United States Patent Application Publication US 2013/0267429 A1 - sequence listing, part 5

SEQ ID NO: 92996 - DNA, 60 bp, Artificial
  Synthetic oligonucleotide
gccgagaggtcgctgttacgcctgtgctagtgatggtcgccggccctgcttgtactaaaa

SEQ ID NO: 92997 - DNA, 60 bp, Artificial
  Synthetic oligonucleotide
tggagggcacatactttttgaacacttatgcacaccccagcttacacaaaagaaaaaaac

SEQ ID NO: 92998 - DNA, 60 bp, Artificial
  Synthetic oligonucleotide
caagtggagtgactctcttgctttcgaggatcacgcagccccctttcgatagcccagact

SEQ ID NO: 92999 - DNA, 60 bp, Artificial
  Synthetic oligonucleotide
gaaagtgctaagctttgcaaacagtgcgagtcacttttggctatctcccttaacagaggc

SEQ ID NO: 93000 - DNA, 58 bp, Artificial
  Synthetic oligonucleotide
cccctctgtagtgacccctgacagcatgcctgtggatcctggtgttggaggactagac

SEQ ID NO: 93001 - DNA, 60 bp, Artificial
  Synthetic oligonucleotide
gagcctggctgtcattaaacaatcaagccaaaatagtgaaagatgtgtgcacaatggtcc

SEQ ID NO: 93002 - DNA, 60 bp, Artificial
  Synthetic oligonucleotide
ctggcctaggaacctatagccctttaggcagagggggcggagggggtgtgtctggcagaa

SEQ ID NO: 93003 - DNA, 60 bp, Artificial
  Synthetic oligonucleotide
caggggtcgagctaactggtttagtagaaggtattacacacaggtttctgtacgcgaccc

SEQ ID NO: 93004 - DNA, 50 bp, Artificial
  Synthetic oligonucleotide
gccgacctccacacccgtcgcagccgagcctgactctccttctcgttgcg

SEQ ID NO: 93005 - DNA, 60 bp, Artificial
  Synthetic oligonucleotide
gggttacgtgcgctttgttttggtataaaatgagcttaagtcctcacacttacacctgtg

SEQ ID NO: 93006 - DNA, 60 bp, Artificial
  Synthetic oligonucleotide
ggcacacctagcggctctctagtctccacagacggacagttatttaacagaccatactgg

SEQ ID NO: 93007 - DNA, 60 bp, Artificial
  Synthetic oligonucleotide
gctgggacaatgaactgtttataacggtaggtgacaatagcagaggaggtgtgtttcata

SEQ ID NO: 93008 - DNA, 60 bp, Artificial
  Synthetic oligonucleotide
gcagggtgacttgcttttattttaatgagcagtgccctttagatgaggaagggaagccag

SEQ ID NO: 93009 - DNA, 60 bp, Artificial
  Synthetic oligonucleotide
cctgcagagcatgaccaaagtgttcacttatcttccagcacaacacaccacaacccatca

SEQ ID NO: 93010 - DNA, 60 bp, Artificial
  Synthetic oligonucleotide
gccggttgcttccgtgccgagtgcaaagaggtaagtaaaggcgggaaagcctcagcaacc

SEQ ID NO: 93011 - DNA, 60 bp, Artificial
  Synthetic oligonucleotide
aataggtcatggatttaaattggaactctggcggtgcaatggcggagcatcatccgtttt

SEQ ID NO: 93012 - DNA, 60 bp, Artificial
  Synthetic oligonucleotide
gggctcgggtgggtctcaataaaagctcaatagtatgcgatgtgtcatgtctttgtgcac

SEQ ID NO: 93013 - DNA, 58 bp, Artificial
  Synthetic oligonucleotide
ttttatgcaagaagggagcaggtatatgttaggcatgtgtatggcaggggaggagaac

SEQ ID NO: 93014 - DNA, 60 bp, Artificial
  Synthetic oligonucleotide
caatcagtgggttgctgcagtgttcggtgtgtctgaggaattattttctgctagtaagtt

SEQ ID NO: 93015 - DNA, 60 bp, Artificial
  Synthetic oligonucleotide
agtgactcggagggcattcatggcgcgaccatccactgtcaaaggtctctgcgcagctac

SEQ ID NO: 93016 - DNA, 60 bp, Artificial
  Synthetic oligonucleotide
cgtttgcattggggaagtttaaagagacattcgggctgagttttatggatttggtgcggg

SEQ ID NO: 93017 - DNA, 60 bp, Artificial
  Synthetic oligonucleotide
catcgtcaaagcagaaacacaggaggttacagtgcctaaggtttcacccaaccagtaccg

SEQ ID NO: 93018 - DNA, 60 bp, Artificial
  Synthetic oligonucleotide
ggcaagcacgacctggcaatggacatcttctacagggacggataggtggggtcgatctcg

SEQ ID NO: 93019 - DNA, 60 bp, Artificial
  Synthetic oligonucleotide
aacaggggcaaacacaggtagagacaccggtaaaagactgcgagactgaaaccaggggag

SEQ ID NO: 93020 - DNA, 60 bp, Artificial
  Synthetic oligonucleotide
tcggtggtcttgcagttgtgcaaagtacacctcactcctgaaaacctggccaccattcac

SEQ ID NO: 93021 - DNA, 60 bp, Artificial
  Synthetic oligonucleotide
gctcccaagaagcaaacgcccaccaagaccaggaaacgactcctgcgtttgtcttcgccc

SEQ ID NO: 93022 - DNA, 60 bp, Artificial
  Synthetic oligonucleotide
gcctagcccgcaggtgtttccacaatttgaaggcgtccatgtgagtcagggtgatgcttc

SEQ ID NO: 93023 - DNA, 60 bp, Artificial
  Synthetic oligonucleotide
gcttgctggctggagcttttacatttggcgttttccctgactggatagctaagcagactt

SEQ ID NO: 93024 - DNA, 60 bp, Artificial
  Synthetic oligonucleotide
agtaaccttgtaacttcacctttgacgatcagtcccttttgcaatcagtcaacttcagaa

SEQ ID NO: 93025 - DNA, 60 bp, Artificial
  Synthetic oligonucleotide
tgctctctcctccctgaaatgtaactggtctctctcggcccaggccactgtatccacccc

SEQ ID NO: 93026 - DNA, 60 bp, Artificial
  Synthetic oligonucleotide
ataaataagcaaatggaataacggggtcacacagaaataatcagccaacagtcaacagtc

SEQ ID NO: 93027 - DNA, 60 bp, Artificial
  Synthetic oligonucleotide
ttgtcctgccaaaaaggttggattaactgaaccgctaccggtgttggcagcgctcccgga

SEQ ID NO: 93028 - DNA, 60 bp, Artificial
  Synthetic oligonucleotide
ggcttctctggcgggcatttcataggcgagcgtattcccttgcaagagttgtccccaagg

SEQ ID NO: 93029 - DNA, 60 bp, Artificial
  Synthetic oligonucleotide
ctgcacagtcggctttctgccttctgctttgctactgaatttcctttcaccgaggatggg

SEQ ID NO: 93030 - DNA, 60 bp, Artificial
  Synthetic oligonucleotide
aaacacaagaaggcagggtgagggtcagccgactcgggacgagagctaccatgcgtacac

SEQ ID NO: 93031 - DNA, 60 bp, Artificial
  Synthetic oligonucleotide
agatatgtgttatggaccgacatttaccaccagactgcaagtgatgactggcgaaaaaca

SEQ ID NO: 93032 - DNA, 60 bp, Artificial
  Synthetic oligonucleotide
ataaaggcccgctggtgtaatggggcaggccacgagagccaacagtgccctccaatcgag

SEQ ID NO: 93033 - DNA, 60 bp, Artificial
  Synthetic oligonucleotide
aagaactgtgcgtatgggtgttgcctcagctgcctgagaaagtgtgccttgcttgaacat

SEQ ID NO: 93034 - DNA, 60 bp, Artificial
  Synthetic oligonucleotide
ctcctcagtgcagtttgtttgcgtgtcctgtgtgaaccatcagaaacttaatcatggcgg

SEQ ID NO: 93035 - DNA, 60 bp, Artificial
  Synthetic oligonucleotide
ctgtggctaccagaagcacttaccccacactcaactattttagctctcccagtgggtctc

SEQ ID NO: 93036 - DNA, 60 bp, Artificial
  Synthetic oligonucleotide
aaattggacgttgtgagaggaagggttagaggagtctgtggtctttgtcgactagcagtg

SEQ ID NO: 93037 - DNA, 60 bp, Artificial
  Synthetic oligonucleotide
gcggtgctcgaggtggtccctgaaaccagagagccccgcatcctcactcgaacacagtat

SEQ ID NO: 93038 - DNA, 60 bp, Artificial
  Synthetic oligonucleotide
ctggggcctgctgttcttccaggcaatgttttccccacggctgtcgaagaccctgtcact

SEQ ID NO: 93039 - DNA, 60 bp, Artificial
  Synthetic oligonucleotide
gggtatcatgcacggccacgcagcaacgatagcagatatagttttagaagaattaccaga

SEQ ID NO: 93040 - DNA, 60 bp, Artificial
  Synthetic oligonucleotide
gtgcgtgaccaactggcagaacaagcaaagcaggcctatagggtggtaacaaagtgtggt

SEQ ID NO: 93041 - DNA, 60 bp, Artificial
  Synthetic oligonucleotide
gcatgtgggcaacaatgttattcaccaaccatgcgactctgtatctagcacccaggacac

SEQ ID NO: 93042 - DNA, 60 bp, Artificial
  Synthetic oligonucleotide
cagtgactttaagtatgaaccgtggacactacaggatacatccatggacatgtggaacac

SEQ ID NO: 93043 - DNA, 60 bp, Artificial
  Synthetic oligonucleotide
ggacagccatgggcaatgcatgtgaagtgattggggaaacaccggaatggatagtacgac

SEQ ID NO: 93044 - DNA, 60 bp, Artificial
  Synthetic oligonucleotide
tgaagtggatttggaggacttacgactgctttgcatttattgcacaactgaactgaccgc

SEQ ID NO: 93045 - DNA, 60 bp, Artificial
  Synthetic oligonucleotide
aggcagtttaaaagtgacaaatccatatgtggggattgggtggtgtgcgcctttggggtg

SEQ ID NO: 93046 - DNA, 60 bp, Artificial
  Synthetic oligonucleotide
acccaggacaccgtgtcagaagtaccccttgctgcaacttgtgacaggctaccacacgcc

SEQ ID NO: 93047 - DNA, 60 bp, Artificial
  Synthetic oligonucleotide
gtttgtgcagagcagctaaagtgcgggaactacggcactggaactactccagctacggcg

SEQ ID NO: 93048 - DNA, 60 bp, Artificial
  Synthetic oligonucleotide
tagataggagacaggaaaaagctagacgaaggttgtttgaccaagacagtgggtatggca

SEQ ID NO: 93049 - DNA, 60 bp, Artificial
  Synthetic oligonucleotide
gcgttggcaccagtggccaccctttatataatagactggatgacactgaaaacaccccat

SEQ ID NO: 93050 - DNA, 60 bp, Artificial
  Synthetic oligonucleotide
accactctcttctgggtttgatttgcctgcatatacaggccctgacattccaattgccac

SEQ ID NO: 93051 - DNA, 60 bp, Artificial
  Synthetic oligonucleotide
tgtgggacacccatactatcctgtgcaggttaatgggcagggcaaaaaggcaaacatacc

SEQ ID NO: 93052 - DNA, 60 bp, Artificial
  Synthetic oligonucleotide
gcctcccactcctgtgtctaaggttatgagcacggaccgttatgttacacgcaccagcct

SEQ ID NO: 93053 - DNA, 60 bp, Artificial
  Synthetic oligonucleotide
tttgttgcagctggggtcccgttctgtttctgtgtctcgtaagcgccctgcctctacatc

SEQ ID NO: 93054 - DNA, 60 bp, Artificial
  Synthetic oligonucleotide
ccgtgagtaagccctccacacgtcctgcaccgccttacagttcctgaccccttatgtacc

SEQ ID NO: 93055 - DNA, 60 bp, Artificial
  Synthetic oligonucleotide
ttggtgtattgccccctccttccaccagccttgatgatacatataggtatttgcagtccc

SEQ ID NO: 93056 - DNA, 60 bp, Artificial
  Synthetic oligonucleotide
tatataccgttgggtacccgtcctcccacggtggtagatgttggtcctacagcacgcccc

SEQ ID NO: 93057 - DNA, 60 bp, Artificial
  Synthetic oligonucleotide
gcgacgcaaacgagcgtccgcaacagatttgtatcggacctgcaaagctgcaggtacctg

SEQ ID NO: 93058 - DNA, 60 bp, Artificial
  Synthetic oligonucleotide
gctcttccaccactacccctgctgtgctagatattaccccttcgtccaccaccgtacagg

SEQ ID NO: 93059 - DNA, 60 bp, Artificial
  Synthetic oligonucleotide
ttgctgcgaccggtttcggtctcccgccttttcggtctctacagtggcatgctgccacaa

SEQ ID NO: 93060 - DNA, 60 bp, Artificial
  Synthetic oligonucleotide
cccctgtggttattgaacctgtgggcgccggggagccttctattgtacagcttgtagagg

SEQ ID NO: 93061 - DNA, 60 bp, Artificial
  Synthetic oligonucleotide
gtatggcaatacgcaggtggaagctggaacattggaaagccaggtaccaggggataatgg

SEQ ID NO: 93062 - DNA, 60 bp, Artificial
  Synthetic oligonucleotide
ggctggacactagtacccacggattctacggtgacactgagtgcccaaaacgcccaaggg

SEQ ID NO: 93063 - DNA, 60 bp, Artificial
  Synthetic oligonucleotide
gtgtgcgtcgggaacatgcaatattatttagggcaagagaagcaggacacaccagtgtag

SEQ ID NO: 93064 - DNA, 60 bp, Artificial
  Synthetic oligonucleotide
cgtacctttctccctgtgctgcctttgttgtgtttatgtgcattatatacctagggttgt

SEQ ID NO: 93065 - DNA, 60 bp, Artificial
  Synthetic oligonucleotide
gtataggtgtatacaaattgtgtttgcagtacactgagccacatattaccaatccacccc

SEQ ID NO: 93066 - DNA, 60 bp, Artificial
  Synthetic oligonucleotide
ggacgtgcggggagacagccactaaagcaacctttgttaccttgcggtatagcagtgtag

SEQ ID NO: 93067 - DNA, 60 bp, Artificial
  Synthetic oligonucleotide
caggacaatgctggacctatattgatgtatacctgcgtagcatattagatggaaatccca

SEQ ID NO: 93068 - DNA, 60 bp, Artificial
  Synthetic oligonucleotide
ccagtaacagccagcggggaaccagtgtatacacttaataatgaaacgtggaaatcattt

SEQ ID NO: 93069 - DNA, 60 bp, Artificial
  Synthetic oligonucleotide
ttctataattgaggctccacaacatggggacattactggacatgtgtttacaagcacgcc

SEQ ID NO: 93070 - DNA, 60 bp, Artificial
  Synthetic oligonucleotide
caggctatatagacgtgcagaacaggccagaatgagcatggcacagtggatagtgcacag

SEQ ID NO: 93071 - DNA, 60 bp, Artificial
  Synthetic oligonucleotide
acttgtgacaggctaccacacgccgacgaacccaccaccagccccgaggtgttgggcacc

SEQ ID NO: 93072 - DNA, 60 bp, Artificial
  Synthetic oligonucleotide
gaccttgtagatttcatagaacgatatccaggggatgggcaggaagttccgttagagctg

SEQ ID NO: 93073 - DNA, 60 bp, Artificial
  Synthetic oligonucleotide
ctacaacaaacggggcaggggggtggtttgtggtggaagccatagttgacagaacaacag

SEQ ID NO: 93074 - DNA, 60 bp, Artificial
  Synthetic oligonucleotide
cataagacgtctacaggagcttctggtgaatgcggtggacatagtgtgtcccagctgcgc

SEQ ID NO: 93075 - DNA, 60 bp, Artificial
  Synthetic oligonucleotide
ccgtagcaccaatattactatttctgcagccacatcacagtccggtgaataccaggcctc

SEQ ID NO: 93076 - DNA, 60 bp, Artificial
  Synthetic oligonucleotide
agtcacgaaaaggaatatttggtgcaaacaggcgataggtttcataaaatagcaggggag

SEQ ID NO: 93077 - DNA, 60 bp, Artificial
  Synthetic oligonucleotide
tctacaattcaggatggcgacatggttgaaacagggtacggtgccatggattttgccaat

SEQ ID NO: 93078 - DNA, 60 bp, Artificial
  Synthetic oligonucleotide
gccctaaaacgaaagtttgtaggtagtcccgcatcaagctcctgtgcgacatgggtggac

SEQ ID NO: 93079 - DNA, 60 bp, Artificial
  Synthetic oligonucleotide
ccatgggcgaggaactccctgcctcctattacatacctggcacctctggaaataatagac

SEQ ID NO: 93080 - DNA, 60 bp, Artificial
  Synthetic oligonucleotide
ggactccttggcgtctccacatgtttcatatacttcttccacgtctgttcctttgcaatc

SEQ ID NO: 93081 - DNA, 60 bp, Artificial
  Synthetic oligonucleotide
gtggccaactatgtgtcttgtaaagcaggactaacagttacaaacttgttgcacacacct

SEQ ID NO: 93082 - DNA, 60 bp, Artificial
  Synthetic oligonucleotide
cattgtgccaatgttccacacctgggagtgcctgacagtttgttggctgcacaacgtggt

SEQ ID NO: 93083 - DNA, 60 bp, Artificial
  Synthetic oligonucleotide
actcccattccaggtgtgcgacgtgttgcaggccctcgcattggcctttacagtcgtgcg

SEQ ID NO: 93084 - DNA, 60 bp, Artificial
  Synthetic oligonucleotide
gcccaggctcttttgtaacatatgacaatcctgtatttgaccccgaggaaacaatcatat

SEQ ID NO: 93085 - DNA, 60 bp, Artificial
  Synthetic oligonucleotide
tgtggcattgcacaggcctgccttaacaactaagcaaggtgctgttcgggttagtcgtat

SEQ ID NO: 93086 - DNA, 60 bp, Artificial
  Synthetic oligonucleotide
gcagagcatattgaacttcgccccttgcagccttccattgctactgccccaggggactcc

SEQ ID NO: 93087 - DNA, 60 bp, Artificial
  Synthetic oligonucleotide
aagatatttacccccaatgcaaaatctccaacacctgcccacccgatgtactcaataaag

SEQ ID NO: 93088 - DNA, 60 bp, Artificial
  Synthetic oligonucleotide
ctatcatgcaagcagcgatcgcctcctgaccgtcggccaccctttctttgacatctacaa

SEQ ID NO: 93089 - DNA, 58 bp, Artificial
  Synthetic oligonucleotide
cattgtgctgacagagcagccaccagacccggctgatcttcgttgctatgagcaaatg

SEQ ID NO: 93090 - DNA, 60 bp, Artificial
  Synthetic oligonucleotide
ttgtcattcgctgagcataacaaactctggcaccattgctccaaactctgtgtacaaacg

SEQ ID NO: 93091 - DNA, 55 bp, Artificial
  Synthetic oligonucleotide
gcaagcagcgatcgccttttgaccgtcggccaccctttctttgacatctacaaaa

SEQ ID NO: 93092 - DNA, 60 bp, Artificial
  Synthetic oligonucleotide
tgccagcagtgcactttacctttggccgcctgccgcgccaagaacgtgccagccaaaaaa

SEQ ID NO: 93093 - DNA, 60 bp, Artificial
  Synthetic oligonucleotide
accatcttctgtacaaggtctttccgcagccaccggagctgcctttaccgatttgcttct

SEQ ID NO: 93094 - DNA, 60 bp, Artificial
  Synthetic oligonucleotide
gcatgaggaaaggtcagaggctgcgaaggtgttgctgcaagatcactgttcctatgtgtt

SEQ ID NO: 93095 - DNA, 59 bp, Artificial
  Synthetic oligonucleotide
ggggcctccaaacacagggaaatcgatgttttgcatgagccttctacggttcttgagag

SEQ ID NO: 93096 - DNA, 60 bp, Artificial
  Synthetic oligonucleotide
tgtgaaactgtaaataggggaggcgggaaaaatggcgccgaggtgctgttcagggctaag

SEQ ID NO: 93097 - DNA, 60 bp, Artificial
  Synthetic oligonucleotide
gccttgctggaactatttcgatgtttatttgaggaatgccctggacggtaaccctgtatg

SEQ ID NO: 93098 - DNA, 60 bp, Artificial
  Synthetic oligonucleotide
gtgcttttgcctgctgccagagctgcataagaaaatgcgcgcaggtggaaagaaattgct

SEQ ID NO: 93099 - DNA, 60 bp, Artificial
  Synthetic oligonucleotide
gtgaccaccaatgtggatgtgctggccgatgcccgctggctgtatctgcgcagtagactt

SEQ ID NO: 93100 - DNA, 60 bp, Artificial
  Synthetic oligonucleotide
cagtacagacttaactgaccaaataaagcactggcagctcaacaggagagagcaggccct

SEQ ID NO: 93101 - DNA, 60 bp, Artificial
  Synthetic oligonucleotide
acggggtcacacagaatataatcagccaacagtcaagttagcatagtgtaggcgtgttct

SEQ ID NO: 93102 - DNA, 60 bp, Artificial
  Synthetic oligonucleotide
gagagacacttttgaaaggacggtcaggttgcccaagtcggtgcaggcatttcggggttc

SEQ ID NO: 93103 - DNA, 60 bp, Artificial
  Synthetic oligonucleotide
ctgagtggatccataggcaatgtcagaaggccgagggtgagggtgactggaaggacgttg

SEQ ID NO: 93104 - DNA, 60 bp, Artificial
  Synthetic oligonucleotide
tgcatgtgaatcagggacctggctcattgcccccttccattcccacagtgcctgacaaaa

SEQ ID NO: 93105 - DNA, 60 bp, Artificial
  Synthetic oligonucleotide
catattctatcatgcaagcagcgatcgcctcctgaccgtcggccaccctttctttgacat

SEQ ID NO: 93106 - DNA, 60 bp, Artificial
  Synthetic oligonucleotide
gacataggctaggttaagataagttgataagataagttgagcttgggagtgggtagtttg

SEQ ID NO: 93107 - DNA, 60 bp, Artificial
  Synthetic oligonucleotide
aaacaggacaggctgtcgtttcctctggcacgagtgacatggagattattagcctaggag

SEQ ID NO: 93108 - DNA, 60 bp, Artificial
  Synthetic oligonucleotide
gtgggatgacagtggaatagatttgcaacatgaagctgacggttctgttaaccaggggca

SEQ ID NO: 93109 - DNA, 60 bp, Artificial
  Synthetic oligonucleotide
ggcagcaccccatgaagattttagggatttggtatctctcagcaaaccgatattttcccg

SEQ ID NO: 93110 - DNA, 60 bp, Artificial
  Synthetic oligonucleotide
cggatgagcagttgcagcagttaaaacgaaagtattttcacagtcctgataaagcagtgc

SEQ ID NO: 93111 - DNA, 60 bp, Artificial
  Synthetic oligonucleotide
gctgataacacgcgagggacccctatgacaattaatgtaggtccaaacgacagggcagaa

SEQ ID NO: 93112 - DNA, 60 bp, Artificial
  Synthetic oligonucleotide
ttctgtcgggtgagcaccacttggacctggacgtcacctacggggacagatagatggggt

SEQ ID NO: 93113 - DNA, 60 bp, Artificial
  Synthetic oligonucleotide
ccaccatccacaccatggaccctaatataattgaaagctggcatctaaatgtcaatcccc

SEQ ID NO: 93114 - DNA, 60 bp, Artificial
  Synthetic oligonucleotide
ccaaacaccactggggagaaaatttctgttccaaactaatgtcttgcagggtggaggcac

SEQ ID NO: 93115 - DNA, 60 bp, Artificial
  Synthetic oligonucleotide
aaagttcggtgctgcgttgaacacaagctggacgttatcagaggccagtgtagaggactc

SEQ ID NO: 93116 - DNA, 58 bp, Artificial
  Synthetic oligonucleotide
ggccaccgccagtggccctcccaagaagccgagcccggccaagaaacgaaaacgaccc

SEQ ID NO: 93117 - DNA, 60 bp, Artificial
  Synthetic oligonucleotide
gggtgtctgctctctgcggtctctgtggcggcggggtgaggttcgcctgcctgtcaggca

SEQ ID NO: 93118 - DNA, 60 bp, Artificial
  Synthetic oligonucleotide
ggtggaagctgactgtagtgatgtagatgagcctgtagaagaagtgtttgatcagtccgc

SEQ ID NO: 93119 - DNA, 60 bp, Artificial
  Synthetic oligonucleotide
ggcatccttcctgaatggatagccaggcaaacattgattaaccaccagctagctgcagaa

SEQ ID NO: 93120 - DNA, 60 bp, Artificial
  Synthetic oligonucleotide
gctgagcatatacaacaaactctggcaccattgctccaaactctgtgtacgaacatgatc

SEQ ID NO: 93121 - DNA, 60 bp, Artificial
  Synthetic oligonucleotide
ccagcgccaaacagttaaattttaagctaccacagacaatacaaacagctgtcaccacac

SEQ ID NO: 93122 - DNA, 60 bp, Artificial
  Synthetic oligonucleotide
cttacttcatcagttccaagacagcctggaacgcgacttgggcgacttctacacgacgct

SEQ ID NO: 93123 - DNA, 60 bp, Artificial
  Synthetic oligonucleotide
gttcaggacaggttggtgagcctgaacctgaccgcactgtggccacccgaacaaactacc

SEQ ID NO: 93124 - DNA, 60 bp, Artificial
  Synthetic oligonucleotide
ggggcctgcagtgcttccaggtgattattttcccactgctgtagaagatcctgttgtcat

SEQ ID NO: 93125 - DNA, 60 bp, Artificial
  Synthetic oligonucleotide
cagcaggtagagctcaggtacgaccgcgaccgggacaatacctccagacatgtgttgtgg

SEQ ID NO: 93126 - DNA, 60 bp, Artificial
  Synthetic oligonucleotide
gagactagagagccacgcatactctccagaagccagtacagcaatcccgcttttgaggtc

SEQ ID NO: 93127 - DNA, 59 bp, Artificial
  Synthetic oligonucleotide
acacctaggaccgatgctgtggagcccagaagggtcctgcaaggcagacgcatccagca

SEQ ID NO: 93128 - DNA, 60 bp, Artificial
  Synthetic oligonucleotide
taggctgcaaacctgccctgggagagcattgggtgaaagcacgttggtgcaatggggctg

SEQ ID NO: 93129 - DNA, 60 bp, Artificial
  Synthetic oligonucleotide
cccaacaagaaccccactggccatgctgacaatgctccagacccacgtgttaacatggcc

SEQ ID NO: 93130 - DNA, 60 bp, Artificial
  Synthetic oligonucleotide
acccccaaatacaggcaaatcattatttggaatgagcctaatgcactttctaggcggtaa

SEQ ID NO: 93131 - DNA, 60 bp, Artificial
  Synthetic oligonucleotide
ggtaagtaggcacataaatacctttaccggtttggtcatgctgctcttttatatatcatg

SEQ ID NO: 93132 - DNA, 60 bp, Artificial
  Synthetic oligonucleotide
gcacagcaagaggattatacaagtcaggtcacgcagctaatgcaggcagggaagccaagg

SEQ ID NO: 93133 - DNA, 60 bp, Artificial
  Synthetic oligonucleotide
gcccacgtttagaggcaatatcactgcaagagagatcaggacgggcaaggagaaaactat

SEQ ID NO: 93134 - DNA, 60 bp, Artificial
  Synthetic oligonucleotide
ggcaggattgtccagacgatattaaacctaaatttgagcaagatacatgggcggatagat

SEQ ID NO: 93135 - DNA, 60 bp, Artificial
  Synthetic oligonucleotide
ggacgttagcgactcagatttctatagaaggctacaagtagagcaacagagggaggatga

SEQ ID NO: 93136 - DNA, 60 bp, Artificial
  Synthetic oligonucleotide
gggatgatctacaggaccacactgaacacaggatctgcctctccttctacagtgaagcac

SEQ ID NO: 93137 - DNA, 60 bp, Artificial
  Synthetic oligonucleotide
caccagcaccccttccactttggacacctccctggacgcatccctgggaaacaccttact

SEQ ID NO: 93138 - DNA, 60 bp, Artificial
  Synthetic oligonucleotide
gggttccaaacggcccggaacttgtcctgacattccaactctcctaatctcaggtgggcc

SEQ ID NO: 93139 - DNA, 60 bp, Artificial
  Synthetic oligonucleotide
ggtgggcctaaccaggtaaaatgtctgcgttatagattgaggcggcatcaccgcaaggca

SEQ ID NO: 93140 - DNA, 60 bp, Artificial
  Synthetic oligonucleotide
atatatgaccctgaccgtgagcgcttggtatgggcatgccgtgggcttcaggtcggaagg

SEQ ID NO: 93141 - DNA, 60 bp, Artificial
  Synthetic oligonucleotide
tgagggtggatatgtccgtgtaagccgctttggggaacgtgaaaccattaggacccgctc

SEQ ID NO: 93142 - DNA, 60 bp, Artificial
  Synthetic oligonucleotide
caggtgaaggggacaataggcagaatgtgtcctttgaccctaagcaggttcaaatggtgt

SEQ ID NO: 93143 - DNA, 60 bp, Artificial
  Synthetic oligonucleotide
gggacaaggttacaagcacctgtgcagatcaggtacataaagaaggtgactgccctgcaa

SEQ ID NO: 93144 - DNA, 60 bp, Artificial
  Synthetic oligonucleotide
cagcctttgttagagtgtaaggtagccatgctggatgatgcaaccacaagcacgtgggac

SEQ ID NO: 93145 - DNA, 60 bp, Artificial
  Synthetic oligonucleotide
gaactgtttcagaaaaggttccagaccccgccaatggtggtgcacatgctcatgaatttt

SEQ ID NO: 93146 - DNA, 60 bp, Artificial
  Synthetic oligonucleotide
taccagaagcaccaatataaccatttctgtgaaggacccaagcaaaaataatgcccatca

SEQ ID NO: 93147 - DNA, 60 bp, Artificial
  Synthetic oligonucleotide
actagtggtcctcaggatcctcaaacatcaacacctatgtccagagttgacagtggctta

SEQ ID NO: 93148 - DNA, 60 bp, Artificial
  Synthetic oligonucleotide
gaaatgcaaaggcggtagaagaggacaccggcgaatccctgggggacctgcccatgagat

SEQ ID NO: 93149 - DNA, 60 bp, Artificial
  Synthetic oligonucleotide
ccctgatacaacattgcattttcctcaagcatctgaggatgttttgcaggcccctgacct

SEQ ID NO: 93150 - DNA, 60 bp, Artificial
  Synthetic oligonucleotide
gctattatgccttattgaggagagaggctgtgcttctctttgctgcaaatgtacgtgaca

SEQ ID NO: 93151 - DNA, 60 bp, Artificial
  Synthetic oligonucleotide
gttgggaagcagtgtacaaacaacgtcaaaatggacaatggtcttgtgttaaatccattg

SEQ ID NO: 93152 - DNA, 60 bp, Artificial
  Synthetic oligonucleotide
ggaagacctgctgaaagacggggatggagaacctttgcagccgcttagatgtgctgcaag

SEQ ID NO: 93153 - DNA, 60 bp, Artificial
  Synthetic oligonucleotide
tgcagaaacttctaggggggctcatgtctgttgaaaagcatcagatggtcctagaacccc

SEQ ID NO: 93154 - DNA, 60 bp, Artificial
  Synthetic oligonucleotide
ggacattggcaaacgcttcagtggtaacaggagagacaccagaatggatactaaagcaag

SEQ ID NO: 93155 - DNA, 60 bp, Artificial
  Synthetic oligonucleotide
gccgcagccacattttcattgtcggcaatggtgcagtgggcatatgataatggtctggag

SEQ ID NO: 93156 - DNA, 60 bp, Artificial
  Synthetic oligonucleotide
gcattaaaatatccaggaagaacctcaaaccttaaggtaagcatggcggaggaaagccca

SEQ ID NO: 93157 - DNA, 60 bp, Artificial
  Synthetic oligonucleotide
cagtggattaagctcaggtgttccaaggtggagggagagggagattggagacccatcatg

SEQ ID NO: 93158 - DNA, 60 bp, Artificial
  Synthetic oligonucleotide
ctcactccagcctttggatgtgtctcttctgcctggtgagagttcttttcagcctcatgc

SEQ ID NO: 93159 - DNA, 60 bp, Artificial
  Synthetic oligonucleotide
cctttccaaatctatgtccattaaattgtaggggtgatccagaattccagttaaccccag

SEQ ID NO: 93160 - DNA, 60 bp, Artificial
  Synthetic oligonucleotide
gcctgcaatgggaggccagccttcacgcccaaatgttgttgttgagaatgttggccctgc

SEQ ID NO: 93161 - DNA, 60 bp, Artificial
  Synthetic oligonucleotide
tacagggtacgttccagttggctcaggtggtggacgtggagttaggcctgcaatgggagg

SEQ ID NO: 93162 - DNA, 60 bp, Artificial
  Synthetic oligonucleotide
ctacatacacacatgacccctcaatcatacacccacgtgtctccagcttgggagagagcg

SEQ ID NO: 93163 - DNA, 60 bp, Artificial
  Synthetic oligonucleotide
ccccaccggagtccggaggccctgcagtcctggatgtgactttgaatgtgacctctacat

SEQ ID NO: 93164 - DNA, 52 bp, Artificial
  Synthetic oligonucleotide
cccctgcatcctgaggttggcccagaccctgaacctggtttgccccttcccc

SEQ ID NO: 93165 - DNA, 53 bp, Artificial
  Synthetic oligonucleotide
ctgtatgcctggatgcaaaacacaaggcccctatgcagcttaagtgcccacca

SEQ ID NO: 93166 - DNA, 60 bp, Artificial
  Synthetic oligonucleotide
gtacggagccggttcaataaggacaacaacatggacaacacaccaggtacagacccattg

SEQ ID NO: 93167 - DNA, 60 bp, Artificial
  Synthetic oligonucleotide
gccgccagcttcttgtagggcatccatactttgatgtgctaggtgaaaatgataagttaa

SEQ ID NO: 93168 - DNA, 60 bp, Artificial
  Synthetic oligonucleotide
cagagatatgtatgtggactttgcccgtgaagcagcaaagtatggaaacggtggagagtg

SEQ ID NO: 93169 - DNA, 60 bp, Artificial
  Synthetic oligonucleotide
ctcgtccaatgctgatgagcacccattgagcgacgcggaaagcgatggagaaaccgaggc

SEQ ID NO: 93170 - DNA, 60 bp, Artificial
  Synthetic oligonucleotide
gcttatctgagagcacatatggacaggaaccctggtatctggcacaggtctcacatgaca

SEQ ID NO: 93171 - DNA, 60 bp, Artificial
  Synthetic oligonucleotide
gtttcctggcgattctccattcaaaaaattggtgagtaatgaatttttggcgtcttaggg

SEQ ID NO: 93172 - DNA, 60 bp, Artificial
  Synthetic oligonucleotide
tccgctcgcgccctataattgtcgcccgtgttgtctgtccactgcttgttgtccgtcagt

SEQ ID NO: 93173 - DNA, 60 bp, Artificial
  Synthetic oligonucleotide
gcatgtgcctatgtgtgtgttgaatgattaataaacagggtatcatttccgctcgcgccc

SEQ ID NO: 93174 - DNA, 60 bp, Artificial
  Synthetic oligonucleotide
cctaggccctgatgttgcagaccctggaatagagttacatctctttggggaaggcacagg

SEQ ID NO: 93175 - DNA, 60 bp, Artificial
  Synthetic oligonucleotide
ggggtccacacaggttttgtccattccagagcttgctcgcccggtgaggggatttgctga

SEQ ID NO: 93176 - DNA, 60 bp, Artificial
  Synthetic oligonucleotide
gaccaccaaacgccccgctgccaaatcccctgtaaagcactccagtaaacgtgcacgcag

SEQ ID NO: 93177 - DNA, 60 bp, Artificial
  Synthetic oligonucleotide
cgctgcgcctgcatcctcctctcttgctgagcattacagatatattaattcactggctac

SEQ ID NO: 93178 - DNA, 60 bp, Artificial
  Synthetic oligonucleotide
gtccagagttgacagtggcttacggtctgtgagacgtgcatatagtaggcgtacaggtgc

SEQ ID NO: 93179 - DNA, 60 bp, Artificial
  Synthetic oligonucleotide
gtgctttacgaaggttgtaccaccgcctcacgcagcaggtgcgggtaaacaggccagagt

SEQ ID NO: 93180 - DNA, 60 bp, Artificial
  Synthetic oligonucleotide
aggtattgaaataggcagaggacaacctttaggggttggaacatcaggtcacccattatt

SEQ ID NO: 93181 - DNA, 60 bp, Artificial
  Synthetic oligonucleotide
ggacaggaaccttggacactggcacaaactagtcttgaggcggtacgcagtccacctgca

SEQ ID NO: 93182 - DNA, 60 bp, Artificial
  Synthetic oligonucleotide
ccacagtagtaatccacatcaatgatacatcaggagattattatttacacccaagtctcc

SEQ ID NO: 93183 - DNA, 60 bp, Artificial
  Synthetic oligonucleotide
cgctggcattgctactaacccatactaactaacaaacccatactaactaacatggttcgt

SEQ ID NO: 93184 - DNA, 60 bp, Artificial
  Synthetic oligonucleotide
cccactatagttcgccctggggtgatacctgaaataattggcccaactgatctaattcct

SEQ ID NO: 93185 - DNA, 60 bp, Artificial
  Synthetic oligonucleotide
gacaaaggtccagatccaagggtcgaacagaaaccgaaaggggaggggagcgacggagac

SEQ ID NO: 93186 - DNA, 60 bp, Artificial
  Synthetic oligonucleotide
ggatccaggacatcatcccgacgataccaacgaaaagcctctagccccaccaccaggaag

SEQ ID NO: 93187 - DNA, 60 bp, Artificial
  Synthetic oligonucleotide
agagacctccaagcacaccctttccaggtcggggtcgccaacaacatcgcgactccctgc

SEQ ID NO: 93188 - DNA, 60 bp, Artificial
  Synthetic oligonucleotide
ttaacaaggacattgtgtttgcccctgttactagctcttcgccaccaactggagacgggg

SEQ ID NO: 93189 - DNA, 60 bp, Artificial
  Synthetic oligonucleotide
caggtggaagaggtaccggccaatccaccaacaacagctcagggaactaagggcttggga

SEQ ID NO: 93190 - DNA, 60 bp, Artificial
  Synthetic oligonucleotide
ctgccattttagaggtggctgacccaagccctcctatgcgaacccgtgttgcacgaactc

SEQ ID NO: 93191 - DNA, 60 bp, Artificial
  Synthetic oligonucleotide
ctgtacagggaaactcccgcgaactgttttgccagcaagagagtgaggaaagcgagcaac

SEQ ID NO: 93192 - DNA, 60 bp, Artificial
  Synthetic oligonucleotide
atgctctgattctagtttagatggtgatttggaaaaattatttgacgaagggacagactc

SEQ ID NO: 93193 - DNA, 60 bp, Artificial
  Synthetic oligonucleotide
gtccggagtgccgaggcagacttcgccatgagtgacaataaaggtactaaattagatcct

SEQ ID NO: 93194 - DNA, 60 bp, Artificial
  Synthetic oligonucleotide
cacgagttcgatcagttggtgcaggacatcacgggagacttgcacgattactggctgagg

SEQ ID NO: 93195 - DNA, 60 bp, Artificial
  Synthetic oligonucleotide
acactgggataaagccaaagtgtgtgaaaaggatgctaataatcaactaggcttatgtcc

SEQ ID NO: 93196 - DNA, 60 bp, Artificial
  Synthetic oligonucleotide
gttgaccttttacctggtgaaatagaatcaattgctgagatacacccagtaccagtggac

SEQ ID NO: 93197 - DNA, 60 bp, Artificial
  Synthetic oligonucleotide
gcagcttagccctcaactggagtctatctctttgtcgcctcagcataaacctaaaaggag

SEQ ID NO: 93198 - DNA, 60 bp, Artificial
  Synthetic oligonucleotide
cgagcgcaacaggaacttttgctgggtgatatacaactggtgtgtccggagtgccgaggc

SEQ ID NO: 93199 - DNA, 60 bp, Artificial
  Synthetic oligonucleotide
gcagaggaggagcagtgtctcactccctacaagatcgtagctggctgtggttgcggtgca

SEQ ID NO: 93200 - DNA, 60 bp, Artificial
  Synthetic oligonucleotide
gcggtgcaagacttcgtttatacgtgcttgctacaaatttaggaattcgagcgcaacagg

SEQ ID NO: 93201 - DNA, 60 bp, Artificial
  Synthetic oligonucleotide
ggtgtcgctactgttttaagttattagacttagtggagaagttagctacatgctataagt

SEQ ID NO: 93202 - DNA, 60 bp, Artificial
  Synthetic oligonucleotide
gcagacactgtgggtcggtagaatgattgggaaagaagctactataccagaggtggttct

SEQ ID NO: 93203 - DNA, 60 bp, Artificial
  Synthetic oligonucleotide
gtgccatgtatttaacagagcagattatggacaggccaaaacctagaacagtaaaggaac

SEQ ID NO: 93204 - DNA, 60 bp, Artificial
  Synthetic oligonucleotide
cagaggaggatttggtgtatggactctgtagtagctgtgcttatgcgtctgcacagttag

SEQ ID NO: 93205 - DNA, 60 bp, Artificial
  Synthetic oligonucleotide
ggcttcaaaacgaccgataacggtaagtcttggcacgtaggtggttatttgatcgttggg

SEQ ID NO: 93206 - DNA, 60 bp, Artificial
  Synthetic oligonucleotide
ccacttgatgctaatcacaaaccacaatttgaacttactgaccaaagctggaaatctttt

SEQ ID NO: 93207 - DNA, 60 bp, Artificial
  Synthetic oligonucleotide
gcaaccgccaatttcactgccaaggttcgttggcagaccgtcctggcttcaaaacgaccg

SEQ ID NO: 93208 - DNA, 60 bp, Artificial
  Synthetic oligonucleotide
gttagatgagggtgtagaagattttagtgggtctcagctagtcgttggcacacgccgcag

SEQ ID NO: 93209 - DNA, 60 bp, Artificial
  Synthetic oligonucleotide
ggagttatgcgattggggtaccaacctgtacctccgttggctaccagtgaacagaaagct

SEQ ID NO: 93210 - DNA, 60 bp, Artificial
  Synthetic oligonucleotide
tgtggcttccagcaagtggtaaggtatatttgccaccagcaacaccagtggcgagagttc

SEQ ID NO: 93211 - DNA, 59 bp, Artificial
  Synthetic oligonucleotide
gtagtggtgcacaggtgggcgcacaggttcatttctacagggacttaagcaccattaac

SEQ ID NO: 93212 - DNA, 60 bp, Artificial
  Synthetic oligonucleotide
ttagatatgaaacatagagcaccttgtcaaatgaaatttccaccccttatgttaacgtct

SEQ ID NO: 93213 - DNA, 60 bp, Artificial
  Synthetic oligonucleotide
gaagtattatcccagataaatgcaatgaactcaggtattttagaggattggcaattaggg

SEQ ID NO: 93214 - DNA, 60 bp, Artificial
  Synthetic oligonucleotide
gtacaagtcaacacagagcgaccgcacccggtttatctgattataaagtgcacctggtgc

SEQ ID NO: 93215 - DNA, 60 bp, Artificial
  Synthetic oligonucleotide
gcacaaggtcacaacaatggcattttatggggtaatcagatatttgttacagtggcagac

SEQ ID NO: 93216 - DNA, 60 bp, Artificial
  Synthetic oligonucleotide
ctcaggcgacggacaaaggattgaagtccctaaagtgtctggtaatcagtatcgggcctt

SEQ ID NO: 93217 - DNA, 60 bp, Artificial
  Synthetic oligonucleotide
cctgcaaatatccagactttctaacaatggcaaatgatgtttatggagatgcatgtttct

SEQ ID NO: 93218 - DNA, 60 bp, Artificial
  Synthetic oligonucleotide
cagtaaaccaggatcataatttctttttgccagcaaaaagtgatcaacaacaacgaacaa

SEQ ID NO: 93219 - DNA, 58 bp, Artificial
  Synthetic oligonucleotide
cgtggtcatgggtaggggaagacagttgtgatagagttggaagagcgcgaatgatttt

SEQ ID NO: 93220 - DNA, 60 bp, Artificial
  Synthetic oligonucleotide
gctgtagagattgggtaattgctgtgtatgctgtgaatgatgacttaattgaaagctcta

SEQ ID NO: 93221 - DNA, 60 bp, Artificial
  Synthetic oligonucleotide
gcctccaaagttgcgaagtgtgtgtgctgcattattttggtataaaggaagtatgaaccc

SEQ ID NO: 93222 - DNA, 60 bp, Artificial
  Synthetic oligonucleotide
caaccatggtgagacattacatgaggggagagatgaaagaaatgagtatgtccacatgga

SEQ ID NO: 93223 - DNA, 60 bp, Artificial
  Synthetic oligonucleotide
ggaccacctgacacgggaaaatcaatgtttacaatgtcactaatatctgtgttaaaagga

SEQ ID NO: 93224 - DNA, 60 bp, Artificial
  Synthetic oligonucleotide
gataaaattttgcaatatggaagtgctggtgtgtttttcgggggcttgggaataagtaca

SEQ ID NO: 93225 - DNA, 60 bp, Artificial
  Synthetic oligonucleotide
tcccgaggagggactgcttccagggttggcgtctcgcctgatgaagtgggaacacgagtt

SEQ ID NO: 93226 - DNA, 60 bp, Artificial
  Synthetic oligonucleotide
gcgtggcgacgccaatgtgcttaagtgctatcgctttcgggaacgcaaaaaaaaaagagg

SEQ ID NO: 93227 - DNA, 60 bp, Artificial
  Synthetic oligonucleotide
gttgaggagcctccagataggcaatttttagatgtacaacgccttagtaggcctttatat

SEQ ID NO: 93228 - DNA, 60 bp, Artificial
  Synthetic oligonucleotide
ctcggactagtacacctgtccaaagagcagtacaatcattatctagtctgcgtagagctc

SEQ ID NO: 93229 - DNA, 60 bp, Artificial
  Synthetic oligonucleotide
ccattatgcgactgtgcaggacctaaaacgaaagtatttaggtagtccatatgttagtcc

SEQ ID NO: 93230 - DNA, 59 bp, Artificial
  Synthetic oligonucleotide
taaagctgagcaaaacacgcttgcagataaaattttaagatatggctctgctggtgttt

SEQ ID NO: 93231 - DNA, 60 bp, Artificial
  Synthetic oligonucleotide
caataaagctgagcaaaacacgcttgcagataaaattttaaaatatggatcggctggtgt

SEQ ID NO: 93232 - DNA, 60 bp, Artificial
  Synthetic oligonucleotide
caatgcttctgtgcacgaatgccagggactttccctgcaactgtttcgcctacaggagca

SEQ ID NO: 93233 - DNA, 60 bp, Artificial
  Synthetic oligonucleotide
tgctcctgtaaacgactgccagggactttccctgcaactgtttcgcctacaggagcaaaa

SEQ ID NO: 93234 - DNA, 58 bp, Artificial
  Synthetic oligonucleotide
ctcctgtaaacgactgccagggactttccctgcaactgtttcgcctacaggagcaaaa

SEQ ID NO: 93235 - DNA, 60 bp, Artificial
  Synthetic oligonucleotide
tttgacagctcagaagaagagaataaccatcaactgacagaaccagctgtgcaggcctac

SEQ ID NO: 93236 - DNA, 60 bp, Artificial
  Synthetic oligonucleotide
ggcgatgcgtgctttttttatgctcgtagggagcaatgttatgccagacacttttttgtt

SEQ ID NO: 93237 - DNA, 60 bp, Artificial
  Synthetic oligonucleotide
tgtgggttcaagggtgatttatgatgcattcgactcctctgtgtctagcacccaggacac

SEQ ID NO: 93238 - DNA, 60 bp, Artificial
  Synthetic oligonucleotide
cagcatggaggaatgccagtttcagttatcagtaatggtgcaatgggcatatgaccatga

SEQ ID NO: 93239 - DNA, 56 bp, Artificial
  Synthetic oligonucleotide
atcagtaatggtgcaatgggcatatgaccatgatataacagacgaaagtatattgg

SEQ ID NO: 93240 - DNA, 60 bp, Artificial
  Synthetic oligonucleotide
gttgtggggcacagtctagaagaatgccagtttcagttatcagtaatggtgcaatgggca

SEQ ID NO: 93241 - DNA, 56 bp, Artificial
  Synthetic oligonucleotide
tcaaagaggatggtacccctgtatttcaacttactgaccaaagctggaaatctttt

SEQ ID NO: 93242 - DNA, 60 bp, Artificial
  Synthetic oligonucleotide
acggacagtggatatggctattctgaagtggaaactgcaacgcaggtagaaagatatggc

SEQ ID NO: 93243 - DNA, 60 bp, Artificial
  Synthetic oligonucleotide
acagtcagtggactgtgatataagtcctcgattggacgccatacagttaagtagaaaacc

SEQ ID NO: 93244 - DNA, 60 bp, Artificial
  Synthetic oligonucleotide
catgcaaatatcctgactatttacaaatggctgcggatccttatggagacagattatttt

SEQ ID NO: 93245 - DNA, 60 bp, Artificial
  Synthetic oligonucleotide
tggaagcacaggcattgttaaacgagcaggaggcggatgctcattatgcggctgtgcagg

SEQ ID NO: 93246 - DNA, 60 bp, Artificial
  Synthetic oligonucleotide
ctgaccctgtaggtctacattgcaatgagcaattagacagctcagaagatgaggtggacg

SEQ ID NO: 93247 - DNA, 60 bp, Artificial
  Synthetic oligonucleotide
ccttaaaagacattgttttagacctgactcctgaccctgtaggtctacattgcaatgagc

SEQ ID NO: 93248 - DNA, 57 bp, Artificial
  Synthetic oligonucleotide
ccaaaattgagcaagcggggcataatggaaagtgcaaatgcctccacgcctgcaaaa

SEQ ID NO: 93249 - DNA, 60 bp, Artificial
  Synthetic oligonucleotide
acagtcagtggactgtgatataagtcctcgattggacgctataaaattaagtagaaattc

SEQ ID NO: 93250 - DNA, 60 bp, Artificial
  Synthetic oligonucleotide
cctaggacatattgaacagtcagtggactgtgatataagtcctcgattggacgctataaa

SEQ ID NO: 93251 - DNA, 60 bp, Artificial
  Synthetic oligonucleotide
gcacaggcattgttaaacgagcaggaggcggatgctcattatgcggctgtgcaggaccta

SEQ ID NO: 93252 - DNA, 60 bp, Artificial
  Synthetic oligonucleotide
gaagcacaggcattgttaaacgagcaggaggcggatgctcattatgcagctgtgcaagac

SEQ ID NO: 93253 - DNA, 60 bp, Artificial
  Synthetic oligonucleotide
ctacggatgcctatgttacacgtaccaacatattttatcatgctagcagttctagactac

SEQ ID NO: 93254 - DNA, 60 bp, Artificial
  Synthetic oligonucleotide
gatgtggcggcctagtgacaacaaactatatgtgcctcctcccgcccctgtatcaaaagt

SEQ ID NO: 93255 - DNA, 57 bp, Artificial
  Synthetic oligonucleotide
attttatcatgctagcagttctagactacttgcagtgggtaatccctatttccctat

SEQ ID NO: 93256 - DNA, 60 bp, Artificial
  Synthetic oligonucleotide
tacaaagcagtgtggcagcattatactggtttagaacaggtatttctaatgctagtatag

SEQ ID NO: 93257 - DNA, 60 bp, Artificial
  Synthetic oligonucleotide
gtggcggcctagtgacaacaaactatatgtgcctcctcccgcccctgtatcaaaagtact

SEQ ID NO: 93258 - DNA, 60 bp, Artificial
  Synthetic oligonucleotide
cggacagtggatatggctattctgaagtggaagctggaacgcaggtagagagaaatggcg

SEQ ID NO: 93259 - DNA, 60 bp, Artificial
  Synthetic oligonucleotide
ggctatggactataaacaaacacagttatgtttagtgggctgtgcacctcctttaggtga

SEQ ID NO: 93260 - DNA, 60 bp, Artificial
  Synthetic oligonucleotide
acatgcaaatatcctgactatttacaaatggctgcggatccttatggagacagattattt

SEQ ID NO: 93261 - DNA, 60 bp, Artificial
  Synthetic oligonucleotide
cgaaatcggtgatatataaaccagcccaaaaattgagcaagcggggcataatggaaagtg

SEQ ID NO: 93262 - DNA, 58 bp, Artificial
  Synthetic oligonucleotide
ttttgctgcagcgtggcacccgggtacggtcgtcccctgtgtcccgcaagcgtcccgc

SEQ ID NO: 93263 - DNA, 60 bp, Artificial
  Synthetic oligonucleotide
cccctgcccctcccggtgttgttcctggctctgttcttgtaaatgggtccacatattatt

SEQ ID NO: 93264 - DNA, 60 bp, Artificial
  Synthetic oligonucleotide
cgccacattttgcaggtgtgcatgcttgtctagggtgtgcctgacagttagttggccagc

SEQ ID NO: 93265 - DNA, 60 bp, Artificial
  Synthetic oligonucleotide
agggtgtttagggtacgtttgcctgatcccaataagtttggccttcctgatgcatcgcta

SEQ ID NO: 93266 - DNA, 60 bp, Artificial
  Synthetic oligonucleotide
gaagcctagtgacaacaaggtatacctgcctcctgcccctgtgtccaaggtcctcagcac

SEQ ID NO: 93267 - DNA, 60 bp, Artificial
  Synthetic oligonucleotide
gcctgtatgacactgaaaacaccaatttatatgatgttgtgcctggcgatgacacccggg

SEQ ID NO: 93268 - DNA, 60 bp, Artificial
  Synthetic oligonucleotide
aatcctgactcgcagcgccttgtatgggcctgtacaggtgttgaggttggcaggggacag

SEQ ID NO: 93269 - DNA, 60 bp, Artificial
  Synthetic oligonucleotide
tttgggcattggaacagggtccggcactggtgggcgcactggatacatccctattgggac

SEQ ID NO: 93270 - DNA, 60 bp, Artificial
  Synthetic oligonucleotide
tagatgctacctgtgccataaaccactgtgcagtgaggaaaaggaacggcttatcagtga

SEQ ID NO: 93271 - DNA, 60 bp, Artificial
  Synthetic oligonucleotide
cagtgttggacataactccatccggtggcaatgtgcaggttagcagtagtagcttcatta

SEQ ID NO: 93272 - DNA, 60 bp, Artificial
  Synthetic oligonucleotide
cagtgtatgtagacacatgtagtgggtttgtgggtgtcatacatttattgggtgtggggt

SEQ ID NO: 93273 - DNA, 60 bp, Artificial
  Synthetic oligonucleotide
gtcgccacacgtgccgccgccgcataagcgtcagcgactcggacacggatatcagcatcc

SEQ ID NO: 93274 - DNA, 60 bp, Artificial
  Synthetic oligonucleotide
gaggacagctaatttatgatgcattcgactcctctgtgtctagcacccaggacaccgacc

SEQ ID NO: 93275 - DNA, 60 bp, Artificial
  Synthetic oligonucleotide
atggaccaaggtgtctggccatgtggaccatgcaggactatactttacacacgaagggac

SEQ ID NO: 93276 - DNA, 60 bp, Artificial
  Synthetic oligonucleotide
ctagtccgttggccgccggggtatgtgtagacaaagacctaagtccacggctggatgcca

SEQ ID NO: 93277 - DNA, 60 bp, Artificial
  Synthetic oligonucleotide
gcacggaaccttggacattacgtgacacaagccaggaaatgtgggacgcagcacccaagc

SEQ ID NO: 93278 - DNA, 60 bp, Artificial
  Synthetic oligonucleotide
gcgtgttttgcggaacagcattaacagaggaggaggttgtatcgtttgcatacaaggagc

SEQ ID NO: 93279 - DNA, 60 bp, Artificial
  Synthetic oligonucleotide
ccggcacaatcaggtacagatgctatcctgtctctgcttaaaacaagtaacctaagggcc

SEQ ID NO: 93280 - DNA, 60 bp, Artificial
  Synthetic oligonucleotide
agggacggagcgcatgcgggtggttttgggtggaagccacagtggacagaaccacgggac

SEQ ID NO: 93281 - DNA, 60 bp, Artificial
  Synthetic oligonucleotide
ccacgtgtttggactgggtaatatgtgcatttggcgtgtactgcacagttgcagagggtg

SEQ ID NO: 93282 - DNA, 60 bp, Artificial
  Synthetic oligonucleotide
gtgtaaccctgacagcgcaaagcagcacgggaacatccgtgtcggtgacagtgcacctgt

SEQ ID NO: 93283 - DNA, 60 bp, Artificial
  Synthetic oligonucleotide
gctaaataaattttagtatgcatcgctctaaacgtcgcaagcgtgcctccgctacccaat

SEQ ID NO: 93284 - DNA, 60 bp, Artificial
  Synthetic oligonucleotide
ctagtttgggcgatacctaccggttcctacagtcccaggctatttcctgtcaaaaacctt

SEQ ID NO: 93285 - DNA, 60 bp, Artificial
  Synthetic oligonucleotide
acaccctctgacacatacaaggcttccaattttaaagagtacatgcgccatggcgaggaa

SEQ ID NO: 93286 - DNA, 60 bp, Artificial
  Synthetic oligonucleotide
cagatagcgaccagctgcaggaccaaattatgcactggggacttgtgcgattggaaaatg

SEQ ID NO: 93287 - DNA, 60 bp, Artificial
  Synthetic oligonucleotide
tcttctacctctcgtggcactcctacaagctctgtatatgggtccacgcctagtgggtcc

SEQ ID NO: 93288 - DNA, 60 bp, Artificial
  Synthetic oligonucleotide
ggcatcccggggatggacaggaagttgcacttgagttatacagacagcaggaggcacaag

SEQ ID NO: 93289 - DNA, 60 bp, Artificial
  Synthetic oligonucleotide
ttgacccctacacgcccctccacacctttacaggctccatcagtgactgcatcgtctgcc

SEQ ID NO: 93290 - DNA, 60 bp, Artificial
  Synthetic oligonucleotide
tgcacaaacataaatctgtactgtttagcaaagtaacctccacctggcgatggtcaacgt

SEQ ID NO: 93291 - DNA, 60 bp, Artificial
  Synthetic oligonucleotide
cacagacccgcccttactgcacgcaggggtaccgtccggtacagccgtctgggtcagcgt

SEQ ID NO: 93292 - DNA, 60 bp, Artificial
  Synthetic oligonucleotide
gtgtacagtgcggaacgttaagggacatctgttgtatacagtgtggagacctttatttgc

SEQ ID NO: 93293 - DNA, 60 bp, Artificial
  Synthetic oligonucleotide
gtgtttctaggcctcctgatcatatacatacaggcgttgcagtcccttgaccaactgtga

SEQ ID NO: 93294 - DNA, 60 bp, Artificial
  Synthetic oligonucleotide
gctggtggtggagagtggacacgcagaaataagacaactccaggagcttctgttgggcgc

SEQ ID NO: 93295 - DNA, 60 bp, Artificial
  Synthetic oligonucleotide
gaacctcccaaaataagacatccagcggctgcactatattggtataaagcaggcatgggc

SEQ ID NO: 93296 - DNA, 60 bp, Artificial
  Synthetic oligonucleotide
gggcgcactgcatatagtgtgtccgctctgcgcataactgctatggccgacggtgaaggt

SEQ ID NO: 93297 - DNA, 60 bp, Artificial
  Synthetic oligonucleotide
ggatggcaatcaggtatgcgtagacagaaaacataggcctttgctgcagctaaaatgtcc

SEQ ID NO: 93298 - DNA, 60 bp, Artificial
  Synthetic oligonucleotide
gcaaagatatcagaggagggcgactggagacccatagtacggttcctaagacaccacgac

SEQ ID NO: 93299 - DNA, 60 bp, Artificial
  Synthetic oligonucleotide
cggtgaaggtacaaacaatggggacgatagtgaggagggacggagcgcatgcgggtggtt

SEQ ID NO: 93300 - DNA, 60 bp, Artificial
  Synthetic oligonucleotide
ctgatgtttactgtgtctgtacacgggttccttgtactgttgtgtatgtatgggtggccc

SEQ ID NO: 93301 - DNA, 60 bp, Artificial
  Synthetic oligonucleotide
ggctttggcgaggcgcttgcctgcagtgttggaaaccatgcatggccaacgaccaacctt

SEQ ID NO: 93302 - DNA, 60 bp, Artificial
  Synthetic oligonucleotide
cggagtttcggtccaggatgaggaagactctccggcatctggggagggaggagacaagtt

SEQ ID NO: 93303 - DNA, 60 bp, Artificial
  Synthetic oligonucleotide
ttgcatgctggcacgtttcaaggaggtatatggtgtgagtgtgactgatttgacgcggca

SEQ ID NO: 93304 - DNA, 60 bp, Artificial
  Synthetic oligonucleotide
gccacccagtctctggcaaagtctaagtacaaagatgaaccctggaccttgcaggatgtc

SEQ ID NO: 93305 - DNA, 60 bp, Artificial
  Synthetic oligonucleotide
gccgtaatgcaggacacaagcgtggatgccctcactgaggaagacatcacggagcaaggc

SEQ ID NO: 93306 - DNA, 60 bp, Artificial
  Synthetic oligonucleotide
gaccttaagcatcgtgcccctatccaggcaacgtgtccgccgctgctgatcacatccaac

SEQ ID NO: 93307 - DNA, 60 bp, Artificial
  Synthetic oligonucleotide
ggcagagcacttgcctgcaggaccatgtgcaatattggggacttgtgcgcagggagagct

SEQ ID NO: 93308 - DNA, 60 bp, Artificial
  Synthetic oligonucleotide
cagcctcgaaatccccaccactaaccgggcagacacctttgggatcaacataggggaagc

SEQ ID NO: 93309 - DNA, 60 bp, Artificial
  Synthetic oligonucleotide
atctttttctggttgtttattctaagcctctttattcttctgatattgctgcgccctcgt

SEQ ID NO: 93310 - DNA, 60 bp, Artificial
  Synthetic oligonucleotide
gcccgaccactgctgctattctcacatgcagagggctgtttctgaacagggcgggggcat

SEQ ID NO: 93311 - DNA, 60 bp, Artificial
  Synthetic oligonucleotide
ccccggtggaccctggggctggagactgtcctgcacttgaactgaaatccacacgattac

SEQ ID NO: 93312 - DNA, 60 bp, Artificial
  Synthetic oligonucleotide
ttgccaacaacaacctcatatattttctttttggaagggagcaacgaccggaaccgatgg

SEQ ID NO: 93313 - DNA, 60 bp, Artificial
  Synthetic oligonucleotide
ggtcacgtaagcatttcaggtgccaagtgcagtgacttgcagtttccatttcagtttcca

SEQ ID NO: 93314 - DNA, 60 bp, Artificial
  Synthetic oligonucleotide
ccccaatgttcggtcccctgcagctgcactgtactgggtgcagagggcgcaatcaaacgc

SEQ ID NO: 93315 - DNA, 60 bp, Artificial
  Synthetic oligonucleotide
ggtggagcaggctttcgaccgcagcctccgacagcagttgttgctccggtcataatcatc

SEQ ID NO: 93316 - DNA, 60 bp, Artificial
  Synthetic oligonucleotide
caggcagaaagagagcatggtgcagtgggcactaagcgctttaatgtgggcatggaacct

SEQ ID NO: 93317 - DNA, 60 bp, Artificial
  Synthetic oligonucleotide
ccggataaggtttccagaccccaataagtttgcactgccagatcccaatgtgttcaaccc

SEQ ID NO: 93318 - DNA, 60 bp, Artificial
  Synthetic oligonucleotide
acgtggcccctgcaccggttaccactatccctagtacagaagatttcattacacgcaccc

SEQ ID NO: 93319 - DNA, 60 bp, Artificial
  Synthetic oligonucleotide
gtagaggtcatttatgatggggatgaggataatgtgatgctgtacacgtcatgggagcac

SEQ ID NO: 93320 - DNA, 60 bp, Artificial
  Synthetic oligonucleotide
ccggaggacgacgtgtcccagtcccaaggccaggaggacccccaccaggaaggagaggtg

SEQ ID NO: 93321 - DNA, 60 bp, Artificial
  Synthetic oligonucleotide
atgtgaactttgaggaggagctgggcaaatacagcacgcgcaatgtgtatgttgtgagga

SEQ ID NO: 93322 - DNA, 60 bp, Artificial
  Synthetic oligonucleotide
cccctagccagtcctgatgaaagattgcagggcacacacaggctgcataggccaatcctt

SEQ ID NO: 93323 - DNA, 60 bp, Artificial
  Synthetic oligonucleotide
ggcattcccaagcgcaactgtgtgtgctatcatggacctcctgatactggcaaatccatg

SEQ ID NO: 93324 - DNA, 60 bp, Artificial
  Synthetic oligonucleotide
ggtgggagaacagatccctctaatgcccagaagtaatccaccacacatccatgagccctc

SEQ ID NO: 93325 - DNA, 60 bp, Artificial
  Synthetic oligonucleotide
agttccgcacaagcaccccacagtcaggccggcgtcctaaccctgttaaagccctgaagt

SEQ ID NO: 93326 - DNA, 60 bp, Artificial
  Synthetic oligonucleotide
gcagcggagatggagcagaggaggaagtagcaggtggctcaggagaatccccgaccattt

SEQ ID NO: 93327 - DNA, 60 bp, Artificial
  Synthetic oligonucleotide
aaactgcagagatgactatggcccaatacattcacgaacgcatagaacaggtggaaggag

SEQ ID NO: 93328 - DNA, 60 bp, Artificial
  Synthetic oligonucleotide
gcagaggaagataagaatgcaatggcgtggttatccagcgcagcccaggctcagcatgtc

SEQ ID NO: 93329 - DNA, 60 bp, Artificial
  Synthetic oligonucleotide
tcatggttgcataccttgtccagttcatgtgtttggaattgcgggcggatattaggaggg

SEQ ID NO: 93330 - DNA, 60 bp, Artificial
  Synthetic oligonucleotide
gggaaatcccttacagttattacagcaacaggaggcagcagaagacgaaaggctagtggc

SEQ ID NO: 93331 - DNA, 60 bp, Artificial
  Synthetic oligonucleotide
tgcccagtgtaccagagagttccactaatggcttcccagcgaggtacggaccctgaggag

SEQ ID NO: 93332 - DNA, 60 bp, Artificial
  Synthetic oligonucleotide
ggtctccgtgtcccttgagctgtcagatgaagttgaggatggtgctctcacacttctcac

SEQ ID NO: 93333 - DNA, 60 bp, Artificial
  Synthetic oligonucleotide
gtgcattcattagctacccactgccccgacaaggaaaaggctaaagagaaggaagaccct

SEQ ID NO: 93334 - DNA, 60 bp, Artificial
  Synthetic oligonucleotide
ctagttgtgagcgacatatgcgactagttatctcctgctcttcaagtggactcagaaccc

SEQ ID NO: 93335 - DNA, 60 bp, Artificial
  Synthetic oligonucleotide
tgttgcggtgcactaactgcttgaagccccttgcctttactgagaagctggcatatgcac

SEQ ID NO: 93336 - DNA, 60 bp, Artificial
  Synthetic oligonucleotide
ggacggggcctgtatatatgggcacacctagcggctccattgtaagcactgaggggcaag

SEQ ID NO: 93337 - DNA, 60 bp, Artificial
  Synthetic oligonucleotide
cagagctgtttgcagatattgcatgagacccgacgggcaggcatgagaggcagagacccc

SEQ ID NO: 93338 - DNA, 60 bp, Artificial
  Synthetic oligonucleotide
agaagcccctcgatcctcaggataagcaccgcttttctgtgagggacttgcgcctgacct

SEQ ID NO: 93339 - DNA, 60 bp, Artificial
  Synthetic oligonucleotide
tgcgaactatcttaggcacacagaggagtatgaaattgcttgcattgtgcagctctgcaa

SEQ ID NO: 93340 - DNA, 60 bp, Artificial
  Synthetic oligonucleotide
caggcaagcagcgcggcacgagcgggagacagccctccacacagtgcctgtgacccttca

SEQ ID NO: 93341 - DNA, 60 bp, Artificial
  Synthetic oligonucleotide
ttgcgcctgacctacaaggacggaaagccctacggatcctgcagccgctgcaccaggcaa

SEQ ID NO: 93342 - DNA, 60 bp, Artificial
  Synthetic oligonucleotide
tcagtgccagaacatcttatctgatagagacaagttccaacatcagacaagaaccgacag

SEQ ID NO: 93343 - DNA, 60 bp, Artificial
  Synthetic oligonucleotide
gcaaactttgtggtcacagttggcccttctccctgaaccttggtgcagtgctcgcacgca

SEQ ID NO: 93344 - DNA, 60 bp, Artificial
  Synthetic oligonucleotide
gggcggatattaggaggggctatgggctttgtgggtgttgtgggatgactccctgtatgc

SEQ ID NO: 93345 - DNA, 60 bp, Artificial
  Synthetic oligonucleotide
agcgctctattgtttccacgaccgttgcaggaaaaccgcgttcggtgcccgccaaacgca

SEQ ID NO: 93346 - DNA, 60 bp, Artificial
  Synthetic oligonucleotide
gtcattaatttgggtggcttgggtattggtacaggggctgggagtggtggcagaggtggc

SEQ ID NO: 93347 - DNA, 60 bp, Artificial
  Synthetic oligonucleotide
ggggcatggccacgtccagcatatcctgcaaggccagtagtgcctgccatagagactgtg

SEQ ID NO: 93348 - DNA, 60 bp, Artificial
  Synthetic oligonucleotide
agtgacaaccacatatcactggctggatgcaggccacacacaacgccgcagtgccgctca

SEQ ID NO: 93349 - DNA, 60 bp, Artificial
  Synthetic oligonucleotide
aggagaggtggagaaaccccatcccgggggactgagaggcctgctgagggatctggtgga

SEQ ID NO: 93350 - DNA, 60 bp, Artificial
  Synthetic oligonucleotide
gcccttcttgtcataatgtctgtaactgatatgcctgtatcccctgccttaaccgctgta

SEQ ID NO: 93351 - DNA, 60 bp, Artificial
  Synthetic oligonucleotide
ccgagtccctagagactctgctacaaacctatatagacagcctggatgccgcgtggacgg

SEQ ID NO: 93352 - DNA, 60 bp, Artificial
  Synthetic oligonucleotide
ttgattttgcttggacgtgtgtacatagtccctgtatatattcccctcctacccccacat

SEQ ID NO: 93353 - DNA, 60 bp, Artificial
  Synthetic oligonucleotide
cctcgtcggctgtactcctgcttcaggtgaacactggacaagtagtcgttgcccagggga

SEQ ID NO: 93354 - DNA, 60 bp, Artificial
  Synthetic oligonucleotide
ggcgtctatatgaacaggtgcaagtacaagaccctaggttcgttgagcagccacagtcaa

SEQ ID NO: 93355 - DNA, 60 bp, Artificial
  Synthetic oligonucleotide
accctatccgagagtgacaccgcccagcaatcgacgtccatcgactacaccgaactccca

SEQ ID NO: 93356 - DNA, 60 bp, Artificial
  Synthetic oligonucleotide
caaagacagcagaaaacacctgtacgcagacggccttacggacggcgaagatccagaagt

SEQ ID NO: 93357 - DNA, 60 bp, Artificial
  Synthetic oligonucleotide
cagaggtggaggacgaagagaaggagaatcaacgccctctaggacacccggatctgtccc

SEQ ID NO: 93358 - DNA, 59 bp, Artificial
  Synthetic oligonucleotide
ctaggacacccggatctgtcccttctgcgcgagacgttggaagtatacacacaacgcct

SEQ ID NO: 93359 - DNA, 60 bp, Artificial
  Synthetic oligonucleotide
caggtacagacttaaagcatctactcaagttgactttgacagcataagcaccacatggca

SEQ ID NO: 93360 - DNA, 57 bp, Artificial
  Synthetic oligonucleotide
ggctcaacgagagaagtttcttgagagagttgctttgcccagatcagtgtctgtgtt

SEQ ID NO: 93361 - DNA, 60 bp, Artificial
  Synthetic oligonucleotide
gtccagaacaggcgcctcctgagccccagactgatccttatagtcaatataaattctggg

SEQ ID NO: 93362 - DNA, 60 bp, Artificial
  Synthetic oligonucleotide
gcaaacaacaacatctgtacatggaccaaacaacccactttcattttattgtgctgcata

SEQ ID NO: 93363 - DNA, 60 bp, Artificial
  Synthetic oligonucleotide
tagataatgtttcttgtgttagcgacttatctgatttattagacgaggcgccgcaaagcc

SEQ ID NO: 93364 - DNA, 60 bp, Artificial
  Synthetic oligonucleotide
ggggcctaagagggatagagataggtagaggccagcctttaggtataggaataacgggcc

SEQ ID NO: 93365 - DNA, 65 bp, Artificial
  Synthetic oligonucleotide
gggactccaataattaatcctgaagaatcatttacacctttggttattatagctcttaacaactc

SEQ ID NO: 93366 - DNA, 60 bp, Artificial
  Synthetic oligonucleotide
cctcagcagtcgcttagacttactgcaagagcagctaatgaacctatatgaacaggacag

SEQ ID NO: 93367 - DNA, 60 bp, Artificial
  Synthetic oligonucleotide
ggtgggcgaaatgccagcactaaaggacctggttcttcaacttgaaccaagcgtcctaga

SEQ ID NO: 93368 - DNA, 60 bp, Artificial
  Synthetic oligonucleotide
ctagttccaccacaaagcgcaaaacagtgcgtgtatctacgtcagccaagcgcaggcgta

SEQ ID NO: 93369 - DNA, 60 bp, Artificial
  Synthetic oligonucleotide
gaggaggagttagtgtcgcctcagcaaccttatgctgtcgttgcttcctgtgcctattgc

SEQ ID NO: 93370 - DNA, 60 bp, Artificial
  Synthetic oligonucleotide
catcgtgtgcccactgtgcaccctacagcgacagtaaaatggcagataataaaggtactg

SEQ ID NO: 93371 - DNA, 60 bp, Artificial
  Synthetic oligonucleotide
gttagattccgaaagtccctttgagctttgtaaaatggttcagtgggcctatgataatgg

SEQ ID NO: 93372 - DNA, 60 bp, Artificial
  Synthetic oligonucleotide
gactgtgcacaaatggtaagacactatttacgtgctgagatggcacaaatgtctatgtca

SEQ ID NO: 93373 - DNA, 60 bp, Artificial
  Synthetic oligonucleotide
ttatgtcttccactagctccccaagggctgctggggctcctgcagtacactccgactacc

SEQ ID NO: 93374 - DNA, 63 bp, Artificial
  Synthetic oligonucleotide
ggatggtaacactatttgtattgatttaaaacatagagctcctcaacaaattaaatgcccacc

SEQ ID NO: 93375 - DNA, 60 bp, Artificial
  Synthetic oligonucleotide
cgcggtcgtacaagagcaacaaaacctgttgtggagattgggttttggcagtttggggtg

SEQ ID NO: 93376 - DNA, 60 bp, Artificial
  Synthetic oligonucleotide
cacaaacgaaagtgtgggcgaaaatttgcaacttactattactaactcagagggtgaggt

SEQ ID NO: 93377 - DNA, 60 bp, Artificial
  Synthetic oligonucleotide
gttccaacttaggtgacacagcatttatacaaggtgagacagcagaggatgacttagaag

SEQ ID NO: 93378 - DNA, 60 bp, Artificial
  Synthetic oligonucleotide
gctttgtaaagtaaagttaactcccgaaaatctagcctacattcatacaatggaccctaa

SEQ ID NO: 93379 - DNA, 60 bp, Artificial
  Synthetic oligonucleotide
ggttgtgtcaaacggagaaagagtgcatagagttagaaacagacttaaagcaaagtgtag

SEQ ID NO: 93380 - DNA, 60 bp, Artificial
  Synthetic oligonucleotide
catagttcatctgcaattgctattccatcgttcttcacatattctacagtagtgttctct

SEQ ID NO: 93381 - DNA, 60 bp, Artificial
  Synthetic oligonucleotide
ctgccaaacttatctggtcgtgctccaacgggtttcctgccaagcacctaaaacggtagg

SEQ ID NO: 93382 - DNA, 60 bp, Artificial
  Synthetic oligonucleotide
ccgcgctccaaagacggtttgcccaaagacggtttgccaacctcggttaggacttgtttc

SEQ ID NO: 93383 - DNA, 60 bp, Artificial
  Synthetic oligonucleotide
caaatgaaggagaatctgccatattagatgtgttacgagggaatgcaaccatacgcactg

SEQ ID NO: 93384 - DNA, 60 bp, Artificial
  Synthetic oligonucleotide
ccccatagatgttgtagatcctacaggccctgctgttattcccctacaagatttaggtag

SEQ ID NO: 93385 - DNA, 60 bp, Artificial
  Synthetic oligonucleotide
gttcaggtgacagggtggtgggcgaggatatccccttggtagaattaaacttaggccttg

SEQ ID NO: 93386 - DNA, 60 bp, Artificial
  Synthetic oligonucleotide
ggccttgaaacagacacatcttctgttgtacaagaaacagcattttccagcagcacacca

SEQ ID NO: 93387 - DNA, 60 bp, Artificial
  Synthetic oligonucleotide
cccctcggtgagggtggtggggttagagttgctactcgtccaactccagtaaggcctaca

SEQ ID NO: 93388 - DNA, 60 bp, Artificial
  Synthetic oligonucleotide
cccctcatgcaaaatatcaaacacctgcccacctgacattcaaaataaaattgagcatac

SEQ ID NO: 93389 - DNA, 60 bp, Artificial
  Synthetic oligonucleotide
gccttggcaaaagttcaactattcgtacacgcctgggcacagcaattggcgccagaaccc

SEQ ID NO: 93390 - DNA, 60 bp, Artificial
  Synthetic oligonucleotide
cgacacaggtagatcaacagcagaaagaacatactggggaagttggggccgctggggtga

SEQ ID NO: 93391 - DNA, 60 bp, Artificial
  Synthetic oligonucleotide
ggaacttaatgctttaaaacgaaagttactttacagtcctcaggcgagaagcgcggacga

SEQ ID NO: 93392 - DNA, 61 bp, Artificial
  Synthetic oligonucleotide
ggagaaaccagttatttattacagttggagataataccagaggaacaagtttatctatcag

SEQ ID NO: 93393 - DNA, 60 bp, Artificial
  Synthetic oligonucleotide
ggaggcagtcccacaaagcctgtatttaacagcagatgctgaaccaagaacaactttagc

SEQ ID NO: 93394 - DNA, 60 bp, Artificial
  Synthetic oligonucleotide
ggggccgctggggtgaacattttgaaagctagtaatatccgcgccgcattattaagcaga

SEQ ID NO: 93395 - DNA, 57 bp, Artificial
  Synthetic oligonucleotide
ggcacagaggattggtcacttcaagacactagcagagagctgtttttggcaccccca

SEQ ID NO: 93396 - DNA, 60 bp, Artificial
  Synthetic oligonucleotide
ggtaccggaaatagaagaaattttggacagacctttattgcaaattgaactccgttgtgt

SEQ ID NO: 93397 - DNA, 60 bp, Artificial
  Synthetic oligonucleotide
catttcgccagaaaaaatggggtaatgagaattggattgcaggcagttccatctttagcg

SEQ ID NO: 93398 - DNA, 60 bp, Artificial
  Synthetic oligonucleotide
taaaatacacaggtaagactctgcacaggaccagatggcgacaccaatccggaccgtcag

SEQ ID NO: 93399 - DNA, 60 bp, Artificial
  Synthetic oligonucleotide
ccagttgatgctagctatattttgtctgagcctccaaaatcaagaagtgtggctgctgca

SEQ ID NO: 93400 - DNA, 60 bp, Artificial
  Synthetic oligonucleotide
ggagagacaatttggtgtttggatgctgtcaagggtgtgctagaactgttagcctattgg

SEQ ID NO: 93401 - DNA, 60 bp, Artificial
  Synthetic oligonucleotide
gggaagtcgatctcacagaaaggatgtccgaacaattagaccaatttccactaggaagga

SEQ ID NO: 93402 - DNA, 60 bp, Artificial
  Synthetic oligonucleotide
atctgatgctgtactgttcaaccgtccatactggcttgagagggcacaaggacaaaacaa

SEQ ID NO: 93403 - DNA, 60 bp, Artificial
  Synthetic oligonucleotide
cccagcttaaacattggggcttgttgaggaaagagcaagtcttgttacatgcagcacgcc

SEQ ID NO: 93404 - DNA, 60 bp, Artificial
  Synthetic oligonucleotide
gtctggtattttacggccctccaaatacagggaagagtctgtttactatgagccttatta

SEQ ID NO: 93405 - DNA, 60 bp, Artificial
  Synthetic oligonucleotide
attgcaagtatagaacacctgtgcaggtaaaatgcccccccatgcttgtcacaacaaatg

SEQ ID NO: 93406 - DNA, 60 bp, Artificial
  Synthetic oligonucleotide
ctgaatgtagcatgcaggccgctaatccagattacacaggcattaccaggcttggtcatc

SEQ ID NO: 93407 - DNA, 60 bp, Artificial
  Synthetic oligonucleotide
agagccaacagaggcggctccgccaccggaacaatacaccttgtaccaggtactcattga

SEQ ID NO: 93408 - DNA, 60 bp, Artificial
  Synthetic oligonucleotide
gggaatcctttgccaaagtcaggggccagtggagggcacggtgcagaatttgcaaacccg

SEQ ID NO: 93409 - DNA, 60 bp, Artificial
  Synthetic oligonucleotide
gctcctgaaccatccccagccgtcaggactcggtggagagctagcaagacaaccttccat

SEQ ID NO: 93410 - DNA, 60 bp, Artificial
  Synthetic oligonucleotide
cgtgtaaaatgataggacctgacaccacgcgctgtctcaccggcgaaactcctgactcgg

SEQ ID NO: 93411 - DNA, 54 bp, Artificial
  Synthetic oligonucleotide
gaggtaggaccagcacaccacgaaccaagcccctcccttctcggttgccttccc

SEQ ID NO: 93412 - DNA, 60 bp, Artificial
  Synthetic oligonucleotide
ggggaggacgataggtggggacagcatagagcttatgccctttactagcagtgataccct

SEQ ID NO: 93413 - DNA, 60 bp, Artificial
  Synthetic oligonucleotide
ctgcgggacgaaaatcttacactccacggactgaaagcacggtgtcgcgtgtgcatgaag

SEQ ID NO: 93414 - DNA, 60 bp, Artificial
  Synthetic oligonucleotide
ccctgagaagcaacggcttgcatggtgtatacggggagtggagatagctcgtggccaacc

SEQ ID NO: 93415 - DNA, 60 bp, Artificial
  Synthetic oligonucleotide
gtggacgcggagagcagccctcctaggacacccagaccggcccccactctcgtggcagag

SEQ ID NO: 93416 - DNA, 60 bp, Artificial
  Synthetic oligonucleotide
ccctcggactgcctgccttttgatcatcaaaggatcatcaaatcaggttaagtgcttgcg

SEQ ID NO: 93417 - DNA, 60 bp, Artificial
  Synthetic oligonucleotide
aaggcgccgccaagacgggcgagtcaaataccccgcgtctccctacaggacaaaaccacc

SEQ ID NO: 93418 - DNA, 60 bp, Artificial
  Synthetic oligonucleotide
ggggtttcaggtagtaggggactcagctgtggatgtatgcgatgcggggcggctgcttaa

SEQ ID NO: 93419 - DNA, 57 bp, Artificial
  Synthetic oligonucleotide
agaaccacctggagacccagtggaggactcggactccccaggcagtcgtcttacccc

SEQ ID NO: 93420 - DNA, 60 bp, Artificial
  Synthetic oligonucleotide
ggatcctgaggcttctgcagagctggttcccagtagggacagtgctcgtccccatgtcat

SEQ ID NO: 93421 - DNA, 60 bp, Artificial
  Synthetic oligonucleotide
cgggcacggacaatagacaaaatgtaggccttgatccgaagcagactcagatgtttattg

SEQ ID NO: 93422 - DNA, 60 bp, Artificial
  Synthetic oligonucleotide
acaatggcattctgtggaataatgatttgttcgtgaccgtgctggacaacactcgtggga

SEQ ID NO: 93423 - DNA, 60 bp, Artificial
  Synthetic oligonucleotide
acggactattatctacacccgtcattgtccagacgcaggcgtaacagcaggcatatctat

SEQ ID NO: 93424 - DNA, 60 bp, Artificial
  Synthetic oligonucleotide
ggtcacgcattctggtgatgtgtgaggactcagcgcagatggacagattcctatgtactg

SEQ ID NO: 93425 - DNA, 60 bp, Artificial
  Synthetic oligonucleotide
ccccggccccggtgcagcgcatactgtctacagatgaatttactacacgaacagacatat

SEQ ID NO: 93426 - DNA, 60 bp, Artificial
  Synthetic oligonucleotide
gccggagtcattatacaagaagggcaaggatggacaggcacagagcacactggcactagc

SEQ ID NO: 93427 - DNA, 60 bp, Artificial
  Synthetic oligonucleotide
cggagaggcgcctgagtggatcaagagacagaccatgattacctgtgcaatggaagagac

SEQ ID NO: 93428 - DNA, 60 bp, Artificial
  Synthetic oligonucleotide
ccagattgggttatcgcattgtactccttgagtgagcccatcctaaatgcggcgcggaca

SEQ ID NO: 93429 - DNA, 60 bp, Artificial
  Synthetic oligonucleotide
gcagtaaaagcagggagacagtaagaaaacaaatgtgcggcatgttccactcagatccgc

SEQ ID NO: 93430 - DNA, 60 bp, Artificial
  Synthetic oligonucleotide
tggcactgtctgcgacgtacctgctgcagagacttgtaccgggtgcggtacttggcagta

SEQ ID NO: 93431 - DNA, 60 bp, Artificial
  Synthetic oligonucleotide
ttgactttagtgcttttaaccttgtttggagaggaaggtgtgcccatggaatctgcacag

SEQ ID NO: 93432 - DNA, 57 bp, Artificial
  Synthetic oligonucleotide
cacgcgcgaatttcaaaccgtaaacggtcccttcctgcttccagaaacggcggcgga

SEQ ID NO: 93433 - DNA, 60 bp, Artificial
  Synthetic oligonucleotide
cttgtgtcccgccttttcttaatcccgcctttgctggggctgcagtacagcacgctgcca

SEQ ID NO: 93434 - DNA, 60 bp, Artificial
  Synthetic oligonucleotide
cttgctacaaaatgccctgacaatgtggaagtcactaagcctgatccctacaaaggacgg

SEQ ID NO: 93435 - DNA, 60 bp, Artificial
  Synthetic oligonucleotide
gcattataaacgggcggagatgaaggctatgagtatgtcacagtgggtatggaagtgctg

SEQ ID NO: 93436 - DNA, 60 bp, Artificial
  Synthetic oligonucleotide
ggaacttgggaagtacatgatggactagagacacattcccttcttattcctgtcaccagc

SEQ ID NO: 93437 - DNA, 60 bp, Artificial
  Synthetic oligonucleotide
ggtggaggtcattgctgagatccaccctgtacctcctgacggtccctccaacacaccaac

SEQ ID NO: 93438 - DNA, 60 bp, Artificial
  Synthetic oligonucleotide
gcgcggcacaagcacaccagatccgtgggctagaacatctactgcttgacgggctaagag

SEQ ID NO: 93439 - DNA, 60 bp, Artificial
  Synthetic oligonucleotide
ccgtgggtgcaagaccagttcctcgacctaatgtgcccttagaaactgttggtccccagg

SEQ ID NO: 93440 - DNA, 60 bp, Artificial
  Synthetic oligonucleotide
gaccccattggctatggatttgttactgcggtagccggatggataggaccgtgcactcct

SEQ ID NO: 93441 - DNA, 60 bp, Artificial
  Synthetic oligonucleotide
gcgacatacacgagtccctcgtgactcggccactcacatatatcaaacatgtaagcaggc

SEQ ID NO: 93442 - DNA, 60 bp, Artificial
  Synthetic oligonucleotide
ggcggggcggctgtattcctcggtggccttggtattggtacaggtaggggaagtggtggt

SEQ ID NO: 93443 - DNA, 60 bp, Artificial
  Synthetic oligonucleotide
cacggccacctggtgtggggaacacgccgtagctctaagcaaataagcatgccattccgc

SEQ ID NO: 93444 - DNA, 60 bp, Artificial
  Synthetic oligonucleotide
cagaccagcagggaaatgtatatggcaggtccatccggcaccttcaagaaagacggcacc

SEQ ID NO: 93445 - DNA, 60 bp, Artificial
  Synthetic oligonucleotide
cctgcagcaatcaggtggttaagaagggtgactgtccacctattcagcggatgtctggga

SEQ ID NO: 93446 - DNA, 60 bp, Artificial
  Synthetic oligonucleotide
gtgacgggtctagtgatgaggagccaaatgagtcctttgaatctattgcggacatgttcg

SEQ ID NO: 93447 - DNA, 60 bp, Artificial
  Synthetic oligonucleotide
tctgggacaaaagacatccctgcacacacgcagcggtatggcaataggccctaaggcata

SEQ ID NO: 93448 - DNA, 60 bp, Artificial
  Synthetic oligonucleotide
cccacggcaactcatgcttcttctatgctaggcaggcgagattatacagcaggcacttct

SEQ ID NO: 93449 - DNA, 60 bp, Artificial
  Synthetic oligonucleotide
cgaaagtacattcccagtccagaggcaggtggggatctctcaccacggctgagggctatc

SEQ ID NO: 93450 - DNA, 60 bp, Artificial
  Synthetic oligonucleotide
attactacgagagggaagaggagactatccagacggcgcacgccgcgagacgaggaggta

SEQ ID NO: 93451 - DNA, 60 bp, Artificial
  Synthetic oligonucleotide
catacctgcatgggatggacccatctatactggataactggaacttgactctgggacccc

SEQ ID NO: 93452 - DNA, 60 bp, Artificial
  Synthetic oligonucleotide
caagggaacactcagaatcgaggggagggagaggtagaggggcgtacgccacaagatcca

SEQ ID NO: 93453 - DNA, 60 bp, Artificial
  Synthetic oligonucleotide
gacaatcccatcaatgatacatatagatacatacattcagcagccacacggtgtccagat

SEQ ID NO: 93454 - DNA, 60 bp, Artificial
  Synthetic oligonucleotide
tactacacggaaagccgaagaacgacggtcccggagtccatcgtcagggacagagcaagc

SEQ ID NO: 93455 - DNA, 60 bp, Artificial
  Synthetic oligonucleotide
cagggacagagcaagccggtgcacggggacggggacaacggggaaccagggcccgttcca

SEQ ID NO: 93456 - DNA, 60 bp, Artificial
  Synthetic oligonucleotide
ggtcatgggtggcttcacaaggtaatacacgcataggtagagctcgcatgctgcttagct

SEQ ID NO: 93457 - DNA, 60 bp, Artificial
  Synthetic oligonucleotide
aataactaacccactttatatattgtatggcgcgcgcacgtagagtaaagcgtgattctg

SEQ ID NO: 93458 - DNA, 60 bp, Artificial
  Synthetic oligonucleotide
acttgggaaacgagcaaccatcagaacacgctctggagcacaggttggcactcaagttca

SEQ ID NO: 93459 - DNA, 60 bp, Artificial
  Synthetic oligonucleotide
ctcaagttcacttttacagagatataagcactattgacacagaaccctccattgaattgc

SEQ ID NO: 93460 - DNA, 60 bp, Artificial
  Synthetic oligonucleotide
gcaactgttaggggaacattctggggatgctagtattgttcaaggcccagtagaaagtac

SEQ ID NO: 93461 - DNA, 60 bp, Artificial
  Synthetic oligonucleotide
ccgcacccggtataagctataaaatatcctgaggtgatgcagtatctgatcctggcagtc

SEQ ID NO: 93462 - DNA, 60 bp, Artificial
  Synthetic oligonucleotide
ggtctatttaccaccatcaacaccagttgccagggtgcaaagcacggactcctacataca

SEQ ID NO: 93463 - DNA, 60 bp, Artificial
  Synthetic oligonucleotide
gccagaattacattctgaagatgtgctattagaggaggcattagaagactttagtggagc

SEQ ID NO: 93464 - DNA, 60 bp, Artificial
  Synthetic oligonucleotide
cccaaggtgtcaggtaatcagtacagggcctttagggtacacttaccggatcctaacaga

SEQ ID NO: 93465 - DNA, 60 bp, Artificial
  Synthetic oligonucleotide
agactgggagacctggaaccgaaaccgccaaagggcgaaggtacggacgaaaagaatcta

SEQ ID NO: 93466 - DNA, 60 bp, Artificial
  Synthetic oligonucleotide
ccaggaggcgaggcattatgcgtttggggtacactcctgttcctagtttagcagcttcag

SEQ ID NO: 93467 - DNA, 54 bp, Artificial
  Synthetic oligonucleotide
ctataccagacataaagctggagctgcaagaccttgtcctgcccattgacctgc

SEQ ID NO: 93468 - DNA, 60 bp, Artificial
  Synthetic oligonucleotide
cccggctgaaaatctacgtttctgctacacagtttggaattcgttctttagaagacttgc

SEQ ID NO: 93469 - DNA, 60 bp, Artificial
  Synthetic oligonucleotide
ggcagataatagaggtattgatcctaaagaagggtgtagtaattggttttctcttgaagc

SEQ ID NO: 93470 - DNA, 60 bp, Artificial
  Synthetic oligonucleotide
atgcgaatgagcagggaatttcccgagatctctttcgccagcaggggagtgaggagtttg

SEQ ID NO: 93471 - DNA, 60 bp, Artificial
  Synthetic oligonucleotide
ccgaaagagttgcagcagcttagccctcgtttggaagcaatacctttgtcgccgcaacac

SEQ ID NO: 93472 - DNA, 60 bp, Artificial
  Synthetic oligonucleotide
ccccaaatactgacggcacagcacggacagaagttcaggcgagcaatgagcattatagac

SEQ ID NO: 93473 - DNA, 60 bp, Artificial
  Synthetic oligonucleotide
gctctgaaccagcgtttcaatgctctagaagaccagctcatggacatatatgaacaaggg

SEQ ID NO: 93474 - DNA, 60 bp, Artificial
  Synthetic oligonucleotide
aaccttggacattgattaacaccagtttagaaacatatagagctcctcctgttaactgct

SEQ ID NO: 93475 - DNA, 60 bp, Artificial
  Synthetic oligonucleotide
taaggtatgtgagtaatttttgaaccgcccctgactaatctaaacatgctaaccgcaccc

SEQ ID NO: 93476 - DNA, 58 bp, Artificial
  Synthetic oligonucleotide
ttggggagtatccagactggattgttcagcaaacgatgattagtcaccatgagggcga

SEQ ID NO: 93477 - DNA, 60 bp, Artificial
  Synthetic oligonucleotide
cgtggaatttaaagtagatgctcgcagatttggaactagtggagaatgggaagtgcgttt

SEQ ID NO: 93478 - DNA, 60 bp, Artificial
  Synthetic oligonucleotide
acacatcctggcagttcatttactttgaagacactgatggacattggcaaaaaactgaag

SEQ ID NO: 93479 - DNA, 60 bp, Artificial
  Synthetic oligonucleotide
cgaggtcggaaccgcccctgactccggcaccctacagactgggagacctggaaccgaaac

SEQ ID NO: 93480 - DNA, 60 bp, Artificial
  Synthetic oligonucleotide
gccccccgacgtccccgaggtcggaaccgcccctgactccggcaccctacagactgggag

SEQ ID NO: 93481 - DNA, 60 bp, Artificial
  Synthetic oligonucleotide
gttaccagctcctcgccgtcctcatacgaagaggtcagagaacgggctgagccccccgac

SEQ ID NO: 93482 - DNA, 60 bp, Artificial
  Synthetic oligonucleotide
gggagcgtttggtatgggctgttagaggaatggaaattggtcgtggacagccattaggtg

SEQ ID NO: 93483 - DNA, 60 bp, Artificial
  Synthetic oligonucleotide
gacacggaaaatccaaatggctataatacaggtggaaaggatgatagggtgaatacatcc

SEQ ID NO: 93484 - DNA, 60 bp, Artificial
  Synthetic oligonucleotide
ccagaagagaacaatgttatgccagacatatgttttgtagaggtgggtcagtaggagaca

SEQ ID NO: 93485 - DNA, 60 bp, Artificial
  Synthetic oligonucleotide
ggagacagtattccagatgatgcagttggagaagacaaccattattatttaaaggctgcc

SEQ ID NO: 93486 - DNA, 60 bp, Artificial
  Synthetic oligonucleotide
ggctgccagtgatcaaaacagagatacaatggcaagttccatttacactcccacagtcag

SEQ ID NO: 93487 - DNA, 60 bp, Artificial
  Synthetic oligonucleotide
ctattgctgaccaaattttaaagtatggcagcaccgctgcgttttttggtgggttgggta

SEQ ID NO: 93488 - DNA, 60 bp, Artificial
  Synthetic oligonucleotide
ggctcgagtgcagtattagaggttgctgacccaagtcctcccactcgtgcacgtgtcagt

SEQ ID NO: 93489 - DNA, 60 bp, Artificial
  Synthetic oligonucleotide
caggacctgatttgttgccaggagaaattgagaccattgctgaggtacatcctgtgtcag

SEQ ID NO: 93490 - DNA, 60 bp, Artificial
  Synthetic oligonucleotide
cctgtaagaatggctcagcaggcctcacgagctttacgtagagctttatacaatcgtaga

SEQ ID NO: 93491 - DNA, 60 bp, Artificial
  Synthetic oligonucleotide
ggaaataacacaaatatttgagagggatttaagctccattgaagaacctccagatagaca

SEQ ID NO: 93492 - DNA, 60 bp, Artificial
  Synthetic oligonucleotide
gtctcctatggtacaatgggcctatgacaatgactatatcgaagattctgacattgcata

SEQ ID NO: 93493 - DNA, 60 bp, Artificial
  Synthetic oligonucleotide
cagaagcgattggtcctactgatataatacctttggatacagtcaaccctattgaccctg

SEQ ID NO: 93494 - DNA, 60 bp, Artificial
  Synthetic oligonucleotide
ttagatgccagttttgtttgcgactgttagattatttagaaaagttaaatatttgtgggt

SEQ ID NO: 93495 - DNA, 60 bp, Artificial
  Synthetic oligonucleotide
gacagtgcagcaacttagaagtcatttgggcattcctactgaagacctgttgttagcctg

SEQ ID NO: 93496 - DNA, 60 bp, Artificial
  Synthetic oligonucleotide
gtaggaaatttaatagcaataagacttgttgtcgggactgggtcgtaactgcatatggag

SEQ ID NO: 93497 - DNA, 60 bp, Artificial
  Synthetic oligonucleotide
actatgtccaatgtcactctttctattgtgttttaaaactggtaaaagcagagatacagt

SEQ ID NO: 93498 - DNA, 60 bp, Artificial
  Synthetic oligonucleotide
gttgttggcaattacaacctgccactcataaacaagtaaccgcctgcgtttctaggacat

SEQ ID NO: 93499 - DNA, 60 bp, Artificial
  Synthetic oligonucleotide
gcagtcactcctggaacaacaccgatccagtggctttgccaaaagcagtttaaacctgcc

SEQ ID NO: 93500 - DNA, 60 bp, Artificial
  Synthetic oligonucleotide
ctgaaccaccaaagttacgaagtgttatggctgtactttactggtataagggcagtatga

SEQ ID NO: 93501 - DNA, 60 bp, Artificial
  Synthetic oligonucleotide
cagaggctcaattgtttaataagccatattggctgcaacgtgcccagggacataataatg

SEQ ID NO: 93502 - DNA, 60 bp, Artificial
  Synthetic oligonucleotide
ccccacacccagtgggtccatggtaacgtctgaggctcaattgtttaataagccatattg

SEQ ID NO: 93503 - DNA, 60 bp, Artificial
  Synthetic oligonucleotide
ggtccatggtaacgtctgaggctcaattgtttaataagccatattggctgcggcgggccc

SEQ ID NO: 93504 - DNA, 60 bp, Artificial
  Synthetic oligonucleotide
gtctggaccatggggaagctgatgaaaacagctggcggggaattgtgcattttctgaggt

SEQ ID NO: 93505 - DNA, 60 bp, Artificial
  Synthetic oligonucleotide
ggccgcctactatttagcttttgatagtgagataagtgctatggaggttttgctgcgaca

SEQ ID NO: 93506 - DNA, 60 bp, Artificial
  Synthetic oligonucleotide
cctacaccatagaccaaagaaatcaacacttgtattatgtggaccgtcggacacaggcaa

SEQ ID NO: 93507 - DNA, 60 bp, Artificial
  Synthetic oligonucleotide
ccggctgcctaaaccctcagatatagatctagagccactgttccaaagccgccagcgctg

SEQ ID NO: 93508 - DNA, 60 bp, Artificial
  Synthetic oligonucleotide
tcccagctatctagtacgccatcagctccagggccagacatccggctgcctaaaccctca

SEQ ID NO: 93509 - DNA, 60 bp, Artificial
  Synthetic oligonucleotide
ggatgtggcagaactaagcccgcgtctggcgggtgtttccctggaagaaaaccgtgggaa

SEQ ID NO: 93510 - DNA, 60 bp, Artificial
  Synthetic oligonucleotide
gcgtcacctaaatctaaaagaccctgaggatgagtcagatggagagactcctggaacgat

SEQ ID NO: 93511 - DNA, 60 bp, Artificial
  Synthetic oligonucleotide
agccagccgtctgccgcactttataggacagagcctcagcgaccttgaggtgaggtgtgt

SEQ ID NO: 93512 - DNA, 60 bp, Artificial
  Synthetic oligonucleotide
agcggtgtgggatccgtcgggcctgcaagctgttgcgagacgcagaagccacataccata

SEQ ID NO: 93513 - DNA, 60 bp, Artificial
  Synthetic oligonucleotide
gcgtattggatatttacgctttcgaccagagctgtctgtacttatcctggggagaagggg

SEQ ID NO: 93514 - DNA, 60 bp, Artificial
  Synthetic oligonucleotide
ggcctacagatccctttcggccgtcagtgctggaagagccttttattataaggcctcctg

SEQ ID NO: 93515 - DNA, 60 bp, Artificial
  Synthetic oligonucleotide
tattgaagactggcatttagctgtcacttcacctcccaattctgtactggaggatcatta

SEQ ID NO: 93516 - DNA, 60 bp, Artificial
  Synthetic oligonucleotide
ggggcacggtgctgtctaatagacgatgcgaccctcacgttttggaggtacgcggaccaa

SEQ ID NO: 93517 - DNA, 60 bp, Artificial
  Synthetic oligonucleotide
tgagggggatgcttcttcatataacaattctaagttttttgagtttttaaggcacaccga

SEQ ID NO: 93518 - DNA, 60 bp, Artificial
  Synthetic oligonucleotide
caatggcatactgtggcacaacgaggcctttgtaacattggttgacactaccaggggaac

SEQ ID NO: 93519 - DNA, 60 bp, Artificial
  Synthetic oligonucleotide
taggcagcgccctggtaaatgtacctgaacctgtaactgttaccgacagctcctccacga

SEQ ID NO: 93520 - DNA, 60 bp, Artificial
  Synthetic oligonucleotide
ttagggcagccagttaccctaatgtttgacaatgatcccgaaaaccttacagaagttgta

SEQ ID NO: 93521 - DNA, 60 bp, Artificial
  Synthetic oligonucleotide
tccttgtcgctgtttcatgcccaaactgtcgaggaatacgagggagagatccagagccta

SEQ ID NO: 93522 - DNA, 60 bp, Artificial
  Synthetic oligonucleotide
gcgggaagacttgtctgtgcatagaattggcgggatctggaggggaacttgtgttcgatg

SEQ ID NO: 93523 - DNA, 60 bp, Artificial
  Synthetic oligonucleotide
tactcagacaggaaggacacgcaagggtcggcggcagagcggtgccggcaatgacggtat

SEQ ID NO: 93524 - DNA, 60 bp, Artificial
  Synthetic oligonucleotide
actactggccttcgtgttagtcgcctggggcaacgtcggggtactatatccacgcgctct

SEQ ID NO: 93525 - DNA, 60 bp, Artificial
  Synthetic oligonucleotide
cagacattactctcacgtttgaggatgatctgcagcaggcactacgtagtgacacagacc

SEQ ID NO: 93526 - DNA, 60 bp, Artificial
  Synthetic oligonucleotide
gcgattacctattaggccctatggcagacagtatcagcaagtgcgagttaccgaccctga

SEQ ID NO: 93527 - DNA, 60 bp, Artificial
  Synthetic oligonucleotide
gtggagaaacctcatcaacggacaacattattgtaggagctgaaagcggtggcacatccg

SEQ ID NO: 93528 - DNA, 60 bp, Artificial
  Synthetic oligonucleotide
acgacgcagaaacgaggaaacgggggagccggtcgccccagcccctaagcgaagacgagg

SEQ ID NO: 93529 - DNA, 60 bp, Artificial
  Synthetic oligonucleotide
tcgcttgtcacgcctgtgtcgagcagaatggcgtccagggtctcagacaccggcaatggc

SEQ ID NO: 93530 - DNA, 60 bp, Artificial
  Synthetic oligonucleotide
gtccatatccagtggtgcaattggtccccgggatattttgccaattgaatcaggggggcc

SEQ ID NO: 93531 - DNA, 60 bp, Artificial
  Synthetic oligonucleotide
gtattgtggtgcggtgtcctcgacggtccatgtgtcatcttataatcacttggtcagtcc

SEQ ID NO: 93532 - DNA, 60 bp, Artificial
  Synthetic oligonucleotide
caggcggcctactaagcgccgccggaaggcttaaacgaattgctggtattgtggtgcggt

SEQ ID NO: 93533 - DNA, 60 bp, Artificial
  Synthetic oligonucleotide
gcgcgaagacagttttattgccaaaaccttttggttgctgccaatagcaggcgtggtctc

SEQ ID NO: 93534 - DNA, 60 bp, Artificial
  Synthetic oligonucleotide
caaggacacgaaacatgcctgctgctttattcttctatcatagatttatgggtacagggg

SEQ ID NO: 93535 - DNA, 58 bp, Artificial
  Synthetic oligonucleotide
tatgttagctttagagtatgctttgcttgctgaaagtgatggcaatgcgcgggctttt

SEQ ID NO: 93536 - DNA, 60 bp, Artificial
  Synthetic oligonucleotide
cctgacaaggagcgtctggtctggggtattcgtgggattgaggtttctaggggacagccc

SEQ ID NO: 93537 - DNA, 60 bp, Artificial
  Synthetic oligonucleotide
aacattactgaccaaggttcagactcaaggttgagcattgcatttgaccctaagcaaaca

SEQ ID NO: 93538 - DNA, 60 bp, Artificial
  Synthetic oligonucleotide
gctctagagcttaagtcctcatacattgaggatgcagacatgagtgacataggcctggga

SEQ ID NO: 93539 - DNA, 60 bp, Artificial
  Synthetic oligonucleotide
gcgcactgataggtatttcatgacacccagcggctccctggtagctactgagcagcagct

SEQ ID NO: 93540 - DNA, 60 bp, Artificial
  Synthetic oligonucleotide
cttcctggaatacaacgtgcagaaatctaggactacagtgtacaattggttcacagccaa

SEQ ID NO: 93541 - DNA, 60 bp, Artificial
  Synthetic oligonucleotide
caggtgcagcaagtccccacacccaggagaacattatacctggtagagagtcagtgtcca

SEQ ID NO: 93542 - DNA, 60 bp, Artificial
  Synthetic oligonucleotide
gctgaatgtagcgatggcggggacgatgaggaaagtatggaggatagcttggtggaagac

SEQ ID NO: 93543 - DNA, 60 bp, Artificial
  Synthetic oligonucleotide
ggggacacaattgacacaacaatacttgcccctggcgaggaggagactgcctttgtgacc

SEQ ID NO: 93544 - DNA, 60 bp, Artificial
  Synthetic oligonucleotide
gggctgtttcgcgcacacgcagaaaagctgtgacctgtgtatcattaaacaatgcttgct

SEQ ID NO: 93545 - DNA, 51 bp, Artificial
  Synthetic oligonucleotide
ctatctagttggcgccaaaggtccagtgaatagcctgcggtgcttaaggta

SEQ ID NO: 93546 - DNA, 60 bp, Artificial
  Synthetic oligonucleotide
ggatggcaaagaggtggtccctaaagtttcctctaatcagttcagggccttccgtgtccg

SEQ ID NO: 93547 - DNA, 60 bp, Artificial
  Synthetic oligonucleotide
cagataattgaactccctagtgtgaatgaccccggtccctcggttgttacccgcacacaa

SEQ ID NO: 93548 - DNA, 60 bp, Artificial
  Synthetic oligonucleotide
ttaaacgctatgagcaaactacacctgctgatagtatattaaagtatgggagtgtagggg

SEQ ID NO: 93549 - DNA, 60 bp, Artificial
  Synthetic oligonucleotide
gggcagagacctgcagttggtattttccactggcaatgatgaggtggttgatattatgac

SEQ ID NO: 93550 - DNA, 60 bp, Artificial
  Synthetic oligonucleotide
tgaacacagaggaatacgtgagacgcaccagtactttcctccatgctgccactgaccgtt

SEQ ID NO: 93551 - DNA, 60 bp, Artificial
  Synthetic oligonucleotide
tgtctatcctactagcacaacagccaccaccccactcgtgcctgcacagcccagcgatgt

SEQ ID NO: 93552 - DNA, 60 bp, Artificial
  Synthetic oligonucleotide
tactatatccacgcgctctggtgttcaggtaggctccgctgctcattttttccaggacat

SEQ ID NO: 93553 - DNA, 60 bp, Artificial
  Synthetic oligonucleotide
ccggtgaggggactattgtgagaggagaccctacgccttctattgagcaagacataggac

SEQ ID NO: 93554 - DNA, 60 bp, Artificial
  Synthetic oligonucleotide
ggcagtgctgatgtgatccctattaatgcagtggatcctttggggcctgcagtgcttcca

SEQ ID NO: 93555 - DNA, 60 bp, Artificial
  Synthetic oligonucleotide
gtgttttgcacaccgatgagtatgtcaccaggacacgcatattctatcatgcaagcagcg

SEQ ID NO: 93556 - DNA, 60 bp, Artificial
  Synthetic oligonucleotide
gccaagcacgcgtgttttgcacaccgatgagtatgtgaccaggacacgtatcttttacca

SEQ ID NO: 93557 - DNA, 60 bp, Artificial
  Synthetic oligonucleotide
caaaatctccaacacctgcccgcccgatattctcaataaagctgagcaaaacacgcttgc

SEQ ID NO: 93558 - DNA, 60 bp, Artificial
  Synthetic oligonucleotide
taaaatgggctagtcaatttctttggtttggtcagctgggtattggaacagggagagggt

SEQ ID NO: 93559 - DNA, 60 bp, Artificial
  Synthetic oligonucleotide
gagcgtaaccctgaaacattagatgagcagattgaatattgggaactggtgaaatgggaa

SEQ ID NO: 93560 - DNA, 60 bp, Artificial
  Synthetic oligonucleotide
ttgaagaccaatatcgccacataaactcccaagccactaagtgtccttcagatgtgcccc

SEQ ID NO: 93561 - DNA, 60 bp, Artificial
  Synthetic oligonucleotide
cttttgctaaccataaaagtcacttttggcttcaaccgttagctgactgcaagtttgctg

SEQ ID NO: 93562 - DNA, 58 bp, Artificial
  Synthetic oligonucleotide
tggtgcgaggcaagcctaatcaactaaagtgctggcgttggcgactacataacagagc

SEQ ID NO: 93563 - DNA, 60 bp, Artificial
  Synthetic oligonucleotide
gacatttcctcctggggtaacgtggtgttatgggagtttggactgcatttaaatcaagct

SEQ ID NO: 93564 - DNA, 60 bp, Artificial
  Synthetic oligonucleotide
gggggtagcttagacatagttgctgagccatgttattacccagactttttaaagatgaca

SEQ ID NO: 93565 - DNA, 60 bp, Artificial
  Synthetic oligonucleotide
gggaagatgtccctgaggaccactatttaagcgggcaggcgcaggcgcgtatggggccta

SEQ ID NO: 93566 - DNA, 60 bp, Artificial
  Synthetic oligonucleotide
atttgttactgtggtagacaccacacgagggacaaacttcactatttctgtacggtctga

SEQ ID NO: 93567 - DNA, 60 bp, Artificial
  Synthetic oligonucleotide
ggtttggctccgagaagtggactctagcagacactagttcaatgacatacctagctcccc

SEQ ID NO: 93568 - DNA, 60 bp, Artificial
  Synthetic oligonucleotide
taggactggcgtcataagccggcccccggttgtcatagactctatagggcctcgtgatat

SEQ ID NO: 93569 - DNA, 60 bp, Artificial
  Synthetic oligonucleotide
agaccccacagcatcatccatcgtacccctcaatgaaggtggtccgtccgttcccacggg

SEQ ID NO: 93570 - DNA, 60 bp, Artificial
  Synthetic oligonucleotide
ttttgtattacttgcataatggtgagggctaaaagggtgaagcgggcttccgaagatcag

SEQ ID NO: 93571 - DNA, 60 bp, Artificial
  Synthetic oligonucleotide
ggcattcacaaattaggctttagtccagtgccctccttacaagcgtccgaacatggcgcg

SEQ ID NO: 93572 - DNA, 60 bp, Artificial
  Synthetic oligonucleotide
cctattctaatgtagatgtgcatggtgtgtattatatacgagactctagaaaacagtact

SEQ ID NO: 93573 - DNA, 60 bp, Artificial
  Synthetic oligonucleotide
ctatggcccaaagtcaacaaaacactgatgacaggcaaaacacctcttttgacccaaagc

SEQ ID NO: 93574 - DNA, 60 bp, Artificial
  Synthetic oligonucleotide
attatgaaaatcagcagccgcagtttgaactgcgcaaaatggttcagtgggctttagatc

SEQ ID NO: 93575 - DNA, 60 bp, Artificial
  Synthetic oligonucleotide
gtacgggctccattacatagaattcttgtacgctgtagaaaatgctttaagctactgtct

SEQ ID NO: 93576 - DNA, 60 bp, Artificial
  Synthetic oligonucleotide
caccaggatccacgcgaaagcttcttaccgccacctatcatcggatactacgtgacaggg

SEQ ID NO: 93577 - DNA, 60 bp, Artificial
  Synthetic oligonucleotide
ctcagcactatgacttttgtgcagccgcgccgaatttctgacctggctactgttctgggt

SEQ ID NO: 93578 - DNA, 60 bp, Artificial
  Synthetic oligonucleotide
gtatagagtgtttcgggttaggctgccagaccccaacaagttcgcactgtcagaacccca

SEQ ID NO: 93579 - DNA, 60 bp, Artificial
  Synthetic oligonucleotide
ttaacagacagtggccatgtaagagtgagcagattaggcaccttaggtacaatctctact

SEQ ID NO: 93580 - DNA, 60 bp, Artificial
  Synthetic oligonucleotide
cccactccaagtaacccagtactgaacactactgtttctagcagcattcataataaccct

SEQ ID NO: 93581 - DNA, 60 bp, Artificial
  Synthetic oligonucleotide
caaacaggcttgtcagcacgcttaagtaaaaacctcaagcagctgagacagcggctatac

SEQ ID NO: 93582 - DNA, 59 bp, Artificial
  Synthetic oligonucleotide
caacaggacgtgtttacctgcctccttctactcctttatccaaagtccttcacactgat

SEQ ID NO: 93583 - DNA, 60 bp, Artificial
  Synthetic oligonucleotide
cccagacgatcagggcttcattcaaggccctcgagatcccccgccccaaagggatcaggg

SEQ ID NO: 93584 - DNA, 60 bp, Artificial
  Synthetic oligonucleotide
atccagttatagacctggatccagacgatcctcctcaggacgaggagcgaggcgcagtcg

SEQ ID NO: 93585 - DNA, 60 bp, Artificial
  Synthetic oligonucleotide
gtattgcgacttttactacgcatctgtacttctctgtaaaaaagggcattgtgtgttata

SEQ ID NO: 93586 - DNA, 59 bp, Artificial
  Synthetic oligonucleotide
gggatcaggggtaccaaagcgacggccgtcagtccgtgcgcctcagagctaccgagggg

SEQ ID NO: 93587 - DNA, 60 bp, Artificial
  Synthetic oligonucleotide
cgaaagttaccgctcacaacggagagatgtcctttgggctcacttgattcctcattaaat

SEQ ID NO: 93588 - DNA, 60 bp, Artificial
  Synthetic oligonucleotide
cgtcgttaacgcgggtgtttaagagtgataaaacgtgctgtcataattgggttgtgtgtg

SEQ ID NO: 93589 - DNA, 60 bp, Artificial
  Synthetic oligonucleotide
gctctttgcacaacaccaagcattagacgcagcccaggaaattagcgctgtaaaacgaaa

SEQ ID NO: 93590 - DNA, 60 bp, Artificial
  Synthetic oligonucleotide
ttgctagctcatccggacacaccgccacagtcgccaccccagaaacaacagtcacctcca

SEQ ID NO: 93591 - DNA, 60 bp, Artificial
  Synthetic oligonucleotide
ccctcccggtgtatctgttaaggtaggtgccatggttgttatctacaacgatcgtactgg

SEQ ID NO: 93592 - DNA, 60 bp, Artificial
  Synthetic oligonucleotide
cttcaaaacttataaggtgtctaatgctgctggtatgtgcgccgcccacattagcattga

SEQ ID NO: 93593 - DNA, 60 bp, Artificial
  Synthetic oligonucleotide
gttactaggaatgcaaataggccgaggtcagcctctgggaattagcagcacaggtcaccc

SEQ ID NO: 93594 - DNA, 60 bp, Artificial
  Synthetic oligonucleotide
cgcactgtcagaaccccacatttatgatccggactcagaaaggcttgtttggaagttact

SEQ ID NO: 93595 - DNA, 60 bp, Artificial
  Synthetic oligonucleotide
gttgggcagtgttcgacaccatcaaagctctcaaaggaaacggtcccgatcccatgaaag

SEQ ID NO: 93596 - DNA, 60 bp, Artificial
  Synthetic oligonucleotide
tttccgtggcttctgcgaccccggatattccacgactcagcccctggttcagacgacgct

SEQ ID NO: 93597 - DNA, 60 bp, Artificial
  Synthetic oligonucleotide
ccgccatttcctcagagctcaaagattagaaatgactatggcaaaatggcttactaggtg

SEQ ID NO: 93598 - DNA, 60 bp, Artificial
  Synthetic oligonucleotide
gtagagctagcaaacggccggggtctaaaagagtttcctttaaatctggccagcccgcca

SEQ ID NO: 93599 - DNA, 60 bp, Artificial
  Synthetic oligonucleotide
gaaaaggccttgccatgtgctgaagatgctcctcctccaaagggcgcctgccccccaata

SEQ ID NO: 93600 - DNA, 60 bp, Artificial
  Synthetic oligonucleotide
gacagccttggaagcacggtttgaagaagtccaagaaaagctgcttgagttattagagcg

SEQ ID NO: 93601 - DNA, 60 bp, Artificial
  Synthetic oligonucleotide
agcattctctgcggcacctgcggacgagacagtttccagcatggagggaaaaaagcctaa

SEQ ID NO: 93602 - DNA, 60 bp, Artificial
  Synthetic oligonucleotide
ctcccgaggtggggcctgagtattatccatatgaaattgcggggcattgtgcaagatgca

SEQ ID NO: 93603 - DNA, 60 bp, Artificial
  Synthetic oligonucleotide
gctctgtacgaagctggtggcggggtgtgtgcagatactgtaggcagccatgattgggtt

SEQ ID NO: 93604 - DNA, 60 bp, Artificial
  Synthetic oligonucleotide
gcagactgctgctaagcacagggtcagacattgtagactcaggcctagaccttcaggaca

SEQ ID NO: 93605 - DNA, 60 bp, Artificial
  Synthetic oligonucleotide
ccctgttccaatacctgcagtgctgtttaatgtgctgtctagtgatcttctcttggatcc

SEQ ID NO: 93606 - DNA, 60 bp, Artificial
  Synthetic oligonucleotide
ctactcgatctgggttaattattggagggcaggtccactattacactgatttaagcagca

SEQ ID NO: 93607 - DNA, 60 bp, Artificial
  Synthetic oligonucleotide
atgacatggaaacctcattttgcaatgtagaccaaggcattgaagaagtagagcgtgacc

SEQ ID NO: 93608 - DNA, 60 bp, Artificial
  Synthetic oligonucleotide
ccgacagtatattattgctgaatcctccaaacaagaggtctgtactggctgctctgttct

SEQ ID NO: 93609 - DNA, 60 bp, Artificial
  Synthetic oligonucleotide
cccatcgcttctagggaacagattgaaaagaacaatagtgcctacatggcctgcccgtct

SEQ ID NO: 93610 - DNA, 60 bp, Artificial
  Synthetic oligonucleotide
ggtgacagtgacgttgatgaggaggagcacctacctaataatcctgccaacacccctgag

SEQ ID NO: 93611 - DNA, 60 bp, Artificial
  Synthetic oligonucleotide
ggctgcagtccagaaagagtgtctgctttaaatgagtgcttaaaaggtgtaaccgagttt

SEQ ID NO: 93612 - DNA, 60 bp, Artificial
  Synthetic oligonucleotide
agtaagagccgatttagtgacctagacttcaacctgactgactttatgcctcagacggta

SEQ ID NO: 93613 - DNA, 60 bp, Artificial
  Synthetic oligonucleotide
gaggtgaccctgatacagagacggagtatgtgtactggggcagactactaaagcacgatc

SEQ ID NO: 93614 - DNA, 60 bp, Artificial
  Synthetic oligonucleotide
ggcggttcgcatctgccaaatggaggccgcttccatcccctaaatggctgacactttctc

SEQ ID NO: 93615 - DNA, 60 bp, Artificial
  Synthetic oligonucleotide
ttagggctcaaccggtccgatgtgccaatggaactggcggcttcagtggctaagtacccg

SEQ ID NO: 93616 - DNA, 60 bp, Artificial
  Synthetic oligonucleotide
cagctttctcttttagccgctgtcttgattatctgccatttggatcatctacacccctcc

SEQ ID NO: 93617 - DNA, 60 bp, Artificial
  Synthetic oligonucleotide
agtttctgcagttacctcggacatctgtgtccactagacgagccattggtgctggttctg

SEQ ID NO: 93618 - DNA, 60 bp, Artificial
  Synthetic oligonucleotide
cggccttacgagggtccccagtcaagtggtctctgagcatatggcaaaggatgctatcct

SEQ ID NO: 93619 - DNA, 60 bp, Artificial
  Synthetic oligonucleotide
atgcgtaataggctgcccataggggcacaaggacctcctgggggacaaccgtccaataac

SEQ ID NO: 93620 - DNA, 60 bp, Artificial
  Synthetic oligonucleotide
gttgtgggttggaagtgatgtccagtttgaggagtgggttggtatgcaggacgttccccg

SEQ ID NO: 93621 - DNA, 60 bp, Artificial
  Synthetic oligonucleotide
ttacgagatcgcaacgagtccgtgtcttgggcatgacgttacggagtggggcccggatac

SEQ ID NO: 93622 - DNA, 60 bp, Artificial
  Synthetic oligonucleotide
ccctccttcatttcctagtcctgcaagcgttgtagaccttgtttgtcacgaaagcatggg

SEQ ID NO: 93623 - DNA, 60 bp, Artificial
  Synthetic oligonucleotide
tgctgaagggactggggatgtatttgtagctgctgacaccggttttaatgggacacaacc

SEQ ID NO: 93624 - DNA, 60 bp, Artificial
  Synthetic oligonucleotide
ggggattagtgcaaggagatgagggtctctgccacttctgcggctttggtgcaggtgtcg

SEQ ID NO: 93625 - DNA, 60 bp, Artificial
  Synthetic oligonucleotide
ggcgtgtcaggagaaccgtgccagtatttgggaggatatggactttacgtccaccaactt

SEQ ID NO: 93626 - DNA, 60 bp, Artificial
  Synthetic oligonucleotide
cactggcgcttcgggtgtacgggtgttccacgtgtccatgcaaggtgtttagcaaatgtg

SEQ ID NO: 93627 - DNA, 60 bp, Artificial
  Synthetic oligonucleotide
ctatacggaacacaaccgcgattctacattgaacctgcggactggcggtcgttctttcag

SEQ ID NO: 93628 - DNA, 60 bp, Artificial
  Synthetic oligonucleotide
ggcgacgtctgtatgcaacgaacttgcgctaccaaagggtcagctcgacttggcactggg

SEQ ID NO: 93629 - DNA, 60 bp, Artificial
  Synthetic oligonucleotide
gcatagtggtgggcggacagcggtcgaaagactaattgatgatgctgtagaccctgttgg

SEQ ID NO: 93630 - DNA, 60 bp, Artificial
  Synthetic oligonucleotide
aagggattcatgtgccaaaaggcgtgcacaggggcgggatccgccattcggcggccgctt

SEQ ID NO: 93631 - DNA, 60 bp, Artificial
  Synthetic oligonucleotide
gcgggagttggtgcaaggtggttgcaataggaaacggagggcatcttccacgcattccaa

SEQ ID NO: 93632 - DNA, 60 bp, Artificial
  Synthetic oligonucleotide
cttccacgcattccaatgacccagttgctaatatctaccataagccgtgcacagtgccgc

SEQ ID NO: 93633 - DNA, 60 bp, Artificial
  Synthetic oligonucleotide
gcacagtgccgcaaactgtgcacagcggctccatacctcttcctaaagcaatgcgtctgt

SEQ ID NO: 93634 - DNA, 60 bp, Artificial
  Synthetic oligonucleotide
ctgtgcggggcttccaccggagggttggctgggcacagtagcagacaaacttacgatgtt

SEQ ID NO: 93635 - DNA, 60 bp, Artificial
  Synthetic oligonucleotide
ggaggcacccttggggccgcaatctgctgaggataagtacaggtttacaagtagccaggc

SEQ ID NO: 93636 - DNA, 60 bp, Artificial
  Synthetic oligonucleotide
gaagatagccgtgcaagccagcaaaagctctttctgattgaaattgcaaggtctggagag

SEQ ID NO: 93637 - DNA, 60 bp, Artificial
  Synthetic oligonucleotide
ccgtgcacccgtccaaactaaatgtccgccattgctgctaaccagtaactatgaccctcg

SEQ ID NO: 93638 - DNA, 60 bp, Artificial
  Synthetic oligonucleotide
ctggctgcaaccattaacggaatgcaaggctgctttgatagacgatgtaaccttaccttg

SEQ ID NO: 93639 - DNA, 60 bp, Artificial
  Synthetic oligonucleotide
cccgggcgcagggcacgaacaatggcatattgtggaacgaaaacttattcgtgacagtgc

SEQ ID NO: 93640 - DNA, 60 bp, Artificial
  Synthetic oligonucleotide
cgtcactgccaacttgttcgggagtcgaaacatcaagccaggggaaggaaagatcatcgg

SEQ ID NO: 93641 - DNA, 60 bp, Artificial
  Synthetic oligonucleotide
ggcacttcgtaaaaggtagactgcattcaataaccatgtcagaacatattgctgctcaga

SEQ ID NO: 93642 - DNA, 60 bp, Artificial
  Synthetic oligonucleotide
cgatggcagccaagctgcttcagaaactcctccagctacaagagagggagagccagttgt

SEQ ID NO: 93643 - DNA, 60 bp, Artificial
  Synthetic oligonucleotide
cttaaatatggcagccaaggggtatacttcggtggtctatcgatagggactgggtccggc

SEQ ID NO: 93644 - DNA, 60 bp, Artificial
  Synthetic oligonucleotide
gatcaccctggcgttatagctgtccctaaggtctctgcaaatcagtatagatgcttccgc

SEQ ID NO: 93645 - DNA, 60 bp, Artificial
  Synthetic oligonucleotide
gtgccgccgctgtacatcccttcacaagtgacagttgcttcgccatattctacagatgat

SEQ ID NO: 93646 - DNA, 60 bp, Artificial
  Synthetic oligonucleotide
tcaagcctccctgtaacggtcgatgtgtccgctaacccgccacgtgctcttccggaaatc

SEQ ID NO: 93647 - DNA, 60 bp, Artificial
  Synthetic oligonucleotide
cggcctgttcctgtgtctccacctataacacctttaccacctttcccatcaggggtagac

SEQ ID NO: 93648 - DNA, 60 bp, Artificial
  Synthetic oligonucleotide
ttgaagatgatgacacggaggctgtacatgtgggcttggtcaatggtctgcaacatactc

SEQ ID NO: 93649 - DNA, 60 bp, Artificial
  Synthetic oligonucleotide
ggcagagcctaagcagccggtaccaggtacccataatgctccacctcagggtactccatt

SEQ ID NO: 93650 - DNA, 60 bp, Artificial
  Synthetic oligonucleotide
tgcttttactatgttaccagggagcaaatttatgctcgccgctactggcagcagtcgggg

SEQ ID NO: 93651 - DNA, 60 bp, Artificial
  Synthetic oligonucleotide
gactggaaaaattactacgagtgtgtcaggcatgtagaggagtatggcatatctgcaata

SEQ ID NO: 93652 - DNA, 60 bp, Artificial
  Synthetic oligonucleotide
ggggtaggcctagtagctgcaccagcgtttaatcgtggacgggatgctgaggctaactcc

SEQ ID NO: 93653 - DNA, 60 bp, Artificial
  Synthetic oligonucleotide
ataccagcgtgtggagtaacgaggctgcattgcatgggcgggactcttggttcgtggagg

SEQ ID NO: 93654 - DNA, 60 bp, Artificial
  Synthetic oligonucleotide
aggcgaggaggacgtggttgacctgagcctcctacctgactcaccggtccacgagtccac

SEQ ID NO: 93655 - DNA, 60 bp, Artificial
  Synthetic oligonucleotide
aagaggaccaacgcggtggtgaatcaacctgctgctccggcacctgaaagacctgcccga

SEQ ID NO: 93656 - DNA, 60 bp, Artificial
  Synthetic oligonucleotide
ggaccctataaccctgcaggagcttgaggatcttaaccaggtgttggtagccgagcttgg

SEQ ID NO: 93657 - DNA, 60 bp, Artificial
  Synthetic oligonucleotide
tattggttgcggtggtggctacgacggaggcgtagacggggttatctgcttttcagatga

SEQ ID NO: 93658 - DNA, 60 bp, Artificial
  Synthetic oligonucleotide
gaaacttcgtctctacgtttttgcaacccattttggcattcgggcattgcaggatctttt

SEQ ID NO: 93659 - DNA, 60 bp, Artificial
  Synthetic oligonucleotide
gggaaactcccgcgaattgctatgccagcaagaaacagaggagagcgagcaacaagtgca

SEQ ID NO: 93660 - DNA, 60 bp, Artificial
  Synthetic oligonucleotide
aattgctaaaacgaaagtatttcagtcctaaagctatttcacagcttagtccgcggctgc

SEQ ID NO: 93661 - DNA, 60 bp, Artificial
  Synthetic oligonucleotide
gacaaagacttggctggatctcgaggaaacaccgcaggcgcccgccaaaagtctgccaag

SEQ ID NO: 93662 - DNA, 60 bp, Artificial
  Synthetic oligonucleotide
cctcccagattgcgaagtgtgttgtctgcattattttggtacaaaggcagtatgaatccc

SEQ ID NO: 93663 - DNA, 60 bp, Artificial
  Synthetic oligonucleotide
ctcaaactatgataagtcatcaagcagcagaggctacacagttttcattatcaagaatgg

SEQ ID NO: 93664 - DNA, 60 bp, Artificial
  Synthetic oligonucleotide
ctctgaccccacatcccgacggcccagcccatccatctccacagtcaccaccaagcagcg

SEQ ID NO: 93665 - DNA, 60 bp, Artificial
  Synthetic oligonucleotide
gtcaagatccagatccggaggatctcccgacagggttggcattgcgccttctgaagtggg

SEQ ID NO: 93666 - DNA, 60 bp, Artificial
  Synthetic oligonucleotide
agaactaaacgtgcctctgtcacagatatatacaaaggctgcaaagctgctggcacatgc

SEQ ID NO: 93667 - DNA, 60 bp, Artificial
  Synthetic oligonucleotide
ctgtcaccgataacggtaagtatttgttttgagcaccggtgccggttgctaaattactca

SEQ ID NO: 93668 - DNA, 54 bp, Artificial
  Synthetic oligonucleotide
aaaagcacaaaggaaactataagtattttagtagtacctggtcctggatagggg

SEQ ID NO: 93669 - DNA, 60 bp, Artificial
  Synthetic oligonucleotide
cctggtgtgcgtgtaggtggcactccaacagtggttcgccctggggtcatacctgaagtt

SEQ ID NO: 93670 - DNA, 60 bp, Artificial
  Synthetic oligonucleotide
atattgggatagggcactgccatgcgatgatgctggtgaccaacaaggtaaatgtccgcc

SEQ ID NO: 93671 - DNA, 60 bp, Artificial
  Synthetic oligonucleotide
gctagacattatttcactagaggaggagctgtgggtgatgctatacctgatacaacaact

SEQ ID NO: 93672 - DNA, 60 bp, Artificial
  Synthetic oligonucleotide
gtgtcaggaaatcaatttagggcatttcgaatgctgtttccagatcccaatcgatttgca

SEQ ID NO: 93673 - DNA, 60 bp, Artificial
  Synthetic oligonucleotide
cgatttgcattagcagacatgtcagtatacaatcctgacaaggaaaggctggtatgggcc

SEQ ID NO: 93674 - DNA, 60 bp, Artificial
  Synthetic oligonucleotide
gtaccgatgagtacgtggagcggaccaatatattttatcacgccactagtgacagattat

SEQ ID NO: 93675 - DNA, 60 bp, Artificial
  Synthetic oligonucleotide
ccttttacctggtgaaatagaaactattgcagaagtgcatcctgttcctgtgccagatac

SEQ ID NO: 93676 - DNA, 60 bp, Artificial
  Synthetic oligonucleotide
ccctgcagcaccttccatagttaatctgactgacagctctgcagttgaccttttacctgg

SEQ ID NO: 93677 - DNA, 60 bp, Artificial
  Synthetic oligonucleotide
ggtcccactgaagtaataccaattgatacagtcactccaattgaccctgcagcaccttcc

SEQ ID NO: 93678 - DNA, 60 bp, Artificial
  Synthetic oligonucleotide
tgaaatagaagaagcaacaccaccaagacaaaccagcacacctattgaaagaggtaggca

SEQ ID NO: 93679 - DNA, 60 bp, Artificial
  Synthetic oligonucleotide
gcatccctgtcagaccaagtgttagtgtttgaaaatactggaggacaaacaatcggtggg

SEQ ID NO: 93680 - DNA, 60 bp, Artificial
  Synthetic oligonucleotide
ggtgccaaacaagacaaagacttggctggatctcgaggaaacaccgcagcgcccgccaaa

SEQ ID NO: 93681 - DNA, 60 bp, Artificial
  Synthetic oligonucleotide
gaggtaggcaagcgctttcctccattcgaagagccctgtataataggcgcttaacacagc

SEQ ID NO: 93682 - DNA, 60 bp, Artificial
  Synthetic oligonucleotide
cgagggcaaatgagagatatgtcaatgtcatgttggattcatacccgtcttatgtctgta

SEQ ID NO: 93683 - DNA, 60 bp, Artificial
  Synthetic oligonucleotide
gccgaggaaacatggagtttggtgcaaactagccttgaaactgttcgaagtcctcctgaa

SEQ ID NO: 93684 - DNA, 60 bp, Artificial
  Synthetic oligonucleotide
cagatatagttctggaagagctgcaagagcttgctcagcccattgacctgcattgttacg

SEQ ID NO: 93685 - DNA, 60 bp, Artificial
  Synthetic oligonucleotide
gcttcaagaagtccaactgatctgtccacagtgtcgagaggctattcgccatggaggaca

SEQ ID NO: 93686 - DNA, 60 bp, Artificial
  Synthetic oligonucleotide
gccagttttggttgcagcctttgtcagaaactaagcttgctttgctagatgatgctacac

SEQ ID NO: 93687 - DNA, 60 bp, Artificial
  Synthetic oligonucleotide
tctttagacattaaacacagggctccgttacagatcaaatttcctccattaatgattacc

SEQ ID NO: 93688 - DNA, 60 bp, Artificial
  Synthetic oligonucleotide
ggaagggattgtgtagacattgtgaggcgatagaatgattgggaaagaagtaactattcc

SEQ ID NO: 93689 - DNA, 60 bp, Artificial
  Synthetic oligonucleotide
ctctgagcgaacgtttcactgcactgcaagacaagttaatggacatatatgaatcaggcc

SEQ ID NO: 93690 - DNA, 60 bp, Artificial
  Synthetic oligonucleotide
ctacaactgttcagatgctcatggacaggccaaggacaatcgtacagcttacacagcatc

SEQ ID NO: 93691 - DNA, 60 bp, Artificial
  Synthetic oligonucleotide
gagcactggcaactcttaagacaagagcaggtgcttctgaactttgctaggcgaaatggt

SEQ ID NO: 93692 - DNA, 60 bp, Artificial
  Synthetic oligonucleotide
cctgcctctcgaaaacgtgcagcgccgaccaccaaatcggttgcaaagcatagcaaacga

SEQ ID NO: 93693 - DNA, 60 bp, Artificial
  Synthetic oligonucleotide
ggtattttgcgactgggatatcaaccagtcccaagtcttgcaacttcagagaccaaagcc

SEQ ID NO: 93694 - DNA, 60 bp, Artificial
  Synthetic oligonucleotide
gtttcttctgatgcacagctctttaacagacccttctggttgaaacgtgcacaaggccac

SEQ ID NO: 93695 - DNA, 60 bp, Artificial
  Synthetic oligonucleotide
gtatcctttaggacgtaaattcctattccaaacaacactacctgcctctcgaaaacgtgc

SEQ ID NO: 93696 - DNA, 65 bp, Artificial
  Synthetic oligonucleotide
ccaacaccagataattcagttcatgacacttatagatttattaattctgctgctactaaatgtcc

SEQ ID NO: 93697 - DNA, 60 bp, Artificial
  Synthetic oligonucleotide
gctatgaattcaggcattttggaagactggcaattaggttttgtaccaacaccagataat

SEQ ID NO: 93698 - DNA, 60 bp, Artificial
  Synthetic oligonucleotide
ccaagggcctgttgaaagtacactggtggatattaatgtaagggatactccagaattgct

SEQ ID NO: 93699 - DNA, 60 bp, Artificial
  Synthetic oligonucleotide
tgctatagaggattttagtgggtcacagctagtgtttggcaaccctagacggtctaccac

SEQ ID NO: 93700 - DNA, 60 bp, Artificial
  Synthetic oligonucleotide
gttgccaagttaggtaggcctctatattccgaaaccccacaaggctatatacgggtcagt

SEQ ID NO: 93701 - DNA, 60 bp, Artificial
  Synthetic oligonucleotide
caagtaggggcacaagtacacttttataaagatgttagtaccattgattctgaagctcct

SEQ ID NO: 93702 - DNA, 60 bp, Artificial
  Synthetic oligonucleotide
gctattcgccatggaggacaataaaggtactgatgcaggtgcaggatgtagtgattggtt

SEQ ID NO: 93703 - DNA, 60 bp, Artificial
  Synthetic oligonucleotide
ttatatgtgcaggatatacaaggttacactgtagcatacccagaatcacgtgataggcca

SEQ ID NO: 93704 - DNA, 60 bp, Artificial
  Synthetic oligonucleotide
ggaatcaggtgctgattactatttacatccccatttacagcgacgcaagcgcaagcgagc

SEQ ID NO: 93705 - DNA, 60 bp, Artificial
  Synthetic oligonucleotide
gcgtttggggtaggattcaatgaactgactagacaatataagagcaataagacgtgttgc

SEQ ID NO: 93706 - DNA, 60 bp, Artificial
  Synthetic oligonucleotide
catcctttcagataatatccgaatctacacctattgctggtgaggcatccctgtcagacc

SEQ ID NO: 93707 - DNA, 60 bp, Artificial
  Synthetic oligonucleotide
tcctctagaggatcaagggggtcacggggacgaacccccagagggaggggaaaacacaca

SEQ ID NO: 93708 - DNA, 60 bp, Artificial
  Synthetic oligonucleotide
cggaggtacggaaggcgagaatcaagtcccacagagtccaaacgaaagcgacgacggtcc

SEQ ID NO: 93709 - DNA, 60 bp, Artificial
  Synthetic oligonucleotide
ggtcctcgtccaggcaaaagaagcaagggcgaaggtcgcggtccagaacaacatcctctc

SEQ ID NO: 93710 - DNA, 60 bp, Artificial
  Synthetic oligonucleotide
tgttactagctccacgccgccagaatccccaggacgagaaagagcttccccagagtccac

SEQ ID NO: 93711 - DNA, 60 bp, Artificial
  Synthetic oligonucleotide
gcaaatttgtatacaatgtggaaatatgtgtattatttggactctgaggacagatggcaa

SEQ ID NO: 93712 - DNA, 60 bp, Artificial
  Synthetic oligonucleotide
ccccgaccacgaactcccacaacaaaccagtgacgaaaccaaccgaaagcggaggtacgg

SEQ ID NO: 93713 - DNA, 60 bp, Artificial
  Synthetic oligonucleotide
agaaagagcttccccagagtccaccgctcacaccaagaccaccgcccgttccagcgcctc

SEQ ID NO: 93714 - DNA, 60 bp, Artificial
  Synthetic oligonucleotide
tcagtaccggccgtggtacaggaggtgcaactggatacgtccccttaagtgaagggcctg

SEQ ID NO: 93715 - DNA, 60 bp, Artificial
  Synthetic oligonucleotide
gcctgctttggttcctgaagttattgggcctgcagaattgctacccgtagataccatagc

SEQ ID NO: 93716 - DNA, 60 bp, Artificial
  Synthetic oligonucleotide
cagtcagtaggtagagctgaagaaatcgagttgcaagaattccctagtagatattcattt

SEQ ID NO: 93717 - DNA, 60 bp, Artificial
  Synthetic oligonucleotide
atattcttgcaatggtgcgtgccaaaagaacaaagagagattctgcaactaatatttaca

SEQ ID NO: 93718 - DNA, 60 bp, Artificial
  Synthetic oligonucleotide
ggcagacatcttaatggcggcagtaagtaaacctcagaccattacagagcttgctaggtg

SEQ ID NO: 93719 - DNA, 60 bp, Artificial
  Synthetic oligonucleotide
gctcattagtgtctagtgatgctcagttgtttaataggcccttctggctccaacgcgcac

SEQ ID NO: 93720 - DNA, 60 bp, Artificial
  Synthetic oligonucleotide
ttttttaaagatgcaaaatgatgtttatggggattcttgctttttttttgctcgcagaga

SEQ ID NO: 93721 - DNA, 60 bp, Artificial
  Synthetic oligonucleotide
ccatgtgtaggtgaacactgggatgttgcacctaaatgtgatggagccaatgaccaaaat

SEQ ID NO: 93722 - DNA, 60 bp, Artificial
  Synthetic oligonucleotide
gacatcagtctggagaagcggcaacatttgatatgtcaactatggtacaatgggcgtttg

SEQ ID NO: 93723 - DNA, 60 bp, Artificial
  Synthetic oligonucleotide
gttgcagaggaacaaatactgtctgaaccaccaaagcttagaagcactgtagcagctttg

SEQ ID NO: 93724 - DNA, 60 bp, Artificial
  Synthetic oligonucleotide
gcagagttgacgcggcagtataaaagtaataagacatgttgtaacgattgggtgattgca

SEQ ID NO: 93725 - DNA, 60 bp, Artificial
  Synthetic oligonucleotide
ggacagtggagtagagctgaacttaacaaatgaagttgaagatattgttacacaggtgga

SEQ ID NO: 93726 - DNA, 60 bp, Artificial
  Synthetic oligonucleotide
atgaacccctcactgctagaggaatggcaattagggtttgtcccaactccagacaatccg

SEQ ID NO: 93727 - DNA, 60 bp, Artificial
  Synthetic oligonucleotide
ggtcatgggttgccgcagatggcacagagcgtctaggcaggtccagagtgctcgtaagtt

SEQ ID NO: 93728 - DNA, 60 bp, Artificial
  Synthetic oligonucleotide
gctaaactagcacctgatgatgttaatgcaactgcctggttggcacataataatcaagct

SEQ ID NO: 93729 - DNA, 60 bp, Artificial
  Synthetic oligonucleotide
cagttagtggacgaaatacagggagacttggaagattattggaagaagctcgcgatcccc

SEQ ID NO: 93730 - DNA, 60 bp, Artificial
  Synthetic oligonucleotide
gggacggtggcatatctcctggggacgtgggaagatcagttcagacagttagtggacgaa

SEQ ID NO: 93731 - DNA, 60 bp, Artificial
  Synthetic oligonucleotide
gcaccagatcagcctcacaaacccgatcaaaacaatccaagtgtgctagggacggtggca

SEQ ID NO: 93732 - DNA, 54 bp, Artificial
  Synthetic oligonucleotide
acaccagttgccagagtacaaagcacggatgaatatgtacaaaggaccaatatt

SEQ ID NO: 93733 - DNA, 60 bp, Artificial
  Synthetic oligonucleotide
cctctacttacacagtacctcgctttgaaaccccaagaaatgctacatattacacacaag

SEQ ID NO: 93734 - DNA, 60 bp, Artificial
  Synthetic oligonucleotide
agcagattgggaaaacgagccactattcgtacacgctcgggggcccaaattgggtcacag

SEQ ID NO: 93735 - DNA, 60 bp, Artificial
  Synthetic oligonucleotide
cagagttggaatcataccctgaggcacatacagaggatgcattattagatgaagcagtag

SEQ ID NO: 93736 - DNA, 60 bp, Artificial
  Synthetic oligonucleotide
gttccaacacgctcggatttggcgcatcctaccacatttggcgccttttctgctggcaag

SEQ ID NO: 93737 - DNA, 60 bp, Artificial
  Synthetic oligonucleotide
gacttggagcagggaaattccagagaactatttcaacaacaagagttagaagacagcgag

SEQ ID NO: 93738 - DNA, 52 bp, Artificial
  Synthetic oligonucleotide
ggacacaattagaactgagtgaccaagaagacgagggagaggatggagactc

SEQ ID NO: 93739 - DNA, 59 bp, Artificial
  Synthetic oligonucleotide
atttctgtatcaggcaaatcttgtacaatcaccagctaaacggtcatcatctatttctc

SEQ ID NO: 93740 - DNA, 60 bp, Artificial
  Synthetic oligonucleotide
gctgttatactttgctaggcaaaatggtgttttaagacttgggtatcagccagtaccacc

SEQ ID NO: 93741 - DNA, 60 bp, Artificial
  Synthetic oligonucleotide
gcatgatgttacagctgcagtcattacaaaagtcagcctatgcatctgaaaagtggactt

SEQ ID NO: 93742 - DNA, 60 bp, Artificial
  Synthetic oligonucleotide
gattagagcaagtagagggagaaggacattggtcctctatagtaaaatttattagatacc

SEQ ID NO: 93743 - DNA, 60 bp, Artificial
  Synthetic oligonucleotide
agcatcagccacgtatgaatttgataattacttgaatgatagtgttgttggctgggcaat

SEQ ID NO: 93744 - DNA, 55 bp, Artificial
  Synthetic oligonucleotide
gtagaggcttggaaatagggcggggccaacctttaggtgttggtactactgggca

SEQ ID NO: 93745 - DNA, 60 bp, Artificial
  Synthetic oligonucleotide
ggcggacaataaaggtagtggtcctgaagggttaagtgattggtgtttattagaagcgga

SEQ ID NO: 93746 - DNA, 60 bp, Artificial
  Synthetic oligonucleotide
ggaaaagaggtcactctgcaagacattgtgttagggttgacaccaccagagcctgttgca

SEQ ID NO: 93747 - DNA, 60 bp, Artificial
  Synthetic oligonucleotide
gcctgcaagaacagctttcaagattattgtgttctgcggcggaggctgtggatcccgact

SEQ ID NO: 93748 - DNA, 60 bp, Artificial
  Synthetic oligonucleotide
aaattgaaaagcttgatatctgtggtagatctctattgttttacaaagtgaggaggggct

SEQ ID NO: 93749 - DNA, 60 bp, Artificial
  Synthetic oligonucleotide
ggagacttttatttgcaccctagctacctcggtattcgcaggaaacgtaaacgcatgcac

SEQ ID NO: 93750 - DNA, 60 bp, Artificial
  Synthetic oligonucleotide
tcttttcagatgtctatgtggcggcctagtgactccaaggtctacctaccacctgtccct

SEQ ID NO: 93751 - DNA, 60 bp, Artificial
  Synthetic oligonucleotide
tattaaaggcagtggaagcaatgtcaagcttgccagccacgtgttttaccccacacctag

SEQ ID NO: 93752 - DNA, 60 bp, Artificial
  Synthetic oligonucleotide
tcagtcccattgcccctgcagaaagcatcgagttgcagcccctgtcatctcagggagagc

SEQ ID NO: 93753 - DNA, 60 bp, Artificial
  Synthetic oligonucleotide
acgtgtccctggatgcaccagtggctgaatcgcctgtgcaccctggagtgcctctaaggc

SEQ ID NO: 93754 - DNA, 60 bp, Artificial
  Synthetic oligonucleotide
cctccgtctggctccttgcaggacacctataggtttgtgacgtctgccgccatcacctgt

SEQ ID NO: 93755 - DNA, 60 bp, Artificial
  Synthetic oligonucleotide
cacgctggcagttccagacttctggctgttggacatccctactatgctgtaaagaagggc

SEQ ID NO: 93756 - DNA, 60 bp, Artificial
  Synthetic oligonucleotide
gggtatggcgctatggactttaatgcactgcaggccaacaaatcagatgttcctatagac

SEQ ID NO: 93757 - DNA, 60 bp, Artificial
  Synthetic oligonucleotide
ccacaaccgcaaccggtcgaccttatgtgttatgagcaattatctgacagctcagaggat

SEQ ID NO: 93758 - DNA, 60 bp, Artificial
  Synthetic oligonucleotide
tgaaaagcaaagacacgtggaccaaggacaaaggttccacagaatagcgggacagtggac

SEQ ID NO: 93759 - DNA, 59 bp, Artificial
  Synthetic oligonucleotide
tggtcatccactgctgaacaaactagatgacacggaaaatggccctaaagtggccgggg

SEQ ID NO: 93760 - DNA, 60 bp, Artificial
  Synthetic oligonucleotide
gacagtggaccggaaggtgcttgatgtgctggagaccaacagtacctgagacccagccag

SEQ ID NO: 93761 - DNA, 60 bp, Artificial
  Synthetic oligonucleotide
cacgcattgaggtatatgattttgcacggtgggatttaagattggtgcatagacaaggca

SEQ ID NO: 93762 - DNA, 60 bp, Artificial
  Synthetic oligonucleotide
ttatgtatgtgtgcatgttgtacgtgattttgtatttcctgtgttgtgcgtgtcactgtt

SEQ ID NO: 93763 - DNA, 60 bp, Artificial
  Synthetic oligonucleotide
gaaatggtgcagtgggcatacgaccacgactttacagatgacagtgtgatagcgtacgag

SEQ ID NO: 93764 - DNA, 60 bp, Artificial
  Synthetic oligonucleotide
gaggcggacaactggggtctgcactataccgttgctggggaaaaggtgtactatgtgcag

SEQ ID NO: 93765 - DNA, 60 bp, Artificial
  Synthetic oligonucleotide
atggggggtttgaaattagcacatctgaagttagcacacccgctgtcctggatgtgtcta

SEQ ID NO: 93766 - DNA, 60 bp, Artificial
  Synthetic oligonucleotide
ctggcacggtttaagtgtggcaaaaacagactaacagtttctaaatgcatgagcacgctg

SEQ ID NO: 93767 - DNA, 60 bp, Artificial
  Synthetic oligonucleotide
gcggactgcaacacatcaacccatcacccccccccgccaaccccagcgccaaggaaaacg

SEQ ID NO: 93768 - DNA, 60 bp, Artificial
  Synthetic oligonucleotide
gtcccagattaaatgaaataagtttaaaccaaggcagcggacaggcaaaacggagactgt

SEQ ID NO: 93769 - DNA, 60 bp, Artificial
  Synthetic oligonucleotide
ccccgttgcttttgatacacctgcatgccctcagtgtggtttacagcagaatgatgtaaa

SEQ ID NO: 93770 - DNA, 60 bp, Artificial
  Synthetic oligonucleotide
tgctgcgtttaaagccaccagcagggcgcgcacgtaaatgtaaacagctgagacggcggc

SEQ ID NO: 93771 - DNA, 56 bp, Artificial
  Synthetic oligonucleotide
attgttgctgctacgcttgtaaaccgccaccattctgctgtttctggttgtgtttt

SEQ ID NO: 93772 - DNA, 60 bp, Artificial
  Synthetic oligonucleotide
ccgtgtatgcctcagtgttgctgcttatgctgttgttctgggtgtccatagtgaacccgt

SEQ ID NO: 93773 - DNA, 60 bp, Artificial
  Synthetic oligonucleotide
gctgagacggcggcgcagataataaacgtcacacaataaagcgtcatgaagcatgcacac

SEQ ID NO: 93774 - DNA, 60 bp, Artificial
  Synthetic oligonucleotide
gtgggcggcaaaagcgtgcatctgccacgcagctgtaccaaacctgcaaggcggcaggca

SEQ ID NO: 93775 - DNA, 60 bp, Artificial
  Synthetic oligonucleotide
ttgggcaaacaaaaccacaacactgctaatcctctggcttcctgcctctcctactgctgc

SEQ ID NO: 93776 - DNA, 60 bp, Artificial
  Synthetic oligonucleotide
ccgagtgtttcgagtgcgtttgcctgaccccaataagtttggccttccagatgctaactt

SEQ ID NO: 93777 - DNA, 60 bp, Artificial
  Synthetic oligonucleotide
gagtttacaaaattcggagtataacaatgaggagtggacgctgcaagatgccagcttgga

SEQ ID NO: 93778 - DNA, 60 bp, Artificial
  Synthetic oligonucleotide
cggtggctctgatgtgcacgttagtgtgacctcctttacaaaccctacctttactgagcc

SEQ ID NO: 93779 - DNA, 60 bp, Artificial
  Synthetic oligonucleotide
aaagtatgcgtggtcgcacccgagtgagtaactgtgtgtgtccggcgtgtagtttctgtc

SEQ ID NO: 93780 - DNA, 60 bp, Artificial
  Synthetic oligonucleotide
gccaccctgcaattttcccactctgacattcaccagccgccagatcctgacttccttgac

SEQ ID NO: 93781 - DNA, 60 bp, Artificial
  Synthetic oligonucleotide
ccacccctgcgcgactggtgacatatgacaaccctgcatatgagggtgtggacgatgcca

SEQ ID NO: 93782 - DNA, 60 bp, Artificial
  Synthetic oligonucleotide
ccatggacacatttgtaataactggagaccacaactataacacaaccagcacacccattc

SEQ ID NO: 93783 - DNA, 60 bp, Artificial
  Synthetic oligonucleotide
ggggaaaaggaaatccttgcaccactggcgctgcaggtgactgccctgcacttgagcttg

SEQ ID NO: 93784 - DNA, 60 bp, Artificial
  Synthetic oligonucleotide
caccgtgcgctttagccgattaggccagcgggcaacactaaccacgcgcagtggtaagcg

SEQ ID NO: 93785 - DNA, 60 bp, Artificial
  Synthetic oligonucleotide
tgacattgtggcattgcacaggcccgccttgacctcacgtaagggcaccgtgcgctttag

SEQ ID NO: 93786 - DNA, 60 bp, Artificial
  Synthetic oligonucleotide
ggcttcctgcctctcctactgctgcatacctgtggttgtgctttggcgctccctggtgac

SEQ ID NO: 93787 - DNA, 60 bp, Artificial
  Synthetic oligonucleotide
gggaggtgcatgttggtgggacggtaatgcattattctgactctgtgtctagcgctaccc

SEQ ID NO: 93788 - DNA, 60 bp, Artificial
  Synthetic oligonucleotide
gcgagccaaacgaattgcccaggaccattcacgaactatgcgagcagcgtgaggagaccc

SEQ ID NO: 93789 - DNA, 60 bp, Artificial
  Synthetic oligonucleotide
ccctgaaggtacaccaggggaaggggtggggtgtacggggtggtttaatgtggaggctat

SEQ ID NO: 93790 - DNA, 60 bp, Artificial
  Synthetic oligonucleotide
aagtgtgcagacaggggacgaggcacctggggcgttgttgcacgcacaggaaacacaagc

SEQ ID NO: 93791 - DNA, 60 bp, Artificial
  Synthetic oligonucleotide
gtggttagtagccacgaagagttacgtgtgctagaggacctgctgatgggcacgcttgac

SEQ ID NO: 93792 - DNA, 60 bp, Artificial
  Synthetic oligonucleotide
gagcactggaaatgtgtgcgccaagaatgtgcagtgttgtataaggcacgggaagtaggg

SEQ ID NO: 93793 - DNA, 60 bp, Artificial
  Synthetic oligonucleotide
ggaggtgggcaaaccatgcaagtgagaaagcaattgtaactgtgacatttgcaaatgagc

SEQ ID NO: 93794 - DNA, 60 bp, Artificial
  Synthetic oligonucleotide
ccccattgcttattacctcaaacaccaatgcaggtcaggatgacaggtggatgtatttgc

SEQ ID NO: 93795 - DNA, 60 bp, Artificial
  Synthetic oligonucleotide
ggaccgccaaatacaggtaaatcctactttggcatgagcttaatacatttcttgcaaggg

SEQ ID NO: 93796 - DNA, 60 bp, Artificial
  Synthetic oligonucleotide
ggagcacaaacatgacactgtgtgcatccactgcctccacagttactacaccatataata

SEQ ID NO: 93797 - DNA, 60 bp, Artificial
  Synthetic oligonucleotide
gtggatctgcacacaacaacgctacagggagttccggtgacagtgactatacgcctatag

SEQ ID NO: 93798 - DNA, 60 bp, Artificial
  Synthetic oligonucleotide
aacgtgtggtcatcgcctgcaaagcgagtgcgtcggtcagactcaggtggagatccagtg

SEQ ID NO: 93799 - DNA, 60 bp, Artificial
  Synthetic oligonucleotide
gaggtggctgcagcgccagaccaggattttgcagatgtcagggaattaggacgagctcgg

SEQ ID NO: 93800 - DNA, 60 bp, Artificial
  Synthetic oligonucleotide
ggggacctccagatacaggaaagtcttatatttgttcttcacttacacggtttatgcagg

SEQ ID NO: 93801 - DNA, 52 bp, Artificial
  Synthetic oligonucleotide
agctgcagaaaccatacaactaagaacattaggcgagtcttcccacgatttt

SEQ ID NO: 93802 - DNA, 60 bp, Artificial
  Synthetic oligonucleotide
cctccacgtaccagtacacctggggagggatttcaacgtgttacaacacgggcaagggaa

SEQ ID NO: 93803 - DNA, 60 bp, Artificial
  Synthetic oligonucleotide
ttgacttcttaggacgtccttcccgcgctgtacaatttgaatttgaaaatcccgcctttt

SEQ ID NO: 93804 - DNA, 60 bp, Artificial
  Synthetic oligonucleotide
tcttggtactgcaagagtgccagcgtctacacctggaacagttataaaacccacacgacc

SEQ ID NO: 93805 - DNA, 60 bp, Artificial
  Synthetic oligonucleotide
gacaataacttgacaactgaatctgaaatagcttataaatatgcattgttagctgattct

SEQ ID NO: 93806 - DNA, 60 bp, Artificial
  Synthetic oligonucleotide
atgtcaacttggtgctgactgccctcctgatgtacgaaataaagtagaaggaaccacact

SEQ ID NO: 93807 - DNA, 60 bp, Artificial
  Synthetic oligonucleotide
ggaagctgtcacaatttcacctcagagacaaagcaaaaggagattatttgaggacagtgg

SEQ ID NO: 93808 - DNA, 60 bp, Artificial
  Synthetic oligonucleotide
gaatgtacaagaacaacaattaatgtgtgatccaccaaaatctagaagtaccccaacagc

SEQ ID NO: 93809 - DNA, 60 bp, Artificial
  Synthetic oligonucleotide
cgacgccgaagatccaacgagcaacaaagagaactatcctccagagagtcgccccgtacc

SEQ ID NO: 93810 - DNA, 60 bp, Artificial
  Synthetic oligonucleotide
ccagaaatagctgcaagcgtgttaaatgtggttcatccttcttctgagtggactattttg

SEQ ID NO: 93811 - DNA, 60 bp, Artificial
  Synthetic oligonucleotide
ctcctgttaccagctcctcaaaacaatcctccgacgactacacttccaaagccgggcagc

SEQ ID NO: 93812 - DNA, 60 bp, Artificial
  Synthetic oligonucleotide
aaagatatgtcaatttctgagtggatatggaaatgttgcgatgattgtaatcaagagggc

SEQ ID NO: 93813 - DNA, 60 bp, Artificial
  Synthetic oligonucleotide
attgggaatatatttactatcaggatgatattgaacaatggcacaggaccagaggagagg

SEQ ID NO: 93814 - DNA, 60 bp, Artificial
  Synthetic oligonucleotide
gttgatcctcagggagcaggagatagaataagttttggagaagaaatagagttaggccct

SEQ ID NO: 93815 - DNA, 60 bp, Artificial
  Synthetic oligonucleotide
ctgagactctgtaaagtgcctttgaatccagatgttctagctcatttaaatgtaatggac

SEQ ID NO: 93816 - DNA, 60 bp, Artificial
  Synthetic oligonucleotide
ccttggtggttatagttacttccctacaccaagtggttctgtagcttctagtgataatca

SEQ ID NO: 93817 - DNA, 60 bp, Artificial
  Synthetic oligonucleotide
taatgatgaggtgactatgcagtttgagcaagatttgcaagaggtggctgcagcgccaga

SEQ ID NO: 93818 - DNA, 60 bp, Artificial
  Synthetic oligonucleotide
cctttgaaaagccaggacagaacggttgctgacctaagtccaaggttggaagctgtcaca

SEQ ID NO: 93819 - DNA, 60 bp, Artificial
  Synthetic oligonucleotide
cttggcattgcatatcgagactataagaaacaatcacttggcacactctcggatttaaca

SEQ ID NO: 93820 - DNA, 60 bp, Artificial
  Synthetic oligonucleotide
cggtgacagcggtcctggattgggtgcaagtgaaattgatatagtttcagaaccaagacc

SEQ ID NO: 93821 - DNA, 60 bp, Artificial
  Synthetic oligonucleotide
attccatcgcaacctgtaggaggtcggttacctgtggacattatagatgccagtgcttcc

SEQ ID NO: 93822 - DNA, 60 bp, Artificial
  Synthetic oligonucleotide
ggccctattaatcagcctgctcaatttgaaatagaagaacctccacgtaccagtacacct

SEQ ID NO: 93823 - DNA, 60 bp, Artificial
  Synthetic oligonucleotide
ccagtttaagcaaatcccaatatgcttcagaactatggggtttaacagatacaagtgcag

SEQ ID NO: 93824 - DNA, 61 bp, Artificial
  Synthetic oligonucleotide
cagcaataacattttcagatataagtgctgcagatttaaatgtatttgttgatcctcaggg

SEQ ID NO: 93825 - DNA, 60 bp, Artificial
  Synthetic oligonucleotide
cccttataaacagtatacattttggacaatagatttgcaagaacgtttttctaacgaatt

SEQ ID NO: 93826 - DNA, 61 bp, Artificial
  Synthetic oligonucleotide
ggcctaatacctgacaatatactagaggatgaatttacagaaaactttaataatgcacagc

SEQ ID NO: 93827 - DNA, 60 bp, Artificial
  Synthetic oligonucleotide
tcgcatttgggtcttcaacccttaccagctttgcaagtatcagagtacaaagccaagcag

SEQ ID NO: 93828 - DNA, 60 bp, Artificial
  Synthetic oligonucleotide
cttggcacactctcggatttaacaagcattgctggacacttaccaaccgtaactggttaa

SEQ ID NO: 93829 - DNA, 60 bp, Artificial
  Synthetic oligonucleotide
aactggttaaaaaagagcgccaaaggggaaacaggcaaccgttttcgttctcctgaagga

SEQ ID NO: 93830 - DNA, 60 bp, Artificial
  Synthetic oligonucleotide
gttttgactcactctctttgttagaaaccatttccgttctgtggatatgcgccagaccaa

SEQ ID NO: 93831 - DNA, 60 bp, Artificial
  Synthetic oligonucleotide
tccagagagtcgccccgtaccaaaagacgcagagtacccgacgaagtcgaccgacagagt

SEQ ID NO: 93832 - DNA, 55 bp, Artificial
  Synthetic oligonucleotide
cttcctagaagcggtatatcaagacttgcaagacttcaaggagaagctcgggatc

SEQ ID NO: 93833 - DNA, 58 bp, Artificial
  Synthetic oligonucleotide
tctaactcgtattcctttgagttctctttctgtacgctgttttgattgccttacattg

SEQ ID NO: 93834 - DNA, 66 bp, Artificial
  Synthetic oligonucleotide
gagcaagattcaaaggacattcaggcccaaatacaatattgggatttaaatagaaaactatatgtc

SEQ ID NO: 93835 - DNA, 60 bp, Artificial
  Synthetic oligonucleotide
cccaattaaattaacacagtctataattcaggacggtgaaatgtgcgatacaggctttgg

SEQ ID NO: 93836 - DNA, 60 bp, Artificial
  Synthetic oligonucleotide
ctcacaagagggagtctctagctctaccacgtcgccgagtgctgttcgattacgacgccg

SEQ ID NO: 93837 - DNA, 60 bp, Artificial
  Synthetic oligonucleotide
cgacatggcagatcctaataaaggtattaattctcttgaattaaatgaggggcatagcga

SEQ ID NO: 93838 - DNA, 60 bp, Artificial
  Synthetic oligonucleotide
cacccgatggtgatcctgaggaggaggagcactatccctatacaatagacacctgttgca

SEQ ID NO: 93839 - DNA, 59 bp, Artificial
  Synthetic oligonucleotide
tgaacactgggatattgctaaaccttgtgatcctgctccagcaaaaggatcctgtcccc

SEQ ID NO: 93840 - DNA, 60 bp, Artificial
  Synthetic oligonucleotide
cacgggcaagggaattatataatagatttgtgcagcaacagccaacacaaaatattgact

SEQ ID NO: 93841 - DNA, 60 bp, Artificial
  Synthetic oligonucleotide
cagctggacaattgtatcttccaccaagcaagcctgttgctcgtgtactcagtacggatg

SEQ ID NO: 93842 - DNA, 60 bp, Artificial
  Synthetic oligonucleotide
tttatgatgacttttatttacatcctcatcttcttaggcgacgcaaacgaaaacggttgg

SEQ ID NO: 93843 - DNA, 64 bp, Artificial
  Synthetic oligonucleotide
gacagtggttcaaataatattactgtacctaaatgtagtggaaatcagtttagagttatgcgac

SEQ ID NO: 93844 - DNA, 60 bp, Artificial
  Synthetic oligonucleotide
gagaaatgattggtaatcagcctaatgttaataaccttgatgtaaatttggaggagttgg

SEQ ID NO: 93845 - DNA, 59 bp, Artificial
  Synthetic oligonucleotide
agacagagctgtctttaacccagaaagagagagattagtctggagattggaaggccttg

SEQ ID NO: 93846 - DNA, 56 bp, Artificial
  Synthetic oligonucleotide
tatttagatgggtagacatagacgtaccagaatcttctagacataaattgttagtt

SEQ ID NO: 93847 - DNA, 60 bp, Artificial
  Synthetic oligonucleotide
gcagattaggaacaaaaggaacaatgaaaacacgaagtggactaactattggtcagaaag

SEQ ID NO: 93848 - DNA, 60 bp, Artificial
  Synthetic oligonucleotide
tgacagccagaggagacgagcagcatgaatcaggccgatctgaccgagcgttccgatgca

SEQ ID NO: 93849 - DNA, 60 bp, Artificial
  Synthetic oligonucleotide
gagagagatacagactctgatatatcggatttgttagatgatactgaactggagcagggc

SEQ ID NO: 93850 - DNA, 60 bp, Artificial
  Synthetic oligonucleotide
ggatatacactaaaatcaatgaagtagaaggggaagggcactggtcagatatagtaaagt

SEQ ID NO: 93851 - DNA, 59 bp, Artificial
  Synthetic oligonucleotide
tcttacaaagttatagctccgtgcggttgcaggaactgtgaggtcaagcttcgcatttt

SEQ ID NO: 93852 - DNA, 60 bp, Artificial
  Synthetic oligonucleotide
gcagcccgaagtgctaccagttgacctgttttgtgaagaggaattaccaaacgagcagga

SEQ ID NO: 93853 - DNA, 60 bp, Artificial
  Synthetic oligonucleotide
gtaaagaggtcaccgtgcaagatattattctggagctcagtgaggtgcagcccgaagtgc

SEQ ID NO: 93854 - DNA, 60 bp, Artificial
  Synthetic oligonucleotide
ccggagatctgcagctcctgtgccctgactgtcgcggaaactgcaaacatgacggatcct

SEQ ID NO: 93855 - DNA, 60 bp, Artificial
  Synthetic oligonucleotide
ctgcaacccctttcagagtgcaagatagctctattggatgatgtaacagacccttgttgg

SEQ ID NO: 93856 - DNA, 60 bp, Artificial
  Synthetic oligonucleotide
agactcgggcccttacaagcagatcgcgatccagaggaaggtccccaaccacctgcagaa

SEQ ID NO: 93857 - DNA, 60 bp, Artificial
  Synthetic oligonucleotide
cagcgagcgtttcaatgctctgcaagatcagctaatgaacatttatgaagctgcagaaca

SEQ ID NO: 93858 - DNA, 60 bp, Artificial
  Synthetic oligonucleotide
gcaaggcttgctcccgaagacgcgaatgcagtagcttggcttgcacataacaaccaggcc

SEQ ID NO: 93859 - DNA, 60 bp, Artificial
  Synthetic oligonucleotide
taactgagtctactccagcacaaggggaatcgtctcttgcagatcacgttttggtgacat

SEQ ID NO: 93860 - DNA, 60 bp, Artificial
  Synthetic oligonucleotide
gcctattcctccaacacgggtcagggtttcacgcacacagtatcacaatccatcttttca

SEQ ID NO: 93861 - DNA, 60 bp, Artificial
  Synthetic oligonucleotide
acaggttccagtgctgttttagaggttgccccagagcctattcctccaacacgggtcagg

SEQ ID NO: 93862 - DNA, 60 bp, Artificial
  Synthetic oligonucleotide
caccctcatgacagtacaggggacttttatttacatcccagtcttcacaggcgcaaacgt

SEQ ID NO: 93863 - DNA, 60 bp, Artificial
  Synthetic oligonucleotide
gggtgctacagggtacgtgccacttggggaaggtcctggtgtccgtgtcggaggaacccc

SEQ ID NO: 93864 - DNA, 60 bp, Artificial
  Synthetic oligonucleotide
ggcagtgctggtgtattttttggtggccttggtattagtacaggccgaggaactgggggt

SEQ ID NO: 93865 - DNA, 60 bp, Artificial
  Synthetic oligonucleotide
accctgacaaagaacgtttggtttgggcctgtagaggcttagaaataggtaggggccagc

SEQ ID NO: 93866 - DNA, 60 bp, Artificial
  Synthetic oligonucleotide
cctggtgaagtgggagggtcacttcgatcagttagttcaaagcatacaggacgacttgga

SEQ ID NO: 93867 - DNA, 60 bp, Artificial
  Synthetic oligonucleotide
gctgatggccaagctcaaaagactataggaaattccatgtatttcccaactgttagtggc

SEQ ID NO: 93868 - DNA, 60 bp, Artificial
  Synthetic oligonucleotide
gcataggagagcattgggataaagctgttccatgtgcagaaaatgatcagcaaactggcc

SEQ ID NO: 93869 - DNA, 60 bp, Artificial
  Synthetic oligonucleotide
ggcacaggtattggcacagatcaatgcaatgaactcttcgttattggaggattggcagtt

SEQ ID NO: 93870 - DNA, 60 bp, Artificial
  Synthetic oligonucleotide
aacggtaagttgcaatttccttgtaccaggtgcggtattgggatttcacaattataatgg

SEQ ID NO: 93871 - DNA, 60 bp, Artificial
  Synthetic oligonucleotide
agcttgtgaattcgactacaaaaggcttagtctaatttggaaagattattgtgtgtttgc

SEQ ID NO: 93872 - DNA, 60 bp, Artificial
  Synthetic oligonucleotide
cggccggatgacgagggaggttcaggggacgtagatatacattacactgcattgttgcgt

SEQ ID NO: 93873 - DNA, 60 bp, Artificial
  Synthetic oligonucleotide
aaacatttagaagcgctccagaaggtcacttcaaaaaaggccccctccctgtagaagtta

SEQ ID NO: 93874 - DNA, 60 bp, Artificial
  Synthetic oligonucleotide
ggcgggaaaaaatcgcgggacagttcataagttaattacctcaatgttaaatgtgcatga

SEQ ID NO: 93875 - DNA, 60 bp, Artificial
  Synthetic oligonucleotide
ccaaaattgagaaatacagccgctgcattgttctggtataagggttgtatgggatcgggg

SEQ ID NO: 93876 - DNA, 60 bp, Artificial
  Synthetic oligonucleotide
atgtactgtttgctgacgatgcgaaaagatatggtacaactggagaatgggaagtaaaag

SEQ ID NO: 93877 - DNA, 59 bp, Artificial
  Synthetic oligonucleotide
tgtcaccagctccacgcctccagggtcgccaggaggacaagcagacacaaacaccaccc

SEQ ID NO: 93878 - DNA, 60 bp, Artificial
  Synthetic oligonucleotide
agaaggtacggacggaggccctccagcaagtcaaggagatcgcaaacgcagcaaaggcga

SEQ ID NO: 93879 - DNA, 60 bp, Artificial
  Synthetic oligonucleotide
ccacgccgcagcagtactccattgccacgcaatcaatctgtaggccgtaggaggggtttc

SEQ ID NO: 93880 - DNA, 60 bp, Artificial
  Synthetic oligonucleotide
aggtccccaaccacctgcagaaggggaggtggaaggtcacccaggcggcgatcaaggtca

SEQ ID NO: 93881 - DNA, 60 bp, Artificial
  Synthetic oligonucleotide
aacggtggaagatttcagtgggtctcagctggttataggtaatcgaaggagcacaaactc

SEQ ID NO: 93882 - DNA, 60 bp, Artificial
  Synthetic oligonucleotide
gagtaagcaggttggggactcgagccactattcgcactcgctctggtgcacagatagggt

SEQ ID NO: 93883 - DNA, 60 bp, Artificial
  Synthetic oligonucleotide
tccaagctgggttacaacaaacgaccgttaacggtacaaaagcagtgtcttataaagggt

SEQ ID NO: 93884 - DNA, 60 bp, Artificial
  Synthetic oligonucleotide
ggacctatgtgtattatatggatgcggatgataagtggcataaggcaagaagtggggtga

SEQ ID NO: 93885 - DNA, 60 bp, Artificial
  Synthetic oligonucleotide
ggactcagaacagaccgtgttcgttataacatgctcggattagggacctccccaaagaag

SEQ ID NO: 93886 - DNA, 60 bp, Artificial
  Synthetic oligonucleotide
gtttgtttactctgactaagtataagtcttccaaggataccgaccgcacccggtacactc

SEQ ID NO: 93887 - DNA, 60 bp, Artificial
  Synthetic oligonucleotide
gctcaaagcagctattgcaacagcattgtgactatatctgggtccgtgggataggtgcaa

SEQ ID NO: 93888 - DNA, 60 bp, Artificial
  Synthetic oligonucleotide
gtgaaagatgcatgcacaatgtgtagacattataaacgagcagagcaggcacaaatgtct

SEQ ID NO: 93889 - DNA, 60 bp, Artificial
  Synthetic oligonucleotide
gaaatgcattagacggtaatcaaatatgtatagatagaaaacacaggccattactgcagt

SEQ ID NO: 93890 - DNA, 60 bp, Artificial
  Synthetic oligonucleotide
ggcatgatagtgtggaacagcgggcacaatttctagccactgtacatattcctaagggca

SEQ ID NO: 93891 - DNA, 60 bp, Artificial
  Synthetic oligonucleotide
tagggtggtttcatactgtggtaggtgctgtcgtgcagttaggcttgtggtggaaagcga

SEQ ID NO: 93892 - DNA, 60 bp, Artificial
  Synthetic oligonucleotide
tacagaaggcaggcgatttcataaaatagcaggccattggcgcggtgcttgcctacagtg

SEQ ID NO: 93893 - DNA, 60 bp, Artificial
  Synthetic oligonucleotide
tgtcctgcagctacagccagaggttgttgacctgtattgtcacgagcaatttgccagctc

SEQ ID NO: 93894 - DNA, 60 bp, Artificial
  Synthetic oligonucleotide
ttctccaaggaagcagtaatatatggggacacaggcatctgggaagtacatgtgggttca

SEQ ID NO: 93895 - DNA, 60 bp, Artificial
  Synthetic oligonucleotide
gcacccaggacaccgagcaagaccaagtacccactattaaacctactgaccacggacccg

SEQ ID NO: 93896 - DNA, 60 bp, Artificial
  Synthetic oligonucleotide
ggtataccaaagaaaagctgtttagtattttatgggcctgcagacactggcaaatcctat

SEQ ID NO: 93897 - DNA, 60 bp, Artificial
  Synthetic oligonucleotide
atggccgactgtgaaggtacaggtactgatgatgatgggggcgaagcgggaacaggcgcg

SEQ ID NO: 93898 - DNA, 60 bp, Artificial
  Synthetic oligonucleotide
agacagacagcggacccttgagcagcccgattctacaaaagcaccacagcagctggcacg

SEQ ID NO: 93899 - DNA, 60 bp, Artificial
  Synthetic oligonucleotide
attgtcccgtaaaagggttgcagcatctaccacatccaccgcccccaaacgtaaacgtgt

SEQ ID NO: 93900 - DNA, 60 bp, Artificial
  Synthetic oligonucleotide
ccttctacctctcgtgcttcccctacaagctctctttatgcatccacacctagtgggtcc

SEQ ID NO: 93901 - DNA, 60 bp, Artificial
  Synthetic oligonucleotide
gcgtcggagggaacaggcaatgaacctataagtagtacacctattcctggggtacgcagg

SEQ ID NO: 93902 - DNA, 60 bp, Artificial
  Synthetic oligonucleotide
accccccctgtccggtgacgccttactgaccagtgaccatgccctgcctttggcccctgg

SEQ ID NO: 93903 - DNA, 60 bp, Artificial
  Synthetic oligonucleotide
gcacaggccggcccttactgcccgtaaaggtacggtacgtttcagtcgtttaggacaaaa

SEQ ID NO: 93904 - DNA, 60 bp, Artificial
  Synthetic oligonucleotide
tcatgacattagccctatacaacccaccgaacacttagaactgcagccactagggcgggc

SEQ ID NO: 93905 - DNA, 58 bp, Artificial
  Synthetic oligonucleotide
ttttgcagatggctttgtggcggcctagtgacagcaaggtatacctgcctcctgcccc

SEQ ID NO: 93906 - DNA, 60 bp, Artificial
  Synthetic oligonucleotide
aacaggcgcgggagggtggttttttgtagaagctattgtggacagatgtaccggcccaca

SEQ ID NO: 93907 - DNA, 60 bp, Artificial
  Synthetic oligonucleotide
gcaccaacgaaacccaagtgtcgaccccgccatttaagcgacagcgactcggagacagac

SEQ ID NO: 93908 - DNA, 60 bp, Artificial
  Synthetic oligonucleotide
cccctcaaacaggtgaggtttcgggacatattttggttagtacctctacatctggcaccc

SEQ ID NO: 93909 - DNA, 60 bp, Artificial
  Synthetic oligonucleotide
ggtagacacaggttttggggcaatggattttgcagccctgcaaacaaataggtctgacgt

SEQ ID NO: 93910 - DNA, 60 bp, Artificial
  Synthetic oligonucleotide
gtgctaccaaaactgttgagtctacatataaagcctctagtttcatggaatatttgagac

SEQ ID NO: 93911 - DNA, 60 bp, Artificial
  Synthetic oligonucleotide
aagcaatgcctggttcagcagatttagctatgtccagcggggacgcataccccaccaacc

SEQ ID NO: 93912 - DNA, 60 bp, Artificial
  Synthetic oligonucleotide
ccgtgcaatacccattgtttggggcatatagttgtgctgactatgttcgcctaagtacgt

SEQ ID NO: 93913 - DNA, 60 bp, Artificial
  Synthetic oligonucleotide
gttgtgtatattgtatgttgttgtgtacgtgtgtatatactgtgcgaccccctggcttcc

SEQ ID NO: 93914 - DNA, 60 bp, Artificial
  Synthetic oligonucleotide
gttgtgtggagaaagtggtttccgtttgctgcatgtgcctgctgtttggaaatagctgga

SEQ ID NO: 93915 - DNA, 60 bp, Artificial
  Synthetic oligonucleotide
cgcctgctgcattatattggtttagggcgagcatgggaaacgcaagtgacatattcgggg

SEQ ID NO: 93916 - DNA, 60 bp, Artificial
  Synthetic oligonucleotide
tgcttcatatcctttccaacacaggtgtgcataccatcataaggtgtgcctggcagttat

SEQ ID NO: 93917 - DNA, 53 bp, Artificial
  Synthetic oligonucleotide
tgtttggactgggtagtatgtgcgtttggtgtgtattgcacggttgcggaggg

SEQ ID NO: 93918 - DNA, 60 bp, Artificial
  Synthetic oligonucleotide
ttagacaccggaacgccagttacagagcaactaatacggtgctacgtgtgtcacaagcca

SEQ ID NO: 93919 - DNA, 57 bp, Artificial
  Synthetic oligonucleotide
caatcccgatacccagcgcttagtgtgggcttgtaagggtcttgaggtaggccgcgg

SEQ ID NO: 93920 - DNA, 60 bp, Artificial
  Synthetic oligonucleotide
gtgtacagacagcaagaagcattagatgacgaggcaattgtgcagcccctaaaacgaaag

SEQ ID NO: 93921 - DNA, 60 bp, Artificial
  Synthetic oligonucleotide
gcaacgaacgatggacattgcgtgacacgagccaggaaatgtgggacgcagtgcctaagc

SEQ ID NO: 93922 - DNA, 60 bp, Artificial
  Synthetic oligonucleotide
caggcagcagcgtcccttacctaactgtgacttgtgactaccacacaaccagccaatact

SEQ ID NO: 93923 - DNA, 59 bp, Artificial
  Synthetic oligonucleotide
tatagacgcggaacgttaagggtacacacctacctgtagtgctggagccctttctatgc

SEQ ID NO: 93924 - DNA, 60 bp, Artificial
  Synthetic oligonucleotide
cgagcaggaggacaatggagacactggccagccgtttagatgcgtgccaggagacgttac

SEQ ID NO: 93925 - DNA, 60 bp, Artificial
  Synthetic oligonucleotide
ggcctctgatccatctattgtgtctttggtagaggattctagtattatagaagcaggagc

SEQ ID NO: 93926 - DNA, 60 bp, Artificial
  Synthetic oligonucleotide
aggtggagcacaataccttggctgataaaatattacgctggggtagtttaggaatatttt

SEQ ID NO: 93927 - DNA, 60 bp, Artificial
  Synthetic oligonucleotide
ttttacagtctcaggccataacctgtcagaaaaacagtcctccccctgcagaaaaaaagg

SEQ ID NO: 93928 - DNA, 60 bp, Artificial
  Synthetic oligonucleotide
ccagcaggcctacacctactactatacccctctgtaactgccacatcagccgtgtctgcc

SEQ ID NO: 93929 - DNA, 60 bp, Artificial
  Synthetic oligonucleotide
gagggaaatatatgtgcaaaacagtacaaatgagacatgggaaaaagtgtgtggcctggt

SEQ ID NO: 93930 - DNA, 60 bp, Artificial
  Synthetic oligonucleotide
aaaatcgtatagttgtccccaaagtgtctggataccaatatagagtgtttcgtgtgcggc

SEQ ID NO: 93931 - DNA, 60 bp, Artificial
  Synthetic oligonucleotide
ggcaaactaaaacataggtgtatgccaggtacgtgtctgtacaacagtgactaattcagg

SEQ ID NO: 93932 - DNA, 60 bp, Artificial
  Synthetic oligonucleotide
ccggctaggggctatatccctaggacggcggtcagctaaagccaaacgacggctgtttga

SEQ ID NO: 93933 - DNA, 60 bp, Artificial
  Synthetic oligonucleotide
ggactgttgaccttaaggaacgattttcatctgaccttgaccagtttcccttgggtcgca

SEQ ID NO: 93934 - DNA, 60 bp, Artificial
  Synthetic oligonucleotide
gaggtgtgtgttgtaagacagtacggctatgtgtgtatagcacgcacacaggcataaggg

SEQ ID NO: 93935 - DNA, 60 bp, Artificial
  Synthetic oligonucleotide
cccagctacaagtagtttggaggacacatataggtttgtacagtcacaggccattgcatg

SEQ ID NO: 93936 - DNA, 60 bp, Artificial
  Synthetic oligonucleotide
gccgccacatcctgccctggtagttttgccagcacatctgcacacccacacatttataac

SEQ ID NO: 93937 - DNA, 59 bp, Artificial
  Synthetic oligonucleotide
ttttactacaggctggcctacgtgcacgtccgcgccttcggcctgtaaagcgtgcagcc

SEQ ID NO: 93938 - DNA, 60 bp, Artificial
  Synthetic oligonucleotide
tatgggcatgcacaggtgtggaggttggtaggggccagccattgggtcttggcctaagtg

SEQ ID NO: 93939 - DNA, 60 bp, Artificial
  Synthetic oligonucleotide
acactgggctaaaggcaacctatgtacacctaatacattggctgctggtgactgtcctcc

SEQ ID NO: 93940 - DNA, 60 bp, Artificial
  Synthetic oligonucleotide
gccctacaaactacatctataccatctcagtatggtaacaccacagttcccctaactgcc

SEQ ID NO: 93941 - DNA, 60 bp, Artificial
  Synthetic oligonucleotide
attgtgtagatatatttgtgtattatggctaaagcaagagccccacgccggaaacgtgca

SEQ ID NO: 93942 - DNA, 60 bp, Artificial
  Synthetic oligonucleotide
ctgcctcctaccccagtttctaaggttgtcagcacggatgaatatgtgactcgcacaagc

SEQ ID NO: 93943 - DNA, 60 bp, Artificial
  Synthetic oligonucleotide
ataagcaaagtattcctaaagtatcaggatatcaatatagggtgtttagggtgcaactac

SEQ ID NO: 93944 - DNA, 60 bp, Artificial
  Synthetic oligonucleotide
tagaacctttggcagatgccaaaatagctatgctagacgatgctacaacacaatgctgga

SEQ ID NO: 93945 - DNA, 60 bp, Artificial
  Synthetic oligonucleotide
ggcctctggcacatgcccttcagatgtaattcctaaggtggagggtacaactatagcaga

SEQ ID NO: 93946 - DNA, 60 bp, Artificial
  Synthetic oligonucleotide
gcgcaatgcattagatggcaatcctatgtgctttgatagaaaacatcgagctatggtgca

SEQ ID NO: 93947 - DNA, 60 bp, Artificial
  Synthetic oligonucleotide
gccccacgccggaaacgtgcatctgcaacacaattatatcaaacatgcaaggcctctggc

SEQ ID NO: 93948 - DNA, 60 bp, Artificial
  Synthetic oligonucleotide
gaccctagcaacacgtttagatgtgtgccaggaaaggcttctagacctatatgaaaaaga

SEQ ID NO: 93949 - DNA, 60 bp, Artificial
  Synthetic oligonucleotide
tattgtgggtacctgccctgtgtgtatatgtgcgccttgccaggcttcttgaacttgacc

SEQ ID NO: 93950 - DNA, 60 bp, Artificial
  Synthetic oligonucleotide
gcattgcaatacaaagcccgggaaatgggatacaaagtgttacagcaccaggcactgcct

SEQ ID NO: 93951 - DNA, 60 bp, Artificial
  Synthetic oligonucleotide
acaggcataagggtactgcaggaactgcttcatcagggcgcactggaaatagtgtgtccc

SEQ ID NO: 93952 - DNA, 60 bp, Artificial
  Synthetic oligonucleotide
cagtgggcttgatatggtggactttattgataatagtgtgtcacaggtagaggggcagga

SEQ ID NO: 93953 - DNA, 60 bp, Artificial
  Synthetic oligonucleotide
cagctgcaggcagatgtagaggcagtgcaacaattaaaacgaaagtatataggcagtccg

SEQ ID NO: 93954 - DNA, 60 bp, Artificial
  Synthetic oligonucleotide
cagaggaggaggggactgggtgtaatggatggttctttgtggaagcaattgtagaacgta

SEQ ID NO: 93955 - DNA, 59 bp, Artificial
  Synthetic oligonucleotide
ggtggagggtacaactatagcagatcaaatcctacgatggggtagtatgggtgtgtttt

SEQ ID NO: 93956 - DNA, 60 bp, Artificial
  Synthetic oligonucleotide
ggatagtgataaactagaggaccaaatagaacattggaaatgcatacgcctggagtgtgc

SEQ ID NO: 93957 - DNA, 57 bp, Artificial
  Synthetic oligonucleotide
tgcaatattcctatgcatagtttgcaacttccttgtgccttttgcaagcggacggtg

SEQ ID NO: 93958 - DNA, 60 bp, Artificial
  Synthetic oligonucleotide
ggtgagcctgtacctaatgacttatacattaagaaatcctcaggtaaccttgacagttct

SEQ ID NO: 93959 - DNA, 60 bp, Artificial
  Synthetic oligonucleotide
gtgcttcacgactataacggcatggcggataaccaaggtacagaggaggaggggactggg

SEQ ID NO: 93960 - DNA, 60 bp, Artificial
  Synthetic oligonucleotide
ttgctacctcaatttgtaaatatcctgattaccttaaaatggctgcagaggcatatgggg

SEQ ID NO: 93961 - DNA, 60 bp, Artificial
  Synthetic oligonucleotide
acattacacacacgtagtggcctgcaacttaaacctcgtgtgcatttttttcaggactta

SEQ ID NO: 93962 - DNA, 58 bp, Artificial
  Synthetic oligonucleotide
cagcccacaatacataatgcacctgatcccgcctttatggacatctttgccttacata

SEQ ID NO: 93963 - DNA, 60 bp, Artificial
  Synthetic oligonucleotide
tgctgcaactcccagtggctctatggtaacatctgaataccaaatatttaataagcccta

SEQ ID NO: 93964 - DNA, 60 bp, Artificial
  Synthetic oligonucleotide
tatggacacttttataattatgcaggaccatataggcacaacaactagcacacctatacc

SEQ ID NO: 93965 - DNA, 60 bp, Artificial
  Synthetic oligonucleotide
agcaccctctgacccttccattgtgtctttagtagaggaatctagtgttgtggatgttgg

SEQ ID NO: 93966 - DNA, 60 bp, Artificial
  Synthetic oligonucleotide
cccagatgttaccctacactttgagcagcccacaatacataatgcacctgatcccgcctt

SEQ ID NO: 93967 - DNA, 60 bp, Artificial
  Synthetic oligonucleotide
ggtgcgtatgggcagcagcatcatattttctcctgcatctgtatctagtaccgaagaggc

SEQ ID NO: 93968 - DNA, 60 bp, Artificial
  Synthetic oligonucleotide
ctgtgatggggagggatggactaaggtgtgcagtaatatagatgcaatgggtatttatta

SEQ ID NO: 93969 - DNA, 60 bp, Artificial
  Synthetic oligonucleotide
aaccgtggacattacaggacacatgcctggaacggtgggatgcaccacctacggggtgct

SEQ ID NO: 93970 - DNA, 60 bp, Artificial
  Synthetic oligonucleotide
ggaagcatctaagtatggggaatatggacagtgggaggtgcgtatgggcagcagcatcat

SEQ ID NO: 93971 - DNA, 60 bp, Artificial
  Synthetic oligonucleotide
ggcacaaggccattgaactgcaacttgcattagagacattgcaaaagacagtatacagca

SEQ ID NO: 93972 - DNA, 58 bp, Artificial
  Synthetic oligonucleotide
tgtcaagctaagtatgtaaaagactgtggaacaatgtgtagacattatataagggcac

SEQ ID NO: 93973 - DNA, 60 bp, Artificial
  Synthetic oligonucleotide
ccagaaacccaaatgttaatagatcctccaaaattacggacgcctgcagcagctttgtat

SEQ ID NO: 93974 - DNA, 60 bp, Artificial
  Synthetic oligonucleotide
gcctagaactgcacgggcaaataaattatagaaggcatcgcgaccgtgcgtgcctgtggg

SEQ ID NO: 93975 - DNA, 60 bp, Artificial
  Synthetic oligonucleotide
ctgacgtggaagctgcggtggaggtaaataccgaggggacagaacaaacagaaacagagc

SEQ ID NO: 93976 - DNA, 60 bp, Artificial
  Synthetic oligonucleotide
aggcgattccactgtgttagaggctattggaagggtaggtgtctacattgctggaagcca

SEQ ID NO: 93977 - DNA, 60 bp, Artificial
  Synthetic oligonucleotide
gcattgggcatgtgtaccaggtaccactaagaataggggcattgtaacaataacctatag

SEQ ID NO: 93978 - DNA, 60 bp, Artificial
  Synthetic oligonucleotide
aaagccaaacgacggctgtttgataaggcccaaccgccgccaaatggccatactgacgtg

SEQ ID NO: 93979 - DNA, 60 bp, Artificial
  Synthetic oligonucleotide
gcagtaacacaacctgacaaacaagcatttaaggtgttaagccagtgtggaggtgtgtgt

SEQ ID NO: 93980 - DNA, 50 bp, Artificial
  Synthetic oligonucleotide
gccacaatttcacctaactgaccaaagctggaaatctttttttgaaaggc

SEQ ID NO: 93981 - DNA, 59 bp, Artificial
  Synthetic oligonucleotide
gagtcactagccgaccgtttagatgcgtgccaggagaaattactagacctctatgaaaa

SEQ ID NO: 93982 - DNA, 60 bp, Artificial
  Synthetic oligonucleotide
caataaagctgagcaaagcacgcttgcagataaaattttaaaatatggctctgctggtgt

SEQ ID NO: 93983 - DNA, 60 bp, Artificial
  Synthetic oligonucleotide
cccaggatgacgaagcaacagtgcaggccctaaaacgaaagtttgtagcgagtcctttgt

SEQ ID NO: 93984 - DNA, 60 bp, Artificial
  Synthetic oligonucleotide
ccgctcaggatgacgaagcaacagtgcaggccctaaaacgaaagtttgtggccagtcctt

SEQ ID NO: 93985 - DNA, 60 bp, Artificial
  Synthetic oligonucleotide
gctcggttagacttacacgagcaggacgaccaggaggacaatggagacattggccagccg

SEQ ID NO: 93986 - DNA, 60 bp, Artificial
  Synthetic oligonucleotide
cagtaaggctggtggtggagagtggacacgcagaactcagagtgctgcaggagcttctgt

SEQ ID NO: 93987 - DNA, 60 bp, Artificial
  Synthetic oligonucleotide
cacaggaagcacagacatatgggaacactggcacctgggaggtgcatgtgggaggacagc

SEQ ID NO: 93988 - DNA, 60 bp, Artificial
  Synthetic oligonucleotide
cctacattgtaacgagcaattagccagctcagaagaggaggataatagggaggacggtga

SEQ ID NO: 93989 - DNA, 60 bp, Artificial
  Synthetic oligonucleotide
tgacctacattgtaacgagcaattagccagctcagaagaggaggataatagggaggacgg

SEQ ID NO: 93990 - DNA, 60 bp, Artificial
  Synthetic oligonucleotide
ctttagcaaccaaatgcccaacaaatgttccacctaaagaaagagaggacccttatgcaa

SEQ ID NO: 93991 - DNA, 60 bp, Artificial
  Synthetic oligonucleotide
cagactctgaagttgctggtttgttggagagagtaagggaggcatgtgttaggtgtggct

SEQ ID NO: 93992 - DNA, 60 bp, Artificial
  Synthetic oligonucleotide
gagactgcaagtgacatttctgacttagtagataatgctcctgtaaacgactgccaggga

SEQ ID NO: 93993 - DNA, 60 bp, Artificial
  Synthetic oligonucleotide
gcaaaggatgaccatgtcagagtggatttctaggcagtgtaaaagtgcacagggagacgg

SEQ ID NO: 93994 - DNA, 60 bp, Artificial
  Synthetic oligonucleotide
gaggacgctgtggtctttgtcgcctttcggtggaaggatgattgggcaagcacccaccat

SEQ ID NO: 93995 - DNA, 60 bp, Artificial
  Synthetic oligonucleotide
gagccctggaccctctcggatactagcagggagcggctgttaacagaaccagcgtactgt

SEQ ID NO: 93996 - DNA, 60 bp, Artificial
  Synthetic oligonucleotide
gaagtgtccacctctgatggtgaccaccaatgtagatgtaataggggattcgcgctggcc

SEQ ID NO: 93997 - DNA, 60 bp, Artificial
  Synthetic oligonucleotide
ctcgctggggaggggctcgcatgatcctcaccttcaaagatcttgagcagagggaggtgt

SEQ ID NO: 93998 - DNA, 60 bp, Artificial
  Synthetic oligonucleotide
gacatgcagaaaattctcctgacccacgagtaaatatggctgtagaccctaagcagaccc

SEQ ID NO: 93999 - DNA, 60 bp, Artificial
  Synthetic oligonucleotide
ggctcgatggtgcaatggcgctgcacatgcaagccagcagtgtcctccaatagagctcaa

SEQ ID NO: 94000 - DNA, 60 bp, Artificial
  Synthetic oligonucleotide
taaaccatctttcttagtcagtccaactctacataagtcttcagttagtaaagtctcctc

SEQ ID NO: 94001 - DNA, 60 bp, Artificial
  Synthetic oligonucleotide
tgtattgcagggtggaggcactaagcgtgcaagggtgactaccacagtgtccagagaaaa

SEQ ID NO: 94002 - DNA, 55 bp, Artificial
  Synthetic oligonucleotide
tccaaacttgcaaaggcctagcccgcaggtgttcccagagtttgaaggcgtgcat

SEQ ID NO: 94003 - DNA, 60 bp, Artificial
  Synthetic oligonucleotide
ggtgcaggaccccactttcttaagtcatccgaggtcactggtaaccttccaaaacccagt

SEQ ID NO: 94004 - DNA, 60 bp, Artificial
  Synthetic oligonucleotide
gtgaccacagatgcacagcctgcagtgctggaagttgtccctgaaacccgagagcccaga

SEQ ID NO: 94005 - DNA, 60 bp, Artificial
  Synthetic oligonucleotide
gttttacctgccaccacaacccacaacgcgtgtgttgcacaccgatgagtatgtcaccag

SEQ ID NO: 94006 - DNA, 60 bp, Artificial
  Synthetic oligonucleotide
gcgatcgccttctgaccgtcggccatcccttctatgacatctacaaagagcaggaagtga

SEQ ID NO: 94007 - DNA, 60 bp, Artificial
  Synthetic oligonucleotide
ttacaacatgaagctgacggtactgttgaacaggggcaaatccaggtagaggcttccaca

SEQ ID NO: 94008 - DNA, 60 bp, Artificial
  Synthetic oligonucleotide
tgggccaatggcctgtgtgcgcgcgctctctaaatttgcaccagtgccagcactgcactt

SEQ ID NO: 94009 - DNA, 60 bp, Artificial
  Synthetic oligonucleotide
gttaagctaccacagacaatacaaacagctgtcaccgcacacattctgattatcttttac

SEQ ID NO: 94010 - DNA, 60 bp, Artificial
  Synthetic oligonucleotide
ggcgacatgtctttgggagagcaatctgggcaagccgtcatttcctctggcacgagcgac

SEQ ID NO: 94011 - DNA, 60 bp, Artificial
  Synthetic oligonucleotide
cggctctcatgctgctttgtttcaaatatcagaagagtagggaaacggtaatgaagttgc

SEQ ID NO: 94012 - DNA, 60 bp, Artificial
  Synthetic oligonucleotide
gcctgtacgtgtttggagggcattcatggcgcgaccatcttcagtacaaggtctttgcgc

SEQ ID NO: 94013 - DNA, 60 bp, Artificial
  Synthetic oligonucleotide
gcctgccttgcaggcggcgaagacatctcgcatctccgaagtcttctcaccagagtacag

SEQ ID NO: 94014 - DNA, 60 bp, Artificial
  Synthetic oligonucleotide
gcagacaatacacgtgggacccctttgactattaatgtggggcccgacgacagggcagag

SEQ ID NO: 94015 - DNA, 60 bp, Artificial
  Synthetic oligonucleotide
tctgattgctggcgcatttacttttggcgcgtttcctgagtggatagccaagcagacgtt

SEQ ID NO: 94016 - DNA, 60 bp, Artificial
  Synthetic oligonucleotide
cagatgtaatccctgtggacgctgtggatcctttggggcctgcagtgcttccaggcagaa

SEQ ID NO: 94017 - DNA, 60 bp, Artificial
  Synthetic oligonucleotide
gacagtgcagacctgactgatcaaattgagcactggcacctcaacaggagggagcagacc

SEQ ID NO: 94018 - DNA, 60 bp, Artificial
  Synthetic oligonucleotide
agtacctcctcacccaccggaccccgagactcccctgggtcggggtctgccgcatccacc

SEQ ID NO: 94019 - DNA, 60 bp, Artificial
  Synthetic oligonucleotide
cccgtctgcggaagaagttggaaaagcgtctgaaacagttccaagagggtctacaacaag

SEQ ID NO: 94020 - DNA, 60 bp, Artificial
  Synthetic oligonucleotide
gcagtgcctttggatattgcagacacacagtgcaaataccctgactacattaaaatggca

SEQ ID NO: 94021 - DNA, 60 bp, Artificial
  Synthetic oligonucleotide
aggggtccaagccagcaacaacacaacaaccgttgtaagtttaacacagtttaagtctac

SEQ ID NO: 94022 - DNA, 60 bp, Artificial
  Synthetic oligonucleotide
atgaggagtgtgaaattgcttatcagtacgcttctcttgctgacacagaggaaaatgcag

SEQ ID NO: 94023 - DNA, 60 bp, Artificial
  Synthetic oligonucleotide
agctccctccctggtcacttgtcctccaacctcctcccccaaatataactggtctctctc

SEQ ID NO: 94024 - DNA, 60 bp, Artificial
  Synthetic oligonucleotide
gctaccggtgttggctgttttcccggaccgaaagagttactcatagaccggaggcgatcg

SEQ ID NO: 94025 - DNA, 60 bp, Artificial
  Synthetic oligonucleotide
ctctggcaccatgctccaaactctgtgaacgaacgatcaaccacttgtaacaaacactct

SEQ ID NO: 94026 - DNA, 60 bp, Artificial
  Synthetic oligonucleotide
gctgcgacgtgattggcaagttgcctgattggctgactcgcctcactgtgctcagtcacc

SEQ ID NO: 94027 - DNA, 60 bp, Artificial
  Synthetic oligonucleotide
ctctttaacagagcttactttctcaggaactctcagggtcccaacaatggagtgctgtgg

SEQ ID NO: 94028 - DNA, 60 bp, Artificial
  Synthetic oligonucleotide
gtcagagtatatttacaaaaggtgctgtaaagttgaaggctcaggcgattggaagcatat

SEQ ID NO: 94029 - DNA, 60 bp, Artificial
  Synthetic oligonucleotide
atggctgacgaggacgtgatattcgtggaccgactgcgagctccgtggtgtatcctttgc

SEQ ID NO: 94030 - DNA, 60 bp, Artificial
  Synthetic oligonucleotide
cgtgctggctgcttttagcgggtgcagacaggggtaggggtgtattagatcaggggcgat

SEQ ID NO: 94031 - DNA, 60 bp, Artificial
  Synthetic oligonucleotide
gggtgaagtgtatgtgcaggatttgttgggtgcttggcacaaatgtcctagccatgttgt

SEQ ID NO: 94032 - DNA, 60 bp, Artificial
  Synthetic oligonucleotide
caggggcgataatcatgagtgcactggctcaaagataaggttaagggcgggttgtgggag

SEQ ID NO: 94033 - DNA, 60 bp, Artificial
  Synthetic oligonucleotide
tagcaataagacttgcactcagcactgggttgtagctgtgtttggaccgaacagtgacat

SEQ ID NO: 94034 - DNA, 60 bp, Artificial
  Synthetic oligonucleotide
cttgctggaactatatggactgttatatgaggacagctttagatggaaacgcagtgtctg

SEQ ID NO: 94035 - DNA, 60 bp, Artificial
  Synthetic oligonucleotide
ccccaagcccagataaagaattaagcccgagattagcattagtgtcaatttctgctagcc

SEQ ID NO: 94036 - DNA, 60 bp, Artificial
  Synthetic oligonucleotide
ggatgtggaagctgaatgtgatgagcctgacaatctttgtgacttagaagcttgttttga

SEQ ID NO: 94037 - DNA, 60 bp, Artificial
  Synthetic oligonucleotide
ttgaggaggggaattcttcggaactcttacacaataatcatatgctagccaaagatggtg

SEQ ID NO: 94038 - DNA, 60 bp, Artificial
  Synthetic oligonucleotide
gcatgccaagaacagatgctggaattgattgagaaggacagtcaagaattagaggaccaa

SEQ ID NO: 94039 - DNA, 60 bp, Artificial
  Synthetic oligonucleotide
ctgtatgtgcttggtgtcagagtcacctgcgcctgagtgtgtcaacgtccgattccagcc

SEQ ID NO: 94040 - DNA, 60 bp, Artificial
  Synthetic oligonucleotide
ccctgcaaagttcagaatttggtagagacccctggacactgccccagacaagccttgagg

SEQ ID NO: 94041 - DNA, 60 bp, Artificial
  Synthetic oligonucleotide
gggtcttgcaaagtcctgtgtggacgcgcacaatcctgatattgatgagcactgccctcc

SEQ ID NO: 94042 - DNA, 60 bp, Artificial
  Synthetic oligonucleotide
taaggttaagggcgggttgtgggaggatatttattggggaatgcgtgcagagggtgcttg

SEQ ID NO: 94043 - DNA, 60 bp, Artificial
  Synthetic oligonucleotide
agatatggacagacagtctgcagcggcccccttgtactttgctactcccagtgggtcttt

SEQ ID NO: 94044 - DNA, 60 bp, Artificial
  Synthetic oligonucleotide
aggccattgaaattggtagaggaggcccattaggtgtaggatgcacaggccatccctttt

SEQ ID NO: 94045 - DNA, 60 bp, Artificial
  Synthetic oligonucleotide
cagtaggccctgtagagcctattggacctggcacacccactgtcatagatgcaactcccc

SEQ ID NO: 94046 - DNA, 60 bp, Artificial
  Synthetic oligonucleotide
attgaaatgggtagctgggttcttatacttaggcacattagggattgggactgggagggg

SEQ ID NO: 94047 - DNA, 60 bp, Artificial
  Synthetic oligonucleotide
cattagggattgggactgggaggggcacaggggggcgaggagggtatgtgcccattggac

SEQ ID NO: 94048 - DNA, 60 bp, Artificial
  Synthetic oligonucleotide
gtggaacaactccagtaaagtttatctgccaccaacgcagcctattgcaagagtactgtc

SEQ ID NO: 94049 - DNA, 60 bp, Artificial
  Synthetic oligonucleotide
cggatcagcccgacactaatccttccagctggcacgaaccctcggactttaatccctgaa

SEQ ID NO: 94050 - DNA, 60 bp, Artificial
  Synthetic oligonucleotide
acactgactgatgtcagaccaactgacccttctgtgtttgaaccagggggggaagacatt

SEQ ID NO: 94051 - DNA, 60 bp, Artificial
  Synthetic oligonucleotide
ggtcgcacctaattcgtttggaatgctagaatgcaaccgcgcccggttggcagctcctct

SEQ ID NO: 94052 - DNA, 60 bp, Artificial
  Synthetic oligonucleotide
ccccaaacccatttgacaatgcagacctcggcaacactgtctctgaaactgcagacttac

SEQ ID NO: 94053 - DNA, 60 bp, Artificial
  Synthetic oligonucleotide
tacttgtcatgctgcagcggttccgtatgtaaacttgtgtaaataaacttatcaattccc

SEQ ID NO: 94054 - DNA, 60 bp, Artificial
  Synthetic oligonucleotide
aggacagcaaaagccaaataccagttaaaatcccagtgcatgtagacccgtcagatgtag

SEQ ID NO: 94055 - DNA, 60 bp, Artificial
  Synthetic oligonucleotide
ttggacagtttagctactaagtgcccagccgatgtagtgccagagaaaaaggatccgtat

SEQ ID NO: 94056 - DNA, 60 bp, Artificial
  Synthetic oligonucleotide
caagattgacactgaaaaccctaataaatatccaaagacagacaaggatgatcgcatgca

SEQ ID NO: 94057 - DNA, 60 bp, Artificial
  Synthetic oligonucleotide
ggtcagagtgaacggctcataactgttggtcatccattttacccagtttacaatgaggaa

SEQ ID NO: 94058 - DNA, 60 bp, Artificial
  Synthetic oligonucleotide
cagcactttctccaatcctcaaggcgtattggactctgggcctgtcataatagagtctga

SEQ ID NO: 94059 - DNA, 60 bp, Artificial
  Synthetic oligonucleotide
gtggagcccctttgagagatatttccatgaactgtcgctattgcttagctgtgctaactt

SEQ ID NO: 94060 - DNA, 60 bp, Artificial
  Synthetic oligonucleotide
gagctgatgtttgttttagaagtgggaaaaattgaattaaatggcacagtactagctcat

SEQ ID NO: 94061 - DNA, 60 bp, Artificial
  Synthetic oligonucleotide
cctcaggagagcagcctccagaagggattgtgcttgaattgcacccacttaatacaggca

SEQ ID NO: 94062 - DNA, 55 bp, Artificial
  Synthetic oligonucleotide
aaaacttttaagaaatggaataatgggaagaagcgttcgtttggctgctgcgaga

SEQ ID NO: 94063 - DNA, 60 bp, Artificial
  Synthetic oligonucleotide
gctcctcttaacctgcaggtgcaccagttccgagccaaatagcaagatcggatcagcccg

SEQ ID NO: 94064 - DNA, 60 bp, Artificial
  Synthetic oligonucleotide
gagctcacaaaccatggcaggtgatgaccactaacggcacccttttgcactctcctagtg

SEQ ID NO: 94065 - DNA, 60 bp, Artificial
  Synthetic oligonucleotide
tgacagtcgtttgcacaccctgtgcccgaaatggcagaagataaaggtactaaaggcggt

SEQ ID NO: 94066 - DNA, 60 bp, Artificial
  Synthetic oligonucleotide
ggctttccttttggggatcgcctgcaggagggcctgaacggggacggagaagacggagtg

SEQ ID NO: 94067 - DNA, 60 bp, Artificial
  Synthetic oligonucleotide
catggctcaaaactaataaccaggccaaatatgttagagactgtggtaacatggtccggc

SEQ ID NO: 94068 - DNA, 60 bp, Artificial
  Synthetic oligonucleotide
ctagctcagcgctttacagctcgtcctcgaacgaccctaaagagaccaggtgtgagaaaa

SEQ ID NO: 94069 - DNA, 60 bp, Artificial
  Synthetic oligonucleotide
gtgctcagtcaccaaggcgccacagaagcatttgagctttcgagaatggtgcagtgggct

SEQ ID NO: 94070 - DNA, 60 bp, Artificial
  Synthetic oligonucleotide
gcgcctggccactatcctgtcctaattggcaaaggaaggccaaactgtctgaagtgctgg

SEQ ID NO: 94071 - DNA, 53 bp, Artificial
  Synthetic oligonucleotide
tagaggaagtccccttaacaagcacacctgaaaatcctgcaaggcctgctggg

SEQ ID NO: 94072 - DNA, 60 bp, Artificial
  Synthetic oligonucleotide
ccctacaactgacctgccaactgtgggagagcccaacatagatttcactgaaacctcctt

SEQ ID NO: 94073 - DNA, 60 bp, Artificial
  Synthetic oligonucleotide
tccacctattcgctgacatgagcaccatagaagagctcccattggaggaaacaatcgaac

SEQ ID NO: 94074 - DNA, 60 bp, Artificial
  Synthetic oligonucleotide
tatatgctaggcacatgttttctagagtgggaaaaaatggagaagagtatcctcaccctg

SEQ ID NO: 94075 - DNA, 60 bp, Artificial
  Synthetic oligonucleotide
ccgcctttgaaggggatgtaggggtgtcagaggaaatgatgcaaaccagagacttgggtg

SEQ ID NO: 94076 - DNA, 60 bp, Artificial
  Synthetic oligonucleotide
aatttcaaggcattgagcctataaggtttgttaacagtatgcggcagtggttacgtggcg

SEQ ID NO: 94077 - DNA, 60 bp, Artificial
  Synthetic oligonucleotide
gctaatagtccttctcaagtcagcctccaggtacatgggaaagaaaatgggaggagccag

SEQ ID NO: 94078 - DNA, 60 bp, Artificial
  Synthetic oligonucleotide
cttgtaagaggctgcttgagaggacggtgctacgagtgcactaaggatggtgcacggacc

SEQ ID NO: 94079 - DNA, 60 bp, Artificial
  Synthetic oligonucleotide
gcagggatactgttcgaaagctgtttgcaagcattctcaatgtccatcctgagcagctgc

SEQ ID NO: 94080 - DNA, 60 bp, Artificial
  Synthetic oligonucleotide
cgcacgtattatgtgactgtcgcttgtccctgctccactcggctgaacttcgctgtgagc

SEQ ID NO: 94081 - DNA, 60 bp, Artificial
  Synthetic oligonucleotide
gcctccacgcatacgtgacataagcactggtcatgatcattataatcccgacagcacatc

SEQ ID NO: 94082 - DNA, 60 bp, Artificial
  Synthetic oligonucleotide
ctaactgctccttgctctgattgctagatcttctacggtgctgtactactctgcacagta

SEQ ID NO: 94083 - DNA, 60 bp, Artificial
  Synthetic oligonucleotide
ctatttcagtcgcagatactacactcagctacctacgtctgatcctgatcctggcgctgc

SEQ ID NO: 94084 - DNA, 60 bp, Artificial
  Synthetic oligonucleotide
caaaggcgtttgaacctgagctgcccacggatgcaccacctacacatgcagatgctgagg

SEQ ID NO: 94085 - DNA, 60 bp, Artificial
  Synthetic oligonucleotide
tgcaagggccctctgggagggttggtgttagcagaattgcgcgtcccacagctatgggaa

SEQ ID NO: 94086 - DNA, 60 bp, Artificial
  Synthetic oligonucleotide
gctgatgagtgtggcctctactacacagacatgacggcagttcgccattattatgacttc

SEQ ID NO: 94087 - DNA, 60 bp, Artificial
  Synthetic oligonucleotide
ggagctagtcccaacagtgctggaggaaggggaagtgattacaacagtggcagagtcaca

SEQ ID NO: 94088 - DNA, 60 bp, Artificial
  Synthetic oligonucleotide
tcacattgcacctccggccgctgatacagccaagcgaacatggaagtctgccctccctga

SEQ ID NO: 94089 - DNA, 60 bp, Artificial
  Synthetic oligonucleotide
tatttaatcgtccatattggctatatcgtgctcagggaatgaacaatggtatatgctgga

SEQ ID NO: 94090 - DNA, 60 bp, Artificial
  Synthetic oligonucleotide
atcaagctaaaatggtaaaagactgtgcaactatggttaggcattataagcgtgcagaag

SEQ ID NO: 94091 - DNA, 60 bp, Artificial
  Synthetic oligonucleotide
aaaggagcaagtttatgtgcgacacgtatggtctagaggcgggacagataaggaagcccc

SEQ ID NO: 94092 - DNA, 60 bp, Artificial
  Synthetic oligonucleotide
ggtgcattccgtccctctgctgtcgaggaaagctctttgggaacaggtgtaggtattcac

SEQ ID NO: 94093 - DNA, 60 bp, Artificial
  Synthetic oligonucleotide
tggtttagactcactttctcgcctgcaacgctaacatacgggactttaccacagtggatc

SEQ ID NO: 94094 - DNA, 60 bp, Artificial
  Synthetic oligonucleotide
ctgtgccctcttctgacgagtcagtaacagattatgacagcgcaaagatcaatgtatatc

SEQ ID NO: 94095 - DNA, 60 bp, Artificial
  Synthetic oligonucleotide
agacgaccggaggactcgcccgacagagccgtccctcctccttctccagggacaccctcc

SEQ ID NO: 94096 - DNA, 60 bp, Artificial
  Synthetic oligonucleotide
aagagttaagcgtgccaacccctatgatctgtacaggacttgcaagcaagcaggaacctg

SEQ ID NO: 94097 - DNA, 60 bp, Artificial
  Synthetic oligonucleotide
ggaagatacctaccgttatctagaatcgccagccactaagtgtgcagataatgtgtctcc

SEQ ID NO: 94098 - DNA, 60 bp, Artificial
  Synthetic oligonucleotide
ctttggatccactgcatccatcagcagcaccgcaggtaggggcacagcagccataaagcc

SEQ ID NO: 94099 - DNA, 60 bp, Artificial
  Synthetic oligonucleotide
gggagacggttcctagctcagcaaggtttaggatgcacaacaatagtgcgcaggcgagct

SEQ ID NO: 94100 - DNA, 60 bp, Artificial
  Synthetic oligonucleotide
ctaccatgcagaaactgaacggctgcttactgtaggccacccattttaccctattcaagt

SEQ ID NO: 94101 - DNA, 60 bp, Artificial
  Synthetic oligonucleotide
gcccagagaaaggctcctgtcctgcactagagctaaagcataaacctatagaggatggag

SEQ ID NO: 94102 - DNA, 60 bp, Artificial
  Synthetic oligonucleotide
ctgcagattttcaaatcctgtgtcctacctgtgcaaagcggccatgagtgacgaaccagg

SEQ ID NO: 94103 - DNA, 60 bp, Artificial
  Synthetic oligonucleotide
ggggtcgtgatgcatggacattgcttgatgtcagctatgaaagatacctcatggagccta

SEQ ID NO: 94104 - DNA, 60 bp, Artificial
  Synthetic oligonucleotide
ccaatatagagcattcatggtgcagcttccagatcctaatcagtttgcattgcctgacag

SEQ ID NO: 94105 - DNA, 60 bp, Artificial
  Synthetic oligonucleotide
gggttatagctgcttatggaccttctgaaactatgtttgaagccagctttgaactactca

SEQ ID NO: 94106 - DNA, 60 bp, Artificial
  Synthetic oligonucleotide
gaccacagcgtcagtgagcagaaagacagtcaaaggatggtgctggatatacttaagtct

SEQ ID NO: 94107 - DNA, 60 bp, Artificial
  Synthetic oligonucleotide
ggaaacacaaaactgctgtgcaaatgaaagctccaccccttttagtgactagtaacatcg

SEQ ID NO: 94108 - DNA, 60 bp, Artificial
  Synthetic oligonucleotide
acagcaggattgtgagcttttacttcaaggagacatgcacaacagctaacggtgagccta

SEQ ID NO: 94109 - DNA, 60 bp, Artificial
  Synthetic oligonucleotide
caggatgctgagcagtaaattcttgggaaaacagtgcttatggtgcagggtagaattaac

SEQ ID NO: 94110 - DNA, 60 bp, Artificial
  Synthetic oligonucleotide
agaaaactagctttaagtcccagttctgacgcctcacccgaaattgatcagctcagccca

SEQ ID NO: 94111 - DNA, 60 bp, Artificial
  Synthetic oligonucleotide
ctattctgggaagctgtgaggactgaaaatggactgttgtatgctgctagacagaagggt

SEQ ID NO: 94112 - DNA, 60 bp, Artificial
  Synthetic oligonucleotide
tgctgggcatgatctagaggattttgtcgataatgcaactgtgtttcagggaaaccaccg

SEQ ID NO: 94113 - DNA, 60 bp, Artificial
  Synthetic oligonucleotide
atagggttgcaggtatctcgtggacagcctctaggcggggcaatcagtggtcatacatca

SEQ ID NO: 94114 - DNA, 60 bp, Artificial
  Synthetic oligonucleotide
tactcgcccgtctccctacggtgcagaccagtgccaaggggttttactacgctgcgattc

SEQ ID NO: 94115 - DNA, 60 bp, Artificial
  Synthetic oligonucleotide
gaagagacgccgccgtcgccagactcaacagacatagtttctgcacctgcaacgcctccg

SEQ ID NO: 94116 - DNA, 60 bp, Artificial
  Synthetic oligonucleotide
tggcgcctcaaaataaaatccagacgtcttgacgccagctgtggaaaaaaagggtcgtgt

SEQ ID NO: 94117 - DNA, 60 bp, Artificial
  Synthetic oligonucleotide
gataatgatcctgcaaataggacgtggtatacagcctggagccttttgtacatgcgcact

SEQ ID NO: 94118 - DNA, 60 bp, Artificial
  Synthetic oligonucleotide
ggttctgtctgctaaagcaaatcccacgcacaccgggagcggtctccgtcggggtcttaa

SEQ ID NO: 94119 - DNA, 60 bp, Artificial
  Synthetic oligonucleotide
gggacatagagacaagtacctacattgcacaaccacctggtggactgttggtgacgaggg

SEQ ID NO: 94120 - DNA, 60 bp, Artificial
  Synthetic oligonucleotide
tgctcaagttcacaaccgtctgcgtttcattaaaaccacagtacctttcacggttaggtt

SEQ ID NO: 94121 - DNA, 60 bp, Artificial
  Synthetic oligonucleotide
tactatacagccagacttctgatgggactctgctgttgcaagcttggcatgcagcatccc

SEQ ID NO: 94122 - DNA, 60 bp, Artificial
  Synthetic oligonucleotide
gggctaggcattgggacaggtcaaggaaagccagtctcaggtgggtatgttcctctgcgg

SEQ ID NO: 94123 - DNA, 60 bp, Artificial
  Synthetic oligonucleotide
cagactctgccccaagtgggaatgtgttaggggggctagacgtcagcacagacagctctg

SEQ ID NO: 94124 - DNA, 60 bp, Artificial
  Synthetic oligonucleotide
cggccatgagtgacgaaccaggtagctcggggattgggaaagggtctgagtttattttgc

SEQ ID NO: 94125 - DNA, 60 bp, Artificial
  Synthetic oligonucleotide
acctctcttccagcagtatgcatcctaaccccttatttcaacagttggaacctgcagcta

SEQ ID NO: 94126 - DNA, 60 bp, Artificial
  Synthetic oligonucleotide
acaaagctccgattgtttgtagtagcgacagagagtgggattcgggaatttcaagaactt

SEQ ID NO: 94127 - DNA, 60 bp, Artificial
  Synthetic oligonucleotide
gtagaaagaaaggctacatgagattagggtatcagcccctgccaccacttgcagtgtcag

SEQ ID NO: 94128 - DNA, 60 bp, Artificial
  Synthetic oligonucleotide
gatcgggacactgattcggacatatcagatttagttgataatgcagacctggagcaggga

SEQ ID NO: 94129 - DNA, 60 bp, Artificial
  Synthetic oligonucleotide
tcggggacctaatccttctgtgtccggagtgccgaagagcacatctacagcccaatggcg

SEQ ID NO: 94130 - DNA, 60 bp, Artificial
  Synthetic oligonucleotide
ggaaaaagggcttcagcttatttggaagggagactttgtgtatggctgttgtagatgctg

SEQ ID NO: 94131 - DNA, 60 bp, Artificial
  Synthetic oligonucleotide
tccaaacccctttccccttaaacccgataatacacctgaatttgagcttactgaccaaag

SEQ ID NO: 94132 - DNA, 60 bp, Artificial
  Synthetic oligonucleotide
gtcaattagacctaagtgaccaagaagaagagggcagtgatggagaacctcagcgagcgt

SEQ ID NO: 94133 - DNA, 60 bp, Artificial
  Synthetic oligonucleotide
gtccaaaagcagttgcacagctcagtccgcgcctcgagtcgatatcaataagtccgcagc

SEQ ID NO: 94134 - DNA, 60 bp, Artificial
  Synthetic oligonucleotide
cagcctctttcagagtgcaaaatagcactgctagacgatgctacagatccatgctggaca

SEQ ID NO: 94135 - DNA, 60 bp, Artificial
  Synthetic oligonucleotide
gcgttccaacctttgtcggtcttaacacgttcggaatcggtctgcttcctcttggcacgg

SEQ ID NO: 94136 - DNA, 55 bp, Artificial
  Synthetic oligonucleotide
ggggaaagctctcttgcagatcaaatagtggttgccgttggttcaggtgggcaaa

SEQ ID NO: 94137 - DNA, 60 bp, Artificial
  Synthetic oligonucleotide
cagacagttagtggacgaaatacaggacgacttggaagattactggcggaggctgtcgat

SEQ ID NO: 94138 - DNA, 60 bp, Artificial
  Synthetic oligonucleotide
gcccactcctccacgttctgctagcacacctattcagcaacgggtgcaacaggctgctag

SEQ ID NO: 94139 - DNA, 60 bp, Artificial
  Synthetic oligonucleotide
gttcctccaccaggggcagagggcggagatccgcctccgatacctccagaagggggagag

SEQ ID NO: 94140 - DNA, 60 bp, Artificial
  Synthetic oligonucleotide
gaaaagcctccagccccaccagcaccgcctcacgaaggaaacgacgtagagcgtcccccc

SEQ ID NO: 94141 - DNA, 60 bp, Artificial
  Synthetic oligonucleotide
cctgctggctatgttagggttagtcgtgtgggtcaacgggccaccatccgaacacgttct

SEQ ID NO: 94142 - DNA, 60 bp, Artificial
  Synthetic oligonucleotide
ggaaagaggaccagacaatactgaaccaaccaccactgccgtcaccagacgttccggagc

SEQ ID NO: 94143 - DNA, 60 bp, Artificial
  Synthetic oligonucleotide
tagtaatgacggctccaaagttgaggtgcctaaggtttcaggcaatcaacacagggtttt

SEQ ID NO: 94144 - DNA, 60 bp, Artificial
  Synthetic oligonucleotide
taggcaaaacgtttcttttgatccaaaacaactccaaatgtttgttattggctgtgcccc

SEQ ID NO: 94145 - DNA, 60 bp, Artificial
  Synthetic oligonucleotide
tatgggcctgcagaggcctggaaattggacggggtcagcctcttggggttgggagttctg

SEQ ID NO: 94146 - DNA, 60 bp, Artificial
  Synthetic oligonucleotide
ggtcctgggttgcaggcgatggcacagagcgtctaggcaggtccagaatgctcatcagtt

SEQ ID NO: 94147 - DNA, 60 bp, Artificial
  Synthetic oligonucleotide
ggcccaccaaatacaggaaaatcagcatttacaatgtcactaataaaagtactaggaggt

SEQ ID NO: 94148 - DNA, 60 bp, Artificial
  Synthetic oligonucleotide
gtagcagctctgttttggtataaaggcagttttggttcaaaagcatatacacatggagcc

SEQ ID NO: 94149 - DNA, 60 bp, Artificial
  Synthetic oligonucleotide
ccacccttgccgtctccagacttcaacagccacaacaatcatccgaagccaacaccaggg

SEQ ID NO: 94150 - DNA, 60 bp, Artificial
  Synthetic oligonucleotide
catgatacctatagatatttagattccttggcaacacgatgccccgataaaacccctgca

SEQ ID NO: 94151 - DNA, 60 bp, Artificial
  Synthetic oligonucleotide
gcaataaaaccacagacagggtctgcactggcagccttgttaggtcttcagctacaggag

SEQ ID NO: 94152 - DNA, 60 bp, Artificial
  Synthetic oligonucleotide
ggatattcaaagttatgatcccaacaagtttcgggaataccaacgacatgtggaggaata

SEQ ID NO: 94153 - DNA, 60 bp, Artificial
  Synthetic oligonucleotide
tggttgcaacgcgctcagggtcataataatggcatctgctgggccaatcaattatttctc

SEQ ID NO: 94154 - DNA, 60 bp, Artificial
  Synthetic oligonucleotide
cctggatggagatgatatgtggcagaaaaccaccagtgaagtaaaccacacaggcattta

SEQ ID NO: 94155 - DNA, 60 bp, Artificial
  Synthetic oligonucleotide
ctgcggcgtggcttgcacataacaatcaagccagatttgttagagaatgtgcgtctatgg

SEQ ID NO: 94156 - DNA, 60 bp, Artificial
  Synthetic oligonucleotide
ggtcgcaacgagttgttccacaaggttagaggacgctggaagggactttgcaggcagtgt

SEQ ID NO: 94157 - DNA, 60 bp, Artificial
  Synthetic oligonucleotide
gtatttacccctgtcactagctccacaccgcccgacacagcgggaggacgacaagaagag

SEQ ID NO: 94158 - DNA, 60 bp, Artificial
  Synthetic oligonucleotide
atgcaattgatgctatgtcgttatttctattgtgttttaaggcgggcaaaaatcgtacca

SEQ ID NO: 94159 - DNA, 60 bp, Artificial
  Synthetic oligonucleotide
gggcggcactcctgcgattgttcgaccctcattgattccggatgccataggaccctctga

SEQ ID NO: 94160 - DNA, 60 bp, Artificial
  Synthetic oligonucleotide
gtttataaattttgttgcatgatttacactgcttcgctttagctgcatggctgcacacta

SEQ ID NO: 94161 - DNA, 60 bp, Artificial
  Synthetic oligonucleotide
gcagtgctggtgtgttttttggaggcctgggcattagtacgggccgaggaactggtggtt

SEQ ID NO: 94162 - DNA, 60 bp, Artificial
  Synthetic oligonucleotide
atagctgaaatcaatcctgttcctggcgcaactcccacagactccccagttgtcacatcc

SEQ ID NO: 94163 - DNA, 60 bp, Artificial
  Synthetic oligonucleotide
ttgtcacatccagcattggctccagtgccgtgcttgaagtcgctcctgagcctacgcctc

SEQ ID NO: 94164 - DNA, 60 bp, Artificial
  Synthetic oligonucleotide
cacagcgggaggacgacaagaagaggaaggaccaagagtctgggccgattcggcagccac

SEQ ID NO: 94165 - DNA, 60 bp, Artificial
  Synthetic oligonucleotide
cctactccacaagtcccaattgtagttattcacccgcatgataattctggggatttctat

SEQ ID NO: 94166 - DNA, 60 bp, Artificial
  Synthetic oligonucleotide
gttaccagctagcggtaaggtgtatttgcctccatcaacgccagttgccagggtccagag

SEQ ID NO: 94167 - DNA, 60 bp, Artificial
  Synthetic oligonucleotide
tcagtagcatatctgccgaagatcctattgaattagaactgctaggtcagcattcagggg

SEQ ID NO: 94168 - DNA, 60 bp, Artificial
  Synthetic oligonucleotide
cgctctctgaaagtattgaggcctactctgatgatttccttctagatgaggcagtggagg

SEQ ID NO: 94169 - DNA, 60 bp, Artificial
  Synthetic oligonucleotide
tgctgtaatgattgggttatttcagtatatggtatacgcgatgagttatatgagggttcg

SEQ ID NO: 94170 - DNA, 60 bp, Artificial
  Synthetic oligonucleotide
cagcaaagtagggctgatgttagcctagatatagtacacgaaacatgcaaatatcctgat

SEQ ID NO: 94171 - DNA, 60 bp, Artificial
  Synthetic oligonucleotide
gttagaggaggaaaggttggtgacgatatacctgcaggtcagatagatgatggcaacctt

SEQ ID NO: 94172 - DNA, 60 bp, Artificial
  Synthetic oligonucleotide
aggaacctcctgaccgtgatttcttagatgtcgctaggctaggaagaccacagtactcta

SEQ ID NO: 94173 - DNA, 60 bp, Artificial
  Synthetic oligonucleotide
gcggtgacaatgtgcagacactacaagcgtgcagagagggaacaaatgagtatgagccag

SEQ ID NO: 94174 - DNA, 60 bp, Artificial
  Synthetic oligonucleotide
aacgaaaggagcatccgtaaccctgacagcacagacctccggcggggccacagtgactct

SEQ ID NO: 94175 - DNA, 60 bp, Artificial
  Synthetic oligonucleotide
tgcaaagcgtcggaagcgcgcctcccccacggacttatatcgaacatgcaagcaggctgg

SEQ ID NO: 94176 - DNA, 60 bp, Artificial
  Synthetic oligonucleotide
aacgccagaagaggtaacgggggaagacaacagtcagggggggcggttggcggacgctag

SEQ ID NO: 94177 - DNA, 60 bp, Artificial
  Synthetic oligonucleotide
ccggctagaaaatgtcatgttgtttaaggctcgggaatgtggaatgacacgagtcggctg

SEQ ID NO: 94178 - DNA, 60 bp, Artificial
  Synthetic oligonucleotide
gccataagcccctgtgttgggaggagaaggaggcattactggtcggcaacaagcggttcc

SEQ ID NO: 94179 - DNA, 60 bp, Artificial
  Synthetic oligonucleotide
agcgtctgctgtgggcctgtgtcggagttgaggtgggtcgtggccagcctctgggtgtgg

SEQ ID NO: 94180 - DNA, 60 bp, Artificial
  Synthetic oligonucleotide
ccggactatctgaaaatggctgctgacccctatggcgattctatgttcttttccctgcgc

SEQ ID NO: 94181 - DNA, 60 bp, Artificial
  Synthetic oligonucleotide
atgagccgccggaccctgacttcctggacatagtgtcactgcaccgccctgccctcacgt

SEQ ID NO: 94182 - DNA, 60 bp, Artificial
  Synthetic oligonucleotide
ggcggcgcccactgctaaacgcaaaaaggtcaggcgctagtagttatgtgtctgcctcat

SEQ ID NO: 94183 - DNA, 60 bp, Artificial
  Synthetic oligonucleotide
caccttgggcgcgtcgtttttgcagccaactttcccttgccaacttgtcttgccgcgcat

SEQ ID NO: 94184 - DNA, 54 bp, Artificial
  Synthetic oligonucleotide
ataagtaataaaagctgttgctgcagttggatagcggggatatttggggtggta

SEQ ID NO: 94185 - DNA, 60 bp, Artificial
  Synthetic oligonucleotide
gcaaccacattgtgaatacctgcaaattataaatccaagcatggggacgggcgttacagt

SEQ ID NO: 94186 - DNA, 60 bp, Artificial
  Synthetic oligonucleotide
gcatggggacgggcgttacagtaatgatgttgtttcagttttatgctgcaaaatgtcggg

SEQ ID NO: 94187 - DNA, 60 bp, Artificial
  Synthetic oligonucleotide
tcggagcagccattaagctgcaaccccggggagcccgaaaccaatgaagacgtcagcaca

SEQ ID NO: 94188 - DNA, 60 bp, Artificial
  Synthetic oligonucleotide
aattggtgtgtgcaagctgcataagagcccagcgccatggaggacaaagacaataaaggt

SEQ ID NO: 94189 - DNA, 60 bp, Artificial
  Synthetic oligonucleotide
ggacaaaaggcaactattggagatgtaaagttagaacttagccctttagtgctacctgca

SEQ ID NO: 94190 - DNA, 60 bp, Artificial
  Synthetic oligonucleotide
ctctcattgtgcagctctgtaaagtgtctcttactcccgatgtattggcacacatacact

SEQ ID NO: 94191 - DNA, 66 bp, Artificial
  Synthetic oligonucleotide
ggggactgtgtaatgttatgaatattgtacctatattactgcttatgtggcaattgtatatttgtg

SEQ ID NO: 94192 - DNA, 60 bp, Artificial
  Synthetic oligonucleotide
gtgtaatgtattgcatgtacgggaatggcaaattataactaatccaccaaagcataggag

SEQ ID NO: 94193 - DNA, 60 bp, Artificial
  Synthetic oligonucleotide
ctcgcttttctgaaacagcagaggggcgcgtgcgtcttagtcgcctaggtcgccggggca

SEQ ID NO: 94194 - DNA, 58 bp, Artificial
  Synthetic oligonucleotide
ttttcttgggcgccccaggcaggcggtaacatttgaatttgaaaatcccgcctttcag

SEQ ID NO: 94195 - DNA, 60 bp, Artificial
  Synthetic oligonucleotide
agaaggtcatacacttgttggccctacgggtgaggctgacttgtatgacacgtactcaga

SEQ ID NO: 94196 - DNA, 60 bp, Artificial
  Synthetic oligonucleotide
caaccacttggtcagcaatctggggtggcctctattgttgatggcttagcatctgctaac

SEQ ID NO: 94197 - DNA, 60 bp, Artificial
  Synthetic oligonucleotide
cgagcaggtgtatgcacgtcattatttcacccataatggcactgttggtgacagtgttcc

SEQ ID NO: 94198 - DNA, 60 bp, Artificial
  Synthetic oligonucleotide
cccagggtactgtactacgtcctggggttgttttggatcctgtaggaccatctgatattg

SEQ ID NO: 94199 - DNA, 60 bp, Artificial
  Synthetic oligonucleotide
caaggccaggaccagcatcagctggctccctctttatattttgctacacctagtgggtcc

SEQ ID NO: 94200 - DNA, 60 bp, Artificial
  Synthetic oligonucleotide
cctcctaaaggcacctgtcctcctttacagttggtgtcctctgttattcaggatggggat

SEQ ID NO: 94201 - DNA, 58 bp, Artificial
  Synthetic oligonucleotide
cactgcattttcatgggtaggtgataggggctcagatagggtagggtgtagtagggta

SEQ ID NO: 94202 - DNA, 60 bp, Artificial
  Synthetic oligonucleotide
gcctaatagacactatcgttcgcgacttgcaagattacaagacgaggctagggatccgcc

SEQ ID NO: 94203 - DNA, 60 bp, Artificial
  Synthetic oligonucleotide
tgctttgctacacttgtataatcaatggagcctccacatgcacgtaggcgaaagcgtgac

SEQ ID NO: 94204 - DNA, 60 bp, Artificial
  Synthetic oligonucleotide
cacagttttcatttggaaacctggaatccctgtaaccacacatgccagtaatgctgccta

SEQ ID NO: 94205 - DNA, 60 bp, Artificial
  Synthetic oligonucleotide
tattccgtttgtaacatgaaccgggagtggtgtgggcagtgtctatatatacagcagggg

SEQ ID NO: 94206 - DNA, 60 bp, Artificial
  Synthetic oligonucleotide
gcagtaatagatttgagcccaagactgcaacagttgcgtgtatcgtcccaaggatccagt

SEQ ID NO: 94207 - DNA, 60 bp, Artificial
  Synthetic oligonucleotide
tagacctgggcgatccagacgacagctcagatggagaccctggtcgaccgtttcgatgct

SEQ ID NO: 94208 - DNA, 60 bp, Artificial
  Synthetic oligonucleotide
ggcaccaatacaattaaaactaccgccattacttctaacctctaacattgaagtacatgc

SEQ ID NO: 94209 - DNA, 60 bp, Artificial
  Synthetic oligonucleotide
cgtttgtaaatagcagaagccaattttggttgcaaccactagtagatgggaaaatagggc

SEQ ID NO: 94210 - DNA, 60 bp, Artificial
  Synthetic oligonucleotide
cagaagttgcttatggatatgcaagccttgcagacgacgatacaaatgcagctgcatggc

SEQ ID NO: 94211 - DNA, 60 bp, Artificial
  Synthetic oligonucleotide
gcggtttgcagatgaggcaacacaatttgatgcagcaaatgaatggcaagtacgaactga

SEQ ID NO: 94212 - DNA, 60 bp, Artificial
  Synthetic oligonucleotide
cccaaggatccagtaaaagacggctggtatttgaggacagtggactaggcaatgaaactg

SEQ ID NO: 94213 - DNA, 60 bp, Artificial
  Synthetic oligonucleotide
ggtcgaccgtttcgatgctgtgcaagacaggctactggggatttatgaagcaggccgcac

SEQ ID NO: 94214 - DNA, 60 bp, Artificial
  Synthetic oligonucleotide
gagggaaattccctagcattgttaaataagcagcagctagaggacgacacgcagcagctt

SEQ ID NO: 94215 - DNA, 60 bp, Artificial
  Synthetic oligonucleotide
cccaggtggggatccgagtctcctatccagtctccttcatcagtggggcaaggacatcga

SEQ ID NO: 94216 - DNA, 60 bp, Artificial
  Synthetic oligonucleotide
cagcccatccgcgacatcggcgaccgaaagcgatacccctgggcaccataccagaagccg

SEQ ID NO: 94217 - DNA, 60 bp, Artificial
  Synthetic oligonucleotide
gcagaagcggcatgtgaggagttagaccctttggaagccgtattggaagaaagtgatggg

SEQ ID NO: 94218 - DNA, 60 bp, Artificial
  Synthetic oligonucleotide
tcctttggagactgtacctgaaacacaaatacctgatgttcctgtgcgaccccctgttgg

SEQ ID NO: 94219 - DNA, 60 bp, Artificial
  Synthetic oligonucleotide
tgttgttggttgcaccccttgtaaaggtgaacactgggatgttgctcctgcatgtgacaa

SEQ ID NO: 94220 - DNA, 60 bp, Artificial
  Synthetic oligonucleotide
aactgtgggtcacccctattttcccgttataaaaccaggcaatcacaccgttgaggttcc

SEQ ID NO: 94221 - DNA, 60 bp, Artificial
  Synthetic oligonucleotide
ccgttgaggttcctaaggtttctggcaaccagtttagggcttttcgcctacgtctcccag

SEQ ID NO: 94222 - DNA, 60 bp, Artificial
  Synthetic oligonucleotide
cggagcgcctcgtgtggcgtcttagaggaattgatattggcagaggagggcctttaggta

SEQ ID NO: 94223 - DNA, 60 bp, Artificial
  Synthetic oligonucleotide
ctgctgttcaggtccctcctttggttcgtgtcctgacacttcctccaggcacagccctac

SEQ ID NO: 94224 - DNA, 60 bp, Artificial
  Synthetic oligonucleotide
cctgttattcctggcactgtgtttccagatgtgtctgaacctcctattgttgtggatggt

SEQ ID NO: 94225 - DNA, 60 bp, Artificial
  Synthetic oligonucleotide
acacatttgttgaaacaggagggtcttctacattttctattgaggaggctgttacgcccc

SEQ ID NO: 94226 - DNA, 58 bp, Artificial
  Synthetic oligonucleotide
ttaggtactggctacattccacaaccgggagcggtgcttttacagtgcctttttctct

SEQ ID NO: 94227 - DNA, 60 bp, Artificial
  Synthetic oligonucleotide
cgcctaccaggcctacctccaggtcttccaaacgccgacgcaggcaagtttaaacattat

SEQ ID NO: 94228 - DNA, 60 bp, Artificial
  Synthetic oligonucleotide
cagggcagtattttggccacacctgggcttttagtatttggcttccggccggcggacgtg

SEQ ID NO: 94229 - DNA, 60 bp, Artificial
  Synthetic oligonucleotide
ctcttgctacaatgtgtcccacagcagagcctcctaaggaaaaggaagatccatatgaca

SEQ ID NO: 94230 - DNA, 60 bp, Artificial
  Synthetic oligonucleotide
gaggcacaacctcctacatctactcctaagcgtgtttcagtaacaagcacacggcatgtt

SEQ ID NO: 94231 - DNA, 60 bp, Artificial
  Synthetic oligonucleotide
ggccacctcgcctgctattacacccatagaccccacaagtgccgttattgaggcacaacc

SEQ ID NO: 94232 - DNA, 60 bp, Artificial
  Synthetic oligonucleotide
tgtttgtaggggcagctgttggtgagggacgggttattagtataggtgaatctatacctt

SEQ ID NO: 94233 - DNA, 60 bp, Artificial
  Synthetic oligonucleotide
acagtggttatacatgttgctgattcctctggagatttttatttacatcccagtttacga

SEQ ID NO: 94234 - DNA, 60 bp, Artificial
  Synthetic oligonucleotide
caagatatacaggggtaccatgtttcatatcccgaaagcagagaacgacccgccattatt

SEQ ID NO: 94235 - DNA, 60 bp, Artificial
  Synthetic oligonucleotide
ccaccaacacctccagttgcgcgcgttcaaagcacggatgaatatgtggaacgaacagac

SEQ ID NO: 94236 - DNA, 60 bp, Artificial
  Synthetic oligonucleotide
gggtcctgtagaaagcactttagtagatgtaaatgtgactgaggttcctgaaggtgttct

SEQ ID NO: 94237 - DNA, 60 bp, Artificial
  Synthetic oligonucleotide
tcctgacgggcagattttaatcagtgcagatatcatctagcacctgcagcaaccgccaaa

SEQ ID NO: 94238 - DNA, 60 bp, Artificial
  Synthetic oligonucleotide
gtgtaaggttcctttgactgctgaagtgctgacacagataaatgctatgaattctggcat

SEQ ID NO: 94239 - DNA, 60 bp, Artificial
  Synthetic oligonucleotide
ccattttggttacaaagagctcaaggccacaacaatggtattttatggggtaatcaaatg

SEQ ID NO: 94240 - DNA, 60 bp, Artificial
  Synthetic oligonucleotide
aagcctttgtttgaacttactgatcaaagctgggcatctttctttaaaaggctgtggaca

SEQ ID NO: 94241 - DNA, 60 bp, Artificial
  Synthetic oligonucleotide
ggatccgatatttctgacttaataaatgatgaggtcgttgagcagggaaattcccgcgaa

SEQ ID NO: 94242 - DNA, 60 bp, Artificial
  Synthetic oligonucleotide
ctttgcagtttgatttgtctcgaatgattcaatgggcctatgataatgaccatatggacg

SEQ ID NO: 94243 - DNA, 60 bp, Artificial
  Synthetic oligonucleotide
gctgggattcggaatttgcaagattgtttgctgggcgacgtaaggcttctgtgtcccacc

SEQ ID NO: 94244 - DNA, 60 bp, Artificial
  Synthetic oligonucleotide
ggggttgtgaagtaaggctaaaactttacgtgtgggcaaccgacgctgggattcggaatt

SEQ ID NO: 94245 - DNA, 60 bp, Artificial
  Synthetic oligonucleotide
gtaaccttttttactaacaatactgctttgctactaacactatggttcgcgcacgtagaa

SEQ ID NO: 94246 - DNA, 60 bp, Artificial
  Synthetic oligonucleotide
gcccattgacctgcattgccacgaggagttgcctgatcttccagaggatattgaagcatc

SEQ ID NO: 94247 - DNA, 60 bp, Artificial
  Synthetic oligonucleotide
ctgcttggatccatcactgtatatctaaggttgaaggagagggtaattggcagcatattg

SEQ ID NO: 94248 - DNA, 60 bp, Artificial
  Synthetic oligonucleotide
ggaagtttaaatagtaatgtgttctgttttggtgaagctcctgattggattctgtcacaa

SEQ ID NO: 94249 - DNA, 61 bp, Artificial
  Synthetic oligonucleotide
cttaggaatggtttagatggtaatttagtgtcgttagatatgaaacataaagcaccttgtc

SEQ ID NO: 94250 - DNA, 56 bp, Artificial
  Synthetic oligonucleotide
cacagatatttgaacaagacattgcagactttgaggaaccacccgatagacagttt

SEQ ID NO: 94251 - DNA, 59 bp, Artificial
  Synthetic oligonucleotide
gactttagctcaaactagcttggaggctgttcgcagtcctcctgcagactgttttaaaa

SEQ ID NO: 94252 - DNA, 60 bp, Artificial
  Synthetic oligonucleotide
cgtctcacgaacctcttatgcagggggtggcatatcgcctgataaagtgggaacggcagt

SEQ ID NO: 94253 - DNA, 60 bp, Artificial
  Synthetic oligonucleotide
tttagggagacgaggaacaatacgaacacgcagtggtgcacaaatagggtcacaggtaca

SEQ ID NO: 94254 - DNA, 60 bp, Artificial
  Synthetic oligonucleotide
gcacaacatggccatggataggagatgcatcaaatgatcgcatagggcgctcgcgaatgc

SEQ ID NO: 94255 - DNA, 60 bp, Artificial
  Synthetic oligonucleotide
agcagataggaggtaccagaacaacagaagaaattgagttacagcctttgttatctagat

SEQ ID NO: 94256 - DNA, 60 bp, Artificial
  Synthetic oligonucleotide
tcagttggtagatcaagtggtggaagacttacgcggctactggcagaggctgcagacccc

SEQ ID NO: 94257 - DNA, 60 bp, Artificial
  Synthetic oligonucleotide
tgtgcgaagagagcaatgctatgccagacattattttgttcgaggtggtgcagtgggcga

SEQ ID NO: 94258 - DNA, 60 bp, Artificial
  Synthetic oligonucleotide
gctgcactccttgtctgggagaatactgggataaagcacctgtatgtgataatgcagggg

SEQ ID NO: 94259 - DNA, 60 bp, Artificial
  Synthetic oligonucleotide
gccggggacagccattaggagttggaactacaggtcatcccttatttaacaaagtaagag

SEQ ID NO: 94260 - DNA, 60 bp, Artificial
  Synthetic oligonucleotide
gaagttcctaaggtgtcaggaaatcaatataggtcattccgggtaacctttccagatcca

SEQ ID NO: 94261 - DNA, 60 bp, Artificial
  Synthetic oligonucleotide
ctggacaggcccaacgcactttagggaactctacgtattttccaacagttagtggatctt

SEQ ID NO: 94262 - DNA, 60 bp, Artificial
  Synthetic oligonucleotide
ggctgtggacacaattagagctcagtgatcaagaagacgagggagacaatggaaactctc

SEQ ID NO: 94263 - DNA, 60 bp, Artificial
  Synthetic oligonucleotide
ggtaggccaacattaactgagtctgcagagggatatgttagagtaagtcgtttagggaga

SEQ ID NO: 94264 - DNA, 60 bp, Artificial
  Synthetic oligonucleotide
catcagtggtagaggaggagccagcatacaccccatacaaaatcatagttctttgtgggg

SEQ ID NO: 94265 - DNA, 60 bp, Artificial
  Synthetic oligonucleotide
cgtgcatctgttactgatatatacaggggctgcaaggcttccaatacttgccctcctgat

SEQ ID NO: 94266 - DNA, 60 bp, Artificial
  Synthetic oligonucleotide
ggggcctgtaaacttcagctttattcatggaactaccaaaacctcaaactgtgcagcagc

SEQ ID NO: 94267 - DNA, 60 bp, Artificial
  Synthetic oligonucleotide
aagcaccaacaggggagggagggacacccggcgatcctcctccagaggatcctcagtctc

SEQ ID NO: 94268 - DNA, 60 bp, Artificial
  Synthetic oligonucleotide
gcagagcattatataatagaaggttaactgagcaagttggtgtcactgaccctttatttt

SEQ ID NO: 94269 - DNA, 60 bp, Artificial
  Synthetic oligonucleotide
cgattgggctatcaacctgtaccttctttggcaagttcagaagccaaagcaaaagatgct

SEQ ID NO: 94270 - DNA, 60 bp, Artificial
  Synthetic oligonucleotide
gataacggtaagacttttcgtttttaaccgtaggcgttggtttattattcctggcaacaa

SEQ ID NO: 94271 - DNA, 60 bp, Artificial
  Synthetic oligonucleotide
ggctgaccctcatccgcctactagagctactgtaagcagaactcaatataataatcctgc

SEQ ID NO: 94272 - DNA, 60 bp, Artificial
  Synthetic oligonucleotide
atatctaaaacgaaagtgtttcagtccgaaagctgttcaggagcttagtcctcgtctgca

SEQ ID NO: 94273 - DNA, 60 bp, Artificial
  Synthetic oligonucleotide
cgtgtcccccgaacggccaccatcacaaacagcacggcgatacgggagaaaagcatctag

SEQ ID NO: 94274 - DNA, 61 bp, Artificial
  Synthetic oligonucleotide
cccatgtcactttatttatgttgctttaatgttggtaaaagtagagacactgttgtaagac

SEQ ID NO: 94275 - DNA, 60 bp, Artificial
  Synthetic oligonucleotide
gagattatttgtggagcaagacagtggactggagctatctctaaatgaagctgaagattc

SEQ ID NO: 94276 - DNA, 60 bp, Artificial
  Synthetic oligonucleotide
gggctgggtactgtaagagatcttttaaggagcagtaacagcagagcaacactgttaagc

SEQ ID NO: 94277 - DNA, 60 bp, Artificial
  Synthetic oligonucleotide
gtggaaggccatgtggattatacaggagcctattattatgagggcaatttaaaggtgtat

SEQ ID NO: 94278 - DNA, 56 bp, Artificial
  Synthetic oligonucleotide
ccccgttaccagttctacgccgccagttggagactccaccgactccgcatccaggg

SEQ ID NO: 94279 - DNA, 59 bp, Artificial
  Synthetic oligonucleotide
gactccaccgactccgcatccagggcggcagtccccgagccttccacctccgtgtcccc

SEQ ID NO: 94280 - DNA, 60 bp, Artificial
  Synthetic oligonucleotide
acgagggagacaatggaaactctcagcgcacgtttcactgtactgcaagagaagttaatg

SEQ ID NO: 94281 - DNA, 60 bp, Artificial
  Synthetic oligonucleotide
cttcaattgtgtcattaactgacagtagtgctgttgaccttttacctggagaggttgaaa

SEQ ID NO: 94282 - DNA, 60 bp, Artificial
  Synthetic oligonucleotide
tacaggcggtgctacaggctatgtgcctctggggcaaggacctggagtgcgagtgggtgg

SEQ ID NO: 94283 - DNA, 60 bp, Artificial
  Synthetic oligonucleotide
taagggggcttgcattaaatgtcgccgtaagcttgcttttgcagaaaggcagaaatatca

SEQ ID NO: 94284 - DNA, 60 bp, Artificial
  Synthetic oligonucleotide
ccttctacgtctagttcagcagatagttgtgaagaacttctcagggctaataatgtgtac

SEQ ID NO: 94285 - DNA, 60 bp, Artificial
  Synthetic oligonucleotide
ggttgtgaccgttttcggagcaccagaaaccctaattgaagcagctaaagtgcagctagg

SEQ ID NO: 94286 - DNA, 60 bp, Artificial
  Synthetic oligonucleotide
caggatgagcaacacatcacagctctaaaacgaaagtatgttacaacccccgggagagaa

SEQ ID NO: 94287 - DNA, 60 bp, Artificial
  Synthetic oligonucleotide
ttatgctaccttgccatttttgcagtagttttatggatcttaataataaggccagctacc

SEQ ID NO: 94288 - DNA, 60 bp, Artificial
  Synthetic oligonucleotide
cgcagcccaccagaccgtattcgttcatggaactttgcagagagtacactttggagcagc

SEQ ID NO: 94289 - DNA, 60 bp, Artificial
  Synthetic oligonucleotide
gttgggtgttgctgaacggttggttttggcagagccgcccaactgccgcagcaatttggc

SEQ ID NO: 94290 - DNA, 60 bp, Artificial
  Synthetic oligonucleotide
cccctactggaccaaggagagtcactgtttccagaagctcacacaacaaccctgcttatg

SEQ ID NO: 94291 - DNA, 60 bp, Artificial
  Synthetic oligonucleotide
gagtggagcaggttagggtaaccaatcaggcacagtttcttgaaaacgcgggaagagcag

SEQ ID NO: 94292 - DNA, 60 bp, Artificial
  Synthetic oligonucleotide
ggcgagaacaggtctatgcaaggcactactttaccagaaatggagtaatgggtgaaacca

SEQ ID NO: 94293 - DNA, 60 bp, Artificial
  Synthetic oligonucleotide
gttgtggctggagagagtagtggaatactatctagtactcatgaaatagatgcggccatt

SEQ ID NO: 94294 - DNA, 60 bp, Artificial
  Synthetic oligonucleotide
tgctccagatacaaaccaagatcagaaaacagttgggcctcatgtttactttggcacacc

SEQ ID NO: 94295 - DNA, 60 bp, Artificial
  Synthetic oligonucleotide
gacaaaagcggtgccactctggatatagtgtctaccatgtgcaaatggcctgactttctc

SEQ ID NO: 94296 - DNA, 60 bp, Artificial
  Synthetic oligonucleotide
ttcgacactccggattcaacgaagggtggccaccaaggactccgtcgccctcgccgtcca

SEQ ID NO: 94297 - DNA, 60 bp, Artificial
  Synthetic oligonucleotide
ctatagatcctaaacagactcagatgttcattgtaggctgtgttccctgtacaggggagc

SEQ ID NO: 94298 - DNA, 60 bp, Artificial
  Synthetic oligonucleotide
ggacctcagtgtatgtgcaaaatgaggaaggcttttggcagaaacatagcagtgaagttg

SEQ ID NO: 94299 - DNA, 60 bp, Artificial
  Synthetic oligonucleotide
gcagctcattgctccaagaccagataacattctgggacttaataagaaaggagggagcac

SEQ ID NO: 94300 - DNA, 60 bp, Artificial
  Synthetic oligonucleotide
aaagagcgccaaaggattagactattgcttaactgccaagcacacaggtgtggcgaccga

SEQ ID NO: 94301 - DNA, 55 bp, Artificial
  Synthetic oligonucleotide
gctccaaagacaccggctgcacctctccaacgccgaaacgacatagacccagcga

SEQ ID NO: 94302 - DNA, 60 bp, Artificial
  Synthetic oligonucleotide
ctgtgtgggaacgaaagcggtacatgacagtttggcagagcccacagacgggaactgact

SEQ ID NO: 94303 - DNA, 60 bp, Artificial
  Synthetic oligonucleotide
gcctacttctttccgcatctgagaatcagttcacgccaggacagcaacagagtaacaagg

SEQ ID NO: 94304 - DNA, 54 bp, Artificial
  Synthetic oligonucleotide
agactgtgcacagatggtaaggatgtataaaaggcagcaaatgagggaaatgtc

SEQ ID NO: 94305 - DNA, 61 bp, Artificial
  Synthetic oligonucleotide
gcagcttcagagacatttgatttcagtaaaatggtacaatgggcttatgataataactatg

SEQ ID NO: 94306 - DNA, 60 bp, Artificial
  Synthetic oligonucleotide
catgccgctagactctaaggggcaaccggagtttgtgctctcagcagctaactgggcctc

SEQ ID NO: 94307 - DNA, 60 bp, Artificial
  Synthetic oligonucleotide
cggggaagctgtatgttctgatgatgatggaactgttgataactttgaggctttattcga

SEQ ID NO: 94308 - DNA, 57 bp, Artificial
  Synthetic oligonucleotide
caggtagatatgaaacacagagcttcaatacagcttaagcttccgccgcttcttata

SEQ ID NO: 94309 - DNA, 55 bp, Artificial
  Synthetic oligonucleotide
tcgccgtccagacacaccatctccggaaggggaaaacaaggagaatcagccaccg

SEQ ID NO: 94310 - DNA, 60 bp, Artificial
  Synthetic oligonucleotide
tggacaacgataaaggtgaatataggtgggcctttcttgacggggaagctgtatgttctg

SEQ ID NO: 94311 - DNA, 60 bp, Artificial
  Synthetic oligonucleotide
ctgctcgccaaagatctgagttttctctgtccggcttgtgtggctgtacacctgactcgt

SEQ ID NO: 94312 - DNA, 60 bp, Artificial
  Synthetic oligonucleotide
cccgtgattgttgccaactattatcatcctatccaaaaagttaggtggagacgttaacgg

SEQ ID NO: 94313 - DNA, 60 bp, Artificial
  Synthetic oligonucleotide
cggcacatgtggagaacttcctgcagagcgtgcagaactccggcaatagaatgctaggcg

SEQ ID NO: 94314 - DNA, 60 bp, Artificial
  Synthetic oligonucleotide
caaagtaactgttccaaaggtgtccgggaatcagtatagggtttttagattgaaatttcc

SEQ ID NO: 94315 - DNA, 60 bp, Artificial
  Synthetic oligonucleotide
cttgtttggagactcagaggaatagaaataggcagaggtggtccgttaggaatcggaaca

SEQ ID NO: 94316 - DNA, 60 bp, Artificial
  Synthetic oligonucleotide
gttgtagtagtgccagaagacagtgttgattattatttgcacccaagtcttcgcaagcgc

SEQ ID NO: 94317 - DNA, 60 bp, Artificial
  Synthetic oligonucleotide
ccaaacggaaagctgtacctccccccaactgctcctgtggccaaagtgcagagtacggat

SEQ ID NO: 94318 - DNA, 60 bp, Artificial
  Synthetic oligonucleotide
agactcagtgaaactgctgacaggacggttagggtaagccgtttaggacagagaggcaca

SEQ ID NO: 94319 - DNA, 60 bp, Artificial
  Synthetic oligonucleotide
gagctgtccaccttaggagaactgtcaggggaggcggagctagtagatggcataggtaac

SEQ ID NO: 94320 - DNA, 60 bp, Artificial
  Synthetic oligonucleotide
gcatagtccctttactggaagctacccctgatgtgcccattgatggtggtcctgaagtac

SEQ ID NO: 94321 - DNA, 60 bp, Artificial
  Synthetic oligonucleotide
tctagaccagtttccgcttgggcgaaaattcctgtttcagacgggaactagatacggaac

SEQ ID NO: 94322 - DNA, 60 bp, Artificial
  Synthetic oligonucleotide
ggagcagtttgagctgtcagttattgtacagctttgtaaagttccacttgagccttcagt

SEQ ID NO: 94323 - DNA, 60 bp, Artificial
  Synthetic oligonucleotide
ctgcagcgagctcagggaaataataatggcatatgttggaacaatgagctgtttgtaacc

SEQ ID NO: 94324 - DNA, 60 bp, Artificial
  Synthetic oligonucleotide
ttggtacaggttcaggttctggggaaacttttgggtatggatcaatcaatcctggagggg

SEQ ID NO: 94325 - DNA, 60 bp, Artificial
  Synthetic oligonucleotide
cgggaatccaccgaacagattggggtcagccctgaagaagttggaagacgatctacgatc

SEQ ID NO: 94326 - DNA, 60 bp, Artificial
  Synthetic oligonucleotide
acagagcacccagggatcttttctagataatgacgaggttgatcaggggaattctttggc

SEQ ID NO: 94327 - DNA, 60 bp, Artificial
  Synthetic oligonucleotide
cgctgatgctcgggacccgcccatagtcttggtcaaaggtccgacaaacgccttaaaatg

SEQ ID NO: 94328 - DNA, 60 bp, Artificial
  Synthetic oligonucleotide
acgatcactaaaggacctggtctcggacgctacgggcgtcttatcgctgatgctcgggac

SEQ ID NO: 94329 - DNA, 60 bp, Artificial
  Synthetic oligonucleotide
ggatggactgtaggtgaactgtttacatcttggactgaggatggtggcagccacacgagc

SEQ ID NO: 94330 - DNA, 60 bp, Artificial
  Synthetic oligonucleotide
ctggagactgtgcctttaccaaagggagcagtggcaataacgggaaatttggatggactg

SEQ ID NO: 94331 - DNA, 60 bp, Artificial
  Synthetic oligonucleotide
gcggacagttaagagaaagaagcgggtgtagagcaggtatctgttatttactttatgcaa

SEQ ID NO: 94332 - DNA, 60 bp, Artificial
  Synthetic oligonucleotide
cctccttcaactaataaatgactaatgcttgaccagccagtctcgcctacttctttccgc

SEQ ID NO: 94333 - DNA, 60 bp, Artificial
  Synthetic oligonucleotide
ctgtggcctaaacgacgtaaacgtgtcaactatttctttgcagatggctttgtggcggcc

SEQ ID NO: 94334 - DNA, 60 bp, Artificial
  Synthetic oligonucleotide
ccactcctagtggctctatggtgtcctctgaacaacagttgtttaataagccttactggc

SEQ ID NO: 94335 - DNA, 60 bp, Artificial
  Synthetic oligonucleotide
ccccttgaggaggacagatggaaatatttgcgcagcaggctaacactgtttacatttaac

SEQ ID NO: 94336 - DNA, 60 bp, Artificial
  Synthetic oligonucleotide
ggccaagtacgtgaaggacgcagtgacaatgtgcaggcactataagcgtgcagagagaga

SEQ ID NO: 94337 - DNA, 60 bp, Artificial
  Synthetic oligonucleotide
aatatgcacacatacagatactgacctgctcgtggggcatggtggtctttatgctgctac

SEQ ID NO: 94338 - DNA, 60 bp, Artificial
  Synthetic oligonucleotide
aagagcagcaagacagcatgtgcagactgggttgtctgtgcctttggcgtgtactatgct

SEQ ID NO: 94339 - DNA, 60 bp, Artificial
  Synthetic oligonucleotide
gcacctccaaagaaatgctggaaaaagaaaggacaatcagtattagtgaaatttgatggc

SEQ ID NO: 94340 - DNA, 60 bp, Artificial
  Synthetic oligonucleotide
attgatgcagagtgcctatagcacggaggcatggaccttacgagacacgtgtctggagat

SEQ ID NO: 94341 - DNA, 55 bp, Artificial
  Synthetic oligonucleotide
acaaacttgaggatcagattaagcattgggcgcaggttcggctagaaaatgtcat

SEQ ID NO: 94342 - DNA, 60 bp, Artificial
  Synthetic oligonucleotide
gtgtgtcatgtgttgtgtgttctgtaactgtacgttctggtgcacagatttctgcacccc

SEQ ID NO: 94343 - DNA, 60 bp, Artificial
  Synthetic oligonucleotide
atgtatacatgtatggtatgtatcccctcccgtatgaataaacgtgtgtcatgtgttgtg

SEQ ID NO: 94344 - DNA, 60 bp, Artificial
  Synthetic oligonucleotide
gccataagcccctgagctgggaggagaaggaggcattactggttggaaacaagcgattcc

SEQ ID NO: 94345 - DNA, 60 bp, Artificial
  Synthetic oligonucleotide
gatgcacacaagggcagggatgtctgaggagaatccatgccctaggaacatctttttgct

SEQ ID NO: 94346 - DNA, 60 bp, Artificial
  Synthetic oligonucleotide
atgtatggtatgtatcccctcccgtatgaataaacgtgtgtcatgtgttgtgtgttctgt

SEQ ID NO: 94347 - DNA, 60 bp, Artificial
  Synthetic oligonucleotide
ggtgatcagtacggatgtctatgtcacgcggactaatgtgtattaccatggtggcagttc

SEQ ID NO: 94348 - DNA, 60 bp, Artificial
  Synthetic oligonucleotide
ggccagtcctttgtctgcatgctcatgcatagagaatgatttaagtcccagattagatgc

SEQ ID NO: 94349 - DNA, 60 bp, Artificial
  Synthetic oligonucleotide
actctagtgtgccctcactgcgcctagcgttatggaggattccgaaggtaccgacgggac

SEQ ID NO: 94350 - DNA, 60 bp, Artificial
  Synthetic oligonucleotide
ccactgcgcgtagcgttatggaggattccgaaggtaccgacgggacagaggaggacgggt

SEQ ID NO: 94351 - DNA, 60 bp, Artificial
  Synthetic oligonucleotide
tggaggataaggaggaggagcgtcaagggggagacggagaggcagacctaactgtacaaa

SEQ ID NO: 94352 - DNA, 60 bp, Artificial
  Synthetic oligonucleotide
ggtatgtatcccctcccgtatgaataaacgtgtgtcatgtgttgtgtgttctgtaactgt

SEQ ID NO: 94353 - DNA, 60 bp, Artificial
  Synthetic oligonucleotide
cccctcccgtatgaataaacgtgtgtcatgtgttgtgtgttctgtaactgtacgttctgg

SEQ ID NO: 94354 - DNA, 60 bp, Artificial
  Synthetic oligonucleotide
ctgattgcagcaggaaaacttagacaatacagacattggcattactcatgctacggagac

SEQ ID NO: 94355 - DNA, 60 bp, Artificial
  Synthetic oligonucleotide
ccccgccgtctgccagtttgcaggacacttatagatatttgcagtcccaggctattacgt

SEQ ID NO: 94356 - DNA, 59 bp, Artificial
  Synthetic oligonucleotide
ggtactggcattactcatgctacggagacacagtggagactgagacaggaatacccata

SEQ ID NO: 94357 - DNA, 59 bp, Artificial
  Synthetic oligonucleotide
ggtactggcattactcatgctacggagacacagtggagaccgagacaggaatacccata

SEQ ID NO: 94358 - DNA, 60 bp, Artificial
  Synthetic oligonucleotide
gcagatggctttgtggcggcctaatgaaagcaaggtatacctacctccaacacctgtttc

SEQ ID NO: 94359 - DNA, 60 bp, Artificial
  Synthetic oligonucleotide
ggtgatcagtacggatgtctatgtcacgcggacgaatgtctattaccatggtggcagttc

SEQ ID NO: 94360 - DNA, 60 bp, Artificial
  Synthetic oligonucleotide
acagctggcattacagacattgatgcagagtgcctatagcacggaggcatggaccctacg

SEQ ID NO: 94361 - DNA, 60 bp, Artificial
  Synthetic oligonucleotide
aaacttagacaatacagacattggcattactcatgctacggagacacagtggagaccgag

SEQ ID NO: 94362 - DNA, 60 bp, Artificial
  Synthetic oligonucleotide
gcaacaaacttgaggatcagattaagcattgggcgcaggtccggctagaaaatgtcatgc

SEQ ID NO: 94363 - DNA, 60 bp, Artificial
  Synthetic oligonucleotide
gctaaggcatgtcgggccatagaggtacagctggcattacagacattgatgcagagtgcc

SEQ ID NO: 94364 - DNA, 60 bp, Artificial
  Synthetic oligonucleotide
ttcccgagaagcatatgctcatagaaccaccaaaactaagaagtacacctgctgccttgt

SEQ ID NO: 94365 - DNA, 60 bp, Artificial
  Synthetic oligonucleotide
gcaggaaaacttagacaatacagacattggcattactcatgctacggagacacagtggag

SEQ ID NO: 94366 - DNA, 60 bp, Artificial
  Synthetic oligonucleotide
acaggggaggatttagactttatagacaatagggttcccggagatgggcaggaaattccc

SEQ ID NO: 94367 - DNA, 60 bp, Artificial
  Synthetic oligonucleotide
aaacatccctgaaaagcatatgctcatagaaccaccaaaactaagaagtacccctgctgc

SEQ ID NO: 94368 - DNA, 60 bp, Artificial
  Synthetic oligonucleotide
cccgagaagcatatgctcatagaaccaccaaaactaagaagtacacctgctgccttgtac

SEQ ID NO: 94369 - DNA, 60 bp, Artificial
  Synthetic oligonucleotide
gtgtgcactatttctttgcagatggctatgtggcggcctaatgaaagcaaggtatacctg

SEQ ID NO: 94370 - DNA, 60 bp, Artificial
  Synthetic oligonucleotide
gtgggaagtgcagttcagacagttagtggacgaaatacaggacgacttggaagattactg

SEQ ID NO: 94371 - DNA, 60 bp, Artificial
  Synthetic oligonucleotide
ttagcacaacatggtcatgggttgccgcagatggcacagagcgtctaggcaggtccagag

SEQ ID NO: 94372 - DNA, 60 bp, Artificial
  Synthetic oligonucleotide
cgaggaatgtcaaactgtgcatttacagcagggcagcttccagagtggattgcaaagcaa

SEQ ID NO: 94373 - DNA, 58 bp, Artificial
  Synthetic oligonucleotide
tctgcccggaacatctatttcggtcgtgctgagcaccggaggcgctcgtaagcagtga

SEQ ID NO: 94374 - DNA, 60 bp, Artificial
  Synthetic oligonucleotide
gattctcttaaccagagggaggagacacaggtagaactgtatggtccgggggagggcaac

SEQ ID NO: 94375 - DNA, 60 bp, Artificial
  Synthetic oligonucleotide
gagcctgcaatatatcctgaggacacacttattgatgagtatgaagtagttggcagtgac

SEQ ID NO: 94376 - DNA, 60 bp, Artificial
  Synthetic oligonucleotide
ccagagagcggtattgtttgcaaagtttaaggagtgtttcgggctgagtttcacggattt

SEQ ID NO: 94377 - DNA, 60 bp, Artificial
  Synthetic oligonucleotide
gggttgtgtgtgggatatatataagtgaggctagagctgaggcaggtaagacactgttgc

SEQ ID NO: 94378 - DNA, 60 bp, Artificial
  Synthetic oligonucleotide
gttgcaagatcattgtgagtatgtatttgtatcccaggcggcgtgttgtgcattgtgtct

SEQ ID NO: 94379 - DNA, 60 bp, Artificial
  Synthetic oligonucleotide
gagcaggcggataatagggttaatgtggcatttgaccccaaacaaacacagcttttcatg

SEQ ID NO: 94380 - DNA, 52 bp, Artificial
  Synthetic oligonucleotide
tcaccgatagacgacgcagacgacgagtcgccagcctctcgaagccgaccac

SEQ ID NO: 94381 - DNA, 60 bp, Artificial
  Synthetic oligonucleotide
cagaaaatgagcatgtaattgttcccaaagtctctgctaatcagtacagagttttcagga

SEQ ID NO: 94382 - DNA, 60 bp, Artificial
  Synthetic oligonucleotide
tgacattgtgctgacagaggttcctgaagcaattgacctgtattgcgatgagcacatgcc

SEQ ID NO: 94383 - DNA, 60 bp, Artificial
  Synthetic oligonucleotide
atttttgcagatggcggtctggcttcctgcacagaatagattttacctgcccccgcagcc

SEQ ID NO: 94384 - DNA, 60 bp, Artificial
  Synthetic oligonucleotide
ctgtcgatgaagagagtgactgggtattggttgaagcagagtgtagtgatgtagaggacg

SEQ ID NO: 94385 - DNA, 60 bp, Artificial
  Synthetic oligonucleotide
tgagacgttgcagctttgtggaagcagccttccatccacataaaagggtcgcagagaagg

SEQ ID NO: 94386 - DNA, 60 bp, Artificial
  Synthetic oligonucleotide
cgcggttcaaacgaccgcacccgatcctggcacaccgaaatcgctctctacaagttggct

SEQ ID NO: 94387 - DNA, 60 bp, Artificial
  Synthetic oligonucleotide
ctctgcgtgtcaagcaactctcagcacgtctgagaaagtccgctgtgctgcagaaggcag

SEQ ID NO: 94388 - DNA, 60 bp, Artificial
  Synthetic oligonucleotide
gcccgctaatagggtttccacaagcactaccagaagggctgtaaagagaaagagggcatc

SEQ ID NO: 94389 - DNA, 60 bp, Artificial
  Synthetic oligonucleotide
atgtcccacccaaaacaagggaagacccatatggcctctatagattctgggaggtggatc

SEQ ID NO: 94390 - DNA, 60 bp, Artificial
  Synthetic oligonucleotide
cacgcggggaacttcactcaatattataatgggcaaagatgataaaacagcaactggaga

SEQ ID NO: 94391 - DNA, 60 bp, Artificial
  Synthetic oligonucleotide
gtccggaaaaggcagtggagagtcttagtccgcgcctggagagtattagcatatcacctc

SEQ ID NO: 94392 - DNA, 60 bp, Artificial
  Synthetic oligonucleotide
cccctcttgcaaactggcaaatacttgtcctcctgatattgtcgactcgattgaaaataa

SEQ ID NO: 94393 - DNA, 60 bp, Artificial
  Synthetic oligonucleotide
tacattcctctgggagagggtgctggggtgcggctgaacacgagggtgtccacagtgagg

SEQ ID NO: 94394 - DNA, 60 bp, Artificial
  Synthetic oligonucleotide
gcaagtacataacataggtagaagaagtacaaagtccctgttctgtctctcctgtaccgt

SEQ ID NO: 94395 - DNA, 60 bp, Artificial
  Synthetic oligonucleotide
gggtctctagatgacttgtagggcaaggtgatggtttagagggcgtaggtgggagggcct

SEQ ID NO: 94396 - DNA, 60 bp, Artificial
  Synthetic oligonucleotide
aggtcaccacaacagacacctcagcactcatagaggttactcctgaaacgaggcctccca

SEQ ID NO: 94397 - DNA, 60 bp, Artificial
  Synthetic oligonucleotide
tttcagaaagtgagcacgacctggagttggactgctggtcagggggaaaggcaggggaga

SEQ ID NO: 94398 - DNA, 60 bp, Artificial
  Synthetic oligonucleotide
atcccactgatgtcattccagtcgatgctgtggatcctttgggtcctgcaatcgtcccat

SEQ ID NO: 94399 - DNA, 60 bp, Artificial
  Synthetic oligonucleotide
cacgtagatcagcgatcagaacaacacaacatcatacacccaactcttcgacctgtaaat

SEQ ID NO: 94400 - DNA, 60 bp, Artificial
  Synthetic oligonucleotide
ctggcaagtatgaggtgttacatgaacttacgcaacctgtttccaccagcacctcgccca

SEQ ID NO: 94401 - DNA, 60 bp, Artificial
  Synthetic oligonucleotide
gcgcatgctgatgtcatttgattctagcgagcagagagagtcctttctgaggcaggcacc

SEQ ID NO: 94402 - DNA, 60 bp, Artificial
  Synthetic oligonucleotide
agaatcagagctttggagagagattgtgaagtttcttaggcatcagacagtgagctttgt

SEQ ID NO: 94403 - DNA, 60 bp, Artificial
  Synthetic oligonucleotide
gcaaccctatttgtgtggactgcaaacataaagcaccctcgcaaattaagtgcccacccc

SEQ ID NO: 94404 - DNA, 60 bp, Artificial
  Synthetic oligonucleotide
gcaagagtcagttctggttgcagccactcgcagatgcaaagataggtttgctagatgatg

SEQ ID NO: 94405 - DNA, 60 bp, Artificial
  Synthetic oligonucleotide
cagaaaaggaacgcctggtatgggctgttcgtggtttagagattggtcgtggtcagcctc

SEQ ID NO: 94406 - DNA, 58 bp, Artificial
  Synthetic oligonucleotide
ctggtgcactcgtgacatttgacaatcctgcatacacggacgatgtggagttaatttt

SEQ ID NO: 94407 - DNA, 60 bp, Artificial
  Synthetic oligonucleotide
ggcttgttctcgaggccagagaccctccagtagtggtcttcaagggcgagcctaattcgc

SEQ ID NO: 94408 - DNA, 60 bp, Artificial
  Synthetic oligonucleotide
tgtgtctctaggcaggcctgtttatggccgtaatccacagggtggggttcgaataagcag

SEQ ID NO: 94409 - DNA, 60 bp, Artificial
  Synthetic oligonucleotide
gaggtgcacatcacatctacatcggggtctggggagtcctctgcagttgaccacgtattg

SEQ ID NO: 94410 - DNA, 60 bp, Artificial
  Synthetic oligonucleotide
ttcagcaaggcctaggaccctgtataacagacgcgtgcagcaggttcaggttgttgaccc

SEQ ID NO: 94411 - DNA, 60 bp, Artificial
  Synthetic oligonucleotide
ctatgtgaggcgtgagcagctatatgcaaggcacatgttcacaagatctgggaacttagg

SEQ ID NO: 94412 - DNA, 60 bp, Artificial
  Synthetic oligonucleotide
gatgcgaagggagcaagttattttgcactatgcacgaaagaatgccatcacgagagtagg

SEQ ID NO: 94413 - DNA, 60 bp, Artificial
  Synthetic oligonucleotide
gaccgttacagttaaaccggggtacagaatggctcgaccgacatcggtggaggatcttgg

SEQ ID NO: 94414 - DNA, 60 bp, Artificial
  Synthetic oligonucleotide
aaagggcggaaggccagttgatgtgaggtttgatggagatcctgaaaatgtcacgcagta

SEQ ID NO: 94415 - DNA, 60 bp, Artificial
  Synthetic oligonucleotide
gatagacattggcctgggtgcaatggattttcgtgtgctgcagcaaaataaggctggggt

SEQ ID NO: 94416 - DNA, 60 bp, Artificial
  Synthetic oligonucleotide
tgtttccaccagcacctcgcccagacctactgggtccaccggtaacagcacctccctggg

SEQ ID NO: 94417 - DNA, 60 bp, Artificial
  Synthetic oligonucleotide
attggctgcaagcctgcaattggggagcattggggtcaggctaggcggtgtgttggggaa

SEQ ID NO: 94418 - DNA, 60 bp, Artificial
  Synthetic oligonucleotide
ggccatttatagtaggtccatgaactaggtagcatagcatagcataggttctgagtaggc

SEQ ID NO: 94419 - DNA, 60 bp, Artificial
  Synthetic oligonucleotide
catctttccattctactttcatttgccaaccaccactgtgtccaggaaatcgttttacac

SEQ ID NO: 94420 - DNA, 60 bp, Artificial
  Synthetic oligonucleotide
ccagcataattcagaccattaaactgtgtaaagataactgtgttctgtgtttccagcgta

SEQ ID NO: 94421 - DNA, 60 bp, Artificial
  Synthetic oligonucleotide
gcctctgataacgtgcttctctgtaaatagacatcacgatccaacctatctagcttgcaa

SEQ ID NO: 94422 - DNA, 60 bp, Artificial
  Synthetic oligonucleotide
atagaggaggatttagacttcatagacaatagggttcccggagatgggcaggaaattccc

SEQ ID NO: 94423 - DNA, 60 bp, Artificial
  Synthetic oligonucleotide
acaggggaggatttagacttcatagacaatagggttcccggagatgggcaggaaattccc

SEQ ID NO: 94424 - DNA, 60 bp, Artificial
  Synthetic oligonucleotide
gcacagaaacaggggaggatgtagacttcatagacaatagggttcccggagatgggcagg

SEQ ID NO: 94425 - DNA, 60 bp, Artificial
  Synthetic oligonucleotide
gcgaaggctctttgcagagcaggacagcggactcgagctgactttaaacaatgaagctga

SEQ ID NO: 94426 - DNA, 60 bp, Artificial
  Synthetic oligonucleotide
agtaaaacaggatattgggaagtgaaagttaataaggaaactgtgtttgctcctgtcacc

SEQ ID NO: 94427 - DNA, 60 bp, Artificial
  Synthetic oligonucleotide
gaagtaaaagttaataaggaaactgtgtttgctcctgtcaccagctccacgcctccaggg

SEQ ID NO: 94428 - DNA, 60 bp, Artificial
  Synthetic oligonucleotide
ctggtcatgggtggcaggagatggcactgagcgtctaggcaggcccagaatgctcattag

SEQ ID NO: 94429 - DNA, 60 bp, Artificial
  Synthetic oligonucleotide
gcacaacatggtcttgggtggctggagatagcactgagcgtctaggcaggcccagaatgc

SEQ ID NO: 94430 - DNA, 60 bp, Artificial
  Synthetic oligonucleotide
cagcagaaatccaagcgaaggctctttgcagagcaggacagcggactcgagctatctcta

SEQ ID NO: 94431 - DNA, 60 bp, Artificial
  Synthetic oligonucleotide
agaagtctaagcgaaggctctttgcagagcaggacagcggactcgagctgactttaaaca

SEQ ID NO: 94432 - DNA, 60 bp, Artificial
  Synthetic oligonucleotide
actgttagtggctcattagtatccagtgatgctcaattgtttaacaggcccttctggctc

SEQ ID NO: 94433 - DNA, 60 bp, Artificial
  Synthetic oligonucleotide
cagtcagtggctcactagtctctagtgatgctcaattgtttaacaggcccttctggctgc

SEQ ID NO: 94434 - DNA, 60 bp, Artificial
  Synthetic oligonucleotide
aaaaggtggaacggtggtagtaccaaaggtgtcacctaatcaatacagagttttccgtgt

SEQ ID NO: 94435 - DNA, 60 bp, Artificial
  Synthetic oligonucleotide
ctgctgaggttttagcggagatagctcagcttaagagaaagtattgtgatagccccgaga

SEQ ID NO: 94436 - DNA, 60 bp, Artificial
  Synthetic oligonucleotide
tgaagctgtatctcttaatggcgcgtcacagcaggtagaatcgggattggggacgggaca

SEQ ID NO: 94437 - DNA, 60 bp, Artificial
  Synthetic oligonucleotide
cgggattggggacgggacaaagtttaaattctagcgcgcgggagaccattactgattctt

SEQ ID NO: 94438 - DNA, 60 bp, Artificial
  Synthetic oligonucleotide
gtagtagagtgtggggactgcggcaagaggctacgctttacctgtgtgagcgacaaggac

SEQ ID NO: 94439 - DNA, 60 bp, Artificial
  Synthetic oligonucleotide
cagaccctttagagggtagcagtgggtggtttttagtgactgaagcagactgtgtggatg

SEQ ID NO: 94440 - DNA, 60 bp, Artificial
  Synthetic oligonucleotide
ggggacgatggaaaccctcagccaacgcttagactctgtgcaagaacagcttctcaatct

SEQ ID NO: 94441 - DNA, 60 bp, Artificial
  Synthetic oligonucleotide
gacggaggagatccagatccccaggagttggattcgacccagcaagatccagaagacaag

SEQ ID NO: 94442 - DNA, 60 bp, Artificial
  Synthetic oligonucleotide
gccccaagcctacccttcaggacattgtgcttacagaaactgctgatcctgtaaatctgc

SEQ ID NO: 94443 - DNA, 58 bp, Artificial
  Synthetic oligonucleotide
cccctacggcccatcgctcttggcaacacccctgacaacgccaccgcgtcgcccgccc

SEQ ID NO: 94444 - DNA, 60 bp, Artificial
  Synthetic oligonucleotide
gaccctttaaaagcgataagactgtatgcggagactgggttgctgggatatcgggagtgc

SEQ ID NO: 94445 - DNA, 60 bp, Artificial
  Synthetic oligonucleotide
ggctcgggatccgccagtgatctgtttaaaagggggcaacaaccagcttaagtgcttaag

SEQ ID NO: 94446 - DNA, 60 bp, Artificial
  Synthetic oligonucleotide
ggcaacaacaattgacaggagaatttagaagagaaacaacctttatcggtctgccaactt

SEQ ID NO: 94447 - DNA, 60 bp, Artificial
  Synthetic oligonucleotide
gctgaccttttggatgagccagaatctgtgggcgaaggcctgcagctggtgattagttcc

SEQ ID NO: 94448 - DNA, 60 bp, Artificial
  Synthetic oligonucleotide
ggcaatccaatatcagttgattgcaagcacagggctccaacagaacttaaatgcccacca

SEQ ID NO: 94449 - DNA, 60 bp, Artificial
  Synthetic oligonucleotide
ggcggtgtggctgtcccagcagagtaaattttatgtgccaccacaacccattacaaagat

SEQ ID NO: 94450 - DNA, 60 bp, Artificial
  Synthetic oligonucleotide
gtgttttcttgaagattagcgcggttactcagcaattttacagttttgtcttgtctggag

SEQ ID NO: 94451 - DNA, 60 bp, Artificial
  Synthetic oligonucleotide
ccactagacgggcaccacggatcctaccgatgcccaagttatttgccactgatgtccatc

SEQ ID NO: 94452 - DNA, 60 bp, Artificial
  Synthetic oligonucleotide
cagtccttagcaacaaaatgtccaccggttgaacccccacaagaagacacagacccctat

SEQ ID NO: 94453 - DNA, 60 bp, Artificial
  Synthetic oligonucleotide
gtgggctggggcaaaatagacaagttaaaacggctgctcccactacaagtatgcgaggat

SEQ ID NO: 94454 - DNA, 60 bp, Artificial
  Synthetic oligonucleotide
gcttaaaggattagctgctcgaccgaaagcggtcccaggtggtaggaattactcaggcga

SEQ ID NO: 94455 - DNA, 60 bp, Artificial
  Synthetic oligonucleotide
ccagtgattcacaagtatttaatagggcttactggctacaacgagctcagggtatgaata

SEQ ID NO: 94456 - DNA, 60 bp, Artificial
  Synthetic oligonucleotide
gcgacatgtggaagagtttgagctgcagttcattgtacagctttgcaaagtccgtctcag

SEQ ID NO: 94457 - DNA, 60 bp, Artificial
  Synthetic oligonucleotide
cggcctcaggtcgagtgagagtcagcagacttggtactactggcactatccgcacacgca

SEQ ID NO: 94458 - DNA, 60 bp, Artificial
  Synthetic oligonucleotide
catgagcctgctaagactgatgggagggaaggtaatttcctttgcaaatagtaaaagcca

SEQ ID NO: 94459 - DNA, 60 bp, Artificial
  Synthetic oligonucleotide
gctgtccaccatgatacagtgggcttatgacaatcacataacagaagagagcaaaattgc

SEQ ID NO: 94460 - DNA, 60 bp, Artificial
  Synthetic oligonucleotide
gcttgggagctatggatcatagactgctgcaggtcagtaaggcagaagtaccaatggaac

SEQ ID NO: 94461 - DNA, 60 bp, Artificial
  Synthetic oligonucleotide
gaggagccacgcaccttggtggagctttgcgaccgtctaaattgtacctttgaaagcttg

SEQ ID NO: 94462 - DNA, 60 bp, Artificial
  Synthetic oligonucleotide
cctttgcttgaaaggcctttgccaacacagcctttgtgcaactgcagcttttgcagccca

SEQ ID NO: 94463 - DNA, 60 bp, Artificial
  Synthetic oligonucleotide
cagctaaaacttgtatggagggacgggtggcctcatggcagctgcagagtatgttgtaga

SEQ ID NO: 94464 - DNA, 60 bp, Artificial
  Synthetic oligonucleotide
ggacacccgacggggaggaggaaccaggagcaagaaatacaagtagccctgacagttctg

SEQ ID NO: 94465 - DNA, 60 bp, Artificial
  Synthetic oligonucleotide
gatcagcgattcctactgggccttgcgactgcgaggagtgcagtggtaataggacacccg

SEQ ID NO: 94466 - DNA, 60 bp, Artificial
  Synthetic oligonucleotide
aaagaaatccaaatcggtgacaagctcagacggtcttccggattagcacaaccgcctgag

SEQ ID NO: 94467 - DNA, 60 bp, Artificial
  Synthetic oligonucleotide
tgtaaaagactgtgctgctatggttcgcttgtatttcagagccgaaatgcaggaaatgtc

SEQ ID NO: 94468 - DNA, 60 bp, Artificial
  Synthetic oligonucleotide
ggatcctccaaagaccagaagcgttcctgcggctttgttttggtacaagcgagccatggt

SEQ ID NO: 94469 - DNA, 60 bp, Artificial
  Synthetic oligonucleotide
cgcgcgatacagtgacaagtttgctaaaacagcttttaggggttgaccacattcaggtca

SEQ ID NO: 94470 - DNA, 60 bp, Artificial
  Synthetic oligonucleotide
tcgggtggcaggggtggttatgttcccttgggaggctcatcaggcggacgggtagtaggt

SEQ ID NO: 94471 - DNA, 60 bp, Artificial
  Synthetic oligonucleotide
caatggtgctacgcacgcgcaagcgcagagctgctccacaagacatttatcctgcatgca

SEQ ID NO: 94472 - DNA, 60 bp, Artificial
  Synthetic oligonucleotide
cagaggagtcagtatggtcaggaaccgtggacattgcaggacacaagcaaggagagattt

SEQ ID NO: 94473 - DNA, 60 bp, Artificial
  Synthetic oligonucleotide
ggggcggcagcgcaatcctggacgtaatcagcgaggaaagtggagtcacaagcagaacac

SEQ ID NO: 94474 - DNA, 60 bp, Artificial
  Synthetic oligonucleotide
gtcctttagaagtaatccctgaagcggttgaccccgcagggtcttcaatcgttccccttg

SEQ ID NO: 94475 - DNA, 60 bp, Artificial
  Synthetic oligonucleotide
cagatgccccagaacctggtgagctcatagaattggtacccttgcatccacggggaagag

SEQ ID NO: 94476 - DNA, 60 bp, Artificial
  Synthetic oligonucleotide
ccttgctgcaccagacccccaattcactgacgtggtcaaactgtccagaccctcttatac

SEQ ID NO: 94477 - DNA, 60 bp, Artificial
  Synthetic oligonucleotide
tcactggtaaccctcttttcaatcgctatgatgacgttgaaaattctagtagatacaaca

SEQ ID NO: 94478 - DNA, 60 bp, Artificial
  Synthetic oligonucleotide
gcacgaggggagcaaatgtatgctcgacattttttcagtagagctggggatgataaggaa

SEQ ID NO: 94479 - DNA, 60 bp, Artificial
  Synthetic oligonucleotide
tcgcccgcccctgcagtatccgcaggccccgcgcaccatccgcaaaccccggtcaagtcg

SEQ ID NO: 94480 - DNA, 60 bp, Artificial
  Synthetic oligonucleotide
aacacagttgtttatacttggttgtgtcccggcaaccggtgagcactggacccaagcgca

SEQ ID NO: 94481 - DNA, 53 bp, Artificial
  Synthetic oligonucleotide
agaagacaaggaaaacatcccaccgacttcaacgccaacaccatctccgccga

SEQ ID NO: 94482 - DNA, 60 bp, Artificial
  Synthetic oligonucleotide
gcgcttgggaatgacatatgtgcctaccttggctgctacacagcacaatgctaaacaggc

SEQ ID NO: 94483 - DNA, 60 bp, Artificial
  Synthetic oligonucleotide
atctcgaccgcgcccggtgacacactccgtaaggacgaggaacaaaagaaatccaaatcg

SEQ ID NO: 94484 - DNA, 60 bp, Artificial
  Synthetic oligonucleotide
gaacaatggcatctgctggctcaatcaattgtttgtcacagttggtgacacgacccgtgg

SEQ ID NO: 94485 - DNA, 60 bp, Artificial
  Synthetic oligonucleotide
cgctcccggtacacaacatcctagccaagtcaggagtacactttgctctgccaaccaaag

SEQ ID NO: 94486 - DNA, 60 bp, Artificial
  Synthetic oligonucleotide
ccgcgcccggttgcacccggtgactaaaactttgcacctggatattttggcaggacatat

SEQ ID NO: 94487 - DNA, 60 bp, Artificial
  Synthetic oligonucleotide
tatggggccttcgtgggatggacgttggtcgtggacagccacttggtataggggtcactg

SEQ ID NO: 94488 - DNA, 60 bp, Artificial
  Synthetic oligonucleotide
acaaggccccgccttcgcctgagaccgacccctacgctggctactctttttggcttgttg

SEQ ID NO: 94489 - DNA, 60 bp, Artificial
  Synthetic oligonucleotide
gcgtacatctgttttctgtcatgcggcctctgataggcttttgactgtgggaaacccttt

SEQ ID NO: 94490 - DNA, 60 bp, Artificial
  Synthetic oligonucleotide
tctagcctccccctgaaccgtaaacgttcgcggtcgccatcttcaacttctaaacgctct

SEQ ID NO: 94491 - DNA, 60 bp, Artificial
  Synthetic oligonucleotide
ccagctttgcattgtgcccctcacccctgacgtgcttgcacatctgcacagccttaactc

SEQ ID NO: 94492 - DNA, 60 bp, Artificial
  Synthetic oligonucleotide
ccgttcggccctgtgcctcccctggtaatagtggatgtggaacgtggttctgggagtgat

SEQ ID NO: 94493 - DNA, 60 bp, Artificial
  Synthetic oligonucleotide
cggcggtctttcttggtggcttgaacataggaacggctacggggcgaggtggatctgggg

SEQ ID NO: 94494 - DNA, 60 bp, Artificial
  Synthetic oligonucleotide
gtgtccgtgggaatatcaccacccgcagtggcgtccagttggggtctcaggcacactttt

SEQ ID NO: 94495 - DNA, 60 bp, Artificial
  Synthetic oligonucleotide
gccttcccctttaacgaggagggcgagcctgtttaccaattaacaaaaggtaactggaaa

SEQ ID NO: 94496 - DNA, 60 bp, Artificial
  Synthetic oligonucleotide
tctggtgttactgtgggtgcagggacgcgtgccgtccgtcctcccattcccttggacgtt

SEQ ID NO: 94497 - DNA, 60 bp, Artificial
  Synthetic oligonucleotide
tgggaccaccagacacagggaaatcagcgttttgccttagcctgctagacttcttcgggg

SEQ ID NO: 94498 - DNA, 60 bp, Artificial
  Synthetic oligonucleotide
cagccactggccgacactagaatagcccttatagacgacgccaccaagtccacctgggac

SEQ ID NO: 94499 - DNA, 60 bp, Artificial
  Synthetic oligonucleotide
ggcaggtgcaggacctgaaaagaaagtatgtaagtccgaaacagaaagtagaggcagagt

SEQ ID NO: 94500 - DNA, 60 bp, Artificial
  Synthetic oligonucleotide
gcgggctggagtcatcgggtcaaaatgaaactagccattctactccggacagcgatcagg

SEQ ID NO: 94501 - DNA, 60 bp, Artificial
  Synthetic oligonucleotide
cacagaccctcattacacagctaatgcgagcgtctaaccaacgggcgacacagctcgccc

SEQ ID NO: 94502 - DNA, 60 bp, Artificial
  Synthetic oligonucleotide
caggtgtgcaaggacgcgtttcagtgtctagtcgacgtcgaggcggacctcaaccgtttc

SEQ ID NO: 94503 - DNA, 60 bp, Artificial
  Synthetic oligonucleotide
ttggacgttcttggggcggctgaggtacctcccgttgatgcgctggcgccctctgtggtg

SEQ ID NO: 94504 - DNA, 60 bp, Artificial
  Synthetic oligonucleotide
tggtgccgctgcaggaggggttgccggaagtgcccctgttggaggttaatcctggggaga

SEQ ID NO: 94505 - DNA, 60 bp, Artificial
  Synthetic oligonucleotide
tgttgacacttcgggttcttcctttgatgctggacctgtgcgtgtggtcgttcatgctgt

SEQ ID NO: 94506 - DNA, 60 bp, Artificial
  Synthetic oligonucleotide
ttgctatttgacacctccgctggggagtcctgtgcgaacgccggacgagttctggttccc

SEQ ID NO: 94507 - DNA, 60 bp, Artificial
  Synthetic oligonucleotide
tcacaggaaacggcgacgggtggccggaggaggtggaactgcaggacctaagaggcagag

SEQ ID NO: 94508 - DNA, 60 bp, Artificial
  Synthetic oligonucleotide
agggacatacccctcccgaggccttccccgctgcccctgccggacacgcgcccgacgttg

SEQ ID NO: 94509 - DNA, 52 bp, Artificial
  Synthetic oligonucleotide
acaccccgcaccccttgagcccgtgcccaggggcctcgcctcccctgagcca

SEQ ID NO: 94510 - DNA, 60 bp, Artificial
  Synthetic oligonucleotide
ggcagagtgtagtgatatggacacaagtgaggatgatgcggaggacgagagttcgggcga

SEQ ID NO: 94511 - DNA, 60 bp, Artificial
  Synthetic oligonucleotide
cccagagggcgtaaccgtgtgtctttggatctgcctaccaatacccttgcttttcccagc

SEQ ID NO: 94512 - DNA, 60 bp, Artificial
  Synthetic oligonucleotide
gaccttgatagctcaagcttgtcatcgctgtcgctgacctctaatgatctggaggctgtt

SEQ ID NO: 94513 - DNA, 60 bp, Artificial
  Synthetic oligonucleotide
ggcgtgagcaggaatatattcggcatttttttagcagggagggtgcagtgggggaggcgg

SEQ ID NO: 94514 - DNA, 60 bp, Artificial
  Synthetic oligonucleotide
cagcggtcggcgtcctgcagaatcagcgagtgtgcaattgcgttgtcatggctacgtgga

SEQ ID NO: 94515 - DNA, 60 bp, Artificial
  Synthetic oligonucleotide
tgccccggaccctcgtttcagggacattgtacgcctgtcctctgcacggtttgaacgcgc

SEQ ID NO: 94516 - DNA, 60 bp, Artificial
  Synthetic oligonucleotide
ggagattggctacggtgctatggatcacaggggtctctctcagaataagtccgatgcacc

SEQ ID NO: 94517 - DNA, 60 bp, Artificial
  Synthetic oligonucleotide
caaaacaaacccaggttcttattgttgggtgttcccctgccctcggtgaacactggtctg

SEQ ID NO: 94518 - DNA, 60 bp, Artificial
  Synthetic oligonucleotide
ggggtacccgcagcgatttgtggagcaggtgaatatatctgacttggatgtattggagag

SEQ ID NO: 94519 - DNA, 60 bp, Artificial
  Synthetic oligonucleotide
cggtgtgtctgtaggaccttcagaggagattcccctacgtgtgtttcgcacaagcacccc

SEQ ID NO: 94520 - DNA, 60 bp, Artificial
  Synthetic oligonucleotide
gccgacgaggacacaaatgcagcggcatggctaggtacaaactcacaggccaagcatgtc

SEQ ID NO: 94521 - DNA, 60 bp, Artificial
  Synthetic oligonucleotide
gcagagcagccattttgcgctttccttaaaggcgccgcgcgcatgtcactggacttatgc

SEQ ID NO: 94522 - DNA, 60 bp, Artificial
  Synthetic oligonucleotide
tatcaagctaatgaaaagcgtactaagtgtgtcggacatccaaattctcgccgacccacc

SEQ ID NO: 94523 - DNA, 60 bp, Artificial
  Synthetic oligonucleotide
catttggagtgcaccacaacacctatagcgatctagtgcataggttggaaaagcattgcg

SEQ ID NO: 94524 - DNA, 60 bp, Artificial
  Synthetic oligonucleotide
cgaccacacagaggagagcgatatagcctaccactatgcattgctagccgacgaggacac

SEQ ID NO: 94525 - DNA, 60 bp, Artificial
  Synthetic oligonucleotide
ccacttccagactgggttgcacggcagacattagtgcagcatcacagcggggaggacaac

SEQ ID NO: 94526 - DNA, 60 bp, Artificial
  Synthetic oligonucleotide
gaggtgcacatgctgtctcgggcttgtgaccaccacgcagaagatccaagcactctacag

SEQ ID NO: 94527 - DNA, 60 bp, Artificial
  Synthetic oligonucleotide
gcaccggacaaaggtgggacgtggtaattaacaatgaacatatttgccctcccgaatctg

SEQ ID NO: 94528 - DNA, 60 bp, Artificial
  Synthetic oligonucleotide
gcagaatctgataatgattgggaaagacgctactttgagagacatcgttcttgaggagca

SEQ ID NO: 94529 - DNA, 60 bp, Artificial
  Synthetic oligonucleotide
ctctgcgtgcgctcaggagtgtctctgtgcgcgataagcattccatgtgtgttttgtggc

SEQ ID NO: 94530 - DNA, 60 bp, Artificial
  Synthetic oligonucleotide
cggctaggtctgcagccagtaccttcgctgcgagtgtcagccgagaaagcaaagcaagca

SEQ ID NO: 94531 - DNA, 60 bp, Artificial
  Synthetic oligonucleotide
tgtgccgaaacacatcattgtgctgtcccacctgcgccgcgtcctaccgctttgaccatg

SEQ ID NO: 94532 - DNA, 60 bp, Artificial
  Synthetic oligonucleotide
acgaaaagtggcagaagacaaagagcaacgtagataatgatggactatggttttgggaca

SEQ ID NO: 94533 - DNA, 60 bp, Artificial
  Synthetic oligonucleotide
acaggggactgtttgaacgcattagcacgacgtggtactgggctggggaagggtcggaca

SEQ ID NO: 94534 - DNA, 60 bp, Artificial
  Synthetic oligonucleotide
actcggagggcattcatggcgcgaccatcttctgttcaaggtctttgcgaagctaccggg

SEQ ID NO: 94535 - DNA, 60 bp, Artificial
  Synthetic oligonucleotide
gcggtggaaagggaggtgtgcttttggctgctgtcaaggctgcataagactgtgtgcaca

SEQ ID NO: 94536 - DNA, 60 bp, Artificial
  Synthetic oligonucleotide
cacgcgtggtacacctttgaccattaatgtgggtccaaatgatagagccgaagatggaga

SEQ ID NO: 94537 - DNA, 60 bp, Artificial
  Synthetic oligonucleotide
cttctcttttctgtcgggtgagcaccacgtggacttggacagcaccgtatgggacagaca

SEQ ID NO: 94538 - DNA, 60 bp, Artificial
  Synthetic oligonucleotide
ccagagtgacgatgacaaatggcgcaagacacagggtcgggtagatgcaaggggtttgtt

SEQ ID NO: 94539 - DNA, 60 bp, Artificial
  Synthetic oligonucleotide
atggatacacaggcagtgcagaagggccgagggtgacggtgactggaaggaggtggtgaa

SEQ ID NO: 94540 - DNA, 60 bp, Artificial
  Synthetic oligonucleotide
gctcccggactggatagccaagcaaaccctgataaaccaccagctagctgcagagaaacc

SEQ ID NO: 94541 - DNA, 60 bp, Artificial
  Synthetic oligonucleotide
ctgagacagaactgtgcgggttgctagaccatcctgaggcggcatgtgttaggtgtggct

SEQ ID NO: 94542 - DNA, 60 bp, Artificial
  Synthetic oligonucleotide
aagtcagaaaagcagggagacagtgtctaaactactcacgggattatttgattgcagggg

SEQ ID NO: 94543 - DNA, 60 bp, Artificial
  Synthetic oligonucleotide
gcaggggagccctggacactctcggacactagtagggaacgtctccttacagaaccagca

SEQ ID NO: 94544 - DNA, 60 bp, Artificial
  Synthetic oligonucleotide
ggggaactttgggatatgtgcctgtgggaacaggacaaggggttcgcctgggaacacgtg

SEQ ID NO: 94545 - DNA, 60 bp, Artificial
  Synthetic oligonucleotide
gcactctgaaagcattgtcactgagtctgtcactgaggtccctgtgaacacacccaaggt

SEQ ID NO: 94546 - DNA, 60 bp, Artificial
  Synthetic oligonucleotide
taaatactcccttcccggtcatctagtccagcctcctcccttaaatagaactggtctctc

SEQ ID NO: 94547 - DNA, 60 bp, Artificial
  Synthetic oligonucleotide
ccccaatgcaaaatctccaacacctgcccacccgatgtactcaataaagctgagcaaagc

SEQ ID NO: 94548 - DNA, 60 bp, Artificial
  Synthetic oligonucleotide
ctaacaaaacaccagccataattctagagatttggggctcaggggaaaattactccctgc

SEQ ID NO: 94549 - DNA, 60 bp, Artificial
  Synthetic oligonucleotide
gactgcgccttccagaccctaataactttgcttttggtgataagtctttgttcaaccccg

SEQ ID NO: 94550 - DNA, 60 bp, Artificial
  Synthetic oligonucleotide
tgttctgccaaaagcaaggattatcgagaccgctaccggtgttggcgcacttcccggacc

SEQ ID NO: 94551 - DNA, 60 bp, Artificial
  Synthetic oligonucleotide
gggtcaaggcacggtggtgcaatggtgctgcgcacgaaagtcaacagtgccctccaattg

SEQ ID NO: 94552 - DNA, 60 bp, Artificial
  Synthetic oligonucleotide
ctaggggtggcgggcaaaatggcgctgaggtgttgctcaggtcaaagaacaggcgtttgt

SEQ ID NO: 94553 - DNA, 60 bp, Artificial
  Synthetic oligonucleotide
tcctgggtgattctcgctggccctatttgcgcagtagactttctgccttttgctttgctg

SEQ ID NO: 94554 - DNA, 60 bp, Artificial
  Synthetic oligonucleotide
gctctattattgtgctagaaggcgaggaataacaagggtagggatggctgtggtgccgcc

SEQ ID NO: 94555 - DNA, 60 bp, Artificial
  Synthetic oligonucleotide
cacagtgcaggttgtgtgcgtgacctgcgttacacagcagaagcttaatcatggcggata

SEQ ID NO: 94556 - DNA, 60 bp, Artificial
  Synthetic oligonucleotide
aacgccgaccaagaaacggaaacgacccctccggatctcatcccctagaaccccaagacc

SEQ ID NO: 94557 - DNA, 60 bp, Artificial
  Synthetic oligonucleotide
cacgggccatgcagacaatgctcctgaccctcgcgtcaacatggctgtcgacccaaaaca

SEQ ID NO: 94558 - DNA, 60 bp, Artificial
  Synthetic oligonucleotide
ctccatttaaagtctccatttaaagtctccatttgaggtcgccttctcaagcctccatgt

SEQ ID NO: 94559 - DNA, 60 bp, Artificial
  Synthetic oligonucleotide
cctctgtgcgcgcgcttccctagttttgcaacagtgccaaaacagcacttatcccttggc

SEQ ID NO: 94560 - DNA, 60 bp, Artificial
  Synthetic oligonucleotide
gccgttagccaagatacaaaggggtccagccaacatcagcttaagtttacacagatagtc

SEQ ID NO: 94561 - DNA, 60 bp, Artificial
  Synthetic oligonucleotide
ccaactcttgaacagttgaaaacattaagctaccacagacaaaacagctgtcaccgcaca

SEQ ID NO: 94562 - DNA, 60 bp, Artificial
  Synthetic oligonucleotide
gcaagttggtgagccagagcctgagcgcacagtagccactcggtcaacctaccccacttt

SEQ ID NO: 94563 - DNA, 60 bp, Artificial
  Synthetic oligonucleotide
tgctccaaactctgtgtacaaacgtgatcaaatatgcaactgtaatcacttaaaccaaaa

SEQ ID NO: 94564 - DNA, 60 bp, Artificial
  Synthetic oligonucleotide
cctgaaaacctagccactattcacaccatgaaccctgacatcattgagagctggcacctc

SEQ ID NO: 94565 - DNA, 60 bp, Artificial
  Synthetic oligonucleotide
gcagggtggaggctctaaacgtgcgagggtgactacctctgtgtccaaagacaaacctgt

SEQ ID NO: 94566 - DNA, 60 bp, Artificial
  Synthetic oligonucleotide
gtgcgtgaccccggtttcataagcaggcccaggtctttggtgacattccagaaccccaca

SEQ ID NO: 94567 - DNA, 60 bp, Artificial
  Synthetic oligonucleotide
cctagaggcagaaacaaccttcaccacaagcacacctaaggcggatgcagtcgctgaacc

SEQ ID NO: 94568 - DNA, 60 bp, Artificial
  Synthetic oligonucleotide
ctaagtaaacccaccttttctcgcaccctggaggggagggtgagagtcagccggctagga

SEQ ID NO: 94569 - DNA, 60 bp, Artificial
  Synthetic oligonucleotide
gggtcacacagaattcaacagccaatagtcaagttagcaagttagcatagcgtgtaggcg

SEQ ID NO: 94570 - DNA, 60 bp, Artificial
  Synthetic oligonucleotide
acaatcaggccaggctgtcatttcctctggcaccagtgatctagagattatcagcttgga

SEQ ID NO: 94571 - DNA, 60 bp, Artificial
  Synthetic oligonucleotide
gaccctaatacaaccattgtgtgattatgcacacatacaagtgctaccatgccaatgggg

SEQ ID NO: 94572 - DNA, 60 bp, Artificial
  Synthetic oligonucleotide
gcagagggcataaagaccctaatacaaccattgtgtgattatgcacacatacaagtgcta

SEQ ID NO: 94573 - DNA, 60 bp, Artificial
  Synthetic oligonucleotide
gctgctactaggcacattgaagctcgtgtgtcctcgctgcgtgtaacaggacatggacga

SEQ ID NO: 94574 - DNA, 60 bp, Artificial
  Synthetic oligonucleotide
aggaagaaaaggacagacatcgtaacgaacggcgacgactgcacaaaatatcagggtact

SEQ ID NO: 94575 - DNA, 60 bp, Artificial
  Synthetic oligonucleotide
cgtgtaacaggacatggacgataatacaggtacagaggggggcgcatgttccgaatcgga

SEQ ID NO: 94576 - DNA, 60 bp, Artificial
  Synthetic oligonucleotide
ctgctgctaggcacattgaagctcgtgtgtcctcgctgcgtgtaacaggacatggacgat

SEQ ID NO: 94577 - DNA, 60 bp, Artificial
  Synthetic oligonucleotide
ccgctggtaagggaagaaaaagacagacatcgtaacgaacggcgacgactgcacaaaata

SEQ ID NO: 94578 - DNA, 60 bp, Artificial
  Synthetic oligonucleotide
gccctgccaataaaatgtgcttccaaatctccaccaagacacacctaatccggtcgctgc

SEQ ID NO: 94579 - DNA, 60 bp, Artificial
  Synthetic oligonucleotide
gatgttcccaaagtatctgcatatcagtatagggtgtttcgggtgcggttgcctgacccc

SEQ ID NO: 94580 - DNA, 60 bp, Artificial
  Synthetic oligonucleotide
ctgtggaagtaagatatgatggagacgaatctaaagccatgtgctatgtacaatggaggg

SEQ ID NO: 94581 - DNA, 60 bp, Artificial
  Synthetic oligonucleotide
ctgttgaagtcagatatgatggagacgaatctaaagccatgtgctatgtacaatggaggg

SEQ ID NO: 94582 - DNA, 60 bp, Artificial
  Synthetic oligonucleotide
aactgtggaagtaagatatgatggagacgaatctaaagccatgtgctatgtacaatggag

SEQ ID NO: 94583 - DNA, 54 bp, Artificial
  Synthetic oligonucleotide
ttggccatcaggtggtgccacctcttagtgtaactaaagccaaggcacgcaatg

SEQ ID NO: 94584 - DNA, 60 bp, Artificial
  Synthetic oligonucleotide
ctgacacatattggccatcaggtggtgccacctcttagtgtaactaaagccaaggcacgc

SEQ ID NO: 94585 - DNA, 60 bp, Artificial
  Synthetic oligonucleotide
gctgtacaaagcaagagaatgtggactgacacatattggccatcaggtggtgccacctct

SEQ ID NO: 94586 - DNA, 60 bp, Artificial
  Synthetic oligonucleotide
gccttgccaataaaatgtgcttccaaatctccaccaagacacacctaatccggtcgctgc

SEQ ID NO: 94587 - DNA, 60 bp, Artificial
  Synthetic oligonucleotide
gcaacaaacttgaggaccagatcacgcattggcacctattgcgtgtagaaaatgctttgc

SEQ ID NO: 94588 - DNA, 60 bp, Artificial
  Synthetic oligonucleotide
ggcacttattgcgtgtagaaaatgctttgctgtacaaagcaagagaatgtggactgacac

SEQ ID NO: 94589 - DNA, 60 bp, Artificial
  Synthetic oligonucleotide
ctttcttgctagcaactgtcaagcaaagtatctaaaggatgcatgcacaatgtgcagaca

SEQ ID NO: 94590 - DNA, 60 bp, Artificial
  Synthetic oligonucleotide
aggatgcatgcacaatgtgcagacattataaaagaggagaacaggcgcgcatgagcatgt

SEQ ID NO: 94591 - DNA, 60 bp, Artificial
  Synthetic oligonucleotide
gcacaatgtgcagacattataaaagaggagaacaggcgcgcatgagcatgtcagaatgga

SEQ ID NO: 94592 - DNA, 60 bp, Artificial
  Synthetic oligonucleotide
tgtgcagacattataaaagaggagaacaggcgcgtatgagtatgtcagaatggatacggt

SEQ ID NO: 94593 - DNA, 60 bp, Artificial
  Synthetic oligonucleotide
catgtcagaatggatatggtttagaggcgacaaagtacagggagatggagattggaaacc

SEQ ID NO: 94594 - DNA, 60 bp, Artificial
  Synthetic oligonucleotide
ggatacggttcagaggcgacaaagtacagggagatggagattggaagcccatagtccaat

SEQ ID NO: 94595 - DNA, 60 bp, Artificial
  Synthetic oligonucleotide
atgaaaaggatagcgacaaacttgaggaccagatcacgcattggcacttattgcgtgtag

SEQ ID NO: 94596 - DNA, 60 bp, Artificial
  Synthetic oligonucleotide
aaggatagcaacaaacttgaggaccagatcacgcattggcacctattgcgtgtagaaaat

SEQ ID NO: 94597 - DNA, 60 bp, Artificial
  Synthetic oligonucleotide
ccagctccgaacagattaagctaccacagacaatacaaacagctgtcaccgcacacaatc

SEQ ID NO: 94598 - DNA, 60 bp, Artificial
  Synthetic oligonucleotide
ggatgaaatacccgaaattgttgacctacattgcgacgagcaatttgacagctcagaaga

SEQ ID NO: 94599 - DNA, 60 bp, Artificial
  Synthetic oligonucleotide
ttacactaatattggatgaaatacccgaaattgttgacctacattgcgacgagcaatttg

SEQ ID NO: 94600 - DNA, 60 bp, Artificial
  Synthetic oligonucleotide
acctatggggtcaccgggacgtgggaggtgcaggtcggggggcgtgttatttatcataca

SEQ ID NO: 94601 - DNA, 60 bp, Artificial
  Synthetic oligonucleotide
tactgatccctatgcaaccatgacattctgggatgtggatctcagtgaaagtttttccat

SEQ ID NO: 94602 - DNA, 60 bp, Artificial
  Synthetic oligonucleotide
gcaacagtgcaggccctaaaacgaaagtttgtagcgagtcctttgtccgcatgctcatgc

SEQ ID NO: 94603 - DNA, 60 bp, Artificial
  Synthetic oligonucleotide
ggaagaaatacccgaaattgttgacctacattgcgacgagcaatttgacaactcagaaga

SEQ ID NO: 94604 - DNA, 60 bp, Artificial
  Synthetic oligonucleotide
ctggcgaaccgtttagatgcgtgccaggagacgttgctagaactgtatgaaaaggatagc

SEQ ID NO: 94605 - DNA, 60 bp, Artificial
  Synthetic oligonucleotide
gttaactatgtggactttggaacagagtccttgacctatggggtcaccgggacgtgggag

SEQ ID NO: 94606 - DNA, 60 bp, Artificial
  Synthetic oligonucleotide
agcaacaaacttgaggaccaaattaaacattgggcgcaggtccggctagaaaatgtcatg

SEQ ID NO: 94607 - DNA, 60 bp, Artificial
  Synthetic oligonucleotide
ctaatattggatgaaatacccgaaattgttgacctacattgcgacgagcaatttgacagc

SEQ ID NO: 94608 - DNA, 60 bp, Artificial
  Synthetic oligonucleotide
caatcaagggaaataacggacagtggatatggctattctgaagtggaaactgcaacgcag

SEQ ID NO: 94609 - DNA, 53 bp, Artificial
  Synthetic oligonucleotide
aaaataggagggaccgaaaacggttcaaccgaaaacggttgtatataaaccag

SEQ ID NO: 94610 - DNA, 57 bp, Artificial
  Synthetic oligonucleotide
agaccacggcacaccgcttttaccacggacgctacgagaactctgtgtgtggagagg

SEQ ID NO: 94611 - DNA, 60 bp, Artificial
  Synthetic oligonucleotide
cgacaggcttaacgttgcctttgaccctaagcaaacccagctcatcattgtagggtgccg

SEQ ID NO: 94612 - DNA, 60 bp, Artificial
  Synthetic oligonucleotide
agcaggtgcggtacaacctcctgtggaacctcctcccaccacatctatatccgggtcagc

SEQ ID NO: 94613 - DNA, 60 bp, Artificial
  Synthetic oligonucleotide
gggagccacttttggttaacaccattgaggacagctagaataggtatgatagatgatgcc

SEQ ID NO: 94614 - DNA, 60 bp, Artificial
  Synthetic oligonucleotide
cgagcgtgatgtggcagacttagaacgattaccagatccatttcaagacattcaatatct

SEQ ID NO: 94615 - DNA, 60 bp, Artificial
  Synthetic oligonucleotide
aaaccttctactgcattctaccctgacaccggagtaaacatagcatatactcctacaaaa

SEQ ID NO: 94616 - DNA, 60 bp, Artificial
  Synthetic oligonucleotide
ttggacgaaatggaggagggggacacattagcccgcagttctcagctgctcttgtctttt

SEQ ID NO: 94617 - DNA, 60 bp, Artificial
  Synthetic oligonucleotide
ggtctgcaggaggagccacaagaacagcaagtgcagctagcaccttgcgacatatatgtc

SEQ ID NO: 94618 - DNA, 60 bp, Artificial
  Synthetic oligonucleotide
caccacgcccgagaccaggccaacgcttttgtctgctagaaacaggaggtccagatctgg

SEQ ID NO: 94619 - DNA, 60 bp, Artificial
  Synthetic oligonucleotide
tcacgtatatcagcacaacttttaactggaccgcaccccagggaactgacaggtgtggtt

SEQ ID NO: 94620 - DNA, 60 bp, Artificial
  Synthetic oligonucleotide
gagcactaacatggtagtacgtaggcgcatcaagcgagctaaccccacacaattatatgc

SEQ ID NO: 94621 - DNA, 60 bp, Artificial
  Synthetic oligonucleotide
cccaagcctattacctcgcagaaagcgcaaacgtcgtattttatgatttcagatggctgt

SEQ ID NO: 94622 - DNA, 60 bp, Artificial
  Synthetic oligonucleotide
ggcttgggaattgggaccgggcggggaggcggtggagtaagtttgggtggggggtctata

SEQ ID NO: 94623 - DNA, 60 bp, Artificial
  Synthetic oligonucleotide
cacagcatagcaggacagggcagtatacagtgaactctgatcaagatgtgtctgaccctg

SEQ ID NO: 94624 - DNA, 60 bp, Artificial
  Synthetic oligonucleotide
aaccggccttattggctacggtctgcacaaggacacaataatggcatactatggcataac

SEQ ID NO: 94625 - DNA, 60 bp, Artificial
  Synthetic oligonucleotide
attgtagggtgccgccctgcccaaggagaacactgggatgcagctccctggtgtgcttca

SEQ ID NO: 94626 - DNA, 60 bp, Artificial
  Synthetic oligonucleotide
gatcatagatgcaatgaagtcacagaacaagtgggtgaagaatggaggtcaattgtgcac

SEQ ID NO: 94627 - DNA, 60 bp, Artificial
  Synthetic oligonucleotide
ggagaacccatttaacccacaaagggctgatgtggaggaggaggatgctgacgacaggct

SEQ ID NO: 94628 - DNA, 60 bp, Artificial
  Synthetic oligonucleotide
gtcctacagatgtaactacctccgaatctacagatccatacagcaaatatcgcttctggg

SEQ ID NO: 94629 - DNA, 59 bp, Artificial
  Synthetic oligonucleotide
atgggccctagataataatttgacagaagaaagctcgatagcactaaaatatgcaatgc

SEQ ID NO: 94630 - DNA, 60 bp, Artificial
  Synthetic oligonucleotide
gctctgtaaggtgtctctgactcctgaaaacttagcctatatacatacaatggaccagag

SEQ ID NO: 94631 - DNA, 60 bp, Artificial
  Synthetic oligonucleotide
atgcagctgtagacaatgcagccggggaacacctgtcactgctccaaacacaaatgcgcg

SEQ ID NO: 94632 - DNA, 60 bp, Artificial
  Synthetic oligonucleotide
cgaaaacggggcattgtacgtgtaatgggcagaagcatccctagtctgcaagcctctgag

SEQ ID NO: 94633 - DNA, 60 bp, Artificial
  Synthetic oligonucleotide
gcggatgcccgcaacgttttggcggactttgtctgacacttcaaaggatttggcactgtt

SEQ ID NO: 94634 - DNA, 60 bp, Artificial
  Synthetic oligonucleotide
aggcaggaagtttcggtttcaaggtggtcttcaaggtggtctccgaggttctacttcttc

SEQ ID NO: 94635 - DNA, 60 bp, Artificial
  Synthetic oligonucleotide
atggcaaaagcgtctcaacagaaaaaagctgtctgcatggctcaggaaagagaccacggc

SEQ ID NO: 94636 - DNA, 60 bp, Artificial
  Synthetic oligonucleotide
gctctgcaacacttgttctacccggcatggatataccaggaaccagcgggacaggagaca

SEQ ID NO: 94637 - DNA, 60 bp, Artificial
  Synthetic oligonucleotide
gcgtcacttagacttgacacccctggaagaggacacacatggagagactgcaacaccgct

SEQ ID NO: 94638 - DNA, 60 bp, Artificial
  Synthetic oligonucleotide
ctcgagtagggtccagccatcatttcttttatgatattagtgacattacacctctagagg

SEQ ID NO: 94639 - DNA, 60 bp, Artificial
  Synthetic oligonucleotide
gctctgagtcctaagctagagcaatgttctttgcagagacaggttaataagaaagctaga

SEQ ID NO: 94640 - DNA, 60 bp, Artificial
  Synthetic oligonucleotide
ggtcagcgcgccgacctttcggagagggttttgggcggcaacccttagatcctattggta

SEQ ID NO: 94641 - DNA, 60 bp, Artificial
  Synthetic oligonucleotide
atgtgtatgtgcatgcttctactgagcgtctgctgactgtcggtcatccttattatgcta

SEQ ID NO: 94642 - DNA, 60 bp, Artificial
  Synthetic oligonucleotide
tgtgagatgtgtgcgctgtctcatgcctttgacaacagtagagaaagaatttcttgctag

SEQ ID NO: 94643 - DNA, 60 bp, Artificial
  Synthetic oligonucleotide
ccagccaatacagggcatttcggtgcaggtttccggaccctaacaactttgcttttggag

SEQ ID NO: 94644 - DNA, 60 bp, Artificial
  Synthetic oligonucleotide
gcatctatccgcccgtacggccggcaatttggtcaggtcagagtaggtgatgcagcattc

SEQ ID NO: 94645 - DNA, 60 bp, Artificial
  Synthetic oligonucleotide
ggatggtcaggctgaaactagttttattgaacatgggtcatactctgaagttcccttgac

SEQ ID NO: 94646 - DNA, 60 bp, Artificial
  Synthetic oligonucleotide
catttgaagtttctatccattccgaattgccctcggcggaaacttcctcagttgatcacg

SEQ ID NO: 94647 - DNA, 60 bp, Artificial
  Synthetic oligonucleotide
gaaggcccacatacaccctttggtgctggtggtgatattgcagtattggaggtccctaca

SEQ ID NO: 94648 - DNA, 60 bp, Artificial
  Synthetic oligonucleotide
ataaaacccagggaggagtggacagaactggtatctactatattggtgtggacggcagcc

SEQ ID NO: 94649 - DNA, 60 bp, Artificial
  Synthetic oligonucleotide
gcagctgcagctagaggaccttgcaaagagcccatatggtttggagccctggtctctgtc

SEQ ID NO: 94650 - DNA, 60 bp, Artificial
  Synthetic oligonucleotide
ccgagactggcacggacctagagactacgcaggtagaaggatgtaacgatgcacatgctg

SEQ ID NO: 94651 - DNA, 60 bp, Artificial
  Synthetic oligonucleotide
ttcttctaaaagacttatggcagatcctccaaagttacgtagcgcgcctgcttgcctttt

SEQ ID NO: 94652 - DNA, 60 bp, Artificial
  Synthetic oligonucleotide
atcattgtggatggctgtaagacacgaaaatgtgctgttccacactatgcgaaaacgggg

SEQ ID NO: 94653 - DNA, 60 bp, Artificial
  Synthetic oligonucleotide
ttatgtacccctgcttgaggatggaaaagcggcagccaagcacacactgcagcagcagtg

SEQ ID NO: 94654 - DNA, 60 bp, Artificial
  Synthetic oligonucleotide
tgcggcttctggcgagattagaatttcgggcgaggcatatgttctcgtgtacggtgcagc

SEQ ID NO: 94655 - DNA, 58 bp, Artificial
  Synthetic oligonucleotide
ttccatcgcgcgttggggctagtagcgctttttagaattgccaagaaaaagggtataa

SEQ ID NO: 94656 - DNA, 60 bp, Artificial
  Synthetic oligonucleotide
cgcgccatttctccgccgcctaaaacgtaagtgaaacgctttcgttattaaacgctttcg

SEQ ID NO: 94657 - DNA, 60 bp, Artificial
  Synthetic oligonucleotide
caccaccacaacggtcacgacaaagaaaacgatccccagcggggcccaccaccaacacca

SEQ ID NO: 94658 - DNA, 60 bp, Artificial
  Synthetic oligonucleotide
cctgccaacggatctgtaatactttaacgcctgcagcgctcattccgctttttttgaact

SEQ ID NO: 94659 - DNA, 60 bp, Artificial
  Synthetic oligonucleotide
cgttcattgcgaaccttatgcacccattgtacagctggattgttttaatgttgtatggtg

SEQ ID NO: 94660 - DNA, 60 bp, Artificial
  Synthetic oligonucleotide
agggaacatggcatacagacattaaaccaccaggtggtgccagcctataacatttcaaaa

SEQ ID NO: 94661 - DNA, 60 bp, Artificial
  Synthetic oligonucleotide
aagggaacatggcatacagacattaaaccaccaggtggtgccagcctataacatttcaaa

SEQ ID NO: 94662 - DNA, 60 bp, Artificial
  Synthetic oligonucleotide
gcagcaagggaacatggtatacagacattaaaccaccaggtggtgccagcctttaacatt

SEQ ID NO: 94663 - DNA, 60 bp, Artificial
  Synthetic oligonucleotide
cggaaactctgtagtggtaacactacgcctataatacatttaaaaggtgacagaaacagt

SEQ ID NO: 94664 - DNA, 60 bp, Artificial
  Synthetic oligonucleotide
tgatttatacagggtgtctgcctcctgcggtctctgtggcagcggggtgaggttcgcctg

SEQ ID NO: 94665 - DNA, 60 bp, Artificial
  Synthetic oligonucleotide
tgatttatacagggtgtcagcgtactgcggtctctgtggcagcggggtgaggttcgcctg

SEQ ID NO: 94666 - DNA, 60 bp, Artificial
  Synthetic oligonucleotide
tgatttatacagggtgtcttccgactgcggcctctgtggcagcggggtgaggttcgcctg

SEQ ID NO: 94667 - DNA, 60 bp, Artificial
  Synthetic oligonucleotide
cctgtggaggtcatttatgataaggagtccggaaatgcaaatgtttatactatgtggaag

SEQ ID NO: 94668 - DNA, 60 bp, Artificial
  Synthetic oligonucleotide
ctgcaactgcaatctctgcaaaagtctgagtatgcttcagagccctggacattagtggac

SEQ ID NO: 94669 - DNA, 60 bp, Artificial
  Synthetic oligonucleotide
attatgtgttgtttgctgatggtgcacgtacatatagtaaaacaggatattgggaagtga

SEQ ID NO: 94670 - DNA, 60 bp, Artificial
  Synthetic oligonucleotide
tacaacctcttggagagtgtaaaattgccttgatagatgatgtaacagatccttgttggc

SEQ ID NO: 94671 - DNA, 60 bp, Artificial
  Synthetic oligonucleotide
cctccttactagaggattggcagttaggatttgtgccaactcccgataatcctatccagg

SEQ ID NO: 94672 - DNA, 60 bp, Artificial
  Synthetic oligonucleotide
ctcgcctgttgtgaccaccagcagaggctcaagtgccatactagaggttgctccagagcc

SEQ ID NO: 94673 - DNA, 60 bp, Artificial
  Synthetic oligonucleotide
cagtagcctggcttgctcataatagccaagcaaagtttgtgcgagactgtgcagcaatgg

SEQ ID NO: 94674 - DNA, 60 bp, Artificial
  Synthetic oligonucleotide
aacattttgatgagactgtgaaatatccgaaaggggttgagacatcatatggcaacttgg

SEQ ID NO: 94675 - DNA, 60 bp, Artificial
  Synthetic oligonucleotide
aggaggcgtgacagggtacacgccactgtctgaagggcctggtatccgtgttggtggtac

SEQ ID NO: 94676 - DNA, 60 bp, Artificial
  Synthetic oligonucleotide
cgtgctaagcgggtcaagcgggtcaagcgtgactctgtaactcatatataccaaacctgc

SEQ ID NO: 94677 - DNA, 60 bp, Artificial
  Synthetic oligonucleotide
cagatttgctttggctgacaagtctgtatacaaccccgataaagaaaggctggtatgggg

SEQ ID NO: 94678 - DNA, 60 bp, Artificial
  Synthetic oligonucleotide
gtggcattcggctaacggtaaggtctatctaccaccatcaacaccagtggccagggtgca

SEQ ID NO: 94679 - DNA, 60 bp, Artificial
  Synthetic oligonucleotide
gcagaacacacacttgagacacaaattgcacattggacacttttgcgaagagaagctgta

SEQ ID NO: 94680 - DNA, 60 bp, Artificial
  Synthetic oligonucleotide
tacccatgatagcagtggtgacttttatttgcatcctagtcttcgacgggcaagggtaag

SEQ ID NO: 94681 - DNA, 60 bp, Artificial
  Synthetic oligonucleotide
gctcggattaggtcgaccgccaaggaacctttagtgtgccaatagcttacagcagtccag

SEQ ID NO: 94682 - DNA, 60 bp, Artificial
  Synthetic oligonucleotide
cagctcctattatgtgcaggacacacaaggttattatgtggcttatcctgagagtcgaga

SEQ ID NO: 94683 - DNA, 60 bp, Artificial
  Synthetic oligonucleotide
cctactcagggtgaaagttctttagcagatcatatattagttacatctggttcagggggt

SEQ ID NO: 94684 - DNA, 60 bp, Artificial
  Synthetic oligonucleotide
tcagcagaaatccaagcgaaggctctttgcagagcaggacagcggactcgagctatctct

SEQ ID NO: 94685 - DNA, 60 bp, Artificial
  Synthetic oligonucleotide
ccctggaactatttcatcaacaagagtgtaagcagagcgaggagcaattacaaatactaa

SEQ ID NO: 94686 - DNA, 60 bp, Artificial
  Synthetic oligonucleotide
gaagaggaattaccaaacgaacaggaaacggaggaggagtcaaatatcgacagaaccgtg

SEQ ID NO: 94687 - DNA, 60 bp, Artificial
  Synthetic oligonucleotide
gtgtccagagtgccgtggtaactgcaagcatggcggatcctaaaggtagtacatctaaag

SEQ ID NO: 94688 - DNA, 60 bp, Artificial
  Synthetic oligonucleotide
tctgttagttcaaaacatagaggaagacttgggagattattggaagaggctctcgacccc

SEQ ID NO: 94689 - DNA, 60 bp, Artificial
  Synthetic oligonucleotide
tcgcaacagaactagagggaaatacacggggctgttcagagccattagcacaacatggtc

SEQ ID NO: 94690 - DNA, 60 bp, Artificial
  Synthetic oligonucleotide
aagccgcaaccaagaggaaaggattcggacgacgaccatccagtagaacaaggcgacaag

SEQ ID NO: 94691 - DNA, 56 bp, Artificial
  Synthetic oligonucleotide
ggtctcactcccggtcgcactcccagtccgataccagggccattgccacctcccta

SEQ ID NO: 94692 - DNA, 60 bp, Artificial
  Synthetic oligonucleotide
gactaggagtcggaggtcagaatccagatcacaatcccagaagtacctccagccgaaggc

SEQ ID NO: 94693 - DNA, 60 bp, Artificial
  Synthetic oligonucleotide
ggaaagcgacggggtagatcatcctccacctccccaccctcaaaacggtctcgaccaaag

SEQ ID NO: 94694 - DNA, 60 bp, Artificial
  Synthetic oligonucleotide
gggttttagctgtgtatgcagttcatgatgatctatttgaaagctcaaagcagctgttgc

SEQ ID NO: 94695 - DNA, 60 bp, Artificial
  Synthetic oligonucleotide
taggttgtacaccttgtgtgggagagcattgggaaaaggccttaccttgtggagatgcgc

SEQ ID NO: 94696 - DNA, 60 bp, Artificial
  Synthetic oligonucleotide
gtcgactcggcacccgggccactattcgcacacgttcaggtgctcaaataggatctcaag

SEQ ID NO: 94697 - DNA, 60 bp, Artificial
  Synthetic oligonucleotide
cgtgttttttctatgctcgcagggagcagtgttatgccagacatttttttgttagggggc

SEQ ID NO: 94698 - DNA, 53 bp, Artificial
  Synthetic oligonucleotide
cggcgcagtagcacaccacttcaaagagcactatccattggcaggcgtagggg

SEQ ID NO: 94699 - DNA, 60 bp, Artificial
  Synthetic oligonucleotide
taacaggcccttctggctgcaaagagcacagggtcataataatggcattctgtgggctaa

SEQ ID NO: 94700 - DNA, 60 bp, Artificial
  Synthetic oligonucleotide
ctttgtctgagagtattgaggcgcattctaatgatctgctacttgatgaagctgttgagg

SEQ ID NO: 94701 - DNA, 60 bp, Artificial
  Synthetic oligonucleotide
atacagctgcggcattgttttggtataaaggtggtatggggtcaggagcatttacatatg

SEQ ID NO: 94702 - DNA, 60 bp, Artificial
  Synthetic oligonucleotide
gaggcttggttattttgcaactgtgattgggacaaatggctcagcagactacaccagacc

SEQ ID NO: 94703 - DNA, 60 bp, Artificial
  Synthetic oligonucleotide
ggtcgaggccttccgttccacaaagtgagagacggctggaaaggagtgtgcaggcactgt

SEQ ID NO: 94704 - DNA, 60 bp, Artificial
  Synthetic oligonucleotide
aagcagctaacattgatttggaaagactactttgtttctgcttgctgtcgaagttgttgt

SEQ ID NO: 94705 - DNA, 60 bp, Artificial
  Synthetic oligonucleotide
ctttaagtgcactgctgtgtcattcatgttctagagtatgcgtgacttcaaccgaaactc

SEQ ID NO: 94706 - DNA, 60 bp, Artificial
  Synthetic oligonucleotide
ggtcgtggacaatactagaaacacaaatttcacaataaacactagcctcacaaacaggtc

SEQ ID NO: 94707 - DNA, 60 bp, Artificial
  Synthetic oligonucleotide
cgtggaggaatatgaactaactataattgttcagctgtgtattgtacccctcgagccaga

SEQ ID NO: 94708 - DNA, 60 bp, Artificial
  Synthetic oligonucleotide
tggagagtaactacaggtacatcgagtctctcgccactatgtgtcccactgaggagcccc

SEQ ID NO: 94709 - DNA, 60 bp, Artificial
  Synthetic oligonucleotide
gccgaaggaggtgaaagaggtaacgagacagaggttgatggggaggcactggatgcaggg

SEQ ID NO: 94710 - DNA, 60 bp, Artificial
  Synthetic oligonucleotide
ccaagcgggtgaaacgagcatcggccgaaacattgtacaagacgtgccagcagggtggtg

SEQ ID NO: 94711 - DNA, 60 bp, Artificial
  Synthetic oligonucleotide
tggaggagcttgtccttccagccaacctgttgtccggcgaaaccttggagacggaagagg

SEQ ID NO: 94712 - DNA, 60 bp, Artificial
  Synthetic oligonucleotide
cagacgccggccttacagcccagacctgtctcgataacgatcttggtttcattgtcctag

SEQ ID NO: 94713 - DNA, 60 bp, Artificial
  Synthetic oligonucleotide
aggggaggcatgctttcaatatttgcatagcagagtgacaggttttgaatttcccagaaa

SEQ ID NO: 94714 - DNA, 60 bp, Artificial
  Synthetic oligonucleotide
gcttgcttatttatgggccacctgacacaggcaaatcatggttttgctttagcctgctta

SEQ ID NO: 94715 - DNA, 60 bp, Artificial
  Synthetic oligonucleotide
gagcaacaaacagcctatctgaaacgaaagtattgtactccaagccctaaatctgcctcc

SEQ ID NO: 94716 - DNA, 60 bp, Artificial
  Synthetic oligonucleotide
gacgctacacatgcctgctttcagtttattgatgttaatatgaggagtgcatttgatggc

SEQ ID NO: 94717 - DNA, 60 bp, Artificial
  Synthetic oligonucleotide
ggatatacagatgttgttatttggtggaaggtcatgatggggactggacagttgtagcca

SEQ ID NO: 94718 - DNA, 60 bp, Artificial
  Synthetic oligonucleotide
gtaatgtgtctgaccttatagatgatgatgagccgtcaggggtcaatgaaggacatgcag

SEQ ID NO: 94719 - DNA, 60 bp, Artificial
  Synthetic oligonucleotide
cgggggggccaagcctgtataccctcagcctagggttggggggaacaaggccccgcagaa

SEQ ID NO: 94720 - DNA, 60 bp, Artificial
  Synthetic oligonucleotide
gtgggctgtacaccatgcaaaggagaacactgggaccaggcgcccaggtgtgacaatcag

SEQ ID NO: 94721 - DNA, 60 bp, Artificial
  Synthetic oligonucleotide
ttagagggtggaggtgtacgcgggggcgaaagcatagtaatagagccggaggtcccagca

SEQ ID NO: 94722 - DNA, 60 bp, Artificial
  Synthetic oligonucleotide
gcgctttggcactaccgggatgtggaaagtttgctataaacatcatgttttgtctgccct

SEQ ID NO: 94723 - DNA, 60 bp, Artificial
  Synthetic oligonucleotide
cctcaggcagccgtgtcacaagcacttcacagcatacaaatccttcatttactcccatac

SEQ ID NO: 94724 - DNA, 60 bp, Artificial
  Synthetic oligonucleotide
gcaaagcagttttacaatagaagattcactcaagttaaagtgacagatcccgccttcctc

SEQ ID NO: 94725 - DNA, 60 bp, Artificial
  Synthetic oligonucleotide
ggaagcactgaccgtctgctcactgtaggaaacccatattttgccgtgaagaatgatgaa

SEQ ID NO: 94726 - DNA, 60 bp, Artificial
  Synthetic oligonucleotide
cctgactctgaaagattagtgtggagactgacaggaattgaaattgggagaggtgggcca

SEQ ID NO: 94727 - DNA, 60 bp, Artificial
  Synthetic oligonucleotide
ccgactctctcctgccgtccctcttggcacagtggggagacgacctggagaacctcagga

SEQ ID NO: 94728 - DNA, 60 bp, Artificial
  Synthetic oligonucleotide
ggttcctggtcaggttgattatgatgggctgttctatacagatgaggatggcgaaaagcg

SEQ ID NO: 94729 - DNA, 60 bp, Artificial
  Synthetic oligonucleotide
aggcagtgtcattgtcacctaggcaaaaacacagcaagcgacgacttttcgaggacagtg

SEQ ID NO: 94730 - DNA, 60 bp, Artificial
  Synthetic oligonucleotide
tgttaaactgttatgattatcaacttagagcagacccccctaaaaacaggagtgttgcag

SEQ ID NO: 94731 - DNA, 60 bp, Artificial
  Synthetic oligonucleotide
ggctgctttggtgttagcttaaaagagctcactagaccatacaagagtagtaaaacatgc

SEQ ID NO: 94732 - DNA, 60 bp, Artificial
  Synthetic oligonucleotide
gtgggatagaaaactcctttgacaatgaagttgaggattcttctgggtcacggtcgcagg

SEQ ID NO: 94733 - DNA, 60 bp, Artificial
  Synthetic oligonucleotide
gtgtagagatgagagggtcttcgccgatcatcagagacattgatttggagttggaggagc

SEQ ID NO: 94734 - DNA, 60 bp, Artificial
  Synthetic oligonucleotide
aaaggagggttcactgttgatgtgctctttgacaatgatcctggcaatgtttttccttac

SEQ ID NO: 94735 - DNA, 60 bp, Artificial
  Synthetic oligonucleotide
tcagtgcaattactgggaggctgcccgtcgagagagtgctcttcttcactatgcaaggaa

SEQ ID NO: 94736 - DNA, 60 bp, Artificial
  Synthetic oligonucleotide
ccagttaggtcttgacccagaagacgaaaatgctggagagtcttgccaggcgtttcgatg

SEQ ID NO: 94737 - DNA, 60 bp, Artificial
  Synthetic oligonucleotide
tttatcatcactgtgcaactctccctataaggatgaaccatggactttggcagatactag

SEQ ID NO: 94738 - DNA, 60 bp, Artificial
  Synthetic oligonucleotide
aatcctcctcaggggaccagtggtcagcacaatggcaatgggaaggacccacaggctcct

SEQ ID NO: 94739 - DNA, 60 bp, Artificial
  Synthetic oligonucleotide
acataaagatacctaaggtgttagacattgcacttggctcatttgacagcctttaattgt

SEQ ID NO: 94740 - DNA, 60 bp, Artificial
  Synthetic oligonucleotide
catggcagaacacaaatactaacgtactaacagcactcagctcctatcccaaaacccacc

SEQ ID NO: 94741 - DNA, 60 bp, Artificial
  Synthetic oligonucleotide
gtcaggtaagagcagtttattagcacgtaccagcagaataggttttagcagttcacgtag

SEQ ID NO: 94742 - DNA, 60 bp, Artificial
  Synthetic oligonucleotide
cgccggcttcgcttgcggtacagtggcctgtttgagtccatcagcacaggcttttcatgg

SEQ ID NO: 94743 - DNA, 60 bp, Artificial
  Synthetic oligonucleotide
ttttgcccaggaatgccttaatggcgcggccactgagcatacgcagtctttgcttatcct

SEQ ID NO: 94744 - DNA, 60 bp, Artificial
  Synthetic oligonucleotide
ttggatccaatctcaagggaagctgtatcttccaccaccaaagccagtaggaaaagtgat

SEQ ID NO: 94745 - DNA, 60 bp, Artificial
  Synthetic oligonucleotide
gtactgttgaaggggatgggcttgagcgtatatttatgaaaccgttagcctccttgtgtg

SEQ ID NO: 94746 - DNA, 60 bp, Artificial
  Synthetic oligonucleotide
ccattgcccacttctccgcctcattcctctgagattcctctttcttcacctgactatggg

SEQ ID NO: 94747 - DNA, 60 bp, Artificial
  Synthetic oligonucleotide
cctctcggacagcacctatgtagcgcaccctagtggaagtgacacatggccattgcccac

SEQ ID NO: 94748 - DNA, 60 bp, Artificial
  Synthetic oligonucleotide
caggagttccaattgacatagtggacactgtctgtaaatggccggacttcttacaaatga

SEQ ID NO: 94749 - DNA, 60 bp, Artificial
  Synthetic oligonucleotide
caggagaggcaaatatagtcctgggtgaaacagaaagcaccgttatcgatgccattagtt

SEQ ID NO: 94750 - DNA, 60 bp, Artificial
  Synthetic oligonucleotide
gtaaggggagggtccacaaatgaaaagcttcccactgacctactaatgaccagtgactca

SEQ ID NO: 94751 - DNA, 60 bp, Artificial
  Synthetic oligonucleotide
gctccgtagcggtacacacatcggaggctccacccactacttctttgacctcagtagaat

SEQ ID NO: 94752 - DNA, 58 bp, Artificial
  Synthetic oligonucleotide
ttttcccgcccgatcaggggaaccgttagcggcgccagaccccgaattctcagacata

SEQ ID NO: 94753 - DNA, 60 bp, Artificial
  Synthetic oligonucleotide
gcccccctcttaaacttgtttcatctataatagaggatggtcagatgtgtgatgttggct

SEQ ID NO: 94754 - DNA, 60 bp, Artificial
  Synthetic oligonucleotide
agaccaaacatccctgtagaaaccctgggaatagacgtgggaggcacagtaggtgcgggg

SEQ ID NO: 94755 - DNA, 60 bp, Artificial
  Synthetic oligonucleotide
ctcagaagaagatactaactatcaactgacagaaccagctgtgcaggcctacggggtggt

SEQ ID NO: 94756 - DNA, 60 bp, Artificial
  Synthetic oligonucleotide
ctcagaagaagatagtaactatcaactgacagaaccagctgtgcaggcctacggggtggt

SEQ ID NO: 94757 - DNA, 60 bp, Artificial
  Synthetic oligonucleotide
gagaacgatttgagtcccagattagatgcaatctccctaaacagaaagtcagagaaagcg

SEQ ID NO: 94758 - DNA, 60 bp, Artificial
  Synthetic oligonucleotide
agatgcaatctccctaaacagaaagtcagaaaaagcgaagagacgcttattcgagacaga

SEQ ID NO: 94759 - DNA, 60 bp, Artificial
  Synthetic oligonucleotide
aatgtggaatgacacgagtcggctgtacaacagtgcccgccctcaccgtgtcaaaggcta

SEQ ID NO: 94760 - DNA, 60 bp, Artificial
  Synthetic oligonucleotide
ctttcccttgccaacttgtctttgccgcgcattccaagaaacacacctattccggtcgca

SEQ ID NO: 94761 - DNA, 58 bp, Artificial
  Synthetic oligonucleotide
ttttgcagccaactttcccttgccaacttgtcttgccgcgcattccaagaaacacacc

SEQ ID NO: 94762 - DNA, 60 bp, Artificial
  Synthetic oligonucleotide
gcccccagtttcgtgcgaccgttttcggttgcgtgcagtttcggtcggcgccgttgccag

SEQ ID NO: 94763 - DNA, 60 bp, Artificial
  Synthetic oligonucleotide
agtacggatgtctatgtcacgcggacgaatgtttattatcatggtgggagctctaggctc

SEQ ID NO: 94764 - DNA, 60 bp, Artificial
  Synthetic oligonucleotide
cctgcctccaacacctgtctcaaaggtgctcagtacggatgtctatgtcacgcggacgaa

SEQ ID NO: 94765 - DNA, 60 bp, Artificial
  Synthetic oligonucleotide
ctagagtaacaacatttacatttccaaatccattcccttttgacagaaatgggaatgcag

SEQ ID NO: 94766 - DNA, 60 bp, Artificial
  Synthetic oligonucleotide
gagcaagggtgactacatctgtgtccagagacaaacctgtcaaacgaaggcgcggaaaca

SEQ ID NO: 94767 - DNA, 60 bp, Artificial
  Synthetic oligonucleotide
gggtgactacatctgtgtccagagacaaacctgtaaaacgaaggcgcggaaacaaataaa

SEQ ID NO: 94768 - DNA, 60 bp, Artificial
  Synthetic oligonucleotide
gatcctgcttacgcatgctacattcaaggcgaaaacgtgcagccccttctgatatttacc

SEQ ID NO: 94769 - DNA, 60 bp, Artificial
  Synthetic oligonucleotide
cctgcttacgcatgctacattcaaggcgaaaacgtgcagccccttctgatatttacccac

SEQ ID NO: 94770 - DNA, 60 bp, Artificial
  Synthetic oligonucleotide
tgcaaaatttccaatacctgcccgcctgacatactcaataaagctgagcaaaacacgctt

SEQ ID NO: 94771 - DNA, 60 bp, Artificial
  Synthetic oligonucleotide
gtggaggctcaaaaagagcaagggtgactacatctgtgtccagagacaaacctgtcaaac

SEQ ID NO: 94772 - DNA, 60 bp, Artificial
  Synthetic oligonucleotide
gtaccaactccgaacagcttaagctaccacagacaatacaaacagctgtcaccgcacaca

SEQ ID NO: 94773 - DNA, 60 bp, Artificial
  Synthetic oligonucleotide
gttgttaagatagatataggtttagaacaagtccacggtttccactgtttatcatacttt

SEQ ID NO: 94774 - DNA, 60 bp, Artificial
  Synthetic oligonucleotide
ccccagtccttgttttaaaaggggatcccaattctcttaagtgtacaaggtataggctca

SEQ ID NO: 94775 - DNA, 60 bp, Artificial
  Synthetic oligonucleotide
ggggccagcaggtagaagtgaggtttgacaacgaccgggagaacgtctccagatatgtgt

SEQ ID NO: 94776 - DNA, 60 bp, Artificial
  Synthetic oligonucleotide
ggggccagcaggtagaagtgaggtttgactgcgaccgggagaacgtctccagatatgtgt

SEQ ID NO: 94777 - DNA, 60 bp, Artificial
  Synthetic oligonucleotide
gcacgaatgccagggactttccctgcaactgtttcgcctacaggagcaaaccgactctga

SEQ ID NO: 94778 - DNA, 60 bp, Artificial
  Synthetic oligonucleotide
cccaatcgcgtgatttatacagggtgtcagcgtcctgcggtctttgtggcagtggggtga

SEQ ID NO: 94779 - DNA, 54 bp, Artificial
  Synthetic oligonucleotide
gaccatcttgcaaccatcttttctcatgaacttaggctttctctctaggaagtt

SEQ ID NO: 94780 - DNA, 53 bp, Artificial
  Synthetic oligonucleotide
gaccatcttgcaaccatcaattctcatgaacttaggctttctctctaggaagt

SEQ ID NO: 94781 - DNA, 54 bp, Artificial
  Synthetic oligonucleotide
agacgagattgctgctgcaggctcgtatgtctttgagaatgcattatacgattc

SEQ ID NO: 94782 - DNA, 60 bp, Artificial
  Synthetic oligonucleotide
gatatccaacacctgcccgcccgacatcctgaataaagctgagcaaaacacgcttgcaga

SEQ ID NO: 94783 - DNA, 60 bp, Artificial
  Synthetic oligonucleotide
cgacccctctgtgtctagcacccaggacaccgagcaagaacccctatccactactagacc

SEQ ID NO: 94784 - DNA, 60 bp, Artificial
  Synthetic oligonucleotide
gtgtacagacagcaagaagcattagatgacgaggcaattgtgcaggccctaaaacgaaag

SEQ ID NO: 94785 - DNA, 60 bp, Artificial
  Synthetic oligonucleotide
acaatgtcaggttatataaaaaggcggtgtgatcaaactgcaggaagtggcagctggctc

SEQ ID NO: 94786 - DNA, 60 bp, Artificial
  Synthetic oligonucleotide
cgccaccgaagacagtataatgtgactgtttcctgcaacgactgtgacaagcgtctgaac

SEQ ID NO: 94787 - DNA, 60 bp, Artificial
  Synthetic oligonucleotide
gcgggcaacctcctcctacagccccctaaaatcagaggtctcgggcctgctctattctgg

SEQ ID NO: 94788 - DNA, 60 bp, Artificial
  Synthetic oligonucleotide
ccgttttacttcaaggagccgtgccctgcttcagacaatggtgagcctatgttttctata

SEQ ID NO: 94789 - DNA, 60 bp, Artificial
  Synthetic oligonucleotide
cggaggagtcgaaaattgcttatgaatatgctctgtgtgctgggagcgactgcaatgcca

SEQ ID NO: 94790 - DNA, 60 bp, Artificial
  Synthetic oligonucleotide
ccgcacaaggttgctatcacttgtcactctgctcagacccttccttctgcatgtctgctg

SEQ ID NO: 94791 - DNA, 60 bp, Artificial
  Synthetic oligonucleotide
cactgtttggtcagccaaagactagcactcctgagggccctattaaccggggtcggggca

SEQ ID NO: 94792 - DNA, 60 bp, Artificial
  Synthetic oligonucleotide
aaccggggtcggtccattaaccgcccgactccctacagcacaccacagtccccgaggagt

SEQ ID NO: 94793 - DNA, 60 bp, Artificial
  Synthetic oligonucleotide
aggagtggcgtgggccccgataccacctccccgctgccgagcccggtaccgcagaacccc

SEQ ID NO: 94794 - DNA, 60 bp, Artificial
  Synthetic oligonucleotide
cggtgcgtatctctacccgacggttttggacgaggggaggaggataacccgccgtcgcca

SEQ ID NO: 94795 - DNA, 60 bp, Artificial
  Synthetic oligonucleotide
cggtataaacggcacatgaggataacggggacggtgagaaaagtgcttctgtacatatgc

SEQ ID NO: 94796 - DNA, 60 bp, Artificial
  Synthetic oligonucleotide
ttctgcgccctcccactctagagagaccatcgaaggactgtggaactccgggggccgtga

SEQ ID NO: 94797 - DNA, 60 bp, Artificial
  Synthetic oligonucleotide
aagaggcagacccaccaactcgcccgaccgcgccgtgcttcacactcctcctggaggcaa

SEQ ID NO: 94798 - DNA, 60 bp, Artificial
  Synthetic oligonucleotide
gctttgtaaatagcaataggtgcaatttaaggagcattatttactggcgcatcgggcaga

SEQ ID NO: 94799 - DNA, 60 bp, Artificial
  Synthetic oligonucleotide
ccctgcaacaaagtgtgcagataatgtatctcccagcaagcctgaggacccatactctgc

SEQ ID NO: 94800 - DNA, 60 bp, Artificial
  Synthetic oligonucleotide
ccctatttgtgacagtgggagacaacacaaggggcagcacactgaccatcacggtcccta

SEQ ID NO: 94801 - DNA, 60 bp, Artificial
  Synthetic oligonucleotide
catgctcaccagtgggtccatcctttctcttgaggtgacacagaagcacacgactgtccc

SEQ ID NO: 94802 - DNA, 60 bp, Artificial
  Synthetic oligonucleotide
cgcaacccaatatttatctgatgttttgcagatggcgttctggcagcctggtcaagcgct

SEQ ID NO: 94803 - DNA, 60 bp, Artificial
  Synthetic oligonucleotide
cctcaagcctttgtcagacagaaccattagtacagcggtgccatatctttgaactgccaa

SEQ ID NO: 94804 - DNA, 60 bp, Artificial
  Synthetic oligonucleotide
ggatgatggtgagtacgtgatagacaatggaggacaatcgaacatcacgcctactgtagt

SEQ ID NO: 94805 - DNA, 60 bp, Artificial
  Synthetic oligonucleotide
ctacaggacgtgcaagaggtggaagtgcccactgatgtcattcctgaaggtggagggaaa

SEQ ID NO: 94806 - DNA, 60 bp, Artificial
  Synthetic oligonucleotide
aggaagcgatgagccccttttagggacaggcatcatctatcctttggtgggcggaggaca

SEQ ID NO: 94807 - DNA, 60 bp, Artificial
  Synthetic oligonucleotide
taggcacacgttcaggggtacgggtggggcctttgtatcacctgcgtcagtcgttcagca

SEQ ID NO: 94808 - DNA, 60 bp, Artificial
  Synthetic oligonucleotide
agtggccgcccaacccaaggtgggtatgttcctttgaggggaggtgggtcctctacatct

SEQ ID NO: 94809 - DNA, 60 bp, Artificial
  Synthetic oligonucleotide
gggtgcttttcgccctggcatcatagaggaggttgctccgacactggaaggtgtcctacc

SEQ ID NO: 94810 - DNA, 60 bp, Artificial
  Synthetic oligonucleotide
actagataatgccactgccgttccgggaaaccacctggagctcttccaaactcaggaaaa

SEQ ID NO: 94811 - DNA, 60 bp, Artificial
  Synthetic oligonucleotide
gctatggggacgtttagacctgagcgatcaagaggacgaggttgacgacgatgagtgcag

SEQ ID NO: 94812 - DNA, 60 bp, Artificial
  Synthetic oligonucleotide
cctgggcttgctgtcataagtatcacacctcggaagcgaatcccgttgttagacgcaggc

SEQ ID NO: 94813 - DNA, 60 bp, Artificial
  Synthetic oligonucleotide
cgcctgcatacagaaattgttcaagactctctacatcgcctcccatggggagatcactcg

SEQ ID NO: 94814 - DNA, 60 bp, Artificial
  Synthetic oligonucleotide
ccgctgttcaaatgaaagcccctcccctcttagtaaccagtaatattgatgtgcatgcag

SEQ ID NO: 94815 - DNA, 60 bp, Artificial
  Synthetic oligonucleotide
ccaccacagccacttttggctcgcacccttagcggactgccgagttgctttaattgatga

SEQ ID NO: 94816 - DNA, 60 bp, Artificial
  Synthetic oligonucleotide
gtgttcttggaaaggtggaagctcgccgatgctatgacaaaaaaattagaacagtggtaa

SEQ ID NO: 94817 - DNA, 60 bp, Artificial
  Synthetic oligonucleotide
agtggaactgggaaccaagtcaagtgctattccttccgcgtgaaaagatggcatagggac

SEQ ID NO: 94818 - DNA, 60 bp, Artificial
  Synthetic oligonucleotide
tatacgattcaaaggcctacaaacatgagcagcagccgtggttatcgcgaccacaggatg

SEQ ID NO: 94819 - DNA, 60 bp, Artificial
  Synthetic oligonucleotide
ggtggttatggtaagtaggcggtcaatagaggcggaactgaggcggaacttatagactat

SEQ ID NO: 94820 - DNA, 54 bp, Artificial
  Synthetic oligonucleotide
aaaacttggtataccgcttggaattcattgtacttgcgcaaaccggatgaggag

SEQ ID NO: 94821 - DNA, 60 bp, Artificial
  Synthetic oligonucleotide
agctgataatacccttgagacgcactgtcagcaacttttaattcacagcaggcctcttgg

SEQ ID NO: 94822 - DNA, 60 bp, Artificial
  Synthetic oligonucleotide
tggaccccgtggggtactgacaaagaactcccacccgaggcctattatctgaagccaccg

SEQ ID NO: 94823 - DNA, 60 bp, Artificial
  Synthetic oligonucleotide
gccagacacaaaggcttgatttggctcggtttgaaccctgtgccaccatgctctgtgaag

SEQ ID NO: 94824 - DNA, 60 bp, Artificial
  Synthetic oligonucleotide
cctgtggatcagggcctgagtggcttggatgtggcaagggaagtcacacaagaaagcctc

SEQ ID NO: 94825 - DNA, 60 bp, Artificial
  Synthetic oligonucleotide
cacctgatttccacctcaacgcacccaaaccctttgtttcatgcacctattcagcagagc

SEQ ID NO: 94826 - DNA, 60 bp, Artificial
  Synthetic oligonucleotide
agagttaaatgccacaaagtcagatctacctctggacattgccaactccatctgtttgta

SEQ ID NO: 94827 - DNA, 60 bp, Artificial
  Synthetic oligonucleotide
catcgcgagcggtctcagctgatcttcttaagttcccaggcgtcttgattggacggttcc

SEQ ID NO: 94828 - DNA, 60 bp, Artificial
  Synthetic oligonucleotide
tgtccaggtgtcaagagggcagcccctgggtggggaggtaagagggcattcctacttcaa

SEQ ID NO: 94829 - DNA, 60 bp, Artificial
  Synthetic oligonucleotide
agtaactgctcagggcaccgatgaccgtaagcaagcaggtatggatacaaaacagcaaca

SEQ ID NO: 94830 - DNA, 60 bp, Artificial
  Synthetic oligonucleotide
actgttatccaaggtcagcaagatcagttcccaagagttttcttctttcgaccctcttcg

SEQ ID NO: 94831 - DNA, 60 bp, Artificial
  Synthetic oligonucleotide
ggcagtcggggagcagggatctgaaagaccaggcgatgccacagtgatcgtcaccttcaa

SEQ ID NO: 94832 - DNA, 60 bp, Artificial
  Synthetic oligonucleotide
cgtgatattcaggaatcaggttcttggcagatgctacacctgtactaggcatggcatgtg

SEQ ID NO: 94833 - DNA, 60 bp, Artificial
  Synthetic oligonucleotide
gcatgaaccatcctgggctgtttctgtttctgggactggtctttggagtgcagttgctac

SEQ ID NO: 94834 - DNA, 60 bp, Artificial
  Synthetic oligonucleotide
acccacagttattaggcctgctttggtgcctgaggctataggaccaagtgaactaatacc

SEQ ID NO: 94835 - DNA, 60 bp, Artificial
  Synthetic oligonucleotide
gtagatacaccagtggtgactgggggcagaaactcgaatgctgttctggaggtggctgat

SEQ ID NO: 94836 - DNA, 60 bp, Artificial
  Synthetic oligonucleotide
accaaagggcgttgattggtctcttgggtgctttgactctatttaacacactaacctttc

SEQ ID NO: 94837 - DNA, 60 bp, Artificial
  Synthetic oligonucleotide
cactggtggtagcactggatatgggccattaggtgaagggacgagtgtaagagttggaaa

SEQ ID NO: 94838 - DNA, 60 bp, Artificial
  Synthetic oligonucleotide
cttcagtactacatggtcatgggtcagtgcaggtagcaacgatagaataggacgctctag

SEQ ID NO: 94839 - DNA, 60 bp, Artificial
  Synthetic oligonucleotide
caacacctggaaggcacacaagatttgcgcgccaaaactacttggcagaacatttcaccg

SEQ ID NO: 94840 - DNA, 60 bp, Artificial
  Synthetic oligonucleotide
catgttaaccgcgcccggtgtattcaatataaacgctgatggtacaagttgtcaaggaac

SEQ ID NO: 94841 - DNA, 61 bp, Artificial
  Synthetic oligonucleotide
ctaatacatctgttaatggtcttaaaagaactagaagcagttctcaaagaggtactaaacg

SEQ ID NO: 94842 - DNA, 60 bp, Artificial
  Synthetic oligonucleotide
attttggaggactggcagttaggatttgttcctactccagataaccctattcaggatgca

SEQ ID NO: 94843 - DNA, 60 bp, Artificial
  Synthetic oligonucleotide
ttgtgctggatctgcaagaccttgtccagcccattgacctgcattgtgacgaagacttgt

SEQ ID NO: 94844 - DNA, 60 bp, Artificial
  Synthetic oligonucleotide
ggaaggcagtgtgtaggttttgtacagagatatgattgggaaacaggctactataccaga

SEQ ID NO: 94845 - DNA, 60 bp, Artificial
  Synthetic oligonucleotide
ggacacatatatattttgaagatgacgaaggcaactggcaaaagactgagggacatttgg

SEQ ID NO: 94846 - DNA, 60 bp, Artificial
  Synthetic oligonucleotide
cctcaaagaatagactacaagatagtttcctcgtgtggtggctgcggaattaagcttcga

SEQ ID NO: 94847 - DNA, 60 bp, Artificial
  Synthetic oligonucleotide
gcgatgctacaatagtccagggtcctgtggaaagtacgttcgtaaatattgatttggaag

SEQ ID NO: 94848 - DNA, 60 bp, Artificial
  Synthetic oligonucleotide
cagatatttcagatttattagatgatggggaccttggggacgcagaattgggaaatcccc

SEQ ID NO: 94849 - DNA, 60 bp, Artificial
  Synthetic oligonucleotide
tggattccatgtgtcttatcctgagagtagagcgtatccagaagttattcctacagaacc

SEQ ID NO: 94850 - DNA, 60 bp, Artificial
  Synthetic oligonucleotide
tccatttaaggacgatggcagtcccttgtttgaacttactgaccaaagctggaaatcttt

SEQ ID NO: 94851 - DNA, 60 bp, Artificial
  Synthetic oligonucleotide
ctccattagtagaatctaaaattgcactactagatgatgccaccgagtgctgttggaatt

SEQ ID NO: 94852 - DNA, 60 bp, Artificial
  Synthetic oligonucleotide
gctcagttgatccacatgatgtattagtgcctaaggtgtcagggaatcagtttagagctt

SEQ ID NO: 94853 - DNA, 60 bp, Artificial
  Synthetic oligonucleotide
ggagcaggtgttatttcattatgccagacaaagaggagtattgcgccttggttatcagcc

SEQ ID NO: 94854 - DNA, 60 bp, Artificial
  Synthetic oligonucleotide
accaagaagacgagggtgaggatggaggctctcagcgaccgtttcaatgcactgcaagac

SEQ ID NO: 94855 - DNA, 60 bp, Artificial
  Synthetic oligonucleotide
gattttagtggtgattattatctacatcctagcttaaaatggaagaaacgaaaacgggcc

SEQ ID NO: 94856 - DNA, 60 bp, Artificial
  Synthetic oligonucleotide
tccctcacaatattcttttgaaatcgaagagccaaccccacctaggcaaacaagcactcc

SEQ ID NO: 94857 - DNA, 60 bp, Artificial
  Synthetic oligonucleotide
gtgtacaaggaaaggatgctatagaaagggactcaggtagtcttttgtgttgtttaactg

SEQ ID NO: 94858 - DNA, 60 bp, Artificial
  Synthetic oligonucleotide
ggctgatccaagtccacccacacgaaacagagttagtagaacacaatataacaatcctgc

SEQ ID NO: 94859 - DNA, 60 bp, Artificial
  Synthetic oligonucleotide
gaaggttcacacagcaggttcaagtggaagatccaatgttttatagtagaccttccaggt

SEQ ID NO: 94860 - DNA, 60 bp, Artificial
  Synthetic oligonucleotide
caagcactcctgtcagacaggcacaacaaatggcctcagcattacggagggctttataca

SEQ ID NO: 94861 - DNA, 60 bp, Artificial
  Synthetic oligonucleotide
catcaggaatatgaaacacagcaatttgatttaagtagaatgattcagtgggcatatgat

SEQ ID NO: 94862 - DNA, 60 bp, Artificial
  Synthetic oligonucleotide
caaacagttactacagtgcagcaatgcgcgggctacattgcttagtaaatttaaagctgc

SEQ ID NO: 94863 - DNA, 60 bp, Artificial
  Synthetic oligonucleotide
gcagacttggcaaacgagctactataaggaccaggtctggaactacaataggcggtcagg

SEQ ID NO: 94864 - DNA, 60 bp, Artificial
  Synthetic oligonucleotide
gaagttactcaggtgtttgaaagagacctagaaactatagaagagcctcctgatagacaa

SEQ ID NO: 94865 - DNA, 60 bp, Artificial
  Synthetic oligonucleotide
gcacagcttatagctgatccaccccagattcgcagcgtagtagcagctttgttttggtac

SEQ ID NO: 94866 - DNA, 60 bp, Artificial
  Synthetic oligonucleotide
ctccctttcgcagacatccggaggacagtcccctgtacccactcaacggaagcaaccatc

SEQ ID NO: 94867 - DNA, 60 bp, Artificial
  Synthetic oligonucleotide
agatacaaaagtgataatacatgttgcagagactgggcaattattgtctatgggttgcag

SEQ ID NO: 94868 - DNA, 60 bp, Artificial
  Synthetic oligonucleotide
aaggagacgcgcggaccctcctcacagtcagacgcggagaacgggaacggggacaaggaa

SEQ ID NO: 94869 - DNA, 60 bp, Artificial
  Synthetic oligonucleotide
gtgatcgcctgctgacagttggacacccttattttgaagtgagaagctcagttgatccac

SEQ ID NO: 94870 - DNA, 60 bp, Artificial
  Synthetic oligonucleotide
tgttacctgcagcatccagtgaccagtctagaagtcaaattgccagttctatctatttcc

SEQ ID NO: 94871 - DNA, 60 bp, Artificial
  Synthetic oligonucleotide
ttcagttatttgttttaggatgtacaccatgcttaggtgaacattgggacacagccttac

SEQ ID NO: 94872 - DNA, 60 bp, Artificial
  Synthetic oligonucleotide
cgacgagaacaatgttatgttaggcatatgtttgtgcgcggtggtgttgtgggtgatacc

SEQ ID NO: 94873 - DNA, 60 bp, Artificial
  Synthetic oligonucleotide
ctgacatgtctgtttataatccagacaaggaaaggcttgtttggggctgcaggggattgg

SEQ ID NO: 94874 - DNA, 59 bp, Artificial
  Synthetic oligonucleotide
gctgtagtacttggtgtttaatagaagctgattgtagtgatgtagatggggattttgaa

SEQ ID NO: 94875 - DNA, 60 bp, Artificial
  Synthetic oligonucleotide
ggtgcacctgattgtggcaaatcaatgttttgtatgtctttaataaaggccttaaaggga

SEQ ID NO: 94876 - DNA, 60 bp, Artificial
  Synthetic oligonucleotide
tccgaagaagaaagggaccgacccgcccctgccacagaccccggctccctttcgcagaca

SEQ ID NO: 94877 - DNA, 60 bp, Artificial
  Synthetic oligonucleotide
accagctccaccaactccgaagaagaaagggaccgacccgcccctgccacagaccccggc

SEQ ID NO: 94878 - DNA, 60 bp, Artificial
  Synthetic oligonucleotide
gcaaccatctaaaggaaggtacgggcgaaaagactctggtgctacaaccgcctccagggg

SEQ ID NO: 94879 - DNA, 60 bp, Artificial
  Synthetic oligonucleotide
tcatgaagctgaagattctgttgcggaagtggaggtaccggggtcaaaagatgacgtccc

SEQ ID NO: 94880 - DNA, 60 bp, Artificial
  Synthetic oligonucleotide
ggcagtttgtgcatcaggcattccttttgatagagttagaggagcttggaaggcagtgtg

SEQ ID NO: 94881 - DNA, 60 bp, Artificial
  Synthetic oligonucleotide
ggccatattggttacaaagagcacaaggccacaacaatggtatttgctggagtaatgaac

SEQ ID NO: 94882 - DNA, 60 bp, Artificial
  Synthetic oligonucleotide
tggcacaagtggcataccacctgagcaagtgggaagcagcctacaaggtgttggtagaca

SEQ ID NO: 94883 - DNA, 60 bp, Artificial
  Synthetic oligonucleotide
tttgtctctctgtcggaaccagaactggtaaaagtttccattgcgtctgggcttgtctat

SEQ ID NO: 94884 - DNA, 60 bp, Artificial
  Synthetic oligonucleotide
cggtgcaccgatataggtttggggctccccaagggactgctgggatgacagcttcatatt

SEQ ID NO: 94885 - DNA, 60 bp, Artificial
  Synthetic oligonucleotide
cctgatctccacaaagtacgttgccggtcggggtcaaaccgtcttcggtgctcgaaaccg

SEQ ID NO: 94886 - DNA, 60 bp, Artificial
  Synthetic oligonucleotide
atagaaaagtcaccacccaaacaacagatgacaggaaacaaacaggcctagatgctaagc

SEQ ID NO: 94887 - DNA, 60 bp, Artificial
  Synthetic oligonucleotide
ctacctgacaggactgttcacaacccaagtaaagagcggctggtgtgggcagtcataggt

SEQ ID NO: 94888 - DNA, 60 bp, Artificial
  Synthetic oligonucleotide
tcaaatttttaatcggccctactggctattccgtgcccagggcatgaacaatggaattgc

SEQ ID NO: 94889 - DNA, 60 bp, Artificial
  Synthetic oligonucleotide
cctcttgacattcaaaatgagatctgcttgtacccagactacctcaaaatggctgaggac

SEQ ID NO: 94890 - DNA, 60 bp, Artificial
  Synthetic oligonucleotide
cacagggacttgcattcgtacccttgcatgaagagcaagcaggttttgaggagatagaat

SEQ ID NO: 94891 - DNA, 60 bp, Artificial
  Synthetic oligonucleotide
cggaactatggtgcaatgggcctatgatcacaaatatgctgaggagtctaaaatagccta

SEQ ID NO: 94892 - DNA, 60 bp, Artificial
  Synthetic oligonucleotide
acacaggtgcccacggaagatcctgaagtgttttcatcccaaacatttgcaaacccactg

SEQ ID NO: 94893 - DNA, 60 bp, Artificial
  Synthetic oligonucleotide
cttacaacacgtagcgggacagaggtgggaccacagctacatgtcaggtactcattgagt

SEQ ID NO: 94894 - DNA, 60 bp, Artificial
  Synthetic oligonucleotide
catacttcgggtccccacgaacaagcacgccccgcagtattgcctctaaatcacgtggca

SEQ ID NO: 94895 - DNA, 60 bp, Artificial
  Synthetic oligonucleotide
tactctgctagagcctgagggtcccgaggacatagcggttcttgagctgcaacccctgga

SEQ ID NO: 94896 - DNA, 60 bp, Artificial
  Synthetic oligonucleotide
tccctgcttggatttgaacaccttttaaactcagatttagacctcttgtgtccacgttgt

SEQ ID NO: 94897 - DNA, 60 bp, Artificial
  Synthetic oligonucleotide
gggccacgtcgagtgtattctgtgactgtctgctgtggaaactgcggaaaagagctgact

SEQ ID NO: 94898 - DNA, 60 bp, Artificial
  Synthetic oligonucleotide
ccagagctaacataattagaggacgctgctacgactgctgcagacatggttcaaggtcca

SEQ ID NO: 94899 - DNA, 60 bp, Artificial
  Synthetic oligonucleotide
gcgaggtcccactacccctccgctttcctctcccggaaaactgtgtgcaacagggccacg

SEQ ID NO: 94900 - DNA, 60 bp, Artificial
  Synthetic oligonucleotide
gatgcacctgatttcagacttccgtgccatttcggccgtcctactaggaagcgaggtccc

SEQ ID NO: 94901 - DNA, 60 bp, Artificial
  Synthetic oligonucleotide
cggttcaaattaaagctccacccctcctggtaaccagtaatattgatgtgcaggcagagg

SEQ ID NO: 94902 - DNA, 60 bp, Artificial
  Synthetic oligonucleotide
gcaggagggtcatgctttgctctaatttcaggaactgctaaccaggtaaagtgctatcgc

SEQ ID NO: 94903 - DNA, 60 bp, Artificial
  Synthetic oligonucleotide
tcccatcagagcaggcctcggttgggtacgggacggtcctcgctcgcacccctacaattt

SEQ ID NO: 94904 - DNA, 60 bp, Artificial
  Synthetic oligonucleotide
taacagccaagctaagcatgtgaaggactgtgcaactatggtaagacactatctaagagc

SEQ ID NO: 94905 - DNA, 60 bp, Artificial
  Synthetic oligonucleotide
cctgcaggaaaagaagccgagccagcccagcctgtctcttctttgctcggctcccccgcc

SEQ ID NO: 94906 - DNA, 60 bp, Artificial
  Synthetic oligonucleotide
gctcacctgacacttactctgctagcccagttactgaccctgattctacctctcctagtc

SEQ ID NO: 94907 - DNA, 60 bp, Artificial
  Synthetic oligonucleotide
cctcagaaatgcattggatggctaccctgtcagtattgatagaaaacacaaagcagcggt

SEQ ID NO: 94908 - DNA, 60 bp, Artificial
  Synthetic oligonucleotide
tattggccctccaaacacaggcaagtctatgctctgcaactcattaattcattttttggg

SEQ ID NO: 94909 - DNA, 60 bp, Artificial
  Synthetic oligonucleotide
gacatccatattacccagtgtctatcggggccaaaactgttcctaaggtctctgcaaatc

SEQ ID NO: 94910 - DNA, 60 bp, Artificial
  Synthetic oligonucleotide
ctaagcatcaatgggacgcgtgcaaagcaccggcggcggtagatgcggggtaagtactga

SEQ ID NO: 94911 - DNA, 60 bp, Artificial
  Synthetic oligonucleotide
gtcagttgtttattggaaccacacccggtacacatcctgtccagcatttgcagtgcgtgc

SEQ ID NO: 94912 - DNA, 60 bp, Artificial
  Synthetic oligonucleotide
tttcccttgggaagaagatttttagcacagcaaggggcaggatgttcaactgtgagaaaa

SEQ ID NO: 94913 - DNA, 60 bp, Artificial
  Synthetic oligonucleotide
gccagaagctgtatctccctccaacccctgtaagcaaggtgctttgcagtgaaacctatg

SEQ ID NO: 94914 - DNA, 60 bp, Artificial
  Synthetic oligonucleotide
ctgtggaaatcacagctcaaactgtgtcacatctgcaaggacttatgccctctgtgcttg

SEQ ID NO: 94915 - DNA, 60 bp, Artificial
  Synthetic oligonucleotide
ccgccccagtataggtgcgggcattcctttagacacccttgaaactcttggggccttgcg

SEQ ID NO: 94916 - DNA, 60 bp, Artificial
  Synthetic oligonucleotide
gcaggtggatcaccaaggtacacaccactccgaacagcagggtccacatcatcgcttgca

SEQ ID NO: 94917 - DNA, 60 bp, Artificial
  Synthetic oligonucleotide
gggatcattttgagtgctcctgtacaggtctgcccttttaatgcctttacatcactggct

SEQ ID NO: 94918 - DNA, 60 bp, Artificial
  Synthetic oligonucleotide
ttgtacagcagtaactacaccttgcatccctccttgttgaggaaacgaaaaaaacggaaa

SEQ ID NO: 94919 - DNA, 60 bp, Artificial
  Synthetic oligonucleotide
ccagcttggacttctgatcactgccattgccttttcttcatctgactggtgtactatgcc

SEQ ID NO: 94920 - DNA, 60 bp, Artificial
  Synthetic oligonucleotide
ctgatcacctttggatcgccaagtcaaaggcaagactttctgaaacatgtaccactacct

SEQ ID NO: 94921 - DNA, 60 bp, Artificial
  Synthetic oligonucleotide
gtaccatttgtcttgaaaactgtttagctactgaaagaagactttggcaaggtgttccag

SEQ ID NO: 94922 - DNA, 60 bp, Artificial
  Synthetic oligonucleotide
gctgctgacagaccccggttttcacatggacctgaaaccttttgcaagaaccaatccatt

SEQ ID NO: 94923 - DNA, 58 bp, Artificial
  Synthetic oligonucleotide
acctttcgctttgagcagccatgcacagatgaatcgggtgagcaaccttttaatatta

SEQ ID NO: 94924 - DNA, 60 bp, Artificial
  Synthetic oligonucleotide
gtgaagaggatggagacagcatgcgaacgtttacatgtagcgcaagaaacacaaatgcag

SEQ ID NO: 94925 - DNA, 60 bp, Artificial
  Synthetic oligonucleotide
cacccgctacacttaaacatggtgctttacctgagtggatacgggcgcaaactactctga

SEQ ID NO: 94926 - DNA, 60 bp, Artificial
  Synthetic oligonucleotide
tgcagttgtctttgcaggagttaagcaaaactgagtttggggatgaaccatggtctttgc

SEQ ID NO: 94927 - DNA, 60 bp, Artificial
  Synthetic oligonucleotide
gtcagaacctaaacggtgctttaagaaaggcgccagggtggtagaggtggagtttgatgg

SEQ ID NO: 94928 - DNA, 60 bp, Artificial
  Synthetic oligonucleotide
gcaagcaatacaaactggtacactgtctacagcaatttgtacatgcgcacagaggacggc

SEQ ID NO: 94929 - DNA, 60 bp, Artificial
  Synthetic oligonucleotide
agaggacggctggcagcttgcgaaggctggggctgacggaactgggctctactactgcac

SEQ ID NO: 94930 - DNA, 60 bp, Artificial
  Synthetic oligonucleotide
tagcaattgggattcgggcttgggatgctcatatctgctgactgaggcagaatgtgaaag

SEQ ID NO: 94931 - DNA, 60 bp, Artificial
  Synthetic oligonucleotide
ctgctttaacacagctaaaagcagagaaacagtccggaatctgatggcaaacacgctaaa

SEQ ID NO: 94932 - DNA, 60 bp, Artificial
  Synthetic oligonucleotide
accactaatcagcaatgggtgctggctgtgtttggccttgcagaggtgttttttgaggcg

SEQ ID NO: 94933 - DNA, 60 bp, Artificial
  Synthetic oligonucleotide
cactcctaaaaagatgtgtatagtaatatatggtccaccagatactggaaagtcaatgtt

SEQ ID NO: 94934 - DNA, 60 bp, Artificial
  Synthetic oligonucleotide
tggtttttcagttatgcaaagtgaacttgactgcagatgttctggcacatttacacgtta

SEQ ID NO: 94935 - DNA, 60 bp, Artificial
  Synthetic oligonucleotide
tcttttaaccccagcaagcactattgtacctgctattaattggttccctttatttgatag

SEQ ID NO: 94936 - DNA, 60 bp, Artificial
  Synthetic oligonucleotide
gccgcacatgtctgctacatcagaaggattagtcagagtcagcagaattggatctcgagc

SEQ ID NO: 94937 - DNA, 60 bp, Artificial
  Synthetic oligonucleotide
catctgttgcttataattatgcatgttatgccacagaaaatacaaatgcagcagcctttt

SEQ ID NO: 94938 - DNA, 60 bp, Artificial
  Synthetic oligonucleotide
gatattagtatacagttccagcgtgatgtaaatagcctagaggctgcgccaaatccagct

SEQ ID NO: 94939 - DNA, 60 bp, Artificial
  Synthetic oligonucleotide
taggccttattggcttagacgagcccagggaacaaataatggcatttgttggggaaatga

SEQ ID NO: 94940 - DNA, 60 bp, Artificial
  Synthetic oligonucleotide
atgggagatataggctttggggctgctaattttcctaagttgatgcaggatcgtgctggc

SEQ ID NO: 94941 - DNA, 60 bp, Artificial
  Synthetic oligonucleotide
cggggctgcaccaccaattcaactagttaatactgttattcaggatggtgatatgggaga

SEQ ID NO: 94942 - DNA, 60 bp, Artificial
  Synthetic oligonucleotide
attatataactcctgattctgccgatcaaaacaacagatcttctcatttaggatcttctg

SEQ ID NO: 94943 - DNA, 60 bp, Artificial
  Synthetic oligonucleotide
tttgtgagacgaagaccgttttcggtaagtttcatagccgccaggtattgtttgtaccga

SEQ ID NO: 94944 - DNA, 59 bp, Artificial
  Synthetic oligonucleotide
aggatctagtaccagatctacaaagcgtaggagagtaagatagtaaagatgtagaatgt

SEQ ID NO: 94945 - DNA, 60 bp, Artificial
  Synthetic oligonucleotide
gttccaccagctccaacgggcattgaagatacttacaggtatatcaaatccatggctact

SEQ ID NO: 94946 - DNA, 60 bp, Artificial
  Synthetic oligonucleotide
aagaagacacagatccatacaaagcttacagtttctggactttagatatgacagagcgct

SEQ ID NO: 94947 - DNA, 60 bp, Artificial
  Synthetic oligonucleotide
acctgttgggattttatatattatcaagatgaccaaaacaaatggcacaagactgaaggg

SEQ ID NO: 94948 - DNA, 60 bp, Artificial
  Synthetic oligonucleotide
aaaacaaaactatttctgcctctgttactagctcctcgagaaatacaaatccctcttctg

SEQ ID NO: 94949 - DNA, 60 bp, Artificial
  Synthetic oligonucleotide
agccctcgaaggagaccgagcatctcagaaaactccaacaccgagtcgcccacctcctcg

SEQ ID NO: 94950 - DNA, 60 bp, Artificial
  Synthetic oligonucleotide
ggaaccaccgacaccacacccagaagacgaggaacaaagaggaaattggggtccgactct

SEQ ID NO: 94951 - DNA, 60 bp, Artificial
  Synthetic oligonucleotide
ggggtccgactctgcaccaactccttcggaagtgggatcaagatctacaacgcttgcaag

SEQ ID NO: 94952 - DNA, 60 bp, Artificial
  Synthetic oligonucleotide
gatgggtcttggtgtttaataactgaagctgaatgtgaggacgatacgttagtggatttg

SEQ ID NO: 94953 - DNA, 60 bp, Artificial
  Synthetic oligonucleotide
gcagaggaggagttttgtccgtaccggatagactccaagtgtcacaattgtggctgtcgc

SEQ ID NO: 94954 - DNA, 59 bp, Artificial
  Synthetic oligonucleotide
gagctaagtccgcggttatcggcagtgcatataacgcctgagagagcatctaagcggag

SEQ ID NO: 94955 - DNA, 60 bp, Artificial
  Synthetic oligonucleotide
tgaaagtaatactattcaggtagattcactgttggtgcaaaaagacgcgggaaatcaaaa

SEQ ID NO: 94956 - DNA, 60 bp, Artificial
  Synthetic oligonucleotide
acgattccgaaagtataattcaggggaattctgaggaaagtgaccgctgtattcaggagc

SEQ ID NO: 94957 - DNA, 60 bp, Artificial
  Synthetic oligonucleotide
gagagacaaaatgtttccatggatcctaagcagagtcagatactaatagttggttgtgct

SEQ ID NO: 94958 - DNA, 55 bp, Artificial
  Synthetic oligonucleotide
gtacccattgatcctggagcgtcatctatagtccctcttgttgagggagggcctg

SEQ ID NO: 94959 - DNA, 60 bp, Artificial
  Synthetic oligonucleotide
tgatcaataaacactgtgaatattttaccgtggtgtcatttatacgcctccattgggtgg

SEQ ID NO: 94960 - DNA, 60 bp, Artificial
  Synthetic oligonucleotide
ggtcagcagacgctgaggagcagcagacgattcagacgtccatttgtgagacgaagaccg

SEQ ID NO: 94961 - DNA, 60 bp, Artificial
  Synthetic oligonucleotide
cctcttggcgtaggatctacaggtcatcctttactaaataagataggggacacagaaaat

SEQ ID NO: 94962 - DNA, 60 bp, Artificial
  Synthetic oligonucleotide
gatacccttgcagaatttaaatttcagttttccgcgggaaagtacacctgttaaacctgg

SEQ ID NO: 94963 - DNA, 60 bp, Artificial
  Synthetic oligonucleotide
ctattcacctttagagatccagcaactgatgtaggtggtgttagtggaggtcctactact

SEQ ID NO: 94964 - DNA, 60 bp, Artificial
  Synthetic oligonucleotide
cactggagaatactgggatttagctaaaccatgcaatgatttggaaaacggggctgcacc

SEQ ID NO: 94965 - DNA, 60 bp, Artificial
  Synthetic oligonucleotide
ggctgcgccaaatccagcttttgctgacattgcttatttaagtaggccgcacatgtctgc

SEQ ID NO: 94966 - DNA, 60 bp, Artificial
  Synthetic oligonucleotide
tttatggaacagtacccaatccaagctccggaatttcttagtcagccttctcgattggtg

SEQ ID NO: 94967 - DNA, 60 bp, Artificial
  Synthetic oligonucleotide
ccgatacagttacaccttaaaatgtactgccaacttttacaagttcagacagagatcaac

SEQ ID NO: 94968 - DNA, 60 bp, Artificial
  Synthetic oligonucleotide
gaccattaggatccgcaggaagtggaagaccagccacagacttaccagtgactagaccta

SEQ ID NO: 94969 - DNA, 60 bp, Artificial
  Synthetic oligonucleotide
cagtccctggcaaggtttacctacctcctagtgcaccagtagctcgtgtgttgcgcactg

SEQ ID NO: 94970 - DNA, 60 bp, Artificial
  Synthetic oligonucleotide
cctaaagtttctgctaatcaataccgagtatttagatgtaaacttccagatcctaacaag

SEQ ID NO: 94971 - DNA, 60 bp, Artificial
  Synthetic oligonucleotide
ttttatgcttcagctctgtttggaagtggcttggtcctaattctgatgggggtgctgcaa

SEQ ID NO: 94972 - DNA, 60 bp, Artificial
  Synthetic oligonucleotide
gcctgctaacttaatttctgacgagtcattgtcaccagatgctactgcagaggaggagtt

SEQ ID NO: 94973 - DNA, 60 bp, Artificial
  Synthetic oligonucleotide
catgaggggagataaggctactattcctgacatagagttagaagagcttgttttgcctgc

SEQ ID NO: 94974 - DNA, 60 bp, Artificial
  Synthetic oligonucleotide
tattgcctattatgctagaaaagaacatattactaaattaggtctgcagccattaccaac

SEQ ID NO: 94975 - DNA, 60 bp, Artificial
  Synthetic oligonucleotide
gccagagacccaggagagcctgagcacccgttttgctgcacagcaagaaattcagttgac

SEQ ID NO: 94976 - DNA, 60 bp, Artificial
  Synthetic oligonucleotide
gttaccaatgtctgacaaagatgaacctttgtttaccatttctgacaaaagctggacctg

SEQ ID NO: 94977 - DNA, 66 bp, Artificial
  Synthetic oligonucleotide
gatgccacacataattgttggatttatttagacacatatttgagaaatgcatttgatggtaacacg

SEQ ID NO: 94978 - DNA, 60 bp, Artificial
  Synthetic oligonucleotide
cttgcttcttttcataacaaacgactgtctgtaatttggagagataatacaccatttgca

SEQ ID NO: 94979 - DNA, 64 bp, Artificial
  Synthetic oligonucleotide
ggggtttcatttaatgagcttacaagaagttttaaaagtgataagacatgtacaccaaattggg

SEQ ID NO: 94980 - DNA, 60 bp, Artificial
  Synthetic oligonucleotide
gcttgcaagacacggttactcacgacttggacgattacaggaagaagctcgggatccgcc

SEQ ID NO: 94981 - DNA, 60 bp, Artificial
  Synthetic oligonucleotide
ggtgctgcaaaagtgttagttgcatttaaaagtgatgcccaaagacaagtgttcttaaac

SEQ ID NO: 94982 - DNA, 60 bp, Artificial
  Synthetic oligonucleotide
gaggaggggctggaaaggactctgtaggcagtgtaagcagatataatgattggaaaagag

SEQ ID NO: 94983 - DNA, 60 bp, Artificial
  Synthetic oligonucleotide
ggggctggaaaggactctgtaggcagtgtaagtagatataatgattggaaaagaggtcac

SEQ ID NO: 94984 - DNA, 60 bp, Artificial
  Synthetic oligonucleotide
ggggctggaaaggactctgtaggcagtgtaagcagatataatgattggaaaagaggtcac

SEQ ID NO: 94985 - DNA, 60 bp, Artificial
  Synthetic oligonucleotide
cttctgtgtcctaactgccgaaacagcgacctgcagcatggcggacaataaaggtagtgg

SEQ ID NO: 94986 - DNA, 52 bp, Artificial
  Synthetic oligonucleotide
ggtcatgggtagctgcagatggcacagagcgtctaggcaggtccagattgct

SEQ ID NO: 94987 - DNA, 60 bp, Artificial
  Synthetic oligonucleotide
aggcacatacacacccgatataaacacgggaacccacatctggtacccaaatgcaagtgg

SEQ ID NO: 94988 - DNA, 60 bp, Artificial
  Synthetic oligonucleotide
cgcgcatgaatcacagtgtattatgtgtgtgccaggtacaggtgtggcgaccggcaccgg

SEQ ID NO: 94989 - DNA, 60 bp, Artificial
  Synthetic oligonucleotide
ggagcgttaacggtcgggtataaatatcagcgcgcccaccagaccttattcgttcgcctt

SEQ ID NO: 94990 - DNA, 60 bp, Artificial
  Synthetic oligonucleotide
tcactccgcacctggggcttagtctgcgccagctccggaacagataggacggtaggaatc

SEQ ID NO: 94991 - DNA, 60 bp, Artificial
  Synthetic oligonucleotide
gcaatgagctgtttgtaaccatggtggataacactcgtaacaccaacttcaccatctcac

SEQ ID NO: 94992 - DNA, 60 bp, Artificial
  Synthetic oligonucleotide
gatagcacacaggatcagaaggttgctgggccatctgtgtactttgggacccctagtggg

SEQ ID NO: 94993 - DNA, 60 bp, Artificial
  Synthetic oligonucleotide
gggctgctgataggttcagacacctatataataggcgtgttcagcaagtgcgggtgtcca

SEQ ID NO: 94994 - DNA, 57 bp, Artificial
  Synthetic oligonucleotide
tatcggtttcgggaacatgaatttcaaggctttgcagcaagacaaaagtggggcccc

SEQ ID NO: 94995 - DNA, 60 bp, Artificial
  Synthetic oligonucleotide
gatgggactgtacgcgtcagcagatttggacaaaggggaactattagaacccggagcgga

SEQ ID NO: 94996 - DNA, 60 bp, Artificial
  Synthetic oligonucleotide
gtgattctcctttggattttgcagacagggctcgatttgcggtatctcaactgaaggtgc

SEQ ID NO: 94997 - DNA, 60 bp, Artificial
  Synthetic oligonucleotide
ggaaggtggaattgagcctattcccatggaacttgctgacaatgagagttttgacttttc

SEQ ID NO: 94998 - DNA, 60 bp, Artificial
  Synthetic oligonucleotide
caaggtaggtaagagccggaacacgctccggaagcagatggccgccatgttaggattaga

SEQ ID NO: 94999 - DNA, 60 bp, Artificial
  Synthetic oligonucleotide
attctgtatgtgttggggaggctgattttgttgaggctatgactggcaagcacattgtgc

SEQ ID NO: 95000 - DNA, 60 bp, Artificial
  Synthetic oligonucleotide
cagggtagcaaccacctgttactcctgtgacactgtgctgagattcattgtcgtggccgg

SEQ ID NO: 95001 - DNA, 60 bp, Artificial
  Synthetic oligonucleotide
catgcagtatctcgcccaaagggaagcagagcaggagacggctcttcgaggacagtggca

SEQ ID NO: 95002 - DNA, 60 bp, Artificial
  Synthetic oligonucleotide
tgaggctgaggtgactttcgggagcgatccggacaacagtgtctcctatatggtgtgggg

SEQ ID NO: 95003 - DNA, 60 bp, Artificial
  Synthetic oligonucleotide
ctgcaggactccagctttggctctgagccgtggactatggcagatacgagcctagagatg

SEQ ID NO: 95004 - DNA, 60 bp, Artificial
  Synthetic oligonucleotide
gggcagaaggtgccctagagtattgtgcgcggcagagtggccgtaataagctcggactac

SEQ ID NO: 95005 - DNA, 60 bp, Artificial
  Synthetic oligonucleotide
accactaccacaagcggttctctgtcctcggatgacctcctgcgcatgagcaatagagta

SEQ ID NO: 95006 - DNA, 57 bp, Artificial
  Synthetic oligonucleotide
atgccgctcaataatgatggccacccacaatttccattacatgctgctaattggaaa

SEQ ID NO: 95007 - DNA, 60 bp, Artificial
  Synthetic oligonucleotide
ggatagtgctcggagctataccctggatgagatactcagatacctaaatgttgatctcgc

SEQ ID NO: 95008 - DNA, 60 bp, Artificial
  Synthetic oligonucleotide
tagggatagtgggggggttactaacatgcttgtggctttccttgactcacaacaaagaga

SEQ ID NO: 95009 - DNA, 60 bp, Artificial
  Synthetic oligonucleotide
gagacgcgtcccaaatcctgtccattgcgatcctcccgtaatactgcttaaaggtccgac

SEQ ID NO: 95010 - DNA, 60 bp, Artificial
  Synthetic oligonucleotide
gccgctagtctagccaggtttaaggatgcattcagtgttagtttcagcgaccttacacgg

SEQ ID NO: 95011 - DNA, 60 bp, Artificial
  Synthetic oligonucleotide
aatagacgagcgcgaccatcagaacgaccccaacccacgtccggtcgacgaggacgactc

SEQ ID NO: 95012 - DNA, 60 bp, Artificial
  Synthetic oligonucleotide
ggtgatttctggactgtgagatataaactgcaaactttcacctcttcccctgatagcacc

SEQ ID NO: 95013 - DNA, 60 bp, Artificial
  Synthetic oligonucleotide
tgcagatggctatgtggacgccccagaatgggaagctttacctacctccaactgctccag

SEQ ID NO: 95014 - DNA, 60 bp, Artificial
  Synthetic oligonucleotide
cgatgtttccacaggctctacatctaccagcacagctaggaccgttaagcgccgccgtag

SEQ ID NO: 95015 - DNA, 60 bp, Artificial
  Synthetic oligonucleotide
acctccaccccaacaggcaattactgatgattataggttcattaattccttggccaccag

SEQ ID NO: 95016 - DNA, 60 bp, Artificial
  Synthetic oligonucleotide
ggtcacccctacttcgagatcaaggataatgacaaggttacagttcccaaagtttctggc

SEQ ID NO: 95017 - DNA, 60 bp, Artificial
  Synthetic oligonucleotide
gagctgtcactcatattacaggtgtgtaaagttccactgcagcccaatgtgcttgctcat

SEQ ID NO: 95018 - DNA, 60 bp, Artificial
  Synthetic oligonucleotide
gggataggcactactggccacccgctgtttaacaaactgggagacactgagaatccgaac

SEQ ID NO: 95019 - DNA, 60 bp, Artificial
  Synthetic oligonucleotide
catgatactgctgttatagatgtccagcctgccccttcaggacctcggagagtgaccatc

SEQ ID NO: 95020 - DNA, 56 bp, Artificial
  Synthetic oligonucleotide
ctatggatcctaagcagacccagatgtttattgtgggctgtgtaccttgcacgggg

SEQ ID NO: 95021 - DNA, 60 bp, Artificial
  Synthetic oligonucleotide
cccatccctcccagggattaggtgagggtggcgggtttattctcggggatagcagtggaa

SEQ ID NO: 95022 - DNA, 60 bp, Artificial
  Synthetic oligonucleotide
ttattcggctttaaatgtattctaaagttgttttgctctcttcctgtctcctgccccctc

SEQ ID NO: 95023 - DNA, 60 bp, Artificial
  Synthetic oligonucleotide
ccttgaacatcagaaagcaggggcagaaacctttgacttcagcaagatggtacaatgggc

SEQ ID NO: 95024 - DNA, 60 bp, Artificial
  Synthetic oligonucleotide
gcctatcggtatgcttgtgaggcagagacagatgcaaatgcccaggcatggctaaagtgt

SEQ ID NO: 95025 - DNA, 60 bp, Artificial
  Synthetic oligonucleotide
ggggtaatcacctggcactgtttacgcagcagttattttcagaggatgatcagcatattg

SEQ ID NO: 95026 - DNA, 60 bp, Artificial
  Synthetic oligonucleotide
aaggcaggagatgagggacatgacaatggctcagtgggtcaggaaatgctgtgatgactg

SEQ ID NO: 95027 - DNA, 60 bp, Artificial
  Synthetic oligonucleotide
ctaatgcttgctggacattcatggacatttacatgcggaatgctttagatggcaacccca

SEQ ID NO: 95028 - DNA, 60 bp, Artificial
  Synthetic oligonucleotide
ctgcaaggagctataatgttgggcccagtacccacccttagagatattgagcttgttgat

SEQ ID NO: 95029 - DNA, 60 bp, Artificial
  Synthetic oligonucleotide
tgctggtgcttgcatacaatgtagacgcttgcttgcaaaggaggaggctaggaagtattc

SEQ ID NO: 95030 - DNA, 60 bp, Artificial
  Synthetic oligonucleotide
gatgaggcagaatgtgaggatgggtcaccactagataactttgaggcactgtttgagcag

SEQ ID NO: 95031 - DNA, 60 bp, Artificial
  Synthetic oligonucleotide
gctcctcacagaggacttcgacttcctttgtcccgggtgcgttaaggacagacttctgcg

SEQ ID NO: 95032 - DNA, 60 bp, Artificial
  Synthetic oligonucleotide
ggcacaagcacatgagtgtggtggactattatggggtgtactatgtggaccacagtggtg

SEQ ID NO: 95033 - DNA, 60 bp, Artificial
  Synthetic oligonucleotide
gcctcctgttcctttcgaggagatagagctggacacctttagtggaggaatcagggactt

SEQ ID NO: 95034 - DNA, 60 bp, Artificial
  Synthetic oligonucleotide
aaccaggttaagcatgtaagggactgctgtgcaatggttagactctacaaaaggcaggag

SEQ ID NO: 95035 - DNA, 60 bp, Artificial
  Synthetic oligonucleotide
gacctattaatccggcagggggcagaataacaggcacaggcacggttatgaggcctggag

SEQ ID NO: 95036 - DNA, 60 bp, Artificial
  Synthetic oligonucleotide
gggtaattttgagggcttgtgacagtgtaacaccatccagacctttgtattgtatatctg

SEQ ID NO: 95037 - DNA, 60 bp, Artificial
  Synthetic oligonucleotide
attagtagaaggcgcccctgatgttggatttgcagctccagatgctggacctgcagcagg

SEQ ID NO: 95038 - DNA, 60 bp, Artificial
  Synthetic oligonucleotide
cctgaagatgacccagatggagacacaggaaactctgagcgcacgttttcttgcacaaca

SEQ ID NO: 95039 - DNA, 60 bp, Artificial
  Synthetic oligonucleotide
attttgggtctgaaccatggactttatcagaatgtagtttagaaatgttaaatgcacctc

SEQ ID NO: 95040 - DNA, 60 bp, Artificial
  Synthetic oligonucleotide
gactgtgttgtgtcgccaccgacgcagctatccgtgtgtttgagtgccttcttcaatcag

SEQ ID NO: 95041 - DNA, 60 bp, Artificial
  Synthetic oligonucleotide
aaggagtgcgtttgggcctgctgacgaacagcccgggccttccacatcgtacgacaagag

SEQ ID NO: 95042 - DNA, 60 bp, Artificial
  Synthetic oligonucleotide
ctttaaactctttcaacctgatgccactgtatatggcaaatctggacaatggactgttat

SEQ ID NO: 95043 - DNA, 60 bp, Artificial
  Synthetic oligonucleotide
atttagttagaggtaattggaggggctgttgtagaaattgttacgaacatgaggggtgat

SEQ ID NO: 95044 - DNA, 60 bp, Artificial
  Synthetic oligonucleotide
cgacaagagccaacaggaaagatctggaagcggtcaaccaaaagccctacaggacaccga

SEQ ID NO: 95045 - DNA, 58 bp, Artificial
  Synthetic oligonucleotide
cttgctctataaaagcttacttgctatctgatttgattggtagacctttgagtgaaat

SEQ ID NO: 95046 - DNA, 60 bp, Artificial
  Synthetic oligonucleotide
aagttagctcttgtttatagagatggtattgcttttgctgcgtgcgctaaatgcttaaga

SEQ ID NO: 95047 - DNA, 60 bp, Artificial
  Synthetic oligonucleotide
aaaatctcacgagttagaacaaacctctgagtcacctcagtgcagctggcagaagaaagt

SEQ ID NO: 95048 - DNA, 60 bp, Artificial
  Synthetic oligonucleotide
tgcctgtgaatttgcttagtgacgaatctattgaaactgatgacatagcagaatctgaaa

SEQ ID NO: 95049 - DNA, 60 bp, Artificial
  Synthetic oligonucleotide
gaggggtgataaaccaactattcctgatattgttttagaagagcttgttttgcctgtgaa

SEQ ID NO: 95050 - DNA, 60 bp, Artificial
  Synthetic oligonucleotide
ccagacataaataatgttaatgtattagttgaccccagctttgcaggagacactgtaggt

SEQ ID NO: 95051 - DNA, 60 bp, Artificial
  Synthetic oligonucleotide
ctagggcaagagatctgtacagtcgatttgttgcacagcagccaatatctgagccagatt

SEQ ID NO: 95052 - DNA, 60 bp, Artificial
  Synthetic oligonucleotide
ttgagtcaaccttcccgccttgttcagtttgaatatagaaatcccgcctttgacccagat

SEQ ID NO: 95053 - DNA, 60 bp, Artificial
  Synthetic oligonucleotide
ctttgacccagatgtgagcctatactttgagcgggatttggaaggcctcagggcagcgcc

SEQ ID NO: 95054 - DNA, 60 bp, Artificial
  Synthetic oligonucleotide
tggaaggcctcagggcagcgccattgcaggaatttgctgatgtagtttatttaggcaggc

SEQ ID NO: 95055 - DNA, 60 bp, Artificial
  Synthetic oligonucleotide
ggcaggccaagagtatccagcacctcagaaggtacaataagagtaagtagattaggtacc

SEQ ID NO: 95056 - DNA, 60 bp, Artificial
  Synthetic oligonucleotide
aatgtctcaggagtttataattatgcagtaaaccctaatcaaccagagcaaaatcgtaga

SEQ ID NO: 95057 - DNA, 60 bp, Artificial
  Synthetic oligonucleotide
caaaccagctgttggtgaatattgggatttagcagaaccttgtgacaaaaacagcttaaa

SEQ ID NO: 95058 - DNA, 60 bp, Artificial
  Synthetic oligonucleotide
caggacagagcaggggtccctttagatatagtggattcaatcagcttatggcctgatcta

SEQ ID NO: 95059 - DNA, 60 bp, Artificial
  Synthetic oligonucleotide
tttaaatacaagcagttcacagttatttaatagaccatattggattcgcagagctcaggg

SEQ ID NO: 95060 - DNA, 60 bp, Artificial
  Synthetic oligonucleotide
catgcacgcagtgagcgtttactaattgtgggacacccatattatgatatagaagatggt

SEQ ID NO: 95061 - DNA, 60 bp, Artificial
  Synthetic oligonucleotide
gtatgccctaggacgaaaatttttgtttcagactggattattaaagagaagagttagaac

SEQ ID NO: 95062 - DNA, 59 bp, Artificial
  Synthetic oligonucleotide
tgtagcaagttcttatatgtactcaaaggatgattttaatcagtacagccgtcatactg

SEQ ID NO: 95063 - DNA, 60 bp, Artificial
  Synthetic oligonucleotide
cagaattttcttttctgtgtcttaagtgctccaaagaattgctacgaaatggcagaactt

SEQ ID NO: 95064 - DNA, 60 bp, Artificial
  Synthetic oligonucleotide
ctcagatacagaacgtttggtttggaaactagtaggtatagaagtcgggagaggtgggcc

SEQ ID NO: 95065 - DNA, 60 bp, Artificial
  Synthetic oligonucleotide
gctacagtgcttgttttgtaaatttgttattactttgcctgacttagctagctttcattg

SEQ ID NO: 95066 - DNA, 60 bp, Artificial
  Synthetic oligonucleotide
ctgcatggaagtggttgggcccaaaatcagagggatacaggggtgatgctaaattgctta

SEQ ID NO: 95067 - DNA, 60 bp, Artificial
  Synthetic oligonucleotide
gaagaagtgggaagaagatctcacacagttgcagcgcatggtctgtcaagacttagacga

SEQ ID NO: 95068 - DNA, 60 bp, Artificial
  Synthetic oligonucleotide
cttagacgattacaagaggaagctcgggatccaccagtcctaattattacaggtcaacag

SEQ ID NO: 95069 - DNA, 60 bp, Artificial
  Synthetic oligonucleotide
ggctatagaccttttggggcccctgggtctggaaggccaactcaggaactacctatcgca

SEQ ID NO: 95070 - DNA, 60 bp, Artificial
  Synthetic oligonucleotide
gcctattgtaccagtagatccctctgcagcttcaatagttccattagtagaaggcgcccc

SEQ ID NO: 95071 - DNA, 60 bp, Artificial
  Synthetic oligonucleotide
tgcttcgcagacgcaaacgggcaagccctacggacttatatagatcatgcttacaagggg

SEQ ID NO: 95072 - DNA, 60 bp, Artificial
  Synthetic oligonucleotide
ggtacagtgggcatacgataatgatatgctggatgaagctgcaattgcttacaattatgc

SEQ ID NO: 95073 - DNA, 60 bp, Artificial
  Synthetic oligonucleotide
aatggtcaggttatacaaaaagcaagaaatgaggaatatgactatgccagaatggattaa

SEQ ID NO: 95074 - DNA, 60 bp, Artificial
  Synthetic oligonucleotide
gatgcaactcaatgttgttggatgtatttggacacacacatgagaaatgcatttgatggt

SEQ ID NO: 95075 - DNA, 60 bp, Artificial
  Synthetic oligonucleotide
ggttacagtaaaacgaaagttttatgccaccccggaaaagctcgcctctgatttgagtcc

SEQ ID NO: 95076 - DNA, 53 bp, Artificial
  Synthetic oligonucleotide
aaaatggcgctgatgcggagttgtattcgttgcttcatagcaataatcgtaga

SEQ ID NO: 95077 - DNA, 56 bp, Artificial
  Synthetic oligonucleotide
aaccaaaagccctacaggacaccgaaccacccacctcgacatcaacagtacgactt

SEQ ID NO: 95078 - DNA, 60 bp, Artificial
  Synthetic oligonucleotide
ataaatatgttgcacctctgtgatcaatcatgttgaccagctggacgtgctgtacaccgg

SEQ ID NO: 95079 - DNA, 60 bp, Artificial
  Synthetic oligonucleotide
atagaagtcgggagaggtgggcctttaggtgttggatctactggtcatcccttgtttaat

SEQ ID NO: 95080 - DNA, 60 bp, Artificial
  Synthetic oligonucleotide
ttagcttatgttccaccagctcccagtggtataggcgatacttacagatacttaaaatct

SEQ ID NO: 95081 - DNA, 60 bp, Artificial
  Synthetic oligonucleotide
acactgttgctacagtttccaaaccaaacaagagaaaacgtaccagataagctgctgaca

SEQ ID NO: 95082 - DNA, 60 bp, Artificial
  Synthetic oligonucleotide
gttaatgtacaggtgtgtgttgtctttgagtcagagttatttactcccgccctttgtagt

SEQ ID NO: 95083 - DNA, 60 bp, Artificial
  Synthetic oligonucleotide
gagtttttcgttgtgaattaccagatcctaacaagtttgctctaattgatactacattgt

SEQ ID NO: 95084 - DNA, 60 bp, Artificial
  Synthetic oligonucleotide
cgtaccagataagctgctgacatgctttcttggctttactgtgaatattgtactgtgaat

SEQ ID NO: 95085 - DNA, 60 bp, Artificial
  Synthetic oligonucleotide
ctacggtgcatataaaagagctgatcagcacagatttgaaggagactgatggagcctcag

SEQ ID NO: 95086 - DNA, 60 bp, Artificial
  Synthetic oligonucleotide
taagtgatatacctccagaggattctatagagttgcatacattaaacgttacaccacaaa

SEQ ID NO: 95087 - DNA, 60 bp, Artificial
  Synthetic oligonucleotide
acattctggcactgttgcaaacattacctttgtagattctggcactgttgcaaacattaa

SEQ ID NO: 95088 - DNA, 60 bp, Artificial
  Synthetic oligonucleotide
ctgttgtaataaatatggtatcccaccgtgcagctcgacgcaaacgggcctctgcaactg

SEQ ID NO: 95089 - DNA, 60 bp, Artificial
  Synthetic oligonucleotide
agtgggcagaaaaaagcaaaacgacgtctgtttcagatagcagacagtggctatggctgt

SEQ ID NO: 95090 - DNA, 60 bp, Artificial
  Synthetic oligonucleotide
aatttttggatagtgttcctattcctgacagtgtacaaatattggtgggatacatgacaa

SEQ ID NO: 95091 - DNA, 60 bp, Artificial
  Synthetic oligonucleotide
gaacagaaagtaaagaaaacagcccattaggggagcagccaggtgtggatacagatttaa

SEQ ID NO: 95092 - DNA, 60 bp, Artificial
  Synthetic oligonucleotide
gataaaattttacagtggtccagccttggtatatttttgggtggtcttgggataggtact

SEQ ID NO: 95093 - DNA, 60 bp, Artificial
  Synthetic oligonucleotide
gcaggcagagctagagacagcacaagcattgttccatgcgcaggaagtagacaatgatgc

SEQ ID NO: 95094 - DNA, 60 bp, Artificial
  Synthetic oligonucleotide
ctggcacatctgggtttgaaataacatcttctggtactactacacctgctgtgttagaca

SEQ ID NO: 95095 - DNA, 60 bp, Artificial
  Synthetic oligonucleotide
gcagcctttaatttctgcaacagacgacagcaacttatttgatgtttatgctgacattcc

SEQ ID NO: 95096 - DNA, 60 bp, Artificial
  Synthetic oligonucleotide
acaaccctgcctttaatcctattgactctacattaacatttgaacctactagtaatgttc

SEQ ID NO: 95097 - DNA, 60 bp, Artificial
  Synthetic oligonucleotide
taccctaaatactattctactgtatcgtcagtctcttcttatggtaaccttactgttcct

SEQ ID NO: 95098 - DNA, 60 bp, Artificial
  Synthetic oligonucleotide
gagaacatggcggcagtttatgtagtagtgggagtagtagtgggtgtatggatggtaatc

SEQ ID NO: 95099 - DNA, 60 bp, Artificial
  Synthetic oligonucleotide
acaatagtcatacatattttcaccactggcacgtattttggcgcacactttggcgcacct

SEQ ID NO: 95100 - DNA, 60 bp, Artificial
  Synthetic oligonucleotide
tgaaactcctggcagttttgtatattctccgtctcccagtggctctattattaacacaga

SEQ ID NO: 95101 - DNA, 60 bp, Artificial
  Synthetic oligonucleotide
ctacttgtattattggcctgtgcaactacttttacatccaacaatctgtctactcttctt

SEQ ID NO: 95102 - DNA, 60 bp, Artificial
  Synthetic oligonucleotide
tacggcgtgaacaactgtttgctaggcatttttggaacagagctggaacaatgggtgaca

SEQ ID NO: 95103 - DNA, 60 bp, Artificial
  Synthetic oligonucleotide
ccaaccacgtgcacaacccactactctgtgcaactacatctggaagcaacaaacgacgga

SEQ ID NO: 95104 - DNA, 60 bp, Artificial
  Synthetic oligonucleotide
gtgtgcttctacacaaaatggcgtagctaccacatatgaccctacaaaatataaacagta

SEQ ID NO: 95105 - DNA, 60 bp, Artificial
  Synthetic oligonucleotide
gtggccatcctttatataacaaattagatgacactgaaagttcacatgctgctacagctg

SEQ ID NO: 95106 - DNA, 60 bp, Artificial
  Synthetic oligonucleotide
gcagatggccctaaagggccttgcacaaagtcagtataacacagaggaatggacactgca

SEQ ID NO: 95107 - DNA, 60 bp, Artificial
  Synthetic oligonucleotide
cgttaatacagccatgtacattatatgctcacattcaatgtttagactgtaaatggggag

SEQ ID NO: 95108 - DNA, 60 bp, Artificial
  Synthetic oligonucleotide
gcagttatgtgcagacattataaacgagcccaaaagcgccaaatgaatatgtcacagtgg

SEQ ID NO: 95109 - DNA, 60 bp, Artificial
  Synthetic oligonucleotide
gggaacacctaaaaaaaactgtatagtaatacatggaccagcaaatacaggtaaatcata

SEQ ID NO: 95110 - DNA, 60 bp, Artificial
  Synthetic oligonucleotide
gcagtattttggaaaactggaattttggtgtcccaccgccacccactaccagtttagtag

SEQ ID NO: 95111 - DNA, 63 bp, Artificial
  Synthetic oligonucleotide
gcacaagccattactacagttaaaatgtccgcctatattattaacctcaaatattaatccagc

SEQ ID NO: 95112 - DNA, 60 bp, Artificial
  Synthetic oligonucleotide
cattgggctaaaggtacaccatgtaaatctactcacatacagcaaggtgactgtcctcct

SEQ ID NO: 95113 - DNA, 60 bp, Artificial
  Synthetic oligonucleotide
gtagcatggaaatgtgtgtactatatgactgaggcaggaacatgggataaaacagaagca

SEQ ID NO: 95114 - DNA, 60 bp, Artificial
  Synthetic oligonucleotide
taccagtgacgaagtatccgctactcagattgttagaccactacaacacgcctccacgtc

SEQ ID NO: 95115 - DNA, 60 bp, Artificial
  Synthetic oligonucleotide
cggctactaaacgacctggacagtgtggacttccggagcaacacagtggacgtgtcacca

SEQ ID NO: 95116 - DNA, 60 bp, Artificial
  Synthetic oligonucleotide
gatggcttactggcggcctagtgacagtacggtttatctgccacctccttctgtgtccag

SEQ ID NO: 95117 - DNA, 60 bp, Artificial
  Synthetic oligonucleotide
cctgctttaacatccaggcgtggtactgttaggtatagtagattaggtcaaagggcaact

SEQ ID NO: 95118 - DNA, 60 bp, Artificial
  Synthetic oligonucleotide
gattattagctgtaggcaatccttattttaaagtttctaaaggtgcaggtagtaggcaag

SEQ ID NO: 95119 - DNA, 60 bp, Artificial
  Synthetic oligonucleotide
gttacctgactctactatttacaatcccgaaacacaacgtcttgtgtgggcctgtgttgg

SEQ ID NO: 95120 - DNA, 60 bp, Artificial
  Synthetic oligonucleotide
gcgtgtggcaggtccccgcctttatagtaaggctaatcaacaggttcgtgtgtctacttc

SEQ ID NO: 95121 - DNA, 60 bp, Artificial
  Synthetic oligonucleotide
attttaccaatccagcattttcagacccttcacttatagaggtacctcaaaccggggagg

SEQ ID NO: 95122 - DNA, 60 bp, Artificial
  Synthetic oligonucleotide
gtcaggaacacatggatatgaagaaatacctttgcaaacatttgcatctcatgggtcagg

SEQ ID NO: 95123 - DNA, 60 bp, Artificial
  Synthetic oligonucleotide
gttcaatctggattacgtcgtaggcctaccataggaccccgcaaacgttctgccccgtct

SEQ ID NO: 95124 - DNA, 60 bp, Artificial
  Synthetic oligonucleotide
agtatgcatggaccgaaaccaacattacaagaaattatattgcatttgcaaccccaaaat

SEQ ID NO: 95125 - DNA, 60 bp, Artificial
  Synthetic oligonucleotide
gcagtgccagaaaccgttgaatccagcagacaaatataaacatcttaaagacaaacgacg

SEQ ID NO: 95126 - DNA, 60 bp, Artificial
  Synthetic oligonucleotide
cgacgattccaccacatatctggttattatagaggccagtgcaattcgtgttacaaccaa

SEQ ID NO: 95127 - DNA, 60 bp, Artificial
  Synthetic oligonucleotide
gctgtgtatattgcaaaacaaccttggaacgcacagaggtatatgaatttgcatttaagg

SEQ ID NO: 95128 - DNA, 60 bp, Artificial
  Synthetic oligonucleotide
atggcgcgatttgaagatccaagcaaacggccctacaagttgccagacctgtgcacagaa

SEQ ID NO: 95129 - DNA, 60 bp, Artificial
  Synthetic oligonucleotide
tcctgtatggttgcaccctggtgagtaacaaatagtgtttgtgttcgtggtatgagtgta

SEQ ID NO: 95130 - DNA, 55 bp, Artificial
  Synthetic oligonucleotide
aacagatgatgttaatcatcgacaactaccagcccgacgagctgaaccacagcgt

SEQ ID NO: 95131 - DNA, 60 bp, Artificial
  Synthetic oligonucleotide
ggcccagatattgtattaccttctagtacttctgtatggccttttataacacctacatct

SEQ ID NO: 95132 - DNA, 60 bp, Artificial
  Synthetic oligonucleotide
caaagtgtctctatggacccaaagcaaactcagctatttgtagtaggctgtactccttgt

SEQ ID NO: 95133 - DNA, 60 bp, Artificial
  Synthetic oligonucleotide
gcaggaggaccattcaggtgtacccttggacattgtagcttctaaatgtaaatggcctga

SEQ ID NO: 95134 - DNA, 60 bp, Artificial
  Synthetic oligonucleotide
gggatggtgtcatgggcgacagtatacctgaggctgaatttgagggtgttaagcacacct

SEQ ID NO: 95135 - DNA, 60 bp, Artificial
  Synthetic oligonucleotide
gggcagttctcttttgcgtggttgtacccctgtgtggtggatggtggtgggctctgggaa

SEQ ID NO: 95136 - DNA, 60 bp, Artificial
  Synthetic oligonucleotide
acagctgatgtattagcccatatacatgtaatggatccagctataattgaggactggcag

SEQ ID NO: 95137 - DNA, 60 bp, Artificial
  Synthetic oligonucleotide
gcctgactggcttaaaagacaaactatgctaaaccaccagcaggaggcagactcatttga

SEQ ID NO: 95138 - DNA, 60 bp, Artificial
  Synthetic oligonucleotide
atagcactatggggacctccagatactggcaaatctatgttttgctacagcctaattaga

SEQ ID NO: 95139 - DNA, 60 bp, Artificial
  Synthetic oligonucleotide
tgtatatgagaagtgctttagatggaaacgaggtgtctgtggattgtaagcatagggtac

SEQ ID NO: 95140 - DNA, 55 bp, Artificial
  Synthetic oligonucleotide
taagtgtccttaccgggtggtgacagattgcaagtattgtgagaagtcattgtgt

SEQ ID NO: 95141 - DNA, 60 bp, Artificial
  Synthetic oligonucleotide
cagacgctggcgttgcacagcaatatgctgccaccagctataaacattatctgcgacatg

SEQ ID NO: 95142 - DNA, 60 bp, Artificial
  Synthetic oligonucleotide
cctattgggcctcctgatatagttcctatagatgcagttacaccacagtcctcctctgtg

SEQ ID NO: 95143 - DNA, 60 bp, Artificial
  Synthetic oligonucleotide
ggtaacatcacagggtactgtagtacgtccgggtgttgtggtagatcctattgggcctcc

SEQ ID NO: 95144 - DNA, 60 bp, Artificial
  Synthetic oligonucleotide
cagcaaccgaattagttatctggccgttggccacgaccggcagcgatgttttgtaatatt

SEQ ID NO: 95145 - DNA, 55 bp, Artificial
  Synthetic oligonucleotide
ctaaaaaacgtagacggggggtttaatctatggcattacctgtgttgcacatgca

SEQ ID NO: 95146 - DNA, 60 bp, Artificial
  Synthetic oligonucleotide
agcaaacaacattagcagacaaactgttaaaatggattgccagtgtggtttactttgggg

SEQ ID NO: 95147 - DNA, 60 bp, Artificial
  Synthetic oligonucleotide
aaaggaggtgtaactgtggaagtgttatttgacaacgaggaagaaaaagctatgccatat

SEQ ID NO: 95148 - DNA, 60 bp, Artificial
  Synthetic oligonucleotide
gaaggtggatcttacagaacgtttgtcctctgatcttgacagatatcctttgggtcgcag

SEQ ID NO: 95149 - DNA, 60 bp, Artificial
  Synthetic oligonucleotide
ttatctcaaactggggttagctcgtcttctacctcctctagaaagcggtctcgtgtagag

SEQ ID NO: 95150 - DNA, 60 bp, Artificial
  Synthetic oligonucleotide
ggtggagcgtttcgatgctgtccaagagaaactactggggctttatgaggccggacgctc

SEQ ID NO: 95151 - DNA, 60 bp, Artificial
  Synthetic oligonucleotide
ggccggacgctcagacctggaatcccaaatacaacactgggatcttgtaaggcaggagca

SEQ ID NO: 95152 - DNA, 60 bp, Artificial
  Synthetic oligonucleotide
ccccaccagtgctatactggaggtgcagcccactgcatcaacacctaaaagggtctctgt

SEQ ID NO: 95153 - DNA, 60 bp, Artificial
  Synthetic oligonucleotide
taaatatatttgtcatggtaccggtctctgcgtgatttgttattgagtcatgtaaggtca

SEQ ID NO: 95154 - DNA, 60 bp, Artificial
  Synthetic oligonucleotide
tgtaaggtcaatagccacacctggcttttagtctttggcttccgtccggcttggacgtgc

SEQ ID NO: 95155 - DNA, 60 bp, Artificial
  Synthetic oligonucleotide
ctttcaggtatgtactttgcaagtttcaacaacaagattactcagccttccagcaaccga

SEQ ID NO: 95156 - DNA, 60 bp, Artificial
  Synthetic oligonucleotide
atctaccaccttctcagccagtggctaaaatactgcctactgatgaatacgttgtggaaa

SEQ ID NO: 95157 - DNA, 60 bp, Artificial
  Synthetic oligonucleotide
ggtcaaacattaataggcccacagctagacaatgagctgcttgattctacaaccgaggat

SEQ ID NO: 95158 - DNA, 60 bp, Artificial
  Synthetic oligonucleotide
ccgaggattttagctcctctcgtctccgatttgcaggggttcaccatggcatccagtttc

SEQ ID NO: 95159 - DNA, 56 bp, Artificial
  Synthetic oligonucleotide
ggggtctgggtataggcacaggtaagggtactggtggggcctctggctatgttccc

SEQ ID NO: 95160 - DNA, 60 bp, Artificial
  Synthetic oligonucleotide
gtggaaacgtctattttcttccatgcctccagcgaccgcctgcttactgtaggacaccca

SEQ ID NO: 95161 - DNA, 60 bp, Artificial
  Synthetic oligonucleotide
acggcttgtttggaagttacggggtctggatattggtcgtggtggaccccttagcgttgg

SEQ ID NO: 95162 - DNA, 60 bp, Artificial
  Synthetic oligonucleotide
cgtgcaggaacatcaaataataacagatcctccgcgacatagaagtgtaccagtagcatt

SEQ ID NO: 95163 - DNA, 60 bp, Artificial
  Synthetic oligonucleotide
gctgggtagcagcaatatttggtgttgtagcagaaatgttggaagcggctaagacgctat

SEQ ID NO: 95164 - DNA, 60 bp, Artificial
  Synthetic oligonucleotide
gcaacgcaggatggcgacacacggtgcctggatattttacacagcagtaatagacaagct

SEQ ID NO: 95165 - DNA, 60 bp, Artificial
  Synthetic oligonucleotide
aggtagcgtcggaggcattgactaattcagggacattgactaatggggatgaaaatgctg

SEQ ID NO: 95166 - DNA, 60 bp, Artificial
  Synthetic oligonucleotide
gccacgaggatccagcagtaaaagacgactatttgaggacagtggcttaggacatgagcc

SEQ ID NO: 95167 - DNA, 60 bp, Artificial
  Synthetic oligonucleotide
cgggtaatagatttaagcccacgacttgaagcgctgtgtgtgtcgccacgaggatccagc

SEQ ID NO: 95168 - DNA, 60 bp, Artificial
  Synthetic oligonucleotide
cttgttacctccaacatagatatgcattcggaggcctctttaaaatacctgcagagtaga

SEQ ID NO: 95169 - DNA, 60 bp, Artificial
  Synthetic oligonucleotide
gagcagcagttagacctttgtgacccagaagacagtacaaatggagaccctggtggagcg

SEQ ID NO: 95170 - DNA, 60 bp, Artificial
  Synthetic oligonucleotide
ctgtatatgggcatcctacagaccctgttacacaatctgcagctgaggtgtttatagggg

SEQ ID NO: 95171 - DNA, 60 bp, Artificial
  Synthetic oligonucleotide
cccctcgggcatttcaaagagcattccaaagggctcgtgaattatataataggcgggttc

SEQ ID NO: 95172 - DNA, 60 bp, Artificial
  Synthetic oligonucleotide
ggggaatccccaagcactgttaaataggcaacagctagaagaagacagtcagctactaac

SEQ ID NO: 95173 - DNA, 60 bp, Artificial
  Synthetic oligonucleotide
gtctgccacatttgatattcaacctactgcagagccaccacgtactagtacccctcgggc

SEQ ID NO: 95174 - DNA, 60 bp, Artificial
  Synthetic oligonucleotide
gcttgtgagtttatagaaacagaagcgacctgtgaggatggtttagattcattggaagca

SEQ ID NO: 95175 - DNA, 60 bp, Artificial
  Synthetic oligonucleotide
ccgaatatagaagaagaaagcgaagacacagagaacgaaaacgatccaagcacaggtggg

SEQ ID NO: 95176 - DNA, 60 bp, Artificial
  Synthetic oligonucleotide
gaggcttatttcagtgtattagcacagcttttacatgggtggcggatgcgggtccacaat

SEQ ID NO: 95177 - DNA, 60 bp, Artificial
  Synthetic oligonucleotide
gccacattagactaagcaggttgggtcaacgtggcactattcgtacaagaagtggcctgc

SEQ ID NO: 95178 - DNA, 55 bp, Artificial
  Synthetic oligonucleotide
ggggccgagcaaggtgacaccaccgcacaagtcacccgaagcgccagaaaaggca

SEQ ID NO: 95179 - DNA, 60 bp, Artificial
  Synthetic oligonucleotide
aggactggaactgatgtattatttggtccttcttctatcgctagcacttcgacgggggcc

SEQ ID NO: 95180 - DNA, 60 bp, Artificial
  Synthetic oligonucleotide
cccctcgaccacctcgacgaccacagagaccgactcagaggattcggcttccgaatatag

SEQ ID NO: 95181 - DNA, 60 bp, Artificial
  Synthetic oligonucleotide
gtcaacatggagcccctgaaagtctctggaagtggagggataccgatgaagacaaggctt

SEQ ID NO: 95182 - DNA, 60 bp, Artificial
  Synthetic oligonucleotide
caacactccacacaacgaccacaacaagggatccagaggtgagggaaacaaaaaccacca

SEQ ID NO: 95183 - DNA, 60 bp, Artificial
  Synthetic oligonucleotide
gctgtctgtcatgtatgtggagtcaaatgaggccctgagtttatgtaggatccaagggac

SEQ ID NO: 95184 - DNA, 60 bp, Artificial
  Synthetic oligonucleotide
acaacagttcaagtatcaaggaggtgtacatgcatatatgcattaaattgggattgtagt

SEQ ID NO: 95185 - DNA, 60 bp, Artificial
  Synthetic oligonucleotide
ggccttatcaccactgggtgctttggtagcctgttatgacggtgtgagttgttccattgg

SEQ ID NO: 95186 - DNA, 60 bp, Artificial
  Synthetic oligonucleotide
ggaggctatctctttattagatgtggtatcagtcaaaaaccgtgtccaactaacatcatt

SEQ ID NO: 95187 - DNA, 60 bp, Artificial
  Synthetic oligonucleotide
gcaaaggagtcagaagagtgcaacaggaatatctcaacaacaaagtacccctgcaaggta

SEQ ID NO: 95188 - DNA, 60 bp, Artificial
  Synthetic oligonucleotide
gggcaatgaagctgcaaaagcagcagaagctttccaaagatcactaaagaaaataggaca

SEQ ID NO: 95189 - DNA, 60 bp, Artificial
  Synthetic oligonucleotide
ggtgcaggagttcaggtaatagtggagttaggggcatacgttcaagcagaaagcataagc

SEQ ID NO: 95190 - DNA, 60 bp, Artificial
  Synthetic oligonucleotide
aaccagtgcagagtcaataggaagcctgtgtcaagagttagagtttagaggcgaaagcct

SEQ ID NO: 95191 - DNA, 60 bp, Artificial
  Synthetic oligonucleotide
ccggttgtacgaggaggtctttgctcctacgagtgatggcaagactccagccgaggaagg

SEQ ID NO: 95192 - DNA, 60 bp, Artificial
  Synthetic oligonucleotide
gacacctctgctcttagtcttgaagccaggctggaatctattgacgagaaattgagcatg

SEQ ID NO: 95193 - DNA, 60 bp, Artificial
  Synthetic oligonucleotide
cactgggagcagagcgtacacagcagatactaaagaactcaggtagtgaggtgcaggcag

SEQ ID NO: 95194 - DNA, 60 bp, Artificial
  Synthetic oligonucleotide
gcattgaaaaggttcccaaggattgacatccccaaaattgcgaggtccttttatgatctg

SEQ ID NO: 95195 - DNA, 60 bp, Artificial
  Synthetic oligonucleotide
gccagagcatcaatagtgactgatcttagtaagtttaaccaggcttttcggtatgagaca

SEQ ID NO: 95196 - DNA, 60 bp, Artificial
  Synthetic oligonucleotide
ctacagctgccatgcaagatagtgcaaactctgattaaatgcggagaacatggcctgatc

SEQ ID NO: 95197 - DNA, 60 bp, Artificial
  Synthetic oligonucleotide
ggaaaatctcacatgtaccgacgggcccagcttaataagaacagaacttgaactgacaaa

SEQ ID NO: 95198 - DNA, 57 bp, Artificial
  Synthetic oligonucleotide
attggcttgtcattggtgcgggatcttaactgaacagtgtaacgagaacaatatttt

SEQ ID NO: 95199 - DNA, 60 bp, Artificial
  Synthetic oligonucleotide
ggtctttgagagaaaggtcctggggtaacatggaaattgttggagtcacctcaccgagca

SEQ ID NO: 95200 - DNA, 59 bp, Artificial
  Synthetic oligonucleotide
cacctgagatctagtgacttgtgtgaagtgccatgggttgtcaatgctgatagtgaagt

SEQ ID NO: 95201 - DNA, 60 bp, Artificial
  Synthetic oligonucleotide
gacatgatatgtgactggttgcaattaaaatcgacatccgaaaatccatctgtcctaaag

SEQ ID NO: 95202 - DNA, 60 bp, Artificial
  Synthetic oligonucleotide
gagagtcctggggaacatgaacagagttatagatggtggagaaggcctgtctatggacac

SEQ ID NO: 95203 - DNA, 60 bp, Artificial
  Synthetic oligonucleotide
gcaacaagagcaaaagaatcagctttatgacatacaatcaggtgctgacatggaaggatg

SEQ ID NO: 95204 - DNA, 60 bp, Artificial
  Synthetic oligonucleotide
ggggtctaaacaggaaaagggtttcaggcactgtcttagaaggaaaccagtatccaatgt

SEQ ID NO: 95205 - DNA, 60 bp, Artificial
  Synthetic oligonucleotide
ggtagaagtgaaggctgttgaggcaaactgcaaatctctgctttccggcctaaggacacc

SEQ ID NO: 95206 - DNA, 60 bp, Artificial
  Synthetic oligonucleotide
ctagaggcaatcgggaaactaagatgggtttataaggggactcaagggttaaggaggttg

SEQ ID NO: 95207 - DNA, 60 bp, Artificial
  Synthetic oligonucleotide
tggttgagcaagaaggctaccactataattgaatggttagaacatatcttgaattcccca

SEQ ID NO: 95208 - DNA, 60 bp, Artificial
  Synthetic oligonucleotide
gcaaggctccctgcaaatatgaagtacggggcaagtgcaatagaggcagtgaatgcaagt

SEQ ID NO: 95209 - DNA, 60 bp, Artificial
  Synthetic oligonucleotide
ggagcagggcgagatgataggacacaagattttgttttggggtcaacaaatgtggtccag

SEQ ID NO: 95210 - DNA, 60 bp, Artificial
  Synthetic oligonucleotide
tagtctgtataatatcataaaacaactgcaagagactgacgtaaggcaggccagagacaa

SEQ ID NO: 95211 - DNA, 60 bp, Artificial
  Synthetic oligonucleotide
ggaatgggagcgtaggcctaactgagaaggccaaggaactgaacaaaatagtggaggacg

SEQ ID NO: 95212 - DNA, 60 bp, Artificial
  Synthetic oligonucleotide
ctgatttggtggagaaagaccaactgcctgcaaggttaacagtatggttccctctattcc

SEQ ID NO: 95213 - DNA, 60 bp, Artificial
  Synthetic oligonucleotide
gaatcgggcaatggtcagaaggaaaggatttgggattttgattggagtttatggtagctc

SEQ ID NO: 95214 - DNA, 60 bp, Artificial
  Synthetic oligonucleotide
caatgaaaccttatggtatggtctcaaagtttgtcaactcagccaaagcagtcgggaaga

SEQ ID NO: 95215 - DNA, 60 bp, Artificial
  Synthetic oligonucleotide
cgtgagttaagtgtgggaaggatgtttgcgatgcaaccaggaaaacaaaggcaagttcag

SEQ ID NO: 95216 - DNA, 60 bp, Artificial
  Synthetic oligonucleotide
ctatttgccgcagcagaaagctatgcaagaagcctaaaagaaagcaataagataaatttc

SEQ ID NO: 95217 - DNA, 60 bp, Artificial
  Synthetic oligonucleotide
caggggattcagcttagtgacttgtcctataagcatgcaatccttaaagaatcacagtac

SEQ ID NO: 95218 - DNA, 60 bp, Artificial
  Synthetic oligonucleotide
ccctaagatcacattcgaaagattgaagaattacgaaactgtgtcaggatccactagagg

SEQ ID NO: 95219 - DNA, 60 bp, Artificial
  Synthetic oligonucleotide
gagaggggccttcattttaaggatcataaaaggctttgttgacacaaacaagagatggcc

SEQ ID NO: 95220 - DNA, 60 bp, Artificial
  Synthetic oligonucleotide
gagcaggagtttgcaataccagagagaacaaatcttgagatggtcttgaatgataaggcc

SEQ ID NO: 95221 - DNA, 60 bp, Artificial
  Synthetic oligonucleotide
ggtcattttaccggaggacaccagatttcttgactgaagcagttagccatatgagtgtac

SEQ ID NO: 95222 - DNA, 60 bp, Artificial
  Synthetic oligonucleotide
ccctcaagcagtgggatcagagagacaggcaagagttactagtgaaataaatagagcagc

SEQ ID NO: 95223 - DNA, 60 bp, Artificial
  Synthetic oligonucleotide
gtccttctaacacttggccaccacaataacctaccatgtcacggggaggtacagagctcc

SEQ ID NO: 95224 - DNA, 60 bp, Artificial
  Synthetic oligonucleotide
atgctatcagctgtgggataagtgtgatgagtgtagtggaacaacttacaggcagaggcc

SEQ ID NO: 95225 - DNA, 60 bp, Artificial
  Synthetic oligonucleotide
gcccaagcaggaacctcaccaccaagggagacatacaccaaacgacaagagcaacaacag

SEQ ID NO: 95226 - DNA, 60 bp, Artificial
  Synthetic oligonucleotide
ggatccactaaatgaaggggttgtgaatgtgtacctacctgattcttatttaaagggtgt

SEQ ID NO: 95227 - DNA, 60 bp, Artificial
  Synthetic oligonucleotide
gaaatgctttccagactagggtcagggagaaaaacctaagggtagtggaacccgtcaaca

SEQ ID NO: 95228 - DNA, 60 bp, Artificial
  Synthetic oligonucleotide
cagcagtagaccaatggaatttccagcatctgtccctgcttacagaacgaccaattacca

SEQ ID NO: 95229 - DNA, 60 bp, Artificial
  Synthetic oligonucleotide
tccaatctgcagcaaaattagacctgtaccaagacaagagagttgtgtgtgtggcgaatg

SEQ ID NO: 95230 - DNA, 66 bp, Artificial
  Synthetic oligonucleotide
gcagctgagtgtacaacagaggaaatacctaatgtggattatatagataaaattttagatgtgttc

SEQ ID NO: 95231 - DNA, 64 bp, Artificial
  Synthetic oligonucleotide
gaggacttaactatttatatgaaagataaagcattatccccaaagaaatcaaactgggacacag

SEQ ID NO: 95232 - DNA, 53 bp, Artificial
  Synthetic oligonucleotide
gtgatgccattcctccaacaaaacaagatggagacggtgatgatggaagaggc

SEQ ID NO: 95233 - DNA, 60 bp, Artificial
  Synthetic oligonucleotide
gtactatcacggccaggaaatgatgaatgtccatggggtcattcatgcccagacggatgt

SEQ ID NO: 95234 - DNA, 60 bp, Artificial
  Synthetic oligonucleotide
ggcaactatcctgccctctggagttatgcgatgggtgtagcagttgtacaaaacaaggcc

SEQ ID NO: 95235 - DNA, 60 bp, Artificial
  Synthetic oligonucleotide
gtgatgtagttgaagggaggtggaatataagttcatgtgcaaaattggatcctaaattac

SEQ ID NO: 95236 - DNA, 60 bp, Artificial
  Synthetic oligonucleotide
ggaccaagacacaaaagacggatggaaaggaaagagaggacacagaagagagcactcgat

SEQ ID NO: 95237 - DNA, 60 bp, Artificial
  Synthetic oligonucleotide
cctcggatatggaggtctagagcatgaagaaaacggggacgtaatatgcaacacaactgg

SEQ ID NO: 95238 - DNA, 60 bp, Artificial
  Synthetic oligonucleotide
cggagacgtaatatgtaatacaactggttgtcctggcaaaacacagagagactgtaatca

SEQ ID NO: 95239 - DNA, 60 bp, Artificial
  Synthetic oligonucleotide
cacaactggttgtcctggcaaaacacagagagactgcaatcaggcctcttacagcccatg

SEQ ID NO: 95240 - DNA, 60 bp, Artificial
  Synthetic oligonucleotide
cattcccctcaactgttacgtatgtaaggaaaactgcgattaagtatctgaggattcgtg

SEQ ID NO: 95241 - DNA, 60 bp, Artificial
  Synthetic oligonucleotide
gcgagtactccttggatctatttatgagagaatggctgaatggagcatcacttgagatct

SEQ ID NO: 95242 - DNA, 60 bp, Artificial
  Synthetic oligonucleotide
ttcaagactatgtcaacaatgaaattgtaccttcaatcacaagattaggctgtgaagcag

SEQ ID NO: 95243 - DNA, 60 bp, Artificial
  Synthetic oligonucleotide
ctgaatttctgaccctcgatatactagtgtttctcaaaacatttggagggttactcgtga

SEQ ID NO: 95244 - DNA, 60 bp, Artificial
  Synthetic oligonucleotide
ctaagcaaaccagccaaggctgctataagaatagcaatgatatatacttgggcatttggg

SEQ ID NO: 95245 - DNA, 60 bp, Artificial
  Synthetic oligonucleotide
tacatatgtgaggaaaactgcgattaagtatctgaggattcgtggaatcaatccacctga

SEQ ID NO: 95246 - DNA, 60 bp, Artificial
  Synthetic oligonucleotide
gaaatcaaagaaggagaaagggattatgggataatgaggccatatcatacagcactgcaa

SEQ ID NO: 95247 - DNA, 60 bp, Artificial
  Synthetic oligonucleotide
tactagatctacgagttggcacagtaaattacagttaggggtaattgacatttctgattt

SEQ ID NO: 95248 - DNA, 60 bp, Artificial
  Synthetic oligonucleotide
ctctctggagttatgcgatgggtgtagcagttgtacaaaacaaggctatgcaacagtatg

SEQ ID NO: 95249 - DNA, 66 bp, Artificial
  Synthetic oligonucleotide
gcaagtaaaacatataatcaaatgactgatggattaagggatctatgggttactatactatcgaag

SEQ ID NO: 95250 - DNA, 60 bp, Artificial
  Synthetic oligonucleotide
cccaagagtcacacatacatttaatattgatgacaataggaaatcctgctcccttgcact

SEQ ID NO: 95251 - DNA, 60 bp, Artificial
  Synthetic oligonucleotide
tcagatatggcattgagactagaatggcagctctaactctgtctacccttagaccggaca

SEQ ID NO: 95252 - DNA, 60 bp, Artificial
  Synthetic oligonucleotide
ctcatggttgaaacactgataacaatgaacacaggtaggaacgacttgacaacgatagag

SEQ ID NO: 95253 - DNA, 60 bp, Artificial
  Synthetic oligonucleotide
gtttgacgctaataaagttgcacttgctcctcaatgtcttccactagatagagggataaa

SEQ ID NO: 95254 - DNA, 60 bp, Artificial
  Synthetic oligonucleotide
aagggtaaagttatatttctcggatatggaggtctagagcatgaagaaaacggagacgta

SEQ ID NO: 95255 - DNA, 60 bp, Artificial
  Synthetic oligonucleotide
gctacagagatgatagtctacaccgtacagaacatcaaacctgaactatatccatggtcc

SEQ ID NO: 95256 - DNA, 60 bp, Artificial
  Synthetic oligonucleotide
cccaacagagcttggtaacactcatggttgaaacactgataacaatgaacacaggcagga

SEQ ID NO: 95257 - DNA, 60 bp, Artificial
  Synthetic oligonucleotide
tcggagaaataattgggacaattgcgatagggatagccacctcagcacagattaccgcag

SEQ ID NO: 95258 - DNA, 60 bp, Artificial
  Synthetic oligonucleotide
caaaacgattctttggagagataattgggacaattgcgatagggatagccacctcagcgc

SEQ ID NO: 95259 - DNA, 60 bp, Artificial
  Synthetic oligonucleotide
ctggatgttcgggagtgatcttgagtatgatcaagacaatatgttgcaaaatggcagaag

SEQ ID NO: 95260 - DNA, 60 bp, Artificial
  Synthetic oligonucleotide
ctcatatctatcagtgccatacatttagcagctgtcaaaatcggtgtaagagttactgca

SEQ ID NO: 95261 - DNA, 60 bp, Artificial
  Synthetic oligonucleotide
cctgattcaggattttatgttcataatcctaaaggaggaatagaggggttttgccaaaag

SEQ ID NO: 95262 - DNA, 54 bp, Artificial
  Synthetic oligonucleotide
atttgttagatcgaggtgtcctttacagaattatgaatcaagaaccaggcgagt

SEQ ID NO: 95263 - DNA, 60 bp, Artificial
  Synthetic oligonucleotide
aaatcaacagatatatacaatgatggatacgaaaccgtaagctgcttcttaacgacagat

SEQ ID NO: 95264 - DNA, 60 bp, Artificial
  Synthetic oligonucleotide
gtgaactgcacagcaattggatcaataactctattcaaaatccccaagtccatggcattg

SEQ ID NO: 95265 - DNA, 60 bp, Artificial
  Synthetic oligonucleotide
gctgcaccctcgccttgaaaagagtacaatatatgttggagatccttattgcccgccatc

SEQ ID NO: 95266 - DNA, 60 bp, Artificial
  Synthetic oligonucleotide
cccaggggaagagaatcacatcctggaacatcctcaacagcgagagcggcaatcgagcag

SEQ ID NO: 95267 - DNA, 60 bp, Artificial
  Synthetic oligonucleotide
ggaattaggaatgctatagctgggatgttagatacaacaaaatcactaattcgagtaggg

SEQ ID NO: 95268 - DNA, 60 bp, Artificial
  Synthetic oligonucleotide
gcaagaaatgtactacaggactcaccaaacccattactatctggattgtttacaagtaca

SEQ ID NO: 95269 - DNA, 60 bp, Artificial
  Synthetic oligonucleotide
gcggtgatgcagtagaacaaattggatcaattatgaggtcccaacagagcttggtaacac

SEQ ID NO: 95270 - DNA, 60 bp, Artificial
  Synthetic oligonucleotide
gagttgtgtgtgtggcgaatgtcctaaacaatgcagatactgcatcaaagatagacttcc

SEQ ID NO: 95271 - DNA, 60 bp, Artificial
  Synthetic oligonucleotide
aagataaagcattatccccaaagaaatcaaactgggacacagtctatccagcttcaaacc

SEQ ID NO: 95272 - DNA, 60 bp, Artificial
  Synthetic oligonucleotide
gaggtcgggttgaggacgcctcagagattcacagatctgactaaattcatatcagacaag

SEQ ID NO: 95273 - DNA, 60 bp, Artificial
  Synthetic oligonucleotide
cctcattgccaactgtgcctctattttgtgtaagtgttacaccactggctcaataataag

SEQ ID NO: 95274 - DNA, 60 bp, Artificial
  Synthetic oligonucleotide
ggaagtcatttgctggtgtgaggttcggctgcttcatgcccctgagtttagacagtgacc

SEQ ID NO: 95275 - DNA, 60 bp, Artificial
  Synthetic oligonucleotide
ccaccacctttctgtaacagtacagattgggagccactagaggctggccgaataccggcg

SEQ ID NO: 95276 - DNA, 60 bp, Artificial
  Synthetic oligonucleotide
caaccaatcaagcagttgaggaaatacgacaagcaggccaagaaatgattctagcggttc

SEQ ID NO: 95277 - DNA, 60 bp, Artificial
  Synthetic oligonucleotide
ttgggattcaagaaaactttgtgttacccgctgatggatatcaatgaagacctcaaccgg

SEQ ID NO: 95278 - DNA, 60 bp, Artificial
  Synthetic oligonucleotide
ccaccccaagatttacaggaagttctggcatggtgggatcatcgagccaattcatggtcc

SEQ ID NO: 95279 - DNA, 60 bp, Artificial
  Synthetic oligonucleotide
cccatctgaggtaagcctggtcgaacatcagcttggtgcagagaaaactgtcaaagtact

SEQ ID NO: 95280 - DNA, 60 bp, Artificial
  Synthetic oligonucleotide
ccagtcttggtctaatacactcagacatagaaaccctccctacaaaagatatcacagaga

SEQ ID NO: 95281 - DNA, 60 bp, Artificial
  Synthetic oligonucleotide
gcggggtgtcagcagaatctagatcaggccagcgagagttagccccttacccatctgagg

SEQ ID NO: 95282 - DNA, 60 bp, Artificial
  Synthetic oligonucleotide
ggccagcgagagttagcaccgtacccgtctgaggtaagcctggtcgaacatcagcttggt

SEQ ID NO: 95283 - DNA, 60 bp, Artificial
  Synthetic oligonucleotide
gtcagcgagagttagccccttacccatctgaggtaagcctggtcgaacatcagcttggtg

SEQ ID NO: 95284 - DNA, 60 bp, Artificial
  Synthetic oligonucleotide
gagagctggcaccgtacccgtctgaggtaagcctggtcgaacatcagcttggtgtggaga

SEQ ID NO: 95285 - DNA, 60 bp, Artificial
  Synthetic oligonucleotide
ggacgagttcacatacctcctctgcgaaagtgatgaggacatagtggctgaccgctttga

SEQ ID NO: 95286 - DNA, 60 bp, Artificial
  Synthetic oligonucleotide
cctcctctgcgaaagtgatgaggacatagtggctgaccgctttgataacatacaggctag

SEQ ID NO: 95287 - DNA, 60 bp, Artificial
  Synthetic oligonucleotide
gagcaagacactccacgcacaattgggattcaagaagactttgtgttaccctctgatgga

SEQ ID NO: 95288 - DNA, 60 bp, Artificial
  Synthetic oligonucleotide
gaggttcaggatccggaagggttcaatatgatactggcaaccatcttagcccagatctgg

SEQ ID NO: 95289 - DNA, 60 bp, Artificial
  Synthetic oligonucleotide
gggaggagatgaggaatctgagaacagcgatgtggattctggcgaacctgatcccgaggg

SEQ ID NO: 95290 - DNA, 60 bp, Artificial
  Synthetic oligonucleotide
cagagaatcaccgatgaccctgatatcagcattaaattggtggaggtagtccaaagtgat

SEQ ID NO: 95291 - DNA, 60 bp, Artificial
  Synthetic oligonucleotide
gaccctgatatcagcattaaattggtggaggtagtccaaagtgataaaactcagtcaggg

SEQ ID NO: 95292 - DNA, 60 bp, Artificial
  Synthetic oligonucleotide
gcaagacactccacgcacaattgggattcaagaagactttgtgttacccgctgatggata

SEQ ID NO: 95293 - DNA, 60 bp, Artificial
  Synthetic oligonucleotide
ctagtcttggcctaatacactcagacatagaaaccctccctacaaaagatatcacagaga

SEQ ID NO: 95294 - DNA, 56 bp, Artificial
  Synthetic oligonucleotide
caagcagagacatcagcgtcatcacatcccaatgcctaaccccttcaatcgacggc

SEQ ID NO: 95295 - DNA, 60 bp, Artificial
  Synthetic oligonucleotide
aagtggaacttgcagcaactcttgccaagctcacaattggtcaaggtggacgtgggcgtc

SEQ ID NO: 95296 - DNA, 60 bp, Artificial
  Synthetic oligonucleotide
ccatgtccggagcagagggtaacaccaacaagcggacatttagggcagtattcaggacac

SEQ ID NO: 95297 - DNA, 58 bp, Artificial
  Synthetic oligonucleotide
aaaacttaggcccggactggtatcacaccgccggctctttcaagcgttggccaaccct

SEQ ID NO: 95298 - DNA, 60 bp, Artificial
  Synthetic oligonucleotide
tgctgttcaataattccgagaccatgatgggagctgaaggccggctatacaccattgggg

SEQ ID NO: 95299 - DNA, 60 bp, Artificial
  Synthetic oligonucleotide
cctatttgagggtcgtatgaatgtcacagctctttgcactgttagtaactacctcagccc

SEQ ID NO: 95300 - DNA, 60 bp, Artificial
  Synthetic oligonucleotide
gaagctcaggaaggtgcagaggatggcggctacaaccaaaccacagacgatcagggagca

SEQ ID NO: 95301 - DNA, 60 bp, Artificial
  Synthetic oligonucleotide
gccagagaatcccataaaacaggtgcacttcttagtatgttttcccttcctgccgctgcc

SEQ ID NO: 95302 - DNA, 60 bp, Artificial
  Synthetic oligonucleotide
gcgcagagttcctcacttgcagcacaagcagtatcccaagaagctacaatcactgtcgga

SEQ ID NO: 95303 - DNA, 60 bp, Artificial
  Synthetic oligonucleotide
aatcgtttgccagctaacaccccaattgctaacccacttataccaattgaacggcctcct

SEQ ID NO: 95304 - DNA, 60 bp, Artificial
  Synthetic oligonucleotide
ggcaacccttgctgctgatccatactctctgaacatagactacctatacccaccaaccac

SEQ ID NO: 95305 - DNA, 60 bp, Artificial
  Synthetic oligonucleotide
ctcaggctctcaagaatgctagcaaactgtgtctaaccgcggatgtcttaggggagtgca

SEQ ID NO: 95306 - DNA, 60 bp, Artificial
  Synthetic oligonucleotide
gctgaagcactgttagcaaatcatgctgggaaactcatgaaagaaaatggtgtggtcatg

SEQ ID NO: 95307 - DNA, 60 bp, Artificial
  Synthetic oligonucleotide
gccaacattatctcaagcatccgagtatagttgcccggctagttatattaccatctcagt

SEQ ID NO: 95308 - DNA, 60 bp, Artificial
  Synthetic oligonucleotide
accaacccatttgtgtacgaccctaatcctttagcagactacgaaatagcacacctcgat

SEQ ID NO: 95309 - DNA, 60 bp, Artificial
  Synthetic oligonucleotide
cgttgcccaagagatagtagatggattgcagcaaggtaacatattaagcccagaagaagc

SEQ ID NO: 95310 - DNA, 60 bp, Artificial
  Synthetic oligonucleotide
ggtgggctaatacagaacagtgcagcatggaacagtcaatttgggtcgtactttctcccc

SEQ ID NO: 95311 - DNA, 60 bp, Artificial
  Synthetic oligonucleotide
gtctctttagcagtggtgagaatcctccccagagaaactatgccccattaccaactcaat

SEQ ID NO: 95312 - DNA, 60 bp, Artificial
  Synthetic oligonucleotide
gctctgacaccgttacccacttcagctaatatcacccacaggttagatgatggagcgact

SEQ ID NO: 95313 - DNA, 60 bp, Artificial
  Synthetic oligonucleotide
acacatccgggccgaccagcagccatgcccaccatatccatccccgctgatcccgcatct

SEQ ID NO: 95314 - DNA, 60 bp, Artificial
  Synthetic oligonucleotide
gccagcaaaattgggattccattccattagtttatgaggaagatcagattgagcgcggta

SEQ ID NO: 95315 - DNA, 60 bp, Artificial
  Synthetic oligonucleotide
taacaacactacctgaaactggattagggattgctcgggatgctttgagccaggttggag

SEQ ID NO: 95316 - DNA, 60 bp, Artificial
  Synthetic oligonucleotide
ccacccaaaacttcttcgacgagccatgaaccttgatgttataacacctgtccatgcacc

SEQ ID NO: 95317 - DNA, 58 bp, Artificial
  Synthetic oligonucleotide
gcttagctgccctgggagtagcaactgcagcccaagtgaccgcagctgtggcagtagt

SEQ ID NO: 95318 - DNA, 60 bp, Artificial
  Synthetic oligonucleotide
cgaagtgagcactagggtggataggtcaagggacacatctaggcatcagaaatccgagtc

SEQ ID NO: 95319 - DNA, 60 bp, Artificial
  Synthetic oligonucleotide
cactacaggcttccctaactccaatcagaaagctgcatacactagtaccacgtgctttca

SEQ ID NO: 95320 - DNA, 60 bp, Artificial
  Synthetic oligonucleotide
gttgatccaactagctaatgactgtatggggaagcctgatcaaaaggcagaaatcgtggc

SEQ ID NO: 95321 - DNA, 60 bp, Artificial
  Synthetic oligonucleotide
cgatggagatcagagattgcagtcctattatggcccaattctctcccttacctttgcact

SEQ ID NO: 95322 - DNA, 60 bp, Artificial
  Synthetic oligonucleotide
gattgctgcagtctgggcggacaacaaatggcaacccttagtgtcattatggctgactat

SEQ ID NO: 95323 - DNA, 60 bp, Artificial
  Synthetic oligonucleotide
ctatgcacgagatttgagtggtgggatcatgaatgagcaatcatcggggatccagtctgg

SEQ ID NO: 95324 - DNA, 60 bp, Artificial
  Synthetic oligonucleotide
tgcaaagcccttctatgtcgctgtgctgatccgccaatggtcattacgcaggacgatcta

SEQ ID NO: 95325 - DNA, 60 bp, Artificial
  Synthetic oligonucleotide
ccctatggcgaagtatatggcactcctggagtcaccaaagctaatggattttgcaccggc

SEQ ID NO: 95326 - DNA, 60 bp, Artificial
  Synthetic oligonucleotide
ccttgagtatgcaaacgagattcaggcatataccgcggatgattgtgttgtaacccctca

SEQ ID NO: 95327 - DNA, 60 bp, Artificial
  Synthetic oligonucleotide
tccaagcactacgaataattctaggaagcactctcccacttattgttgaatcacggtgga

SEQ ID NO: 95328 - DNA, 60 bp, Artificial
  Synthetic oligonucleotide
atcagataggcacgaacctaacacaccccgagacacaccagccacacacatccgggccga

SEQ ID NO: 95329 - DNA, 60 bp, Artificial
  Synthetic oligonucleotide
ttgagtgcctgcttcatcacaacagatcttactaaatactgtccgcagtggaggtatcaa

SEQ ID NO: 95330 - DNA, 60 bp, Artificial
  Synthetic oligonucleotide
ttaacaaggtttagttcaggtccatcactgaccgatcaggcgtcatccaaggaccccaac

SEQ ID NO: 95331 - DNA, 60 bp, Artificial
  Synthetic oligonucleotide
gccatcatcttatcaggacagcgttagacaagacttggaattaggatctttccgactgtc

SEQ ID NO: 95332 - DNA, 60 bp, Artificial
  Synthetic oligonucleotide
tatgagtggtgcaatccaacatgtgccccagttactgccactgaccgcaagttctcctgt

SEQ ID NO: 95333 - DNA, 60 bp, Artificial
  Synthetic oligonucleotide
gacccaatagaagtagtcaatggtgcactagttataggagtgggtgaatgcgactactgc

SEQ ID NO: 95334 - DNA, 60 bp, Artificial
  Synthetic oligonucleotide
cgggtggcgcacattgtgattgagcagtcaagtgtgggcagaaagaagcaaatccagggc

SEQ ID NO: 95335 - DNA, 60 bp, Artificial
  Synthetic oligonucleotide
ccaagcttcattccatctgccactgcacctggaggctgcactaggatcccatccttttcg

SEQ ID NO: 95336 - DNA, 60 bp, Artificial
  Synthetic oligonucleotide
acttttatctgactcgaaaggtccttaatagcatacgggattctgaggaggggcaatacc

SEQ ID NO: 95337 - DNA, 60 bp, Artificial
  Synthetic oligonucleotide
cctaatcgcacggaagttaacattgctggctttaatacaaggaaaccaactcgtgctgcc

SEQ ID NO: 95338 - DNA, 60 bp, Artificial
  Synthetic oligonucleotide
ctttcaaggtctcagatacatgccctgataatagctaccacagtattgaaaagaggaggc

SEQ ID NO: 95339 - DNA, 60 bp, Artificial
  Synthetic oligonucleotide
atctagtctgtcgccttgctgccgatttcaaaaccataggctttagtgctgcactcgcat

SEQ ID NO: 95340 - DNA, 60 bp, Artificial
  Synthetic oligonucleotide
caggggagactggtatgttctgctgagaagttcgttaagaacccatctaagatgatggcc

SEQ ID NO: 95341 - DNA, 60 bp, Artificial
  Synthetic oligonucleotide
ggggccccactgtgataatcaaggccaacggtcatattcctaagactgcagctcctttct

SEQ ID NO: 95342 - DNA, 60 bp, Artificial
  Synthetic oligonucleotide
ccacagttgagggcatgatgactactatgaaaattatggacccaagcactccaactaatg

SEQ ID NO: 95343 - DNA, 60 bp, Artificial
  Synthetic oligonucleotide
caaaactccctttgtgaatgcagatgtagaacaaggtgactatgacgagacagagggatt

SEQ ID NO: 95344 - DNA, 60 bp, Artificial
  Synthetic oligonucleotide
ggatatggatttacttcaagccctgagagagggtggagtgattacacatcaggagcaaac

SEQ ID NO: 95345 - DNA, 60 bp, Artificial
  Synthetic oligonucleotide
gagtgtcgaacacccgtgactgggcagaaggttcagatgacatacaactggacccagtgg

SEQ ID NO: 95346 - DNA, 60 bp, Artificial
  Synthetic oligonucleotide
ctaaggatgatggaggtgttgaaagaagaagcttggaggatctatccagtacttctccca

SEQ ID NO: 95347 - DNA, 60 bp, Artificial
  Synthetic oligonucleotide
gaggatctatccagtacttctcccacagatggaactattggaaagagagtgtcgaacacc

SEQ ID NO: 95348 - DNA, 60 bp, Artificial
  Synthetic oligonucleotide
acaaaagcctgggaagattttctgcagtgcaccagtggagaatctgaacaagttgagggg

SEQ ID NO: 95349 - DNA, 60 bp, Artificial
  Synthetic oligonucleotide
ccatcaaaagcttgatgctactctacagagaaattggcccaagagccccttatatggtgc

SEQ ID NO: 95350 - DNA, 60 bp, Artificial
  Synthetic oligonucleotide
ttgccatgggtgtggctactactattgacaggtctataggggcattgaatatcaatcgtg

SEQ ID NO: 95351 - DNA, 60 bp, Artificial
  Synthetic oligonucleotide
cacactgcctcccttgaaaatccacgaatgtaacatttcttgtcctaacccactcccttt

SEQ ID NO: 95352 - DNA, 60 bp, Artificial
  Synthetic oligonucleotide
catcacatgttcccagatttgcactatctaacggggttctgtttgccaattgcataagtg

SEQ ID NO: 95353 - DNA, 60 bp, Artificial
  Synthetic oligonucleotide
caatgcacggggagtgtcatggaaaattataaaacacgattaaacggtatcctaacgcct

SEQ ID NO: 95354 - DNA, 60 bp, Artificial
  Synthetic oligonucleotide
ggttccataggcggactaagtctccacattaagatcaatggtgtaatcagcaaacggctg

SEQ ID NO: 95355 - DNA, 60 bp, Artificial
  Synthetic oligonucleotide
ggggtcgactgagaagtgtcctcgagagctggttgtttcatcacacgttcccagatttgc

SEQ ID NO: 95356 - DNA, 60 bp, Artificial
  Synthetic oligonucleotide
gctttgtgcagtgtcagttgttggagaccctattctgaatagcacctactggtccggatc

SEQ ID NO: 95357 - DNA, 60 bp, Artificial
  Synthetic oligonucleotide
ccttcaagacccagtttctaattcaatgactatacaggctatatctcaggcattcggtgg

SEQ ID NO: 95358 - DNA, 60 bp, Artificial
  Synthetic oligonucleotide
ctgttgttaagcttcaagagactgcagaaaagacagtctatgtactgaccgctttgcagg

SEQ ID NO: 95359 - DNA, 60 bp, Artificial
  Synthetic oligonucleotide
ctggaaagaagtgttattatcttacacccgaaatggttctaatgtattgtgatgtcctag

SEQ ID NO: 95360 - DNA, 60 bp, Artificial
  Synthetic oligonucleotide
cagagatgcgagcagtgatcaagaattcacaaaagccgaaattccgttcagattcatgca

SEQ ID NO: 95361 - DNA, 60 bp, Artificial
  Synthetic oligonucleotide
gatagagcctttagttcttgcactactccaactcaaggatgaggctaggatcctgagggg

SEQ ID NO: 95362 - DNA, 60 bp, Artificial
  Synthetic oligonucleotide
gagcactcatcaataagagtaccttatgtaggatcaagtacggatgaaagatcggatatc

SEQ ID NO: 95363 - DNA, 60 bp, Artificial
  Synthetic oligonucleotide
catgagtgtaggcgattaggggatttagggaagaatatgagtcaatctaaatggtatgag

SEQ ID NO: 95364 - DNA, 60 bp, Artificial
  Synthetic oligonucleotide
gcatacacccctggattcccaatctcaagattatttaacatgtacagatcatatttcgga

SEQ ID NO: 95365 - DNA, 60 bp, Artificial
  Synthetic oligonucleotide
cgggaatttagactcctacgagtatatcataaataggacagcggggcgaagtataggtct

SEQ ID NO: 95366 - DNA, 60 bp, Artificial
  Synthetic oligonucleotide
tgacttatacgcaaatcaccataaacctccttggataatagatctgaacccacaagaaaa

SEQ ID NO: 95367 - DNA, 60 bp, Artificial
  Synthetic oligonucleotide
tggcagataaagttcttgaatatgcccctataatgaaggcacatgctatattctgcggga

SEQ ID NO: 95368 - DNA, 60 bp, Artificial
  Synthetic oligonucleotide
gagatttgtaaactgtggcttgctattgcctacacagggtccttaccttcatcaacaaga

SEQ ID NO: 95369 - DNA, 60 bp, Artificial
  Synthetic oligonucleotide
aggctgacaaggatgttttaaagcaacaccttgcaatagactctgacgataacatcaaca

SEQ ID NO: 95370 - DNA, 60 bp, Artificial
  Synthetic oligonucleotide
ggagacaaggtatccagcacttgcactcaacgaattccagagtgacctcaacaccatcaa

SEQ ID NO: 95371 - DNA, 60 bp, Artificial
  Synthetic oligonucleotide
catggttgagatcctcatagaagtcaagaaaggaggatctgctaaaggcagagcagtaga

SEQ ID NO: 95372 - DNA, 60 bp, Artificial
  Synthetic oligonucleotide
gttcaacaaaagagagtcaatccgttctttgctctaactcaacaatggctaacagagatg

SEQ ID NO: 95373 - DNA, 60 bp, Artificial
  Synthetic oligonucleotide
atgggagggctagtgcggcaactgctactttgacaaccaagataaggatatttgtaccgg

SEQ ID NO: 95374 - DNA, 60 bp, Artificial
  Synthetic oligonucleotide
cagagagacccggggccctcattagaagtctcctcaatgacccagacattgaagctgtaa

SEQ ID NO: 95375 - DNA, 60 bp, Artificial
  Synthetic oligonucleotide
tttgtaccggctactaatagtccagagctcagatgggaactaacattatttgcacttgat

SEQ ID NO: 95376 - DNA, 60 bp, Artificial
  Synthetic oligonucleotide
ccacgaaccatgcttgagttcaggagaaacaatgccattgccttcaatcttctagtgtac

SEQ ID NO: 95377 - DNA, 60 bp, Artificial
  Synthetic oligonucleotide
cctaccaagaaggcaagagtgtcaatgcggagaatgtccaactgaatgcttccactgcgg

SEQ ID NO: 95378 - DNA, 60 bp, Artificial
  Synthetic oligonucleotide
gccctcagactagcagaaatgtcaatttggacagcatcaaattgtacacatcagatgacg

SEQ ID NO: 95379 - DNA, 60 bp, Artificial
  Synthetic oligonucleotide
ctcaagtgaagtgatagtcggcatttctcctgaagatgaagagccttcaagtgttggcgg

SEQ ID NO: 95380 - DNA, 60 bp, Artificial
  Synthetic oligonucleotide
cttgagtgcctatgagacaaacacgaggattgctgcaattgtccaaggagacaacgaatc

SEQ ID NO: 95381 - DNA, 60 bp, Artificial
  Synthetic oligonucleotide
gctagcttcctgatggacaggagggtgatattacctagagccgctcatgagatactggac

SEQ ID NO: 95382 - DNA, 60 bp, Artificial
  Synthetic oligonucleotide
ctgcaggctatctatggggattagaccaaacagtcattatatccttcgatctggactact

SEQ ID NO: 95383 - DNA, 60 bp, Artificial
  Synthetic oligonucleotide
caggattgcgacagtatatacttgggcctatggagataatgaagagtgttggtatgaagc

SEQ ID NO: 95384 - DNA, 60 bp, Artificial
  Synthetic oligonucleotide
gaggggtctccaaacaaagaataataggagttggagaggtactagacagaggtgacgaag

SEQ ID NO: 95385 - DNA, 60 bp, Artificial
  Synthetic oligonucleotide
aaggctataaccccagtctccacttcaaacaatttatcccatagattgagagacaaatcc

SEQ ID NO: 95386 - DNA, 60 bp, Artificial
  Synthetic oligonucleotide
gctgaaactcaatgggccagaaattcttaagagtgaaatcagttatgatatcggttcaga

SEQ ID NO: 95387 - DNA, 60 bp, Artificial
  Synthetic oligonucleotide
aaaggataattgttgtgtcaaagaagtggctgatgtaggccaagtagacgctgagttgcc

SEQ ID NO: 95388 - DNA, 60 bp, Artificial
  Synthetic oligonucleotide
cactagtgatgaacaagtacttctccaagcagggctaaaactcaatgggccagaaatcct

SEQ ID NO: 95389 - DNA, 60 bp, Artificial
  Synthetic oligonucleotide
ggccgacgaattatcaatatccgacatcatttaccctgaatgtcatttggatagtcctat

SEQ ID NO: 95390 - DNA, 60 bp, Artificial
  Synthetic oligonucleotide
ttaaacgaccaaatcgtagcaatcaaggtaagactgcgaatcgagacacccagagagata

SEQ ID NO: 95391 - DNA, 60 bp, Artificial
  Synthetic oligonucleotide
ccagtgtttcctcgatgactcaagtccctttggagcatcttgcgagaccggggaaagggg

SEQ ID NO: 95392 - DNA, 60 bp, Artificial
  Synthetic oligonucleotide
tcttctctccaaaacacaacctgctgcatataccactaccacctgcttccgtgatacgga

SEQ ID NO: 95393 - DNA, 60 bp, Artificial
  Synthetic oligonucleotide
gcgtgatgttgtggggtatcatatctacagtgagcggtatcaacactgaagcgctcagtc

SEQ ID NO: 95394 - DNA, 60 bp, Artificial
  Synthetic oligonucleotide
cggctgcaaagcgcgatttacctcaacctgtcaaccggcgactactccttaactttcttg

SEQ ID NO: 95395 - DNA, 60 bp, Artificial
  Synthetic oligonucleotide
ttgctggacggtgcacttgtcgtaggatctgggacctgtctgcagtgtgagcaaggagat

SEQ ID NO: 95396 - DNA, 60 bp, Artificial
  Synthetic oligonucleotide
tgctcccatcccagttgcccaaccagcacaggatggcccacatgacaacgctgcagctgc

SEQ ID NO: 95397 - DNA, 60 bp, Artificial
  Synthetic oligonucleotide
cttgctcttcctgacatctctacaccttaccacaacaagttcgtgtttgatcaggacccc

SEQ ID NO: 95398 - DNA, 60 bp, Artificial
  Synthetic oligonucleotide
aatgtctattctcaccgccattcgagatcactgtcactgccctgattgttcatctgcctg

SEQ ID NO: 95399 - DNA, 60 bp, Artificial
  Synthetic oligonucleotide
tgatgggacagagccgcaatccgctgctgtcagggatattccatgagaatgcacgacagg

SEQ ID NO: 95400 - DNA, 60 bp, Artificial
  Synthetic oligonucleotide
caccacacccgtccacacaagcagtcccttagttattcaggtgcctagggcgtgtagggc

SEQ ID NO: 95401 - DNA, 60 bp, Artificial
  Synthetic oligonucleotide
ggaatatatgcactccgtgttgcgacgcatccctggccttgtgttcggtggcatgtccgc

SEQ ID NO: 95402 - DNA, 60 bp, Artificial
  Synthetic oligonucleotide
ccctaccctgtccactcatagcacagccaaagtattggatcttgtcacgatatcctcaca

SEQ ID NO: 95403 - DNA, 60 bp, Artificial
  Synthetic oligonucleotide
cagccccaattaactaatcctgctctatctcccctcacgattcaggcgctcagggctgtg

SEQ ID NO: 95404 - DNA, 60 bp, Artificial
  Synthetic oligonucleotide
cccatagttactgcctgcatgttgccattcggtgccggaccattgctggacagcccagag

SEQ ID NO: 95405 - DNA, 60 bp, Artificial
  Synthetic oligonucleotide
gacttggaagacttcgccattggaccatcagcagaacttaccgcaggaactattcactct

SEQ ID NO: 95406 - DNA, 60 bp, Artificial
  Synthetic oligonucleotide
caggtgtccccagtaacatgactgcgcagattgctcgcaaccagatcgctgaagtaccgc

SEQ ID NO: 95407 - DNA, 60 bp, Artificial
  Synthetic oligonucleotide
aaccccttatccacatttaccccagtccgaggttcatcatccactcatgatcccctccct

SEQ ID NO: 95408 - DNA, 56 bp, Artificial
  Synthetic oligonucleotide
ggggccgaccggaaaggagctaatcccggcgaaccaggccaccgtagagaatatag

SEQ ID NO: 95409 - DNA, 60 bp, Artificial
  Synthetic oligonucleotide
ggatagaggagccgagggtagcattccccccgaaaccctcaaaacccgcattcaagtctt

SEQ ID NO: 95410 - DNA, 57 bp, Artificial
  Synthetic oligonucleotide
ttgtcactttgccaggtgagcaattacttaagcccactcgcacctagaatcacaaaa

SEQ ID NO: 95411 - DNA, 60 bp, Artificial
  Synthetic oligonucleotide
acggttctaatctctgtggcccgcaactggttgacacttactgagcaatacagactccgg

SEQ ID NO: 95412 - DNA, 60 bp, Artificial
  Synthetic oligonucleotide
gcccacacactcggctcaccaacctgctctgcctttctaacccactgctgagatggctag

SEQ ID NO: 95413 - DNA, 60 bp, Artificial
  Synthetic oligonucleotide
cacgcccgttcttaaatgcaatgtacttccaattcggtgtagaaacagctcgtcgccaac

SEQ ID NO: 95414 - DNA, 60 bp, Artificial
  Synthetic oligonucleotide
gcccgggacgaagcatatcaaggtggcgaacagcatccgaccctccaatcgattgaacgc

SEQ ID NO: 95415 - DNA, 60 bp, Artificial
  Synthetic oligonucleotide
ttaaagctaggtggattcccaatcggcacagcattcgatggagatggaccacatcagagg

SEQ ID NO: 95416 - DNA, 60 bp, Artificial
  Synthetic oligonucleotide
gtccttccttcacaattgggcgggctgaattatctttcctgcagtcgcctattcaaccgg

SEQ ID NO: 95417 - DNA, 60 bp, Artificial
  Synthetic oligonucleotide
ggggcacccaagtcttgtagctgctcaagcggcgggaaaagtcagggaatctatgtgtgc

SEQ ID NO: 95418 - DNA, 60 bp, Artificial
  Synthetic oligonucleotide
cacaagcctcctgttccaatctagctacaactgtgatgcgcttggctgagaatggtgttg

SEQ ID NO: 95419 - DNA, 60 bp, Artificial
  Synthetic oligonucleotide
cttagtgacggggtgaataggaaaagttgctcgattgctgtagtaccgggtggatgcgcg

SEQ ID NO: 95420 - DNA, 60 bp, Artificial
  Synthetic oligonucleotide
cgggcacagggttatgagcatggttcagggagacaatcaggtagttgcagtaaccacccg

SEQ ID NO: 95421 - DNA, 60 bp, Artificial
  Synthetic oligonucleotide
aattgttgcctgcccttaccgagctatttatcagactcaatgcaccctgattcccctccc

SEQ ID NO: 95422 - DNA, 60 bp, Artificial
  Synthetic oligonucleotide
gacgccccaatgactttgcaggtatcctcgaagccatgtttcagcagcttgcagaggagc

SEQ ID NO: 95423 - DNA, 60 bp, Artificial
  Synthetic oligonucleotide
gacactgcacaacttcaaccatttccccttgtgatgagcgagccagagaatgggaagcgc

SEQ ID NO: 95424 - DNA, 60 bp, Artificial
  Synthetic oligonucleotide
actcgagtcacaataactatggaccagctcagagcactcactccgctcccaacatcggcc

SEQ ID NO: 95425 - DNA, 60 bp, Artificial
  Synthetic oligonucleotide
tctcttgtctactttcatctggacacgaacaaccaaaagttaaaggctgtgatcccaccg

SEQ ID NO: 95426 - DNA, 60 bp, Artificial
  Synthetic oligonucleotide
gaaatgtggcaaagtgcagctggacaccctcaccttcacaatcagcacatttgcaaatcg

SEQ ID NO: 95427 - DNA, 60 bp, Artificial
  Synthetic oligonucleotide
ccgcgaatgtcaatttcactcctacctatatgttggctatgctcaatctttgcactgtgc

SEQ ID NO: 95428 - DNA, 60 bp, Artificial
  Synthetic oligonucleotide
ccgccaaccctccgacccatcatgtgctgcgaccactcggtttatcgtccacttcatggt

SEQ ID NO: 95429 - DNA, 60 bp, Artificial
  Synthetic oligonucleotide
cgcacagacccagaagcccgctccagcaaagcaagccaccgacggggctcgcctcatggt

SEQ ID NO: 95430 - DNA, 60 bp, Artificial
  Synthetic oligonucleotide
ccgagacctgggtgaacaggcacgatacttggcactcttagaggctccccaggctatgga

SEQ ID NO: 95431 - DNA, 60 bp, Artificial
  Synthetic oligonucleotide
gaatgcaaggatgatgcgcccatggccaaagcgctgatcaagagagacgagagggatggg

SEQ ID NO: 95432 - DNA, 60 bp, Artificial
  Synthetic oligonucleotide
gcaggcccgaacagaggtcacgcatgaagccagggtcgcaatggcgatgcatgccaagat

SEQ ID NO: 95433 - DNA, 60 bp, Artificial
  Synthetic oligonucleotide
ggccaacggatgggtaatgctggttcctggagtagggagcgggacactatacaatgagta

SEQ ID NO: 95434 - DNA, 60 bp, Artificial
  Synthetic oligonucleotide
cggcaaagggtgggcctgacgggggaattgacccagagtcccaacctggacagaggggac

SEQ ID NO: 95435 - DNA, 60 bp, Artificial
  Synthetic oligonucleotide
gctccatctgaagaacgtaggatagccaaatataggcagcaaggtaggttggaagcccgg

SEQ ID NO: 95436 - DNA, 60 bp, Artificial
  Synthetic oligonucleotide
gtggggcacttgcagcacaattgtggcatgacaaccctgtctttcaagattggcctgcat

SEQ ID NO: 95437 - DNA, 60 bp, Artificial
  Synthetic oligonucleotide
ccggatgccaccatcaatgcactcaatgttgctgcagatgagctgccacccgacttggtc

SEQ ID NO: 95438 - DNA, 60 bp, Artificial
  Synthetic oligonucleotide
agacaagcaggagatgacagaaacgctaaacaggcttggcgctgcaggtgcacgaggggc

SEQ ID NO: 95439 - DNA, 60 bp, Artificial
  Synthetic oligonucleotide
tggcatcctgatcatctgcttagttgtaacatgggctgctctatgggcactcttgaaaga

SEQ ID NO: 95440 - DNA, 60 bp, Artificial
  Synthetic oligonucleotide
gcatacctgtgtagcttggcagagatatctagggatgggccaagactagaatcaatgacc

SEQ ID NO: 95441 - DNA, 60 bp, Artificial
  Synthetic oligonucleotide
gatgctgtggtgaagttgaaaataaccgtgcgtaggactgcccgaagctcagaaacactg

SEQ ID NO: 95442 - DNA, 60 bp, Artificial
  Synthetic oligonucleotide
gcagttggagctgttgccctagctacgtctgcacagataacagcggggattgctctctct

SEQ ID NO: 95443 - DNA, 60 bp, Artificial
  Synthetic oligonucleotide
agacccagtatatctgtgcaatgtcgactctccaacctgacatctgagccacaccgccat

SEQ ID NO: 95444 - DNA, 60 bp, Artificial
  Synthetic oligonucleotide
aagtacaatggatcccaaaagctactactgcaatgaggacctgaggagcgatggtggaga

SEQ ID NO: 95445 - DNA, 60 bp, Artificial
  Synthetic oligonucleotide
gggtatactcaatccgacctgcttgacttattgtccacagagtcgatagtggggacagtc

SEQ ID NO: 95446 - DNA, 60 bp, Artificial
  Synthetic oligonucleotide
cagtaatttattctcgcaactggacccgtcgacatactggacatgctcttctgggacccc

SEQ ID NO: 95447 - DNA, 60 bp, Artificial
  Synthetic oligonucleotide
ccattgcggtaatctcccactatgtcgtcaatgcagggctcaccggtttctttcagacca

SEQ ID NO: 95448 - DNA, 60 bp, Artificial
  Synthetic oligonucleotide
gagagacacggaggatcttggccaccatgcttcctcccagactatgcatcatctgagctc

SEQ ID NO: 95449 - DNA, 60 bp, Artificial
  Synthetic oligonucleotide
tatcacttgctgactgacgatatggttttgggattctgtgatgtagtagaagggagattg

SEQ ID NO: 95450 - DNA, 60 bp, Artificial
  Synthetic oligonucleotide
gaggtcagagaaacagcaataacggcagaggacaacatcgggtctttggatgatgagagc

SEQ ID NO: 95451 - DNA, 60 bp, Artificial
  Synthetic oligonucleotide
ccacctagctgcagtccagacaggggtgagagtctccgcagttatccaaggagacaatca

SEQ ID NO: 95452 - DNA, 60 bp, Artificial
  Synthetic oligonucleotide
cagcatcaaggagaatgaacaaaccggaacccagaaagccaaccacagcaatcaaccagg

SEQ ID NO: 95453 - DNA, 60 bp, Artificial
  Synthetic oligonucleotide
ggcagcttgctctaacatttcgacatctctcgctaaggcggtcgagaacgggatatcccc

SEQ ID NO: 95454 - DNA, 60 bp, Artificial
  Synthetic oligonucleotide
cggggaaaggcaaggaagtattcactgagcagaacctaacagagagcgggatggccggtg

SEQ ID NO: 95455 - DNA, 60 bp, Artificial
  Synthetic oligonucleotide
ctgggttgcatgttggtattaagatttgcgtatgaatgttatgcacggcatatagagggc

SEQ ID NO: 95456 - DNA, 60 bp, Artificial
  Synthetic oligonucleotide
gtaggcttgagtattatcgagttgacccacaggaggcaagagaataccggcgaggacagc

SEQ ID NO: 95457 - DNA, 60 bp, Artificial
  Synthetic oligonucleotide
tcagaacacgcatctacaaaccgacctacacaacaaccacaccacccacatgtcacaccc

SEQ ID NO: 95458 - DNA, 60 bp, Artificial
  Synthetic oligonucleotide
ggggatcctttagtagcggcattggcagatgttaagagatatattgagattgggttactc

SEQ ID NO: 95459 - DNA, 60 bp, Artificial
  Synthetic oligonucleotide
cacttgttcactcagacatggaaagcgggatagagaaaagcaatcaggcggttcttgttg

SEQ ID NO: 95460 - DNA, 60 bp, Artificial
  Synthetic oligonucleotide
ggagaatggatcactgagagtcccgtatttcggttcatcaacgtctgagaggtcggaggc

SEQ ID NO: 95461 - DNA, 60 bp, Artificial
  Synthetic oligonucleotide
cagcaagtcggtggtcgtccttttcaacagagatgggatgagttctatatcacagtggcg

SEQ ID NO: 95462 - DNA, 60 bp, Artificial
  Synthetic oligonucleotide
gggcggtatcagagtgcctgagtgagcaggttggcgagatatccatggcagtttcggatc

SEQ ID NO: 95463 - DNA, 60 bp, Artificial
  Synthetic oligonucleotide
tcaagaacatgaacctaggagattgatacagtcttacacaggcccagggaaacccgaagc

SEQ ID NO: 95464 - DNA, 60 bp, Artificial
  Synthetic oligonucleotide
cgtgttaggaccatcccaaattcccaggtgtggctcggtgcagagggtcgtatacagaca

SEQ ID NO: 95465 - DNA, 60 bp, Artificial
  Synthetic oligonucleotide
tgacatcgcagacgggttcgctgatcatcagatcaacctaagatcttctaagcaggcaac

SEQ ID NO: 95466 - DNA, 60 bp, Artificial
  Synthetic oligonucleotide
gcgggaagagtacagcagctgataaagaaaggattttaatcaaaggatcccggtgtacgg

SEQ ID NO: 95467 - DNA, 60 bp, Artificial
  Synthetic oligonucleotide
cgctggggctttcctcagccttttagtcctcttcacgaataatccaactgcagccttagg

SEQ ID NO: 95468 - DNA, 60 bp, Artificial
  Synthetic oligonucleotide
ctggttggtctggttgaccaaggcagtcaggaggtccaacactaggtcagaaagggtgac

SEQ ID NO: 95469 - DNA, 60 bp, Artificial
  Synthetic oligonucleotide
gccggtttgatgaccacaagagactcggaaggccatcacacagttgaaacaatgatacat

SEQ ID NO: 95470 - DNA, 60 bp, Artificial
  Synthetic oligonucleotide
gcagaaggctctgaagacagaagaaccgagagatttgagcaagaagggaggattgcgtcc

SEQ ID NO: 95471 - DNA, 60 bp, Artificial
  Synthetic oligonucleotide
ccgaagtgactctgactgcgatgacccttgatcaatgtagcttgataactgtggacgggc

SEQ ID NO: 95472 - DNA, 60 bp, Artificial
  Synthetic oligonucleotide
gactctgaataatgggctaaaccgcaaatcctgcagtaccgtggcacaagggagaggcgc

SEQ ID NO: 95473 - DNA, 60 bp, Artificial
  Synthetic oligonucleotide
gaggttgacctggaccgtccttacgcggcactctaccccagtgttggatcagggacagtt

SEQ ID NO: 95474 - DNA, 60 bp, Artificial
  Synthetic oligonucleotide
ggttaaatcaatcgtgtatgcgcagtgtgtccattatttaacagaggagagtcagtccag

SEQ ID NO: 95475 - DNA, 60 bp, Artificial
  Synthetic oligonucleotide
cagaagggaaaggagattctcaggaacaaccaaacaagaaggagtacacaagagagccgg

SEQ ID NO: 95476 - DNA, 60 bp, Artificial
  Synthetic oligonucleotide
gatcaggacttcaatatctcctatagcctcaaagagaaagagattaagcaagcgggcaga

SEQ ID NO: 95477 - DNA, 60 bp, Artificial
  Synthetic oligonucleotide
ggtcccaagtcgatgataccacagatttcagtctagtttgttcagtcacacttgctaaga

SEQ ID NO: 95478 - DNA, 60 bp, Artificial
  Synthetic oligonucleotide
ctcaaaggaaggatcaaggcaatgataatctgtatctactgtttgactgaaaattccccg

SEQ ID NO: 95479 - DNA, 60 bp, Artificial
  Synthetic oligonucleotide
atactgccaagagttgcaaatgttatactagatcaatccgtgacaggtgccaggtctgca

SEQ ID NO: 95480 - DNA, 60 bp, Artificial
  Synthetic oligonucleotide
ggggtctgtgtcactatggcaatctataaaagtcaaggacctaacactagacaggaaccc

SEQ ID NO: 95481 - DNA, 60 bp, Artificial
  Synthetic oligonucleotide
ggttaacgttgggatgcttaagacacttggtttaacagaacagcaaggtcagactttggc

SEQ ID NO: 95482 - DNA, 60 bp, Artificial
  Synthetic oligonucleotide
cgtcacgatgtccagcgcagtgtatcacaggagtttacacagatatctttccgttgtcgc

SEQ ID NO: 95483 - DNA, 60 bp, Artificial
  Synthetic oligonucleotide
cggatcggccttttatttctcaggacgttgaggggtaagtgagatccaatcccaaccgca

SEQ ID NO: 95484 - DNA, 60 bp, Artificial
  Synthetic oligonucleotide
cgggcacgaacgagacacaccagccgaacggagctgacacacaggacaatgatgatgacc

SEQ ID NO: 95485 - DNA, 60 bp, Artificial
  Synthetic oligonucleotide
gaggggtgaattaatagttgggtcgggttcatgcaccatatgcgaaagagggatggacca

SEQ ID NO: 95486 - DNA, 60 bp, Artificial
  Synthetic oligonucleotide
gatgtagccatacgagctgagatcctgacggttgtatggttgataacagggtggtcaaca

SEQ ID NO: 95487 - DNA, 60 bp, Artificial
  Synthetic oligonucleotide
catagcacctaaacctgaagctggaaggacaaagatggattggtacctaactctcagtgg

SEQ ID NO: 95488 - DNA, 60 bp, Artificial
  Synthetic oligonucleotide
gaaatctggcgaaacgatcccggacaaagcggaggaacctcaaccggtgcaacagcagga

SEQ ID NO: 95489 - DNA, 60 bp, Artificial
  Synthetic oligonucleotide
cgcacctgcggcatacccgatgatatggagttttgcaatgggctacgggacagcagttga

SEQ ID NO: 95490 - DNA, 60 bp, Artificial
  Synthetic oligonucleotide
gggagtcggatcagaggatatcaatagtcaacgagaaaccgacccatccccgtcagagcc

SEQ ID NO: 95491 - DNA, 60 bp, Artificial
  Synthetic oligonucleotide
gcatcaagccagtgataatttcttcaaggaattgattcatgtcaatcatttgatcggcca

SEQ ID NO: 95492 - DNA, 60 bp, Artificial
  Synthetic oligonucleotide
gagcacatcattctggagacttggagtagagtacgctcaggctcaaggaagtagcatcaa

SEQ ID NO: 95493 - DNA, 60 bp, Artificial
  Synthetic oligonucleotide
gctagagaggaaattgctggattacttgacacaacaaaggggctaataagatcaggattg

SEQ ID NO: 95494 - DNA, 60 bp, Artificial
  Synthetic oligonucleotide
ctgaatcgaactaccacacccatcaccaatgaagcccgaacaagtctacatagatcagtt

SEQ ID NO: 95495 - DNA, 60 bp, Artificial
  Synthetic oligonucleotide
atgctacacccatgacggctagcgtgagagaatgcttgacaggatccacagataagtgcc

SEQ ID NO: 95496 - DNA, 60 bp, Artificial
  Synthetic oligonucleotide
gtgtgtttcccagtgtatagtaatccagagtccacagaagtgtatctcatctgcttgcag

SEQ ID NO: 95497 - DNA, 60 bp, Artificial
  Synthetic oligonucleotide
ctcgattggctggtaactgcatcccgaattcccgcaccaattggaggtttcaattacttg

SEQ ID NO: 95498 - DNA, 60 bp, Artificial
  Synthetic oligonucleotide
ccatgatgtgttagctaagactgtggctcaaacagttctcgagatcataactaaagccga

SEQ ID NO: 95499 - DNA, 60 bp, Artificial
  Synthetic oligonucleotide
ggtcgacaccaatctaatataccaacaaacaatgctactcggcttgtcagtattggaagg

SEQ ID NO: 95500 - DNA, 60 bp, Artificial
  Synthetic oligonucleotide
gtgcaagttccttttcaaatggtgctcaaatctaaggatcctcttgctgaataggctatc

SEQ ID NO: 95501 - DNA, 60 bp, Artificial
  Synthetic oligonucleotide
ccgccctcaggcagactcaggaaggaaagatgaccaggaacccaaacctgcccaaaatga

SEQ ID NO: 95502 - DNA, 60 bp, Artificial
  Synthetic oligonucleotide
gggaaaggcaagggtgaaaggaaagggaaaacaaatccggagctaaaacctgtaattggg

SEQ ID NO: 95503 - DNA, 60 bp, Artificial
  Synthetic oligonucleotide
acatcccagagtgttcaagaggtttgtgaattgcggcttgcttcttcccactcagggtcc

SEQ ID NO: 95504 - DNA, 60 bp, Artificial
  Synthetic oligonucleotide
ctctaatggacatcaatccttggctcaacagactgacttggaacaacagttgtgagatca

SEQ ID NO: 95505 - DNA, 60 bp, Artificial
  Synthetic oligonucleotide
ggctagtttcagaagctatcaatcgaaactcggtcgagatgggcgggcaagtgcggcaac

SEQ ID NO: 95506 - DNA, 60 bp, Artificial
  Synthetic oligonucleotide
caccaaaaggcgggattgaaggttatagtcagaagacttggacgatcgcaacaattccct

SEQ ID NO: 95507 - DNA, 60 bp, Artificial
  Synthetic oligonucleotide
gctcaacgggatccctgtgatggaaaggagaggggacaaagcacaagaggagatggaagg

SEQ ID NO: 95508 - DNA, 60 bp, Artificial
  Synthetic oligonucleotide
caggaccaaaaggatgaagttttaggtatttatgagcaggacagactcagtaacataggg

SEQ ID NO: 95509 - DNA, 60 bp, Artificial
  Synthetic oligonucleotide
gcacttttacagttgaaagatgaggcgcgcatcctaagaggggcatttctacatcattgc

SEQ ID NO: 95510 - DNA, 60 bp, Artificial
  Synthetic oligonucleotide
gattgcaaaggcagtgactgctccagatacagccgaggaaagtgagaccagaagatgggc

SEQ ID NO: 95511 - DNA, 60 bp, Artificial
  Synthetic oligonucleotide
ggggtgggtgaggtattggataggggtgataaggtgccatcaatgtttatgaccaatgtt

SEQ ID NO: 95512 - DNA, 60 bp, Artificial
  Synthetic oligonucleotide
gagggaattacagcaggctagatgataggcaagtgcgaccggtcagtaatggtgatctgt

SEQ ID NO: 95513 - DNA, 60 bp, Artificial
  Synthetic oligonucleotide
ctaagaagaggaataatcaagcagctcagaattaggcaagtgacagaagtaatcgacacc

SEQ ID NO: 95514 - DNA, 60 bp, Artificial
  Synthetic oligonucleotide
catgtcatctctcgcagacagtgtcccaagcagttcagtgagtacatccggaggaacgag

SEQ ID NO: 95515 - DNA, 60 bp, Artificial
  Synthetic oligonucleotide
ggccccaaagtctcactaattgacacatccagcaccatcacaattcctgctaacataggg

SEQ ID NO: 95516 - DNA, 60 bp, Artificial
  Synthetic oligonucleotide
ctaggaaacgtcaagagaccgacaagagcactgagatctgccatcgaattgcaactgttt

SEQ ID NO: 95517 - DNA, 60 bp, Artificial
  Synthetic oligonucleotide
ccacgtggatagggaacttagattcatacgagtacataatcaacagaacagccggtcgta

SEQ ID NO: 95518 - DNA, 60 bp, Artificial
  Synthetic oligonucleotide
ctccggcatctacatgatcccaaggacaatgctagaattcagaaggaacaacgctattgc

SEQ ID NO: 95519 - DNA, 60 bp, Artificial
  Synthetic oligonucleotide
tccagtgttacttcctcagatggaactattggacaaagagtgtcaaacacccgagcttgg

SEQ ID NO: 95520 - DNA, 60 bp, Artificial
  Synthetic oligonucleotide
gaggaggagtaccgaaaagactgcccatgttatctgaagagttcgagtgctccggatcag

SEQ ID NO: 95521 - DNA, 60 bp, Artificial
  Synthetic oligonucleotide
ccttgactatcatatggaattcagtccctacaagtcagacagaatggataggacagagac

SEQ ID NO: 95522 - DNA, 60 bp, Artificial
  Synthetic oligonucleotide
ctgagttgatggattatctaaatcgagcagaaacagatgaagaggttcaggaggtggcca

SEQ ID NO: 95523 - DNA, 60 bp, Artificial
  Synthetic oligonucleotide
cagccctgcgccaacaaggcaatgtcaatcacttgaatgcaggggtagaccccagaatcc

SEQ ID NO: 95524 - DNA, 60 bp, Artificial
  Synthetic oligonucleotide
ggacacgaccaggaagttaccagcaacgaagatagtctggatgacaaatatattatgcca

SEQ ID NO: 95525 - DNA, 60 bp, Artificial
  Synthetic oligonucleotide
cctacaatagatcaaattagctgcaagcaaacagagctcgcattagacttggcgttgtct

SEQ ID NO: 95526 - DNA, 60 bp, Artificial
  Synthetic oligonucleotide
cagggattctctcaccaatcaaaggcgccatcgaactgtacaataataacacgcatgacc

SEQ ID NO: 95527 - DNA, 60 bp, Artificial
  Synthetic oligonucleotide
caagataccctgcacttgccctcaatgagttccagagtgatctcaataccatcaaagggc

SEQ ID NO: 95528 - DNA, 60 bp, Artificial
  Synthetic oligonucleotide
caggaccattgccgcgtaccctcttggtgttggcaagagcacttctcaccctcaggatct

SEQ ID NO: 95529 - DNA, 60 bp, Artificial
  Synthetic oligonucleotide
ggctacacaagaggtcaggctaaagtgtttgctctgtgggatcatagttctggttttgtc

SEQ ID NO: 95530 - DNA, 60 bp, Artificial
  Synthetic oligonucleotide
catcagttgggagacaggacaacaacatgcaggcaagagaagccaaatttgcagctgggg

SEQ ID NO: 95531 - DNA, 60 bp, Artificial
  Synthetic oligonucleotide
ggtaccgtgacaggcatcggggagcttggcctccactttatctgccatcgcatgcatcga

SEQ ID NO: 95532 - DNA, 60 bp, Artificial
  Synthetic oligonucleotide
gtgagtaaattaggagtagtagtattgaaccacctcatatcttatttcttctgaactgca

SEQ ID NO: 95533 - DNA, 60 bp, Artificial
  Synthetic oligonucleotide
taagatgcgtgcctgtcaggtaattgctgaagctttgattgcatcgggagtgggcaagta

SEQ ID NO: 95534 - DNA, 60 bp, Artificial
  Synthetic oligonucleotide
caaagagcgataaacttgctaccctgtacacttaaagcagatactgtgattaactctgta

SEQ ID NO: 95535 - DNA, 60 bp, Artificial
  Synthetic oligonucleotide
ccctgtgtttgccgtattcaaggataacgagatcctttaccaagttccactggctgaaga

SEQ ID NO: 95536 - DNA, 60 bp, Artificial
  Synthetic oligonucleotide
gcaagtacagcaaagcagaaaactgtaggctttcaatgggtgtcaactccaaaagtcatt

SEQ ID NO: 95537 - DNA, 60 bp, Artificial
  Synthetic oligonucleotide
ctcaagtgatgaggaaccatgttgcccttgcagggaaacagaatgaggccacgctggcta

SEQ ID NO: 95538 - DNA, 60 bp, Artificial
  Synthetic oligonucleotide
tgggacaagtcaaaatgtcattccctgaaggaaaagatatcctgttcatgggtaatgaag

SEQ ID NO: 95539 - DNA, 55 bp, Artificial
  Synthetic oligonucleotide
aaaactgggacaagtcaaaatgtcattccctgaaggaaaagatatcctgttcatg

SEQ ID NO: 95540 - DNA, 60 bp, Artificial
  Synthetic oligonucleotide
ggtcatccaccatgtcttccccaagagacagggttaatgctttctacaaggataacctcc

SEQ ID NO: 95541 - DNA, 58 bp, Artificial
  Synthetic oligonucleotide
aagcctaccatgtcaacaaaggtctggagtgcatcaaagcccttagggctagacccct

SEQ ID NO: 95542 - DNA, 60 bp, Artificial
  Synthetic oligonucleotide
catattttgcgggattatcatcaacgggtatcgggatagacatggagggagctggccacc

SEQ ID NO: 95543 - DNA, 60 bp, Artificial
  Synthetic oligonucleotide
acctcgacagcccgatagtgactaacaagttggttgccatactggagtacgcccggatcc

SEQ ID NO: 95544 - DNA, 60 bp, Artificial
  Synthetic oligonucleotide
ggcccaccaatatcactggagaagctggatgtggggactaacctcggtaatgcagtgaca

SEQ ID NO: 95545 - DNA, 60 bp, Artificial
  Synthetic oligonucleotide
gtatatctaccatagaaggccatctttccagcatcatgatcgcgatcccgggatttggca

SEQ ID NO: 95546 - DNA, 60 bp, Artificial
  Synthetic oligonucleotide
gctggatgtagggactaacctcggtaatgcagtgacaaaactggagaaagctaaggacct

SEQ ID NO: 95547 - DNA, 60 bp, Artificial
  Synthetic oligonucleotide
ggatgcaaggtcatccaccatgtcttccccaagagacagggttaatgctttctacaagga

SEQ ID NO: 95548 - DNA, 60 bp, Artificial
  Synthetic oligonucleotide
ctggagaagctagatgtggggactaacctcggtaatgcagtgacaaaactggagaaagcc

SEQ ID NO: 95549 - DNA, 60 bp, Artificial
  Synthetic oligonucleotide
ggcgaagggtcagggtcaatgttggtaacatataaggagatccttaagttgaagaagtgc

SEQ ID NO: 95550 - DNA, 60 bp, Artificial
  Synthetic oligonucleotide
cgaactgtcagttagatgacatagatagggagacatcagcacttagggtcccctacatcg

SEQ ID NO: 95551 - DNA, 60 bp, Artificial
  Synthetic oligonucleotide
taccatgtcaacaaaggtctggagtgcatcaaggcccttagggctcgacccctcgacccc

SEQ ID NO: 95552 - DNA, 60 bp, Artificial
  Synthetic oligonucleotide
tcagggacctggagaaagcaacagctgtgatggggagctgggagcactcatggatgaccc

SEQ ID NO: 95553 - DNA, 60 bp, Artificial
  Synthetic oligonucleotide
gtggatcatgtccagctacctgtcgactttgtgcaggcgatgatgtctatgatggaggcg

SEQ ID NO: 95554 - DNA, 60 bp, Artificial
  Synthetic oligonucleotide
gtggatcatgtccagctacctgtagactttgtgcaggcgatgatgtctatgatggaggcg

SEQ ID NO: 95555 - DNA, 60 bp, Artificial
  Synthetic oligonucleotide
ctcctgagcttgtcattgtgacacatacagatgagaacaagttcacatgcctcacccaag

SEQ ID NO: 95556 - DNA, 60 bp, Artificial
  Synthetic oligonucleotide
cccctgagcttgtcattgtgacacatacagatgagaacaagttcacatgcctcacacagg

SEQ ID NO: 95557 - DNA, 60 bp, Artificial
  Synthetic oligonucleotide
ccggagtacatacagaggataatgaggcagaagagaaggcattggctgaattcttactca

SEQ ID NO: 95558 - DNA, 60 bp, Artificial
  Synthetic oligonucleotide
gagtgcacacagaggataatgaggcagaagagaaggcattggctgaattcttgcttaatc

SEQ ID NO: 95559 - DNA, 60 bp, Artificial
  Synthetic oligonucleotide
aagagtctagctaaggacaaagaaactggacggttcattgcttcagtgtggatccacctg

SEQ ID NO: 95560 - DNA, 60 bp, Artificial
  Synthetic oligonucleotide
cgtggttcctggcaactcaccctatctcgcaaccctcgactttaccaagctttgcgttga

SEQ ID NO: 95561 - DNA, 60 bp, Artificial
  Synthetic oligonucleotide
gggcctgagacttgctccctcgttcatgcagactgggaagacaacaatcaagcagaaacc

SEQ ID NO: 95562 - DNA, 60 bp, Artificial
  Synthetic oligonucleotide
caactattgcactccatagcatggcaaaggtttacacccttaaggctatttctgcacatg

SEQ ID NO: 95563 - DNA, 60 bp, Artificial
  Synthetic oligonucleotide
catcccatctcaaaacaagaagagctgccctgcgcaaggcaaccggaaccggagtcggac

SEQ ID NO: 95564 - DNA, 60 bp, Artificial
  Synthetic oligonucleotide
cgcactgccgctattagtggaggatgatcgccgattgaggttggagaagatcattgacga

SEQ ID NO: 95565 - DNA, 60 bp, Artificial
  Synthetic oligonucleotide
cccttaatcccgaagccctcagcctcaagtcgtctcggtggaacccgttcactaaacagc

SEQ ID NO: 95566 - DNA, 60 bp, Artificial
  Synthetic oligonucleotide
ctgtcccttagcctaggttcacatctgtaccttgcggaggggagtggtgcctcaatggca

SEQ ID NO: 95567 - DNA, 60 bp, Artificial
  Synthetic oligonucleotide
ggcacccatttaatccatctatttgcctttcttgactcccagctgcacactcctccgggc

SEQ ID NO: 95568 - DNA, 60 bp, Artificial
  Synthetic oligonucleotide
cagctggcagtagctgtccaagcaatccaagaccaaatcaataacgtaatccagcctcaa

SEQ ID NO: 95569 - DNA, 60 bp, Artificial
  Synthetic oligonucleotide
ccggggtggggaggctgtgtcgggaacaacttttgccctatgatctgcgtgtcaggagtt

SEQ ID NO: 95570 - DNA, 60 bp, Artificial
  Synthetic oligonucleotide
aactgccaaaatgtcgtctgtgctgagtatgtttgagcgcttcacaatggagcaggaact

SEQ ID NO: 95571 - DNA, 60 bp, Artificial
  Synthetic oligonucleotide
ggctaggcgccttcccaacactccaagcctttgaaaatgatggtcccctagctgggcaaa

SEQ ID NO: 95572 - DNA, 60 bp, Artificial
  Synthetic oligonucleotide
atgccagcacctcaggcaatcgactcaagggacagcaccgcccagcctgccgctcctgat

SEQ ID NO: 95573 - DNA, 60 bp, Artificial
  Synthetic oligonucleotide
ccgactccggcccaagcgatccaacacaggtgcaaggtgcaaaaccaaagagccacggaa

SEQ ID NO: 95574 - DNA, 60 bp, Artificial
  Synthetic oligonucleotide
gggaaagtgaccacccacgagcccaaagagtccagccaggccgatggttatgaatatgac

SEQ ID NO: 95575 - DNA, 60 bp, Artificial
  Synthetic oligonucleotide
ctcgcattactggaagctcctcagatgatggagtttgcccctgccaactacccgctccta

SEQ ID NO: 95576 - DNA, 60 bp, Artificial
  Synthetic oligonucleotide
gtgtcggagattatggacatgttgagacggctggacgcaaggattggctcagtagaggcg

SEQ ID NO: 95577 - DNA, 60 bp, Artificial
  Synthetic oligonucleotide
cactagggacacggtggcaaccactcgcattggcagcattctctggggagctcaccaaga

SEQ ID NO: 95578 - DNA, 60 bp, Artificial
  Synthetic oligonucleotide
aggatgagatcatgccaggtaattgctgagtccatgcttgctaatcatgctgggaagctc

SEQ ID NO: 95579 - DNA, 60 bp, Artificial
  Synthetic oligonucleotide
gggcttttggagagtcagacgacagttgggccgaggcatatcaattggcatcatcacgag

SEQ ID NO: 95580 - DNA, 60 bp, Artificial
  Synthetic oligonucleotide
caaatcaccccacctggatctcacgtctagctttgctgccttcccagctaggcgggctca

SEQ ID NO: 95581 - DNA, 60 bp, Artificial
  Synthetic oligonucleotide
cacttcgggcttgtcaaggtttcttcgaacgcctccgtgagaacaactatggcatagggc

SEQ ID NO: 95582 - DNA, 60 bp, Artificial
  Synthetic oligonucleotide
cttgctgcatccggcctgtagatagttgcttcctgaatccaccctgggtagcagtgcccg

SEQ ID NO: 95583 - DNA, 60 bp, Artificial
  Synthetic oligonucleotide
cacgttgagccctcctattgcatttcccagttttattccaacctccactacaactgtggg

SEQ ID NO: 95584 - DNA, 60 bp, Artificial
  Synthetic oligonucleotide
gccgccgaccggggaaagggacttggagtaccattgctgctgacccttatgcactcaaca

SEQ ID NO: 95585 - DNA, 60 bp, Artificial
  Synthetic oligonucleotide
gctgcatgcttcctcactactgacctcaagaaatattgcctacaatggagataccagacc

SEQ ID NO: 95586 - DNA, 60 bp, Artificial
  Synthetic oligonucleotide
tgcttctcccgcaccctccatggcctcccagctaagtgatggcacccgcatcatgatcct

SEQ ID NO: 95587 - DNA, 60 bp, Artificial
  Synthetic oligonucleotide
ggtgtgtgctacttatctgaattgcaaaccaatctctcgtctagatatcactcacgggcc

SEQ ID NO: 95588 - DNA, 60 bp, Artificial
  Synthetic oligonucleotide
tagctgacacactgctcaacatcaaccacccctgcaacccacccacatgcgcaaccgcag

SEQ ID NO: 95589 - DNA, 60 bp, Artificial
  Synthetic oligonucleotide
cggaagaatttcttaggaagacagacaaccgcaagtacctcagcaaagaactcacaactt

SEQ ID NO: 95590 - DNA, 60 bp, Artificial
  Synthetic oligonucleotide
gactggctgcaaacccagtcggaaccccggccatggcccgacacgccaagattccactgg

SEQ ID NO: 95591 - DNA, 60 bp, Artificial
  Synthetic oligonucleotide
gcggcacactgcatcagtccagcctgtagtcacgtcttgcatgcttccttttggctgtgg

SEQ ID NO: 95592 - DNA, 60 bp, Artificial
  Synthetic oligonucleotide
gctacttataccctgcaggctcaggcacaagccactcttcagaatgtgatacggcaaagc

SEQ ID NO: 95593 - DNA, 58 bp, Artificial
  Synthetic oligonucleotide
tccctccaatctgagccgggttcacaaaagccacactaccaatcggatgatcaactag

SEQ ID NO: 95594 - DNA, 60 bp, Artificial
  Synthetic oligonucleotide
cgtacattgatcaggtgtttgtgtttgccgcttggaacctcctactagagctctcctacc

SEQ ID NO: 95595 - DNA, 60 bp, Artificial
  Synthetic oligonucleotide
tgcaatgtacgttggctcatacccactcagacacaatgcacttaatcaatgtcgggggtg

SEQ ID NO: 95596 - DNA, 60 bp, Artificial
  Synthetic oligonucleotide
cgcctaagaactcgaggtccttgtgcaagatgaatgacagtgtcttttccaatgctgctc

SEQ ID NO: 95597 - DNA, 60 bp, Artificial
  Synthetic oligonucleotide
cagcggagacactgcgtactcttgtggccgagaattataccaaagctgtcgcacataaaa

SEQ ID NO: 95598 - DNA, 60 bp, Artificial
  Synthetic oligonucleotide
gaacacaaccccacaccccacagcaagcccacacccgcccaccagcggagacccagcgga

SEQ ID NO: 95599 - DNA, 58 bp, Artificial
  Synthetic oligonucleotide
cccctgcacaaaccctgatcctgttcttctttaatggcactgttcatgaacaccggat

SEQ ID NO: 95600 - DNA, 60 bp, Artificial
  Synthetic oligonucleotide
caggaggagattaattcgctcgatttcatggcacgtgagctgccaaaaggcttccagggt

SEQ ID NO: 95601 - DNA, 60 bp, Artificial
  Synthetic oligonucleotide
aaggggactacactggaatctggccatctgccggagcaaccgcagctgaggacgccatag

SEQ ID NO: 95602 - DNA, 59 bp, Artificial
  Synthetic oligonucleotide
taactcactctatctggcttatgtacttgaaatcattgaaactccaagagaagtccccc

SEQ ID NO: 95603 - DNA, 60 bp, Artificial
  Synthetic oligonucleotide
acagctcttgcatccatcagtcattatctcagtccgctcttgccccgcatctctaagctt

SEQ ID NO: 95604 - DNA, 60 bp, Artificial
  Synthetic oligonucleotide
gtcgcgatatgacttgtgcatgcaagagcccctctaagatcatcactcaacccgactccc

SEQ ID NO: 95605 - DNA, 60 bp, Artificial
  Synthetic oligonucleotide
ggctgctgaactaggcgtaacaaccactgacaaggaggaaatggcacagactctgacgag

SEQ ID NO: 95606 - DNA, 60 bp, Artificial
  Synthetic oligonucleotide
agagttaatgattccggaacacttgatcaatatcccagtcctattcagcttgcacaggca

SEQ ID NO: 95607 - DNA, 60 bp, Artificial
  Synthetic oligonucleotide
gcgccgccacaacgggatttggcctccacataagctcccagaatctgcccctttaagcct

SEQ ID NO: 95608 - DNA, 60 bp, Artificial
  Synthetic oligonucleotide
ggtgtcttctcaaacgaatcagcctgcatgtctaacactactgttataccgatctacctc

SEQ ID NO: 95609 - DNA, 51 bp, Artificial
  Synthetic oligonucleotide
ggggacagcccgtccgtccattctgtgcagagagtttagtgagcacactga

SEQ ID NO: 95610 - DNA, 60 bp, Artificial
  Synthetic oligonucleotide
ggactgcttcgtacacttaacattgcaacagcaggaccaacagctgcacgagatggaatt

SEQ ID NO: 95611 - DNA, 55 bp, Artificial
  Synthetic oligonucleotide
atgaggaaccatgttgcccttgcagggaaacagaatgaggccacactggctattc

SEQ ID NO: 95612 - DNA, 60 bp, Artificial
  Synthetic oligonucleotide
cgcgaagtctcaatatgttgggacggaagacgtgcctgggtcgaagagtggtgcaacccg

SEQ ID NO: 95613 - DNA, 60 bp, Artificial
  Synthetic oligonucleotide
cgaaatatccatctgctgggacggaaaacgtgcctgggtcgaagagtggtgcaacccggc

SEQ ID NO: 95614 - DNA, 52 bp, Artificial
  Synthetic oligonucleotide
tggttacagacgttgtataccatgatcatggaggagaatgtaccggacatgg

SEQ ID NO: 95615 - DNA, 60 bp, Artificial
  Synthetic oligonucleotide
ggacccagtggttacagacgttgtataccatgatcatggaggagaatgtaccggatatgg

SEQ ID NO: 95616 - DNA, 60 bp, Artificial
  Synthetic oligonucleotide
tgggacggaaaacgtgcctgggtcgaagagtggtgcaacccggcatgttcgaggatcacc

SEQ ID NO: 95617 - DNA, 60 bp, Artificial
  Synthetic oligonucleotide
cagggactttatgagcacatcattctggagacttggagtagagtacgctcaggcccaagg

SEQ ID NO: 95618 - DNA, 60 bp, Artificial
  Synthetic oligonucleotide
ttcgccagagactttatgagcacatcattctggagacttggagtagagtacgctcaggct

SEQ ID NO: 95619 - DNA, 60 bp, Artificial
  Synthetic oligonucleotide
gttgtcagctttccaaaagaataagagaaatgtcatgggatgggttggagattgtcggtg

SEQ ID NO: 95620 - DNA, 60 bp, Artificial
  Synthetic oligonucleotide
cctgcagtactgtaactaggggttataagagtgtgttaaggacagggtggtatacgaatg

SEQ ID NO: 95621 - DNA, 60 bp, Artificial
  Synthetic oligonucleotide
ggacagatggcctatccttgatatcaggggcaggacgagaagatagaacccaggattttg

SEQ ID NO: 95622 - DNA, 60 bp, Artificial
  Synthetic oligonucleotide
gatcgtattcaagtggagaacttacctgactggctggagcactggtttgattcttggttg

SEQ ID NO: 95623 - DNA, 60 bp, Artificial
  Synthetic oligonucleotide
tttcgaggtgatagaaaacacatacccagacatggtgaagctattggacaacttaaaccc

SEQ ID NO: 95624 - DNA, 60 bp, Artificial
  Synthetic oligonucleotide
gagacctccagtttatgagcaagaccattcaatcagaaggcgtaatgtatcctgctgcaa

SEQ ID NO: 95625 - DNA, 60 bp, Artificial
  Synthetic oligonucleotide
ccaatgcaattggatcatgtgtactcaaccggccatacattaaggatgactatacagcac

SEQ ID NO: 95626 - DNA, 60 bp, Artificial
  Synthetic oligonucleotide
cagtacatacaagcccacacactctccgaccaacgaatcagatcaatccctccccacaac

SEQ ID NO: 95627 - DNA, 60 bp, Artificial
  Synthetic oligonucleotide
gtgtaccaattgagcaaggttgtaggcgaacagaggaccataaaaggagctccagttgtg

SEQ ID NO: 95628 - DNA, 60 bp, Artificial
  Synthetic oligonucleotide
ccactcttaccacactgatgagagaccctcaagctattgggtcagaaaggcaggctaagg

SEQ ID NO: 95629 - DNA, 60 bp, Artificial
  Synthetic oligonucleotide
gtgcaactataacatatcgacttctaaatacccatgcaaagtcagcacaggtagacaccc

SEQ ID NO: 95630 - DNA, 60 bp, Artificial
  Synthetic oligonucleotide
ccagagtccggaagaccaaaccaaagcatgattacccggccacgacaggtcatagcagca

SEQ ID NO: 95631 - DNA, 60 bp, Artificial
  Synthetic oligonucleotide
gttaagtatcatgcacaatctgaagcaaagaagctaccacattttgtccgagtagtttca

SEQ ID NO: 95632 - DNA, 60 bp, Artificial
  Synthetic oligonucleotide
ctgacttggaaggaccttgccttgagcagatttaatgcaaacttgtgtgtgtgggtgagc

SEQ ID NO: 95633 - DNA, 60 bp, Artificial
  Synthetic oligonucleotide
ggcacatgctatgacacgcttgctaaggtgcaagaacatgcaagacaatgtgcccaccat

SEQ ID NO: 95634 - DNA, 60 bp, Artificial
  Synthetic oligonucleotide
gtgcaggaggtccacaactgcaagcagaagttatcaggagcgagcacaactacagctgca

SEQ ID NO: 95635 - DNA, 60 bp, Artificial
  Synthetic oligonucleotide
gctgcttgggagcacgagagggtgaagatttgaattgtatagatttagtggtggagtgtg

SEQ ID NO: 95636 - DNA, 60 bp, Artificial
  Synthetic oligonucleotide
tgatgaaagaagaggacacccagagggcaaaaataggagatggtagcgtgaagcttaccg

SEQ ID NO: 95637 - DNA, 60 bp, Artificial
  Synthetic oligonucleotide
ggggagtatcagcagaataatcgaccttggtgaagggttggcaatggaagcaactgatgc

SEQ ID NO: 95638 - DNA, 60 bp, Artificial
  Synthetic oligonucleotide
gagaacaacaagatcaacctagcggccttagggctcactgatgatgagagggaagcagca

SEQ ID NO: 95639 - DNA, 60 bp, Artificial
  Synthetic oligonucleotide
tgttgtcctcgggaacgccgccgggcttggtattataggcatgtacaaaggtcgagcccc

SEQ ID NO: 95640 - DNA, 60 bp, Artificial
  Synthetic oligonucleotide
gggtgcaggtatgcaagttatagtagaactggggccgtatgtacaagcagagagtctggg

SEQ ID NO: 95641 - DNA, 60 bp, Artificial
  Synthetic oligonucleotide
gaatacggtaaggcactcggaagtacatccaccggaagcaggatggagagcctgtttgtg

SEQ ID NO: 95642 - DNA, 60 bp, Artificial
  Synthetic oligonucleotide
caaatctgccatcgaggccaacctgaaatcactagcacctgggttgacactgccacttag

SEQ ID NO: 95643 - DNA, 60 bp, Artificial
  Synthetic oligonucleotide
ctgttgaagtaggccttgaaactgctatccggcgtgcctcaagggtattaagcgatgcca

SEQ ID NO: 95644 - DNA, 60 bp, Artificial
  Synthetic oligonucleotide
gagtgtaagaaagattgtgactgatcaacatatctttaatccggaccacatcgacttggt

SEQ ID NO: 95645 - DNA, 60 bp, Artificial
  Synthetic oligonucleotide
gccagaccagtttggagatggtactgaatgataaagcaatatctcctcccaaatctctca

SEQ ID NO: 95646 - DNA, 60 bp, Artificial
  Synthetic oligonucleotide
gggttctgtcagaaagcgagaggtgctaaacattcacgatgtgggtgttgggtgggctga

SEQ ID NO: 95647 - DNA, 60 bp, Artificial
  Synthetic oligonucleotide
ggaattcgggacattgactgtgtgtgatgtgaggtccatttatctgactaccttgaagcc

SEQ ID NO: 95648 - DNA, 57 bp, Artificial
  Synthetic oligonucleotide
atgttggtgctaccactgcgatcacaccttccgaactgcagccgcaagtatccacat

SEQ ID NO: 95649 - DNA, 60 bp, Artificial
  Synthetic oligonucleotide
ctgcataccgaaggcggacacagaacacatctgttgagcatcatagatacccaggcgagc

SEQ ID NO: 95650 - DNA, 60 bp, Artificial
  Synthetic oligonucleotide
gctggttacatctgactgtatcctccacaaccatgatctgcacttatagacatgctcccc

SEQ ID NO: 95651 - DNA, 60 bp, Artificial
  Synthetic oligonucleotide
gtaggtcgtatgtttgcaatgcaacctggaaagcaaagacaggtgcagatccttgctgag

SEQ ID NO: 95652 - DNA, 60 bp, Artificial
  Synthetic oligonucleotide
acctcggtttatgagcgtcaatttcctacacaggcttgcagtgagcagcaggcctatgga

SEQ ID NO: 95653 - DNA, 59 bp, Artificial
  Synthetic oligonucleotide
gagtagacaatagcttttggcggatgatgagcaaggtgttcctggaacccaaagtaaaa

SEQ ID NO: 95654 - DNA, 60 bp, Artificial
  Synthetic oligonucleotide
gggcaccagtgcatatcaaactgcagtggggttctggctggacatcgggaggaggtacat

SEQ ID NO: 95655 - DNA, 60 bp, Artificial
  Synthetic oligonucleotide
ctgcagggccagagagtgacaatgccagtggtaataccctgcagaagggtgacagcaata

SEQ ID NO: 95656 - DNA, 60 bp, Artificial
  Synthetic oligonucleotide
gtggtgtctgtgaggaatcgggtgcagctcacatcactgctgaatggggacaaccagtct

SEQ ID NO: 95657 - DNA, 60 bp, Artificial
  Synthetic oligonucleotide
cacctgtctacccacatggactgagagtggtgtatgaagcattcccattccacaaagctg

SEQ ID NO: 95658 - DNA, 60 bp, Artificial
  Synthetic oligonucleotide
gccttggcaccacatcaaccgttataactttgtccatagctccacagggtgtaaggtaag

SEQ ID NO: 95659 - DNA, 60 bp, Artificial
  Synthetic oligonucleotide
gcacagccactctgctctcaacaagcctgggcctcatgctcacatcgaagactgggacac

SEQ ID NO: 95660 - DNA, 60 bp, Artificial
  Synthetic oligonucleotide
ttgtgcaaccccaccacaccaaagggatcatgtataaaacctaacaaagctcctgtcccc

SEQ ID NO: 95661 - DNA, 60 bp, Artificial
  Synthetic oligonucleotide
ggcccaaccgccgccagagatgggatacgtgatgcaatgatagggatgagagaagagctg

SEQ ID NO: 95662 - DNA, 60 bp, Artificial
  Synthetic oligonucleotide
caaatcaggaccaatttgtcagcgagataatcaagttgacccaacagccctctgccactg

SEQ ID NO: 95663 - DNA, 60 bp, Artificial
  Synthetic oligonucleotide
gcaccaagtgcgactccagcaggaaattatggaggattacaaacggctcgaacaagaaag

SEQ ID NO: 95664 - DNA, 60 bp, Artificial
  Synthetic oligonucleotide
ggagagtcagagagtgaagaagagagtggagagtctgaatctgatgaggaagagagcgac

SEQ ID NO: 95665 - DNA, 60 bp, Artificial
  Synthetic oligonucleotide
tatcaatcaccacccagtacacagcatccccggaaggccctgtgctccaagtcaatgcag

SEQ ID NO: 95666 - DNA, 60 bp, Artificial
  Synthetic oligonucleotide
gagggagaggtgaaggcaattaagaatgccctccggaacacaaatgaggcagtatccaca

SEQ ID NO: 95667 - DNA, 60 bp, Artificial
  Synthetic oligonucleotide
atgccaacttcatcaggacagattagtttgatgttgaacaatcgtgccatggttagaagg

SEQ ID NO: 95668 - DNA, 60 bp, Artificial
  Synthetic oligonucleotide
ccactaatgggcaacataataaacacacccaacgaatgacactcccgccaagttacgaca

SEQ ID NO: 95669 - DNA, 60 bp, Artificial
  Synthetic oligonucleotide
gaattccctgcatcaataccagcttatagaacaacaaattatcactttgacactagccct

SEQ ID NO: 95670 - DNA, 60 bp, Artificial
  Synthetic oligonucleotide
cgcacgggtagaaggtgtgaatctcgagtgcgagcccgaagcacaaactcgagaaagcct

SEQ ID NO: 95671 - DNA, 60 bp, Artificial
  Synthetic oligonucleotide
gtcgcacgggtagaaggtgtgaatctcgagtgcgagcccgaagcacaaactcgagaaagc

SEQ ID NO: 95672 - DNA, 60 bp, Artificial
  Synthetic oligonucleotide
gctaaaactaaccccggcagcaaggagaggcctggcagctgctgcccaacgagtatctga

SEQ ID NO: 95673 - DNA, 60 bp, Artificial
  Synthetic oligonucleotide
ggaggagcagatgcaagatagtaagaatccaggcagttttgcagccatcagttcctcaag

SEQ ID NO: 95674 - DNA, 60 bp, Artificial
  Synthetic oligonucleotide
gataacagccggcattgcacttcaccagtccatgctgaactctcaagccatcgacaatct

SEQ ID NO: 95675 - DNA, 60 bp, Artificial
  Synthetic oligonucleotide
ggcaattgaggcaatcagacaagcagggcaggagatgatattggctgttcagggtgtcca

SEQ ID NO: 95676 - DNA, 60 bp, Artificial
  Synthetic oligonucleotide
ggcctcatttggaacggagatcgcgtctttattgacaggtggtgcaacccaatgtgctcg

SEQ ID NO: 95677 - DNA, 60 bp, Artificial
  Synthetic oligonucleotide
catgccagaggggactgtgtgcagccaaaatgccttgtacccgatgagtcctctgctcca

SEQ ID NO: 95678 - DNA, 60 bp, Artificial
  Synthetic oligonucleotide
ccattcctggacttgggaaggatcccaacgaccccactgcagatgtcgaactcaatcccg

SEQ ID NO: 95679 - DNA, 60 bp, Artificial
  Synthetic oligonucleotide
cagcgatgtggatattggcgaacctgataccgagggatatgctatcactgaccggggatc

SEQ ID NO: 95680 - DNA, 60 bp, Artificial
  Synthetic oligonucleotide
gcctcggggcgagatggattgcttaactctatactcatcctctacagggagttggcaaga

SEQ ID NO: 95681 - DNA, 60 bp, Artificial
  Synthetic oligonucleotide
cagcggtgaagcggttgagggaatccaagatgctgactctatcatggttcgatcaggcct

SEQ ID NO: 95682 - DNA, 60 bp, Artificial
  Synthetic oligonucleotide
ggagccactttcacttgcttacctgcagctgagggatataacagtagaactcagaggtgc

SEQ ID NO: 95683 - DNA, 60 bp, Artificial
  Synthetic oligonucleotide
tttggccccagcttacgggaccccatatctgcggagatatctatccaggctttgagctat

SEQ ID NO: 95684 - DNA, 60 bp, Artificial
  Synthetic oligonucleotide
tcgaaaagatgggcctggtttttgcacttggtgggatagggggcaccagtcttcacatta

SEQ ID NO: 95685 - DNA, 60 bp, Artificial
  Synthetic oligonucleotide
ggaatttgttacatggtccacaccccaactatatcacattctagctaagtccacagcact

SEQ ID NO: 95686 - DNA, 60 bp, Artificial
  Synthetic oligonucleotide
tcatcccaggatacccagctcccgcaagctagagctgagggcagagctatgtaccaaccc

SEQ ID NO: 95687 - DNA, 60 bp, Artificial
  Synthetic oligonucleotide
ggatggccaaggatgagcacgatttgactaaggcactccacactctagctgtctcaggag

SEQ ID NO: 95688 - DNA, 60 bp, Artificial
  Synthetic oligonucleotide
tgcttcgggattcgggccattgatcacacacggttcagggatggacctatacaaatccaa

SEQ ID NO: 95689 - DNA, 60 bp, Artificial
  Synthetic oligonucleotide
gagatatgagaccatcagcttgtttgcacagaggctaaatgagatttacggattaccctc

SEQ ID NO: 95690 - DNA, 60 bp, Artificial
  Synthetic oligonucleotide
agatatcaacattaattaggagatgccttgagccaggggaagacggcttgttcttgggtg

SEQ ID NO: 95691 - DNA, 60 bp, Artificial
  Synthetic oligonucleotide
ccagctcgtcaagctaggtgtctggaaatccccaaccgacatgcaatcctgggtcccctt

SEQ ID NO: 95692 - DNA, 60 bp, Artificial
  Synthetic oligonucleotide
gtaaggattgcttcgttagtgcaaggggacaatcagaccatagccgtaacaaaaagggta

SEQ ID NO: 95693 - DNA, 60 bp, Artificial
  Synthetic oligonucleotide
agaagaggacgagagactggcggcattcctcatggacaggcatattatagtacctagggc

SEQ ID NO: 95694 - DNA, 60 bp, Artificial
  Synthetic oligonucleotide
gctccattataaaatccagccggctagaggaggatcggaagcgttacctgatgactctcc

SEQ ID NO: 95695 - DNA, 60 bp, Artificial
  Synthetic oligonucleotide
gcgacccttactcagcaaatctcgtatgcgtccagagcatcactagactcctcaagaaca

SEQ ID NO: 95696 - DNA, 60 bp, Artificial
  Synthetic oligonucleotide
gctagaatctatgcgaggccaccttattcggcgtcatgagacatgtgtcatctgcgagtg

SEQ ID NO: 95697 - DNA, 60 bp, Artificial
  Synthetic oligonucleotide
caacaacaccccactaactctcctcacaccttggagaaaggtcctaacaacagggagtgt

SEQ ID NO: 95698 - DNA, 60 bp, Artificial
  Synthetic oligonucleotide
ccatgggaggtttgaactttggccgatcttactttgatccagcatattttagattagggc

SEQ ID NO: 95699 - DNA, 60 bp, Artificial
  Synthetic oligonucleotide
gctacgttggaggatgccaaggaattgttggagtcatcggaccagatattgaggagtatg

SEQ ID NO: 95700 - DNA, 60 bp, Artificial
  Synthetic oligonucleotide
atcactgcccggtagtcgaggtgaacggcgtgaccatccaagtcgggagcaggaggtatc

SEQ ID NO: 95701 - DNA, 60 bp, Artificial
  Synthetic oligonucleotide
cgggcagccatctacaccgcagagatccataaaagcctcagcaccaatctagatgtaact

SEQ ID NO: 95702 - DNA, 60 bp, Artificial
  Synthetic oligonucleotide
gggcatttgatgtacattatcatagaccatcagggaaatatcagatgggtgagctgttgt

SEQ ID NO: 95703 - DNA, 60 bp, Artificial
  Synthetic oligonucleotide
ccatggcagcatggtcagaaatatcagacaacccaggacaggaccgagccacccgcaagg

SEQ ID NO: 95704 - DNA, 58 bp, Artificial
  Synthetic oligonucleotide
gagatccacgagctcctgaaactccaatccagaggcaacaactttccgaagcttggga

SEQ ID NO: 95705 - DNA, 60 bp, Artificial
  Synthetic oligonucleotide
ggctatcgtgacaggcacggaggcagttggccaccgctgaccctccccctgcatgctgca

SEQ ID NO: 95706 - DNA, 60 bp, Artificial
  Synthetic oligonucleotide
cacaaacccatacttgccataggaggagacacacacctgtattcttcactggtagttcag

SEQ ID NO: 95707 - DNA, 60 bp, Artificial
  Synthetic oligonucleotide
gctctccaaagggaatgggattcagtttacccgaaagagttcctgcgttacgaccctccc

SEQ ID NO: 95708 - DNA, 60 bp, Artificial
  Synthetic oligonucleotide
gacttcgacaagtcggcatgggacatcaaagggtcgatcgctccgatacaacccaccacc

SEQ ID NO: 95709 - DNA, 60 bp, Artificial
  Synthetic oligonucleotide
gccatgccccaacatacctacctgcggaggtggatggtgatgtcaaactcagttccaatc

SEQ ID NO: 95710 - DNA, 60 bp, Artificial
  Synthetic oligonucleotide
ctctcttggcttcacaatcaattcaaccatgacccgggatgtagtcatacccctcctcac

SEQ ID NO: 95711 - DNA, 60 bp, Artificial
  Synthetic oligonucleotide
tcaaacagataagattgagagttgatccaggattcattttcgacgccctcgctgaggtaa

SEQ ID NO: 95712 - DNA, 60 bp, Artificial
  Synthetic oligonucleotide
gtcgctgtccctgttagacttgtatttaggtcgaggttacaatgtgtcatctatagtcac

SEQ ID NO: 95713 - DNA, 60 bp, Artificial
  Synthetic oligonucleotide
acggggggtttgaaacgtgagtgggtttttaaggtaacagtcaaggagaccaaagaatgg

SEQ ID NO: 95714 - DNA, 60 bp, Artificial
  Synthetic oligonucleotide
ccggatagggagtacgacttcagagatctcacttggtgtatcaacccgccagagagaatc

SEQ ID NO: 95715 - DNA, 60 bp, Artificial
  Synthetic oligonucleotide
ggagtaggtaatattgtcaaggtgctctttaacgggaggcccgaagtcacgtgggtaggc

SEQ ID NO: 95716 - DNA, 60 bp, Artificial
  Synthetic oligonucleotide
gcttatgcctttcagcggggattttgttcagggatttataagttatgtagggtctcatta

SEQ ID NO: 95717 - DNA, 60 bp, Artificial
  Synthetic oligonucleotide
gagtccctcacgcttacagcctggaggaccctacactgtgtcagaacatcaagcaccgcc

SEQ ID NO: 95718 - DNA, 60 bp, Artificial
  Synthetic oligonucleotide
gcgcataggttgagggatcgtagcactcaagtgaaatactcaggtacatcccttgtccga

SEQ ID NO: 95719 - DNA, 60 bp, Artificial
  Synthetic oligonucleotide
tttgggtcttgctcgcaaaggcggttacggccccagacacggcagctgattcggagctaa

SEQ ID NO: 95720 - DNA, 60 bp, Artificial
  Synthetic oligonucleotide
tgacgggctacttgtgtcccaatcactcaagagcattgcaaggtgtgtattttggtcaga

SEQ ID NO: 95721 - DNA, 60 bp, Artificial
  Synthetic oligonucleotide
tcaagaaaacacccgggaacaaacctaggattgctgaaatgatatgtgacattgatacat

SEQ ID NO: 95722 - DNA, 60 bp, Artificial
  Synthetic oligonucleotide
aggattatgccagaagctatggacaatgatctcaattgctgcaatccaacttgctgcagc

SEQ ID NO: 95723 - DNA, 60 bp, Artificial
  Synthetic oligonucleotide
cctccggcttaaggagagcattgctgcaaccaatgaggctgtgcatgaggtcaccgacgg

SEQ ID NO: 95724 - DNA, 60 bp, Artificial
  Synthetic oligonucleotide
gttactcctgagctggtcattgtgacacatacagatgagaacaagttcacgtgtcttacc

SEQ ID NO: 95725 - DNA, 60 bp, Artificial
  Synthetic oligonucleotide
ccatgttgcccttgcgggaaagcagaatgaggccacactggctgttcttgagatcgatgg

SEQ ID NO: 95726 - DNA, 60 bp, Artificial
  Synthetic oligonucleotide
ggtagaaggtgtgaatctcgagtgcgagcccgaagcacaaactcgagaaagccttctgcc

SEQ ID NO: 95727 - DNA, 60 bp, Artificial
  Synthetic oligonucleotide
gaccatggataaacacaatattagatgacattaaaactagtgctgagtcaatagggagtc

SEQ ID NO: 95728 - DNA, 60 bp, Artificial
  Synthetic oligonucleotide
gcatgttataaaaggcagaccagtgtcaagcagctttgatccaatcaagtttcctgaaga

SEQ ID NO: 95729 - DNA, 60 bp, Artificial
  Synthetic oligonucleotide
ccaaaagtgcactaagagagctcaaaacagtttctgctgaccaattggcaagagaggagc

SEQ ID NO: 95730 - DNA, 60 bp, Artificial
  Synthetic oligonucleotide
caaagcaatcattcttctgtagcaacagttggtggcagcaagatcatagagtctaaatgg

SEQ ID NO: 95731 - DNA, 64 bp, Artificial
  Synthetic oligonucleotide
ggacttcaaaatattcctatgtgtctttaaaactaaacttttatgtagttggggatctcaaggg

SEQ ID NO: 95732 - DNA, 60 bp, Artificial
  Synthetic oligonucleotide
cagcgatctgtgcggatgtagcagacgaattacatggaacacaaagcttattctgttggt

SEQ ID NO: 95733 - DNA, 60 bp, Artificial
  Synthetic oligonucleotide
gtctttatcagcagcattagcatgtcattggtgtgggatattaacagaacaatgcataga

SEQ ID NO: 95734 - DNA, 60 bp, Artificial
  Synthetic oligonucleotide
cagttccagcttatagaacaacaaattaccatttcgacactagtcctattaatcaagcac

SEQ ID NO: 95735 - DNA, 60 bp, Artificial
  Synthetic oligonucleotide
ccaatcaatagatgtaagtaaaccagtcaagttatctgaaggtttggatgaagtgaaggc

SEQ ID NO: 95736 - DNA, 60 bp, Artificial
  Synthetic oligonucleotide
ggggataattattgaaaagttcagcactgacagaactacaaggggtcaaagaggtccaaa

SEQ ID NO: 95737 - DNA, 60 bp, Artificial
  Synthetic oligonucleotide
accaaagcataacaaaagctgcagcctgctacagtctacacaacataatcaagcaactac

SEQ ID NO: 95738 - DNA, 61 bp, Artificial
  Synthetic oligonucleotide
ggtatacagattctgtaataaacaaggacacatgctggaaaataagtagaaatcaatgcac

SEQ ID NO: 95739 - DNA, 60 bp, Artificial
  Synthetic oligonucleotide
aaccgtgcgatggtgcgaagaaaggggttcggaatcctgataggggtctacgggagctcc

SEQ ID NO: 95740 - DNA, 60 bp, Artificial
  Synthetic oligonucleotide
gcaggcgctgacaatgactcttcatatgccctgcaagacagtgaaagcattaatcaagtg

SEQ ID NO: 95741 - DNA, 58 bp, Artificial
  Synthetic oligonucleotide
gacaacactgcaaaagttgccatagagaatcctgttattgagcatgtgagactcaaaa

SEQ ID NO: 95742 - DNA, 60 bp, Artificial
  Synthetic oligonucleotide
gcagggtcaactgtttactacccaaatgagaaagactgtgaaacaagaggagaccatgtc

SEQ ID NO: 95743 - DNA, 60 bp, Artificial
  Synthetic oligonucleotide
ttaccaaactagcatcaactatagaagtgggattagagaccacagtcagaagagctaacc

SEQ ID NO: 95744 - DNA, 60 bp, Artificial
  Synthetic oligonucleotide
gaagtttgttcattgagtatggcaaagcattaggctcatcctctacaggcagcaaagcag

SEQ ID NO: 95745 - DNA, 60 bp, Artificial
  Synthetic oligonucleotide
cagaagtctatgacctagtgcgagagatgggccctgaatctgggctcctacatttaaggc

SEQ ID NO: 95746 - DNA, 60 bp, Artificial
  Synthetic oligonucleotide
gtcagagccgaagttagcatggacagacaaaggtggggcaatcaaaactgaagcaaagca

SEQ ID NO: 95747 - DNA, 60 bp, Artificial
  Synthetic oligonucleotide
gcagtgaagcagaccaagctctaacacaagccaaaattgcaccttatgcgggactgatca

SEQ ID NO: 95748 - DNA, 60 bp, Artificial
  Synthetic oligonucleotide
aaatcctaaagttttgtactttattggagaaggagcaggaaattggatggccagaacagc

SEQ ID NO: 95749 - DNA, 60 bp, Artificial
  Synthetic oligonucleotide
gataacattcgaaaggctaacaaatcatgacacaagttcaaattatgctaaagggaagct

SEQ ID NO: 95750 - DNA, 60 bp, Artificial
  Synthetic oligonucleotide
ctttggaataccagagagtaataggtgaattaagcagaatcatagatagtggtgaagggc

SEQ ID NO: 95751 - DNA, 60 bp, Artificial
  Synthetic oligonucleotide
agttgtaaacatgatatcagggacaaaatctataaccaacttattacagagaacatccgc

SEQ ID NO: 95752 - DNA, 60 bp, Artificial
  Synthetic oligonucleotide
gggtagtaagctgtcaggttcagaatgctacatactcttaacactaggccaccacaacag

SEQ ID NO: 95753 - DNA, 60 bp, Artificial
  Synthetic oligonucleotide
gcaaaagtaacaagtgacatcaatagaacagcagttaccagtatcttaagtctttcccca

SEQ ID NO: 95754 - DNA, 65 bp, Artificial
  Synthetic oligonucleotide
ccaatcttgagatggtattaaatgacaaagctatatcacctcctaaaagattaatatggtctgtg

SEQ ID NO: 95755 - DNA, 60 bp, Artificial
  Synthetic oligonucleotide
gaggggcattcatattaaggattatcaaaggatttgtggacaacaacaaaaggtggccca

SEQ ID NO: 95756 - DNA, 60 bp, Artificial
  Synthetic oligonucleotide
atccaccacaaattacccatgcaaagtcagcacaggaaggcatcctatcagtatggttgc

SEQ ID NO: 95757 - DNA, 60 bp, Artificial
  Synthetic oligonucleotide
caggccttggtagatcaatcaaacagaatcctaagcagtgcagagaaagggaatactggc

SEQ ID NO: 95758 - DNA, 60 bp, Artificial
  Synthetic oligonucleotide
gcaacagtctgaatgaaaatcaggaagggctagggttgagaagtaatctgcaaggtatgt

SEQ ID NO: 95759 - DNA, 60 bp, Artificial
  Synthetic oligonucleotide
ctgatagagctgatggcctatcaataatatcaggcgcaggcagagaagacagaacgcaag

SEQ ID NO: 95760 - DNA, 60 bp, Artificial
  Synthetic oligonucleotide
tatgcaagacttggagccatcaaggaacaagatatgtgctgaagtccagataacagccaa

SEQ ID NO: 95761 - DNA, 60 bp, Artificial
  Synthetic oligonucleotide
gtgtaggtagaatgtttgctatgcaaccaggaaaacagcgacaaatacaaatattggcag

SEQ ID NO: 95762 - DNA, 60 bp, Artificial
  Synthetic oligonucleotide
ttgctaataacacctcaacacggtcttaaagagagctacttagaagaatcatgtagcact

SEQ ID NO: 95763 - DNA, 64 bp, Artificial
  Synthetic oligonucleotide
ggatctagaaaagaacacaccagttacaataccagcatttatcaaatcagtttctatcaaagag

SEQ ID NO: 95764 - DNA, 60 bp, Artificial
  Synthetic oligonucleotide
gatgttagacatacacggagtagagaaaagctgggtggaagagatagacaaagaagcaag

SEQ ID NO: 95765 - DNA, 60 bp, Artificial
  Synthetic oligonucleotide
cagcaggacccacagcagcaagagatgggatcagagatgcaatgattggcataagggagg

SEQ ID NO: 95766 - DNA, 60 bp, Artificial
  Synthetic oligonucleotide
ggctcagagttcatggtaccgtattagaaaataatgattatccaatgtatgaagttgtac

SEQ ID NO: 95767 - DNA, 60 bp, Artificial
  Synthetic oligonucleotide
ccttacacagcagctgttcaagttgatctagtagaaaaggacctgttacctgcaagccta

SEQ ID NO: 95768 - DNA, 58 bp, Artificial
  Synthetic oligonucleotide
tgtgccaagatggactcatctaggacaatcgggctgtactttgattctacccttcctt

SEQ ID NO: 95769 - DNA, 60 bp, Artificial
  Synthetic oligonucleotide
aggccaagtctttgttactcctgagctcgtcattgtgacacatacagatgagaacaagtt

SEQ ID NO: 95770 - DNA, 54 bp, Artificial
  Synthetic oligonucleotide
gtcgcacgggtagaaggtgtgaatctcgagtgcgagcccgaagctcaaactcga

SEQ ID NO: 95771 - DNA, 54 bp, Artificial
  Synthetic oligonucleotide
gtcatacgggtagaaggtgtgaatctcgagtgcgagcccgaagctcaaactcga

SEQ ID NO: 95772 - DNA, 60 bp, Artificial
  Synthetic oligonucleotide
gtcgcacgggtagaaggtgtgaatctcgagtgcgagcccgaagctcaaactcgagagtac

SEQ ID NO: 95773 - DNA, 60 bp, Artificial
  Synthetic oligonucleotide
cgcacgggtagaaggtgtgaatctcgagtgcgagcccgaagcacaaactcgaggaagcct

SEQ ID NO: 95774 - DNA, 60 bp, Artificial
  Synthetic oligonucleotide
ctccctgcaaatatgaagtacggggcaagtgcaatagaggcagtgaatgcaaatttaacc

SEQ ID NO: 95775 - DNA, 60 bp, Artificial
  Synthetic oligonucleotide
gcaaggctccctgcaaatatgaagtacggggcaagtgcaatagaggcagtgaatgcaaat

SEQ ID NO: 95776 - DNA, 60 bp, Artificial
  Synthetic oligonucleotide
gtttaactcgtggtgaaagaggacctactaagccatgggtaggttcatctacgcaggaga

SEQ ID NO: 95777 - DNA, 64 bp, Artificial
  Synthetic oligonucleotide
cgatactagtcctatcaatcatgtattaacagaaaagtatggagatgaagatatcgacattgtg

SEQ ID NO: 95778 - DNA, 60 bp, Artificial
  Synthetic oligonucleotide
gggatccacaggctttagggtctgaaaggcaagctaaaattactagtgagattaatagat

SEQ ID NO: 95779 - DNA, 60 bp, Artificial
  Synthetic oligonucleotide
gagacctatatatcccgagatatgcagttcatgagcaaaacaatccagcacaatggagtg

SEQ ID NO: 95780 - DNA, 60 bp, Artificial
  Synthetic oligonucleotide
cctgcatcactaacaatatgggtgcctatgttccagtcatctgtgccagcagacttgctc

SEQ ID NO: 95781 - DNA, 60 bp, Artificial
  Synthetic oligonucleotide
ctctacgcccaaaggaccttcactacgagtcacgatcaactcaagaagcgctgtgctggc

SEQ ID NO: 95782 - DNA, 60 bp, Artificial
  Synthetic oligonucleotide
tacccatagtaaatcaacagagctgtcgcatctccaacattgaaacagttatagaattcc

SEQ ID NO: 95783 - DNA, 60 bp, Artificial
  Synthetic oligonucleotide
gacattcaaccccactcatgagatcattgctctatgtgaatttgaaaatattatgacatc

SEQ ID NO: 95784 - DNA, 60 bp, Artificial
  Synthetic oligonucleotide
ctacaaacaaagctgtagtcagtctatcaaatggggtcagtgttttaaccagcaaagtgt

SEQ ID NO: 95785 - DNA, 60 bp, Artificial
  Synthetic oligonucleotide
cattagtagttgcaagtgcaggacccacttcagctcgcgatggaataagagatgctatgg

SEQ ID NO: 95786 - DNA, 51 bp, Artificial
  Synthetic oligonucleotide
acagacatcaatccattgaatcaactgccagaccgaacaaacaaatgtccg

SEQ ID NO: 95787 - DNA, 60 bp, Artificial
  Synthetic oligonucleotide
aagtgtggtcctaggcaatgcagcaggtctaggcataatgggagagtatagaggtacgcc

SEQ ID NO: 95788 - DNA, 61 bp, Artificial
  Synthetic oligonucleotide
cagagaaaatgatagccgaaaatattttacaattcttccctgagagtttgacaagatatgg

SEQ ID NO: 95789 - DNA, 60 bp, Artificial
  Synthetic oligonucleotide
gctcttagcaaagtcaagttaaatgatacattaaataaggatcagctgctgtcatctagc

SEQ ID NO: 95790 - DNA, 60 bp, Artificial
  Synthetic oligonucleotide
ctcaagtcagaacataactgaggagttttaccaatcgacatgtagtgcagttagcagagg

SEQ ID NO: 95791 - DNA, 60 bp, Artificial
  Synthetic oligonucleotide
gggtttgtaaatacctacaacagatggcccactttaaggaatgctattgtcctacctcta

SEQ ID NO: 95792 - DNA, 60 bp, Artificial
  Synthetic oligonucleotide
gaagctgacagtaccccagaagccaaaaccaactacccaagaaaacccctagtaagcttc

SEQ ID NO: 95793 - DNA, 60 bp, Artificial
  Synthetic oligonucleotide
acaaagccatttcacctccaaaagatctaatatggactagttttcccagaaattacatgc

SEQ ID NO: 95794 - DNA, 60 bp, Artificial
  Synthetic oligonucleotide
acgcgaaaaaatgcgtactacaaacttgcacattcggaaaaaatggggcaaataagaatt

SEQ ID NO: 95795 - DNA, 60 bp, Artificial
  Synthetic oligonucleotide
cgccttaataatgctaaatttaccgtatgcccttgggttgttaacatagattatcaccca

SEQ ID NO: 95796 - DNA, 60 bp, Artificial
  Synthetic oligonucleotide
cgtacggtagtagaacttcatccagacataagatacatttacagaagtttaaaagattgc

SEQ ID NO: 95797 - DNA, 60 bp, Artificial
  Synthetic oligonucleotide
caccacttcacatcagacatctttagtaaggaatagtgcatcactttattgcatgcttcc

SEQ ID NO: 95798 - DNA, 56 bp, Artificial
  Synthetic oligonucleotide
aattacagctacttacgcaaaacacgccagctgccaacaaccgggccagaagagaa

SEQ ID NO: 95799 - DNA, 60 bp, Artificial
  Synthetic oligonucleotide
gaggatggtattgtgataatgcaggatcagtatccttcttcccacaggctgacacttgca

SEQ ID NO: 95800 - DNA, 60 bp, Artificial
  Synthetic oligonucleotide
cactatatccaaacatcatgaacatctacactacacacttcatcacacaaaccaatccca

SEQ ID NO: 95801 - DNA, 60 bp, Artificial
  Synthetic oligonucleotide
gcagaacctattagcatctttgtctgcgatgctgaattacctgttacagccaattggagt

SEQ ID NO: 95802 - DNA, 64 bp, Artificial
  Synthetic oligonucleotide
gcaggattagtattagttatcacagttactgacaataaaggagcattcaaatatatcaagccac

SEQ ID NO: 95803 - DNA, 60 bp, Artificial
  Synthetic oligonucleotide
gggcaacactttatactatgtaaacaagctggaaggcaagaacctttatgtaaaagggga

SEQ ID NO: 95804 - DNA, 60 bp, Artificial
  Synthetic oligonucleotide
gccaatattacaaaacggaggatacatatgggaattgattgagttgacacactgctctca

SEQ ID NO: 95805 - DNA, 60 bp, Artificial
  Synthetic oligonucleotide
gtagggagtaccaaatacaagaaatacactgaatataatacaaaatatggcactttcccc

SEQ ID NO: 95806 - DNA, 60 bp, Artificial
  Synthetic oligonucleotide
gtgcctaggtagcaagttaaaaggatctgaagtttacttagtccttacaataggccctgc

SEQ ID NO: 95807 - DNA, 60 bp, Artificial
  Synthetic oligonucleotide
gctggacgtaatgaagtattcagcaacaagcttataaaccacaagcatatgaatatccta

SEQ ID NO: 95808 - DNA, 60 bp, Artificial
  Synthetic oligonucleotide
ctaaaagagatgggagaagtggctccagaatataggcatgattctccagactgtgggatg

SEQ ID NO: 95809 - DNA, 60 bp, Artificial
  Synthetic oligonucleotide
ataagtgatgtaaaggtgtacgccatcttgaataaactaggactaaaggaaaaggacaga

SEQ ID NO: 95810 - DNA, 60 bp, Artificial
  Synthetic oligonucleotide
tgtccaggcagaaatggagcaagttgtggaagtctatgagtatgcacagaagttgggagg

SEQ ID NO: 95811 - DNA, 60 bp, Artificial
  Synthetic oligonucleotide
ggagctgctgaactggatagaacagaagaatatgctcttggtatagttggagtgctagag

SEQ ID NO: 95812 - DNA, 60 bp, Artificial
  Synthetic oligonucleotide
aaggttatgggacaaaatggatcccattattaatggaaactctgctaatgtgtatctaac

SEQ ID NO: 95813 - DNA, 58 bp, Artificial
  Synthetic oligonucleotide
cctcacatcatgctacctacacaactaagctagatccttaactcatagttacataaaa

SEQ ID NO: 95814 - DNA, 60 bp, Artificial
  Synthetic oligonucleotide
tgtaaggtacgatacaaggcgatggagcaattgaagtcgcacgggtagaaggtgtgaatc

SEQ ID NO: 95815 - DNA, 60 bp, Artificial
  Synthetic oligonucleotide
cgtaagttacgataaaaggcgaaagagcaattgaagtcgcacgggtagaaggtgtgactc

SEQ ID NO: 95816 - DNA, 60 bp, Artificial
  Synthetic oligonucleotide
gcagggaataagtatgatctgctgttcccatctgtcttagatgataacctgagtgagaag

SEQ ID NO: 95817 - DNA, 60 bp, Artificial
  Synthetic oligonucleotide
ggggcattgagggattatgccagaagctatggacaatgatctcaattgctgcaatccaac

SEQ ID NO: 95818 - DNA, 60 bp, Artificial
  Synthetic oligonucleotide
gacgggataactttgaggctcagtggggaatttgatgcaacttatcaaaagaatatctca

SEQ ID NO: 95819 - DNA, 60 bp, Artificial
  Synthetic oligonucleotide
ctgcacaatcttgcgctcaatgtcactattgatgtggaggtagacccgaagagcccgttg

SEQ ID NO: 95820 - DNA, 61 bp, Artificial
  Synthetic oligonucleotide
gaattctccaaaaggtgaattaaactatgatttctttgaagcattagagaacacatacccc

SEQ ID NO: 95821 - DNA, 60 bp, Artificial
  Synthetic oligonucleotide
ctttattggagaaggagcaggtaactggatggcaagaacagcatgtgaatatcctgatat

SEQ ID NO: 95822 - DNA, 55 bp, Artificial
  Synthetic oligonucleotide
tatctgtgaagactcgctgtcagatgacctctctattaaacggagacaatcagtc

SEQ ID NO: 95823 - DNA, 60 bp, Artificial
  Synthetic oligonucleotide
gttgctgtagaaaaccctgttgttgaacatgtcagacttagaaatgcagtcatgaccaaa

SEQ ID NO: 95824 - DNA, 60 bp, Artificial
  Synthetic oligonucleotide
gatagagcagtgtctatgatgttagagaacttagggttgttatctaggatattgtcagta

SEQ ID NO: 95825 - DNA, 60 bp, Artificial
  Synthetic oligonucleotide
gaccagtttcaagcagttttgatccaatcaagtttcctgaggatcagttcaatgttgcgc

SEQ ID NO: 95826 - DNA, 61 bp, Artificial
  Synthetic oligonucleotide
gatggcctaaaattaagaatttaaaagtgctcagcaaaagatgggctatgtatttcaaagc

SEQ ID NO: 95827 - DNA, 61 bp, Artificial
  Synthetic oligonucleotide
cattgggacttgatacacagaataagtaaagatgctttattgataacattgtgtgatgcag

SEQ ID NO: 95828 - DNA, 60 bp, Artificial
  Synthetic oligonucleotide
aagagtctcaatacacaataaaaagagatgtaggcaccacaactgcagtgacaccttcat

SEQ ID NO: 95829 - DNA, 55 bp, Artificial
  Synthetic oligonucleotide
aaaagagatgtaggcaccacaactgcagtgacaccttcatcattacaacaagaaa

SEQ ID NO: 95830 - DNA, 60 bp, Artificial
  Synthetic oligonucleotide
cggctctaggatcagaaagagtacaacagattttaagaaattcaggcagtgaagttcagg

SEQ ID NO: 95831 - DNA, 60 bp, Artificial
  Synthetic oligonucleotide
gcaagttacagaggtttatgatttggtgagagaaatgggtcctgaatctgggcttttaca

SEQ ID NO: 95832 - DNA, 60 bp, Artificial
  Synthetic oligonucleotide
gccgatctttggtgtcatagatacaccttgttggatcatcaaggcagctccctcttgctc

SEQ ID NO: 95833 - DNA, 60 bp, Artificial
  Synthetic oligonucleotide
gttgtgcggcagttttcagacaatgcagggataacaccagcaatatcattggacctgatg

SEQ ID NO: 95834 - DNA, 60 bp, Artificial
  Synthetic oligonucleotide
gtactgatggacctagcttaatcaaaacagaacttgacctaaccaaaagtgctctaagag

SEQ ID NO: 95835 - DNA, 60 bp, Artificial
  Synthetic oligonucleotide
gcattgcgatagccaaaaccataaggcttgagagtgaagtgaatgcaatcaaaggtgctc

SEQ ID NO: 95836 - DNA, 60 bp, Artificial
  Synthetic oligonucleotide
gacatggcacatgctcttacacgattaattaggaagaaattgatgtgtgataatgcactc

SEQ ID NO: 95837 - DNA, 60 bp, Artificial
  Synthetic oligonucleotide
gctcagcaaaagatgggttatgtatttcaaagctaaaagttaccctagccaacttgagct

SEQ ID NO: 95838 - DNA, 60 bp, Artificial
  Synthetic oligonucleotide
cctccgatcaacacatcttcagtcctgacaaaatagacatattaacactagggaagatgc

SEQ ID NO: 95839 - DNA, 60 bp, Artificial
  Synthetic oligonucleotide
aatctgtacagcttacggaacagatctttacttatttgcaaagtatcatgcgacggactg

SEQ ID NO: 95840 - DNA, 60 bp, Artificial
  Synthetic oligonucleotide
ccctgttgttgaacatgtgaggcttagaaatgcagtcatgaccaaaatgaagatatcaga

SEQ ID NO: 95841 - DNA, 60 bp, Artificial
  Synthetic oligonucleotide
gagtaagttttttcacatataaccaactgttaacatggaaagatgtgatgttaagtaggt

SEQ ID NO: 95842 - DNA, 61 bp, Artificial
  Synthetic oligonucleotide
ctggagagcttaacagaactaagaggagcatttatactaagaattataaaagggtttgtag

SEQ ID NO: 95843 - DNA, 66 bp, Artificial
  Synthetic oligonucleotide
ggttaaagaataaagcaagtacaataattgattggttagagcatatcttgaattctccaagaggtg

SEQ ID NO: 95844 - DNA, 60 bp, Artificial
  Synthetic oligonucleotide
gaactagaattcagaggggagagtatactagttagcttgatattaaggaatttctggctg

SEQ ID NO: 95845 - DNA, 60 bp, Artificial
  Synthetic oligonucleotide
ccctcaggcagtaggatcagaacgacaagctaaggtaacaagtgatataaatagaacagc

SEQ ID NO: 95846 - DNA, 60 bp, Artificial
  Synthetic oligonucleotide
gttcagaaaaagatggaaattatgcttgcctcctaagagaggatcaagggtggtattgta

SEQ ID NO: 95847 - DNA, 60 bp, Artificial
  Synthetic oligonucleotide
gctaaggtaacaagtgatataaatagaacagcagttactagcatactgagtctatctccg

SEQ ID NO: 95848 - DNA, 60 bp, Artificial
  Synthetic oligonucleotide
catcagtaggatctgcaagagctggagtcaccaaggaacaagatacgtactaaaatccag

SEQ ID NO: 95849 - DNA, 60 bp, Artificial
  Synthetic oligonucleotide
gctgcatcacagaatggtccaatactcaaggtaaatgcatcagctcagggtgctgctatg

SEQ ID NO: 95850 - DNA, 60 bp, Artificial
  Synthetic oligonucleotide
gggaacgaagacattaatttagtgttccaaaatgcaatcagctgcggaattagtataatg

SEQ ID NO: 95851 - DNA, 60 bp, Artificial
  Synthetic oligonucleotide
agaaagatgccctagatttgctctcagacaatgaggaagaagacgcagaatcctcaatcc

SEQ ID NO: 95852 - DNA, 60 bp, Artificial
  Synthetic oligonucleotide
actacctaccatcagcaaacctgcacgatcatctacactgctggaaccaaaattggcatg

SEQ ID NO: 95853 - DNA, 60 bp, Artificial
  Synthetic oligonucleotide
actcttcatatgccttgcaagacagtgaaagcactaatcaagtgcagtaagcatggtccc

SEQ ID NO: 95854 - DNA, 60 bp, Artificial
  Synthetic oligonucleotide
ggcataatcggaatgtacagagggagagtaccaaacacagagctattttctgcagcagaa

SEQ ID NO: 95855 - DNA, 60 bp, Artificial
  Synthetic oligonucleotide
atgtcttcacattagaagttggtgatgttgaaaatcttacatgtactgatggacctagct

SEQ ID NO: 95856 - DNA, 51 bp, Artificial
  Synthetic oligonucleotide
agaaacacagataaggctgatggtttgtcaataatatcaggagcaggtaga

SEQ ID NO: 95857 - DNA, 60 bp, Artificial
  Synthetic oligonucleotide
gcagtttcgatccaatcaagtttcctgaggatcagttcaatgttgcgcttgatcaagtct

SEQ ID NO: 95858 - DNA, 60 bp, Artificial
  Synthetic oligonucleotide
agcatactgagtctatctccgaatcagctcttttgtgatagtgctatacactatagcaga

SEQ ID NO: 95859 - DNA, 60 bp, Artificial
  Synthetic oligonucleotide
tactaatgtggttcaagggtacattgatgacaaccaaggaataaccaaggctgcagcttg

SEQ ID NO: 95860 - DNA, 60 bp, Artificial
  Synthetic oligonucleotide
ccattttgacactagtccaatcaaccaagcattaagtgagaggttcgggaacgaagacat

SEQ ID NO: 95861 - DNA, 59 bp, Artificial
  Synthetic oligonucleotide
gtattgtaacatgtatggatgttgtgtatgcaactagttctcatttaaaaggaataatt

SEQ ID NO: 95862 - DNA, 60 bp, Artificial
  Synthetic oligonucleotide
cagcacaggaagacaccctatcagcatggttgcactatcacctctcggtgctttggtggc

SEQ ID NO: 95863 - DNA, 60 bp, Artificial
  Synthetic oligonucleotide
ctctcatatctctcttatgttcccactctcaagtgatgaggaaccatgttgcccttgcgg

SEQ ID NO: 95864 - DNA, 60 bp, Artificial
  Synthetic oligonucleotide
gacgggataactctgaggctcagtggggaatttgatgcaacttatcaaaagaacatctca

SEQ ID NO: 95865 - DNA, 60 bp, Artificial
  Synthetic oligonucleotide
ggcgagggcctgccttactatggtggtaacatgcaagaagagtgcaactaatactgagag

SEQ ID NO: 95866 - DNA, 60 bp, Artificial
  Synthetic oligonucleotide
ggcaagggcctgcctcactatggtggtaacatgcaagaagagtgcaactaatactgagag

SEQ ID NO: 95867 - DNA, 60 bp, Artificial
  Synthetic oligonucleotide
ggtgttgcagctcccgaagatgtaaccctggtaacatccgacagcacatctcctgctcgg

SEQ ID NO: 95868 - DNA, 60 bp, Artificial
  Synthetic oligonucleotide
ctggcgctatgaaacaagtgctatatatgcacaaaggcttgatgagatttacggacttcc

SEQ ID NO: 95869 - DNA, 60 bp, Artificial
  Synthetic oligonucleotide
tatctatctgcatatgaagttggtgtcaggatcgcatcagtcgttcaaggtgacaatgag

SEQ ID NO: 95870 - DNA, 60 bp, Artificial
  Synthetic oligonucleotide
aaactccaacaaccagggtaagcggaagagtaagaaagaaatgcacattcagagacatac

SEQ ID NO: 95871 - DNA, 60 bp, Artificial
  Synthetic oligonucleotide
gaaattcaaacagctctctcagagtaccttacgtagggtcaacaacagaagaacgcagtg

SEQ ID NO: 95872 - DNA, 60 bp, Artificial
  Synthetic oligonucleotide
aatatcaagctatgatcacgactataactattcaactctggatcttgctaactaaggccg

SEQ ID NO: 95873 - DNA, 60 bp, Artificial
  Synthetic oligonucleotide
gccgaccagaaagcacatggttggggaatcctgaatgttattgctatatcctcagtactg

SEQ ID NO: 95874 - DNA, 65 bp, Artificial
  Synthetic oligonucleotide
cagtttcgtcagttcaataggctaatgcaaaacgataaatacaactcattaattgaaactggttc

SEQ ID NO: 95875 - DNA, 60 bp, Artificial
  Synthetic oligonucleotide
aacacaggccgcaacgagaccacacatcccctgagacaccacacccaagggtccatcaac

SEQ ID NO: 95876 - DNA, 60 bp, Artificial
  Synthetic oligonucleotide
ataaagcatggtcccttagtaaatacctatctactcgaatgaattccactggccctcgtg

SEQ ID NO: 95877 - DNA, 60 bp, Artificial
  Synthetic oligonucleotide
cactgacaaagggtatcttttaccaatcaactgtatctagccgaacaaatacaagagggc

SEQ ID NO: 95878 - DNA, 60 bp, Artificial
  Synthetic oligonucleotide
ccaggtaagatgccttcgattagaggcttggacgtttatcagaaagctcaagttctcagc

SEQ ID NO: 95879 - DNA, 60 bp, Artificial
  Synthetic oligonucleotide
atctactaacatcgctcacaggctaagagacaaaagcacccagatgaaatatgcagcagc

SEQ ID NO: 95880 - DNA, 60 bp, Artificial
  Synthetic oligonucleotide
ccgcttggggcactgtttccttggaggagagtcctagactttggtgctgttttcactgcc

SEQ ID NO: 95881 - DNA, 60 bp, Artificial
  Synthetic oligonucleotide
ccacctcatatgaaagtcccagtcaaagcttaccttcattacagtttcacttgctctttc

SEQ ID NO: 95882 - DNA, 60 bp, Artificial
  Synthetic oligonucleotide
ccatgtgacaggcttgatttgataacacatctgttaccaccctgcagcaacttcaaccct

SEQ ID NO: 95883 - DNA, 59 bp, Artificial
  Synthetic oligonucleotide
aagataattccttctgtaagagtagtaaatccgggttggggtgagaggaaaacatcagg

SEQ ID NO: 95884 - DNA, 60 bp, Artificial
  Synthetic oligonucleotide
ctgaactccatgaacagcacaaaggccgttctaagcgactatcggcattgggaagggtga

SEQ ID NO: 95885 - DNA, 60 bp, Artificial
  Synthetic oligonucleotide
ggatgcgttacggaacagcaatgaagcgattcaacatctgaaggatgcacaggggcatac

SEQ ID NO: 95886 - DNA, 55 bp, Artificial
  Synthetic oligonucleotide
tgaccagacagtgctcggaggatagtacccacgaccaaggccctggagttgaagg

SEQ ID NO: 95887 - DNA, 60 bp, Artificial
  Synthetic oligonucleotide
caccaaaatcgcaacttgatttagactcccttgccagtataggggtagttgatgcaggaa

SEQ ID NO: 95888 - DNA, 60 bp, Artificial
  Synthetic oligonucleotide
gaccccattgacaatgccacactttaagaaagagcccaactcaaactaagtagactcctc

SEQ ID NO: 95889 - DNA, 60 bp, Artificial
  Synthetic oligonucleotide
ctcaacctccccaaccaaagtccccaccactgatcgaacattggtactctccatctaccc

SEQ ID NO: 95890 - DNA, 60 bp, Artificial
  Synthetic oligonucleotide
ccaggtgcaagaccctgtgactctgctaatgactgcccagaagattgtttagttggtgga

SEQ ID NO: 95891 - DNA, 60 bp, Artificial
  Synthetic oligonucleotide
atcaagaccctttgcagagccagagtgggagtcgcgatacacttgatggaccaccttcaa

SEQ ID NO: 95892 - DNA, 60 bp, Artificial
  Synthetic oligonucleotide
gcccgcttgtagctgcaaagttggtccaggctatagagtatgcagaattacatcacaatc

SEQ ID NO: 95893 - DNA, 60 bp, Artificial
  Synthetic oligonucleotide
cccagttccgtacccagaatgcaattatgacttgttcaggatttcagatccaactttctc

SEQ ID NO: 95894 - DNA, 60 bp, Artificial
  Synthetic oligonucleotide
cagaaagcacagtagacaggtcaatggctcaagaattaggtattgatcccacatctgagg

SEQ ID NO: 95895 - DNA, 60 bp, Artificial
  Synthetic oligonucleotide
ttcggatcatgcaaaccaactggtgtctggggtttataatatttaaagaaggaaacaatg

SEQ ID NO: 95896 - DNA, 60 bp, Artificial
  Synthetic oligonucleotide
atggcccggctattggttagaaacataggtgatccagtgactgcatcgttggctgatgtc

SEQ ID NO: 95897 - DNA, 60 bp, Artificial
  Synthetic oligonucleotide
agtcccagaccccaggggatccattggacaaagcaacgctcagtttcaaccaccaaaacc

SEQ ID NO: 95898 - DNA, 60 bp, Artificial
  Synthetic oligonucleotide
ctaggtcagactgttgccatccattgggcattcgacattcattatagaagagccagtgga

SEQ ID NO: 95899 - DNA, 61 bp, Artificial
  Synthetic oligonucleotide
ctggactatggcaataattacaaaagaaatcaaactatggtggaaattacttgggtattcc

SEQ ID NO: 95900 - DNA, 60 bp, Artificial
  Synthetic oligonucleotide
cagttgtggttctcgttccatcgaccaaagatcataggctgagatggaagttaatcaggt

SEQ ID NO: 95901 - DNA, 60 bp, Artificial
  Synthetic oligonucleotide
ctgctgcaccatgatcctgcaggaggcaaagaagctctagtagggtctatacttgtgcta

SEQ ID NO: 95902 - DNA, 60 bp, Artificial
  Synthetic oligonucleotide
gcttggatgatcagggtgagataagatttgctgccagaggagacatactaaccagatata

SEQ ID NO: 95903 - DNA, 60 bp, Artificial
  Synthetic oligonucleotide
ccgggaactggctcgcttcctccttgacaggaaagtaatcctacctagggcagcaagtga

SEQ ID NO: 95904 - DNA, 60 bp, Artificial
  Synthetic oligonucleotide
ttactacgatggtgtttgtatgacacaaggtctgaaggccgttgcgagatgtgttttctg

SEQ ID NO: 95905 - DNA, 60 bp, Artificial
  Synthetic oligonucleotide
gtgctggctcttaatgcattccaaagtgatctcagtgtgataaggaatctgattgacctg

SEQ ID NO: 95906 - DNA, 60 bp, Artificial
  Synthetic oligonucleotide
gatttggaattcatcttgcagaatcacatcagtagctgccatcctacagccttctgtgag

SEQ ID NO: 95907 - DNA, 60 bp, Artificial
  Synthetic oligonucleotide
gaatcaggagctggcagaacagttgctgaaggagctgccacacgagaccacaagtatagc

SEQ ID NO: 95908 - DNA, 60 bp, Artificial
  Synthetic oligonucleotide
ctagtcacaaatcagatcaatggtcaaagatcttcggaatccaaactattactccaggga

SEQ ID NO: 95909 - DNA, 60 bp, Artificial
  Synthetic oligonucleotide
cattcagtgacacactagctggttatctaatcgttggtggtgttgatgggtgtcagctcc

SEQ ID NO: 95910 - DNA, 60 bp, Artificial
  Synthetic oligonucleotide
gctgcatgccgctgcgaaaagcctccaatggccatcgttcaaccagcaacatcaaccttg

SEQ ID NO: 95911 - DNA, 60 bp, Artificial
  Synthetic oligonucleotide
caatcacagttaaaactagattatcaatatgcagcactatatccagcaaccggaccaggg

SEQ ID NO: 95912 - DNA, 60 bp, Artificial
  Synthetic oligonucleotide
gcccacttaaatgctcgaagtgcctgctggacccagaataaggagccgcaatgccacatc

SEQ ID NO: 95913 - DNA, 60 bp, Artificial
  Synthetic oligonucleotide
gagccgctagctttaagttacctgcaattgcgagatgaatcgggaatcctagcaggagct

SEQ ID NO: 95914 - DNA, 60 bp, Artificial
  Synthetic oligonucleotide
gtgcataacaaactggaagagcttctgcgggatgaggtttgggtgttttatgccactgtc

SEQ ID NO: 95915 - DNA, 60 bp, Artificial
  Synthetic oligonucleotide
ggggaaagtagtgcaaaagggtttcatccaaaggagaatctcgtgagccggactgtgatc

SEQ ID NO: 95916 - DNA, 60 bp, Artificial
  Synthetic oligonucleotide
gtctaaacaaggcctcgcactctcaactctagaaggactgctgtccagtgtcatgattgc

SEQ ID NO: 95917 - DNA, 60 bp, Artificial
  Synthetic oligonucleotide
ggctcaggtatgggtcacagtagcaaaggccatgactgcatatgagacagcagatgagtc

SEQ ID NO: 95918 - DNA, 60 bp, Artificial
  Synthetic oligonucleotide
tgttcaatgaagatgtcaataattgccaatgatccaacaaagaaacgacaccgaacaaac

SEQ ID NO: 95919 - DNA, 60 bp, Artificial
  Synthetic oligonucleotide
ataggtatcaacggaatgctgttcaatacaaacaaagaaggaactcttgcattctacaca

SEQ ID NO: 95920 - DNA, 61 bp, Artificial
  Synthetic oligonucleotide
caaatcttaaaattatgactgagagaggaggaaagaaagaccaaaatgaatccaatgagag

SEQ ID NO: 95921 - DNA, 60 bp, Artificial
  Synthetic oligonucleotide
caccctcgtcttgaaggaagtacaatctatgtaggtgatccttactgccctccatcagat

SEQ ID NO: 95922 - DNA, 60 bp, Artificial
  Synthetic oligonucleotide
ggacacagtttatcctgcatctaatttactgtaccgtactaacgcatccaacgaatcacg

SEQ ID NO: 95923 - DNA, 60 bp, Artificial
  Synthetic oligonucleotide
gccgcaaccaaactggatatagaagtgagaagaacagtcaaagcgaaagagatggttgtt

SEQ ID NO: 95924 - DNA, 60 bp, Artificial
  Synthetic oligonucleotide
gaaccattaccactcaaagtcaatgaacagagaaaagcagtaccccacattagagttgcc

SEQ ID NO: 95925 - DNA, 60 bp, Artificial
  Synthetic oligonucleotide
ctatgttgcagaacggcaggaacaattcaacaattgaagaccttgtccacacatttgggt

SEQ ID NO: 95926 - DNA, 60 bp, Artificial
  Synthetic oligonucleotide
gggcttcatcagtagagattacaagagtggatgcaattttccaaccttctttacctggcg

SEQ ID NO: 95927 - DNA, 60 bp, Artificial
  Synthetic oligonucleotide
gcaggcagggctggtattgagcggtgacacagtggatcagattgggtcaatcatgcggtc

SEQ ID NO: 95928 - DNA, 60 bp, Artificial
  Synthetic oligonucleotide
ccctcttcccagccatatcatgacgaaaggggcatttctaggtggagcagacgtcaaaga

SEQ ID NO: 95929 - DNA, 60 bp, Artificial
  Synthetic oligonucleotide
catctcggattgatcaaaagaaaagtaggcagaatgtactctgttgaatactgtaaacag

SEQ ID NO: 95930 - DNA, 60 bp, Artificial
  Synthetic oligonucleotide
ggcaatagatgaagagccagaacaattcgaacatagatcagatcaagaacgagatggaga

SEQ ID NO: 95931 - DNA, 60 bp, Artificial
  Synthetic oligonucleotide
gggagagattgaattacttaagagattaacaaccatatcaatatcaggagttccacggta

SEQ ID NO: 95932 - DNA, 60 bp, Artificial
  Synthetic oligonucleotide
cagatagggataataactgtaaactcagacttggtacctgacttaaatcctaggatctct

SEQ ID NO: 95933 - DNA, 60 bp, Artificial
  Synthetic oligonucleotide
ggaattgagactagaatggcagctttgactctatccactctcagaccagacatcaataga

SEQ ID NO: 95934 - DNA, 60 bp, Artificial
  Synthetic oligonucleotide
gggaccacgcgctcctttcatctgtatcctcagagatcccatacatggtgagttcgcacc

SEQ ID NO: 95935 - DNA, 60 bp, Artificial
  Synthetic oligonucleotide
cggtagaccttgccatagcattgcgacaaaagatgtggattcatttatcaggaggaagga

SEQ ID NO: 95936 - DNA, 60 bp, Artificial
  Synthetic oligonucleotide
gcgtgagggtgactgcaatggttcaaggagacaatcaagctatagctgtaaccacaagag

SEQ ID NO: 95937 - DNA, 60 bp, Artificial
  Synthetic oligonucleotide
gctggaatgttagatacgacaaaatcactaattcgggttggcataaatagaggaggactg

SEQ ID NO: 95938 - DNA, 60 bp, Artificial
  Synthetic oligonucleotide
gggacacaaacaaagcagtgcagtcagttcagagctccatagggaatctaatagtagcaa

SEQ ID NO: 95939 - DNA, 60 bp, Artificial
  Synthetic oligonucleotide
cagtcaggagtgaacacaaggcttcttacaattcagagtcatgtccagaattatatacca

SEQ ID NO: 95940 - DNA, 60 bp, Artificial
  Synthetic oligonucleotide
ggatactgcaactcagatgaaattctccagtacatcattgatcagagtcagcagatttat

SEQ ID NO: 95941 - DNA, 60 bp, Artificial
  Synthetic oligonucleotide
caagaggttctgggattgtggagttttaaaccctatttatggtcctaatattgctagtca

SEQ ID NO: 95942 - DNA, 60 bp, Artificial
  Synthetic oligonucleotide
gcactatacccatctgttggaccagggatatactacaaaggcaaaataatatttctcggg

SEQ ID NO: 95943 - DNA, 60 bp, Artificial
  Synthetic oligonucleotide
gcgaggctaggttgtgaagcagcaggacttcaattaggaattgcattaacgcagcattac

SEQ ID NO: 95944 - DNA, 60 bp, Artificial
  Synthetic oligonucleotide
ctcctgaattagtactgatgtattgtgacgtagtcgaaggccgatggaatataagtgcat

SEQ ID NO: 95945 - DNA, 60 bp, Artificial
  Synthetic oligonucleotide
gtcaaatgactgatggattaagagatctatggattaacgtgctatcaaaattagcctcaa

SEQ ID NO: 95946 - DNA, 60 bp, Artificial
  Synthetic oligonucleotide
gggttcctggtgtccttattatcaatggcttatgccaatccagagctctacctaacaaca

SEQ ID NO: 95947 - DNA, 60 bp, Artificial
  Synthetic oligonucleotide
ggcaggattagtcataggggtttcaatggacaacgacacaaaattaacacagatacaaaa

SEQ ID NO: 95948 - DNA, 60 bp, Artificial
  Synthetic oligonucleotide
gaggggtaattggaaccattgctctgggagtagcaacctcagcacaaatcacagcggcgg

SEQ ID NO: 95949 - DNA, 60 bp, Artificial
  Synthetic oligonucleotide
caaccaccaacaccgacacaaaggggcaaacagaaatacagacagaatcatcagaaacac

SEQ ID NO: 95950 - DNA, 60 bp, Artificial
  Synthetic oligonucleotide
gagaggcatggtggacagtggcctcctgtgacattacctgatcatgcacacgaattcatc

SEQ ID NO: 95951 - DNA, 60 bp, Artificial
  Synthetic oligonucleotide
gacaaatggaaaggaaaggaaggatacagaagagagcaatcgatttacagagagggcaat

SEQ ID NO: 95952 - DNA, 60 bp, Artificial
  Synthetic oligonucleotide
gcatgtaggtgtattggtcaacagtcccaaagggatgaagatatcacaaaacttcgaaac

SEQ ID NO: 95953 - DNA, 60 bp, Artificial
  Synthetic oligonucleotide
gagaggacctgggagaagaagcagctcagatagtagagctgagactgtggtctctggagg

SEQ ID NO: 95954 - DNA, 60 bp, Artificial
  Synthetic oligonucleotide
gattcttgggaagaggaatcaagagataaatcaactaatatctcctcggccctcaacatc

SEQ ID NO: 95955 - DNA, 60 bp, Artificial
  Synthetic oligonucleotide
gagaagactagtattaagttggatttcattatcattatcgactcgattacttacaggtcg

SEQ ID NO: 95956 - DNA, 66 bp, Artificial
  Synthetic oligonucleotide
gttgtttgaaagctcttgagttatcacaaattttaatgaaggaagttaataaagacaaggacaggc

SEQ ID NO: 95957 - DNA, 60 bp, Artificial
  Synthetic oligonucleotide
gcgtgctcgggaaatggacactgaatctaacaatggcactgtatctgacatactctatcc

SEQ ID NO: 95958 - DNA, 60 bp, Artificial
  Synthetic oligonucleotide
cgagagtgaacccagtcataacttactcaacagcaactgaaagagtaaacgagctggcca

SEQ ID NO: 95959 - DNA, 53 bp, Artificial
  Synthetic oligonucleotide
atgttacaccactggctcaataataagtcaagaccctgacaagatcctgacct

SEQ ID NO: 95960 - DNA, 60 bp, Artificial
  Synthetic oligonucleotide
cgccagagactttatgagcacatcattctggagacttggagtagagtatgctcgggctca

SEQ ID NO: 95961 - DNA, 60 bp, Artificial
  Synthetic oligonucleotide
atttgccagggactttatgagcacatcattctggagacttggagtagagtatgcccaggc

SEQ ID NO: 95962 - DNA, 60 bp, Artificial
  Synthetic oligonucleotide
cgtgaacaagcttcacgaaggctccacatacacagctgctgttcaatacaatgtcctaga

SEQ ID NO: 95963 - DNA, 60 bp, Artificial
  Synthetic oligonucleotide
aagctaatgtcaagtaatgttcaaatagtcaggcaacagagttattccattatgtcagtg

SEQ ID NO: 95964 - DNA, 60 bp, Artificial
  Synthetic oligonucleotide
tgcactgctatccacaaataaagcagtagttagtctatccaatggagttagtgtccttac

SEQ ID NO: 95965 - DNA, 60 bp, Artificial
  Synthetic oligonucleotide
gttgatgagcaaagtggactgtatagatatcatatgggtggtatagaaggttggtgtcaa

SEQ ID NO: 95966 - DNA, 60 bp, Artificial
  Synthetic oligonucleotide
agccaaccaagacaacaatccaccacagaaccagccctgaagccaaactgcaacccaaaa

SEQ ID NO: 95967 - DNA, 60 bp, Artificial
  Synthetic oligonucleotide
gttctataatcactgatcttagcaagttcaatcaggcattcaggtatgaaacgtcatgca

SEQ ID NO: 95968 - DNA, 60 bp, Artificial
  Synthetic oligonucleotide
gtaggtaggatgtttgcaatgcagccaggcatgttcagacaggttcaaatcatggctgag

SEQ ID NO: 95969 - DNA, 60 bp, Artificial
  Synthetic oligonucleotide
ggtgataggtcaggcctcactgcagtcattaggagagccaacaatgtactaaggaatgaa

SEQ ID NO: 95970 - DNA, 60 bp, Artificial
  Synthetic oligonucleotide
atggctcttagcaaggtcaaactaaatgacactttcaacaaggatcaactgttgtcaacc

SEQ ID NO: 95971 - DNA, 60 bp, Artificial
  Synthetic oligonucleotide
catgccagcgtacaagcagaaatggaacaggttgtagaagtctatgaatatgcacaaaag

SEQ ID NO: 95972 - DNA, 60 bp, Artificial
  Synthetic oligonucleotide
gacactaacacaacgctatctaacatagtaagagataatatactctcagtcataagtgac

SEQ ID NO: 95973 - DNA, 65 bp, Artificial
  Synthetic oligonucleotide
ctggtgctaataatcttaataacctaagtgaactctactttctctttagaatatttggacatccc

SEQ ID NO: 95974 - DNA, 60 bp, Artificial
  Synthetic oligonucleotide
tgcaccactgataataaagaagggtcaaacatctgcttaactaggacagatcgtgggtgg

SEQ ID NO: 95975 - DNA, 60 bp, Artificial
  Synthetic oligonucleotide
cctgcatctctcacaatatgggttcctatgttccaatcatccatctctgctgatttgctt

SEQ ID NO: 95976 - DNA, 60 bp, Artificial
  Synthetic oligonucleotide
ctagcccaaatgcccagcaaatttaccataagtgcaaatgtatcattggatgaacgaagc

SEQ ID NO: 95977 - DNA, 60 bp, Artificial
  Synthetic oligonucleotide
gctcacaactgtgaaagatctcaccatgaaaacattcaatcctacccatgagatcattgc

SEQ ID NO: 95978 - DNA, 60 bp, Artificial
  Synthetic oligonucleotide
ccttatgctgggttggtattagttatcactgtaactgacaataaaggggcattcaagtac

SEQ ID NO: 95979 - DNA, 60 bp, Artificial
  Synthetic oligonucleotide
aatgccaacaaagattatgtggggcaaataaaatctgcatccaatcaagtacagcataca

SEQ ID NO: 95980 - DNA, 60 bp, Artificial
  Synthetic oligonucleotide
ccattaagcctatagaggactgattctcacacaacttatcttaacacaacagaagactcc

SEQ ID NO: 95981 - DNA, 60 bp, Artificial
  Synthetic oligonucleotide
gggcaaatatggagacatacgtgaacaaactccatgaaggatcaacttacacagctgctg

SEQ ID NO: 95982 - DNA, 60 bp, Artificial
  Synthetic oligonucleotide
ggggcaaataaggatggcgacaacagccatgaggatgatcatcagcattatcttcatctc

SEQ ID NO: 95983 - DNA, 64 bp, Artificial
  Synthetic oligonucleotide
gtggtagatggaaacattttatcatattctatagcagggcgaaatgaagtttatagtaacaagc

SEQ ID NO: 95984 - DNA, 60 bp, Artificial
  Synthetic oligonucleotide
gctgaaaggttctgaggtttatttagtccttacagttggtccatctaatatatttccatc

SEQ ID NO: 95985 - DNA, 60 bp, Artificial
  Synthetic oligonucleotide
aactcacacatcaattcaaagcaccacactgtcccaactaccaaacacagacaccactag

SEQ ID NO: 95986 - DNA, 61 bp, Artificial
  Synthetic oligonucleotide
gtgtacaatctctcttttcttggttgcatttaactattccttttgccactgttatatgtac

SEQ ID NO: 95987 - DNA, 60 bp, Artificial
  Synthetic oligonucleotide
gtggcagcaatactgaacaaattatgtgacttcaacgatcatcatacaaatagtctagac

SEQ ID NO: 95988 - DNA, 60 bp, Artificial
  Synthetic oligonucleotide
gctagtataggtcataaacttaaaggtacggagacatatatatcccgtgatatgcaattt

SEQ ID NO: 95989 - DNA, 60 bp, Artificial
  Synthetic oligonucleotide
gtccaaacggctttgaccaccttagcaatgataaccttgacatcactcgtcataacagcc

SEQ ID NO: 95990 - DNA, 60 bp, Artificial
  Synthetic oligonucleotide
cactcaactattaatcaacagccacttcttcatagctagcaatatataaggacaaaatgg

SEQ ID NO: 95991 - DNA, 60 bp, Artificial
  Synthetic oligonucleotide
cactctgccaaatcgggccggagagagcaccaagcagagcccctacaatcaccctcaaaa

SEQ ID NO: 95992 - DNA, 60 bp, Artificial
  Synthetic oligonucleotide
actattagccgagattaacaatgatgacataaagagattgaggaacaaggaagtgccaac

SEQ ID NO: 95993 - DNA, 60 bp, Artificial
  Synthetic oligonucleotide
gatggggcaaatatgtcacgaagaaatccctgcaaatatgagattaggggacattgctta

SEQ ID NO: 95994 - DNA, 60 bp, Artificial
  Synthetic oligonucleotide
ggacaggaacaacgataccctgtcagaaataagtggtgcagcagagttggatagaacaga

SEQ ID NO: 95995 - DNA, 60 bp, Artificial
  Synthetic oligonucleotide
ctgttttactgtaagaccaagagtactcctatcatgttagggaaggatcagctcagtggt

SEQ ID NO: 95996 - DNA, 60 bp, Artificial
  Synthetic oligonucleotide
aagagagtcctataacatctaccaatcaaaatatcaaccaaccaagtgagatcaatgaca

SEQ ID NO: 95997 - DNA, 66 bp, Artificial
  Synthetic oligonucleotide
cttcaatgcctatattacaaaatggaggatatatatgggaattgatggagttaacacattgtttcc

SEQ ID NO: 95998 - DNA, 60 bp, Artificial
  Synthetic oligonucleotide
gggtcatcaattacagtgtattggatctgactacagaggaattagaggcaatcaagaacc

SEQ ID NO: 95999 - DNA, 60 bp, Artificial
  Synthetic oligonucleotide
cagttccccaaccagccatgagcaccccaaatcccgaaaccactgctcagagattgatag

SEQ ID NO: 96000 - DNA, 60 bp, Artificial
  Synthetic oligonucleotide
tggctagtgcaggaccaacagctgctcgtgacggtataagagatgccatggtagggctcc

SEQ ID NO: 96001 - DNA, 60 bp, Artificial
  Synthetic oligonucleotide
gaccaacgataggttagaagcaatggccaggcttagggatgaagaaagtgaaaagatgac

SEQ ID NO: 96002 - DNA, 60 bp, Artificial
  Synthetic oligonucleotide
ggcattgctcaatcctcaactagaggaggtagtagggtagaaggaatctttgcagggtta

SEQ ID NO: 96003 - DNA, 60 bp, Artificial
  Synthetic oligonucleotide
tcacctggataagcaattgtttaaataccttgaataaaagccttggattgagatgtgagt

SEQ ID NO: 96004 - DNA, 60 bp, Artificial
  Synthetic oligonucleotide
ccatgagtgtatagtacgcaaactcgatgaacgacaggccacatttacattccttgtcaa

SEQ ID NO: 96005 - DNA, 60 bp, Artificial
  Synthetic oligonucleotide
gaggggtcccactaaaccatgggtaggatcatcaacccaagaaaagaaaacaatgcctgt

SEQ ID NO: 96006 - DNA, 60 bp, Artificial
  Synthetic oligonucleotide
cctcaatacctgagtgtaaactacctgcatcgtcttacagttagtagtagaccatgtgag

SEQ ID NO: 96007 - DNA, 65 bp, Artificial
  Synthetic oligonucleotide
cagaattgtatcagttttggtcttagcttaatgtcagttgtagaacaatttacaaatgtatgccc

SEQ ID NO: 96008 - DNA, 60 bp, Artificial
  Synthetic oligonucleotide
gtgatgctgagttacctgatttaactaactggagtagaattgtttcagaatggtataagc

SEQ ID NO: 96009 - DNA, 60 bp, Artificial
  Synthetic oligonucleotide
gatactgccctaacactatatatgaatttgccaatgttatttggtggtggagacccaaat

SEQ ID NO: 96010 - DNA, 60 bp, Artificial
  Synthetic oligonucleotide
ctactcttcttggtctgaattagagccctaaatcaatagccaacaccagatggactaagc

SEQ ID NO: 96011 - DNA, 55 bp, Artificial
  Synthetic oligonucleotide
gagccgacttacccgcatggattaagagtggtctatgaaagtcttcctttctaca

SEQ ID NO: 96012 - DNA, 60 bp, Artificial
  Synthetic oligonucleotide
gctgccctaataggggatgacgacatcaacagttttataacagagttcctccttgtagag

SEQ ID NO: 96013 - DNA, 60 bp, Artificial
  Synthetic oligonucleotide
tgccctaataggagatgatgacatcaacagttttataacagagttcctccttgtagagcc

SEQ ID NO: 96014 - DNA, 58 bp, Artificial
  Synthetic oligonucleotide
ttttgtgcaagtgttacaccactggctcaataataagtcaggatcctgataagatcct

SEQ ID NO: 96015 - DNA, 60 bp, Artificial
  Synthetic oligonucleotide
acctcggtaatgcagtgacaaaactggagaaagccaaggatctattagattcatccgacc

SEQ ID NO: 96016 - DNA, 60 bp, Artificial
  Synthetic oligonucleotide
gcgggtcccaagttcatggccttaccaccttaagaaaagagaagctgcacgcgtgacaag

SEQ ID NO: 96017 - DNA, 60 bp, Artificial
  Synthetic oligonucleotide
agaggactgatatgaagctcgcatttgttaaatcacccagtcgatccctgcggtcagctg

SEQ ID NO: 96018 - DNA, 60 bp, Artificial
  Synthetic oligonucleotide
aaaagtcaccgtggggaccgtcagggccaaatgcatctgcggagaatgccctcgcgtctg

SEQ ID NO: 96019 - DNA, 60 bp, Artificial
  Synthetic oligonucleotide
ggggaacaagccttcacataagaagtacaggcaaaatgagcaagacactccacgcacaat

SEQ ID NO: 96020 - DNA, 60 bp, Artificial
  Synthetic oligonucleotide
taccctctgatggatatcaatgaagacctcaaccggttgctgtggagatccagatgcaag

SEQ ID NO: 96021 - DNA, 60 bp, Artificial
  Synthetic oligonucleotide
cccactgatggatatcaatgaagacctcaaccggttgctgtggagatccaaatgcaggat

SEQ ID NO: 96022 - DNA, 60 bp, Artificial
  Synthetic oligonucleotide
tttatgatcacagcggtgaaaaggttgagggagtcgaagatgctgactctatcctggttc

SEQ ID NO: 96023 - DNA, 60 bp, Artificial
  Synthetic oligonucleotide
ccggaagggttcaatatgatactggcaaccatcttagcccagatctggattttactggct

SEQ ID NO: 96024 - DNA, 60 bp, Artificial
  Synthetic oligonucleotide
gatcacagcggtgaaaaggttgagggagtcgaagatgctgactctatcctggttcaatca

SEQ ID NO: 96025 - DNA, 60 bp, Artificial
  Synthetic oligonucleotide
ttatgatcacagcggtgaaaaggttgagggagtcgaagatgctgactctatcctggttca

SEQ ID NO: 96026 - DNA, 60 bp, Artificial
  Synthetic oligonucleotide
ccaggatccagaagggttcaatatgatactggcaaccatcttagcccagatctggatctt

SEQ ID NO: 96027 - DNA, 60 bp, Artificial
  Synthetic oligonucleotide
ccaccccaagatttacaggaagttctggcatagtgggattatagagccaatccatggtcc

SEQ ID NO: 96028 - DNA, 60 bp, Artificial
  Synthetic oligonucleotide
cacagcggtgaaaaggttgagggagtcgaagatgctgactctatcctggttcaatcaggc

SEQ ID NO: 96029 - DNA, 60 bp, Artificial
  Synthetic oligonucleotide
atcacagcggtgaaaaggttgagggagtcgaagatgctgactctgtcctggttcaatcag

SEQ ID NO: 96030 - DNA, 60 bp, Artificial
  Synthetic oligonucleotide
catcgacctttagggaaatatcagatgggagaactcctgacctcattccttgcaaggatg

SEQ ID NO: 96031 - DNA, 60 bp, Artificial
  Synthetic oligonucleotide
tgatgatatcaacagttttataacagagttcctccttgtagagcctagactgtttaccgt

SEQ ID NO: 96032 - DNA, 60 bp, Artificial
  Synthetic oligonucleotide
ggagatgacgacatcaacagttttataacagagttcctccttgtagagcctagactgttt

SEQ ID NO: 96033 - DNA, 60 bp, Artificial
  Synthetic oligonucleotide
aggagatgatgacataaacagttttataacagagttcctccttgtagagcctagactgtt

SEQ ID NO: 96034 - DNA, 60 bp, Artificial
  Synthetic oligonucleotide
atggagactttgcccctggaaactatccagcactgtggagctacgcaatgggcgttgctg

SEQ ID NO: 96035 - DNA, 60 bp, Artificial
  Synthetic oligonucleotide
gggagcagtcaaattatttggggcaagacagagcacatctgctgatatcactaatatcga

SEQ ID NO: 96036 - DNA, 60 bp, Artificial
  Synthetic oligonucleotide
gaagtgagagcatcaataagtctggcggaggagcaattatacctggtcaaagaagtaccg

SEQ ID NO: 96037 - DNA, 60 bp, Artificial
  Synthetic oligonucleotide
ctacagctagatgttttgtcagaaatataggtgatccagcagttgcagctctagcagact

SEQ ID NO: 96038 - DNA, 60 bp, Artificial
  Synthetic oligonucleotide
ttttagtatcactccttgcaatggcctacagtagtccggagttatatctcactacaaacg

SEQ ID NO: 96039 - DNA, 60 bp, Artificial
  Synthetic oligonucleotide
cctatgatcaacaagaacccattgttccaagggcaaagagagaatgcggatctagaggca

SEQ ID NO: 96040 - DNA, 60 bp, Artificial
  Synthetic oligonucleotide
caatcaatttgcatattcactttacgggttaaacgtcagagggagggatgaaatatgggg

SEQ ID NO: 96041 - DNA, 60 bp, Artificial
  Synthetic oligonucleotide
atgtgtattttggtcagagactcttgtagatgaaaacaggtcagcatgctcaaacattgc

SEQ ID NO: 96042 - DNA, 60 bp, Artificial
  Synthetic oligonucleotide
ccttactgtccagtacctgatagaatgcacaaagaactccaagatcatgatgataccgga

SEQ ID NO: 96043 - DNA, 60 bp, Artificial
  Synthetic oligonucleotide
tggtgtcagagtgtcagcaatggtacaaggagacaatcaagctatagcagtgacatccag

SEQ ID NO: 96044 - DNA, 60 bp, Artificial
  Synthetic oligonucleotide
tcaacatgctaagactcaagaatgtacaactagaggcagcatacactactacatcatgta

SEQ ID NO: 96045 - DNA, 60 bp, Artificial
  Synthetic oligonucleotide
ccgaactcaatatcagtgaatctgctggttacacttagggcaggagtatcaacggaacaa

SEQ ID NO: 96046 - DNA, 60 bp, Artificial
  Synthetic oligonucleotide
atacatggtagattcgatccatgctcctctactaccatggtccagccgactgagacaagg

SEQ ID NO: 96047 - DNA, 60 bp, Artificial
  Synthetic oligonucleotide
cttgatgtgctactattgggattctttgaaacacctaagcaaggacctctatctggcagc

SEQ ID NO: 96048 - DNA, 60 bp, Artificial
  Synthetic oligonucleotide
catacaggttccccagattctcacacgaagaaaatgggacagtagaacctctccctctca

SEQ ID NO: 96049 - DNA, 60 bp, Artificial
  Synthetic oligonucleotide
ccagcaggaaggacacacatctggctactgattgcaacaacaatgcatacagtattgtcc

SEQ ID NO: 96050 - DNA, 60 bp, Artificial
  Synthetic oligonucleotide
gctggctccatggtatcatcgacaacccaaaagaaaacaagccatcatgcaaagccgacg

SEQ ID NO: 96051 - DNA, 60 bp, Artificial
  Synthetic oligonucleotide
cccatgaccattaaatgggcgcctcatgaagtcctgtctcgaccaggaaaccaagactgc

SEQ ID NO: 96052 - DNA, 60 bp, Artificial
  Synthetic oligonucleotide
aaatcagaaatggaggtttatcgccccggcagatcaaaatcagatcgctaggcaaaatcc

SEQ ID NO: 96053 - DNA, 60 bp, Artificial
  Synthetic oligonucleotide
ggatgcaaaagaataagtcggggaaccatttagatgtctcaaattctcacaattttcttg

SEQ ID NO: 96054 - DNA, 60 bp, Artificial
  Synthetic oligonucleotide
ccgaaggagaggcaccacgaaaacaagaatcactctcagatgtcatcggactccttgacg

SEQ ID NO: 96055 - DNA, 60 bp, Artificial
  Synthetic oligonucleotide
ctcaaccagacaccaccagcatacacgaaaccaaccttcacagtggatacctcagcatcc

SEQ ID NO: 96056 - DNA, 60 bp, Artificial
  Synthetic oligonucleotide
cagggcctctaggcgaggaactagtccaaaccctctacctgagaatatgggcaatgaaag

SEQ ID NO: 96057 - DNA, 60 bp, Artificial
  Synthetic oligonucleotide
gcatctgccacaaatttcctagaggaatccaagacagagctcatgaaggcaagggcaatc

SEQ ID NO: 96058 - DNA, 60 bp, Artificial
  Synthetic oligonucleotide
gtggcactggtagggaagaaattgaataatgtcacgagtttatgtcaaagagttaaggtt

SEQ ID NO: 96059 - DNA, 60 bp, Artificial
  Synthetic oligonucleotide
cttaagcaagccggcaaaagcagcaataagaatcgcaatggtttacacttgggcttatgg

SEQ ID NO: 96060 - DNA, 60 bp, Artificial
  Synthetic oligonucleotide
gagcagtccaggtattagcagaaacactactagcaaaaggagtaggtgagttattcagtg

SEQ ID NO: 96061 - DNA, 60 bp, Artificial
  Synthetic oligonucleotide
ggcatgtcgcaatcccaaattacataatcaataaggcatcatccttaggaggtgcagatg

SEQ ID NO: 96062 - DNA, 60 bp, Artificial
  Synthetic oligonucleotide
gatttgacaatttatatgaaggataaggctctatcacctaggaaagcagcatgggattca

SEQ ID NO: 96063 - DNA, 60 bp, Artificial
  Synthetic oligonucleotide
agaagctatagccgggatgcttgatacaacgaaatctctagtaagagctagtgtcaggag

SEQ ID NO: 96064 - DNA, 60 bp, Artificial
  Synthetic oligonucleotide
ggtttcatctaacttatggaagaccaatccacggtttagaaactccagacccgttagaat

SEQ ID NO: 96065 - DNA, 60 bp, Artificial
  Synthetic oligonucleotide
tcacttgctttaatacagttggatgaccctgtaactaatttaaaaggagctttcatgaga

SEQ ID NO: 96066 - DNA, 60 bp, Artificial
  Synthetic oligonucleotide
gcaatcttctgtgcaattataataaacggatatagagaaagacacggtggtcaatggccg

SEQ ID NO: 96067 - DNA, 60 bp, Artificial
  Synthetic oligonucleotide
catgattggatagttagagaattaaaggaagggagtgcatcgtcaggtatgctaagacct

SEQ ID NO: 96068 - DNA, 60 bp, Artificial
  Synthetic oligonucleotide
cccagtgatactacaaggtcaccatcagtcttcacaaaagggaaagacaataaggtcaaa

SEQ ID NO: 96069 - DNA, 60 bp, Artificial
  Synthetic oligonucleotide
gggaagaagaccaagttgagggatttccagaagaggtacgaagaagtacacccttatctg

SEQ ID NO: 96070 - DNA, 60 bp, Artificial
  Synthetic oligonucleotide
ccagagcttgaagatgccgttctacaaaggaacaaaagacggccgacgaccatcaagcgt

SEQ ID NO: 96071 - DNA, 57 bp, Artificial
  Synthetic oligonucleotide
cagcccaaaagttccaccgtcaaagaacgaagagtcagcagccactccaaagaacaa

SEQ ID NO: 96072 - DNA, 60 bp, Artificial
  Synthetic oligonucleotide
ccagtgaatcaagatcgctcaagaggagttacattcttgacctataccaattgcggttta

SEQ ID NO: 96073 - DNA, 60 bp, Artificial
  Synthetic oligonucleotide
gtcgaggacactgctgatcgggacaacaagaactggacaaatgacagcaatgaaagatgg

SEQ ID NO: 96074 - DNA, 60 bp, Artificial
  Synthetic oligonucleotide
gactacggcattgaaactagggatcaagctcacccaacactactctgaattagcaacagc

SEQ ID NO: 96075 - DNA, 60 bp, Artificial
  Synthetic oligonucleotide
cggtggcttaacaactccgctccaaggcgacactaagtgtgtgataaacagatgtaccaa

SEQ ID NO: 96076 - DNA, 60 bp, Artificial
  Synthetic oligonucleotide
ggtgcagtgatgaggtcacaacaaagcttagtatctcttatggtagaaactctggtgact

SEQ ID NO: 96077 - DNA, 60 bp, Artificial
  Synthetic oligonucleotide
gggcagcttcagtagaaatcacaagtgtcgatgctgtgttccaacctgcaattccgaaag

SEQ ID NO: 96078 - DNA, 60 bp, Artificial
  Synthetic oligonucleotide
gtaggattaactctaccttttgatgggcgatatttatcacaccaattgagacttttcggg

SEQ ID NO: 96079 - DNA, 60 bp, Artificial
  Synthetic oligonucleotide
ctcaaggatgtgcagatatagggaagtcatatcaggttttacaattaggttacatatcct

SEQ ID NO: 96080 - DNA, 60 bp, Artificial
  Synthetic oligonucleotide
cagcggctgcagggataggaggaatttaacaggatacttggacaatagaagccagatcaa

SEQ ID NO: 96081 - DNA, 60 bp, Artificial
  Synthetic oligonucleotide
ctgcgggcattgcattagctgaagcacgagaagccaggaaggacatagcactaataaaag

SEQ ID NO: 96082 - DNA, 60 bp, Artificial
  Synthetic oligonucleotide
caagattgcacgaaggctggccgacagaaaacagagactaagccaggcaaacaataaacg

SEQ ID NO: 96083 - DNA, 60 bp, Artificial
  Synthetic oligonucleotide
ggaattggctcagatatgcgaaaacaccattgctattcaccatgcagacggcatatctcc

SEQ ID NO: 96084 - DNA, 60 bp, Artificial
  Synthetic oligonucleotide
tctctctacagacggtaaaaagagaacatcacttaaacagtgcacaaggcagatcttaga

SEQ ID NO: 96085 - DNA, 60 bp, Artificial
  Synthetic oligonucleotide
ggctcgagtctgcacaatcttgcgctcaatgtcactattgatgtggaggtagacccgaag

SEQ ID NO: 96086 - DNA, 53 bp, Artificial
  Synthetic oligonucleotide
tggcgtacatacagaggataatgaggcagaagagaaggcgttggctgaatttt

SEQ ID NO: 96087 - DNA, 53 bp, Artificial
  Synthetic oligonucleotide
tggcgtacatacagaggataatgaggcagaagagaaggcgctggctgaatttt

SEQ ID NO: 96088 - DNA, 53 bp, Artificial
  Synthetic oligonucleotide
tggcgtgcatacagaggataatgaggcagaagagaaggcgttggctgaatttt

SEQ ID NO: 96089 - DNA, 52 bp, Artificial
  Synthetic oligonucleotide
acgggtagaattggagtgccccaattgtgccaagatggactcatctaggaca

SEQ ID NO: 96090 - DNA, 60 bp, Artificial
  Synthetic oligonucleotide
ggaagtcatttgccggtgtaaggtttggctgcttcatgcccctgagtttagacagtgacc

SEQ ID NO: 96091 - DNA, 60 bp, Artificial
  Synthetic oligonucleotide
gtacacagtgctctttgctacaacaagagaaatcccgaaaataaggggcctatcggcaga

SEQ ID NO: 96092 - DNA, 60 bp, Artificial
  Synthetic oligonucleotide
ttacagtgaggaggactgttcgagcaggagagatgatagtatacatggtggattcgatcg

SEQ ID NO: 96093 - DNA, 60 bp, Artificial
  Synthetic oligonucleotide
ccatgttgcccttgcagggaaacagaatgaggccacactggctgttcttgagatcgatgg

SEQ ID NO: 96094 - DNA, 60 bp, Artificial
  Synthetic oligonucleotide
ccgatgcagtgtacctgcataaaatagaccttggcccaccaatatcactggagaagctgg

SEQ ID NO: 96095 - DNA, 60 bp, Artificial
  Synthetic oligonucleotide
ggaagcgacagatctagacatagtcgtcagacgcacagcaggattgaacgaaaagctggt

SEQ ID NO: 96096 - DNA, 60 bp, Artificial
  Synthetic oligonucleotide
gcgggtgccaagttcatggccttaccaccttaagaaaagagaagctgctcgcgtgacgag

SEQ ID NO: 96097 - DNA, 60 bp, Artificial
  Synthetic oligonucleotide
atggtaggggacccagacatcagcggtcctaaattaaccggggctctcatcagcatctta

SEQ ID NO: 96098 - DNA, 60 bp, Artificial
  Synthetic oligonucleotide
gtcatttgccggtgtaaggtttggctgcttcatgcccttgagtttagacagtgacctcac

SEQ ID NO: 96099 - DNA, 60 bp, Artificial
  Synthetic oligonucleotide
caacatacagtgacggccgattgattccccaagttagggtaattgacccaggactcgggg

SEQ ID NO: 96100 - DNA, 60 bp, Artificial
  Synthetic oligonucleotide
gcagcctgtagcaacatagccacaaccatagccaagagcatagagagagggtttgacagg

SEQ ID NO: 96101 - DNA, 60 bp, Artificial
  Synthetic oligonucleotide
gcctaacttgcagcatgaacaagtcgctgatatgcacataagcaattttaggccgcccta

SEQ ID NO: 96102 - DNA, 60 bp, Artificial
  Synthetic oligonucleotide
gccctcaaatactgtactgcacctccatgtagaaacagattgctgcgtgatccctatgat

SEQ ID NO: 96103 - DNA, 60 bp, Artificial
  Synthetic oligonucleotide
gcactcagggtcccctacatcggatcgacaacagatgagaggactgatatgaagctcgca

SEQ ID NO: 96104 - DNA, 60 bp, Artificial
  Synthetic oligonucleotide
cctatacatggtgagttcgcaccaggcaactatcctgccatatggagctatgcaatgggg

SEQ ID NO: 96105 - DNA, 60 bp, Artificial
  Synthetic oligonucleotide
ctggctcgagcctgtacaatcttgcgctcaatgtcactattgatgtggaggtggctccga

SEQ ID NO: 96106 - DNA, 60 bp, Artificial
  Synthetic oligonucleotide
ctgaattttatcccggcgcctactacaggatcaggctgcactcggataccctcattcgac

SEQ ID NO: 96107 - DNA, 60 bp, Artificial
  Synthetic oligonucleotide
gcacatcattctggagacttggagtagagtatgctcaggctcagggaagtagcatcaatg

SEQ ID NO: 96108 - DNA, 60 bp, Artificial
  Synthetic oligonucleotide
ccatgttgcccttgcagggaaacagaacgaggccacactggctgttcttgagatcgatgg

SEQ ID NO: 96109 - DNA, 60 bp, Artificial
  Synthetic oligonucleotide
tgtagaactcaacttgtacctaactgaattgactacagtattcgggccacaaatcacttc

SEQ ID NO: 96110 - DNA, 60 bp, Artificial
  Synthetic oligonucleotide
ggtcgcactagctccccaatgcctccctgtggacaaggacataagattcagagtggtgtt

SEQ ID NO: 96111 - DNA, 60 bp, Artificial
  Synthetic oligonucleotide
gccatctcttacgagtgtgcagtagacaactatacaagtttcataggcttcaagttccgg

SEQ ID NO: 96112 - DNA, 60 bp, Artificial
  Synthetic oligonucleotide
gtctgggtcaaagagttaaagtgttattcaacgggaatcctggctcgacatggattggga

SEQ ID NO: 96113 - DNA, 60 bp, Artificial
  Synthetic oligonucleotide
gctgcctggtccgagcttgttatctggttctacaacgatctctggatgtgttaggctccc

SEQ ID NO: 96114 - DNA, 60 bp, Artificial
  Synthetic oligonucleotide
aaaggtgccttagttttcactggggagacagttgaggggataggctcggtcatgcgatcc

SEQ ID NO: 96115 - DNA, 60 bp, Artificial
  Synthetic oligonucleotide
ggtgagggcgagggagaagtctcgacatcgtcgacccaagataatcgatcaggtgaggag

SEQ ID NO: 96116 - DNA, 60 bp, Artificial
  Synthetic oligonucleotide
tatcccggcgcctactacaggatcaggttgcactcggataccctcatttgacatgagcgc

SEQ ID NO: 96117 - DNA, 60 bp, Artificial
  Synthetic oligonucleotide
cggcgcctactacaggatcaggttgcactcggataccctcatttgacatgagcgctaccc

SEQ ID NO: 96118 - DNA, 60 bp, Artificial
  Synthetic oligonucleotide
cccttctcagatctcagccatgtctgctatgattaagaatgaggttttgcggcaatgtac

SEQ ID NO: 96119 - DNA, 60 bp, Artificial
  Synthetic oligonucleotide
ctgaggattgatcagttggtgacaactcgggaccagcgccagacccagcaaggttctata

SEQ ID NO: 96120 - DNA, 60 bp, Artificial
  Synthetic oligonucleotide
gggagataccgggaatcaacatgggaggactgattcaggctcggctgctgacacaggagg

SEQ ID NO: 96121 - DNA, 60 bp, Artificial
  Synthetic oligonucleotide
gaggatctcgggaacgtgatgagcgagggcacatccaaaatccacaaacgtctgagaggt

SEQ ID NO: 96122 - DNA, 60 bp, Artificial
  Synthetic oligonucleotide
ccccaaagtgtgtgcaagatgtatcaaagaccggatctacgtgccaaagtagcaaggctg

SEQ ID NO: 96123 - DNA, 60 bp, Artificial
  Synthetic oligonucleotide
acatgaggaaagaaattgtggcaaacagaaaatggtacggtgattatctagattccgact

SEQ ID NO: 96124 - DNA, 60 bp, Artificial
  Synthetic oligonucleotide
gacctgcgctttgctctcggggctgttggtggtttaagccttcatgtcagtatatgcggc

SEQ ID NO: 96125 - DNA, 60 bp, Artificial
  Synthetic oligonucleotide
gggttggatgacttggaaggaagtgggcctggccaccaatctggaccagaggatccaagc

SEQ ID NO: 96126 - DNA, 60 bp, Artificial
  Synthetic oligonucleotide
cccctgctacctgggcctgtgcgacaggtaacctaacaagttgtgcaagaacccgtgttg

SEQ ID NO: 96127 - DNA, 60 bp, Artificial
  Synthetic oligonucleotide
ggaagaccatccttatgttagttctgacgatgtgctgccgactctcagaggtgtgtatga

SEQ ID NO: 96128 - DNA, 60 bp, Artificial
  Synthetic oligonucleotide
aggccgatcacctccgagagaagggagaccaaccagagaagggcccatccgtcctgacat

SEQ ID NO: 96129 - DNA, 60 bp, Artificial
  Synthetic oligonucleotide
gggttcagtagatgggttggatactcaattgcagttcttaagactttacaacagctagtt

SEQ ID NO: 96130 - DNA, 60 bp, Artificial
  Synthetic oligonucleotide
cctcaactggatcactgacccctttggatgctcatggtggcacatatctcaacactgacc

SEQ ID NO: 96131 - DNA, 60 bp, Artificial
  Synthetic oligonucleotide
agagagttttacagaaggtcatgcatcaagaacctggtgattgtaattttctcgattggg

SEQ ID NO: 96132 - DNA, 60 bp, Artificial
  Synthetic oligonucleotide
tggactgcctgggttcttttcatggctacataaacgtctggaaatctcaacactgtatgt

SEQ ID NO: 96133 - DNA, 60 bp, Artificial
  Synthetic oligonucleotide
gaaatggtgctaatgttctgtgatgttgtggaagggagattgatgattgaaacagggatg

SEQ ID NO: 96134 - DNA, 60 bp, Artificial
  Synthetic oligonucleotide
ggagaacattcagaagacgtacgggagaagtgcaattggactaccaaccaccaaagaaag

SEQ ID NO: 96135 - DNA, 60 bp, Artificial
  Synthetic oligonucleotide
ggggacttggttgctccacaatgtcgaaacttaataaggtgttggatgagttccgtgact

SEQ ID NO: 96136 - DNA, 60 bp, Artificial
  Synthetic oligonucleotide
ccaccactgaagaaagaagtgagattaagctatcaagtgttcgatctgcttcaagggctc

SEQ ID NO: 96137 - DNA, 60 bp, Artificial
  Synthetic oligonucleotide
tgatgagaatggcttctgcaggtccgtcgaaaggtgcctctccctacccatatgttcggc

SEQ ID NO: 96138 - DNA, 60 bp, Artificial
  Synthetic oligonucleotide
gttcctccttttacccttgcttatttggttaatccatctagcctttgttatatcgcttgg

SEQ ID NO: 96139 - DNA, 60 bp, Artificial
  Synthetic oligonucleotide
ttgctgcagttagggagattctaaaatccgagaacgccaacatgagcaatggtccacagg

SEQ ID NO: 96140 - DNA, 60 bp, Artificial
  Synthetic oligonucleotide
cagacgctccagaggatgtcaaagccagactggacgcagagaaggaagcatcaaggaaga

SEQ ID NO: 96141 - DNA, 60 bp, Artificial
  Synthetic oligonucleotide
gctcacaaaagcagtgacagccattgacacagcccgcgactccgaaaagaagaggtgggg

SEQ ID NO: 96142 - DNA, 60 bp, Artificial
  Synthetic oligonucleotide
tctcggcatggttatagcaatcaattggtcttatgatgtatactatagaaggccccatgg

SEQ ID NO: 96143 - DNA, 60 bp, Artificial
  Synthetic oligonucleotide
ctgctagcacatcagatcatggatatcgacgcagccatcacagtatctgtaattgcactc

SEQ ID NO: 96144 - DNA, 60 bp, Artificial
  Synthetic oligonucleotide
agcaatagacccagaagcagacgagaagggcagactcgttccaaagtacagagtcatcaa

SEQ ID NO: 96145 - DNA, 60 bp, Artificial
  Synthetic oligonucleotide
gtccctgcgattaatacactggggtgttcagttattgctaatacactaggccttcgtctg

SEQ ID NO: 96146 - DNA, 60 bp, Artificial
  Synthetic oligonucleotide
atctctcactgatgacccgccttcccttggaactattgatgaatcccacatagttagaga

SEQ ID NO: 96147 - DNA, 60 bp, Artificial
  Synthetic oligonucleotide
ggtttagtggggcaaagagtgttccaagtcttcccatctgaagtcctaattgtgagtcac

SEQ ID NO: 96148 - DNA, 60 bp, Artificial
  Synthetic oligonucleotide
gcaaggggatggtgtgcctggagttaggttttggggtgctatcataggtggggttgctct

SEQ ID NO: 96149 - DNA, 60 bp, Artificial
  Synthetic oligonucleotide
gagtcaaggtcgcccttctatcctcaaattaacagcattcacactgctaacattccctac

SEQ ID NO: 96150 - DNA, 60 bp, Artificial
  Synthetic oligonucleotide
gacagaccacagaagttccgagctgtgtttctcaccataacaatgctgacagatgcgggg

SEQ ID NO: 96151 - DNA, 60 bp, Artificial
  Synthetic oligonucleotide
ggatggtgaggaactagaatatatactgcctgagagcaatgaggagtatgtggatcagag

SEQ ID NO: 96152 - DNA, 60 bp, Artificial
  Synthetic oligonucleotide
ctaaccaggacccacttttccatctgaccacctctaatagtcaatctcaaagtgctgcag

SEQ ID NO: 96153 - DNA, 60 bp, Artificial
  Synthetic oligonucleotide
gggtgtgtccgactaccatccttttcacttggtcttgaggtattcgcatatgctcatgct

SEQ ID NO: 96154 - DNA, 60 bp, Artificial
  Synthetic oligonucleotide
ggaggagcatggccacctcacacttttcctgaccatgtagacaagccggttagagaggca

SEQ ID NO: 96155 - DNA, 60 bp, Artificial
  Synthetic oligonucleotide
ccagagttggtcagcccttttcttctcggtgggatcaggtgttgtaattggggatacagt

SEQ ID NO: 96156 - DNA, 60 bp, Artificial
  Synthetic oligonucleotide
gggaatcattgattgcaacaggtgtgggtaaatactttaaagagaatggaatggtcaagg

SEQ ID NO: 96157 - DNA, 60 bp, Artificial
  Synthetic oligonucleotide
gactatcctggcctgaccaccataccaaactccgtggttcagacattcaacctcataaca

SEQ ID NO: 96158 - DNA, 60 bp, Artificial
  Synthetic oligonucleotide
ggacgcttgcgcagttgagctggccaggcgactaagaaatacgatgtgggtgcatctaac

SEQ ID NO: 96159 - DNA, 60 bp, Artificial
  Synthetic oligonucleotide
caccggacaataactggatgggagctgaagggagacttttccactttcacaactcaggga

SEQ ID NO: 96160 - DNA, 60 bp, Artificial
  Synthetic oligonucleotide
ccagaggcactacccaatcagtaccttctaaccctaaacattctaacctaaggatggctt

SEQ ID NO: 96161 - DNA, 58 bp, Artificial
  Synthetic oligonucleotide
aaaagtcagcctccgtacagcagtatttgtctcaatgatgtaatggtcatctccgttg

SEQ ID NO: 96162 - DNA, 60 bp, Artificial
  Synthetic oligonucleotide
cgtacatcattactgaacaggataaaccaccttgcaacagagcttaaggaagcagcgagg

SEQ ID NO: 96163 - DNA, 60 bp, Artificial
  Synthetic oligonucleotide
tgtccagagaagtgttctaggtgaagtatgtttcggtgtcttgattaagggttatccatt

SEQ ID NO: 96164 - DNA, 60 bp, Artificial
  Synthetic oligonucleotide
ggcaggggcaaagggtcaagaaggagatggccgtacaactctggcagatttggggagaac

SEQ ID NO: 96165 - DNA, 60 bp, Artificial
  Synthetic oligonucleotide
gtgccatctggatagtcccatagtcacaggcaagctgtattcacttctctgcagaggtgg

SEQ ID NO: 96166 - DNA, 60 bp, Artificial
  Synthetic oligonucleotide
ggagaaggcaccatacatggtaatactcgaagaatccatccagacaaaatttgccccggg

SEQ ID NO: 96167 - DNA, 60 bp, Artificial
  Synthetic oligonucleotide
ccgaaacccagggtagttgagctcattgccgacattgggaattacatcagtgaaaccgga

SEQ ID NO: 96168 - DNA, 60 bp, Artificial
  Synthetic oligonucleotide
cctactacaggatcaggttgcactcggataccctcatttgacatgagtgctacccattac

SEQ ID NO: 96169 - DNA, 60 bp, Artificial
  Synthetic oligonucleotide
gacgggataactctgaggctcagtggggaatttgatgcaacttatcaaaagaatatctca

SEQ ID NO: 96170 - DNA, 60 bp, Artificial
  Synthetic oligonucleotide
ctgagactatggtcactcgaagaatctccagaagcagcccagatcctaacaatggaaccc

SEQ ID NO: 96171 - DNA, 60 bp, Artificial
  Synthetic oligonucleotide
cgcttacacctctaatcttattacccagggctgtcaagatataggaaaatcttaccaagt

SEQ ID NO: 96172 - DNA, 60 bp, Artificial
  Synthetic oligonucleotide
cgataagtcaattggtttagtacattgtgacatggagggagcgataggcaaatcagaaga

SEQ ID NO: 96173 - DNA, 60 bp, Artificial
  Synthetic oligonucleotide
agtaataataacgggatctgaacattgtaggatatgttattcaactgaaggtgtaagccc

SEQ ID NO: 96174 - DNA, 60 bp, Artificial
  Synthetic oligonucleotide
tgagaaaccatgttgcccttgcagggaaacagaatgaggccacactggctgttcttgaga

SEQ ID NO: 96175 - DNA, 60 bp, Artificial
  Synthetic oligonucleotide
gtacattgtgatatggaaggagctatcggtaaatcagaagaaactgttctacatgaacat

SEQ ID NO: 96176 - DNA, 60 bp, Artificial
  Synthetic oligonucleotide
gtgatatggaaggagctatcggtaaatcagaagaaactgttctacatgaacattatagtg

SEQ ID NO: 96177 - DNA, 60 bp, Artificial
  Synthetic oligonucleotide
ccatgttgcccttgcagggaaacagaatgaagccacactggctgttcttgagatcgatgg

SEQ ID NO: 96178 - DNA, 60 bp, Artificial
  Synthetic oligonucleotide
gcaacatcaacatatctactaccaactacccatgcaaagtcagcacaggaagacacccta

SEQ ID NO: 96179 - DNA, 51 bp, Artificial
  Synthetic oligonucleotide
caatgggaatcccaattcaacatggataggaaatatggaatgtgagagctt

SEQ ID NO: 96180 - DNA, 60 bp, Artificial
  Synthetic oligonucleotide
gttccttagggaagccactgatattgcacttacatcttaataacgggtgctgtataatgg

SEQ ID NO: 96181 - DNA, 60 bp, Artificial
  Synthetic oligonucleotide
ccggctcgaggctgtacaatcttgcgctcaatgtcactattgatgtggatgtagatccga

SEQ ID NO: 96182 - DNA, 60 bp, Artificial
  Synthetic oligonucleotide
cgtaagttacgataaaaggcgaaggagcaattgaagtcgcacgggtagaaggtgtgaatc

SEQ ID NO: 96183 - DNA, 60 bp, Artificial
  Synthetic oligonucleotide
gcctcacccaagaacttgtgttgatgtatgcggatatgatggagggcagagatatggtca

SEQ ID NO: 96184 - DNA, 60 bp, Artificial
  Synthetic oligonucleotide
cagccgcccaagcaacggcagcagtggccttggtagaagcaagacagaatgcagcccaaa

SEQ ID NO: 96185 - DNA, 60 bp, Artificial
  Synthetic oligonucleotide
cctgcaagcacaagcatcttaaactcaacacttgatctaccactcgtaggtcccagctgt

SEQ ID NO: 96186 - DNA, 60 bp, Artificial
  Synthetic oligonucleotide
cccactgtgcaaggatgtcttccgtgtttcgtgcgttcgagctctttaccttagagcaag

SEQ ID NO: 96187 - DNA, 60 bp, Artificial
  Synthetic oligonucleotide
cagggctcaccatcgtacatcgtagtgaaactcgtaccgactcttggcaatgttcctggg

SEQ ID NO: 96188 - DNA, 60 bp, Artificial
  Synthetic oligonucleotide
cagcgttgagcctaatggcaaatgatctccctgacacatacaccaatgacacaccattca

SEQ ID NO: 96189 - DNA, 60 bp, Artificial
  Synthetic oligonucleotide
gcgcctaccttggcaaaggcattatggtctgtcggtgctcagatcacacaggtgaatgca

SEQ ID NO: 96190 - DNA, 60 bp, Artificial
  Synthetic oligonucleotide
gccaacctcacacacaggcttgatgacgggctcactcagcaaaagtttactccagccagc

SEQ ID NO: 96191 - DNA, 60 bp, Artificial
  Synthetic oligonucleotide
ctgtccgaccactctcatacactccaggttagaatctctgcaactggcccgctcctctgc

SEQ ID NO: 96192 - DNA, 60 bp, Artificial
  Synthetic oligonucleotide
cggcggactactcgaaacaacattacagtactaaataagtctgagaggcatcatctaggt

SEQ ID NO: 96193 - DNA, 60 bp, Artificial
  Synthetic oligonucleotide
aagggacttgacacagttgaacatttcctcagcgcttctacccaatctgtccggagcctg

SEQ ID NO: 96194 - DNA, 60 bp, Artificial
  Synthetic oligonucleotide
gcttgcactcattgtatgtcagggaatagaaagtacacctggttcttcgtgccagcaggg

SEQ ID NO: 96195 - DNA, 60 bp, Artificial
  Synthetic oligonucleotide
gcaaggtgacaaccaggctatggcgattactacaatggtaccacgtgggcttcctcacca

SEQ ID NO: 96196 - DNA, 60 bp, Artificial
  Synthetic oligonucleotide
gcttcacatgcatagaccccgaaatcctcacacagatcatagtcaacctcaataaccaac

SEQ ID NO: 96197 - DNA, 60 bp, Artificial
  Synthetic oligonucleotide
gacacactaccaatcctaagcggaaatcatttgtacctagcagaaggaagtggggcgatg

SEQ ID NO: 96198 - DNA, 60 bp, Artificial
  Synthetic oligonucleotide
ggagcggatcatcagaggaaacagatctaagttgtgctgcctgcgtcaaccttatactca

SEQ ID NO: 96199 - DNA, 60 bp, Artificial
  Synthetic oligonucleotide
aaatccccaacatcaccacgctcagctgcaagcccgcaacccagcagacacacacctagc

SEQ ID NO: 96200 - DNA, 60 bp, Artificial
  Synthetic oligonucleotide
gcctggaacttactccttgacctatcctatcagctgtattatctccgcattttaggacag

SEQ ID NO: 96201 - DNA, 60 bp, Artificial
  Synthetic oligonucleotide
tacccaccctcagtatccctcagtacaataaattcatctatgatacaaacccactcaccg

SEQ ID NO: 96202 - DNA, 60 bp, Artificial
  Synthetic oligonucleotide
agccaacaccgatgccccaccctgcacgcaccaacaactgcctcgcttcaaacctcaaag

SEQ ID NO: 96203 - DNA, 60 bp, Artificial
  Synthetic oligonucleotide
acaggccattgcactgagagcgacctaaacatttactgtccgtatgtagatgctcaactc

SEQ ID NO: 96204 - DNA, 60 bp, Artificial
  Synthetic oligonucleotide
ggcaaccggaaccccgcgggtcacagaatggtgcaacccaatatgtcacccaatatccca

SEQ ID NO: 96205 - DNA, 60 bp, Artificial
  Synthetic oligonucleotide
ttcaccaacaagtccaagtgggccagaatggcgtgccccgagcaagtgatcctcccagag

SEQ ID NO: 96206 - DNA, 60 bp, Artificial
  Synthetic oligonucleotide
gcgcgacaggattattccaggccccgtggatagttaatggtgacagcattctagatagag

SEQ ID NO: 96207 - DNA, 60 bp, Artificial
  Synthetic oligonucleotide
aactagatgagctggcccgaccatccccagcaaagcctcgacaggtcaaacaatccggcc

SEQ ID NO: 96208 - DNA, 60 bp, Artificial
  Synthetic oligonucleotide
acggcttacgacagggcgcggtgcaggacaagcccaggacatgataaacatcatgggtgc

SEQ ID NO: 96209 - DNA, 60 bp, Artificial
  Synthetic oligonucleotide
cccgcctaattacaattcctgctcagcttggtggcctaaattactacgctttgacccgct

SEQ ID NO: 96210 - DNA, 60 bp, Artificial
  Synthetic oligonucleotide
gcccagcatactcaagtcagctacacggaccacccaacccacacaacatcaagccccaga

SEQ ID NO: 96211 - DNA, 60 bp, Artificial
  Synthetic oligonucleotide
ggctctactggctagaccgaatcctatacccaaaagttgttcacggttcccaagttacag

SEQ ID NO: 96212 - DNA, 60 bp, Artificial
  Synthetic oligonucleotide
aagaacctgattgcgcgtgagccgggtgatggggactggaacacccttgcatcagatcct

SEQ ID NO: 96213 - DNA, 60 bp, Artificial
  Synthetic oligonucleotide
ggacagagatatagttatgcctagggttgctcatatcgtgttggagcagtctgtgtgtgg

SEQ ID NO: 96214 - DNA, 60 bp, Artificial
  Synthetic oligonucleotide
ggtttgctttagggacacgctggcctccattggctctatctgctttctctggagagctct

SEQ ID NO: 96215 - DNA, 60 bp, Artificial
  Synthetic oligonucleotide
taccttcaccttcctgctgacttagtcgctgagctgctgtgtatcatgagactctggggc

SEQ ID NO: 96216 - DNA, 59 bp, Artificial
  Synthetic oligonucleotide
gaaaactgcctccctctctcccgacaatgctccgcaaactcctgcgcttccacacactc

SEQ ID NO: 96217 - DNA, 60 bp, Artificial
  Synthetic oligonucleotide
cgcactggaaagagattgcaatgctggagtttgggaagagtatagatgcggatccgggcg

SEQ ID NO: 96218 - DNA, 60 bp, Artificial
  Synthetic oligonucleotide
cccctatgggacttcaggcaagaggctgctcggtcataagctctatatacggctgctatc

SEQ ID NO: 96219 - DNA, 60 bp, Artificial
  Synthetic oligonucleotide
gacaggataagaggacaaaagccggtgagcccgaatagggtgaatccgtgtggctccctc

SEQ ID NO: 96220 - DNA, 58 bp, Artificial
  Synthetic oligonucleotide
cacccagtgctgtttgaagaccctgatacgcctgagttcgatatctttggcgaggaac

SEQ ID NO: 96221 - DNA, 60 bp, Artificial
  Synthetic oligonucleotide
gagtgtatatgaagaggtcataccaactgagtctgctcccttgatccctaaaactactcc

SEQ ID NO: 96222 - DNA, 60 bp, Artificial
  Synthetic oligonucleotide
ctgtaaattccccaagaagtccaaccgctaatctagatgttgaggtaatcctatggcctg

SEQ ID NO: 96223 - DNA, 59 bp, Artificial
  Synthetic oligonucleotide
aaactatagagcagatgtggggcagatgatcgttaccaatcctctagacatctctgcgg

SEQ ID NO: 96224 - DNA, 60 bp, Artificial
  Synthetic oligonucleotide
ccttcaactctctgtatccttgactggctgaccccgttgttttcccaagctgataaagtg

SEQ ID NO: 96225 - DNA, 60 bp, Artificial
  Synthetic oligonucleotide
tgcacggaagctctcactgctctgctgtctaactgcttctcaccatgagctaccacatgt

SEQ ID NO: 96226 - DNA, 60 bp, Artificial
  Synthetic oligonucleotide
accagtgagagcaaggcacccatcccggccaattccaccctgaaccttgttgatgtcccc

SEQ ID NO: 96227 - DNA, 60 bp, Artificial
  Synthetic oligonucleotide
ggactgttttgcatctgtgtggttccatatctgcaatctgtatcgagggaataagccgtt

SEQ ID NO: 96228 - DNA, 60 bp, Artificial
  Synthetic oligonucleotide
cgacttcctcctttattcaatcgtcatcaaatatcagggaatcgtctcatttgtgtgccg

SEQ ID NO: 96229 - DNA, 60 bp, Artificial
  Synthetic oligonucleotide
gaacctaaccccaagaggttccacggagcttcctctcaccttcatcaacacctatggatt

SEQ ID NO: 96230 - DNA, 60 bp, Artificial
  Synthetic oligonucleotide
cagatatgatcgagggaaggatgaatatacttgcaattagtagtgccagctgttacctcc

SEQ ID NO: 96231 - DNA, 56 bp, Artificial
  Synthetic oligonucleotide
gcttgccgcttccatggacaacacacaagacctcaatctgcgctagacttctgcca

SEQ ID NO: 96232 - DNA, 60 bp, Artificial
  Synthetic oligonucleotide
gtccaactacctgtcgactttgtgcaggcgatgatgtctatgatggaggcgttatcacag

SEQ ID NO: 96233 - DNA, 60 bp, Artificial
  Synthetic oligonucleotide
atatcatggacaatgggaggagtcacaactatcagctggtgcaacccctcatggtctccg

SEQ ID NO: 96234 - DNA, 60 bp, Artificial
  Synthetic oligonucleotide
atatcatggacaatgggaggagtcacaactatcagctggtgcaacccctcatgctctccg

SEQ ID NO: 96235 - DNA, 60 bp, Artificial
  Synthetic oligonucleotide
ccctctgcagggtgatacaaaatgtaggacccaaggatgccaacaggtgtcgcaagacac

SEQ ID NO: 96236 - DNA, 60 bp, Artificial
  Synthetic oligonucleotide
ccgtttagatgatggagccacaacacttaaattcactccagctagttcctatgcattttc

SEQ ID NO: 96237 - DNA, 60 bp, Artificial
  Synthetic oligonucleotide
ctgcaatttcaacactaattccaggccctccttctcatcatgtattacgaccactaggag

SEQ ID NO: 96238 - DNA, 60 bp, Artificial
  Synthetic oligonucleotide
cctaagtgatggaatcaatcgcaaaagctgttcagtcactgctataccaggaggttgtgt

SEQ ID NO: 96239 - DNA, 60 bp, Artificial
  Synthetic oligonucleotide
cctgagaagctaccaatcaacaccccaatacccaatccattacttccactggcacgcccc

SEQ ID NO: 96240 - DNA, 60 bp, Artificial
  Synthetic oligonucleotide
caccctccatttgcacactagctcatcttgttgtgttagaagtgtagatggttgccttat

SEQ ID NO: 96241 - DNA, 60 bp, Artificial
  Synthetic oligonucleotide
tttcactcattaagacccattggtgttacactcacaatgtaatacttggagattgcctcg

SEQ ID NO: 96242 - DNA, 60 bp, Artificial
  Synthetic oligonucleotide
cccatcagagttccatacattgggtctagaacagaggaaagaagagttgcatcaatggca

SEQ ID NO: 96243 - DNA, 60 bp, Artificial
  Synthetic oligonucleotide
gtagaaacagcaaggaaacagcagggagctgttgacaacaggacagcagaggacctcggc

SEQ ID NO: 96244 - DNA, 60 bp, Artificial
  Synthetic oligonucleotide
gtatatgggtgtctacaacttaaagatccagtagtggaattagcagggtcatttcattcc

SEQ ID NO: 96245 - DNA, 60 bp, Artificial
  Synthetic oligonucleotide
attcattccgagtcattccagatgctcgatcaactatgtccagaggagaggtgctggctt

SEQ ID NO: 96246 - DNA, 60 bp, Artificial
  Synthetic oligonucleotide
cctcacagatcctgatgatacatttgaacttagtgcatgttttataactactgatcttgc

SEQ ID NO: 96247 - DNA, 60 bp, Artificial
  Synthetic oligonucleotide
cgcccctcttccaactcaatttgtacagagtgttccatataaattgtggcaagctgatct

SEQ ID NO: 96248 - DNA, 60 bp, Artificial
  Synthetic oligonucleotide
cacaccagaatcatacaatcatggccgaggaaccaacatacaccactgagcaagttgatg

SEQ ID NO: 96249 - DNA, 60 bp, Artificial
  Synthetic oligonucleotide
gggaggacaagcaaatgatacacctgtgtataacttcaatccaatcaatactcggaggta

SEQ ID NO: 96250 - DNA, 60 bp, Artificial
  Synthetic oligonucleotide
ggccacaatcaatcctgcagttggaagcgggatctatcatctaggctttatcttatttcc

SEQ ID NO: 96251 - DNA, 60 bp, Artificial
  Synthetic oligonucleotide
ttaacagacgtctattactcaatttcttagaagatgacagttttgatccagttgctgagc

SEQ ID NO: 96252 - DNA, 60 bp, Artificial
  Synthetic oligonucleotide
ggacatgtagaatcattttccgaactgccacaattcttggaatatgcacattgattgttc

SEQ ID NO: 96253 - DNA, 60 bp, Artificial
  Synthetic oligonucleotide
gagatctctctcatagaatttagaaagtgctttgactttgatcctggtgaggagctaagc

SEQ ID NO: 96254 - DNA, 60 bp, Artificial
  Synthetic oligonucleotide
ctccttcctgaagtccacttgaactcaccaatagtcaaacacaaactcatatactactta

SEQ ID NO: 96255 - DNA, 53 bp, Artificial
  Synthetic oligonucleotide
attgaggctcaatgggtaccgtcctatcaagttccccgccctggagtcatgcc

SEQ ID NO: 96256 - DNA, 60 bp, Artificial
  Synthetic oligonucleotide
gggctcatctcttttaggggagttccaaataataccatttctaagggaactaatacctta

SEQ ID NO: 96257 - DNA, 60 bp, Artificial
  Synthetic oligonucleotide
gaactcatgtcacgtaatgctctgaaccccaactatcgatttgctggagcctttctcaaa

SEQ ID NO: 96258 - DNA, 60 bp, Artificial
  Synthetic oligonucleotide
catcaatacgtatggatttgtttatgctcgagacacttcaggaggcattcacagcgagat

SEQ ID NO: 96259 - DNA, 60 bp, Artificial
  Synthetic oligonucleotide
gcttgatcttcgccttcagactgtagaagggaaggtagataaaattcttgcaacttccgc

SEQ ID NO: 96260 - DNA, 60 bp, Artificial
  Synthetic oligonucleotide
caaaggatgcagttgcattcataatacataaagtaggagcggagaaagcatcccttgttc

SEQ ID NO: 96261 - DNA, 60 bp, Artificial
  Synthetic oligonucleotide
ggagatcaggtcagagtcttcgagtggtgtaatcccaggtgtgccccagtcacggcctca

SEQ ID NO: 96262 - DNA, 60 bp, Artificial
  Synthetic oligonucleotide
tctagaacgatctttaatgtatacagtccgaaattggttagttttacccagttccatccg

SEQ ID NO: 96263 - DNA, 60 bp, Artificial
  Synthetic oligonucleotide
aaaacaaatatggaaagccttaggtagtgtaatatattgttcggagacggttgatatacc

SEQ ID NO: 96264 - DNA, 60 bp, Artificial
  Synthetic oligonucleotide
catgcaaatgctaattcaaatcaatgttccgacatttataatgcaacccggtgcgaaggt

SEQ ID NO: 96265 - DNA, 60 bp, Artificial
  Synthetic oligonucleotide
ctgaggattggattgcagatagcaacttcttcgctaatcaagccagaacagccaagacac

SEQ ID NO: 96266 - DNA, 60 bp, Artificial
  Synthetic oligonucleotide
cagcctgaagcacaaagactaattcagaatgccatccgcaagtcaatggtagtgaggcat

SEQ ID NO: 96267 - DNA, 60 bp, Artificial
  Synthetic oligonucleotide
ttgaaagatttactatacaacaggagcttcaggagcaatctgatgacactccagtacctc

SEQ ID NO: 96268 - DNA, 60 bp, Artificial
  Synthetic oligonucleotide
atatgactttgcgcaggatacccggaactgctctaaataatattgcagctactattagcc

SEQ ID NO: 96269 - DNA, 60 bp, Artificial
  Synthetic oligonucleotide
ccaggatcatatcaatggagctattgttaatgggataacatctgcatcatgccgtgccca

SEQ ID NO: 96270 - DNA, 60 bp, Artificial
  Synthetic oligonucleotide
taatcgctgagatgttgtgtctcatgagactttggggtcatcccactcttactgctgcgc

SEQ ID NO: 96271 - DNA, 60 bp, Artificial
  Synthetic oligonucleotide
cctacagcatccaagactaatctcacgtattgttctgctcccttcacagctaggtggtct

SEQ ID NO: 96272 - DNA, 60 bp, Artificial
  Synthetic oligonucleotide
ctctatttctgtgatcatcctctcttcagccgaatccaaaacaagagtaatgagcatggt

SEQ ID NO: 96273 - DNA, 57 bp, Artificial
  Synthetic oligonucleotide
agcacgaacccttaaggtgtcgtaacgtctcgtgacgccgggttcagttcaaacatc

SEQ ID NO: 96274 - DNA, 60 bp, Artificial
  Synthetic oligonucleotide
ggggaactccagaaattaaaagctctcatgctacattatcagagtctaggacccatggcc

SEQ ID NO: 96275 - DNA, 60 bp, Artificial
  Synthetic oligonucleotide
ctgctactaccatcatgagattaacagaaaatggggttgagaaagatacatgttataagc

SEQ ID NO: 96276 - DNA, 66 bp, Artificial
  Synthetic oligonucleotide
gagaatcagacgaaggacaatatattatcacctcatattatgaatccttcgaacaattagaaacag

SEQ ID NO: 96277 - DNA, 60 bp, Artificial
  Synthetic oligonucleotide
gtattgatgcaattcagtggggagttaaacaagttcttgctgatttatcaaatggaattg

SEQ ID NO: 96278 - DNA, 60 bp, Artificial
  Synthetic oligonucleotide
gccacagatgggaatgacatttctcttgagctagttggagattttgattcctaactctca

SEQ ID NO: 96279 - DNA, 60 bp, Artificial
  Synthetic oligonucleotide
gccaccaacttcttcgcaggagataatgggcttattctaagatgtggaggaactcccagc

SEQ ID NO: 96280 - DNA, 60 bp, Artificial
  Synthetic oligonucleotide
gcatctttgttatgtacactggaattgtaggttcaggtgccattgccggagaccaactac

SEQ ID NO: 96281 - DNA, 60 bp, Artificial
  Synthetic oligonucleotide
gagtaacaccgcaagagagggacatagagctggtgctctcctcagtctcttatcactacc

SEQ ID NO: 96282 - DNA, 60 bp, Artificial
  Synthetic oligonucleotide
cgtgtgcccgcatttagagcaactagatggcgtagtcatgcagccgtccttatatggcct

SEQ ID NO: 96283 - DNA, 60 bp, Artificial
  Synthetic oligonucleotide
gtctccattacatactcaccacgaaatctgaattaccaagttgccagacctatccttaag

SEQ ID NO: 96284 - DNA, 60 bp, Artificial
  Synthetic oligonucleotide
tgcatcaaagttctcgtcagccgactgatttagttcacattgttgacacacgatctggtc

SEQ ID NO: 96285 - DNA, 60 bp, Artificial
  Synthetic oligonucleotide
aagattgccatcagatcaggtcaacggacatttgagaggtccaaattcagcccatttaaa

SEQ ID NO: 96286 - DNA, 60 bp, Artificial
  Synthetic oligonucleotide
ttcgccagagactttatgagcacatcattctggagacttggggtggaatatgctcaggct

SEQ ID NO: 96287 - DNA, 60 bp, Artificial
  Synthetic oligonucleotide
cggtgggtaggagaaagcaaattcaagggcttgttgacacaacgaacaccgtgattaaga

SEQ ID NO: 96288 - DNA, 60 bp, Artificial
  Synthetic oligonucleotide
cgtgagttacgataaaaggcgaaggagcaattgaagtcgcacgggtagaaggtgtgaatc

SEQ ID NO: 96289 - DNA, 60 bp, Artificial
  Synthetic oligonucleotide
cgtggtttcctatgacgaagatacctctatcaagaatgacgccataatagtgtatgacaa

SEQ ID NO: 96290 - DNA, 60 bp, Artificial
  Synthetic oligonucleotide
cgtggtttcctatgatgaagatacctctatcaagaatgacgccataatagtgtatgacaa

SEQ ID NO: 96291 - DNA, 60 bp, Artificial
  Synthetic oligonucleotide
gctacctgtcgactttgtgcaggcgatgatgtctatgatggaggcaatatcacagagggt

SEQ ID NO: 96292 - DNA, 60 bp, Artificial
  Synthetic oligonucleotide
ggcccaggtatgggtcacagtagcaaaggccatgactgcatatgagacagcagatgagtc

SEQ ID NO: 96293 - DNA, 60 bp, Artificial
  Synthetic oligonucleotide
gcacagagattcatggtaatcgcaggatctctccctcgggcatgcagcaacggtactccg

SEQ ID NO: 96294 - DNA, 55 bp, Artificial
  Synthetic oligonucleotide
tatattctctccaatggctatgcctgtagaggggatatggagtgttacctggtat

SEQ ID NO: 96295 - DNA, 60 bp, Artificial
  Synthetic oligonucleotide
ttgtgttgatgtatgcagatatgatggagggcagagatatggtcaacataatatcatcca

SEQ ID NO: 96296 - DNA, 60 bp, Artificial
  Synthetic oligonucleotide
gcaaataccaatttgccagagactttatgagcacatcattctggagacttggagtagagt

SEQ ID NO: 96297 - DNA, 60 bp, Artificial
  Synthetic oligonucleotide
caatcttgcgctcaatgtcactattgatgtggaggtagacccgaagagcccgttggtcaa

SEQ ID NO: 96298 - DNA, 60 bp, Artificial
  Synthetic oligonucleotide
ccagcggaaaattaatcggccagtctgtggtttcttatgatgaagatacctctataaaga

SEQ ID NO: 96299 - DNA, 60 bp, Artificial
  Synthetic oligonucleotide
ccagcgggaagttaatcggccagtctgtggtttcttatgatgaagatacctccataaaga

SEQ ID NO: 96300 - DNA, 53 bp, Artificial
  Synthetic oligonucleotide
ggacagtgacctcaaataagtttatgtatgatcctagtcctgtatcggagggg

SEQ ID NO: 96301 - DNA, 60 bp, Artificial
  Synthetic oligonucleotide
cctgtacacggtgctctttgctacaacaagagaaatcccgaaaataagaggcttatctgc

SEQ ID NO: 96302 - DNA, 60 bp, Artificial
  Synthetic oligonucleotide
ctggctcaagcctgtacaatcttgcgctcaatgtcactattgatgtggacgtggatccga

SEQ ID NO: 96303 - DNA, 60 bp, Artificial
  Synthetic oligonucleotide
cccgtcaccggaaccggggtctcgaactatgaagtccacgcttatcgtagaatcggcctg

SEQ ID NO: 96304 - DNA, 60 bp, Artificial
  Synthetic oligonucleotide
tgacaaagggtggctggacgcagtccgcaacaggattgcagaagatctatcacttcggcg

SEQ ID NO: 96305 - DNA, 60 bp, Artificial
  Synthetic oligonucleotide
ggttgataaacccagaagccattaagcaaagcataatcagagtggggactaggactgcac

SEQ ID NO: 96306 - DNA, 60 bp, Artificial
  Synthetic oligonucleotide
cccaggtgaaatactcggggacatcccttgtgagggttgcaagatacacaaccatctcca

SEQ ID NO: 96307 - DNA, 60 bp, Artificial
  Synthetic oligonucleotide
ggcgtgatgatcagcatgttatctttgttcgtggagtcacccgggcaattgatacagcgg

SEQ ID NO: 96308 - DNA, 60 bp, Artificial
  Synthetic oligonucleotide
cggtgacagagtgttcatcgataagtggtgcaacccaagctgtgccagagtccagatggg

SEQ ID NO: 96309 - DNA, 60 bp, Artificial
  Synthetic oligonucleotide
tctcattgacaaggactcgtgctcggtgcagctcgctatagccctgagggaccacatgtg

SEQ ID NO: 96310 - DNA, 60 bp, Artificial
  Synthetic oligonucleotide
agaccatagcataaccggggcaagagaagctatagccgggatgttggacaccaccaaggg

SEQ ID NO: 96311 - DNA, 60 bp, Artificial
  Synthetic oligonucleotide
cccagaccccgggagaatcatcctacctcgattgggcaagtgacccttattctgccaacc

SEQ ID NO: 96312 - DNA, 60 bp, Artificial
  Synthetic oligonucleotide
ccctgatacgtccgagggagatcatcagagtatcaaccaatcatgctcaccagcaatcgg

SEQ ID NO: 96313 - DNA, 60 bp, Artificial
  Synthetic oligonucleotide
tcgtgaggctcaaagatcggccgaggcactcttcaggctgcaggccatggccaagattct

SEQ ID NO: 96314 - DNA, 60 bp, Artificial
  Synthetic oligonucleotide
ggactcgaggatgctgactctctcgtggttcaagcagatcctccagttgctaacgtcttc

SEQ ID NO: 96315 - DNA, 60 bp, Artificial
  Synthetic oligonucleotide
gcactggctgcactgaagaatgagtgggattcagtttacccgaaagaatacctccgttat

SEQ ID NO: 96316 - DNA, 60 bp, Artificial
  Synthetic oligonucleotide
cgacttggggttgcacatgcatagctctcaatggttcgagacctttctgttctggttcac

SEQ ID NO: 96317 - DNA, 60 bp, Artificial
  Synthetic oligonucleotide
atggaggagaggatggatctgacgacagcgatgtggactctggcccagatgatcccggca

SEQ ID NO: 96318 - DNA, 60 bp, Artificial
  Synthetic oligonucleotide
ggcccagccatctccctggagaaactggatgtaggcaccaatttaggcaatgcagtcaca

SEQ ID NO: 96319 - DNA, 60 bp, Artificial
  Synthetic oligonucleotide
gcagagacgatccaggggttgacacaagaatctggtaccatagcatcactgactcagcct

SEQ ID NO: 96320 - DNA, 60 bp, Artificial
  Synthetic oligonucleotide
ggtcgacaaaatcgtgcgccagaaccctagtttcagggaccacaagtaatagatttatcc

SEQ ID NO: 96321 - DNA, 60 bp, Artificial
  Synthetic oligonucleotide
aacaaaacttaggacgaaaggtcaatcaccatgtccgcacaaagggaaaggatcaatgcc

SEQ ID NO: 96322 - DNA, 60 bp, Artificial
  Synthetic oligonucleotide
tttcagagtacaaaagattgctgatcacagtgttaaagcctgtagaggatgccctgtcag

SEQ ID NO: 96323 - DNA, 60 bp, Artificial
  Synthetic oligonucleotide
gacgagcatgacctaacaaaagcccttcacactctggcagtctcaggtgttcccaagaac

SEQ ID NO: 96324 - DNA, 60 bp, Artificial
  Synthetic oligonucleotide
cgaggccaattgggtagtaccgtcgaccgatgttcgtgatcttcaaaacaaaggagaatg

SEQ ID NO: 96325 - DNA, 60 bp, Artificial
  Synthetic oligonucleotide
gttgaagagggattattcggaagaacatataccgtctggagatccgatgccagggatccg

SEQ ID NO: 96326 - DNA, 60 bp, Artificial
  Synthetic oligonucleotide
cccgggtgtagttatcacttcagtgtttggcccattgatacctcacctatccggtatgga

SEQ ID NO: 96327 - DNA, 60 bp, Artificial
  Synthetic oligonucleotide
gaccatggctactctccttaaaagcttggcattgttcaagaggaacaaagacaaagcgcc

SEQ ID NO: 96328 - DNA, 60 bp, Artificial
  Synthetic oligonucleotide
ctctgaggatagagtgtttcccttggcgtcataaggtgtggtgctaccatgattgtctta

SEQ ID NO: 96329 - DNA, 60 bp, Artificial
  Synthetic oligonucleotide
ttctgtttcttttcccaaatgctgttgcgtgccagattcactggggcaatctatccaaga

SEQ ID NO: 96330 - DNA, 55 bp, Artificial
  Synthetic oligonucleotide
atcttttgctgaatgatgagctagatgattacccgtatttactctgcgagagtga

SEQ ID NO: 96331 - DNA, 53 bp, Artificial
  Synthetic oligonucleotide
aaaatctgtagggatctaatccaccatgatatcgcctccggtccagacggtct

SEQ ID NO: 96332 - DNA, 60 bp, Artificial
  Synthetic oligonucleotide
ttcactctcaatacgaaagaagtgaaagagtggttcaaattggtgggttacagtgcactc

SEQ ID NO: 96333 - DNA, 60 bp, Artificial
  Synthetic oligonucleotide
acaagagattactttataattcttagcatagcctacccaaccttatctgagatcaagggg

SEQ ID NO: 96334 - DNA, 60 bp, Artificial
  Synthetic oligonucleotide
ctctgacctaccttcgctgcggttccatcaaacaaatcaggttgagagtggatcctgggt

SEQ ID NO: 96335 - DNA, 60 bp, Artificial
  Synthetic oligonucleotide
gcagtcaacctagtcccgcttgatactccccagagattcagggttgtgtacatgagcata

SEQ ID NO: 96336 - DNA, 60 bp, Artificial
  Synthetic oligonucleotide
gggctgaccggtatagaggtaacatgtaatccagtctgagtagagctgcaaccatcgctc

SEQ ID NO: 96337 - DNA, 60 bp, Artificial
  Synthetic oligonucleotide
ctggcagcctatgagagcggagtaagaatcgcctcactagtgcaaggtgacaatcagaca

SEQ ID NO: 96338 - DNA, 60 bp, Artificial
  Synthetic oligonucleotide
aggtctcagtccgggttgacctttgcatcacgtggtgctgatttagacaacgaggcagac

SEQ ID NO: 96339 - DNA, 60 bp, Artificial
  Synthetic oligonucleotide
cgtctcggacaggagatggtcagaagatctgcaggaaaggtcagctctgtgattgcggcc

SEQ ID NO: 96340 - DNA, 60 bp, Artificial
  Synthetic oligonucleotide
tgttgccctgcttgaaccattatcgttggcttatcttcaacttcaggatgtcactctgga

SEQ ID NO: 96341 - DNA, 60 bp, Artificial
  Synthetic oligonucleotide
gcttggtatcacagcagaggaagccaaactagtctcggaaatcgcctcacagactgggga

SEQ ID NO: 96342 - DNA, 60 bp, Artificial
  Synthetic oligonucleotide
cagcttcttaaggatctccagctaaaacctgtcgacaagcaggcaagctctgcaatcggg

SEQ ID NO: 96343 - DNA, 60 bp, Artificial
  Synthetic oligonucleotide
gtgtcatccgctccataatcaagtcgagcaagcttaacattgatcacaaggactatcttc

SEQ ID NO: 96344 - DNA, 60 bp, Artificial
  Synthetic oligonucleotide
ctggtccttatgtattgtgatgtcatagagggcagacttatgactgagacagccatggcc

SEQ ID NO: 96345 - DNA, 60 bp, Artificial
  Synthetic oligonucleotide
cccggacagagcagaggttatgccgcacattttgaccacagagatcagagggcctcgagg

SEQ ID NO: 96346 - DNA, 60 bp, Artificial
  Synthetic oligonucleotide
ccactattgaatccttgatgaacttgtatcaacagctaggagaggttgcaccctacatgg

SEQ ID NO: 96347 - DNA, 60 bp, Artificial
  Synthetic oligonucleotide
gtaccctgaggtccatctagatagccctattgtcacaaacaaactagttgccatccttga

SEQ ID NO: 96348 - DNA, 60 bp, Artificial
  Synthetic oligonucleotide
cagaaggcacctacaattccatcactgaaggattggattacgtattcatcacccacgata

SEQ ID NO: 96349 - DNA, 60 bp, Artificial
  Synthetic oligonucleotide
cggcctgctagtctcacaatcactaaagagcatcgccagatgtgtcttctggtccgagac

SEQ ID NO: 96350 - DNA, 60 bp, Artificial
  Synthetic oligonucleotide
aaccgaaggtaatcagttatgagactatgatgaaagggcatgcagtattttgcgggataa

SEQ ID NO: 96351 - DNA, 60 bp, Artificial
  Synthetic oligonucleotide
gcaacaactgtcgccaagagtatagagaggggttatgatagataccttgcatattctttg

SEQ ID NO: 96352 - DNA, 60 bp, Artificial
  Synthetic oligonucleotide
cgtggtcctaaggcaaaggttgcacgatgtaggtcatcacttaaaggctaatgagaccat

SEQ ID NO: 96353 - DNA, 60 bp, Artificial
  Synthetic oligonucleotide
gtgtatgacaacacccggaattggatcagcgaagctcagaattcagatgtggtccgcctc

SEQ ID NO: 96354 - DNA, 60 bp, Artificial
  Synthetic oligonucleotide
tcagcgaagctcagaattcagatgtggtccgcctattcgagtatgcagcacttgaagtgc

SEQ ID NO: 96355 - DNA, 60 bp, Artificial
  Synthetic oligonucleotide
tccatggaacttctattgatgagaaagcagagatcttttcattctttcggacattcggtc

SEQ ID NO: 96356 - DNA, 60 bp, Artificial
  Synthetic oligonucleotide
cctgtgcagcttggcagagatatctagggatgggccaagactagagtcaatgaactctct

SEQ ID NO: 96357 - DNA, 60 bp, Artificial
  Synthetic oligonucleotide
agcaggaacaaatggtataggccattcctaacttggttcagtatcaaatatgatatgcgg

SEQ ID NO: 96358 - DNA, 60 bp, Artificial
  Synthetic oligonucleotide
aggaacaaatggtataggccattcctaacttggttcagtatcaaatatgacatgcggtgg

SEQ ID NO: 96359 - DNA, 60 bp, Artificial
  Synthetic oligonucleotide
ggatgccaacaggtgtcgcaagacacatgcaatgaagccctgaagattacatggctgggg

SEQ ID NO: 96360 - DNA, 60 bp, Artificial
  Synthetic oligonucleotide
gccaacaggtgtcgcaagacacatgcaatgaagctctgaagattacatggctgggcggga

SEQ ID NO: 96361 - DNA, 60 bp, Artificial
  Synthetic oligonucleotide
ctgcagggtgatacaaaatgtaggactaaaggatgccaacaggtgtcgcaagacacatgc

SEQ ID NO: 96362 - DNA, 60 bp, Artificial
  Synthetic oligonucleotide
cgaagtgtaggactcaaggatgccaacaggtgtcgcaagacacatgcaatgaagccttga

SEQ ID NO: 96363 - DNA, 60 bp, Artificial
  Synthetic oligonucleotide
gcggtgttacaaccagccatccctcgtgatttccgctactaccctaatgttgtggcaaag

SEQ ID NO: 96364 - DNA, 60 bp, Artificial
  Synthetic oligonucleotide
ccggccatccctcgtgatttccgctactaccctaatgtcgtggcaaagaacatagggagg

SEQ ID NO: 96365 - DNA, 60 bp, Artificial
  Synthetic oligonucleotide
gatcacagatgttgatgcggtgttccaaccggccatccctcgtgatttccgctactaccc

SEQ ID NO: 96366 - DNA, 60 bp, Artificial
  Synthetic oligonucleotide
cgatgcggtgttccaaccggccatccctcgtgatttccgctactaccctaatgttgtggc

SEQ ID NO: 96367 - DNA, 60 bp, Artificial
  Synthetic oligonucleotide
gcttggtatctctcatggttgagacccttgtgactatgaacactgcgagatccgacctca

SEQ ID NO: 96368 - DNA, 60 bp, Artificial
  Synthetic oligonucleotide
cccggtagataaagacacaagattcagagtggtgtttgtcaatgggacatctctaggggc

SEQ ID NO: 96369 - DNA, 60 bp, Artificial
  Synthetic oligonucleotide
gccccgattgtgccaagatggactcatctaggacaatcaggctgtactttgattctacct

SEQ ID NO: 96370 - DNA, 60 bp, Artificial
  Synthetic oligonucleotide
ggctcaagtatgggtcacggtggcaaaggccatgactgcatatgagacagcagatgagtc

SEQ ID NO: 96371 - DNA, 60 bp, Artificial
  Synthetic oligonucleotide
taccaatttgccagggactttatgagcacatcattctggagacttggagtagagtacgct

SEQ ID NO: 96372 - DNA, 60 bp, Artificial
  Synthetic oligonucleotide
taccaatttgccaaggactttatgagcacatcattctggagacttggagtagagtacgct

SEQ ID NO: 96373 - DNA, 60 bp, Artificial
  Synthetic oligonucleotide
ctcctgagcttgtcattgtgacacatacagatgagaacaggttcacatgcctcacccagg

SEQ ID NO: 96374 - DNA, 60 bp, Artificial
  Synthetic oligonucleotide
ccccagtgcctcccggtggacaaggacataagattcagagtggtgtttgtcaatgggaca

SEQ ID NO: 96375 - DNA, 60 bp, Artificial
  Synthetic oligonucleotide
gaacacttgaatttcatcccggcgcctactacaggatcaggttgcactcggataccctca

SEQ ID NO: 96376 - DNA, 60 bp, Artificial
  Synthetic oligonucleotide
gcacaaatagcactatcagttctggcaatgataatctcaacctctctcataattgcagcc

SEQ ID NO: 96377 - DNA, 60 bp, Artificial
  Synthetic oligonucleotide
ataaacaaacaaatccaatcttctcacagagtcatggtgtcgcaaaaccacgccaactat

SEQ ID NO: 96378 - DNA, 60 bp, Artificial
  Synthetic oligonucleotide
gtaaacaaacaaatccaatcttctcacagagtcatggtggcgcaaagccacgccaactat

SEQ ID NO: 96379 - DNA, 60 bp, Artificial
  Synthetic oligonucleotide
gggtaaatagacattagttagagttcaatcaatctcaacaaccatttataccgccaattc

SEQ ID NO: 96380 - DNA, 60 bp, Artificial
  Synthetic oligonucleotide
cagccataatattcatcatctctgccaatcacaaagttacactaacaacggtcacagttc

SEQ ID NO: 96381 - DNA, 60 bp, Artificial
  Synthetic oligonucleotide
actcctgagcttgtcattgtgacacatacagatgagaacaagttcacatgcctcacccag

SEQ ID NO: 96382 - DNA, 60 bp, Artificial
  Synthetic oligonucleotide
ctcaagtgatgaggaaccatgttgcccttgcagggaaacagaatgaggccacactggctg

SEQ ID NO: 96383 - DNA, 60 bp, Artificial
  Synthetic oligonucleotide
gcgaaaccttctctctgaggaccagaagaaacatgtaaaggaggcaacctcgactaaccg

SEQ ID NO: 96384 - DNA, 60 bp, Artificial
  Synthetic oligonucleotide
agggaactggtaaataccaattcgccagagactttatgagcacatcattctggagacttg

SEQ ID NO: 96385 - DNA, 60 bp, Artificial
  Synthetic oligonucleotide
ccatcccaagatttacaagaagttctggcatagtgggattatagagccaattcatggtcc

SEQ ID NO: 96386 - DNA, 60 bp, Artificial
  Synthetic oligonucleotide
ccccaagatttacaggaagttctggcatagtgggattatagagccaattcatggcccctc

SEQ ID NO: 96387 - DNA, 60 bp, Artificial
  Synthetic oligonucleotide
ccccaagatttacaggaagttctggcatagtgggattatagagccaattcatggtccctc

SEQ ID NO: 96388 - DNA, 60 bp, Artificial
  Synthetic oligonucleotide
tgatattcatctcacgggcgagatcttctcattctttagaagtttcggccaccccaggct

SEQ ID NO: 96389 - DNA, 60 bp, Artificial
  Synthetic oligonucleotide
gatcacccaagtgaacgcaatcctgcaaccatccgagctgagccaaatggtccaagtgag

SEQ ID NO: 96390 - DNA, 60 bp, Artificial
  Synthetic oligonucleotide
gcaggccaaatcaatcaagcggatagaagtaacgagcactacaagaccgggaaaccgcga

SEQ ID NO: 96391 - DNA, 60 bp, Artificial
  Synthetic oligonucleotide
ccttccgaggtagctgccgatgtggaaactgccccggcatctgctccttatgtgaaagag

SEQ ID NO: 96392 - DNA, 60 bp, Artificial
  Synthetic oligonucleotide
cacatctttggattttgtcatgctcttagatcgtcttactctgatccgaattccgatgag

SEQ ID NO: 96393 - DNA, 60 bp, Artificial
  Synthetic oligonucleotide
gggaagatctcaactggtatagacgtgatgactaaacagacactggatatctcgatcagg

SEQ ID NO: 96394 - DNA, 60 bp, Artificial
  Synthetic oligonucleotide
gcgtgacactactacttactgttttccgcagacagtgcccaacattctttcatgtacatc

SEQ ID NO: 96395 - DNA, 60 bp, Artificial
  Synthetic oligonucleotide
gaggagtgtccaattggaagtgatgctgcgaattgactgtgctgccgactcaccgctgaa

SEQ ID NO: 96396 - DNA, 60 bp, Artificial
  Synthetic oligonucleotide
ccgccacagagaaattttcagcctatgcccactcaatttgtagaaagtattgtgtaccaa

SEQ ID NO: 96397 - DNA, 60 bp, Artificial
  Synthetic oligonucleotide
gaagtccagcgctgcctcaccagcggccctatccggctataagatgacattattggctct

SEQ ID NO: 96398 - DNA, 60 bp, Artificial
  Synthetic oligonucleotide
gggccagaatggcgtgccccgagcagatcatcctccctgaggttcatcttgattcaccga

SEQ ID NO: 96399 - DNA, 60 bp, Artificial
  Synthetic oligonucleotide
cggccaaaatcagcccttgaacttagtcatctgtaccaatctaaccaatataccactctg

SEQ ID NO: 96400 - DNA, 60 bp, Artificial
  Synthetic oligonucleotide
aactacagtcttccagacacaactaaccaatcctgctctcacaccgctgagcattcaagc

SEQ ID NO: 96401 - DNA, 60 bp, Artificial
  Synthetic oligonucleotide
cagcgggattgatacgataccacaggcagataggctcaaggtatttagccatttggtagg

SEQ ID NO: 96402 - DNA, 60 bp, Artificial
  Synthetic oligonucleotide
gactgcaactctgacggcattggattgggcagtagaaatcttcaatctatcattccctca

SEQ ID NO: 96403 - DNA, 60 bp, Artificial
  Synthetic oligonucleotide
cacactcagtcgaattcctggtttagcattgtcggggatttcgtcaactatcagtcatcc

SEQ ID NO: 96404 - DNA, 60 bp, Artificial
  Synthetic oligonucleotide
ccgtgaatccatgtgtgctccaaaagtgattgacctaactaccaatctcaagacattggc

SEQ ID NO: 96405 - DNA, 60 bp, Artificial
  Synthetic oligonucleotide
gcccgtgctgcccataaaacaggggcaattcttactctattgagcttgcccaccgctatg

SEQ ID NO: 96406 - DNA, 60 bp, Artificial
  Synthetic oligonucleotide
tcaagccctcaagaatgtgagcaaattgtgtcttatagccgacgtgatgggtgagagcac

SEQ ID NO: 96407 - DNA, 60 bp, Artificial
  Synthetic oligonucleotide
cctgtcgcaaatggtcctccgtgcagtagaatggcctgcaattataccagagcttaagtc

SEQ ID NO: 96408 - DNA, 60 bp, Artificial
  Synthetic oligonucleotide
gtcttccgtgttcagggcgtttgagctcttcaccttagagcaagagcagaatgagcatgg

SEQ ID NO: 96409 - DNA, 60 bp, Artificial
  Synthetic oligonucleotide
agtgagcccgaaccagttaagaagggcacactccgaccatggcgctcagacaagcaacca

SEQ ID NO: 96410 - DNA, 60 bp, Artificial
  Synthetic oligonucleotide
ttatgaccccagccgattccaatactgaaactggttccacgaaaatgaaggacccgttca

SEQ ID NO: 96411 - DNA, 60 bp, Artificial
  Synthetic oligonucleotide
tggcccaggatctccctgacacttactctaatgataccccgttcctcaatccaaacaccg

SEQ ID NO: 96412 - DNA, 60 bp, Artificial
  Synthetic oligonucleotide
tctgaagtccatcaccaggcatccactccctgcctcactgcatgcatgatcccgttcggc

SEQ ID NO: 96413 - DNA, 60 bp, Artificial
  Synthetic oligonucleotide
ggacgagcaagacatgctacttgatcttgacatgtaacgaactggcaattttccatctac

SEQ ID NO: 96414 - DNA, 60 bp, Artificial
  Synthetic oligonucleotide
ggggctttgttgcaaacgcaggtcaaataatagtgacaaacccttttgacatttcagctg

SEQ ID NO: 96415 - DNA, 60 bp, Artificial
  Synthetic oligonucleotide
cagcagcagtcaccagactcacaacagggaggggaggcaatcaagcacaagagttaatca

SEQ ID NO: 96416 - DNA, 60 bp, Artificial
  Synthetic oligonucleotide
ctgacccttcaagcctcgaaaccaaagccgagactaggaccccaaagggaactccggtaa

SEQ ID NO: 96417 - DNA, 60 bp, Artificial
  Synthetic oligonucleotide
gcggctcgcttatcaagcatgatgacaaattgtatcaacggcaatttaggtgagtgcgta

SEQ ID NO: 96418 - DNA, 60 bp, Artificial
  Synthetic oligonucleotide
gaccaaagacatgttattcagtccgtattatggggagaatgtaatggtgttcgggttcct

SEQ ID NO: 96419 - DNA, 60 bp, Artificial
  Synthetic oligonucleotide
aaagaagtcaccaccgcagcacccgagcctgcagtccgtgggaaagtccgtcccattgat

SEQ ID NO: 96420 - DNA, 60 bp, Artificial
  Synthetic oligonucleotide
gagcgttgcaacagaccctgccaggagcctcgggaagtcaacaatcaagcctgggaagac

SEQ ID NO: 96421 - DNA, 60 bp, Artificial
  Synthetic oligonucleotide
agatcacgataaagctccgtacagtcctgagtcaagttcaccccacaggaaatcattgaa

SEQ ID NO: 96422 - DNA, 60 bp, Artificial
  Synthetic oligonucleotide
gcggagagacaaaccttctcaaggcaatacatgaaccgaagctgactgctttcccctgca

SEQ ID NO: 96423 - DNA, 60 bp, Artificial
  Synthetic oligonucleotide
atgcacacacacaacgaccggaaaggagcacgaacaggtgcacccacacaccaccccaca

SEQ ID NO: 96424 - DNA, 60 bp, Artificial
  Synthetic oligonucleotide
attcacttaaatctgctctacggttatgcggggtatatatttgggcttttggggacacag

SEQ ID NO: 96425 - DNA, 60 bp, Artificial
  Synthetic oligonucleotide
cctgcagtatagatcttgcaaagatggtgcgaaggctatcatggtcatcactacttgggg

SEQ ID NO: 96426 - DNA, 60 bp, Artificial
  Synthetic oligonucleotide
cactcgatggtgacatactcttccctgatcaagatgacattgaactcgatatctttggcg

SEQ ID NO: 96427 - DNA, 60 bp, Artificial
  Synthetic oligonucleotide
gccaatcaagaaggcgcagacgatttgcaggtgtggctatagggttagcagccctaggag

SEQ ID NO: 96428 - DNA, 60 bp, Artificial
  Synthetic oligonucleotide
gcaagtttacggatataccattacaggatgatactgactctcaacatccatcaggctcca

SEQ ID NO: 96429 - DNA, 60 bp, Artificial
  Synthetic oligonucleotide
aggggacaatcaagcaatggcaataaccacattagttcctagatccctctcccatagcac

SEQ ID NO: 96430 - DNA, 60 bp, Artificial
  Synthetic oligonucleotide
ctgacatgctggagggccgtatgaacatcttagtgattgctgactctagttgctaccttc

SEQ ID NO: 96431 - DNA, 60 bp, Artificial
  Synthetic oligonucleotide
ctgacccatgagctgcagacggcacggaaacagggtgctataactggaaaatactacgcc

SEQ ID NO: 96432 - DNA, 60 bp, Artificial
  Synthetic oligonucleotide
aaatgattcgccaatgcaatacagtctgcaagggtccaggacagaagccaggaagccaga

SEQ ID NO: 96433 - DNA, 60 bp, Artificial
  Synthetic oligonucleotide
gcccttctggaaatgtctgagatgatggagtttgcaccagctaactaccctctttgctac

SEQ ID NO: 96434 - DNA, 60 bp, Artificial
  Synthetic oligonucleotide
gcttgtcttatgctattctccagttatctgatcccgttcccgagttgaggggtgagttcc

SEQ ID NO: 96435 - DNA, 60 bp, Artificial
  Synthetic oligonucleotide
gggaagttgtaatgccaagagttgcgcacatcataatggagcagtctgtgtgtgggagga

SEQ ID NO: 96436 - DNA, 60 bp, Artificial
  Synthetic oligonucleotide
gccctggagatggtgattggaatactcttgcctcagatccttatgctttaaacatcaact

SEQ ID NO: 96437 - DNA, 60 bp, Artificial
  Synthetic oligonucleotide
ggcctcgtctttgctcttggcggaatcggagggaccagcctacatatcagatgtactggg

SEQ ID NO: 96438 - DNA, 60 bp, Artificial
  Synthetic oligonucleotide
cccagaagttaacagagataatgcagttcatatcaaacaagatcaaattcctcaacccag

SEQ ID NO: 96439 - DNA, 60 bp, Artificial
  Synthetic oligonucleotide
gccggaattgtaagccgcccatacatgagcatgatgagagacccacaggcgactttcatg

SEQ ID NO: 96440 - DNA, 60 bp, Artificial
  Synthetic oligonucleotide
cttatgtactgcgatgtagtggaaggaaggttaatgacggaaactgcaatgactgtggac

SEQ ID NO: 96441 - DNA, 60 bp, Artificial
  Synthetic oligonucleotide
ggtgcaagttgaccaaccatgtcttctccgcgtgacaaggtcgacgcattctacaaggac

SEQ ID NO: 96442 - DNA, 60 bp, Artificial
  Synthetic oligonucleotide
ctctcaatcacttaaaagtgtggctcggtgtgttttctggtcggaaacaattgtggatga

SEQ ID NO: 96443 - DNA, 60 bp, Artificial
  Synthetic oligonucleotide
ctctggacaataagtacaataccctacctgtacctagcggctcatgagagtggagttagg

SEQ ID NO: 96444 - DNA, 60 bp, Artificial
  Synthetic oligonucleotide
gagggatctgcaacttaagccggtagacaggaaaatgagctctgctgtgggatttgtccc

SEQ ID NO: 96445 - DNA, 60 bp, Artificial
  Synthetic oligonucleotide
ccgaagcaaggccgcctgcgaagaatcaagcgagagtcatcaccaggacaactccgaaaa

SEQ ID NO: 96446 - DNA, 60 bp, Artificial
  Synthetic oligonucleotide
cggacccttgataatccatggagcagggatggacatttacgaaggccccagtagcaatca

SEQ ID NO: 96447 - DNA, 60 bp, Artificial
  Synthetic oligonucleotide
atcctatcaattggcacaggatttggataaaggttcacagtcatggcgacacttcttcgg

SEQ ID NO: 96448 - DNA, 60 bp, Artificial
  Synthetic oligonucleotide
cccattcagaatcaaggcaagaggagagccaatttatctgaggatagagtgtttcccctg

SEQ ID NO: 96449 - DNA, 60 bp, Artificial
  Synthetic oligonucleotide
ccaagatgagagccatggccaagctattggaaaaccaaggcccgcgtgatgtcactgcgc

SEQ ID NO: 96450 - DNA, 60 bp, Artificial
  Synthetic oligonucleotide
ttcttcatcctgacagaggcgatgccagtactccagggaacatccttcgcgcaaacgagg

SEQ ID NO: 96451 - DNA, 60 bp, Artificial
  Synthetic oligonucleotide
gtgagaagtccctatcagggctcacttttgcatccagaggcgctaatatggaggatgagg

SEQ ID NO: 96452 - DNA, 60 bp, Artificial
  Synthetic oligonucleotide
gagcaccaggttacatccctaatgaaggagagcccgagccaggagacatcggaaaggagg

SEQ ID NO: 96453 - DNA, 60 bp, Artificial
  Synthetic oligonucleotide
ccaaggagacatcatctttacgagttccctatattgggtcaacaacagaggaaaggacag

SEQ ID NO: 96454 - DNA, 60 bp, Artificial
  Synthetic oligonucleotide
gacatccaccaatttggctcatcgattgagggatcgtaacactcaggtaaagtactcagg

SEQ ID NO: 96455 - DNA, 66 bp, Artificial
  Synthetic oligonucleotide
gttgggcttaagtacaatagattaatcaaccctgaaggaataaaacaacaactactaaaattgagc

SEQ ID NO: 96456 - DNA, 60 bp, Artificial
  Synthetic oligonucleotide
gaggtttgcaggagtggtcttggcaggtgtggcattgggagttgctactgccgcccagat

SEQ ID NO: 96457 - DNA, 60 bp, Artificial
  Synthetic oligonucleotide
tcccagagccatagaaagcacctcgtggagtttgttacttggtcaacggggcagctgtat

SEQ ID NO: 96458 - DNA, 60 bp, Artificial
  Synthetic oligonucleotide
cacaacaaccaggggattcctctttcctagattgggcgagtgatccctactcagctaatc

SEQ ID NO: 96459 - DNA, 60 bp, Artificial
  Synthetic oligonucleotide
caggagaggatgggttattcttgggtgaaggttcaggttctatgctagtcacgtataggg

SEQ ID NO: 96460 - DNA, 60 bp, Artificial
  Synthetic oligonucleotide
ccaaggaagatgttgcacgattactcagtactataggcacagcccagcatgatctcccca

SEQ ID NO: 96461 - DNA, 60 bp, Artificial
  Synthetic oligonucleotide
gcaatactagagagtcgagggataaaagcaaaagttacccatgttgatttagaaggttac

SEQ ID NO: 96462 - DNA, 60 bp, Artificial
  Synthetic oligonucleotide
actgcagtcgattacgagagtggaaaatgctatgtcccggttgagttgtcaggagccaag

SEQ ID NO: 96463 - DNA, 60 bp, Artificial
  Synthetic oligonucleotide
gtggtaaatctaagactcatgagttacccctaccacaggcacaagatctaccccgactgt

SEQ ID NO: 96464 - DNA, 60 bp, Artificial
  Synthetic oligonucleotide
cgtagggagccgtgaacccgtgctgcagatgacaaatttcatggtgattgatgaggacga

SEQ ID NO: 96465 - DNA, 60 bp, Artificial
  Synthetic oligonucleotide
ccggttgatgcgctcctgaccaatcaccgcgagcgaccaagaatccagagctctcgatct

SEQ ID NO: 96466 - DNA, 60 bp, Artificial
  Synthetic oligonucleotide
gcctccgatttcccttccgactcatgcatcttcaatagttaggaatgccctggcttcagg

SEQ ID NO: 96467 - DNA, 60 bp, Artificial
  Synthetic oligonucleotide
cggtatggccaaagatgaacatgatcttacaaaggcactccacacactagcggtttcagg

SEQ ID NO: 96468 - DNA, 60 bp, Artificial
  Synthetic oligonucleotide
tcaggggttaaacagtcctacatccagtgaccccaaaagccaagacgtgacatcactcgc

SEQ ID NO: 96469 - DNA, 60 bp, Artificial
  Synthetic oligonucleotide
gctcgtggttccaacaggcagtgatgatgatgcagaattcagagacggagatgagagctc

SEQ ID NO: 96470 - DNA, 60 bp, Artificial
  Synthetic oligonucleotide
cgcagtggctcgcgaatcacttgcagggatgctcgatactactaaagggctaataagggc

SEQ ID NO: 96471 - DNA, 60 bp, Artificial
  Synthetic oligonucleotide
acctgaagaactgcttaaagaggccaccgaattggatattgtggtaaggaggacagcggg

SEQ ID NO: 96472 - DNA, 60 bp, Artificial
  Synthetic oligonucleotide
gtagacagattcctaaaggtcccaccaattccaacctcagtgccgctggaccccgctccc

SEQ ID NO: 96473 - DNA, 60 bp, Artificial
  Synthetic oligonucleotide
cagaaacccccacaaggatctggtaccacagcctcccagaaatcccagaacaatggccat

SEQ ID NO: 96474 - DNA, 60 bp, Artificial
  Synthetic oligonucleotide
cggcttgacaagggatggttggatgctgtgagaaatcggattgcggaggacctatcgttg

SEQ ID NO: 96475 - DNA, 60 bp, Artificial
  Synthetic oligonucleotide
cgcaccatcagcactcccactctccaatccatcctctaatcagtggtcgctctagacccc

SEQ ID NO: 96476 - DNA, 60 bp, Artificial
  Synthetic oligonucleotide
ctacagttgagtctctaatgaacctctaccaacagatgggcgagactgcaccgtacatgg

SEQ ID NO: 96477 - DNA, 60 bp, Artificial
  Synthetic oligonucleotide
ggtgccgggtgcggaatcaagaatggacatgatcaggaggcttacgagactgtcagtgct

SEQ ID NO: 96478 - DNA, 60 bp, Artificial
  Synthetic oligonucleotide
gttacgacagggatcacagatttgggagcctacatgcagagttctcaatggtatgggcct

SEQ ID NO: 96479 - DNA, 60 bp, Artificial
  Synthetic oligonucleotide
gactgggtcaagagatggtcaggagatcagcaggcaaggtgagctcatcgctagccgcag

SEQ ID NO: 96480 - DNA, 60 bp, Artificial
  Synthetic oligonucleotide
ggcaaggtttaaggaaaacacaaggagtcaacaaggcatgtttcacgcttatccggttct

SEQ ID NO: 96481 - DNA, 60 bp, Artificial
  Synthetic oligonucleotide
gtgcaggagctttagtgattctgtgcgtattggtatactgttgtaggaggcactgtcgca

SEQ ID NO: 96482 - DNA, 60 bp, Artificial
  Synthetic oligonucleotide
tgaacaccaactagggctggatcgtagtgttaaggtattattcaacgggaaaccagaggt

SEQ ID NO: 96483 - DNA, 60 bp, Artificial
  Synthetic oligonucleotide
gaagaggggcggttaaacagatcaggctgagggttgatcctgggttcgtatcggaagttc

SEQ ID NO: 96484 - DNA, 60 bp, Artificial
  Synthetic oligonucleotide
caccataattagccaggatccagataaactcttaacattcgtcgccgcagacaaatgccc

SEQ ID NO: 96485 - DNA, 60 bp, Artificial
  Synthetic oligonucleotide
gtgcgagagtgatgaagatgtagtcagtgaccggtttgagaatatccaagcaaggtacct

SEQ ID NO: 96486 - DNA, 60 bp, Artificial
  Synthetic oligonucleotide
tgggctttcgagatacattatcaccgtccttcaggcaagtaccaaatgggagagttgctc

SEQ ID NO: 96487 - DNA, 60 bp, Artificial
  Synthetic oligonucleotide
gtgcagatgtagctgatgagttacatgggacacaaagcttattctgttggttacatctta

SEQ ID NO: 96488 - DNA, 60 bp, Artificial
  Synthetic oligonucleotide
gtctcgtaaggctccatgcaaatatgaagtgcggggcaaatgcaatagaggaagtgagtg

SEQ ID NO: 96489 - DNA, 60 bp, Artificial
  Synthetic oligonucleotide
gtctcgtaaggctccatgcaaatatgaagtgcggggcaaatgcaacagagggagtgattg

SEQ ID NO: 96490 - DNA, 60 bp, Artificial
  Synthetic oligonucleotide
gtctcgcaaggctccatgcaaatatgaagtgcggggcaaatgcaacagaggaagtgagtg

SEQ ID NO: 96491 - DNA, 60 bp, Artificial
  Synthetic oligonucleotide
gcacagttgcaaatgtcagatcccatcccagaactcagaggacaattccatgcattcgta

SEQ ID NO: 96492 - DNA, 60 bp, Artificial
  Synthetic oligonucleotide
tcctctcttggaaagaatacaataccaccaggggtcacaggactactaaccaatgctgca

SEQ ID NO: 96493 - DNA, 60 bp, Artificial
  Synthetic oligonucleotide
ccggaaagccgatcccaaaccctctattaggtctggactccaccccgagcacccaaactg

SEQ ID NO: 96494 - DNA, 60 bp, Artificial
  Synthetic oligonucleotide
cacagcaatttggatcaagcggtcaagaagcagcatatggccacacaacctgttttaggg

SEQ ID NO: 96495 - DNA, 60 bp, Artificial
  Synthetic oligonucleotide
ccagaacgcagcagttggagctcccatccatacagatgacctgaatgccgcactgggtga

SEQ ID NO: 96496 - DNA, 60 bp, Artificial
  Synthetic oligonucleotide
gccgatgcctggttactgaccaacccttcgtctaccagtacatttggatcagaagcaacc

SEQ ID NO: 96497 - DNA, 60 bp, Artificial
  Synthetic oligonucleotide
cggacgggttagcaacaagcgactgccggtgccaacagcgcaatccacaatctacaatgg

SEQ ID NO: 96498 - DNA, 60 bp, Artificial
  Synthetic oligonucleotide
cccgggtgcagcattaaacaatctggcatctacattaagtcatccaaaacttttccgacg

SEQ ID NO: 96499 - DNA, 60 bp, Artificial
  Synthetic oligonucleotide
ggccttcgtgaccgacctcgagtcagagtagttcaataaggacctatcaagtttgggcaa

SEQ ID NO: 96500 - DNA, 60 bp, Artificial
  Synthetic oligonucleotide
cgtcacaacattttatcactatgcacagttagcacttacctgaatcctctgaagaaaaga

SEQ ID NO: 96501 - DNA, 60 bp, Artificial
  Synthetic oligonucleotide
gacaaccatcttccacaatcaaattacaaaccctgcattgagtcccattacaattcaagc

SEQ ID NO: 96502 - DNA, 60 bp, Artificial
  Synthetic oligonucleotide
caacttgggaagaaaagagaggctgtgaccgctgcaatggttacccttggatgtgggcct

SEQ ID NO: 96503 - DNA, 60 bp, Artificial
  Synthetic oligonucleotide
gggagaaaaccgggaaacggctcatgggctactttagcagctgacccgtactcaatcaat

SEQ ID NO: 96504 - DNA, 60 bp, Artificial
  Synthetic oligonucleotide
gcacccaatcatcatgttctaatcttgcaactactgtcatgaggttaactgagaatggtg

SEQ ID NO: 96505 - DNA, 60 bp, Artificial
  Synthetic oligonucleotide
gttccaagtgtcactaaaacactatggtccgtgggctgtgagattacaaaggcgaaggca

SEQ ID NO: 96506 - DNA, 60 bp, Artificial
  Synthetic oligonucleotide
aatgttttcgctaccatcagccacaatgctcaatcatgtcaaattagctgaccagtcacc

SEQ ID NO: 96507 - DNA, 60 bp, Artificial
  Synthetic oligonucleotide
gatgtactgttttgtttctactcaaccagagagggatgactacttttctgccgctcctcc

SEQ ID NO: 96508 - DNA, 60 bp, Artificial
  Synthetic oligonucleotide
gggacaccccatgctcactgccagtcaagctgcaggaaaggtacgcgagtctatgtgtgc

SEQ ID NO: 96509 - DNA, 60 bp, Artificial
  Synthetic oligonucleotide
gagaacccacggcttgcagcattcgccagcaacaattactacctgaccagaaaattattg

SEQ ID NO: 96510 - DNA, 60 bp, Artificial
  Synthetic oligonucleotide
attgatccgttggatatatcccaaaatctagctgcggtgaataagagtctaagtgatgca

SEQ ID NO: 96511 - DNA, 60 bp, Artificial
  Synthetic oligonucleotide
caccttctctccagtggttgggagctttctcactcgattcgtgctgttcgatggaatagt

SEQ ID NO: 96512 - DNA, 60 bp, Artificial
  Synthetic oligonucleotide
tagttgtgacatctgaagatagccttattctcagtgaccgatccatgaatctcattgcaa

SEQ ID NO: 96513 - DNA, 60 bp, Artificial
  Synthetic oligonucleotide
ggtgactggcagcttgatccaagcctatcccgcatcgcaatgcaccattacacccaacac

SEQ ID NO: 96514 - DNA, 55 bp, Artificial
  Synthetic oligonucleotide
cattaggttgtgtagtctattgtcacgatccaatggatcaaagggagtcaacaga

SEQ ID NO: 96515 - DNA, 60 bp, Artificial
  Synthetic oligonucleotide
gcagctggtttggcaatcgaatgattcagtctgggatcctggcatgtcctcttcgacagg

SEQ ID NO: 96516 - DNA, 60 bp, Artificial
  Synthetic oligonucleotide
atccggaagggaatggtggtcagacatttcctcacctttgaactgcagcttgcccgagca

SEQ ID NO: 96517 - DNA, 60 bp, Artificial
  Synthetic oligonucleotide
ctgacacactaaaccatgcaacacctttcgttgattccgaagtcgagggaactgcatggg

SEQ ID NO: 96518 - DNA, 57 bp, Artificial
  Synthetic oligonucleotide
cagcaaatcgaggggcagacaccaggggaggagtcaacccgttctcatctgtcactg

SEQ ID NO: 96519 - DNA, 60 bp, Artificial
  Synthetic oligonucleotide
ccagacccttggtgagcaggcccgatatttggccctattggagtcaccacatttgatgga

SEQ ID NO: 96520 - DNA, 60 bp, Artificial
  Synthetic oligonucleotide
gccacgacaccagagggctgcaccaggatcccatcattctcgctcactaagacacactgg

SEQ ID NO: 96521 - DNA, 60 bp, Artificial
  Synthetic oligonucleotide
acacactacctgaggcagccatgccatccatcagcattcccgcagaccccaccaatccac

SEQ ID NO: 96522 - DNA, 60 bp, Artificial
  Synthetic oligonucleotide
acactagagttaacatcacacttgaacagctgcaatccctcaccccacttccaacctctg

SEQ ID NO: 96523 - DNA, 60 bp, Artificial
  Synthetic oligonucleotide
tgcaggtacttcccagtgcattcagaatctcagctatggactgacaggtcgtgggaacct

SEQ ID NO: 96524 - DNA, 60 bp, Artificial
  Synthetic oligonucleotide
ccttgacgatttaggtccattacataatcaaaattggaatcagatagcacatgaagagtc

SEQ ID NO: 96525 - DNA, 60 bp, Artificial
  Synthetic oligonucleotide
gggagatgaagtcaaggtcactgagtggtgcaatccatcctgttctccaatcaccgctgc

SEQ ID NO: 96526 - DNA, 60 bp, Artificial
  Synthetic oligonucleotide
tatcctcatctctttgagtggattcacttacggctaatgcgtagtacactttacgtgggg

SEQ ID NO: 96527 - DNA, 60 bp, Artificial
  Synthetic oligonucleotide
cttgaaacatgtagcatcgacattgcaaggaacctccggaagctctcctgggccccactc

SEQ ID NO: 96528 - DNA, 60 bp, Artificial
  Synthetic oligonucleotide
gactgacctctaatcgagactacaccgccgcaaactataggtgggtggtacctcagtgat

SEQ ID NO: 96529 - DNA, 60 bp, Artificial
  Synthetic oligonucleotide
ggctcgaccaactgcaacaagtgttaagaagattgtcaggaaggttcctcctcagaagga

SEQ ID NO: 96530 - DNA, 60 bp, Artificial
  Synthetic oligonucleotide
cctgtgtaagcccgattcgccacttatgaaggtccatacccctgacaaggagggaagagg

SEQ ID NO: 96531 - DNA, 60 bp, Artificial
  Synthetic oligonucleotide
tcctaacacctgctataggctatccactgcatcatctctcctgccatacttcctactcac

SEQ ID NO: 96532 - DNA, 60 bp, Artificial
  Synthetic oligonucleotide
cctgtggactcctgcattctctcagaagcattaacagtcaagccacatattacagtaccg

SEQ ID NO: 96533 - DNA, 60 bp, Artificial
  Synthetic oligonucleotide
gagacgattaggaaccagttgattccaactcggaggagacgccggtttgcaggggtggtg

SEQ ID NO: 96534 - DNA, 60 bp, Artificial
  Synthetic oligonucleotide
cagcttgtgtagaattcatcatcaatcgagtcggcccaaggacttgcagtttagtacatg

SEQ ID NO: 96535 - DNA, 60 bp, Artificial
  Synthetic oligonucleotide
tgcctactcagttcattgagagtgtcccatacaagctctggcaagcacacacagatcaat

SEQ ID NO: 96536 - DNA, 60 bp, Artificial
  Synthetic oligonucleotide
ccaaatccattcaatcgacggctgttgctaaactttctcggagatgacaaattcgacccg

SEQ ID NO: 96537 - DNA, 60 bp, Artificial
  Synthetic oligonucleotide
gaggtttatttaatttgtatccttgccaacaactttgcattccagactgtctcgcaggca

SEQ ID NO: 96538 - DNA, 60 bp, Artificial
  Synthetic oligonucleotide
ctctgcagtcgctctacctctacaattggacactcttgaatcaacactccttacagccat

SEQ ID NO: 96539 - DNA, 60 bp, Artificial
  Synthetic oligonucleotide
caggggtgcctcgagtagcttaaaagcagttcttagactggcgggagtgtacatctgggc

SEQ ID NO: 96540 - DNA, 60 bp, Artificial
  Synthetic oligonucleotide
ctcaaatgtggagggacaccaaatgcacggaatctcatcgatatcgagccagtcgcaact

SEQ ID NO: 96541 - DNA, 60 bp, Artificial
  Synthetic oligonucleotide
gcaacccctttaggttgtgatatgctgtgctccaaggtcacagagactgaagaggaggat

SEQ ID NO: 96542 - DNA, 60 bp, Artificial
  Synthetic oligonucleotide
ggaccctgtccatggtgagtttgcaccaggcaactatccagcactctggagctatgcaat

SEQ ID NO: 96543 - DNA, 60 bp, Artificial
  Synthetic oligonucleotide
gcgggcctgatataggagtggagagggacactgtccgtgcattgatcatgtcacgcccaa

SEQ ID NO: 96544 - DNA, 60 bp, Artificial
  Synthetic oligonucleotide
gcgggcctgatataggagtggaaaaggacactgtccgtgcattgatcatgtcacgcccaa

SEQ ID NO: 96545 - DNA, 60 bp, Artificial
  Synthetic oligonucleotide
ccacctcagcgcaaatcaccgcagcagtcgctcttgtcgaagctaaacaggcaaggtcag

SEQ ID NO: 96546 - DNA, 52 bp, Artificial
  Synthetic oligonucleotide
ccataagataggccaagtctttgttactcctgagcttgtcattgtgacacat

SEQ ID NO: 96547 - DNA, 60 bp, Artificial
  Synthetic oligonucleotide
gtgggagtgggtatgccgcagctgtccatgcagttcttcatagttcaggggatggtggtg

SEQ ID NO: 96548 - DNA, 60 bp, Artificial
  Synthetic oligonucleotide
ccaccgggtagaactttagccgcatatccactcggtgtagggcagagtattgcaggtccc

SEQ ID NO: 96549 - DNA, 60 bp, Artificial
  Synthetic oligonucleotide
ccggttaatgtgtgaggttgcaatggcggcagatccaaaatatggctctctaataccaca

SEQ ID NO: 96550 - DNA, 60 bp, Artificial
  Synthetic oligonucleotide
cactggcggaaaccaaacaacacattcctatagaggtcctgcaaatgtcaattactcccc

SEQ ID NO: 96551 - DNA, 60 bp, Artificial
  Synthetic oligonucleotide
gatgccgtcagagggcaaagagagtttgcaccgtaccctgctgaggttgctcttgtttcg

SEQ ID NO: 96552 - DNA, 60 bp, Artificial
  Synthetic oligonucleotide
cctaccttgcataccatgctgccggtggtgactggctcacagttggccctaggtttatcc

SEQ ID NO: 96553 - DNA, 60 bp, Artificial
  Synthetic oligonucleotide
attcaggatccattgtctggtcatatcactgtacaagcattgtcccaagcagccggaggg

SEQ ID NO: 96554 - DNA, 60 bp, Artificial
  Synthetic oligonucleotide
cacgtgtaaggacattctctactgcgatacggaaccctaaaacatgtcaaagggcagggc

SEQ ID NO: 96555 - DNA, 60 bp, Artificial
  Synthetic oligonucleotide
cagccaaccctcaacaagccccacgcaacaaccgtaacaggaggaggagaggtcaacctg

SEQ ID NO: 96556 - DNA, 60 bp, Artificial
  Synthetic oligonucleotide
cccacaaacaaatttatcgacgtctttgggatgctgacctgattgaaccgacaagtggcc

SEQ ID NO: 96557 - DNA, 60 bp, Artificial
  Synthetic oligonucleotide
cccaacaagtggactcggtgcaaattatcgttactctcctgggctaaatgactccaaacc

SEQ ID NO: 96558 - DNA, 60 bp, Artificial
  Synthetic oligonucleotide
gctatgggagttggttcagcgttggatagagcgatggccaacttaaatttcaatcggtca

SEQ ID NO: 96559 - DNA, 60 bp, Artificial
  Synthetic oligonucleotide
ccatcaatcctcacatgactcctgatattaagaacccaatccttggcaatcggtcttggt

SEQ ID NO: 96560 - DNA, 60 bp, Artificial
  Synthetic oligonucleotide
gcttgggcctggtaagactgacccacctatcgctctccctacgaaagcatctactccagt

SEQ ID NO: 96561 - DNA, 60 bp, Artificial
  Synthetic oligonucleotide
gagagaagtgatattaaagtcggacatgtaaggaacccaagcaaagccctcaaagcagca

SEQ ID NO: 96562 - DNA, 60 bp, Artificial
  Synthetic oligonucleotide
gcagtggattccttaatacttgggcattatatttcctccaacacatatcatggtctgtat

SEQ ID NO: 96563 - DNA, 60 bp, Artificial
  Synthetic oligonucleotide
agctcctgtggcgaacacaatgctccattcagagggtagttgcagttttccagccctcag

SEQ ID NO: 96564 - DNA, 60 bp, Artificial
  Synthetic oligonucleotide
ccctgtcatgttactcccctaaccctccgcttgatgattatgtcctttgtacagcagtca

SEQ ID NO: 96565 - DNA, 60 bp, Artificial
  Synthetic oligonucleotide
tcctatgttaagaggactgttccatgatgggaccgctgaagaggatcataagcttgcagc

SEQ ID NO: 96566 - DNA, 60 bp, Artificial
  Synthetic oligonucleotide
cgcctttccatatcatcagttccaaggaataacaagtatcgccaacaagtagcagatctg

SEQ ID NO: 96567 - DNA, 60 bp, Artificial
  Synthetic oligonucleotide
tctcggattaaggacaaggatatgaacactagaatgaggaggctacttaatacagccaag

SEQ ID NO: 96568 - DNA, 60 bp, Artificial
  Synthetic oligonucleotide
ctctggaagggcagttgagctcggtaatgattgcagtcccttcaactgggtcccaaccac

SEQ ID NO: 96569 - DNA, 60 bp, Artificial
  Synthetic oligonucleotide
ccagtaccggcaccaaacctacaataatgtctggggtgctaagtgcactacgtgagttca

SEQ ID NO: 96570 - DNA, 60 bp, Artificial
  Synthetic oligonucleotide
cagcagggaacggaattatggaaaagctctaccctcatactggatcagaacctgaacaga

SEQ ID NO: 96571 - DNA, 60 bp, Artificial
  Synthetic oligonucleotide
cggatgactgatcatccgaatgtggccagtacacagagctgtccgataatcagaccgccc

SEQ ID NO: 96572 - DNA, 60 bp, Artificial
  Synthetic oligonucleotide
gctgcccaagtcacagctggagtagcactgtatgaggcccgccagaacgctgctgctata

SEQ ID NO: 96573 - DNA, 60 bp, Artificial
  Synthetic oligonucleotide
gaggccgagagtcaagataggagtgagaaggaacccggatctggtcggagtggagaggag

SEQ ID NO: 96574 - DNA, 60 bp, Artificial
  Synthetic oligonucleotide
ctcattgattaccgcagtgagctgtcagatttccttccagaatttgagtaccatcggcgt

SEQ ID NO: 96575 - DNA, 60 bp, Artificial
  Synthetic oligonucleotide
cctggatctctgtacagtgccagacagaccaatccatagctccccactcacagtctcctc

SEQ ID NO: 96576 - DNA, 60 bp, Artificial
  Synthetic oligonucleotide
tcattaagcaccagccacgatcagtgtctcactctatagctacaacaatgagtcttccta

SEQ ID NO: 96577 - DNA, 58 bp, Artificial
  Synthetic oligonucleotide
ctgattggccatgacccttctcacggaactcgaccaattgttgctggagttgtgatga

SEQ ID NO: 96578 - DNA, 60 bp, Artificial
  Synthetic oligonucleotide
ttccgtggttcagcaacccagactcaacagaggtatacgtcataggaataggcctcaaaa

SEQ ID NO: 96579 - DNA, 60 bp, Artificial
  Synthetic oligonucleotide
gatccaggatcctaaagccaacttttggggttcaaaatggttgatccacctgcagtatcc

SEQ ID NO: 96580 - DNA, 60 bp, Artificial
  Synthetic oligonucleotide
cctagagtccagtctcaccacgatagaacatggtccgactctagcaccaaaatcaggacc

SEQ ID NO: 96581 - DNA, 60 bp, Artificial
  Synthetic oligonucleotide
ctgcaagtgtgaagatccagaggagacaatcactcaggacccggcatatcctttgatggt

SEQ ID NO: 96582 - DNA, 60 bp, Artificial
  Synthetic oligonucleotide
ggttaagacactgattgaaatccagagaatggggcagggaaaaggaaggttgctggaggt

SEQ ID NO: 96583 - DNA, 60 bp, Artificial
  Synthetic oligonucleotide
agaaacagtggataatacccattactactcctgaagctaagatgtggtggaaggcaatag

SEQ ID NO: 96584 - DNA, 60 bp, Artificial
  Synthetic oligonucleotide
ggcgggagaagtgcagatgcgggtggtgtccaaaagaatgcccggaatgtgctcttggca

SEQ ID NO: 96585 - DNA, 60 bp, Artificial
  Synthetic oligonucleotide
cgcctgatgacttcccttttgaagaatctgaagcttggagacaggatgacatgccaatgg

SEQ ID NO: 96586 - DNA, 60 bp, Artificial
  Synthetic oligonucleotide
ccttggatagcaccgcgaggacgttataatcatgtaccctatccagagtgtaatagtcga

SEQ ID NO: 96587 - DNA, 60 bp, Artificial
  Synthetic oligonucleotide
attccagattgacgttggggctgagtacttcacagtcgataaagttgtagtagtgcctag

SEQ ID NO: 96588 - DNA, 60 bp, Artificial
  Synthetic oligonucleotide
caactccaatcccctcaaattcaagcggcacaccagtcgttataagatcagatggaactg

SEQ ID NO: 96589 - DNA, 60 bp, Artificial
  Synthetic oligonucleotide
cccgaggaatatagatacccaaaaccaaggactgcatctagttaccacagcaggaaagtc

SEQ ID NO: 96590 - DNA, 60 bp, Artificial
  Synthetic oligonucleotide
cgccactttgaaataggcttggtgcgtagagatgcctggtgggaccctgtcctaacaccg

SEQ ID NO: 96591 - DNA, 60 bp, Artificial
  Synthetic oligonucleotide
aaagatgaagcacctatacttgctggtgccttccttgagcactgcttgtccgaagtaaca

SEQ ID NO: 96592 - DNA, 60 bp, Artificial
  Synthetic oligonucleotide
gcggagcatggcctcccgttcaattccctgaccacataagcaaccctataaggtcagctc

SEQ ID NO: 96593 - DNA, 60 bp, Artificial
  Synthetic oligonucleotide
gagggcttcaaccagaagttgtggacaatagccactatcccgttcctatacttgtctgcg

SEQ ID NO: 96594 - DNA, 60 bp, Artificial
  Synthetic oligonucleotide
ccggaacacagtcagatgaaccggttgtcaaaccaaagcgaaagaataagaaatcaccca

SEQ ID NO: 96595 - DNA, 60 bp, Artificial
  Synthetic oligonucleotide
gacgcaggtccatccctttactccagcaaccatggcaacgatgcatgaattcctacctgg

SEQ ID NO: 96596 - DNA, 60 bp, Artificial
  Synthetic oligonucleotide
actatgacggagttgttctatctcaagctctcaagtcaatcgctaggtgtgttttctggt

SEQ ID NO: 96597 - DNA, 60 bp, Artificial
  Synthetic oligonucleotide
ggttctgatgtattgtgatgttgtggaagggaggtggaatatgtctgctgcagggcagtt

SEQ ID NO: 96598 - DNA, 60 bp, Artificial
  Synthetic oligonucleotide
gcagaccttgcattgcctaattctatctctgttaacctgctagtgacacttaagaccggg

SEQ ID NO: 96599 - DNA, 60 bp, Artificial
  Synthetic oligonucleotide
ggaggcgtcaggaggacgagagtcgctctcggatgttatcggattcctcgatgcagtcct

SEQ ID NO: 96600 - DNA, 60 bp, Artificial
  Synthetic oligonucleotide
gggttagagaagcaattgcagggatgcttgatacaaccaagtctctggtgagggcaagcg

SEQ ID NO: 96601 - DNA, 60 bp, Artificial
  Synthetic oligonucleotide
agcaacagattcatccacagacggttatgagacgttaagttgcttcctaacaacagacct

SEQ ID NO: 96602 - DNA, 60 bp, Artificial
  Synthetic oligonucleotide
tgggaccatagcacttggagtggcaacatcagcacagataaccgcagggatcgcgctagc

SEQ ID NO: 96603 - DNA, 60 bp, Artificial
  Synthetic oligonucleotide
cctctattttgctcaacattcggaggtatcctagtcaatcagtttgcatactcactctac

SEQ ID NO: 96604 - DNA, 60 bp, Artificial
  Synthetic oligonucleotide
caagttatccattgcaaccaccttcttagctcactcattagacacagataagcagcactc

SEQ ID NO: 96605 - DNA, 60 bp, Artificial
  Synthetic oligonucleotide
ccgagagttaagagagggaagttcgtcgtcagggatgcttagaccttaccaccaggcgtt

SEQ ID NO: 96606 - DNA, 60 bp, Artificial
  Synthetic oligonucleotide
gaggctgcatataccacgacatcatgtatcacgcactttggcaaaggctactgtttccac

SEQ ID NO: 96607 - DNA, 60 bp, Artificial
  Synthetic oligonucleotide
gtgagtttgcaccaggcaactatccagcactctggagctatgcaatgggagtcgccgttg

SEQ ID NO: 96608 - DNA, 60 bp, Artificial
  Synthetic oligonucleotide
ggaagcaggagagtcgaaggacactaatctcgtgtatcagcagattatgctaactgggct

SEQ ID NO: 96609 - DNA, 60 bp, Artificial
  Synthetic oligonucleotide
ctgttgcagtacgagacactgactagaactctcagaaagccggtgaaagataacattgag

SEQ ID NO: 96610 - DNA, 60 bp, Artificial
  Synthetic oligonucleotide
cttaatctcaatcagtgcaatccacctagcagctgtgagagtgggtgtcagggtctctgc

SEQ ID NO: 96611 - DNA, 60 bp, Artificial
  Synthetic oligonucleotide
ggagaagccactgatattacacttacatcttaataacgggtgctgtataatggagtcccc

SEQ ID NO: 96612 - DNA, 60 bp, Artificial
  Synthetic oligonucleotide
cggaaatcatgctcagtagtggcaaccgggactaggggttatcagctttgctccatgccg

SEQ ID NO: 96613 - DNA, 60 bp, Artificial
  Synthetic oligonucleotide
cctgtgtatgggcctaacctctcaaatcaggataagacactcctggccctctctgtatgt

SEQ ID NO: 96614 - DNA, 60 bp, Artificial
  Synthetic oligonucleotide
ggttgaatatctttaagcaactaggtaatatagaaggaagagaggggtacgatccattgc

SEQ ID NO: 96615 - DNA, 60 bp, Artificial
  Synthetic oligonucleotide
gctctgtggtggcaaccgggactaggggttatcagctttgctccatgccgactgtagacg

SEQ ID NO: 96616 - DNA, 60 bp, Artificial
  Synthetic oligonucleotide
cactatcaggacagggcagtctaacatctatgatgtcatttatacagaacagatcaaggg

SEQ ID NO: 96617 - DNA, 60 bp, Artificial
  Synthetic oligonucleotide
aaagataactggctcgcctcatttaggcggaaccttctctctgaggaccagaagaaacag

SEQ ID NO: 96618 - DNA, 60 bp, Artificial
  Synthetic oligonucleotide
ggggcattgaggggctatgccagaagctatggacaatgatctcaattgctgcaatccaac

SEQ ID NO: 96619 - DNA, 56 bp, Artificial
  Synthetic oligonucleotide
gcatctctctacagagtgtcgccttatattcacatatccaatgattctcaaaggct

SEQ ID NO: 96620 - DNA, 60 bp, Artificial
  Synthetic oligonucleotide
gggcaaatatggaaacatacgtgaacaagcttcacgaaggctccacatacacagcagctg

SEQ ID NO: 96621 - DNA, 60 bp, Artificial
  Synthetic oligonucleotide
catacgtgaacaagcttcacgaaggctccacatacacagcagctgttcagtacaatgttc

SEQ ID NO: 96622 - DNA, 56 bp, Artificial
  Synthetic oligonucleotide
aaaagaaaagggtggggcaaatatggaaacatacgtgaacaagcttcacgaaggct

SEQ ID NO: 96623 - DNA, 60 bp, Artificial
  Synthetic oligonucleotide
ccctgcatcaataccagcttatagaacaacaaattatcatttcgatactagtcctatcaa

SEQ ID NO: 96624 - DNA, 61 bp, Artificial
  Synthetic oligonucleotide
cctgcatcaataccagcttatagaacaacaaattatcatttcgatactagtcctatcaatc

SEQ ID NO: 96625 - DNA, 60 bp, Artificial
  Synthetic oligonucleotide
caaacaatcgagccagaagagaactaccaaggtttatgaattatacactcaacaatgcca

SEQ ID NO: 96626 - DNA, 60 bp, Artificial
  Synthetic oligonucleotide
cactgaagaattttatcaatcaacatgcagtgcagtcagcaaaggctatcttagtgctct

SEQ ID NO: 96627 - DNA, 60 bp, Artificial
  Synthetic oligonucleotide
gtgttcaactttgtaccctgcagcatatgcagcaacaatccaacctgctgggctatctgc

SEQ ID NO: 96628 - DNA, 60 bp, Artificial
  Synthetic oligonucleotide
aaacttatgtatgcttaggcagtaagttaaagggatcggaggtttacttagtccttacaa

SEQ ID NO: 96629 - DNA, 60 bp, Artificial
  Synthetic oligonucleotide
gctacagatgcaaccaacaacattcattggtcttatttacatataaagtttgctgaacct

SEQ ID NO: 96630 - DNA, 60 bp, Artificial
  Synthetic oligonucleotide
gtgttgttagtggagatatactatcatattctatagcaggacgtaatgaagttttcagca

SEQ ID NO: 96631 - DNA, 60 bp, Artificial
  Synthetic oligonucleotide
ctatggaccatagaagctatatcactattggatctaatatctctcaaagggaaattctca

SEQ ID NO: 96632 - DNA, 60 bp, Artificial
  Synthetic oligonucleotide
ggagctgcagagttggacagaacagaagagtatgccctcggtgtagttggagtgctagag

SEQ ID NO: 96633 - DNA, 60 bp, Artificial
  Synthetic oligonucleotide
ctggggcaaacatgtcacgaaggaatccttgcaaatttgaaattcgaggtcattgcttaa

SEQ ID NO: 96634 - DNA, 60 bp, Artificial
  Synthetic oligonucleotide
tagatacaccttgttggaaactacacacatcccctctatgtacaaccaacacaaaggaag

SEQ ID NO: 96635 - DNA, 60 bp, Artificial
  Synthetic oligonucleotide
gtcatcacagtgactgacaacaaaggagcattcaaatacataaagccgcaaagtcaattc

SEQ ID NO: 96636 - DNA, 60 bp, Artificial
  Synthetic oligonucleotide
acaaatatccacacccaagggaccttcactaagagtcatgataaactcaagaagtgcagt

SEQ ID NO: 96637 - DNA, 60 bp, Artificial
  Synthetic oligonucleotide
cagtcattacttatgacatacaagagtatgacctcgtcagaacagattgctaccactaat

SEQ ID NO: 96638 - DNA, 60 bp, Artificial
  Synthetic oligonucleotide
ctgttggaagggaatgatagtgacaatgatctatcacttgatgatttctgatcagttacc

SEQ ID NO: 96639 - DNA, 60 bp, Artificial
  Synthetic oligonucleotide
cgccagtggcattgctgtatctaaggtcctgcacctagaaggggaagtgaacaagatcaa

SEQ ID NO: 96640 - DNA, 60 bp, Artificial
  Synthetic oligonucleotide
tgccagtgttacaaaatggaggttatatatgggaaatgatggaattaacacactgctctc

SEQ ID NO: 96641 - DNA, 60 bp, Artificial
  Synthetic oligonucleotide
caatgacaccacaccacaaagactgatgatcacagacatgagaccattgtcacttgagac

SEQ ID NO: 96642 - DNA, 60 bp, Artificial
  Synthetic oligonucleotide
agtaccacttaaatttaactcccttggttagagatgggcagcaattcgttgagtatgata

SEQ ID NO: 96643 - DNA, 60 bp, Artificial
  Synthetic oligonucleotide
ctcaagtcaacgagaagattaaccagagcctagcatttattcgtaaatccgatgaattat

SEQ ID NO: 96644 - DNA, 61 bp, Artificial
  Synthetic oligonucleotide
cacgagatatgcaatttatgagtaaaacaattcaacataacggtgtatattacccagctag

SEQ ID NO: 96645 - DNA, 60 bp, Artificial
  Synthetic oligonucleotide
acagcattaacattgtatatgaatttgcccatgttatttggtggtggtgatcccaacttg

SEQ ID NO: 96646 - DNA, 60 bp, Artificial
  Synthetic oligonucleotide
gaactgaagcattaatgaccaatgacagactagaagctatggcaagactcaggaatgagg

SEQ ID NO: 96647 - DNA, 60 bp, Artificial
  Synthetic oligonucleotide
gtctttgactcaatttcctcacttctccagtgtagtattaggcaatgctgctggcctagg

SEQ ID NO: 96648 - DNA, 61 bp, Artificial
  Synthetic oligonucleotide
ctccatcatgattgcaatactgaacaaactctgtgaatataacgtattccataacaaaacc

SEQ ID NO: 96649 - DNA, 60 bp, Artificial
  Synthetic oligonucleotide
cttcaatgcttataagacctatctcttgtgttttcataaaggttacggcagagcaaagct

SEQ ID NO: 96650 - DNA, 61 bp, Artificial
  Synthetic oligonucleotide
gcttaatgagatacatttaatgaaacctcccatattcacaggtgatgttgatattcacaag

SEQ ID NO: 96651 - DNA, 60 bp, Artificial
  Synthetic oligonucleotide
gatgtaagcagctccgttatcacatctctaggagccattgtgtcatgctatggcaaaact

SEQ ID NO: 96652 - DNA, 60 bp, Artificial
  Synthetic oligonucleotide
gtcaacatagacaagtcaacacgccaggcaaaatcaaccaatggaaaatacatccataac

SEQ ID NO: 96653 - DNA, 61 bp, Artificial
  Synthetic oligonucleotide
cgagtattttgtgacacaatgaacagtttaacattaccaagtgaagtaaatctctgcaatg

SEQ ID NO: 96654 - DNA, 60 bp, Artificial
  Synthetic oligonucleotide
gggcaaatatggaaacatacgtgaacaaacttcacgaaggctccacatacacagctgctg

SEQ ID NO: 96655 - DNA, 60 bp, Artificial
  Synthetic oligonucleotide
ccacaaattggaagcacacagctacacgatttgcaatcaaacccatggaagattaacctt

SEQ ID NO: 96656 - DNA, 60 bp, Artificial
  Synthetic oligonucleotide
gctcctatactgtaaggccagaagcacaccagtcacactaagcaaggatcaactgagtgg

SEQ ID NO: 96657 - DNA, 60 bp, Artificial
  Synthetic oligonucleotide
tagcattcataggtgaaggagcagggaatttattattgcggaccgtagtggaacttcatc

SEQ ID NO: 96658 - DNA, 60 bp, Artificial
  Synthetic oligonucleotide
gaagtgcagtgctagcacaaatgcccagcaaatttaccatatgcgctaatgtgtccttgg

SEQ ID NO: 96659 - DNA, 60 bp, Artificial
  Synthetic oligonucleotide
ccagtcagactcatggaaggtcaaactcatgctcaagcagattatttgctagcattaaat

SEQ ID NO: 96660 - DNA, 60 bp, Artificial
  Synthetic oligonucleotide
cacctaatcatgttcttacaatggtttactatctgctcatagacaacccatctatcattg

SEQ ID NO: 96661 - DNA, 60 bp, Artificial
  Synthetic oligonucleotide
cacatcgtcaagacatcaatgggaaagaaatgaaatttgaagtgttaacattggcaagct

SEQ ID NO: 96662 - DNA, 60 bp, Artificial
  Synthetic oligonucleotide
ttttgttcattttggtatagcacaatcttctaccagaggtggcagtagagttgaagggat

SEQ ID NO: 96663 - DNA, 60 bp, Artificial
  Synthetic oligonucleotide
cagaagatgctaatcataaattcactgggttaataggtatgttatatgcgatgtctaggt

SEQ ID NO: 96664 - DNA, 60 bp, Artificial
  Synthetic oligonucleotide
cttctgtcatccagcaaatacaccatccaacggagcacaggagatagtattgatactcct

SEQ ID NO: 96665 - DNA, 60 bp, Artificial
  Synthetic oligonucleotide
ggccacatttacattcctggtcaactatgaaatgaaactattgcacaaagtgggaagcac

SEQ ID NO: 96666 - DNA, 61 bp, Artificial
  Synthetic oligonucleotide
gacactagccctattaatcgcatattaacagaaaagtatggtgatgaagatattgacatag

SEQ ID NO: 96667 - DNA, 60 bp, Artificial
  Synthetic oligonucleotide
gtttaacacgtggtgagagaggacccactaaaccatgggttggttcatctacacaagaga

SEQ ID NO: 96668 - DNA, 51 bp, Artificial
  Synthetic oligonucleotide
ctgccatagacttaacagatattgatagagccactgagatgatgaggaaaa

SEQ ID NO: 96669 - DNA, 60 bp, Artificial
  Synthetic oligonucleotide
cagctccaaacaaaatattctccaaaagtgcacaacattataccactacagagatagatc

SEQ ID NO: 96670 - DNA, 60 bp, Artificial
  Synthetic oligonucleotide
gtacattgtgacatggagggagcgataggcaaatcagaagaaactgttctacatgaacat

SEQ ID NO: 96671 - DNA, 60 bp, Artificial
  Synthetic oligonucleotide
gcagctcatgcgtttatatcggatgaaaggagataatgcgccgtacatgacattgcttgg

SEQ ID NO: 96672 - DNA, 60 bp, Artificial
  Synthetic oligonucleotide
gggaaataccaatttgccagggactttatgagcacatcattctggagacttggagtagag

SEQ ID NO: 96673 - DNA, 60 bp, Artificial
  Synthetic oligonucleotide
gtcagccactgttgaagctgcaataagcagtgaggccgaccaagcgttaacacaagccaa

SEQ ID NO: 96674 - DNA, 60 bp, Artificial
  Synthetic oligonucleotide
tatcagctaagcaaagttgagggtgaacagcatgttataaaaggcagaccagtgtcaagc

SEQ ID NO: 96675 - DNA, 60 bp, Artificial
  Synthetic oligonucleotide
gtcagccactgttgaagctgcaataagcagtgaggccgaccaagcattaacacaagccaa

SEQ ID NO: 96676 - DNA, 60 bp, Artificial
  Synthetic oligonucleotide
caatagctgatacaatgtctcaattagatagagacaacttaaaggagatgatagcactgg

SEQ ID NO: 96677 - DNA, 60 bp, Artificial
  Synthetic oligonucleotide
gggtattctcctatactaggctactgcattgcgttgtacaagacttgtcagcaagtgtgt

SEQ ID NO: 96678 - DNA, 60 bp, Artificial
  Synthetic oligonucleotide
ggttcgacaacgatctctggatgtgttaggctcccctcactttcaatcggtgaagcgatc

SEQ ID NO: 96679 - DNA, 60 bp, Artificial
  Synthetic oligonucleotide
ggttctacaacgatctctggatgtgttaggctcccttcactctcaattggcgaggcaatc

SEQ ID NO: 96680 - DNA, 60 bp, Artificial
  Synthetic oligonucleotide
ccacatgtacctgcgggacaggccgaagaccaatcagtcaggatcgctctaaaggtgtag

SEQ ID NO: 96681 - DNA, 60 bp, Artificial
  Synthetic oligonucleotide
ccacatgtacctgtgggacaggccgaaggccaatcagtcaggatcgctctaaaggtgtag

SEQ ID NO: 96682 - DNA, 60 bp, Artificial
  Synthetic oligonucleotide
caatagcggatacaatgtctcaattagatagagacaacttaaaggagatgatagcactgg

SEQ ID NO: 96683 - DNA, 60 bp, Artificial
  Synthetic oligonucleotide
cgatagctgatacaatgtctcaattagatagagacaacctaaaagagatgatcgcgctag

SEQ ID NO: 96684 - DNA, 60 bp, Artificial
  Synthetic oligonucleotide
cgatagctgatacaatgtctcaattagatagagacaacttaaaagagatgatcgcactag

SEQ ID NO: 96685 - DNA, 60 bp, Artificial
  Synthetic oligonucleotide
aaaatatcgtgtttagttctacagggcaagagacagagcctcccattgaccccacatgtg

SEQ ID NO: 96686 - DNA, 60 bp, Artificial
  Synthetic oligonucleotide
gttaacagaccgggaactcacctccattgtaggcggcatggctgtttcagcaggccaaaa

SEQ ID NO: 96687 - DNA, 60 bp, Artificial
  Synthetic oligonucleotide
ggagaaacttacctatcacgtgacatgcagtttatgagtaaaaccattcaacatgagggg

SEQ ID NO: 96688 - DNA, 60 bp, Artificial
  Synthetic oligonucleotide
gagtcaggcatgattcagggttactcagctaacatcagttcagtcctatcaatcccatac

SEQ ID NO: 96689 - DNA, 60 bp, Artificial
  Synthetic oligonucleotide
ggcagcaacacatgttccttcctaaccatataacaccagctcaatatatagaattgtttc

SEQ ID NO: 96690 - DNA, 60 bp, Artificial
  Synthetic oligonucleotide
ctgaggcagacagcattgagtggaagtgcataaggaggcaggagaaagtgactggggtga

SEQ ID NO: 96691 - DNA, 60 bp, Artificial
  Synthetic oligonucleotide
agcgactgctggacctaccactgctagagatgagattagagatgcccttataggcactag

SEQ ID NO: 96692 - DNA, 60 bp, Artificial
  Synthetic oligonucleotide
caccagctgttatgagaaacgtgaaatcaacccaggaagtgtttgccctgatcttgtaac

SEQ ID NO: 96693 - DNA, 60 bp, Artificial
  Synthetic oligonucleotide
gcactgatcaggagagagctgtgctagagcttggaggtcaacaggctatcatggagttgc

SEQ ID NO: 96694 - DNA, 60 bp, Artificial
  Synthetic oligonucleotide
cagacacgcacattcttcaaggcctctgatcagttattggacttaagtgaaaacagagag

SEQ ID NO: 96695 - DNA, 60 bp, Artificial
  Synthetic oligonucleotide
gactctgccagatggttgccactacatctccaacaaaggtgtggacagggttcaagtagg

SEQ ID NO: 96696 - DNA, 60 bp, Artificial
  Synthetic oligonucleotide
agatcccaaacccaactgcacccctcccactcgaaatcagttgtagcctcagcagctcca

SEQ ID NO: 96697 - DNA, 60 bp, Artificial
  Synthetic oligonucleotide
ggggttgggattaaggtgtagattaaaaggtcatctgctcagtaagttgtacatttccac

SEQ ID NO: 96698 - DNA, 60 bp, Artificial
  Synthetic oligonucleotide
ctgtgtacagcgaggtattgcactctaaactacttctagcagaatgtcaccaattccatc

SEQ ID NO: 96699 - DNA, 60 bp, Artificial
  Synthetic oligonucleotide
atttcagacagtgaagagtcgggcgatgaggcaggggtgggcaaggtgtcccgtaccaca

SEQ ID NO: 96700 - DNA, 60 bp, Artificial
  Synthetic oligonucleotide
ccagccgagcctacaaaacatcactagatacatcaactggaacttcatcaggatctgcaa

SEQ ID NO: 96701 - DNA, 60 bp, Artificial
  Synthetic oligonucleotide
ccagaagttgtggactacagaagccatagcattattggacacagtagcagtcaagggcag

SEQ ID NO: 96702 - DNA, 57 bp, Artificial
  Synthetic oligonucleotide
gtacgatgggtttgtcacagaccacatgttcctggacttacaactcttcctctctag

SEQ ID NO: 96703 - DNA, 60 bp, Artificial
  Synthetic oligonucleotide
ggtacgagtcatcctgtgtgtgtagtgatcttttagatgagctacatgggactcaaagct

SEQ ID NO: 96704 - DNA, 60 bp, Artificial
  Synthetic oligonucleotide
tagttgtttccaaattagctgcaggggacaggggaggacttgatgctgtggaaagaaggg

SEQ ID NO: 96705 - DNA, 60 bp, Artificial
  Synthetic oligonucleotide
gcctaagtcctcaggcttacaaagctgtacccacacaaactacaggcaccaccacggcac

SEQ ID NO: 96706 - DNA, 60 bp, Artificial
  Synthetic oligonucleotide
cttctggctatacaggttatactcagttgacttgaaagaccattctttatgtgggaagca

SEQ ID NO: 96707 - DNA, 60 bp, Artificial
  Synthetic oligonucleotide
ggttagtggagcctctccaaatgcagcatgagctcttgagtgtactatcgcccaatttca

SEQ ID NO: 96708 - DNA, 60 bp, Artificial
  Synthetic oligonucleotide
gtgagcagcagacctcgggagtacccctcatctttacctgcttacaggactactaacttc

SEQ ID NO: 96709 - DNA, 60 bp, Artificial
  Synthetic oligonucleotide
cccaaagaccagaatcatgggctgtaatgtgatgatggagcttgattatggtggacgagc

SEQ ID NO: 96710 - DNA, 60 bp, Artificial
  Synthetic oligonucleotide
caagaacatcatgctaggccatgctagtgtacaagctgagatggaacaggtggttgaggt

SEQ ID NO: 96711 - DNA, 60 bp, Artificial
  Synthetic oligonucleotide
gctggtacaatatatgggtcaatcttaacaacttactgcaggagtaccgttcaaaggaag

SEQ ID NO: 96712 - DNA, 60 bp, Artificial
  Synthetic oligonucleotide
gagctgactcagatcactccaaccagcagagagatccaccacctatagcaagtgatgtag

SEQ ID NO: 96713 - DNA, 60 bp, Artificial
  Synthetic oligonucleotide
gtcccatgatcaaggtagatctgagctcttccaatgcaggtttagctaccatgccaaggc

SEQ ID NO: 96714 - DNA, 60 bp, Artificial
  Synthetic oligonucleotide
gagtccacatgtagtgttgagactgcaggttataagagtgcccttagaacaggttggcat

SEQ ID NO: 96715 - DNA, 60 bp, Artificial
  Synthetic oligonucleotide
ggcaggtagtcagattcttgcagaactgggtccctatctgacgcaggtgagcctacatga

SEQ ID NO: 96716 - DNA, 60 bp, Artificial
  Synthetic oligonucleotide
cccactaatcgacctactcatgagctgatagctgtctgctctttccataacagggtaaca

SEQ ID NO: 96717 - DNA, 60 bp, Artificial
  Synthetic oligonucleotide
gggaaggaactttgaagtgagtggcagcattaccaatttgaactttgagagaactcagca

SEQ ID NO: 96718 - DNA, 60 bp, Artificial
  Synthetic oligonucleotide
atgcacagttcatcccaatcaccctccaccaagttatggcgtcaatgtaactggtctgcc

SEQ ID NO: 96719 - DNA, 60 bp, Artificial
  Synthetic oligonucleotide
ccacaactacaaccccacgatttcacacagcacaacaaccaccgccaccaacatccacat

SEQ ID NO: 96720 - DNA, 60 bp, Artificial
  Synthetic oligonucleotide
gctcaggcagaactacatgcttaataggatttataggttcctcgacaccaacacagatgc

SEQ ID NO: 96721 - DNA, 60 bp, Artificial
  Synthetic oligonucleotide
ccttgcaaggacactcggcatgttcttacttactgccttcaaccgttgcgaagaagtggc

SEQ ID NO: 96722 - DNA, 60 bp, Artificial
  Synthetic oligonucleotide
ctggcccagtctagtgtcaagggaggcagcaaagttgaggggctgttttcaggtctcttc

SEQ ID NO: 96723 - DNA, 60 bp, Artificial
  Synthetic oligonucleotide
ctgtggtgtggaatcgtgttgatgtgatagcttgtgtgaaagaggccttgtgctgcatag

SEQ ID NO: 96724 - DNA, 60 bp, Artificial
  Synthetic oligonucleotide
tccccaaccaaccgccggtctgcccaccacagagcaagggaccatccccagattcaccaa

SEQ ID NO: 96725 - DNA, 60 bp, Artificial
  Synthetic oligonucleotide
tcaaaccacaaggccaactccacgcagaatgccacgacccggaacagcacatccacccct

SEQ ID NO: 96726 - DNA, 60 bp, Artificial
  Synthetic oligonucleotide
gctcattcaaactcccttccccgagagttgctgcaaatcttactgaaccctctgctcccc

SEQ ID NO: 96727 - DNA, 60 bp, Artificial
  Synthetic oligonucleotide
gatgccattgatagggctcgactagagtatctggcccgctgtgccaattcagctgccagg

SEQ ID NO: 96728 - DNA, 60 bp, Artificial
  Synthetic oligonucleotide
ggagcatatgtttatagaattatcaaaggattcgtagcaaattataacaggtggccttac

SEQ ID NO: 96729 - DNA, 60 bp, Artificial
  Synthetic oligonucleotide
cttcacctgtcagctgctttaaggtagtttacacctcaaccctccaaaataatagtgttg

SEQ ID NO: 96730 - DNA, 60 bp, Artificial
  Synthetic oligonucleotide
ccttgaagtccaaaaggaagaagaggttcctcggtttgattcttggtctcggagctgcag

SEQ ID NO: 96731 - DNA, 60 bp, Artificial
  Synthetic oligonucleotide
gaagctgttggctgataacatcctgcaattctttccggagacactgactagatacggtga

SEQ ID NO: 96732 - DNA, 60 bp, Artificial
  Synthetic oligonucleotide
ccactgagaatgaactgaacggcatagcaagtggtgttagccctgtatatcctcatggtt

SEQ ID NO: 96733 - DNA, 60 bp, Artificial
  Synthetic oligonucleotide
gctcagatgataccgatactaagaaaactaggaagccgatggtcacctttgtggaacccg

SEQ ID NO: 96734 - DNA, 60 bp, Artificial
  Synthetic oligonucleotide
gcatttccggagaagtaatttaaaggttatatgtttcataggtgaaggtgctggaaacct

SEQ ID NO: 96735 - DNA, 60 bp, Artificial
  Synthetic oligonucleotide
agctatggacaatgatctcaattgctgcaatccaacttgctgcagcaagatcacattgta

SEQ ID NO: 96736 - DNA, 59 bp, Artificial
  Synthetic oligonucleotide
ggggcattgagggactctgccagaagctatggacaatgatctcaattgctgcaatccaa

SEQ ID NO: 96737 - DNA, 60 bp, Artificial
  Synthetic oligonucleotide
ggcccaagtatgggtcacggtggcaaaggccatgactgcatatgagacagcagatgagtc

SEQ ID NO: 96738 - DNA, 60 bp, Artificial
  Synthetic oligonucleotide
gataggccacgtctttgttactcctgagcttgtcattgtgacacatacagatgagaacaa

SEQ ID NO: 96739 - DNA, 60 bp, Artificial
  Synthetic oligonucleotide
ctcctgagcttgtcattgtgacacatacagatgagaacaagttcacgtgtcttacacaag

SEQ ID NO: 96740 - DNA, 60 bp, Artificial
  Synthetic oligonucleotide
ccatgttgctcttgcggggaaacagaatgaggccacactggctgttcttgagatcgatgg

SEQ ID NO: 96741 - DNA, 60 bp, Artificial
  Synthetic oligonucleotide
ctggctcgagcctatacaatcttgcgctcaatgtcactattgatgtggacgtggatccga

SEQ ID NO: 96742 - DNA, 60 bp, Artificial
  Synthetic oligonucleotide
ttgaaacaccggtcggcgagggcaaggcagtagtaccccagtttgttgtggaatctggcc

SEQ ID NO: 96743 - DNA, 60 bp, Artificial
  Synthetic oligonucleotide
ccaaacaaggaaaccatatgcttggggaatttacgagaacgcttataaaatcgtgagggg

SEQ ID NO: 96744 - DNA, 60 bp, Artificial
  Synthetic oligonucleotide
gcaagcaaagtcgccgggaagtgccacacagttctaacaatatagctggtcctgatgatt

SEQ ID NO: 96745 - DNA, 60 bp, Artificial
  Synthetic oligonucleotide
gggccttgcgcttattggccaccggcctagctatggtctccttagtgttctgcctgaacc

SEQ ID NO: 96746 - DNA, 60 bp, Artificial
  Synthetic oligonucleotide
ccccttgtctcacaggtttgtgactaaccccatgacactccacttacacacagggtactc

SEQ ID NO: 96747 - DNA, 60 bp, Artificial
  Synthetic oligonucleotide
ggatccctgtgtgtgtcctactctccgaggatcctgaagaacgatggagctttgtttgct

SEQ ID NO: 96748 - DNA, 60 bp, Artificial
  Synthetic oligonucleotide
ccggcgattaataatctgacatgtgaagtagcaggtgctaaagtaggtgtggaactgtca

SEQ ID NO: 96749 - DNA, 60 bp, Artificial
  Synthetic oligonucleotide
tctttgagaccactgttgccgggagacgaaagcatctgcaaggattgattgacaccacac

SEQ ID NO: 96750 - DNA, 60 bp, Artificial
  Synthetic oligonucleotide
gcaattgaccaccagaaccagaccattcgtttcactgggcgcagcaatgtgactgacggg

SEQ ID NO: 96751 - DNA, 60 bp, Artificial
  Synthetic oligonucleotide
ggccttgaagtgcttgacccaccaggacttgtaaccttactatccctagtgactgcacgc

SEQ ID NO: 96752 - DNA, 60 bp, Artificial
  Synthetic oligonucleotide
cggaagtattgctgtgagattaattcccaacctacctcaagaagtgcttaaatgctccgc

SEQ ID NO: 96753 - DNA, 60 bp, Artificial
  Synthetic oligonucleotide
gcaggcttaggggtgagctctattcgccatcgtgtagcattccgcagtcggctacagaca

SEQ ID NO: 96754 - DNA, 60 bp, Artificial
  Synthetic oligonucleotide
ctagcagccacagaatcaggttgtcgggttgcatctatggtccaaggggaaaaccaagca

SEQ ID NO: 96755 - DNA, 60 bp, Artificial
  Synthetic oligonucleotide
agtccctactccccggacacttgaaagataagctgcaatctgagggcccttctaaccggc

SEQ ID NO: 96756 - DNA, 60 bp, Artificial
  Synthetic oligonucleotide
caggcctcctctgctcgtgccctgttgacatcagaggacatagaagccaagggagccatc

SEQ ID NO: 96757 - DNA, 60 bp, Artificial
  Synthetic oligonucleotide
gggttgctgtgatggatccacaagtccaaatacaccacatcatcaagccagagtgccatc

SEQ ID NO: 96758 - DNA, 60 bp, Artificial
  Synthetic oligonucleotide
gtctgaagggaggcggttggccaaatacatccagcaaaacagagtgatccggagtacgat

SEQ ID NO: 96759 - DNA, 60 bp, Artificial
  Synthetic oligonucleotide
ggcctgggaaaatagcaggatctctctgggctcaaggggttgtaacatgtaatctgacca

SEQ ID NO: 96760 - DNA, 60 bp, Artificial
  Synthetic oligonucleotide
ggctttagccgtatcagacctactggaacatccgagcttcataccagcgcctaccacctc

SEQ ID NO: 96761 - DNA, 59 bp, Artificial
  Synthetic oligonucleotide
gtccccattgctccagaacctctatagagaatccgccgagcttcagtacgcgattgtgc

SEQ ID NO: 96762 - DNA, 60 bp, Artificial
  Synthetic oligonucleotide
gatcggagaacctgtctcactcttccatgcacacaatcaataggccagcgacccctcccc

SEQ ID NO: 96763 - DNA, 60 bp, Artificial
  Synthetic oligonucleotide
catcctggccgagtggtgcaacccagtctgtgcacctgtcacacctgaacccagagcatt

SEQ ID NO: 96764 - DNA, 60 bp, Artificial
  Synthetic oligonucleotide
ctccacccacaccaggagcaggtctcaccccatactctgataatgccagtggcctggaca

SEQ ID NO: 96765 - DNA, 60 bp, Artificial
  Synthetic oligonucleotide
tgggtgcggtaggggtcggccatcgtgggaaacccgtgtttacgacaagtgcagcaacaa

SEQ ID NO: 96766 - DNA, 60 bp, Artificial
  Synthetic oligonucleotide
aggaacttgtgaccagcctggacctagctggagaggccccagtgccccagcgtcaaccaa

SEQ ID NO: 96767 - DNA, 60 bp, Artificial
  Synthetic oligonucleotide
catcgtccattacttccctgagtgccgattaccagccaatatggtcagatacccatcaga

SEQ ID NO: 96768 - DNA, 59 bp, Artificial
  Synthetic oligonucleotide
tcatgagggacggcacgatcgtaaaagatgctcttgctcgcccagttaatccggacaag

SEQ ID NO: 96769 - DNA, 60 bp, Artificial
  Synthetic oligonucleotide
cactgccctgtctgacctgaataaattgtggatggcgacagatcacagaactcgggaatg

SEQ ID NO: 96770 - DNA, 60 bp, Artificial
  Synthetic oligonucleotide
catccgggaatttgggcaagactgaggctaatcggggcagtaagtgctgggaatagcccc

SEQ ID NO: 96771 - DNA, 60 bp, Artificial
  Synthetic oligonucleotide
cactcagagtaatctcttcaactttgcgccgcttgaatcctgaactgtggacgcgcacgc

SEQ ID NO: 96772 - DNA, 60 bp, Artificial
  Synthetic oligonucleotide
cctgatagatggagttactctgcagatcgaagctcaagttagtgggtcgtattccaggaa

SEQ ID NO: 96773 - DNA, 60 bp, Artificial
  Synthetic oligonucleotide
cacagcattctttcttcctgatcacacccaacaatttgctttggacacccttgacactga

SEQ ID NO: 96774 - DNA, 60 bp, Artificial
  Synthetic oligonucleotide
gagatggaacgtggacaacactgtgcgccgacccgtactcattaaaccaaccatatgtgc

SEQ ID NO: 96775 - DNA, 60 bp, Artificial
  Synthetic oligonucleotide
ccacggctttgagtggattcacctccgcttgatgaatacgaccatgtttgtaggagaccc

SEQ ID NO: 96776 - DNA, 60 bp, Artificial
  Synthetic oligonucleotide
ataatggaagttacagacaacctactcggagactggaggatcgccccgctgttatatgag

SEQ ID NO: 96777 - DNA, 60 bp, Artificial
  Synthetic oligonucleotide
caccttagggcggcattaagaggagcgagtgtttacatctgggcgtatggagacagtgac

SEQ ID NO: 96778 - DNA, 60 bp, Artificial
  Synthetic oligonucleotide
cagatgtggtggaaggccgtgccatgacaaagttggtcgcactcaccgagccgacaatgg

SEQ ID NO: 96779 - DNA, 60 bp, Artificial
  Synthetic oligonucleotide
cagagggtgcaatcaagtgccccgagaagatgacatccgatcgcctttacaagttccgcg

SEQ ID NO: 96780 - DNA, 60 bp, Artificial
  Synthetic oligonucleotide
ggtaggaggctgcagtttgtggtcacccataagcgatccagccctggtcacaggtggtga

SEQ ID NO: 96781 - DNA, 60 bp, Artificial
  Synthetic oligonucleotide
gctgttgcttggggcatacaacctgcaagtatccggaaaagtaagaacaatggctgcggc

SEQ ID NO: 96782 - DNA, 60 bp, Artificial
  Synthetic oligonucleotide
ggcccaatctgcatatacacacatcataaccctcgccttacattgcctaatgattagcgg

SEQ ID NO: 96783 - DNA, 60 bp, Artificial
  Synthetic oligonucleotide
ggcggcaaagaaagtcagagaatcgatgtgtgcaccgaaattaacctctctagataccac

SEQ ID NO: 96784 - DNA, 60 bp, Artificial
  Synthetic oligonucleotide
ccggaggaaagaaaagcgcgatatttgtgaattgctatgggttcgttgaagatcacgggg

SEQ ID NO: 96785 - DNA, 60 bp, Artificial
  Synthetic oligonucleotide
ccgtgggtgagaattgtgtcggcaattgctcaaatatcagttccacagttgctaggctca

SEQ ID NO: 96786 - DNA, 60 bp, Artificial
  Synthetic oligonucleotide
cccacaatctaaatttccgaggcccacctggacaaagggcgtatgcgagaaaccggcaat

SEQ ID NO: 96787 - DNA, 60 bp, Artificial
  Synthetic oligonucleotide
gggaaaggccaagtggatcgcaacacccctcagagagatccaaccactgcctcgggttca

SEQ ID NO: 96788 - DNA, 60 bp, Artificial
  Synthetic oligonucleotide
ccaacacgacgagatattatgccacagttggggatgctgcagcttacttcaagaacgcgg

SEQ ID NO: 96789 - DNA, 60 bp, Artificial
  Synthetic oligonucleotide
tcggaaaggaaatacatccgaactgcgagcagcctgggaagccgagacacaaccagccca

SEQ ID NO: 96790 - DNA, 60 bp, Artificial
  Synthetic oligonucleotide
gagcgctacatccgaagaacggtcgggacagcttcaacatcttggtacaaagcagcagga

SEQ ID NO: 96791 - DNA, 60 bp, Artificial
  Synthetic oligonucleotide
ggtgaggatggaccctatatggcatttctggaagactccgaccttatgagcttcgcccct

SEQ ID NO: 96792 - DNA, 60 bp, Artificial
  Synthetic oligonucleotide
ggtatgggtcacggtagcaaaggccatgactgcatatgagacagcagatgagtcagaaac

SEQ ID NO: 96793 - DNA, 60 bp, Artificial
  Synthetic oligonucleotide
ggggctttgaaattcattatcaccgaccttctggaaagtaccaaatgggtgaattgttgt

SEQ ID NO: 96794 - DNA, 60 bp, Artificial
  Synthetic oligonucleotide
gaagtttcggtcacccaaggttagaagcaataacagcagcagagaacgtacggaaacaca

SEQ ID NO: 96795 - DNA, 60 bp, Artificial
  Synthetic oligonucleotide
ctccccgggaaactcatcatcttaagtatctcatacccaactttatcagaagtcaagggg

SEQ ID NO: 96796 - DNA, 60 bp, Artificial
  Synthetic oligonucleotide
ccggacagggcagctgatgtgagcatgctgatggaagaggaattaagtgctctgctcaag

SEQ ID NO: 96797 - DNA, 60 bp, Artificial
  Synthetic oligonucleotide
cacccgggttggtagggcacatcctttcatcaaagcagacagcatgtgtgcagtctttgc

SEQ ID NO: 96798 - DNA, 60 bp, Artificial
  Synthetic oligonucleotide
gagttccaagcacctggtcctatgccttgaagaagtctgaagccagtcgagtcaccacag

SEQ ID NO: 96799 - DNA, 60 bp, Artificial
  Synthetic oligonucleotide
gcagaggagcaggcctaccatgtcagcaaagggctggaatgcctcaaagccctcagagag

SEQ ID NO: 96800 - DNA, 60 bp, Artificial
  Synthetic oligonucleotide
cggggatcccgtgacatcttctattgccgacctcaaacgaatgatccgatcaggccttct

SEQ ID NO: 96801 - DNA, 60 bp, Artificial
  Synthetic oligonucleotide
gttccatgcatacccagtgttaatcgcaagtcaggaaagggagctcgtatctatcattgc

SEQ ID NO: 96802 - DNA, 60 bp, Artificial
  Synthetic oligonucleotide
caactattgaatcccttatgatgctataccaacagatgggtgaaacagcaccgtacatgg

SEQ ID NO: 96803 - DNA, 60 bp, Artificial
  Synthetic oligonucleotide
cgagagatttcaccttacccttctgaggtcagtcttgtggaacatcaattaggactcgat

SEQ ID NO: 96804 - DNA, 60 bp, Artificial
  Synthetic oligonucleotide
tgaagggacacgctatattctgtgggataatcattaacggttatcgggatagacatgggg

SEQ ID NO: 96805 - DNA, 60 bp, Artificial
  Synthetic oligonucleotide
gtacccaaaagaattcctcaggtacaacccacctcgctccactgagtctcggagacttgt

SEQ ID NO: 96806 - DNA, 60 bp, Artificial
  Synthetic oligonucleotide
ctcctgagtcagctatcaacaaggacacacaacttacctattacaggattaggagtccgg

SEQ ID NO: 96807 - DNA, 60 bp, Artificial
  Synthetic oligonucleotide
ggccacagctgcacaaatcactgcagggatagctttacatcaatccaacctcaatgctca

SEQ ID NO: 96808 - DNA, 60 bp, Artificial
  Synthetic oligonucleotide
gaggaacgagtcttcacatacgatgtactggtaagatgagcaaggccttgaatgcccagc

SEQ ID NO: 96809 - DNA, 60 bp, Artificial
  Synthetic oligonucleotide
cgatctgccattactaaactaactgaagataatcaagccatactttctaaactggatacc

SEQ ID NO: 96810 - DNA, 60 bp, Artificial
  Synthetic oligonucleotide
cagtgggcgagttgacactggcttccttgtgtgtagatgagagcaccgtattattatatc

SEQ ID NO: 96811 - DNA, 60 bp, Artificial
  Synthetic oligonucleotide
gcccgagtctacgtgaccctatttcagccgagatatcaattcaagcactgagttatgctc

SEQ ID NO: 96812 - DNA, 60 bp, Artificial
  Synthetic oligonucleotide
cccgggtgattcaagcattgttacaagatctcgactattggatagacttgttaggttggt

SEQ ID NO: 96813 - DNA, 60 bp, Artificial
  Synthetic oligonucleotide
tagcatttaacattttagtcaccattcaagttgagggagatgtcgattcaagccgaggta

SEQ ID NO: 96814 - DNA, 60 bp, Artificial
  Synthetic oligonucleotide
ggggtacttaaaatcaaaagccctagaatcccatgttggtctgacatggaatgacaaacc

SEQ ID NO: 96815 - DNA, 60 bp, Artificial
  Synthetic oligonucleotide
tcaactctgtttgcggtcttacatttgcatccagaggagcaagtttggattctgaggcag

SEQ ID NO: 96816 - DNA, 60 bp, Artificial
  Synthetic oligonucleotide
acccattgacaaagagtctagctcggcaatcggatacaaaccgaaggataccgcaccttc

SEQ ID NO: 96817 - DNA, 60 bp, Artificial
  Synthetic oligonucleotide
ctatgaagcctgcatcttatcgaggagcccttcactccgtctcttccccaagtagtagat

SEQ ID NO: 96818 - DNA, 60 bp, Artificial
  Synthetic oligonucleotide
cccattgcacatcttaactccgtggaagaaggtccttacgagtggaagtgtgttcagtgc

SEQ ID NO: 96819 - DNA, 60 bp, Artificial
  Synthetic oligonucleotide
gcacaaagattcagggtggtatatatgagcatcactcgactatcagacgatggaagttac

SEQ ID NO: 96820 - DNA, 60 bp, Artificial
  Synthetic oligonucleotide
gtgggccaagctggcgaagggtcgtcctatttatggtctagaagtcccggatatccttga

SEQ ID NO: 96821 - DNA, 60 bp, Artificial
  Synthetic oligonucleotide
tacccaatgggaggggtggagggatactgtcagaagttatggactattagcaccatacct

SEQ ID NO: 96822 - DNA, 60 bp, Artificial
  Synthetic oligonucleotide
attgctggaatgctagacaccacaaaggggttgataagagcaagcatgaaaagaggaggt

SEQ ID NO: 96823 - DNA, 60 bp, Artificial
  Synthetic oligonucleotide
gggtgccatacatcgggtccacaacagaagaaagaacagacatgaaattagcattcgtca

SEQ ID NO: 96824 - DNA, 60 bp, Artificial
  Synthetic oligonucleotide
gatagcactgaggattctggcgaagattattccgagggaaatgcttcatctaactgggga

SEQ ID NO: 96825 - DNA, 60 bp, Artificial
  Synthetic oligonucleotide
ggacaacggggcagctttatcatgtactagctaaatctactgctatgtctatggttgaga

SEQ ID NO: 96826 - DNA, 60 bp, Artificial
  Synthetic oligonucleotide
gaacacgatctcactaaagcattgcacactctggctgtgtccggggttccgaaagacaag

SEQ ID NO: 96827 - DNA, 60 bp, Artificial
  Synthetic oligonucleotide
ggcttgatattgttagaaacaggattgctgaggacttatctttgaggcggttcatggtag

SEQ ID NO: 96828 - DNA, 60 bp, Artificial
  Synthetic oligonucleotide
gtaatacccatgagcgaccatccaagggtcccagggctcagaaaggtcgtcataccaaga

SEQ ID NO: 96829 - DNA, 60 bp, Artificial
  Synthetic oligonucleotide
ctcaagtcaaatactcagggacctctctcatcagagtagcacgttatgcaacaatctcga

SEQ ID NO: 96830 - DNA, 60 bp, Artificial
  Synthetic oligonucleotide
ctatttcatgcacaggatcgagtcatctctctgaggctgagaaatatattcaaaagagga

SEQ ID NO: 96831 - DNA, 60 bp, Artificial
  Synthetic oligonucleotide
ggacaatggcttctatactgaagagacgttccaaaccttaacccaagctctagacttcgt

SEQ ID NO: 96832 - DNA, 60 bp, Artificial
  Synthetic oligonucleotide
ggtcctgatgtattgtgatgtgatagaagggaggctaatgactgatactgctatggcaat

SEQ ID NO: 96833 - DNA, 60 bp, Artificial
  Synthetic oligonucleotide
tgctagcttccatcttggctcaaatttggatcctgctcgctaaagcagtgactgctcctg

SEQ ID NO: 96834 - DNA, 60 bp, Artificial
  Synthetic oligonucleotide
gatcagtgattaaatcctctactcacaactgtcgcaagcggaggcagaaccctgtctttg

SEQ ID NO: 96835 - DNA, 60 bp, Artificial
  Synthetic oligonucleotide
ggaggcagaggtgacatattcccaccatacagatgcagtggagctactacttcagtaggc

SEQ ID NO: 96836 - DNA, 60 bp, Artificial
  Synthetic oligonucleotide
agatccttgagacggttaggcgctcttcctttaattttggcagtcttctcagcgttccca

SEQ ID NO: 96837 - DNA, 60 bp, Artificial
  Synthetic oligonucleotide
taaggctcagatacattggaataatttgtcaactattgggattatcgggactgacagtgt

SEQ ID NO: 96838 - DNA, 60 bp, Artificial
  Synthetic oligonucleotide
ggagatcagagtgcaaaatagtaagaatccaagcagtcctgcaaccatcagtcccacaag

SEQ ID NO: 96839 - DNA, 60 bp, Artificial
  Synthetic oligonucleotide
cctatggtgatgatgacgaatcttggcaagaggcttggaccttggcaaaacagagagcgg

SEQ ID NO: 96840 - DNA, 60 bp, Artificial
  Synthetic oligonucleotide
ggtggggaggctattcgctaaaatgacctacaaaatgcgagcctgtcaggtcatagcaga

SEQ ID NO: 96841 - DNA, 60 bp, Artificial
  Synthetic oligonucleotide
gcactggcggaagttctcaagcaacccgcatcatcccgcggtaatcggaaggacagtggt

SEQ ID NO: 96842 - DNA, 60 bp, Artificial
  Synthetic oligonucleotide
cctggttttgggaaggacactggagaccctacggcaaatgtcgacattaacccagagctc

SEQ ID NO: 96843 - DNA, 60 bp, Artificial
  Synthetic oligonucleotide
gcctgtacaatcttgcgctcaatgtcactattgatgtggaggtggacccgaagagcccgt

SEQ ID NO: 96844 - DNA, 60 bp, Artificial
  Synthetic oligonucleotide
gcccggaagtggtgttttgcgatttcgaggccgggctcgatcctcacctttcattgtcga

SEQ ID NO: 96845 - DNA, 60 bp, Artificial
  Synthetic oligonucleotide
ctccaatgagcacaaagcattaacgtacctcacctttgaaatggtattaatggtcactga

SEQ ID NO: 96846 - DNA, 60 bp, Artificial
  Synthetic oligonucleotide
gttatgatctagtatttccccaaactaaatctcttagtcaggacatcactaatgcttatc

SEQ ID NO: 96847 - DNA, 60 bp, Artificial
  Synthetic oligonucleotide
catcggagacccattagtgtctgcaattgctgatgtgaaacgattaattaaagctggctg

SEQ ID NO: 96848 - DNA, 60 bp, Artificial
  Synthetic oligonucleotide
gctgaagaatctcaggttcatgcacgtttaaaacagatcagagtagaactcattgcaagg

SEQ ID NO: 96849 - DNA, 60 bp, Artificial
  Synthetic oligonucleotide
tgcatttcttgtctgtgcctggaatcagatcctagttacaaattgcgagctagttgtccc

SEQ ID NO: 96850 - DNA, 60 bp, Artificial
  Synthetic oligonucleotide
ccaaccttttctgaatgcaatcaatgttgatacttgtagcatcgatatagctaggtccct

SEQ ID NO: 96851 - DNA, 60 bp, Artificial
  Synthetic oligonucleotide
tctgcaattgctgatgtgaaacgattaattaaagctggctgtctagatatctgggtcctg

SEQ ID NO: 96852 - DNA, 60 bp, Artificial
  Synthetic oligonucleotide
cccctatcaattctccacacatagcttcactggattacacaaaattgagcatagacgcag

SEQ ID NO: 96853 - DNA, 60 bp, Artificial
  Synthetic oligonucleotide
ctggacttgacatcacagtttgacaatctatcccctgatttaactgctgagctcctctgc

SEQ ID NO: 96854 - DNA, 60 bp, Artificial
  Synthetic oligonucleotide
gcctgcaacatcttgaacaaaaggtggacaaggtgcttgcacagggcagcatggtgaccc

SEQ ID NO: 96855 - DNA, 60 bp, Artificial
  Synthetic oligonucleotide
cctgcaacatcttgagcaaaaggtggacaaggtgcttgcacagggcagcatggtgaccca

SEQ ID NO: 96856 - DNA, 60 bp, Artificial
  Synthetic oligonucleotide
ccgcagcaagattccactcctgcaaatgtgggaattgccccgcaaagtgcgaccagtgcg

SEQ ID NO: 96857 - DNA, 60 bp, Artificial
  Synthetic oligonucleotide
ggagaggtccgggtctttgagtggtgcaaccccatatgctcacctatcactgccacagca

SEQ ID NO: 96858 - DNA, 60 bp, Artificial
  Synthetic oligonucleotide
ggagaggtccgggtctttgagtggtgcaaccccatatgctcacctatcactgccgcagca

SEQ ID NO: 96859 - DNA, 60 bp, Artificial
  Synthetic oligonucleotide
gtgcgaacgagattatggacctccttagagggatggatgctcgcctgcaacatcttgagc

SEQ ID NO: 96860 - DNA, 60 bp, Artificial
  Synthetic oligonucleotide
cgatcagtgcgaacgagattatggacctccttagagggatggatgctcgcctgcaacatc

SEQ ID NO: 96861 - DNA, 60 bp, Artificial
  Synthetic oligonucleotide
atgatctagtatttccccaaactaaatctcttagtcaggacatcactaatgcttatctca

SEQ ID NO: 96862 - DNA, 60 bp, Artificial
  Synthetic oligonucleotide
tctgccaatacaatgaggcagagaggctgagcctagaatcaaaactatgccttgcaggca

SEQ ID NO: 96863 - DNA, 60 bp, Artificial
  Synthetic oligonucleotide
gatcttcggcaaagtatgcaattgcccacagtatgggagaaattgactcaatccacagtt

SEQ ID NO: 96864 - DNA, 60 bp, Artificial
  Synthetic oligonucleotide
ccctttgcccacccagtttattgaaagtgtcccttacagattgattcaagcaggtatagc

SEQ ID NO: 96865 - DNA, 60 bp, Artificial
  Synthetic oligonucleotide
cgacagtctatcgagcttggagagtttagactaagagacgtgataacacccatggagatc

SEQ ID NO: 96866 - DNA, 60 bp, Artificial
  Synthetic oligonucleotide
gacagtctatcgagcttggagagtttagactaagagacgtgataacacccatggagatcc

SEQ ID NO: 96867 - DNA, 60 bp, Artificial
  Synthetic oligonucleotide
ggcagtctatcgagcttggagagtttagactaagagacgtgataacacccatggagatcc

SEQ ID NO: 96868 - DNA, 60 bp, Artificial
  Synthetic oligonucleotide
ttctccacacatagcttcactggattacacaaaattgagcatagatgcagtaatgtgggg

SEQ ID NO: 96869 - DNA, 60 bp, Artificial
  Synthetic oligonucleotide
tgctcgaaaattatcactactggcaatcatctgggccaattataactatcctccaaaggt

SEQ ID NO: 96870 - DNA, 54 bp, Artificial
  Synthetic oligonucleotide
gcccctttgcccacccagtttattgaaagtgtcccttacagattgattcaagca

SEQ ID NO: 96871 - DNA, 60 bp, Artificial
  Synthetic oligonucleotide
ctgcaacatcttgagcaaaaggtggacaaggtgcttgcacagggcagcatggtgacccaa

SEQ ID NO: 96872 - DNA, 60 bp, Artificial
  Synthetic oligonucleotide
cgagatcaaccgcatccccaatctattcaggcatcatcaaatatctgcggaccatctgat

SEQ ID NO: 96873 - DNA, 60 bp, Artificial
  Synthetic oligonucleotide
ccgcattcccaatctattcaggcatcatcaaatatctgcggaccatctgattcaggccag

SEQ ID NO: 96874 - DNA, 60 bp, Artificial
  Synthetic oligonucleotide
cctagggttatacctaacagaattaacaacagtgtttcagccacaattaattaatccggc

SEQ ID NO: 96875 - DNA, 50 bp, Artificial
  Synthetic oligonucleotide
agtaaagagcttgagtatgtcaccagtggagaatatcttagggaccctga

SEQ ID NO: 96876 - DNA, 60 bp, Artificial
  Synthetic oligonucleotide
aggataaggcaataagctgtccaaagcaagactggatgggagtatttaggaggagcctga

SEQ ID NO: 96877 - DNA, 60 bp, Artificial
  Synthetic oligonucleotide
ctgccaatacaatgaggcagagaggctgagcctagaatcaaaactatgccttgcaggcaa

SEQ ID NO: 96878 - DNA, 60 bp, Artificial
  Synthetic oligonucleotide
gacatcacagtttgacaatctatcccctgatttaactgctgagctcctctgcattatgag

SEQ ID NO: 96879 - DNA, 60 bp, Artificial
  Synthetic oligonucleotide
tcagcatattcatgaaggataaggcaataagctgtccaaagcaagactggatgggagtat

SEQ ID NO: 96880 - DNA, 60 bp, Artificial
  Synthetic oligonucleotide
acgtgtctatgcaagagtccatcttatcctatataccaacctgaccatcatgcagtcaca

SEQ ID NO: 96881 - DNA, 60 bp, Artificial
  Synthetic oligonucleotide
aagataaggcaataagctgtccaaagcaagactggatgggagtatttaggaggagcctga

SEQ ID NO: 96882 - DNA, 50 bp, Artificial
  Synthetic oligonucleotide
attaaggagcttgagtatgtcaccagtggagaatatcttagggaccctga

SEQ ID NO: 96883 - DNA, 60 bp, Artificial
  Synthetic oligonucleotide
gatctagtatttccccaaactaaatctcttagtcaggacatcactaatgcttatcttaac

SEQ ID NO: 96884 - DNA, 60 bp, Artificial
  Synthetic oligonucleotide
ggtgacaaccaagcaattgcaatcaccactagagtagtacgctcgctcagtcattccgag

SEQ ID NO: 96885 - DNA, 56 bp, Artificial
  Synthetic oligonucleotide
ataaccaagcaattgcaatcaccactagagtagtacgttcgctcagtcattccgag

SEQ ID NO: 96886 - DNA, 60 bp, Artificial
  Synthetic oligonucleotide
gggagtcggcacagtcctagatgtccaaatgcgaaattacacttatgcacgacctttcct

SEQ ID NO: 96887 - DNA, 60 bp, Artificial
  Synthetic oligonucleotide
gggagtcggtacagtcctagatgtccaaatgcgaaattacacttatgcacgacctttcct

SEQ ID NO: 96888 - DNA, 60 bp, Artificial
  Synthetic oligonucleotide
caggggtgaggagggttcaattccaccggagactttaaagtcagcagtcaaagtcttcgt

SEQ ID NO: 96889 - DNA, 60 bp, Artificial
  Synthetic oligonucleotide
ccgccggagactttaaagtcagcagtcaaagtcttcgtcattaacacacccaatcccacc

SEQ ID NO: 96890 - DNA, 59 bp, Artificial
  Synthetic oligonucleotide
acaagccagataccttgctttgttggaggctccccaaataatggactttgcacccgggg

SEQ ID NO: 96891 - DNA, 60 bp, Artificial
  Synthetic oligonucleotide
aacaagccagataccttgctttgttggaggctccccaaataatggactttgcacccgggg

SEQ ID NO: 96892 - DNA, 60 bp, Artificial
  Synthetic oligonucleotide
gggagtcggtacagtcctagatgtccaaatgcgaaattacacttatgcacgacctttctt

SEQ ID NO: 96893 - DNA, 56 bp, Artificial
  Synthetic oligonucleotide
agccaggtacctcgctttgttggaggctccccaaataatggactttgcacccgggg

SEQ ID NO: 96894 - DNA, 55 bp, Artificial
  Synthetic oligonucleotide
ggggtattgagggattatgtcagaagctatggacaatgatctcaattgctgcaat

SEQ ID NO: 96895 - DNA, 59 bp, Artificial
  Synthetic oligonucleotide
ggggtattgagggattatgtcagaagctatggacaatgatctcaattgctgcaatccaa

SEQ ID NO: 96896 - DNA, 60 bp, Artificial
  Synthetic oligonucleotide
cccatagggtaggccaagtctttgttactcctgagcttgtcattgtgacacatacagatg

SEQ ID NO: 96897 - DNA, 60 bp, Artificial
  Synthetic oligonucleotide
tccaggctcaagtatgggtcacggtggcaaaggccatgactgcatatgagacagcagatg

SEQ ID NO: 96898 - DNA, 60 bp, Artificial
  Synthetic oligonucleotide
gtgggccaagtctttgttactcctgagcttgtcattgtgacacatacagatgagaacaag

SEQ ID NO: 96899 - DNA, 60 bp, Artificial
  Synthetic oligonucleotide
aggccatgtctttgttactcctgagcttgtcattgtgacacatacagatgagaacaagtt

SEQ ID NO: 96900 - DNA, 60 bp, Artificial
  Synthetic oligonucleotide
ataggccacgtctttgttactcctgagcttgtcattgtgacacatacagatgagaacaag

SEQ ID NO: 96901 - DNA, 60 bp, Artificial
  Synthetic oligonucleotide
ggccaaatctttgttactcctgagcttgtcattgtgacacatacagatgagaacaagttc

SEQ ID NO: 96902 - DNA, 60 bp, Artificial
  Synthetic oligonucleotide
aggccaagtctttgttactcctgagcttgtcattgtgacacatacagatgagaacaagtt

SEQ ID NO: 96903 - DNA, 60 bp, Artificial
  Synthetic oligonucleotide
gggtcacgtctttgttactcctgagcttgtcattgtgacacatacagatgagaacaagtt

SEQ ID NO: 96904 - DNA, 60 bp, Artificial
  Synthetic oligonucleotide
caaatgattttgatccatataaggagatggaatatctgacgacccttgagtacctaagag

SEQ ID NO: 96905 - DNA, 60 bp, Artificial
  Synthetic oligonucleotide
acgtgaacacagcatatcatggacaatgggaggagtcacaactatcagctggtgcaaccc

SEQ ID NO: 96906 - DNA, 60 bp, Artificial
  Synthetic oligonucleotide
cgcgaacacagcatatcatggacaatgggaggagtcacaactatcagctggtgcaacccc

SEQ ID NO: 96907 - DNA, 60 bp, Artificial
  Synthetic oligonucleotide
cgcgaacacagcatatcatggacaatgggaggagtcacaactatcagctggtgcaaccca

SEQ ID NO: 96908 - DNA, 60 bp, Artificial
  Synthetic oligonucleotide
ggtattctgtcttcggattgctgttagcgaggatgccaacaaaccactcaggcaaggtgc

SEQ ID NO: 96909 - DNA, 60 bp, Artificial
  Synthetic oligonucleotide
gatgggataaccctgaggctcagtggggaatttgatgcaacttatcaaaagaatatctca

SEQ ID NO: 96910 - DNA, 60 bp, Artificial
  Synthetic oligonucleotide
gatactatccggttgcagagatcactcacactcacatcaatatttagcacttggtgtgct

SEQ ID NO: 96911 - DNA, 60 bp, Artificial
  Synthetic oligonucleotide
cacagtgacaatagacaacactgtatatcagctaagcaaagttgagggtgaacagcatgt

SEQ ID NO: 96912 - DNA, 60 bp, Artificial
  Synthetic oligonucleotide
gttactcctgagcttgtcattgtgacacatacagatgagaacaagttcacgtgtcttacc

SEQ ID NO: 96913 - DNA, 60 bp, Artificial
  Synthetic oligonucleotide
gttactcctgagcttgtcattgtgacacatacagatgagaacaagttcacgtgccttacc

SEQ ID NO: 96914 - DNA, 60 bp, Artificial
  Synthetic oligonucleotide
gcccttgcagggaaacagaatgaggccacactggctgttcttgagatcgatggttttgct

SEQ ID NO: 96915 - DNA, 60 bp, Artificial
  Synthetic oligonucleotide
ccatgttgctcttgcagggaaacagaatgaggccacactggctgttcttgagatcgatgg

SEQ ID NO: 96916 - DNA, 60 bp, Artificial
  Synthetic oligonucleotide
gtactgttcaatgggaatcctaattcaacatggataggaaatatggaatgtgagagctta

SEQ ID NO: 96917 - DNA, 60 bp, Artificial
  Synthetic oligonucleotide
aagaggttctgggattgtggagttttaaaccctatttatggtcctaatactgctagtcaa

SEQ ID NO: 96918 - DNA, 60 bp, Artificial
  Synthetic oligonucleotide
cacgaagattggttgaagtatttatagcagatagtaaatttgatccccaccaagtattag

SEQ ID NO: 96919 - DNA, 60 bp, Artificial
  Synthetic oligonucleotide
taatcaaatgactgatggattaagagatctatgggttactgtactatcgaagttagcatc

SEQ ID NO: 96920 - DNA, 60 bp, Artificial
  Synthetic oligonucleotide
ggtgacactgactcataaggtaggccaagtctttgttactcctgagcttgtcattgtgac

SEQ ID NO: 96921 - DNA, 60 bp, Artificial
  Synthetic oligonucleotide
ctcaacttgtacctaactgaattgactacagtattcgggccacaaatcacttcccctgcc

SEQ ID NO: 96922 - DNA, 60 bp, Artificial
  Synthetic oligonucleotide
gcttctgggcacttgcacaggttgtctgtcctctctttcgcaatttcacactgtgcaagg

SEQ ID NO: 96923 - DNA, 60 bp, Artificial
  Synthetic oligonucleotide
gcttctgggcacttgcacaggttgtctgtcctactactctgttacttcccactgtgcaag

SEQ ID NO: 96924 - DNA, 60 bp, Artificial
  Synthetic oligonucleotide
cgagtcatcccgagacgcgagttatgtgtttgcaaggcgtgccctaaaatctgcgaacta

SEQ ID NO: 96925 - DNA, 55 bp, Artificial
  Synthetic oligonucleotide
ctctgtaggtaggagaaagcaaattcaagggcttgttgacacaacaaacactgtg

SEQ ID NO: 96926 - DNA, 53 bp, Artificial
  Synthetic oligonucleotide
tacgggtagaatcaaagtgccttgattgtgccaagatggactcatctaggaca

SEQ ID NO: 96927 - DNA, 60 bp, Artificial
  Synthetic oligonucleotide
gccccgattgtgccaagatggactcatctaggacaatcaagctgtactttgattctacct

SEQ ID NO: 96928 - DNA, 60 bp, Artificial
  Synthetic oligonucleotide
cagaatgaggccacactggctgttcttgagatcgatggttttaccaacggcgtaccccag

SEQ ID NO: 96929 - DNA, 60 bp, Artificial
  Synthetic oligonucleotide
ggtgagttacgataaaaggcgaaggagcaattgaagtcgcacgggtagaaggtgtgaatc

SEQ ID NO: 96930 - DNA, 60 bp, Artificial
  Synthetic oligonucleotide
ggtagaaggtgtgaatctcgagtgcgagcccgaagctcaagctcgagagagccttctgcc

SEQ ID NO: 96931 - DNA, 60 bp, Artificial
  Synthetic oligonucleotide
ggctgcgaaccctgataagaggggagaagaccaagctgaaggatttccagaggaggtacg

SEQ ID NO: 96932 - DNA, 60 bp, Artificial
  Synthetic oligonucleotide
ggctgcgcaccctgataagaggggagaagaccaagctgaaggacttccagaagaggtacg

SEQ ID NO: 96933 - DNA, 60 bp, Artificial
  Synthetic oligonucleotide
ggctgcgaaccctgataagaggggagaagaccaagctgaaggacttccagaagagatacg

SEQ ID NO: 96934 - DNA, 56 bp, Artificial
  Synthetic oligonucleotide
tgaagttgagaggaaggcgccaggaggacgagagtcgctctcggatgttatcggat

SEQ ID NO: 96935 - DNA, 60 bp, Artificial
  Synthetic oligonucleotide
tccatggaacctctattgatgagaaagcagagatcttttccttctttaggacatttggcc

SEQ ID NO: 96936 - DNA, 60 bp, Artificial
  Synthetic oligonucleotide
gagtcgttactcgccattttccatggaacctctattgatgagaaagcagagatcttttcc

SEQ ID NO: 96937 - DNA, 60 bp, Artificial
  Synthetic oligonucleotide
ccataggggtagccaaatattacgggtctgatcaggaactcttaaaggcctgcaccgatc

SEQ ID NO: 96938 - DNA, 60 bp, Artificial
  Synthetic oligonucleotide
caggctcgtcatagagagcagtcccctaagcagagctgagaaagcagcatatgtgaaatc

SEQ ID NO: 96939 - DNA, 60 bp, Artificial
  Synthetic oligonucleotide
ccccggccagaggagcacagtctcagtgttcgtactaggcccaagtgttactgatgatgc

SEQ ID NO: 96940 - DNA, 60 bp, Artificial
  Synthetic oligonucleotide
ccccggccagaggagcacagtctcagtgttcgtactaggcccaagtgtgactgatgatgc

SEQ ID NO: 96941 - DNA, 60 bp, Artificial
  Synthetic oligonucleotide
cttggcaagacatcttgcatacctatgcagcttggcagagatatctagggatgggccaag

SEQ ID NO: 96942 - DNA, 60 bp, Artificial
  Synthetic oligonucleotide
atccccggccagaggagcacagtctcagtgttcgtactaggcccaagtgtgactgatgat

SEQ ID NO: 96943 - DNA, 60 bp, Artificial
  Synthetic oligonucleotide
ggctcggttatgagatctcagcaaagccttgtatctctcatggttgagacccttgtgact

SEQ ID NO: 96944 - DNA, 60 bp, Artificial
  Synthetic oligonucleotide
ccttcattcttaaagaagattctgaagttgagagggaggcgccaggaggacgagagtcgc

SEQ ID NO: 96945 - DNA, 60 bp, Artificial
  Synthetic oligonucleotide
tggacacagataagcagcactctcagagaggagggttcctcgtctctctgcttgccatgg

SEQ ID NO: 96946 - DNA, 60 bp, Artificial
  Synthetic oligonucleotide
gcaaagcttggtatctctcatggttgagacccttgtgactatgaacactgcgaggtccga

SEQ ID NO: 96947 - DNA, 60 bp, Artificial
  Synthetic oligonucleotide
gatggctgcgaaccctgataagaggggagaagaccaagctgaaggacttccagaagagat

SEQ ID NO: 96948 - DNA, 60 bp, Artificial
  Synthetic oligonucleotide
ggacacagataagcagcactctcagagaggagggttcctcgtctccctgcttgccatggc

SEQ ID NO: 96949 - DNA, 60 bp, Artificial
  Synthetic oligonucleotide
gtgctgtagacaactatacaagtttcataggcttcaagtttcggaagtttatagaaccac

SEQ ID NO: 96950 - DNA, 60 bp, Artificial
  Synthetic oligonucleotide
ccgaaagggcggagcatcaaatcatcctacccgaatctcacttatcgtctccacttgtca

SEQ ID NO: 96951 - DNA, 60 bp, Artificial
  Synthetic oligonucleotide
cccctgccatactttatcccttgaccattgcaaataagactgcgactctccaggaccctt

SEQ ID NO: 96952 - DNA, 60 bp, Artificial
  Synthetic oligonucleotide
cgttcaattttgagacagtggccagcccgaatatcgtcctcaagaagcatacacagcgcg

SEQ ID NO: 96953 - DNA, 60 bp, Artificial
  Synthetic oligonucleotide
cttgatgttcccacaagaaccgttgcttgaattcccaccagtccaggacatcggtgcacg

SEQ ID NO: 96954 - DNA, 60 bp, Artificial
  Synthetic oligonucleotide
ggcacttgattgtagctgcacggatgaggtctgcctccagcaagcttgtgacactgtctc

SEQ ID NO: 96955 - DNA, 60 bp, Artificial
  Synthetic oligonucleotide
gttccaaggtcacagagactgaagaggaggactaccaatcgacagaccctacactaatgg

SEQ ID NO: 96956 - DNA, 60 bp, Artificial
  Synthetic oligonucleotide
ggccagtgacaacttcttcagagaattgatccatgtcaaccatctgatagggcacaacct

SEQ ID NO: 96957 - DNA, 60 bp, Artificial
  Synthetic oligonucleotide
agaagagggcttgcggcagcagctcagagagtgtccgaggatgccagcaacatggacctt

SEQ ID NO: 96958 - DNA, 60 bp, Artificial
  Synthetic oligonucleotide
ggtatgtaacattctgactctcgacgggatcaccttgcgccttagcggggaattcgatgc

SEQ ID NO: 96959 - DNA, 60 bp, Artificial
  Synthetic oligonucleotide
gggtcaaagcacataccatatacgggaaggtaattgctcaactgcatgccgactctgccg

SEQ ID NO: 96960 - DNA, 60 bp, Artificial
  Synthetic oligonucleotide
cagcgcttggattcctggacagacagcaaggaggactcggtgttcatcaccacatacgga

SEQ ID NO: 96961 - DNA, 60 bp, Artificial
  Synthetic oligonucleotide
gaggtgtcgcattaggtgtagccaccgcagcgcagatcacagcggcttctgcccttatac

SEQ ID NO: 96962 - DNA, 60 bp, Artificial
  Synthetic oligonucleotide
gatcccaagccttctaccggccatttgcatgctcctccactgatcttcgtggccatcagt

SEQ ID NO: 96963 - DNA, 60 bp, Artificial
  Synthetic oligonucleotide
gagggtgttaaggaagggaatgtggtatatcagcagatcatgcttctggggctctctctg

SEQ ID NO: 96964 - DNA, 60 bp, Artificial
  Synthetic oligonucleotide
gccaggacaacgacaccgactggggatactagtcagaacctcgctcggtgatgacccaga

SEQ ID NO: 96965 - DNA, 60 bp, Artificial
  Synthetic oligonucleotide
ggcaaatcctcgaagtaaccatcctcggacttggggcagaggatctcaatcgggtgggag

SEQ ID NO: 96966 - DNA, 60 bp, Artificial
  Synthetic oligonucleotide
gatggcgaagacattgatacagagacacgggacgctactcgccaaatcagatgagatggc

SEQ ID NO: 96967 - DNA, 60 bp, Artificial
  Synthetic oligonucleotide
gccggaatcatgacctcaaaggtaagcaccgacggagggttgccacatttatcaccaccg

SEQ ID NO: 96968 - DNA, 60 bp, Artificial
  Synthetic oligonucleotide
caagtggcactagagtcacccctagccctgctcaacactgaatccacgatcatgaacgcc

SEQ ID NO: 96969 - DNA, 60 bp, Artificial
  Synthetic oligonucleotide
ggtgacattcgacaagttggaaaggaagctccggaggctcgatctgtccgtggggctcag

SEQ ID NO: 96970 - DNA, 60 bp, Artificial
  Synthetic oligonucleotide
ctgacaaccgtgttcggaccgcaaatcacatcccctgcactcacgcagttgaccatccag

SEQ ID NO: 96971 - DNA, 60 bp, Artificial
  Synthetic oligonucleotide
tcaggtttacgacgttgtggcactgatggagggcttcgcgtatggtgccgtgcagctcct

SEQ ID NO: 96972 - DNA, 60 bp, Artificial
  Synthetic oligonucleotide
taaagcatgcaacttctggcggcccggatatagggattgagagggacactgttcgtgcgc

SEQ ID NO: 96973 - DNA, 60 bp, Artificial
  Synthetic oligonucleotide
acagcggaacaagcccaacgtggggccaaccaggggagggcccagtgggagacggggcac

SEQ ID NO: 96974 - DNA, 60 bp, Artificial
  Synthetic oligonucleotide
ggcagggtccagaaacggtacatcctccacccggtgtgtagaagtgcgatccagcttacc

SEQ ID NO: 96975 - DNA, 60 bp, Artificial
  Synthetic oligonucleotide
ggggctgtacaaggtgtgatagcggagacgaacaattcacgtggttccatctcccaagca

SEQ ID NO: 96976 - DNA, 60 bp, Artificial
  Synthetic oligonucleotide
ccgcaactggataagcgaggctcaaaattcagatgtcgtccggctattcgagtacgcagc

SEQ ID NO: 96977 - DNA, 60 bp, Artificial
  Synthetic oligonucleotide
ggtatgccgcagtttaacaacagaagtggcgtatccgaggaaagggcccagaggttcatg

SEQ ID NO: 96978 - DNA, 60 bp, Artificial
  Synthetic oligonucleotide
ggcacggcaattctctgtatctcgctgaaggaagcggggctatcatgagcttattggagc

SEQ ID NO: 96979 - DNA, 60 bp, Artificial
  Synthetic oligonucleotide
tttattgacgaccgtgtatggttcccagtttacggagggctaaaacccaactcgcctagc

SEQ ID NO: 96980 - DNA, 60 bp, Artificial
  Synthetic oligonucleotide
taacacttggtaagtcacagttaccccgtgctatgtatgccgaggatgtgtctttgggag

SEQ ID NO: 96981 - DNA, 60 bp, Artificial
  Synthetic oligonucleotide
gggcttgtgctacagggaatgtaactagctgcgccagaactagggttgtaaatgctcatg

SEQ ID NO: 96982 - DNA, 60 bp, Artificial
  Synthetic oligonucleotide
tggctaatgcggtgtctttcaatctgcttgttgaactgctaatcggggcggacatgacag

SEQ ID NO: 96983 - DNA, 60 bp, Artificial
  Synthetic oligonucleotide
ccttactatttctgagtgcatatgaatgtggggcaaagatagcagcagtagttcagggtg

SEQ ID NO: 96984 - DNA, 60 bp, Artificial
  Synthetic oligonucleotide
ctcctcagttctttacctggaatcttgagccgctgcctgtggtagtctaccctgtctctc

SEQ ID NO: 96985 - DNA, 60 bp, Artificial
  Synthetic oligonucleotide
cttcttggatctgggtttgggataaccaaaatgtcccgacttggacctgcgttggatgag

SEQ ID NO: 96986 - DNA, 60 bp, Artificial
  Synthetic oligonucleotide
agagtgtcttttggaggaagcatgggtagtcgggcatcgacagttaattcactctccgga

SEQ ID NO: 96987 - DNA, 60 bp, Artificial
  Synthetic oligonucleotide
cgtaggcttagttggacagagagttttccaggtcttcccttctgaagtaatgttggtgtc

SEQ ID NO: 96988 - DNA, 60 bp, Artificial
  Synthetic oligonucleotide
gtcagttggcggcacacaaccttgccatgtcgaatttctacgggacccatcagggagatc

SEQ ID NO: 96989 - DNA, 60 bp, Artificial
  Synthetic oligonucleotide
catctcatggatagtacaaagagcagtgtctcgtccaggggagtttccttgtggggcttc

SEQ ID NO: 96990 - DNA, 60 bp, Artificial
  Synthetic oligonucleotide
ggagcttgctccctcaacgatgactgcttacgagcctattccgttcctctaccagctgga

SEQ ID NO: 96991 - DNA, 60 bp, Artificial
  Synthetic oligonucleotide
ctgggaacacgattgatccgacagcattatccaggcctctaaatcatgacacgaccggag

SEQ ID NO: 96992 - DNA, 60 bp, Artificial
  Synthetic oligonucleotide
tgatctcgctgtgattctggaatggcgcacccgactatatcagatgtgctctatcccgaa

SEQ ID NO: 96993 - DNA, 60 bp, Artificial
  Synthetic oligonucleotide
acccaccaacgcacggaggtaactacaacacctgaactggtcaacaacacgttaaacccc

SEQ ID NO: 96994 - DNA, 60 bp, Artificial
  Synthetic oligonucleotide
ggcagtgtgcaagatgtatcgacgaccggggctattggccaaagtgacgaggctgcacac

SEQ ID NO: 96995 - DNA, 60 bp, Artificial
  Synthetic oligonucleotide
gggatggtagaaaagatggaggggtcggttaacaggcatgtggctgaagaacttggactg

SEQ ID NO: 96996 - DNA, 60 bp, Artificial
  Synthetic oligonucleotide
cacccatatcgacatctaacaatattgcccatagattgagggataagagcacccagatga

SEQ ID NO: 96997 - DNA, 60 bp, Artificial
  Synthetic oligonucleotide
gcagtcaaccctcctgcataggttatgtaacacagtctgcagatatgatgagcaagaagc

SEQ ID NO: 96998 - DNA, 60 bp, Artificial
  Synthetic oligonucleotide
cactcacactgcccctgcaatccctacaaccacctcaaacccgtacctatacaataaagg

SEQ ID NO: 96999 - DNA, 60 bp, Artificial
  Synthetic oligonucleotide
cccgtgagaacaaggaccatctaaccgagtttaaagttcttgcaaacgacgatgatgtta

SEQ ID NO: 97000 - DNA, 60 bp, Artificial
  Synthetic oligonucleotide
ttgaacctagaatctgtgtgtgtccccgctctgaaagtcctgacagatgaatctcagtgg

SEQ ID NO: 97001 - DNA, 60 bp, Artificial
  Synthetic oligonucleotide
ccatgaacaaacaccccatgggacagatctaccgtgtcgtgagggaggctctggatgctg

SEQ ID NO: 97002 - DNA, 60 bp, Artificial
  Synthetic oligonucleotide
caaacagagccccttccccgaaagcaagagtccttgagctgatttgcgatatcgggaact

SEQ ID NO: 97003 - DNA, 60 bp, Artificial
  Synthetic oligonucleotide
ggtcatcggtggagttgcattaggggtggcgacttcagcgcagattacagcaggcgttgc

SEQ ID NO: 97004 - DNA, 60 bp, Artificial
  Synthetic oligonucleotide
gccagagaaaagcaccgacaacagggtgaatcaggactcaacatcggaatcagcagtgga

SEQ ID NO: 97005 - DNA, 60 bp, Artificial
  Synthetic oligonucleotide
gcctacattgcagcaagtgttttcacctgttgccactcccagttggccctcagtgagctc

SEQ ID NO: 97006 - DNA, 60 bp, Artificial
  Synthetic oligonucleotide
ggcttggcctcctcatcattttccagaacacgtgagctccatcattaagtcagccgccgc

SEQ ID NO: 97007 - DNA, 60 bp, Artificial
  Synthetic oligonucleotide
ccccacttcagaaacactttcaatccaggcactttccagagcatttaacggtgactttga

SEQ ID NO: 97008 - DNA, 60 bp, Artificial
  Synthetic oligonucleotide
ctcgctctacggaggaccttcagattgctattcagaccgtgactgcgcaactttggatcc

SEQ ID NO: 97009 - DNA, 60 bp, Artificial
  Synthetic oligonucleotide
gtcccacaggtggacttcccacggctggagaaagagggtatcctatcacaacaggaaatc

SEQ ID NO: 97010 - DNA, 60 bp, Artificial
  Synthetic oligonucleotide
ataccagcctacagcaacagttgttcccctgaatgttatctggtatgtagtggaaagaag

SEQ ID NO: 97011 - DNA, 60 bp, Artificial
  Synthetic oligonucleotide
gaaaactgcaggggctggaagaatatttaccgacaaagaatcgatgggaagcacatgtcc

SEQ ID NO: 97012 - DNA, 60 bp, Artificial
  Synthetic oligonucleotide
gatgacttctgattatgaggatccggcttcgatgccttcttgctatggttcgatgaggag

SEQ ID NO: 97013 - DNA, 60 bp, Artificial
  Synthetic oligonucleotide
cgcccatccaagttcggtcatcgccagatggtcaatgggatactcaagttcaaaacaaca

SEQ ID NO: 97014 - DNA, 60 bp, Artificial
  Synthetic oligonucleotide
gcacgctctgacatatacccttccgcaggtactgacatctaacaagcatgctctggtttc

SEQ ID NO: 97015 - DNA, 60 bp, Artificial
  Synthetic oligonucleotide
ggagccatggaggcatggatgggatgcgtgatcatgactgagacattttacgacgaccgc

SEQ ID NO: 97016 - DNA, 60 bp, Artificial
  Synthetic oligonucleotide
caccctagagttttccgaaggttttgggacgtgggattgatcgagccagtctacgggcct

SEQ ID NO: 97017 - DNA, 60 bp, Artificial
  Synthetic oligonucleotide
gccccttagctgaaaatccaactcactccaggtattttgaagaagtcaatctggacagca

SEQ ID NO: 97018 - DNA, 60 bp, Artificial
  Synthetic oligonucleotide
tggtgcagtgggtggcctaagtcttcatgtctgtatcaaggggaagatgagcaatgccct

SEQ ID NO: 97019 - DNA, 60 bp, Artificial
  Synthetic oligonucleotide
ctgtgacacggagaggacaactagtcactttcttgaaccttacccactagcacgcgattc

SEQ ID NO: 97020 - DNA, 60 bp, Artificial
  Synthetic oligonucleotide
cctctgaaagcagcactctttatcgagagagcgttgagcccattagacctacacgggaag

SEQ ID NO: 97021 - DNA, 60 bp, Artificial
  Synthetic oligonucleotide
cattagccctgtgctcacaccttggaaagacatcctgaccactggggcaatattccctgc

SEQ ID NO: 97022 - DNA, 60 bp, Artificial
  Synthetic oligonucleotide
cagaccccagattgagcttgcagagaaaccagacagtgtgccaatcaatgaacaccttgc

SEQ ID NO: 97023 - DNA, 60 bp, Artificial
  Synthetic oligonucleotide
ccggaagactttcagaagacgtacggcagaagtgccatccaggagccgtcgacaagagcc

SEQ ID NO: 97024 - DNA, 60 bp, Artificial
  Synthetic oligonucleotide
ggcctataactaccctaacaatcggcaattggcagttcagaccagtggaggtgagtgggg

SEQ ID NO: 97025 - DNA, 60 bp, Artificial
  Synthetic oligonucleotide
gtcacagcctcattagctgatctaaaacgaatgattaaagtcgggcttcttgatgagcgg

SEQ ID NO: 97026 - DNA, 60 bp, Artificial
  Synthetic oligonucleotide
tgacttacaagatgagggcatgtcaggtggtaggagaatcattgattgcgacaggtgtgg

SEQ ID NO: 97027 - DNA, 60 bp, Artificial
  Synthetic oligonucleotide
gctctgtactgtcgctggcttcaacatgctaccgcaagatatctactcgcatagtcaagc

SEQ ID NO: 97028 - DNA, 60 bp, Artificial
  Synthetic oligonucleotide
ggccaagtcattaactggtgcacgccaagagattgctggtatgttggattctaccaaagg

SEQ ID NO: 97029 - DNA, 60 bp, Artificial
  Synthetic oligonucleotide
tgttttagaaggcagggttatgatagatctcggtatgacttgtgatttgaggtttgagga

SEQ ID NO: 97030 - DNA, 58 bp, Artificial
  Synthetic oligonucleotide
aaaagagaacatcacttaaacagtgcacaaggcagatcttagaggtcacaatattggg

SEQ ID NO: 97031 - DNA, 60 bp, Artificial
  Synthetic oligonucleotide
cggtgctctttgctacaacaagagaaatcccgaaaataagaggcttatctgcagaagaga

SEQ ID NO: 97032 - DNA, 60 bp, Artificial
  Synthetic oligonucleotide
caattatttgcatcgccttacagtcagtagtagaccatgtgaattccctgcatcaatacc

SEQ ID NO: 97033 - DNA, 60 bp, Artificial
  Synthetic oligonucleotide
caactatttgcatcgccttacagtcagtagtagaccatgtgaattccctgcatcaatacc

SEQ ID NO: 97034 - DNA, 60 bp, Artificial
  Synthetic oligonucleotide
attatttacaccgtttaacagtcagtagtagaccatgtgaattccctgcatcaataccag

SEQ ID NO: 97035 - DNA, 60 bp, Artificial
  Synthetic oligonucleotide
gcatcgccttacagtcagtagtagaccatgtgaattccctgcatcaataccagcttatag

SEQ ID NO: 97036 - DNA, 60 bp, Artificial
  Synthetic oligonucleotide
cgtggccatttgaggtatatatggccgagtgagcgagcaggatctccattttgaccgcga

SEQ ID NO: 97037 - DNA, 60 bp, Artificial
  Synthetic oligonucleotide
ggtggcgcaccaatggcagacaataacgaaggtgccgacggagtgggtaatgcctcagga

SEQ ID NO: 97038 - DNA, 60 bp, Artificial
  Synthetic oligonucleotide
caggccaagaagcgggttctcgaacctctcggtctggttgaggaaggcgctaagacggct

SEQ ID NO: 97039 - DNA, 60 bp, Artificial
  Synthetic oligonucleotide
agcagtcttccaggccaagaagcgggttctcgaacctctcggtctggttgaggaaggcgc

SEQ ID NO: 97040 - DNA, 60 bp, Artificial
  Synthetic oligonucleotide
tacgtcctcggctctgcgcaccagggctgcctgcctccgttcccggcggacgtcttcatg

SEQ ID NO: 97041 - DNA, 60 bp, Artificial
  Synthetic oligonucleotide
aaaagcgagcccaagcgggcctgcccctcagtcgcggatccatcgacgtcagacgcggaa

SEQ ID NO: 97042 - DNA, 60 bp, Artificial
  Synthetic oligonucleotide
gatccatcgacgtcagacgcggaaggagctccggtggactttgccgacaggtaccaaaac

SEQ ID NO: 97043 - DNA, 60 bp, Artificial
  Synthetic oligonucleotide
cccctcagtcgcggatccatcgacgtcagacgcggaaggagctccggtggactttgccga

SEQ ID NO: 97044 - DNA, 60 bp, Artificial
  Synthetic oligonucleotide
aaaagacccgcccccgatgacgcggataaaagcgagcccaagcgggcctgcccctcagtc

SEQ ID NO: 97045 - DNA, 60 bp, Artificial
  Synthetic oligonucleotide
cgactacctggtggggccctcgctgcccgcggacattaaaaccaaccgcatctaccgcat

SEQ ID NO: 97046 - DNA, 60 bp, Artificial
  Synthetic oligonucleotide
tcccagatcaaggccgcgctggacaatgccggcaagatcatggcgctgaccaaatccgcg

SEQ ID NO: 97047 - DNA, 60 bp, Artificial
  Synthetic oligonucleotide
ggtggaccggggcatcacctccgagaagcagtggatccaggaggaccaggcctcgtacat

SEQ ID NO: 97048 - DNA, 60 bp, Artificial
  Synthetic oligonucleotide
aattctgacgcgcccgtgatcaggtcaaaaacctccgcgcgctacatggagctggtcggg

SEQ ID NO: 97049 - DNA, 60 bp, Artificial
  Synthetic oligonucleotide
ccctgcaaaacgtgcgagagaatgaatcagaatttcaacatttgcttcacacacggggtc

SEQ ID NO: 97050 - DNA, 50 bp, Artificial
  Synthetic oligonucleotide
gcgcaaacggctcgtggcgcagcacctgacccacgtcagccagacccagg

SEQ ID NO: 97051 - DNA, 60 bp, Artificial
  Synthetic oligonucleotide
gcgtggactaacatggaggagtatataagcgcgtgtttgaacctggccgaacgcaaacgg

SEQ ID NO: 97052 - DNA, 60 bp, Artificial
  Synthetic oligonucleotide
gtcagcgctgacgtaaatcacgtcataggggagtggtcctgtattagctgtcacgtgagt

SEQ ID NO: 97053 - DNA, 60 bp, Artificial
  Synthetic oligonucleotide
gatgacgcggataaaagcgagcccaagcgggcctgcccctcagtcgcggatccatcgacg

SEQ ID NO: 97054 - DNA, 60 bp, Artificial
  Synthetic oligonucleotide
tcggcggcagcaaggtgcgcgtggaccaaaagtgcaagtcgtccgcccagatcgacccca

SEQ ID NO: 97055 - DNA, 60 bp, Artificial
  Synthetic oligonucleotide
tttcaggagcgtctgcaagaagatacgtcatttgggggcaacctcgggcgagcagtcttc

SEQ ID NO: 97056 - DNA, 60 bp, Artificial
  Synthetic oligonucleotide
gtgacaatccgtacctgcggtataaccacgccgacgccgagtttcaggagcgtctgcaag

SEQ ID NO: 97057 - DNA, 60 bp, Artificial
  Synthetic oligonucleotide
ttggctcgaggacaacctctctgagggcattcgcgagtggtgggcgctgaaacctggagc

SEQ ID NO: 97058 - DNA, 60 bp, Artificial
  Synthetic oligonucleotide
aacctctctgagggcattcgcgagtggtgggacttgaaacctggagccccgaagcccaaa

SEQ ID NO: 97059 - DNA, 60 bp, Artificial
  Synthetic oligonucleotide
caaggtgacaaagcaggaagtcaaagagttcttccgctgggcgcaggatcacgtgaccga

SEQ ID NO: 97060 - DNA, 60 bp, Artificial
  Synthetic oligonucleotide
ggaagtcaaagagttcttccgctgggcgcaggatcacgtgaccgaggtggcgcatgagtt

SEQ ID NO: 97061 - DNA, 60 bp, Artificial
  Synthetic oligonucleotide
gccgggtttctacgagatcgtgatcaaggtgccgagcgacctggacgagcacctgccggg

SEQ ID NO: 97062 - DNA, 60 bp, Artificial
  Synthetic oligonucleotide
gaccggatgttcaaatttgaactcacccgccgtctggagcacgactttggcaaggtgacg

SEQ ID NO: 97063 - DNA, 60 bp, Artificial
  Synthetic oligonucleotide
tcacccgccgtctggagcacgactttggcaaggtgacaaagcaggaagtcaaagagttct

SEQ ID NO: 97064 - DNA, 60 bp, Artificial
  Synthetic oligonucleotide
gattctgacatggatcggaatctgatcgagcaggcacccctgaccgtggccgagaagctg

SEQ ID NO: 97065 - DNA, 60 bp, Artificial
  Synthetic oligonucleotide
gctacatccccaactacctcctgcccaagactcagcccgagctgcagtgggcgtggacta

SEQ ID NO: 97066 - DNA, 60 bp, Artificial
  Synthetic oligonucleotide
acctcctgcccaagacccagcccgagctgcagtgggcgtggactaacatggaggagtata

SEQ ID NO: 97067 - DNA, 60 bp, Artificial
  Synthetic oligonucleotide
acgtgaccgaggtggcgcatgagttctacgtcagaaagggcggagccagcaaaagacccg

SEQ ID NO: 97068 - DNA, 60 bp, Artificial
  Synthetic oligonucleotide
gttttacgtcagaaagggcggagccagcaaaagacccgcccccgatgacgcggataaaag

SEQ ID NO: 97069 - DNA, 60 bp, Artificial
  Synthetic oligonucleotide
catacagatcaggcagcactacagcaggaataagtgacattatggtcacggaagaacaag

SEQ ID NO: 97070 - DNA, 58 bp, Artificial
  Synthetic oligonucleotide
caactatgcaaactggaacatctggagtaatgggaacaaggtgaatttgaaagacaga

SEQ ID NO: 97071 - DNA, 60 bp, Artificial
  Synthetic oligonucleotide
gtaaattccatccttctccgaatctcggaggatttggcctgcacaatccaccaccgcagg

SEQ ID NO: 97072 - DNA, 60 bp, Artificial
  Synthetic oligonucleotide
ggactgtaacgaatgaacaaaacactactacagctcctacaagttcagatctggatgttc

SEQ ID NO: 97073 - DNA, 60 bp, Artificial
  Synthetic oligonucleotide
cattcgttactctgctctcagagagaacggacctcaggtcggagagatggcactttctag

SEQ ID NO: 97074 - DNA, 60 bp, Artificial
  Synthetic oligonucleotide
ggcctgcacaatccaccaccgcaggtgttcatcaagaatacaccagtgcctgcagaccct

SEQ ID NO: 97075 - DNA, 60 bp, Artificial
  Synthetic oligonucleotide
ccagtactctacgggccagtgtacagtagagatggtgtgggagctgagaaaagagaattc

SEQ ID NO: 97076 - DNA, 60 bp, Artificial
  Synthetic oligonucleotide
ccagtagaatacgtgcaccagaagtggaattcctacataacccagtactctacgggccag

SEQ ID NO: 97077 - DNA, 60 bp, Artificial
  Synthetic oligonucleotide
cggtcagcccaatagttaagccggaaacacgtcaccggaagtcacatgaccggaagtcac

SEQ ID NO: 97078 - DNA, 60 bp, Artificial
  Synthetic oligonucleotide
taatgtttgcacctaatgaaactggtggatatgtagaagatagattgattggaaccagat

SEQ ID NO: 97079 - DNA, 60 bp, Artificial
  Synthetic oligonucleotide
gcgcgccaggaagtgacgtgcaatgccaccctatataagccaggaaacttccggtttagt

SEQ ID NO: 97080 - DNA, 60 bp, Artificial
  Synthetic oligonucleotide
ctttcaagcaacttcttcaaataatagacaagtgaaagctgcactggaaaatgcccgtgc

SEQ ID NO: 97081 - DNA, 60 bp, Artificial
  Synthetic oligonucleotide
gtctcttaactttgtagaatggctttctaccggagtttgggagcccacgggcatctggaa

SEQ ID NO: 97082 - DNA, 60 bp, Artificial
  Synthetic oligonucleotide
gaccgtagtgcattctactgcttagagtacttccctagtcagatgctaagaacaggcaac

SEQ ID NO: 97083 - DNA, 60 bp, Artificial
  Synthetic oligonucleotide
ttcgctcattcacaggacttagacaggctgatgaaccccctagtggatcaatacctctgg

SEQ ID NO: 97084 - DNA, 60 bp, Artificial
  Synthetic oligonucleotide
aaaaggctgtgaaaggggcttatggcaccatgggccgcaattggctgccaggacctaaat

SEQ ID NO: 97085 - DNA, 60 bp, Artificial
  Synthetic oligonucleotide
gtctttacggatgatgagcatcaactcccgtatgtcctgggctcggctacggaaggcacc

SEQ ID NO: 97086 - DNA, 60 bp, Artificial
  Synthetic oligonucleotide
cacgctgaccaggactttatagatagcctccaagacgaccagtcattcggaggtaatctt

SEQ ID NO: 97087 - DNA, 60 bp, Artificial
  Synthetic oligonucleotide
gtacgggtactgcacaatgcacaccaaccagaatggagcacggttcaatgaccgtagtgc

SEQ ID NO: 97088 - DNA, 60 bp, Artificial
  Synthetic oligonucleotide
cacctgtcaataaggcggacagcgtcgcgcttgaacacgacaaggcctatgaccagcagc

SEQ ID NO: 97089 - DNA, 60 bp, Artificial
  Synthetic oligonucleotide
gtacttcctggctataagtatcttgggcctggtaacggcctggataaaggcccacctgtc

SEQ ID NO: 97090 - DNA, 60 bp, Artificial
  Synthetic oligonucleotide
ctggataaaggcccacctgtcaataaggcggacagcgtcgcgcttgaacacgacaaggcc

SEQ ID NO: 97091 - DNA, 60 bp, Artificial
  Synthetic oligonucleotide
gattgtgctatatgtaaagagttgaaaaatgaacttgcagaaattgagcatgtgtttgag

SEQ ID NO: 97092 - DNA, 60 bp, Artificial
  Synthetic oligonucleotide
gatcaaagagttagggcctacacaggaggaacagacaactatgcaaactggaacatctgg

SEQ ID NO: 97093 - DNA, 60 bp, Artificial
  Synthetic oligonucleotide
ccattagaggagcgtatgtttcaaattgtcctatcacataaattggagccttcttttgga

SEQ ID NO: 97094 - DNA, 56 bp, Artificial
  Synthetic oligonucleotide
acttccggtgacgtgtttccggcttaactattgggctgaccgcgcgcatgcgcgtg

SEQ ID NO: 97095 - DNA, 60 bp, Artificial
  Synthetic oligonucleotide
agttccggtcacatgcttccggtgacgcacatccggtgacgtagttccggtcacgtgctt

SEQ ID NO: 97096 - DNA, 60 bp, Artificial
  Synthetic oligonucleotide
aggtaatcttggaaaggctgtatttcaggccaaaaaacgtatcttagagccatttggcct

SEQ ID NO: 97097 - DNA, 60 bp, Artificial
  Synthetic oligonucleotide
gaggggaggacagaataagaccgtgactgcagcatacatactgcattaccttattcctaa

SEQ ID NO: 97098 - DNA, 60 bp, Artificial
  Synthetic oligonucleotide
gaaggcagtgagtacattcatcttcattgctgtattgcccagggcaatgtacggtctttt

SEQ ID NO: 97099 - DNA, 60 bp, Artificial
  Synthetic oligonucleotide
ggggataacatctgagaagcaatggctcactgagaaccgagagagctacagaagctttca

SEQ ID NO: 97100 - DNA, 60 bp, Artificial
  Synthetic oligonucleotide
gcggcaaagaactatagcaaccttgttgattggctcattgaaatggggataacatctgag

SEQ ID NO: 97101 - DNA, 60 bp, Artificial
  Synthetic oligonucleotide
gcccctttacctgatcctcaagcatcaactgtggcaccgcttatttccaacagagcggca

SEQ ID NO: 97102 - DNA, 60 bp, Artificial
  Synthetic oligonucleotide
cgcgtggtcaacctaacagccggaaacacgtcaccggaagtcacatgaccggaagtcacg

SEQ ID NO: 97103 - DNA, 60 bp, Artificial
  Synthetic oligonucleotide
gcggcaagaattgctggatgcatttcaagaaagtgatttggctgcccctttacctgatcc

SEQ ID NO: 97104 - DNA, 60 bp, Artificial
  Synthetic oligonucleotide
aaccgcttccactgccacttctcccctagagactggcagagacttatcaacaaccattgg

SEQ ID NO: 97105 - DNA, 60 bp, Artificial
  Synthetic oligonucleotide
gtgtatgattgttgatggcaactctactacaatggaacatagaataccattagaggagcg

SEQ ID NO: 97106 - DNA, 60 bp, Artificial
  Synthetic oligonucleotide
gcctcgtggcggaatctgaaagctggagcccctcagccaaaaccaaaccagcagtctcag

SEQ ID NO: 97107 - DNA, 60 bp, Artificial
  Synthetic oligonucleotide
ggggtgccgatggagtgggtaatgcctcgggaaattggcattgcgattcccaatggatgg

SEQ ID NO: 97108 - DNA, 60 bp, Artificial
  Synthetic oligonucleotide
aacctgtggcagcatctgaaatggcagagggaggaggcggagctatgggcgactcttcag

SEQ ID NO: 97109 - DNA, 60 bp, Artificial
  Synthetic oligonucleotide
agtgccgtacaagacggaggagccaccgcggagggcaccgaacctgtggcagcatctgaa

SEQ ID NO: 97110 - DNA, 60 bp, Artificial
  Synthetic oligonucleotide
catttggcctagtagaagatcctgtcaacacggcacctgcaaaaaaaaatacagggaagc

SEQ ID NO: 97111 - DNA, 57 bp, Artificial
  Synthetic oligonucleotide
tctagttcctgttgtgtctgagttcaaagtccgaactaatgaacaaaccaacttgcc

SEQ ID NO: 97112 - DNA, 60 bp, Artificial
  Synthetic oligonucleotide
cctgggtcctgccaagctacaacaaccacatctacaaagcaattaccagcggaacctctc

SEQ ID NO: 97113 - DNA, 60 bp, Artificial
  Synthetic oligonucleotide
cccaatggatgggaaacacagtcatcacaaagaccaccagaacctgggtcctgccaagct

SEQ ID NO: 97114 - DNA, 60 bp, Artificial
  Synthetic oligonucleotide
atgtaaaggatctgtttgtattgaacctactcctgtaattattactagtaatactgatat

SEQ ID NO: 97115 - DNA, 60 bp, Artificial
  Synthetic oligonucleotide
agccagcccagaattgttctcatcagtcgctccaattcctgtgactcctcagaactcccc

SEQ ID NO: 97116 - DNA, 60 bp, Artificial
  Synthetic oligonucleotide
cataggaagtatcctgtgcggctgggtgaagagagagttcaacaaaagaaacgccatatg

SEQ ID NO: 97117 - DNA, 60 bp, Artificial
  Synthetic oligonucleotide
gctattgcccatgctgtacccttctatggctgtgttaactggactaatgagaactttcct

SEQ ID NO: 97118 - DNA, 60 bp, Artificial
  Synthetic oligonucleotide
gtctactgacctttgaccttctgagctgatgtctactgacctgatgatggagaggatccg

SEQ ID NO: 97119 - DNA, 60 bp, Artificial
  Synthetic oligonucleotide
tatctctatttatagccaatggtccgctggccagccacatcctgttttgcacacggccca

SEQ ID NO: 97120 - DNA, 60 bp, Artificial
  Synthetic oligonucleotide
tcataaagtcttccgttagaactgccagcatctgatctacggctaattttgtgctcttgc

SEQ ID NO: 97121 - DNA, 60 bp, Artificial
  Synthetic oligonucleotide
gtggcagctccatctagaaaacgtgagtggtcacatggaggacgaggaacaatggccagc

SEQ ID NO: 97122 - DNA, 60 bp, Artificial
  Synthetic oligonucleotide
cagaggtcaacctactaatcaaatagacgaagacgctaaggaacacgacgaagcatacga

SEQ ID NO: 97123 - DNA, 60 bp, Artificial
  Synthetic oligonucleotide
ccagccacatcctgttttgcacacggcccagcttcgacgcgagtttgccggtcagacgag

SEQ ID NO: 97124 - DNA, 66 bp, Artificial
  Synthetic oligonucleotide
gaactctcatagttaggttcattccataataatacacgtttattaggtgcttcttgaaatgcaaac

SEQ ID NO: 97125 - DNA, 60 bp, Artificial
  Synthetic oligonucleotide
gatggggtattgatagatcatttactgcttttcaatcagatcaacctatgattcccactg

SEQ ID NO: 97126 - DNA, 55 bp, Artificial
  Synthetic oligonucleotide
actaagcaagctatcgaaaaacacagtggagtaatctacccttctgtttcaggta

SEQ ID NO: 97127 - DNA, 60 bp, Artificial
  Synthetic oligonucleotide
gaaaagaaagcctattcggcagggaaattcgcatacatacggcaaaagacaaaggcgtta

SEQ ID NO: 97128 - DNA, 60 bp, Artificial
  Synthetic oligonucleotide
cttcgtcgtgttctttagcgtcttcgtctatttgatttataggttgacctctattcaatg

SEQ ID NO: 97129 - DNA, 60 bp, Artificial
  Synthetic oligonucleotide
ggaatcataggttgatcagattgaaaagcagtaaatgatctatcaattccccaaccaagt

SEQ ID NO: 97130 - DNA, 60 bp, Artificial
  Synthetic oligonucleotide
gttggaatcataggttgatcagattgaaaagcagtaaacgctctgttaattccccaacct

SEQ ID NO: 97131 - DNA, 60 bp, Artificial
  Synthetic oligonucleotide
tcagctacattttgtgttgcttctggaggattagttacaactgctcctctcatattcacc

SEQ ID NO: 97132 - DNA, 60 bp, Artificial
  Synthetic oligonucleotide
ggttgaatctgtggattttcatgtccccaaggtcctttatgtagtatttgagacttttca

SEQ ID NO: 97133 - DNA, 60 bp, Artificial
  Synthetic oligonucleotide
ttggaggagacccatatactgttagagttaagaatcgtatggatgcacatgtaaaacgca

SEQ ID NO: 97134 - DNA, 60 bp, Artificial
  Synthetic oligonucleotide
gcagcatgtgatgactttggtaaggatcttaatgctatgtctttacgtgaaatttatgat

SEQ ID NO: 97135 - DNA, 60 bp, Artificial
  Synthetic oligonucleotide
gtaggttgacctctattaagtgagtttccaggaccaagatatttatatccaggaacagtt

SEQ ID NO: 97136 - DNA, 60 bp, Artificial
  Synthetic oligonucleotide
gtttcttctggccctgccgcctcttggaaactagtttcgcgaagaggttctggttcattt

SEQ ID NO: 97137 - DNA, 60 bp, Artificial
  Synthetic oligonucleotide
cctgcgttgatttcgtcttccgcgatatcaatgcgagtttcttctggccctgccgcctct

SEQ ID NO: 97138 - DNA, 60 bp, Artificial
  Synthetic oligonucleotide
ctgtgattttgcacgatgcaataagtcttcgtacccaagatcgtgttccttagcaatttg

SEQ ID NO: 97139 - DNA, 60 bp, Artificial
  Synthetic oligonucleotide
gcaatttgatcagtttctgatcgtgcaggtttaggatctattggattaccaggccccacg

SEQ ID NO: 97140 - DNA, 60 bp, Artificial
  Synthetic oligonucleotide
gcgcctcccaaaagtcctgttgtttcggtagctgcttcgccgagttcaagtgctgtttcc

SEQ ID NO: 97141 - DNA, 60 bp, Artificial
  Synthetic oligonucleotide
gctgtttcctcaactccagtagagaaacttgtttcagcttcggctgctccttcacctgcg

SEQ ID NO: 97142 - DNA, 60 bp, Artificial
  Synthetic oligonucleotide
tttgaattgcatgatccaaaaaatgaaaagttgtatactgctgctatttctttatatgtg

SEQ ID NO: 97143 - DNA, 60 bp, Artificial
  Synthetic oligonucleotide
tgaatggggaaaaagaatatcagcttaaccctaaagttaatactgtatgtataattggta

SEQ ID NO: 97144 - DNA, 66 bp, Artificial
  Synthetic oligonucleotide
caatgtaatggtagtgaggaaggtgtgaaagaattactaatgaatattgtagcttggtttaatagg

SEQ ID NO: 97145 - DNA, 60 bp, Artificial
  Synthetic oligonucleotide
tggttcatttgtaggtagtctgtcgtaggggtgactacgattccaccatctcccaaatct

SEQ ID NO: 97146 - DNA, 60 bp, Artificial
  Synthetic oligonucleotide
ctgctaaatcagtagtcggatgatgttcctgtgtagtagaaggaagttgatctacgtcga

SEQ ID NO: 97147 - DNA, 60 bp, Artificial
  Synthetic oligonucleotide
gaggaggttctggaataggatgatcaattggtaaacctcgacgtactcgagctaattgcc

SEQ ID NO: 97148 - DNA, 60 bp, Artificial
  Synthetic oligonucleotide
cctattgcatgtgatgctcattttgtagatgtaaggatgaaggtattttattggaggcca

SEQ ID NO: 97149 - DNA, 60 bp, Artificial
  Synthetic oligonucleotide
tcgagctaattgccattgttcaacagcgtaccgccgttgaccttcatttaagtattccca

SEQ ID NO: 97150 - DNA, 60 bp, Artificial
  Synthetic oligonucleotide
caacaaatgcttgccacgtaccggatttctggtattcctcagaaaaacgatgaattgctt

SEQ ID NO: 97151 - DNA, 59 bp, Artificial
  Synthetic oligonucleotide
agtattcccaattatcacgttcttgtggatgaggtttcagtgggggtgtcattacactg

SEQ ID NO: 97152 - DNA, 60 bp, Artificial
  Synthetic oligonucleotide
ggcggtacatttcagacgttgtggtcacgtcgtctcctgaacacggtcgcagagtgctgg

SEQ ID NO: 97153 - DNA, 60 bp, Artificial
  Synthetic oligonucleotide
ggttggtcacttcattcgcggacttagatcgaagagtttcagctctactcggcggtacat

SEQ ID NO: 97154 - DNA, 60 bp, Artificial
  Synthetic oligonucleotide
atgctgttacgcgtacattacattcttcaatgcaacttccaggtggtaattgagcaaatt

SEQ ID NO: 97155 - DNA, 60 bp, Artificial
  Synthetic oligonucleotide
ggagacgttgaaggactttatgaagacattatggggcctctgcgagaatcaaccgttgac

SEQ ID NO: 97156 - DNA, 60 bp, Artificial
  Synthetic oligonucleotide
cgatggagccagtacaagcacaggacaatctggatggagtagaggagacgttgaaggact

SEQ ID NO: 97157 - DNA, 60 bp, Artificial
  Synthetic oligonucleotide
ggatacggaataccgaactgatgacgtggtacatgattgggtactgatttatcgccgtaa

SEQ ID NO: 97158 - DNA, 60 bp, Artificial
  Synthetic oligonucleotide
actgcccgtacagcgctggacaatgtagatgcaagttctcaaaaacggaagacttcaaaa

SEQ ID NO: 97159 - DNA, 60 bp, Artificial
  Synthetic oligonucleotide
catcacgtattgctccaagttcatctatggatgatacaaccattggttcattagcttgaa

SEQ ID NO: 97160 - DNA, 60 bp, Artificial
  Synthetic oligonucleotide
tgccctttcccttgtcttgtgttttgtccggggttatgggaggagttaaaggagcactca

SEQ ID NO: 97161 - DNA, 60 bp, Artificial
  Synthetic oligonucleotide
gcggagtagtaattggtctaggaattggaataatcgcttgaccgcctccttcacctgcaa

SEQ ID NO: 97162 - DNA, 60 bp, Artificial
  Synthetic oligonucleotide
gaccgcctccttcacctgcaatatctgcacctgctcccggtaatgatgtacctgccattc

SEQ ID NO: 97163 - DNA, 60 bp, Artificial
  Synthetic oligonucleotide
attatgtgaggggtgtccattcaatgttagcgtaaaacatcaatcagatggaattgttgc

SEQ ID NO: 97164 - DNA, 58 bp, Artificial
  Synthetic oligonucleotide
aacagctctaatttctatcggtttaagaagtttgttctcgttcgcgatcaaacagtta

SEQ ID NO: 97165 - DNA, 60 bp, Artificial
  Synthetic oligonucleotide
aagaacggtcggtcgactggtaaacgtcccaaactagtaataacgaagttgtcaacatat

SEQ ID NO: 97166 - DNA, 60 bp, Artificial
  Synthetic oligonucleotide
ggttcaggatctggatctgtggaacgtccaggttgcgctgctaaatcagtagtcggatga

SEQ ID NO: 97167 - DNA, 60 bp, Artificial
  Synthetic oligonucleotide
gcgaacgagcagtttggattgatggagccttacgacgactaccggatacaggtgaaggtg

SEQ ID NO: 97168 - DNA, 60 bp, Artificial
  Synthetic oligonucleotide
tacaggtgaaggtgtacgatggaccgcgctgtgcgagcaatcccgactactactggaaca

SEQ ID NO: 97169 - DNA, 56 bp, Artificial
  Synthetic oligonucleotide
gtcgaagttcattaccgaactcgatgacaccgactgggcaaatgttttcttatact

SEQ ID NO: 97170 - DNA, 60 bp, Artificial
  Synthetic oligonucleotide
ccgcaatggtgggcggacatgctggagagtgttaccatttctctggaggatcagaacacg

SEQ ID NO: 97171 - DNA, 60 bp, Artificial
  Synthetic oligonucleotide
ggaacaacaagctgcaagagatggatgtgacggtatcgaagaagtcacagatttggaagg

SEQ ID NO: 97172 - DNA, 60 bp, Artificial
  Synthetic oligonucleotide
acagatttggaaggacatcaacaacgcgttttgcgtggcgtataccaacctcgaagaaaa

SEQ ID NO: 97173 - DNA, 60 bp, Artificial
  Synthetic oligonucleotide
ggtgtacgatggaccgcgctgtgcgagcaatcccgactactactggaacaacaagctgca

SEQ ID NO: 97174 - DNA, 60 bp, Artificial
  Synthetic oligonucleotide
cgaagaaaacggagcaagttccagaccttcgccgaagaagcaaaagtactattctcaaaa

SEQ ID NO: 97175 - DNA, 60 bp, Artificial
  Synthetic oligonucleotide
ctgaaatcacgcaacgtgagatctgtaaagacgccagacatttaatactacgatgctaaa

SEQ ID NO: 97176 - DNA, 60 bp, Artificial
  Synthetic oligonucleotide
attcgtaacccggattatctgccgtaccgttctgttgaagaacaagtgcgaaataattct

SEQ ID NO: 97177 - DNA, 60 bp, Artificial
  Synthetic oligonucleotide
tggattaccaggccccacgaaatcagtgccaggtaatactgcacctttgctactcgtgtg

SEQ ID NO: 97178 - DNA, 60 bp, Artificial
  Synthetic oligonucleotide
ttgcgattaaagatggaactcatttaggcccgcagtggtttaatagtatatatctcatgt

SEQ ID NO: 97179 - DNA, 60 bp, Artificial
  Synthetic oligonucleotide
cacaaacgaattgtaattggtaatgaaatatctttggaagatggagcaaaggaggatatg

SEQ ID NO: 97180 - DNA, 60 bp, Artificial
  Synthetic oligonucleotide
gtagcaagaccagtattagaactatttgtttgaaaagcaatacgaggggtaaatgctgtt

SEQ ID NO: 97181 - DNA, 58 bp, Artificial
  Synthetic oligonucleotide
cagatcgtcgatataagcggagcttttctgtgactgtacgtagtgtattgatcttcgt

SEQ ID NO: 97182 - DNA, 60 bp, Artificial
  Synthetic oligonucleotide
gatgtttcatacaagtgcatttctgtgctcctggtacttttggcttccctattacagata

SEQ ID NO: 97183 - DNA, 60 bp, Artificial
  Synthetic oligonucleotide
gtcgtactttgcaagcagcttcaacaataaagtaagcttgagtgtcagtaaaattagcat

SEQ ID NO: 97184 - DNA, 60 bp, Artificial
  Synthetic oligonucleotide
ctgttgtcaatgcatgaacaggtttcacaccaatatgcaaactaggttgagcttttggtg

SEQ ID NO: 97185 - DNA, 60 bp, Artificial
  Synthetic oligonucleotide
ctgcgagttccctgtacctgctgggcaactaagagttgagttaccacccactgcgctagg

SEQ ID NO: 97186 - DNA, 60 bp, Artificial
  Synthetic oligonucleotide
gggggtattttgactttaacagattccactgccacttctcaccacgtgactggcagcgac

SEQ ID NO: 97187 - DNA, 60 bp, Artificial
  Synthetic oligonucleotide
gggtattttgactttaacagattccactgccacttctcaccacgtgactggcagcgactc

SEQ ID NO: 97188 - DNA, 52 bp, Artificial
  Synthetic oligonucleotide
ggggtattttgactttaacagattccactgccacttctcaccacgtgactgg

SEQ ID NO: 97189 - DNA, 57 bp, Artificial
  Synthetic oligonucleotide
aaaatgggcaatcaattctttggatacgttactgggcaaagtgttaaaccttccagc

SEQ ID NO: 97190 - DNA, 60 bp, Artificial
  Synthetic oligonucleotide
ccagtagttaacgctggaacagcttgcataccaatgtgaatactaggttgaatttgagga

SEQ ID NO: 97191 - DNA, 60 bp, Artificial
  Synthetic oligonucleotide
ggtcacagaagtaggtcaaggtcaaatagaaggtcaaaggtcagaggtcaaaggtcatcc

SEQ ID NO: 97192 - DNA, 60 bp, Artificial
  Synthetic oligonucleotide
ggattaatttcacgagacatacctgaaacagaaggatatattactccagtgtgtttttcg

SEQ ID NO: 97193 - DNA, 60 bp, Artificial
  Synthetic oligonucleotide
gatgcatactttggaggagcactagcagtaggaatcataggttgatctgattggaacgca

SEQ ID NO: 97194 - DNA, 60 bp, Artificial
  Synthetic oligonucleotide
tagtttcagaaacttgttgagtagcaatttctggaccagaaacattggcagatctcattg

SEQ ID NO: 97195 - DNA, 60 bp, Artificial
  Synthetic oligonucleotide
caggaaatgcacgattaaaatctccttgaaatatttgttttccaagttgtttagtttttt

SEQ ID NO: 97196 - DNA, 60 bp, Artificial
  Synthetic oligonucleotide
ccaacagcagcagtttcttcagcagcagttataataccttcacttaataatggagtttct

SEQ ID NO: 97197 - DNA, 60 bp, Artificial
  Synthetic oligonucleotide
ggaaagtgagttggttgtgattccattacagtacaactagcaataacatctacataaccc

SEQ ID NO: 97198 - DNA, 50 bp, Artificial
  Synthetic oligonucleotide
ttttgattgactataggcctcgtcgtgctccttagcgtctgcgtctattt

SEQ ID NO: 97199 - DNA, 60 bp, Artificial
  Synthetic oligonucleotide
atgaactaggattctgagggtctgcagattgtgaacttgaatctgtattatgagcacctt

SEQ ID NO: 97200 - DNA, 60 bp, Artificial
  Synthetic oligonucleotide
agatgaaactatgtgggtgcaatttaaatggatatataataaatctactacttttgaatt

SEQ ID NO: 97201 - DNA, 65 bp, Artificial
  Synthetic oligonucleotide
ggaggtaataagtcaaattcagattgattcatatataatggtatcttttgccatggtatctcagc

SEQ ID NO: 97202 - DNA, 60 bp, Artificial
  Synthetic oligonucleotide
ctcatgttgctgtctctttctaacagttgctatgttgctgtcacacttacacactattgc

SEQ ID NO: 97203 - DNA, 60 bp, Artificial
  Synthetic oligonucleotide
tgctcttacaccaatcggagttgcagggacatctggcttggtcaagtcaagcccttcgga

SEQ ID NO: 97204 - DNA, 60 bp, Artificial
  Synthetic oligonucleotide
gattgtttgaaacgaaaacttacaatccgaaaactctattttacttgtcttataaaactg

SEQ ID NO: 97205 - DNA, 60 bp, Artificial
  Synthetic oligonucleotide
ggcaactacatctagaaaacgtgaatgggcatatggaggacgaggaacaatggccagcct

SEQ ID NO: 97206 - DNA, 60 bp, Artificial
  Synthetic oligonucleotide
ggcagcggaccgttgggtataaataggcttgttgttgtcgagagcgcatcagtctacaag

SEQ ID NO: 97207 - DNA, 60 bp, Artificial
  Synthetic oligonucleotide
tatgaacttgcttttagtgatagaataattcaatataaatggaatgctgcgccattctta

SEQ ID NO: 97208 - DNA, 60 bp, Artificial
  Synthetic oligonucleotide
tcctatcagtgctatatgtgatgtgcctgaatttcgtgatgatgatttattgtgtgatcc

SEQ ID NO: 97209 - DNA, 60 bp, Artificial
  Synthetic oligonucleotide
cggtgactcacgagtttaaagttcccagggaattggcgggaactaaaggggcggagaaat

SEQ ID NO: 97210 - DNA, 60 bp, Artificial
  Synthetic oligonucleotide
tggtgggaggagggaaagatgaccaacaaggtggttgaatccgccaaggccatcctgggg

SEQ ID NO: 97211 - DNA, 60 bp, Artificial
  Synthetic oligonucleotide
gaactgactaagcggctcccgccagattttggcaagattactaagcaggaagtcaaggac

SEQ ID NO: 97212 - DNA, 60 bp, Artificial
  Synthetic oligonucleotide
gacgcctcgcagttcagacgtgactgttgatcccgctcctctgcgaccgctcaattggaa

SEQ ID NO: 97213 - DNA, 60 bp, Artificial
  Synthetic oligonucleotide
atacaatgtctgcgggaggtggcggcccattgggcgacaataaccaaggtgccgatggag

SEQ ID NO: 97214 - DNA, 60 bp, Artificial
  Synthetic oligonucleotide
ggtgcccggcaacatcaccagcttctcggacgtgcccgtcagcagcttcatcacccagta

SEQ ID NO: 97215 - DNA, 60 bp, Artificial
  Synthetic oligonucleotide
cgcggtggactacctcgtggggagctccgttcccgaggacatttcaaaaaacagaatctg

SEQ ID NO: 97216 - DNA, 60 bp, Artificial
  Synthetic oligonucleotide
agaggactccaagccttccacctcgtcagacgccgaagctggacccagcggatcccagca

SEQ ID NO: 97217 - DNA, 60 bp, Artificial
  Synthetic oligonucleotide
tccaagaggtggaacccagagatccagtacaccaacaactacaacgacccccagtttgtg

SEQ ID NO: 97218 - DNA, 60 bp, Artificial
  Synthetic oligonucleotide
tcgtacaacgagcagcttgaggcgggagacaacccctacctcaagtacaaccacgcggac

SEQ ID NO: 97219 - DNA, 60 bp, Artificial
  Synthetic oligonucleotide
aacccgataccttacccgacccctttaacccattcatgtcgcataccctcaataaaccgt

SEQ ID NO: 97220 - DNA, 60 bp, Artificial
  Synthetic oligonucleotide
aaacctccttgcttgagagtgtggcactctcccccctgtcgcgttcgctcgctcgctggc

SEQ ID NO: 97221 - DNA, 60 bp, Artificial
  Synthetic oligonucleotide
cagcgctcgcaggaggcggcttcgcagcgtgagttctcggctgacccggtcatcaaaagc

SEQ ID NO: 97222 - DNA, 60 bp, Artificial
  Synthetic oligonucleotide
aaacccccttgcttgagagtgtggcactctcccccctgtcgcgttcgctcgctcgctggc

SEQ ID NO: 97223 - DNA, 60 bp, Artificial
  Synthetic oligonucleotide
gtggagcacggcatcacttccgagaagcagtggatccaggagaatcaggagagctacctc

SEQ ID NO: 97224 - DNA, 60 bp, Artificial
  Synthetic oligonucleotide
acgcgggatccatcctctacggctggtgtcagcgctccttcaacaagaggaacaccgtct

SEQ ID NO: 97225 - DNA, 60 bp, Artificial
  Synthetic oligonucleotide
gcgagtagtcatgtcttttgttgatcaccctccagattggttggaagaagttggtgaagg

SEQ ID NO: 97226 - DNA, 60 bp, Artificial
  Synthetic oligonucleotide
gcgtcccatttgacgtggaggaacatctgcctggaatttctgacagctttgtggactggg

SEQ ID NO: 97227 - DNA, 60 bp, Artificial
  Synthetic oligonucleotide
ccatcgcccacactgtgcccttttacggctgcgtgaactggaccaatgaaaactttccct

SEQ ID NO: 97228 - DNA, 60 bp, Artificial
  Synthetic oligonucleotide
cgtggacaaacctggacgagtataaattggccgccctgaacctggaggagcgcaaacggc

SEQ ID NO: 97229 - DNA, 60 bp, Artificial
  Synthetic oligonucleotide
ctgcccagctacaacaaccaccagtaccgagagatcaaaagcggctccgtcgacggaagc

SEQ ID NO: 97230 - DNA, 60 bp, Artificial
  Synthetic oligonucleotide
tcccgtacgtcgtcggcaacgggaccgagggatgcctgccggccttccccccgcaggtct

SEQ ID NO: 97231 - DNA, 60 bp, Artificial
  Synthetic oligonucleotide
acgcttgtggagacctccggcatctcttccatggtcctcggccgctacgtgagtcagatt

SEQ ID NO: 97232 - DNA, 60 bp, Artificial
  Synthetic oligonucleotide
acccgccacgaccggcaagaccaacatcgcggaggccatcgcccacactgtgccctttta

SEQ ID NO: 97233 - DNA, 60 bp, Artificial
  Synthetic oligonucleotide
aaggacccatctgggccaagatcccagagacgggggcgcactttcacccctctccggcca

SEQ ID NO: 97234 - DNA, 60 bp, Artificial
  Synthetic oligonucleotide
tccagggaatcgagccacagatcaacgactgggtcgccatcaccaaggtaaagaagggcg

SEQ ID NO: 97235 - DNA, 60 bp, Artificial
  Synthetic oligonucleotide
cgctgcaaatctcttctggctacacgtccttttgaacctgaggaggctgacatatttcac

SEQ ID NO: 97236 - DNA, 60 bp, Artificial
  Synthetic oligonucleotide
tgcggtggttaccttcctcatagtgctgacaattctatgtacactgatcgcgcaagcgaa

SEQ ID NO: 97237 - DNA, 60 bp, Artificial
  Synthetic oligonucleotide
catcctgtgctcagttctatggtttaatactagctgagataattcaacgctgcaaatctc

SEQ ID NO: 97238 - DNA, 60 bp, Artificial
  Synthetic oligonucleotide
actttacagctctcacatatctttttcatctacatcctgttacttcacttgactcagaca

SEQ ID NO: 97239 - DNA, 60 bp, Artificial
  Synthetic oligonucleotide
ggtgggaggagtgcttaatgcaccaggattgggtggaacctgcaaagtgtatcttgggcg

SEQ ID NO: 97240 - DNA, 60 bp, Artificial
  Synthetic oligonucleotide
ctgcaaagtgtatcttgggcgggacagaatgcagaattgacgtcaagcatagagacagtg

SEQ ID NO: 97241 - DNA, 60 bp, Artificial
  Synthetic oligonucleotide
ggccaaggcaatcgtccaagggattagactttatgggtgtgttaatcatttgaacaaagg

SEQ ID NO: 97242 - DNA, 60 bp, Artificial
  Synthetic oligonucleotide
atagagatcgcagaggagaccttcatgcacaaacagtggatcctcttcgcttcttcaaaa

SEQ ID NO: 97243 - DNA, 60 bp, Artificial
  Synthetic oligonucleotide
gcatacattcctcctggactaatgtttaatccaaaagttccaacaagaagagttcagtac

SEQ ID NO: 97244 - DNA, 60 bp, Artificial
  Synthetic oligonucleotide
tctggcactttagaaataactctgattgtgaaagatgtaattactgggatgatgtgtacc

SEQ ID NO: 97245 - DNA, 60 bp, Artificial
  Synthetic oligonucleotide
agccatactcaaaaccaacaagctggatgacaggacctggcctgctcagtgcacagagag

SEQ ID NO: 97246 - DNA, 60 bp, Artificial
  Synthetic oligonucleotide
atactttcaaatggtgctgacacaacatacaacaatgacctcacagctggcgttcacatc

SEQ ID NO: 97247 - DNA, 60 bp, Artificial
  Synthetic oligonucleotide
ctaaccacgatatctatgcggttgttggtggcaattctgtttctcatgttcacgcggctc

SEQ ID NO: 97248 - DNA, 60 bp, Artificial
  Synthetic oligonucleotide
aaattgtatgggaagtagaaagatacgcaacaaagaactggcgtccagaaagaagacata

SEQ ID NO: 97249 - DNA, 60 bp, Artificial
  Synthetic oligonucleotide
tccaatctggtgcaaaaaaccaagggctgacaaacacacaatcatggatccatttgatgg

SEQ ID NO: 97250 - DNA, 60 bp, Artificial
  Synthetic oligonucleotide
gcgctgcgtcacaactccatggacatactttaactttaatcaatacagctgtcacttctc

SEQ ID NO: 97251 - DNA, 60 bp, Artificial
  Synthetic oligonucleotide
ccgtagacacttagctaatgtttcctcacagacagaagcagacgagataactgacgagga

SEQ ID NO: 97252 - DNA, 60 bp, Artificial
  Synthetic oligonucleotide
tccattcatggtttgcactaacccagaaggaacacacataaacacaggtgctgcaggatt

SEQ ID NO: 97253 - DNA, 60 bp, Artificial
  Synthetic oligonucleotide
gcatggaagcagatgcctccaattaagagacagcctagagggtgggtgctgcctggatac

SEQ ID NO: 97254 - DNA, 60 bp, Artificial
  Synthetic oligonucleotide
ggcacgcacagccacgtgacgaagatgagctcagggaatatgaaagacaagcatcgctcc

SEQ ID NO: 97255 - DNA, 60 bp, Artificial
  Synthetic oligonucleotide
caaactcacctgcgagctctgtaagtactattactttctttaacacttggcacgcacagc

SEQ ID NO: 97256 - DNA, 60 bp, Artificial
  Synthetic oligonucleotide
gatcctccaagcggatgtctggcaccaactaacctagaatacaaacttcaatggtaccag

SEQ ID NO: 97257 - DNA, 56 bp, Artificial
  Synthetic oligonucleotide
tgattagagctttttctcaacctgcttttacttatgtcttcaaatttccatatcca

SEQ ID NO: 97258 - DNA, 60 bp, Artificial
  Synthetic oligonucleotide
cttacagcaaacctgatgtttgtacttctcctgacaactggttcattttagctgaaaaaa

SEQ ID NO: 97259 - DNA, 60 bp, Artificial
  Synthetic oligonucleotide
gacgtggtccgtgggaacatcttcctgaggtaggagatcagcgcctagctgcgtcttctg

SEQ ID NO: 97260 - DNA, 60 bp, Artificial
  Synthetic oligonucleotide
aaagaggggagaggaagagacactggcagacaactcatcacaggagcaggagccgcagcc

SEQ ID NO: 97261 - DNA, 60 bp, Artificial
  Synthetic oligonucleotide
gcttttacgggcctgcctcaacaggtaaaacaaatatggccaaggcaatcgtccaaggga

SEQ ID NO: 97262 - DNA, 60 bp, Artificial
  Synthetic oligonucleotide
tagctaattgtcctgaactactccttatgcttgaaggtcaaccaggaggggcacgcctta

SEQ ID NO: 97263 - DNA, 60 bp, Artificial
  Synthetic oligonucleotide
ttttagctcatggaactgaacaatctatgatacaattaagaaactgcgctcctcatccgg

SEQ ID NO: 97264 - DNA, 60 bp, Artificial
  Synthetic oligonucleotide
gaagatcgccattttggggctgttctctgcaaggctgtttacatggcaacaactactctc

SEQ ID NO: 97265 - DNA, 60 bp, Artificial
  Synthetic oligonucleotide
cttgtacattgtggggggagctgttttgtttgcttatgcaatcgcgaaactctatatctt

SEQ ID NO: 97266 - DNA, 60 bp, Artificial
  Synthetic oligonucleotide
gcatcgctcctacaaaagaaaagggagtccagaaagaggggagaggaagagacactggca

SEQ ID NO: 97267 - DNA, 60 bp, Artificial
  Synthetic oligonucleotide
ctcagtgcacaaagagtaggaccacaatcatcagacactgctccattcatggtttgcact

SEQ ID NO: 97268 - DNA, 60 bp, Artificial
  Synthetic oligonucleotide
ggggtggagttactggcggcaacatgcaaatccttcaatatagagatcgcagaggagacc

SEQ ID NO: 97269 - DNA, 60 bp, Artificial
  Synthetic oligonucleotide
ccaaatgcatctcatccatgggatgaagacgtcatgcctgatcttccatacaagacctgg

SEQ ID NO: 97270 - DNA, 60 bp, Artificial
  Synthetic oligonucleotide
cacagagcttccaatcctgaagctccagggtggtgtgggttctactggcactctactcgc

SEQ ID NO: 97271 - DNA, 60 bp, Artificial
  Synthetic oligonucleotide
cgcagatcttgatggaaatgcagctggaggcaatgctacagaaaaagcacttctgtatca

SEQ ID NO: 97272 - DNA, 60 bp, Artificial
  Synthetic oligonucleotide
gcaaacccatcactctcaatgcttagagaccaactcctatacaaaggaaaccagaccaca

SEQ ID NO: 97273 - DNA, 60 bp, Artificial
  Synthetic oligonucleotide
ctgtaaataacgctgatcgcgctgctcaatcacatgatcacgcctactctgaactaataa

SEQ ID NO: 97274 - DNA, 60 bp, Artificial
  Synthetic oligonucleotide
agagacactggcaaacaactcatcacaggagcaggagccgcagcccgatccgacacagtg

SEQ ID NO: 97275 - DNA, 60 bp, Artificial
  Synthetic oligonucleotide
aaataaagcgcgccgtggctcctgctctgggaaataaagagagagcccaaaaaagacact

SEQ ID NO: 97276 - DNA, 60 bp, Artificial
  Synthetic oligonucleotide
cctactcattcacaggactttacacttcacgaaaacggatactgcactgattgcggtggt

SEQ ID NO: 97277 - DNA, 60 bp, Artificial
  Synthetic oligonucleotide
gaaacgtcgtctaactgctccagcaagtcctccaaactcacctgcgagctctgtaagtac

SEQ ID NO: 97278 - DNA, 60 bp, Artificial
  Synthetic oligonucleotide
ctcacagctggcgttcacatcttttgtgatggagagcatgcttacccaaatgcatctcat

SEQ ID NO: 97279 - DNA, 60 bp, Artificial
  Synthetic oligonucleotide
tcttgggccatttaatccacttgataacggtgaacctgtaaataacgctgatcgcgctgc

SEQ ID NO: 97280 - DNA, 54 bp, Artificial
  Synthetic oligonucleotide
ggggattcggacggagaagacaccgagcctgagacatcgcaagtggactattgt

SEQ ID NO: 97281 - DNA, 60 bp, Artificial
  Synthetic oligonucleotide
atcatcaggaacacccaatcagccacctatcgtcttgcactgcttcgaagacctcagacc

SEQ ID NO: 97282 - DNA, 60 bp, Artificial
  Synthetic oligonucleotide
gagagtacatcggggaaaaaagacaatagaacaaatccatacactgtattcagtcaacac

SEQ ID NO: 97283 - DNA, 60 bp, Artificial
  Synthetic oligonucleotide
ctggtgtggggatttccactggagggtgggtcggaggttctcacttttcagacaaatatg

SEQ ID NO: 97284 - DNA, 60 bp, Artificial
  Synthetic oligonucleotide
ccgacacagtggggagagaggctcgggctcatatcatcaggaacacccaatcagccacct

SEQ ID NO: 97285 - DNA, 60 bp, Artificial
  Synthetic oligonucleotide
ccaggtcatttaccaggagaaaattatgtattgcctcagtatgggtacattacaagaggc

SEQ ID NO: 97286 - DNA, 60 bp, Artificial
  Synthetic oligonucleotide
agtggagaagagaatgaaatgcactaccatttagttgtgaaccaagcagacatggtaggc

SEQ ID NO: 97287 - DNA, 60 bp, Artificial
  Synthetic oligonucleotide
gtgaaccaagcagacatggtaggcagagaatgtagcaactggctgcgcacctggaaagtc

SEQ ID NO: 97288 - DNA, 60 bp, Artificial
  Synthetic oligonucleotide
tggagggattgggatggcctgcaaagaccccgcaatcttctcgccgacgactggcctata

SEQ ID NO: 97289 - DNA, 60 bp, Artificial
  Synthetic oligonucleotide
gcaacttgccaaaagccttgtgtgcaccaatggaagacaaccaagtacaatgggattctg

SEQ ID NO: 97290 - DNA, 60 bp, Artificial
  Synthetic oligonucleotide
gttaatttaggctactgcatattacaacagctgtttgcctcgcatgctgttactctgcca

SEQ ID NO: 97291 - DNA, 60 bp, Artificial
  Synthetic oligonucleotide
cagagaacattgttgaagtagccaaagctgtgcttggtggagcacctgtgaggttggatg

SEQ ID NO: 97292 - DNA, 60 bp, Artificial
  Synthetic oligonucleotide
ctaagctaccactgaatgattgctattatgcatggactaatatagacaggtttgaagcag

SEQ ID NO: 97293 - DNA, 60 bp, Artificial
  Synthetic oligonucleotide
tggctggatatttggtagctcctgtgtggactttaagttggaacattagagaaacccgtc

SEQ ID NO: 97294 - DNA, 60 bp, Artificial
  Synthetic oligonucleotide
gaggaggaccgagatggtagagttactaacccatccagagttgttcagatagatggtgat

SEQ ID NO: 97295 - DNA, 60 bp, Artificial
  Synthetic oligonucleotide
ctcgctaacgaactttgccaaagaagacttagacacctggcaacaactccacgagcagtt

SEQ ID NO: 97296 - DNA, 60 bp, Artificial
  Synthetic oligonucleotide
tttcagagatcctgtggctattggaaatcctgctacaagtgacaggtatagtgtagctcc

SEQ ID NO: 97297 - DNA, 60 bp, Artificial
  Synthetic oligonucleotide
tggagctggggacattgagtctttctggtctgaacatgtgtttgatgcagattgggctac

SEQ ID NO: 97298 - DNA, 60 bp, Artificial
  Synthetic oligonucleotide
aactctttcaccctccagatgtcggagtccaccttgttagtgacagccgcgatgaaggag

SEQ ID NO: 97299 - DNA, 60 bp, Artificial
  Synthetic oligonucleotide
gaaacgccctgaaggcatggatgttggcagactcccattaaattatgttccagggccagc

SEQ ID NO: 97300 - DNA, 60 bp, Artificial
  Synthetic oligonucleotide
ccagatgacctaccttggagaaaattgtcaactcccaaccaaacattgtatgcaagacat

SEQ ID NO: 97301 - DNA, 60 bp, Artificial
  Synthetic oligonucleotide
tcttcggaccaacaaccggcttattccgcaggagagccctcagccaagaaggcgcggatt

SEQ ID NO: 97302 - DNA, 60 bp, Artificial
  Synthetic oligonucleotide
ggacattacacacttagcagatgtagtagttggcaatgctattagaggtttatggcaggc

SEQ ID NO: 97303 - DNA, 60 bp, Artificial
  Synthetic oligonucleotide
ctaactcctacttctgtaagccagattgtttctgcaccatttcctgacgaaactgctgaa

SEQ ID NO: 97304 - DNA, 60 bp, Artificial
  Synthetic oligonucleotide
cagaagaaaaggcgggaacttcaagagacacctccaaccactcccagtgaagtcattgag

SEQ ID NO: 97305 - DNA, 60 bp, Artificial
  Synthetic oligonucleotide
ccaggccctcctagtccaggtgctcacacagttccacaatctaatttaaaccagtatgca

SEQ ID NO: 97306 - DNA, 60 bp, Artificial
  Synthetic oligonucleotide
gatagatggtgatttagcagctcctcatgtgggtcacacgttttttgttcctggacacac

SEQ ID NO: 97307 - DNA, 60 bp, Artificial
  Synthetic oligonucleotide
tgtgtataagcaaggaagtcatgtagattcttcgcagcctgtaatgggtatgaaaacacc

SEQ ID NO: 97308 - DNA, 51 bp, Artificial
  Synthetic oligonucleotide
tgtatgaagtgccttctgatcaatggattgcgcgaaattattctcatttgc

SEQ ID NO: 97309 - DNA, 54 bp, Artificial
  Synthetic oligonucleotide
cttccgcttttaagcggacgtgtcccggaagcggaaatacgcaattttcgcggg

SEQ ID NO: 97310 - DNA, 60 bp, Artificial
  Synthetic oligonucleotide
cggcctgccggaggcgggcttactctccccgggtataattatgttggtcctggtaatcct

SEQ ID NO: 97311 - DNA, 60 bp, Artificial
  Synthetic oligonucleotide
agggccagctctaatgatgccaacagacacccaaattagaaacacaactttcagagatcc

SEQ ID NO: 97312 - DNA, 60 bp, Artificial
  Synthetic oligonucleotide
cttccggttccggtgacgtgcttccggccacgtcaacttccggccacgtcaacttccggt

SEQ ID NO: 97313 - DNA, 60 bp, Artificial
  Synthetic oligonucleotide
ttcctctgactcactctgttcgtagaggtcaccatggacgctcctgcctggattgccgtg

SEQ ID NO: 97314 - DNA, 60 bp, Artificial
  Synthetic oligonucleotide
cccctgacgagtctgacccggccttgcttctgcagcctcataccaatacaatgtccgtgg

SEQ ID NO: 97315 - DNA, 60 bp, Artificial
  Synthetic oligonucleotide
cctgtgaggttggatgtaaagaacaaaggcagcgaagactacatacctacctgtgtcatc

SEQ ID NO: 97316 - DNA, 60 bp, Artificial
  Synthetic oligonucleotide
cctctaatggagatttaacagttacagttgatggccctgtggttagcacccagcatcaag

SEQ ID NO: 97317 - DNA, 60 bp, Artificial
  Synthetic oligonucleotide
caggtactactgtttctgattctgcaagtggtgggattactgtatttgctgatgatagct

SEQ ID NO: 97318 - DNA, 60 bp, Artificial
  Synthetic oligonucleotide
aggcgcggattggtacccctgacgagtctgacccggccttgcttctgcagcctcatacca

SEQ ID NO: 97319 - DNA, 60 bp, Artificial
  Synthetic oligonucleotide
aacggtacgcagagatgattgagcatggggacatcccttatttacatggtcacggcgctg

SEQ ID NO: 97320 - DNA, 60 bp, Artificial
  Synthetic oligonucleotide
ttaaagctcagtggataggtggaactagtttttctgattctgtagttattacttcacata

SEQ ID NO: 97321 - DNA, 60 bp, Artificial
  Synthetic oligonucleotide
aacaaactcagacaggcagcagcaggtataactcactcaaaagcccccaatgctgaaagc

SEQ ID NO: 97322 - DNA, 60 bp, Artificial
  Synthetic oligonucleotide
gctgcctctagatgagctaatgcaaagaatgaatagagcaattcctgtgggaccggaacc

SEQ ID NO: 97323 - DNA, 60 bp, Artificial
  Synthetic oligonucleotide
tcctgtgggaccggaaccttcaagtcaagccaaccgcggaggggggccatatcaaactca

SEQ ID NO: 97324 - DNA, 60 bp, Artificial
  Synthetic oligonucleotide
ccaggtaagcaaacatgtctgctgctgatgcttatcgtccaggtggcaagctgcctctag

SEQ ID NO: 97325 - DNA, 60 bp, Artificial
  Synthetic oligonucleotide
acttcacatactagaacttcaatgttagctgatagaggggggtatgtgcctgtgtataag

SEQ ID NO: 97326 - DNA, 60 bp, Artificial
  Synthetic oligonucleotide
caacaaatgcactacaaatagctaaaagagaaatggttttagcccaccctttattaagct

SEQ ID NO: 97327 - DNA, 60 bp, Artificial
  Synthetic oligonucleotide
gcaccatgatgcagagtgtttgggtacaggagatcactggtctcatcactatgagtttcc

SEQ ID NO: 97328 - DNA, 60 bp, Artificial
  Synthetic oligonucleotide
gcatgggcaagaggagtgtggcccaaaagaagagccatatggctctggggcccagctagt

SEQ ID NO: 97329 - DNA, 60 bp, Artificial
  Synthetic oligonucleotide
ggtcctaaaccttacggacttttttggacttacttatggtctcgagagttttggaggttt

SEQ ID NO: 97330 - DNA, 60 bp, Artificial
  Synthetic oligonucleotide
ccagaagaatttagagtgccaagaaactttgacaaacaaccaatggcatctaccagcaac

SEQ ID NO: 97331 - DNA, 60 bp, Artificial
  Synthetic oligonucleotide
caggtttgaagcagctgtactgagcgtgcgcaacagacagctttcaggtcctcaaggtgc

SEQ ID NO: 97332 - DNA, 60 bp, Artificial
  Synthetic oligonucleotide
atgtgtttgatgcagattgggctacaaggctacacatttgtcccccaggtggtcctaaac

SEQ ID NO: 97333 - DNA, 60 bp, Artificial
  Synthetic oligonucleotide
gactggttagttgaaaatggaatagccacagaaaagaggtggttatcagtgaataaactc

SEQ ID NO: 97334 - DNA, 60 bp, Artificial
  Synthetic oligonucleotide
ggacgctcctgcctggattgccgtgctacaaattcctactggatttctctccaacccagc

SEQ ID NO: 97335 - DNA, 60 bp, Artificial
  Synthetic oligonucleotide
gcagaagtggggacctctatgcatgcagagtagatccagtagaatttatctgcaactatc

SEQ ID NO: 97336 - DNA, 60 bp, Artificial
  Synthetic oligonucleotide
ttaactctgtatgttaccggtcaggtcacatgcacaatagaatgggaggtcgagcgattt

SEQ ID NO: 97337 - DNA, 60 bp, Artificial
  Synthetic oligonucleotide
tcatcaatatccatattcccagcatccgtgggatgctggaacgatgccagaacttcccta

SEQ ID NO: 97338 - DNA, 59 bp, Artificial
  Synthetic oligonucleotide
tgccggagaaatgtttgatgttttgcctaaggtacctgaatcttcttggaaaattgata

SEQ ID NO: 97339 - DNA, 60 bp, Artificial
  Synthetic oligonucleotide
tggctaaatatacttcgccacaacgtgatccaaaaaaacgagccaatatttgccggagaa

SEQ ID NO: 97340 - DNA, 60 bp, Artificial
  Synthetic oligonucleotide
cgtctgcaaagagcactgggcggtattcggggagacgctctcgatgatccatccgtgtac

SEQ ID NO: 97341 - DNA, 60 bp, Artificial
  Synthetic oligonucleotide
gatgaagttcgtctgcaaagagcactgggcggtattcggggagacgctctcgatgatcca

SEQ ID NO: 97342 - DNA, 60 bp, Artificial
  Synthetic oligonucleotide
ggtgcgccgatctcgttgttatgttagaatgtcaatcgggcggaaacaaacttatagaac

SEQ ID NO: 97343 - DNA, 61 bp, Artificial
  Synthetic oligonucleotide
ctaagagagagactttaatgattgactgtatgaatcgatgtgagcaaaattactggttaac

SEQ ID NO: 97344 - DNA, 60 bp, Artificial
  Synthetic oligonucleotide
gtatataaggataggtatttcctgcttctgttcatttcgcttccggacttcgtcgagaga

SEQ ID NO: 97345 - DNA, 63 bp, Artificial
  Synthetic oligonucleotide
gcgcttagttatattttagcaaaatatgatccaatcccatttacgactgacaataaagtgtgg

SEQ ID NO: 97346 - DNA, 60 bp, Artificial
  Synthetic oligonucleotide
cttccaatcgcgtctttagacgaccttactcaagttttctactcctgcttatacttatat

SEQ ID NO: 97347 - DNA, 60 bp, Artificial
  Synthetic oligonucleotide
gaaatttccatatgtggggtggaaagctgatgaagttcgtctgcaaagagcactgggcgg

SEQ ID NO: 97348 - DNA, 60 bp, Artificial
  Synthetic oligonucleotide
actcatagttatataacacacttatgaatatgctaatacagagattagaatatccaatca

SEQ ID NO: 97349 - DNA, 60 bp, Artificial
  Synthetic oligonucleotide
cgattcatcctttgccgggtggctaggcaagtctgcatttagacttaaacgtattttggc

SEQ ID NO: 97350 - DNA, 60 bp, Artificial
  Synthetic oligonucleotide
gtgagttggaggagaaaatatctatgagagacatcgacaacgacatgagccgatggggtc

SEQ ID NO: 97351 - DNA, 60 bp, Artificial
  Synthetic oligonucleotide
gcgcggctactccggaacaagccctcggaccagtaactgtagtgactgctccacctggga

SEQ ID NO: 97352 - DNA, 60 bp, Artificial
  Synthetic oligonucleotide
gcgcacgctctgcattcgataagataggactagcctatgactctgctccggaaagtgagt

SEQ ID NO: 97353 - DNA, 60 bp, Artificial
  Synthetic oligonucleotide
gcaacgtggtccggttatgatgtcagtccagtaaactgcgcacgctctggattcgataag

SEQ ID NO: 97354 - DNA, 60 bp, Artificial
  Synthetic oligonucleotide
ttgtgggtgggtcaataatgaccgggcatactgcccattacaggcggactttaatccact

SEQ ID NO: 97355 - DNA, 60 bp, Artificial
  Synthetic oligonucleotide
aacttccctataaagtctggttgctggaaaactatggttacttccaattccaaggtgacc

SEQ ID NO: 97356 - DNA, 60 bp, Artificial
  Synthetic oligonucleotide
gtaaacgatgttctcacacaggatctatctgacgcagaaatgctttcagctgcaatggag

SEQ ID NO: 97357 - DNA, 60 bp, Artificial
  Synthetic oligonucleotide
ggatctgtctgacgcagaaatgctttcagctgcaatggaggtagatggctcctccgaata

SEQ ID NO: 97358 - DNA, 60 bp, Artificial
  Synthetic oligonucleotide
ggggatactttaattttaacgcgtacgactcgcacttttcaccacaagactggcaacgtc

SEQ ID NO: 97359 - DNA, 60 bp, Artificial
  Synthetic oligonucleotide
tgcaatggaggtagatggctcctccgaatagaaaaccaggtggttgggtcgttcctggat

SEQ ID NO: 97360 - DNA, 60 bp, Artificial
  Synthetic oligonucleotide
cacaggaggcaataccactacacatgttcattctatgccacttcgggagagagttgttca

SEQ ID NO: 97361 - DNA, 60 bp, Artificial
  Synthetic oligonucleotide
tgaaacaacttgaaagcacgttcggtgaaatagagccaacagacgttgttgcattattac

SEQ ID NO: 97362 - DNA, 60 bp, Artificial
  Synthetic oligonucleotide
tggatgttccccaatcaagcatgggattcgacgcccatcagcagggacttcccgatttgg

SEQ ID NO: 97363 - DNA, 60 bp, Artificial
  Synthetic oligonucleotide
ggggtcaagtgttcgtgcaagacggaacaaacaaggaaatatcaaacgataacactggtc

SEQ ID NO: 97364 - DNA, 60 bp, Artificial
  Synthetic oligonucleotide
tgtcgcattgtgcacatatggctgcctatagcgtattctccgttaaacagggaagagcac

SEQ ID NO: 97365 - DNA, 60 bp, Artificial
  Synthetic oligonucleotide
catatggctgcctatagcgtattctccgttaaacagggaagagcacctccggtggctagc

SEQ ID NO: 97366 - DNA, 60 bp, Artificial
  Synthetic oligonucleotide
tgactactgattgggtggaacaagcaaaatgtataatggggggcacacagtttagaatag

SEQ ID NO: 97367 - DNA, 60 bp, Artificial
  Synthetic oligonucleotide
accgcaaacaccgttaataatatcaaccaatcataatatatatgaagtcacaggaggcaa

SEQ ID NO: 97368 - DNA, 60 bp, Artificial
  Synthetic oligonucleotide
tgcaactatctacttcgaaaaaaccttaaatactacacctgtatggatccagataaagcc

SEQ ID NO: 97369 - DNA, 60 bp, Artificial
  Synthetic oligonucleotide
acgacagtggtatgcacctatatacaacggacatagatacaccaaacttgagggaaccgg

SEQ ID NO: 97370 - DNA, 60 bp, Artificial
  Synthetic oligonucleotide
agagcactgggcggtattcggggagacgctctcgatgatccatccgtgtacatcgggatg

SEQ ID NO: 97371 - DNA, 60 bp, Artificial
  Synthetic oligonucleotide
cgagagtggtctatgcggatcgtgcggaggctattatccactagagacgtggaatgaaaa

SEQ ID NO: 97372 - DNA, 60 bp, Artificial
  Synthetic oligonucleotide
ccactggttaaaaccagacgctacttcgctacacgaaacaactacaacaactcaggaaaa

SEQ ID NO: 97373 - DNA, 60 bp, Artificial
  Synthetic oligonucleotide
caggaccatcgcttggatacattggaaacacacaaagcgcggctactcgggaacaagccc

SEQ ID NO: 97374 - DNA, 60 bp, Artificial
  Synthetic oligonucleotide
gatacaccaagcttgagggaaccggaaacacattctggaaagggataaaaactccatggg

SEQ ID NO: 97375 - DNA, 60 bp, Artificial
  Synthetic oligonucleotide
ttcgtgtacacgcgatacagtccgtataacaagccatcacagtggatgccaggaccatcg

SEQ ID NO: 97376 - DNA, 60 bp, Artificial
  Synthetic oligonucleotide
atcacagtggatgccaggaccatcgcttggatacattggaaacacacaaagcgcggctac

SEQ ID NO: 97377 - DNA, 60 bp, Artificial
  Synthetic oligonucleotide
aggatggaaccgcaggaaactgagaacactgttgaggctgatgcgggcattgcggggcgt

SEQ ID NO: 97378 - DNA, 60 bp, Artificial
  Synthetic oligonucleotide
catcacagttaacacacgacagtggtatgcacctatatacaacggacatagatacaccaa

SEQ ID NO: 97379 - DNA, 60 bp, Artificial
  Synthetic oligonucleotide
acactcctcctgctaaaagagtggccggaaacagtagacaagatagggcgcaaaagagga

SEQ ID NO: 97380 - DNA, 60 bp, Artificial
  Synthetic oligonucleotide
cgatgatccatccgtgtacatcgggatgcctggtcccgatagtccggttgagcagacgag

SEQ ID NO: 97381 - DNA, 60 bp, Artificial
  Synthetic oligonucleotide
gtgagatccttaatcacaaaaatgtatccaatgaagaattcgaggaatggatcactaact

SEQ ID NO: 97382 - DNA, 60 bp, Artificial
  Synthetic oligonucleotide
cacttcgggagagagttgttcaatttaactttatgaaacaacttgaaagcacgttcggtg

SEQ ID NO: 97383 - DNA, 60 bp, Artificial
  Synthetic oligonucleotide
cgggatgcctggtcccgatagtccggttgagcagacgagttttctcgagacacatggacc

SEQ ID NO: 97384 - DNA, 60 bp, Artificial
  Synthetic oligonucleotide
accggtcaggtcacatgcacaatagaatgggaggtcgagcgatttatgaccaagaactgg

SEQ ID NO: 97385 - DNA, 60 bp, Artificial
  Synthetic oligonucleotide
gcataagcaaaccaaaaaagactataccaagtgtgttctttttggaaacatgattgctta

SEQ ID NO: 97386 - DNA, 60 bp, Artificial
  Synthetic oligonucleotide
ccagtccaccaagggacggaggctattttcttagcagtgactctggctggaaaactaact

SEQ ID NO: 97387 - DNA, 60 bp, Artificial
  Synthetic oligonucleotide
aggcaaatctattattgcacaagccatagcacaagcagttggtaatgttggttgttacaa

SEQ ID NO: 97388 - DNA, 60 bp, Artificial
  Synthetic oligonucleotide
gccagcacaggcaaatctattattgcacaagccatagcacaagcagttggcaatgttggt

SEQ ID NO: 97389 - DNA, 60 bp, Artificial
  Synthetic oligonucleotide
aaacctgatttgggtggaagaagctggtaactttggacagcaagtaaaccagtttaaagc

SEQ ID NO: 97390 - DNA, 60 bp, Artificial
  Synthetic oligonucleotide
ttgggtagaagaagctggtaactttggacagcaagtaaaccagtttaaagccatttgctc

SEQ ID NO: 97391 - DNA, 60 bp, Artificial
  Synthetic oligonucleotide
tagaaccaaaacagcatttgacttgattttagaaaaagctgaaaccagcaaactaaccaa

SEQ ID NO: 97392 - DNA, 60 bp, Artificial
  Synthetic oligonucleotide
gccatagcacaggcagttggtaatgttggttgttataacgcagccaatgtgaactttcca

SEQ ID NO: 97393 - DNA, 60 bp, Artificial
  Synthetic oligonucleotide
gcacaagccatagcacaggcagttggtaatgttggttgctataatgcagcaaatgtgaac

SEQ ID NO: 97394 - DNA, 60 bp, Artificial
  Synthetic oligonucleotide
gtacaggcaaatccattattgcacaagccatagcacaggcagttggtaatgttggttgct

SEQ ID NO: 97395 - DNA, 60 bp, Artificial
  Synthetic oligonucleotide
gaactactcgacttccaaatgcataatgatcaactagagtattttgacagcatagaggat

SEQ ID NO: 97396 - DNA, 60 bp, Artificial
  Synthetic oligonucleotide
agatgcgcagatgtcccgcatggaagatcatccagaaacggaaacccagtcgaaaagttc

SEQ ID NO: 97397 - DNA, 60 bp, Artificial
  Synthetic oligonucleotide
catggcccttggaacacatattagacaccaaggattggcttgaaagtgaatggggtacat

SEQ ID NO: 97398 - DNA, 60 bp, Artificial
  Synthetic oligonucleotide
gtgaagtctatagtctcggagtacgattaccttttgtaacttcagccactaccagttcag

SEQ ID NO: 97399 - DNA, 60 bp, Artificial
  Synthetic oligonucleotide
tgagcaatgaccaaataagagaacgacgagacctaactacaagtgtaccacctgtagctc

SEQ ID NO: 97400 - DNA, 60 bp, Artificial
  Synthetic oligonucleotide
gccgaagcaggaccaagtggaactcaaccagtcgaaacagcacaacaatctcctccaaca

SEQ ID NO: 97401 - DNA, 60 bp, Artificial
  Synthetic oligonucleotide
gcggagagtactttgaaaggaaacgtagtcactccgcttgcagcgcaaccaactaatata

SEQ ID NO: 97402 - DNA, 60 bp, Artificial
  Synthetic oligonucleotide
gcctaaagacgtcggaatatatgactacgttgacattaaaaatggaactactgcttacgg

SEQ ID NO: 97403 - DNA, 60 bp, Artificial
  Synthetic oligonucleotide
gggccaaaatcaaaaggattaatagagctagagccgcaagacgagaaaaccaagaaaacc

SEQ ID NO: 97404 - DNA, 60 bp, Artificial
  Synthetic oligonucleotide
agtgcaattccatatgcctcgtattcattttccttatcataattatcttggtccgggtac

SEQ ID NO: 97405 - DNA, 60 bp, Artificial
  Synthetic oligonucleotide
gcatactggaaacgtgcatagtttaattggcggtattggacttggaactaaaaatttggt

SEQ ID NO: 97406 - DNA, 60 bp, Artificial
  Synthetic oligonucleotide
ataattaatacttaacatacgtacatcaagtcacgtacaccaactatgacgtcacagaca

SEQ ID NO: 97407 - DNA, 60 bp, Artificial
  Synthetic oligonucleotide
gaatcgcaggaaccgaccatcgagttcaagacatataaatactactcggaaaagaaagtc

SEQ ID NO: 97408 - DNA, 60 bp, Artificial
  Synthetic oligonucleotide
ataaaggaacggaagactacccagaagacattagtagaggatacccacccgactacgatt

SEQ ID NO: 97409 - DNA, 60 bp, Artificial
  Synthetic oligonucleotide
atacagttaatgcaagaagaattttacacgactccattgagtttagaccaggccacagat

SEQ ID NO: 97410 - DNA, 60 bp, Artificial
  Synthetic oligonucleotide
ctcgttggaagaattgtacgaaacagtggacgagccgaaattggtacattcaagcctagc

SEQ ID NO: 97411 - DNA, 60 bp, Artificial
  Synthetic oligonucleotide
gtggaccttccggacaacagtcgtcacgcctaccaactaaaagagataatagatgcgcag

SEQ ID NO: 97412 - DNA, 60 bp, Artificial
  Synthetic oligonucleotide
gtggccgacggacccgaattcgaatatgtttatagaactgaatctgtttgcaaagaatca

SEQ ID NO: 97413 - DNA, 60 bp, Artificial
  Synthetic oligonucleotide
acccaagcgacactcgcaacaactggaagagagcaacgatcaggatgaaagtggaccttc

SEQ ID NO: 97414 - DNA, 60 bp, Artificial
  Synthetic oligonucleotide
gcaggtgcctcgggaggagctttgacgtcaatccaaggaagaataaggcaatccctatcg

SEQ ID NO: 97415 - DNA, 60 bp, Artificial
  Synthetic oligonucleotide
actcgaattagactcactggacttcaatctactagggaatgggttgctagaacggataga

SEQ ID NO: 97416 - DNA, 60 bp, Artificial
  Synthetic oligonucleotide
ggaattccatgggaaagactactaatgtatgtaagtgaaggcgaactcctccgaatgttt

SEQ ID NO: 97417 - DNA, 60 bp, Artificial
  Synthetic oligonucleotide
cggaggaatgggagctggtggatcagctaatgatggtagacaagacattttttctggagc

SEQ ID NO: 97418 - DNA, 59 bp, Artificial
  Synthetic oligonucleotide
agatatacaaccaatggaaaccgtcggggccactgataccggagcaggagctcaagtcg

SEQ ID NO: 97419 - DNA, 59 bp, Artificial
  Synthetic oligonucleotide
ggaatggattcaagaatagccgctgggcgagctgcagaaacaacgcaagatgaatttat

SEQ ID NO: 97420 - DNA, 60 bp, Artificial
  Synthetic oligonucleotide
tcggtttgaactggtatgaacctgtctgtgacgtcatagttggtgtacgtgacttgcctt

SEQ ID NO: 97421 - DNA, 60 bp, Artificial
  Synthetic oligonucleotide
ctggcgcttacgaggactcctgggaagacgggcttaatccatttgacgaagactacgtag

SEQ ID NO: 97422 - DNA, 60 bp, Artificial
  Synthetic oligonucleotide
gtcaagcagcgaccggagtatttgcagaaactggaaaccgttatgatgtccacgatccaa

SEQ ID NO: 97423 - DNA, 60 bp, Artificial
  Synthetic oligonucleotide
atgcagagaagacagtatgtcaacgagccgacatttagttgctggagccagagcgagctg

SEQ ID NO: 97424 - DNA, 60 bp, Artificial
  Synthetic oligonucleotide
gagttggagtccgggagatggacacagttgggccatggcatgggcagggtggagagctgc

SEQ ID NO: 97425 - DNA, 60 bp, Artificial
  Synthetic oligonucleotide
ttcctcaacatctacgtcaccggacaagtctcctgcgaagtcgtctgggaggtagaaaag

SEQ ID NO: 97426 - DNA, 60 bp, Artificial
  Synthetic oligonucleotide
tgctgatgaaaactcctgctactcaaaacatgaatccgggagcaccacactatgattgcc

SEQ ID NO: 97427 - DNA, 60 bp, Artificial
  Synthetic oligonucleotide
gaaccagcaactggatgtcaggaccggggatcgcaaggggaacacacaacgcaactctac

SEQ ID NO: 97428 - DNA, 60 bp, Artificial
  Synthetic oligonucleotide
ctctgacggagatcctgaccctgacggtgctgttgctggcgatagcgatacttctgctaa

SEQ ID NO: 97429 - DNA, 60 bp, Artificial
  Synthetic oligonucleotide
ggcgtctacgcaggcgcggtacaaaacgcagacgtcatgcagacaagattcaatcaccac

SEQ ID NO: 97430 - DNA, 60 bp, Artificial
  Synthetic oligonucleotide
ggacattcagcgaaaacggcgtctgctggcactgcggaggtttcatccagccaacaccag

SEQ ID NO: 97431 - DNA, 60 bp, Artificial
  Synthetic oligonucleotide
ccaatctcgctaaggccatctgccacgcagtggggctatacgggtgcgtgaaccacaaca

SEQ ID NO: 97432 - DNA, 60 bp, Artificial
  Synthetic oligonucleotide
ggagtgcctctgtacatgctggaaaactctgaccacgaagtgctacgcaacgggagaatc

SEQ ID NO: 97433 - DNA, 60 bp, Artificial
  Synthetic oligonucleotide
ccaatgtcacatccgccaggaaccatcttcatcaagctagcaagaattccagtaccagga

SEQ ID NO: 97434 - DNA, 60 bp, Artificial
  Synthetic oligonucleotide
cagatctccagttctgcggcttctactggcactcaactcgactagccagcaaaggaacta

SEQ ID NO: 97435 - DNA, 60 bp, Artificial
  Synthetic oligonucleotide
atctactcatacagcggaccaaacaaccaaacaagcaacgattccagaatgcagcactaa

SEQ ID NO: 97436 - DNA, 60 bp, Artificial
  Synthetic oligonucleotide
gaaagctatactttgcgcgctcaaacaagggcgccaaaaaagcaaacagagaacctgcac

SEQ ID NO: 97437 - DNA, 60 bp, Artificial
  Synthetic oligonucleotide
aatgatatacctaacgacgaggctggcaatcagccaattgaactggcgactcggtccgtg

SEQ ID NO: 97438 - DNA, 60 bp, Artificial
  Synthetic oligonucleotide
ccaggaagtcaaaaatcagactgctgcagacctcgacagagaacacacgtctctgcgctc

SEQ ID NO: 97439 - DNA, 60 bp, Artificial
  Synthetic oligonucleotide
gcacttcattcgtttaaacaccttctgatcactattagacagagaacacacgctccagac

SEQ ID NO: 97440 - DNA, 60 bp, Artificial
  Synthetic oligonucleotide
agagaacacacgctccagacactgtgctatctagagatgagctgaatgcatggaactggc

SEQ ID NO: 97441 - DNA, 60 bp, Artificial
  Synthetic oligonucleotide
aaaacggccatctctataaaagcgaggtgcttaacactggtgacacggctcacaggcaat

SEQ ID NO: 97442 - DNA, 60 bp, Artificial
  Synthetic oligonucleotide
aaaatagaaaggtggctgacacagtcttaacgagacacactacaccagaacagagctacg

SEQ ID NO: 97443 - DNA, 60 bp, Artificial
  Synthetic oligonucleotide
ggggaaacgccacgtttggagttcacgcggcgccgctcaaagaaagaatcactcaaatga

SEQ ID NO: 97444 - DNA, 60 bp, Artificial
  Synthetic oligonucleotide
gggagctgtgcaggcctttgggcatccatcttggtcctacgtcatcaagctgcgtcatgg

SEQ ID NO: 97445 - DNA, 60 bp, Artificial
  Synthetic oligonucleotide
gaacatctgtcgctggaaggctttgctattaaatgggacgtgcagagcgtggggaacagc

SEQ ID NO: 97446 - DNA, 60 bp, Artificial
  Synthetic oligonucleotide
gccgggagaagaaccaatcgtcctctactgcttcgagaccttaccagaaagcgacgagga

SEQ ID NO: 97447 - DNA, 60 bp, Artificial
  Synthetic oligonucleotide
tccgagcgcgtggggagagaagctggggatcgtggagaagccgggagaagaaccaatcgt

SEQ ID NO: 97448 - DNA, 60 bp, Artificial
  Synthetic oligonucleotide
caccgagggagactggatcgacttcgagtcgagacaaaagcgacgcagactggagcgaga

SEQ ID NO: 97449 - DNA, 60 bp, Artificial
  Synthetic oligonucleotide
taccaaaagagctcgcgtggaggaaggtgagccgtgggatggaacgcagccgatcaccga

SEQ ID NO: 97450 - DNA, 60 bp, Artificial
  Synthetic oligonucleotide
ggggtccgggactgaccagacaaaatgcagccatctcgaggtctatactctgcacttcat

SEQ ID NO: 97451 - DNA, 56 bp, Artificial
  Synthetic oligonucleotide
cgaaaacacgactttggctattccgacttgttaaaggagggaaagaatccctacct

SEQ ID NO: 97452 - DNA, 60 bp, Artificial
  Synthetic oligonucleotide
ggcgcttcgcgcctttattgataactaagaatacaactaaaagatggcggaaagagtgaa

SEQ ID NO: 97453 - DNA, 60 bp, Artificial
  Synthetic oligonucleotide
aactcaaacccaagcgtgtggggagaccttccaagggtaagcgctaaccgcatcgacgcg

SEQ ID NO: 97454 - DNA, 60 bp, Artificial
  Synthetic oligonucleotide
cagagctacgactctacttggggtaaaacatacggcttcgcggtctgtaacggcgagacg

SEQ ID NO: 97455 - DNA, 60 bp, Artificial
  Synthetic oligonucleotide
acaacatctacacagcgcatccagctgagaacatgctcaactcaaacccaagcgtgtggg

SEQ ID NO: 97456 - DNA, 60 bp, Artificial
  Synthetic oligonucleotide
tccgggcatgatttcaaattggctgtctcactgcgcgcacattcaccaagaacatctgtc

SEQ ID NO: 97457 - DNA, 60 bp, Artificial
  Synthetic oligonucleotide
caatatgggtcaaggtaccgagagtcaacagaaagacactcctggacacgcaagacggat

SEQ ID NO: 97458 - DNA, 60 bp, Artificial
  Synthetic oligonucleotide
atactcgacggatccaatctacgggggacagcaaccagattcagacctgctgagactgag

SEQ ID NO: 97459 - DNA, 60 bp, Artificial
  Synthetic oligonucleotide
caacgcaactctacaaacacaatctgcaggagcactggtgaccatggtaactaacggagc

SEQ ID NO: 97460 - DNA, 60 bp, Artificial
  Synthetic oligonucleotide
ttggaaaacgcagcaagacacacttttaccagagaggcgagaacgaaactgatcacggga

SEQ ID NO: 97461 - DNA, 60 bp, Artificial
  Synthetic oligonucleotide
tgtggtgggaggaatgcatcatgactacagactacgtagaggcagcaaagtgtgtgctcg

SEQ ID NO: 97462 - DNA, 60 bp, Artificial
  Synthetic oligonucleotide
caatgatttggtagtacatttgtctgatttgatgttaatgcttgagggcatgccgggcgg

SEQ ID NO: 97463 - DNA, 60 bp, Artificial
  Synthetic oligonucleotide
ccgtttaacgtgtttagcgctcaccgagcactctccaaaacagatctccagttctgcggc

SEQ ID NO: 97464 - DNA, 60 bp, Artificial
  Synthetic oligonucleotide
tctgactgcaggcatgcacatcttctgcgacggggatcacagatacccatacgtacagca

SEQ ID NO: 97465 - DNA, 60 bp, Artificial
  Synthetic oligonucleotide
ggggagagaattggaatatgctccacgaactacctggagacaaatggactgctggagatg

SEQ ID NO: 97466 - DNA, 65 bp, Artificial
  Synthetic oligonucleotide
gcaaaggaactaatgaaatattcaatggactaaaacaatcatttcaatcaaaagcgattgacggg

SEQ ID NO: 97467 - DNA, 60 bp, Artificial
  Synthetic oligonucleotide
ggggagacatggatgacattgtagacatcctgaagtgcagaaaggccaacggcacgctgg

SEQ ID NO: 97468 - DNA, 60 bp, Artificial
  Synthetic oligonucleotide
ggtcaacgactacgagagattcagaccaaaagccatgatagtgagagtctacaacctgca

SEQ ID NO: 97469 - DNA, 60 bp, Artificial
  Synthetic oligonucleotide
cagaagagataactgattctgaaatgctggaagcggcagaagctgttgatgccgccaacc

SEQ ID NO: 97470 - DNA, 60 bp, Artificial
  Synthetic oligonucleotide
gccaaacagcatatgggagctaccacaatatgcttacataccagctccaatatcagtcgt

SEQ ID NO: 97471 - DNA, 60 bp, Artificial
  Synthetic oligonucleotide
cgtttagcagtaacgactcaggactaggatccgtcacttcatcagctccatcggtacctg

SEQ ID NO: 97472 - DNA, 60 bp, Artificial
  Synthetic oligonucleotide
cggtacctgacagagccgaggaaatagaggagattcccagtgagtgcttggagtggatgc

SEQ ID NO: 97473 - DNA, 60 bp, Artificial
  Synthetic oligonucleotide
ggattcggacttaaacaccctcctccacagattctcatcaagaacaccccggtacctgcg

SEQ ID NO: 97474 - DNA, 60 bp, Artificial
  Synthetic oligonucleotide
ggcgttcttccaggcatggtctggcaggacagagatgtgtaccttcaggggcccatctgg

SEQ ID NO: 97475 - DNA, 60 bp, Artificial
  Synthetic oligonucleotide
gcagggtctccattttgaagcgggaggtttgaacgcgcagccgccatgccggggttttac

SEQ ID NO: 97476 - DNA, 60 bp, Artificial
  Synthetic oligonucleotide
gagctgcagaaggaaaacagcaaacgctggaatcccgaaattcagtacacttccaactac

SEQ ID NO: 97477 - DNA, 56 bp, Artificial
  Synthetic oligonucleotide
gcactctcctgtggagccagactcctcctcgggaaccggaaaggcgggccagcagc

SEQ ID NO: 97478 - DNA, 60 bp, Artificial
  Synthetic oligonucleotide
acagccaccagcagccccctctggtctgggaactaatacgatggctacaggcagtggcgc

SEQ ID NO: 97479 - DNA, 60 bp, Artificial
  Synthetic oligonucleotide
agacgccgcggccctcgagcacgacaaagcctacgaccggcagctcgacagcggagacaa

SEQ ID NO: 97480 - DNA, 60 bp, Artificial
  Synthetic oligonucleotide
tctacaaacaaatttccagccaatcaggagcctcgaacgacaatcactactttggctaca

SEQ ID NO: 97481 - DNA, 58 bp, Artificial
  Synthetic oligonucleotide
ccaagaaaagacccgcccccagtgacgcagatataagtgagcccaaacgggtgcgcga

SEQ ID NO: 97482 - DNA, 60 bp, Artificial
  Synthetic oligonucleotide
cgtttcagttgaactttggtctctgcgtatttctttcttatctagtttccatggctacgt

SEQ ID NO: 97483 - DNA, 60 bp, Artificial
  Synthetic oligonucleotide
cgactttctgacggaatggcgccgtgtgagtaaggccccggaggcccttttctttgtgca

SEQ ID NO: 97484 - DNA, 60 bp, Artificial
  Synthetic oligonucleotide
aaaggcgtatcagaaactgtgctacattcatcatatcatgggaaaggtgccagacgcttg

SEQ ID NO: 97485 - DNA, 60 bp, Artificial
  Synthetic oligonucleotide
gttctcgtcacgtgggcatgaatctgatgctgtttccctgcagacaatgcgagagaatga

SEQ ID NO: 97486 - DNA, 60 bp, Artificial
  Synthetic oligonucleotide
gtggaaaccaccggggtgaaatccatggttttgggacgtttcctgagtcagattcgcgaa

SEQ ID NO: 97487 - DNA, 60 bp, Artificial
  Synthetic oligonucleotide
ggaacagtatttaagcgcctgtttgaatctcacggagcgtaaacggttggtggcgcagca

SEQ ID NO: 97488 - DNA, 60 bp, Artificial
  Synthetic oligonucleotide
gcggcctccaactcgcggtcccaaatcaaggctgccttggacaatgcgggaaagattatg

SEQ ID NO: 97489 - DNA, 60 bp, Artificial
  Synthetic oligonucleotide
agagcggcataaggacgacagcaggggtcttgtgcttcctgggtacaagtacctcggacc

SEQ ID NO: 97490 - DNA, 60 bp, Artificial
  Synthetic oligonucleotide
ctccaagtggaaccaccacgcagtcaaggcttcagttttctcaggccggagcgagtgaca

SEQ ID NO: 97491 - DNA, 60 bp, Artificial
  Synthetic oligonucleotide
ctttccacagcagctacgctcacagccagagtctggaccgtctcatgaatcctctcatcg

SEQ ID NO: 97492 - DNA, 60 bp, Artificial
  Synthetic oligonucleotide
aggtgtttactgactcggagtaccagctcccgtacgtcctcggctcggcgcatcaaggat

SEQ ID NO: 97493 - DNA, 60 bp, Artificial
  Synthetic oligonucleotide
ggacgctcttcattttactgcctggagtactttccttctcagatgctgcgtaccggaaac

SEQ ID NO: 97494 - DNA, 60 bp, Artificial
  Synthetic oligonucleotide
ctggaccctgttaccgccagcagcgagtatcaaagacatctgcggataacaacaacagtg

SEQ ID NO: 97495 - DNA, 60 bp, Artificial
  Synthetic oligonucleotide
gccgtgattgacgggaactcaacgaccttcgaacaccagcagccgttgcaagaccggatg

SEQ ID NO: 97496 - DNA, 60 bp, Artificial
  Synthetic oligonucleotide
ggaactaaacgggtacgatccccaatatgcggcttccgtctttctgggatgggccacgaa

SEQ ID NO: 97497 - DNA, 60 bp, Artificial
  Synthetic oligonucleotide
gggcctgcaactaccgggaagaccaacatcgcggaggccatagcccacactgtgcccttc

SEQ ID NO: 97498 - DNA, 60 bp, Artificial
  Synthetic oligonucleotide
aagatggtgatctggtgggaggaggggaagatgaccgccaaggtcgtggagtcggccaaa

SEQ ID NO: 97499 - DNA, 60 bp, Artificial
  Synthetic oligonucleotide
gtgtcgcagacgcaggagcagaacaaagagaatcagaaccccaattctgacgcgccggtc

SEQ ID NO: 97500 - DNA, 60 bp, Artificial
  Synthetic oligonucleotide
tgaatctgattgagcaggcacccctgaccgtggccgagaagctgcagcgcgactttctga

SEQ ID NO: 97501 - DNA, 60 bp, Artificial
  Synthetic oligonucleotide
cagaaagactgtttagagtgctttcccgtgtcagaatctcaacccgtttctgtcgtcaaa

SEQ ID NO: 97502 - DNA, 60 bp, Artificial
  Synthetic oligonucleotide
ctgaatctgattgagcaggcacccctgaccgtggccgagaagctgcagcgcgactttctg

SEQ ID NO: 97503 - DNA, 60 bp, Artificial
  Synthetic oligonucleotide
ttcagccaggtacatggagctggtcgggtggctcgtggacaaggggattacctcggagaa

SEQ ID NO: 97504 - DNA, 60 bp, Artificial
  Synthetic oligonucleotide
cggagacaacccgtacctcaagtacaaccacgccgacgcggagtttcaggagcgccttaa

SEQ ID NO: 97505 - DNA, 60 bp, Artificial
  Synthetic oligonucleotide
cggtgacaacccgtacctcaagtacaaccacgccgacgccgagtttcaggagcgtcttca

SEQ ID NO: 97506 - DNA, 60 bp, Artificial
  Synthetic oligonucleotide
acgcagaatgacggtacgacgacgattgccaataaccttaccagcacggttcaggtgttt

SEQ ID NO: 97507 - DNA, 60 bp, Artificial
  Synthetic oligonucleotide
tttggctacagcaccccttgggggtattttgacttcaacagattccactgccacttttca

SEQ ID NO: 97508 - DNA, 51 bp, Artificial
  Synthetic oligonucleotide
tccagagattcagtacacttccaactacaacaagtctgttaatgtggactt

SEQ ID NO: 97509 - DNA, 53 bp, Artificial
  Synthetic oligonucleotide
aatccagagattcagtacacttccaactacaacaagtctgttaatgtggactt

SEQ ID NO: 97510 - DNA, 60 bp, Artificial
  Synthetic oligonucleotide
ttccagccaatcaggagcctcgaacgacaatcactactttggctacagcaccccttgggg

SEQ ID NO: 97511 - DNA, 60 bp, Artificial
  Synthetic oligonucleotide
gcagtggcgcaccaatggcagacaataacgagggcgccgacggagtgggtaattcctcgg

SEQ ID NO: 97512 - DNA, 54 bp, Artificial
  Synthetic oligonucleotide
ccaatcaggagcttcaaacgacaaccactactttggctacagcaccccttgggg

SEQ ID NO: 97513 - DNA, 60 bp, Artificial
  Synthetic oligonucleotide
ccaatcaggagcttcaaacgacaaccactactttggctacagcaccccttgggggtattt

SEQ ID NO: 97514 - DNA, 60 bp, Artificial
  Synthetic oligonucleotide
gagcccagggccattggatcccgatacctcaccaaccacctctagcccaattctgttgca

SEQ ID NO: 97515 - DNA, 60 bp, Artificial
  Synthetic oligonucleotide
gattggcattgcgattccacttggtcagagagccacgtcaccaccacctcaacccgcacc

SEQ ID NO: 97516 - DNA, 60 bp, Artificial
  Synthetic oligonucleotide
ggagagctacctgtccttcaactccacgggaaactctcggagccagattaaagccgcgct

SEQ ID NO: 97517 - DNA, 60 bp, Artificial
  Synthetic oligonucleotide
tcaatctggaggagcgcaaacggctcgtcgctcagtttcagcttgagtcctcgcagcgct

SEQ ID NO: 97518 - DNA, 60 bp, Artificial
  Synthetic oligonucleotide
cccggtcatcaagagcaagacttcccagaaatacatggcgctggtaagctggctggtgga

SEQ ID NO: 97519 - DNA, 60 bp, Artificial
  Synthetic oligonucleotide
gataggctgatgaacccgctgctggaccagtacctgtgggagctccagtctaccacctct

SEQ ID NO: 97520 - DNA, 60 bp, Artificial
  Synthetic oligonucleotide
gcctcagtacgggtactgcggactggtaaccggaggcagctctcaaaaccagacagacag

SEQ ID NO: 97521 - DNA, 60 bp, Artificial
  Synthetic oligonucleotide
cgtgcctgtagagcccgctcctctgcgacctctcaactggtcttccaggtatgaatgcag

SEQ ID NO: 97522 - DNA, 60 bp, Artificial
  Synthetic oligonucleotide
ttgttgaccaccctccagattggttggaatcgatcggcgacggctttcgtgaatttctcg

SEQ ID NO: 97523 - DNA, 60 bp, Artificial
  Synthetic oligonucleotide
ggcaaaggctcatcaacaaccactggggactgcgccccaaaagcatgcaagtccgcatct

SEQ ID NO: 97524 - DNA, 60 bp, Artificial
  Synthetic oligonucleotide
ctcggctcgagcaacgccagcgacaccttcaacggattctccaccccctggggatacttt

SEQ ID NO: 97525 - DNA, 60 bp, Artificial
  Synthetic oligonucleotide
aacccccttgctagagagtgtggcactcccccccctgtcgcgttcgctcgttcgctggct

SEQ ID NO: 97526 - DNA, 60 bp, Artificial
  Synthetic oligonucleotide
gccggtgactcacgagtttatggttcccaagaaagtggcgggaactgagagggcggagac

SEQ ID NO: 97527 - DNA, 60 bp, Artificial
  Synthetic oligonucleotide
gaaaacgcccactggatgacgtcaccaataccaactataaaagtccggagaagcgggccc

SEQ ID NO: 97528 - DNA, 60 bp, Artificial
  Synthetic oligonucleotide
gaactccacgacctttgaacaccagcagccgctggaagaccgcatgttcagatttgaact

SEQ ID NO: 97529 - DNA, 60 bp, Artificial
  Synthetic oligonucleotide
acgacccggcatacgcgggctctgttctctacggctggtgcactcgcgcctttggaaaga

SEQ ID NO: 97530 - DNA, 60 bp, Artificial
  Synthetic oligonucleotide
tttggaaagaggaacaccgtctggctgtatggacccgcgaccaccggaaagaccaacatc

SEQ ID NO: 97531 - DNA, 60 bp, Artificial
  Synthetic oligonucleotide
ggccaaaattccacacacggatggacactttcacccgtctcctctcattggcggatttgg

SEQ ID NO: 97532 - DNA, 53 bp, Artificial
  Synthetic oligonucleotide
tcaaaaacactcctgtacccgccaatcccgcaacgaccttctctccggccaga

SEQ ID NO: 97533 - DNA, 60 bp, Artificial
  Synthetic oligonucleotide
gttgcccgagagcacgacctctcctaccagaaacagcttgaggcgggcgataacccttac

SEQ ID NO: 97534 - DNA, 60 bp, Artificial
  Synthetic oligonucleotide
gcctgccagaaagagactcaactttgacgacgaacctggagccggagacgggcctccccc

SEQ ID NO: 97535 - DNA, 60 bp, Artificial
  Synthetic oligonucleotide
gaatattttcatctgcacacgctcgtggagacctccggcatctcttctatggtccttggc

SEQ ID NO: 97536 - DNA, 60 bp, Artificial
  Synthetic oligonucleotide
gacgtcatcagtgaccttgacctctgaccttctacttgaccttgacctacttctatgacc

SEQ ID NO: 97537 - DNA, 60 bp, Artificial
  Synthetic oligonucleotide
cccaaagttgcaccattaccatacaaaccattaaaggcactagtaagagaattaggtgta

SEQ ID NO: 97538 - DNA, 65 bp, Artificial
  Synthetic oligonucleotide
ccccaacctaatttatttaaaccaatagcggtttgcacattagatatttgatttagtgtagcttg

SEQ ID NO: 97539 - DNA, 60 bp, Artificial
  Synthetic oligonucleotide
ggcaaactcgcgtcgaagctaaaccgtgtgcaaaataggatgtgactggccagcggaccg

SEQ ID NO: 97540 - DNA, 60 bp, Artificial
  Synthetic oligonucleotide
ctccgattgcacgaattactatgagtgtgaacagcaagagcacaaaattagccgtagatc

SEQ ID NO: 97541 - DNA, 60 bp, Artificial
  Synthetic oligonucleotide
aaagcgtatctatctctccaccattcatgtgcatgtgttccaatagcaccagccacacca

SEQ ID NO: 97542 - DNA, 60 bp, Artificial
  Synthetic oligonucleotide
gcagcaccaaaagcgttaccaggtgtttctttaaaattaatagcattaaccacgtgatct

SEQ ID NO: 97543 - DNA, 60 bp, Artificial
  Synthetic oligonucleotide
ccattgtaacgtcaagatcagttgtagcaccagatgaactaggattttgaggatcggtac

SEQ ID NO: 97544 - DNA, 60 bp, Artificial
  Synthetic oligonucleotide
ggcaacttcatctagaaaacgtgagtgggcatttggaggacgaggaacaatggccagcct

SEQ ID NO: 97545 - DNA, 60 bp, Artificial
  Synthetic oligonucleotide
tcagaaggtcaaaggtcagtagaccagaaggtcacagaagtaggtcaaggtcatatagaa

SEQ ID NO: 97546 - DNA, 60 bp, Artificial
  Synthetic oligonucleotide
tataaatggaatgctgcgccattcctaaaggattatgaattgaaaccacatccaatgaca

SEQ ID NO: 97547 - DNA, 50 bp, Artificial
  Synthetic oligonucleotide
caaaattagccgtagatcagatgctggcagtactaacggaagactttatg

SEQ ID NO: 97548 - DNA, 60 bp, Artificial
  Synthetic oligonucleotide
agctgatggtctactgacctgatgatggagaggatccgaagaccttggagctgaaggtgg

SEQ ID NO: 97549 - DNA, 60 bp, Artificial
  Synthetic oligonucleotide
gctgatggtctactgacctgatgatggagaggatccgaagaccttggagctgatggtgga

SEQ ID NO: 97550 - DNA, 60 bp, Artificial
  Synthetic oligonucleotide
atgaccttctgagctgatggtctactgacctgatgatggagaggatccgaagaccttgga

SEQ ID NO: 97551 - DNA, 60 bp, Artificial
  Synthetic oligonucleotide
gctccaaggtcttcggatcctctccatcatcaggtcagtagaccatcagctcagaaggtc

SEQ ID NO: 97552 - DNA, 60 bp, Artificial
  Synthetic oligonucleotide
aaatccgaacagtccgtttcgtctacttcttccgtactcacgcaagacgtccaaacattg

SEQ ID NO: 97553 - DNA, 60 bp, Artificial
  Synthetic oligonucleotide
cagctccgtgatcaatgtttggacgtcttgcgtgagtacggaagaagtagacgaaacgga

SEQ ID NO: 97554 - DNA, 60 bp, Artificial
  Synthetic oligonucleotide
accttccagcgcatatatcagcgatgtcattatcttacgagatattcagctccgtgatca

SEQ ID NO: 97555 - DNA, 60 bp, Artificial
  Synthetic oligonucleotide
gatcacggagctgaatatctcgtaagataatgacatcgctgatatatgcgctggaaggtt

SEQ ID NO: 97556 - DNA, 60 bp, Artificial
  Synthetic oligonucleotide
tacgagatattcagctccgtgatcaatgtttggacgtcttgcgtgagtacggaagaagta

SEQ ID NO: 97557 - DNA, 60 bp, Artificial
  Synthetic oligonucleotide
tcattatcttacgagatattcagctccgtgatcaatgtttggacgtcctgcgtgagtacg

SEQ ID NO: 97558 - DNA, 60 bp, Artificial
  Synthetic oligonucleotide
ccgtttcgtctacttcttccgtactcacgcaagacgtccaaacattgatcacggagctga

SEQ ID NO: 97559 - DNA, 60 bp, Artificial
  Synthetic oligonucleotide
gatattcagctccgtgatcaatgtttggacgtcctgcgtgagtacggaagaagtagacga

SEQ ID NO: 97560 - DNA, 60 bp, Artificial
  Synthetic oligonucleotide
aatggaatgctgcgccattcctaaaggattatgaattgaaaccacatccaatgacatttt

SEQ ID NO: 97561 - DNA, 53 bp, Artificial
  Synthetic oligonucleotide
attaaaatcatcaaaccattcataaggaaattctcccttgcccgaattaaatg

SEQ ID NO: 97562 - DNA, 60 bp, Artificial
  Synthetic oligonucleotide
ttagaaatgctcttatactacgtattaaatgtaaattatctcccttctttaacatatgaa

SEQ ID NO: 97563 - DNA, 60 bp, Artificial
  Synthetic oligonucleotide
agttacagaatggctttcttatcataggctgctttagcttatataggcatgttttgtcgc

SEQ ID NO: 97564 - DNA, 58 bp, Artificial
  Synthetic oligonucleotide
ggtataataccatcagagtgaatattaaacacatcaggagtggtatgtataatttttc

SEQ ID NO: 97565 - DNA, 60 bp, Artificial
  Synthetic oligonucleotide
aacatatgaataggaacttcatcaacttctcctaatatcttagcatagattggtattcca

SEQ ID NO: 97566 - DNA, 60 bp, Artificial
  Synthetic oligonucleotide
atacatttttatctatgattcctattcgtaagagtgatggttctttaatgaaaataagag

SEQ ID NO: 97567 - DNA, 60 bp, Artificial
  Synthetic oligonucleotide
ccaccaatgcgtcaaattagtgctagaattaatccaggaggaagtcctacgggaggcttg

SEQ ID NO: 97568 - DNA, 60 bp, Artificial
  Synthetic oligonucleotide
cacccttataaccaaatggtaaagtagttactttatcagtataagtaatacgcttattat

SEQ ID NO: 97569 - DNA, 60 bp, Artificial
  Synthetic oligonucleotide
caggatatttgtatataaaagaagttacaggcagtggagttcaacctattgtagatcaac

SEQ ID NO: 97570 - DNA, 60 bp, Artificial
  Synthetic oligonucleotide
aatgaatcctaatactagtacagctcctggtgttgttattggaagagacgctcgaggaga

SEQ ID NO: 97571 - DNA, 60 bp, Artificial
  Synthetic oligonucleotide
ggggaataaggtacgatgttgacccagtaggataggatgacttggagcgaaaatccactt

SEQ ID NO: 97572 - DNA, 60 bp, Artificial
  Synthetic oligonucleotide
atcaagagattggattcaaagagcttggtctagagccccatctaataagcatacattttt

SEQ ID NO: 97573 - DNA, 60 bp, Artificial
  Synthetic oligonucleotide
gaaatttcttcttatactactagataaattcagttcaataggtgcaggggttccatctcg

SEQ ID NO: 97574 - DNA, 60 bp, Artificial
  Synthetic oligonucleotide
acagctatgttgtttggggaataaggtacgatgttgacccagtaggataggatgacttgg

SEQ ID NO: 97575 - DNA, 53 bp, Artificial
  Synthetic oligonucleotide
tacttccagagggtaagtagatttcacttttccagacttggtatatccaggtt

SEQ ID NO: 97576 - DNA, 60 bp, Artificial
  Synthetic oligonucleotide
atgactccaatgaaatttcttcttatactactagataaattcagttcaataggtgcaggg

SEQ ID NO: 97577 - DNA, 53 bp, Artificial
  Synthetic oligonucleotide
aaaatcatttacattcataggattattatcatcttttaaggcattcttaggaa

SEQ ID NO: 97578 - DNA, 58 bp, Artificial
  Synthetic oligonucleotide
ctgaccacaaccctggagttttagtagcagaaccaaaagagccatccttattaatagg

SEQ ID NO: 97579 - DNA, 58 bp, Artificial
  Synthetic oligonucleotide
tttcccataatcattagtttgaaacttttttataatactatataaatcagttaaaaac

SEQ ID NO: 97580 - DNA, 60 bp, Artificial
  Synthetic oligonucleotide
tcatctatacatattatttctccagttatattacaagcattaggaatatgaaatttttta

SEQ ID NO: 97581 - DNA, 60 bp, Artificial
  Synthetic oligonucleotide
caacgaggattgtgaaattactcccgacgatcttcgtgtattggttgctaccttaactgg

SEQ ID NO: 97582 - DNA, 60 bp, Artificial
  Synthetic oligonucleotide
cttaatctgtcacttatcttgcacgtgactcttgattgttgcatgtgactcttgatagcg

SEQ ID NO: 97583 - DNA, 60 bp, Artificial
  Synthetic oligonucleotide
ctcctctctagaatcaggaaacggaaagcagcagatgaagtcgaagctggctcaagtgca

SEQ ID NO: 97584 - DNA, 60 bp, Artificial
  Synthetic oligonucleotide
gttatttaagcataataatgtagatataagtaagttttgtgaggcattatattctatttt

SEQ ID NO: 97585 - DNA, 52 bp, Artificial
  Synthetic oligonucleotide
cgctcacttcagaagagcgcgaaaaggctgacgatctcctctctagaatcag

SEQ ID NO: 97586 - DNA, 60 bp, Artificial
  Synthetic oligonucleotide
ctgacgatctcctctctagaatcaggaaacggaaagcagcagatgaagtcgaagctggct

SEQ ID NO: 97587 - DNA, 60 bp, Artificial
  Synthetic oligonucleotide
tggtaatataaagactggtaaaactcttatgatgcgtctcataactggtaattttaagtg

SEQ ID NO: 97588 - DNA, 60 bp, Artificial
  Synthetic oligonucleotide
gactggtaaaactcttatgatgcgtctcataactggtaattttaagtgtgttggtaaagg

SEQ ID NO: 97589 - DNA, 52 bp, Artificial
  Synthetic oligonucleotide
taatatccaaatatacctaatccataatgtctagcataataatatttaccct

SEQ ID NO: 97590 - DNA, 60 bp, Artificial
  Synthetic oligonucleotide
tctccggatccagatagtcttcaatgaagttatcaatttgtacatcaataggtataatac

SEQ ID NO: 97591 - DNA, 60 bp, Artificial
  Synthetic oligonucleotide
ggttattcttataaagtcagataatatatctttatgtgtaataacatccattttgttaat

SEQ ID NO: 97592 - DNA, 60 bp, Artificial
  Synthetic oligonucleotide
aagtagaggaggtgcttcagcagaggaaaaatctgaccaacctatttacaagccaatcga

SEQ ID NO: 97593 - DNA, 60 bp, Artificial
  Synthetic oligonucleotide
gttttgattctgacgttggtggaagtggaagtggaaaacgcagtaatgtgtctgggggcg

SEQ ID NO: 97594 - DNA, 60 bp, Artificial
  Synthetic oligonucleotide
tggtggtgaagggtttgatatatcatgtaaatttcataatccacaaactttaaatagaac

SEQ ID NO: 97595 - DNA, 59 bp, Artificial
  Synthetic oligonucleotide
aaaatcatggtcaacttaaacaattagtaccattaactagaaatgctggagccgatagt

SEQ ID NO: 97596 - DNA, 60 bp, Artificial
  Synthetic oligonucleotide
gcctgaagattcttttactggatggggatatcgcttatatgaagaaagtgctgatggagg

SEQ ID NO: 97597 - DNA, 51 bp, Artificial
  Synthetic oligonucleotide
taagtgcatattttactaatagattacgatttttagaaccatatttatctg

SEQ ID NO: 97598 - DNA, 60 bp, Artificial
  Synthetic oligonucleotide
cgagtggaaagcaagtttcactatccccttcaattatactacatgggaagaaattggaac

SEQ ID NO: 97599 - DNA, 60 bp, Artificial
  Synthetic oligonucleotide
cgtaagccctggtgctccatcaaaataaactggatctatcttatcttcatttacagtggt

SEQ ID NO: 97600 - DNA, 60 bp, Artificial
  Synthetic oligonucleotide
gcatatttagtaacaacttgtgttacaccaccccgtatattgcgcgatacatcaagataa

SEQ ID NO: 97601 - DNA, 66 bp, Artificial
  Synthetic oligonucleotide
gtcaagaaagagatgttggaaattcttttacaattgatagaagtcatactaatttcctcactgctg

SEQ ID NO: 97602 - DNA, 60 bp, Artificial
  Synthetic oligonucleotide
gatgacttggagcgaaaatccacttccagagtatttgctgaaactactcttctccggatc

SEQ ID NO: 97603 - DNA, 60 bp, Artificial
  Synthetic oligonucleotide
tgatgaggcattaaaggcattgataaatgcgcaggtaaatcatgtagatattccggataa

SEQ ID NO: 97604 - DNA, 60 bp, Artificial
  Synthetic oligonucleotide
ttatctagtaaatatctagttacacattcttcatataaaatgcaattacctaaagtaata

SEQ ID NO: 97605 - DNA, 60 bp, Artificial
  Synthetic oligonucleotide
catcttcaatattagcatatttagtaacaacttgtgttacaccaccccgtatattgcgcg

SEQ ID NO: 97606 - DNA, 60 bp, Artificial
  Synthetic oligonucleotide
tttaagcccatacaaataaagactataattgcatataccgccccgataacgacgtgactc

SEQ ID NO: 97607 - DNA, 60 bp, Artificial
  Synthetic oligonucleotide
tctcctaatttatactttaagcccatacaaataaagactataattgcatataccgccccg

SEQ ID NO: 97608 - DNA, 60 bp, Artificial
  Synthetic oligonucleotide
taccgccccgataacgacgtgactcatagcaaaagacaggcggtattcgctatcaagagt

SEQ ID NO: 97609 - DNA, 60 bp, Artificial
  Synthetic oligonucleotide
atcttgcacgtgactcttgattgttgcatgtgactcttgatagcgaataccgcctgtctt

SEQ ID NO: 97610 - DNA, 60 bp, Artificial
  Synthetic oligonucleotide
ttagctaaacttgctaatgactctggtaaaaagttaaaagtatctttaaaggttattctt

SEQ ID NO: 97611 - DNA, 60 bp, Artificial
  Synthetic oligonucleotide
cagcgtccgatacggctgcgtgaactggacaaactctaactttccatttcaagacttagc

SEQ ID NO: 97612 - DNA, 60 bp, Artificial
  Synthetic oligonucleotide
caatactgctacacaaccgtaggcatggaaagtccatggggtaactggtcacaagcgcga

SEQ ID NO: 97613 - DNA, 60 bp, Artificial
  Synthetic oligonucleotide
gggacgatcactacgaactgccatacgtgattggcggtggacaagaaacagtgcctgagc

SEQ ID NO: 97614 - DNA, 60 bp, Artificial
  Synthetic oligonucleotide
gtgaacacacaactgcatccagggtgctcctggacgtcacaataccactttccacactta

SEQ ID NO: 97615 - DNA, 60 bp, Artificial
  Synthetic oligonucleotide
ccagcacttcttccaccaccacttcctggttctaccgtcgtgtacaaccttgactcccag

SEQ ID NO: 97616 - DNA, 60 bp, Artificial
  Synthetic oligonucleotide
cagagacggcgactgccaaatcatccctcccaaaggcagagaataccacgtactaccagt

SEQ ID NO: 97617 - DNA, 60 bp, Artificial
  Synthetic oligonucleotide
ccacgtactaccagttagatcaggactcccaccagtcatagttgtacgacagggaatttt

SEQ ID NO: 97618 - DNA, 60 bp, Artificial
  Synthetic oligonucleotide
ctcgggaacagaacagccagggccaccgacagaagacaaagcagtcattacgccaggagg

SEQ ID NO: 97619 - DNA, 60 bp, Artificial
  Synthetic oligonucleotide
gaggacacctccgaccccggacaacgagatgtttccacacttggctaaacgaccccgact

SEQ ID NO: 97620 - DNA, 60 bp, Artificial
  Synthetic oligonucleotide
atttcagcgtgccttaacacagcacgggacagcgtcgacggagcgaccgaggacacctcc

SEQ ID NO: 97621 - DNA, 60 bp, Artificial
  Synthetic oligonucleotide
ggacttaggagacattccaaagccgctcacaccatggcaactggcaaacaaaatagggcc

SEQ ID NO: 97622 - DNA, 60 bp, Artificial
  Synthetic oligonucleotide
ggaacgaatattaatgaggtggcgaaacattgtcctaatatggtgctgaacgctgattgg

SEQ ID NO: 97623 - DNA, 60 bp, Artificial
  Synthetic oligonucleotide
ggctatggaaaagccaccgcctacaatatacctccgaatgcttcctatgccctgtgcgcc

SEQ ID NO: 97624 - DNA, 60 bp, Artificial
  Synthetic oligonucleotide
gctgtcagagagggaggacgtctcttggtgagtacaaaatgagctactacacttttgttg

SEQ ID NO: 97625 - DNA, 60 bp, Artificial
  Synthetic oligonucleotide
aaaacttccgggcagcagatacccgctacaaagcgaaattacatacgggcaacacacagg

SEQ ID NO: 97626 - DNA, 60 bp, Artificial
  Synthetic oligonucleotide
cagactatgcaaggcaattattgacgatgtcgggacacgattttactggacgtacacccc

SEQ ID NO: 97627 - DNA, 60 bp, Artificial
  Synthetic oligonucleotide
agacagactgcaaaagtagagaaaattgtaagaccattcgaggaacaagaacaagaagac

SEQ ID NO: 97628 - DNA, 60 bp, Artificial
  Synthetic oligonucleotide
gattttactggacgtacacccccagtacaaattcctgaccctggcatccgagaaggccta

SEQ ID NO: 97629 - DNA, 60 bp, Artificial
  Synthetic oligonucleotide
gaccagtaagacagactcagattaatagaacaagcaacggtagttggaagatagagactg

SEQ ID NO: 97630 - DNA, 60 bp, Artificial
  Synthetic oligonucleotide
ggcttatactcctaggacccacaccagaaggtggaaccctaccagtccagcacttcttcc

SEQ ID NO: 97631 - DNA, 60 bp, Artificial
  Synthetic oligonucleotide
tatgtcggacccggaggggacctcccggcagggcgtccaatgtccaaactggatgaaatt

SEQ ID NO: 97632 - DNA, 60 bp, Artificial
  Synthetic oligonucleotide
tattgcgtaacttgccaagggcaacgacttagcaatgcatggtttcccttgcaggccgcc

SEQ ID NO: 97633 - DNA, 60 bp, Artificial
  Synthetic oligonucleotide
gagtgctgtcaatacccatcgtgcgcaggatttcaacagtaagtgaaatcttgcattact

SEQ ID NO: 97634 - DNA, 60 bp, Artificial
  Synthetic oligonucleotide
gaatgcttcctatgccctgtgcgccttgcaaaaacaaatacacaaaaagtccaggaatga

SEQ ID NO: 97635 - DNA, 60 bp, Artificial
  Synthetic oligonucleotide
ctcacagacgaagaagtctgtagcatactagatagtgaagaaggctgggacggggacaac

SEQ ID NO: 97636 - DNA, 60 bp, Artificial
  Synthetic oligonucleotide
caaatacacatttacaagcagtgtagatagcacaccaggaattacagtaaccacaccatg

SEQ ID NO: 97637 - DNA, 60 bp, Artificial
  Synthetic oligonucleotide
tcacgcccggtagttccgggtcaagtgacgtagttccggtgacgtgtcgctcacggctag

SEQ ID NO: 97638 - DNA, 60 bp, Artificial
  Synthetic oligonucleotide
gaccccgactagatgaacctaataaatctgcttcttgctctacagacatgtcgtcctgtg

SEQ ID NO: 97639 - DNA, 60 bp, Artificial
  Synthetic oligonucleotide
tcttccacacaatgcacaaacgacgaagacatggagctcaaccagactacagtcatgggg

SEQ ID NO: 97640 - DNA, 60 bp, Artificial
  Synthetic oligonucleotide
gctcaaccagactacagtcatggggatgccaagttcaactacagacagcacaatcgggaa

SEQ ID NO: 97641 - DNA, 60 bp, Artificial
  Synthetic oligonucleotide
gagcaaggagaaaagcacaagaggtggcacatacacgtagtgttagacataagcgtggga

SEQ ID NO: 97642 - DNA, 60 bp, Artificial
  Synthetic oligonucleotide
gcagaggaaggggaatcctggctagcaaactttatacttgctacatggaaagccaaagct

SEQ ID NO: 97643 - DNA, 60 bp, Artificial
  Synthetic oligonucleotide
aaatttaacttcaacaagagacttccacctaactttggcatagtagagagagaagacatg

SEQ ID NO: 97644 - DNA, 60 bp, Artificial
  Synthetic oligonucleotide
ctacaacaaactgctaccaaaagaacaggcatacttaagtgatcctaaactgatagggca

SEQ ID NO: 97645 - DNA, 60 bp, Artificial
  Synthetic oligonucleotide
ccttgactcccagaagttcaccaccgacaatcaatacaccatcgcagcagaatcctggca

SEQ ID NO: 97646 - DNA, 60 bp, Artificial
  Synthetic oligonucleotide
gcctaaaagaattggaagaacaaagtaaactcatggaaagagtacaagccggtgaagggg

SEQ ID NO: 97647 - DNA, 60 bp, Artificial
  Synthetic oligonucleotide
gaccggacatagacgtaccgatgtggagacaagctagcggagacagaatgagagacttgg

SEQ ID NO: 97648 - DNA, 60 bp, Artificial
  Synthetic oligonucleotide
cacacaggggctgtagaagagagtgagtccgggttctacgaatttcaaatctgggagaga

SEQ ID NO: 97649 - DNA, 60 bp, Artificial
  Synthetic oligonucleotide
ggccctgaaagtataacacaaatagcaccacccacacaagactctgtactgttagagccc

SEQ ID NO: 97650 - DNA, 60 bp, Artificial
  Synthetic oligonucleotide
cgcttggagcatacgagcgacaggacgtagaggagccttatggttctacggaccaggaca

SEQ ID NO: 97651 - DNA, 60 bp, Artificial
  Synthetic oligonucleotide
ggcaagacaacccatgtcaaaaacaaagaatagtggctgtacgaaactgttgctccacaa

SEQ ID NO: 97652 - DNA, 60 bp, Artificial
  Synthetic oligonucleotide
cctatggcatacactacacaatacccgtggagcacaagacggcaagacaacccatgtcaa

SEQ ID NO: 97653 - DNA, 60 bp, Artificial
  Synthetic oligonucleotide
gaccaagcagacatgggttttttcagaaagccgacaatgtggttgccggctaacagacac

SEQ ID NO: 97654 - DNA, 60 bp, Artificial
  Synthetic oligonucleotide
gcaacaaactgccaaataggatggtgggaagaaggggtaatcacagaagacattgtggaa

SEQ ID NO: 97655 - DNA, 60 bp, Artificial
  Synthetic oligonucleotide
aaaataagagtagacagaaaatgtagagacagcgtagaaattacaccgccaccatttgtg

SEQ ID NO: 97656 - DNA, 60 bp, Artificial
  Synthetic oligonucleotide
tgcatggtttcccttgcaggccgccgaccacctcttcacacctaccagaactcacagacg

SEQ ID NO: 97657 - DNA, 60 bp, Artificial
  Synthetic oligonucleotide
gtgcaaggaggaaatcaagtaagctttgtccacaaaaaaccgctagaagacaggatgatt

SEQ ID NO: 97658 - DNA, 60 bp, Artificial
  Synthetic oligonucleotide
aactggtggtgcagcgagaaaggggagttggaggaccagcagagcccaaccacgtacaag

SEQ ID NO: 97659 - DNA, 60 bp, Artificial
  Synthetic oligonucleotide
agccagggccaccgacagaagacaaagcagtcattacgccaggaggcaccacggtgctta

SEQ ID NO: 97660 - DNA, 60 bp, Artificial
  Synthetic oligonucleotide
gaaaccaagaggaagaagacaaaatagtagcaaaacttttactagatcctaatgcaccag

SEQ ID NO: 97661 - DNA, 60 bp, Artificial
  Synthetic oligonucleotide
tacgcattcagttttattccacatgccgcacttgccgggtcataaatatattggtcccgg

SEQ ID NO: 97662 - DNA, 60 bp, Artificial
  Synthetic oligonucleotide
aaccaacatggccattagaacatgtgtttcaaacaaaggaatggcttgatggtcctttcg

SEQ ID NO: 97663 - DNA, 60 bp, Artificial
  Synthetic oligonucleotide
ctatagaagcctagaatgtaatcctatatgggctgctcctagttttaatgggtttacgga

SEQ ID NO: 97664 - DNA, 60 bp, Artificial
  Synthetic oligonucleotide
gggtttacggattattaccacacactagacgaatctattgacattatagaacgtttacta

SEQ ID NO: 97665 - DNA, 60 bp, Artificial
  Synthetic oligonucleotide
gtttactaaactaccaatgtgaacaagacgaatacctttctgaaatgtctcaaaacgatg

SEQ ID NO: 97666 - DNA, 60 bp, Artificial
  Synthetic oligonucleotide
aaattataggtgagcctagtgctggtaaaaattattttatagacgctatattgtcctttt

SEQ ID NO: 97667 - DNA, 60 bp, Artificial
  Synthetic oligonucleotide
gcagctttagacaccataaaaatgttgttagctggtgatcctttaaaagtaaatgtaaaa

SEQ ID NO: 97668 - DNA, 60 bp, Artificial
  Synthetic oligonucleotide
ggaaacgagcgccatttttaaaagaatatcatgccaaattgcaccctatgatatggtcat

SEQ ID NO: 97669 - DNA, 61 bp, Artificial
  Synthetic oligonucleotide
gcatatgaaatacagtatgacgccactcaagtcaatgatgtaattaataaagcattaggtg

SEQ ID NO: 97670 - DNA, 60 bp, Artificial
  Synthetic oligonucleotide
tatttgcgattttaccacaccctacacccccagtactggcccgtagcttcgctgtgtggt

SEQ ID NO: 97671 - DNA, 60 bp, Artificial
  Synthetic oligonucleotide
cagcttgggagtacgtttaccatttgtgacatcagctactaccagttctgtagcaaatgc

SEQ ID NO: 97672 - DNA, 60 bp, Artificial
  Synthetic oligonucleotide
gcattaggtgctgaatggaagaattccactcgcccagatacacctgtatccactcaatgg

SEQ ID NO: 97673 - DNA, 60 bp, Artificial
  Synthetic oligonucleotide
ccaatgatgggagacaagacatatttgcaggagcacctcaaccaaatcaaaatcacgagc

SEQ ID NO: 97674 - DNA, 61 bp, Artificial
  Synthetic oligonucleotide
caaaatcacgagctcatttatggcaaaagttatcattttacacttactaatggtttacccg

SEQ ID NO: 97675 - DNA, 60 bp, Artificial
  Synthetic oligonucleotide
tggtttacccgattttagacatgccattactaacaatgcctacagtgcacaattacgatt

SEQ ID NO: 97676 - DNA, 60 bp, Artificial
  Synthetic oligonucleotide
cctgaccaaaaaggcgaatggccatacccagaaaacatctcaagaggatactacccagat

SEQ ID NO: 97677 - DNA, 60 bp, Artificial
  Synthetic oligonucleotide
tagccgagggacccgacgcatacttcacgatagcattgaatacgaagaatcaagacatgg

SEQ ID NO: 97678 - DNA, 61 bp, Artificial
  Synthetic oligonucleotide
ccagttctgtagcaaatgctaatgctcaatatccaataggttgttttcattttgataatgc

SEQ ID NO: 97679 - DNA, 60 bp, Artificial
  Synthetic oligonucleotide
gatccacagttggaatgcctccaatctctatggaactctgcaatggaaatgtctatggta

SEQ ID NO: 97680 - DNA, 60 bp, Artificial
  Synthetic oligonucleotide
cggcttggacggagactcaggagaagattcaatatctagaagagaagataaagtcagtgc

SEQ ID NO: 97681 - DNA, 60 bp, Artificial
  Synthetic oligonucleotide
ctacccagatttcgacttctgtgtcttcaaaaacgacgaagtgtggaacggaaagcttgc

SEQ ID NO: 97682 - DNA, 60 bp, Artificial
  Synthetic oligonucleotide
aacccacggaagaggatagcagtgacggaagagagttcggaggacgaagatggctcgacc

SEQ ID NO: 97683 - DNA, 60 bp, Artificial
  Synthetic oligonucleotide
agaagtaaatttggctgactttccagactttcttcaagatttcgtagcagaagcaggacc

SEQ ID NO: 97684 - DNA, 60 bp, Artificial
  Synthetic oligonucleotide
gcaccacaagctatgccaaaatttatgattggatttgtcaatattcgtaatgaagacaac

SEQ ID NO: 97685 - DNA, 60 bp, Artificial
  Synthetic oligonucleotide
agtactggcccgtgtgtggtgccgcgaagcggcacttcgtaccacacagcgaagttacgg

SEQ ID NO: 97686 - DNA, 60 bp, Artificial
  Synthetic oligonucleotide
ctacgacccatcgaacaaaatgaactggaagggagctctagtccgcttgaaattcgacgt

SEQ ID NO: 97687 - DNA, 60 bp, Artificial
  Synthetic oligonucleotide
tgctctgcgaagcgaatgcattagcgcagaacatattagaaacatcctgctctataacac

SEQ ID NO: 97688 - DNA, 60 bp, Artificial
  Synthetic oligonucleotide
agaaggagcgacagatgttggaggaggagctcaagttgatccacgtagtggaggacaagc

SEQ ID NO: 97689 - DNA, 60 bp, Artificial
  Synthetic oligonucleotide
gaatgtcggtgcctctcaaggcattttgacgtcaatccgagaaagaacaatgctctgcga

SEQ ID NO: 97690 - DNA, 60 bp, Artificial
  Synthetic oligonucleotide
ccagtcaaagggcacttccacgtcttacatgcctgtacttggtacaaccaagaatgtcgg

SEQ ID NO: 97691 - DNA, 56 bp, Artificial
  Synthetic oligonucleotide
aaaagctggccgttcgaaaggtcagaccttactccctttccagtaccagtcaaagg

SEQ ID NO: 97692 - DNA, 60 bp, Artificial
  Synthetic oligonucleotide
ccagacattagaaattttggacacgtagctggagagaatataaacccagacgaagaagta

SEQ ID NO: 97693 - DNA, 54 bp, Artificial
  Synthetic oligonucleotide
cttggtgctaaaaacctaatagaagaacatgtactaggtaattcattatacggc

SEQ ID NO: 97694 - DNA, 60 bp, Artificial
  Synthetic oligonucleotide
taacaaagacatctacaaggcagacaaaacagcacgagacgaatttttcagtgattttgt

SEQ ID NO: 97695 - DNA, 60 bp, Artificial
  Synthetic oligonucleotide
ggtcccggtactagtgactttaaacctatacctatagatagtgacgacgctatagctaga

SEQ ID NO: 97696 - DNA, 60 bp, Artificial
  Synthetic oligonucleotide
gcgcaagagtcaccacccgtaatgtctcaagaaaacgtaccaatggatacagaaggagcg

SEQ ID NO: 97697 - DNA, 60 bp, Artificial
  Synthetic oligonucleotide
gcagaagcaggaccgagtggcactcaacctttagaaacagcgcaagagtcaccacccgta

SEQ ID NO: 97698 - DNA, 60 bp, Artificial
  Synthetic oligonucleotide
aagatttcgtagcagaagcaggaccgagtggcactcaacctttagaaacagcgcaagagt

SEQ ID NO: 97699 - DNA, 60 bp, Artificial
  Synthetic oligonucleotide
cgacgtaaaagagaccgagagggaagctcagatggtgaacatgattgtggacgcccaaac

SEQ ID NO: 97700 - DNA, 54 bp, Artificial
  Synthetic oligonucleotide
gcgtgatcgaatgacgcaaatcattgacctcgaatgcttttagtgccgtgtgca

SEQ ID NO: 97701 - DNA, 60 bp, Artificial
  Synthetic oligonucleotide
caaaatttttgaaagagacgatgcacaattgagaacacccccaaaggcatattcagctac

SEQ ID NO: 97702 - DNA, 60 bp, Artificial
  Synthetic oligonucleotide
tcagtctacgcagtgctgccaaacggtatagacgtacatcacgctccttacacctgtaat

SEQ ID NO: 97703 - DNA, 60 bp, Artificial
  Synthetic oligonucleotide
cacccggtagaagtaatgaagaactaaatgaaaaagctattaaggatcaaaaatctttac

SEQ ID NO: 97704 - DNA, 60 bp, Artificial
  Synthetic oligonucleotide
gctgtgtggtacgaagtgccgcttcgcggcaccacacacgggccagtactgggggtgtag

SEQ ID NO: 97705 - DNA, 60 bp, Artificial
  Synthetic oligonucleotide
gttaattatccccttccatttggtgttacaaatgttcctaaagatgtaggaatatatgac

SEQ ID NO: 97706 - DNA, 60 bp, Artificial
  Synthetic oligonucleotide
ctgtatccactcaatggtctgaaacatttcctaatataagcgcttcaagtactagtcgtg

SEQ ID NO: 97707 - DNA, 58 bp, Artificial
  Synthetic oligonucleotide
gggggtgtagggtgtggtaaaatcgcaaataatttcgcatctgcgcagtttataagta

SEQ ID NO: 97708 - DNA, 50 bp, Artificial
  Synthetic oligonucleotide
cacctgtaatcagaaccagtgtcacaatttaacgtcgcagcaaataataa

SEQ ID NO: 97709 - DNA, 58 bp, Artificial
  Synthetic oligonucleotide
cacacagcgaagttacgggccagtactgggggtgtagggtgtggtaaaatcgcaaata

SEQ ID NO: 97710 - DNA, 60 bp, Artificial
  Synthetic oligonucleotide
aacaagtaataataagtgaagatataaatccagactcagtctacgcagtgctgccaaacg

SEQ ID NO: 97711 - DNA, 60 bp, Artificial
  Synthetic oligonucleotide
gttctataacacaaaatggcccagatggcctgtgtacatcaaagtggccgacggacccga

SEQ ID NO: 97712 - DNA, 60 bp, Artificial
  Synthetic oligonucleotide
tattctcaatatataccaccacaacccccccagaacccaagcccaatcctattgcgatga

SEQ ID NO: 97713 - DNA, 60 bp, Artificial
  Synthetic oligonucleotide
gagtacgtttaccattcgtgacttcagctacaacaagttctgtggccaatgctaatgcac

SEQ ID NO: 97714 - DNA, 60 bp, Artificial
  Synthetic oligonucleotide
ctactcgagaatggatttcaagaactgatacaatcccaccacaatggtttacatcgcaat

SEQ ID NO: 97715 - DNA, 60 bp, Artificial
  Synthetic oligonucleotide
atgtagacatcaagaatggtacaactgcttatggaaaatgttgggaaaaaagattcaaac

SEQ ID NO: 97716 - DNA, 60 bp, Artificial
  Synthetic oligonucleotide
ctgcaaacgatggacgacaagacatttatgcaggagcgccacaacctaaccaacaccacg

SEQ ID NO: 97717 - DNA, 60 bp, Artificial
  Synthetic oligonucleotide
gaagaagcttttgatgaaccaaccgaaggccatttccacatacttcacgcctgccaatgg

SEQ ID NO: 97718 - DNA, 60 bp, Artificial
  Synthetic oligonucleotide
acggaagattacccagaagacatctgtagaggatatcccccagactacgactttggagtc

SEQ ID NO: 97719 - DNA, 60 bp, Artificial
  Synthetic oligonucleotide
gtaggaggagaaaatattaatcctgacgctgaagtaaacttggcagatttcccagatttt

SEQ ID NO: 97720 - DNA, 60 bp, Artificial
  Synthetic oligonucleotide
gtggaggacaagctgctggaggtatgggagcaggaggtgctgcaaacgatggacgacaag

SEQ ID NO: 97721 - DNA, 60 bp, Artificial
  Synthetic oligonucleotide
cgtttgatgcgcgactatacagcggttaaagttgaagaagttgtttgcgaagtttatagt

SEQ ID NO: 97722 - DNA, 58 bp, Artificial
  Synthetic oligonucleotide
aaaacaaccagtagacgaagacgacgcaatagccagagcacatgacctggattacgat

SEQ ID NO: 97723 - DNA, 60 bp, Artificial
  Synthetic oligonucleotide
tcaaggctgataagcaggctcgcgacgagtttttcagttcatttgtgcacagcggaaact

SEQ ID NO: 97724 - DNA, 60 bp, Artificial
  Synthetic oligonucleotide
taaagctttagggtcagaatggaaaaacacaacaagaccagctcaaccagtaacaacttc

SEQ ID NO: 97725 - DNA, 60 bp, Artificial
  Synthetic oligonucleotide
taagcgtttacatccttttgtatggtgctatctagttgataagtatgtactcgatttgta

SEQ ID NO: 97726 - DNA, 61 bp, Artificial
  Synthetic oligonucleotide
gcttacctgattttcgtcatttcataaacacaataagcaacaactattctgctcaattacg

SEQ ID NO: 97727 - DNA, 60 bp, Artificial
  Synthetic oligonucleotide
gcctacgtgacttggtatacgtgacctaaaacaacaaagtggcgtacgtgagataatgta

SEQ ID NO: 97728 - DNA, 60 bp, Artificial
  Synthetic oligonucleotide
ccccagaacccaagcccaatcctattgcgatacgtagtgaccacacgaagtgacgcgctt

SEQ ID NO: 97729 - DNA, 60 bp, Artificial
  Synthetic oligonucleotide
gtgaagcagcgacaggagcacttgaagagattagaaatcgtgctcaagtcggtaatacaa

SEQ ID NO: 97730 - DNA, 61 bp, Artificial
  Synthetic oligonucleotide
ctaatcaaataagtgaacgttctgattctcaaatacgtataccaccaaaagcttatactgc

SEQ ID NO: 97731 - DNA, 60 bp, Artificial
  Synthetic oligonucleotide
cgctcaccttgcaaaacaaagcgaaagagactacgggcttgaaaggccattccctgtcag

SEQ ID NO: 97732 - DNA, 60 bp, Artificial
  Synthetic oligonucleotide
ccaaataaaagagataataaatgcacaaatgtcccgcatggaaaatcatcccgaaacgga

SEQ ID NO: 97733 - DNA, 60 bp, Artificial
  Synthetic oligonucleotide
caatacaacccgagcgacagtcgcaacaattggaagagagcaacaatcaggatgaaagtg

SEQ ID NO: 97734 - DNA, 60 bp, Artificial
  Synthetic oligonucleotide
ccagatgcaacagaaacattaaagaaactatttgcaggtacagcactcaaggcaacagtc

SEQ ID NO: 97735 - DNA, 60 bp, Artificial
  Synthetic oligonucleotide
tcctttagtacgtgcaaatggtatgcaaactaatcctactcacagacctggaatgatttc

SEQ ID NO: 97736 - DNA, 60 bp, Artificial
  Synthetic oligonucleotide
gacctacagcgaactaaaaatgctctaccaaaatgaacatacaatgcctatatggggagc

SEQ ID NO: 97737 - DNA, 60 bp, Artificial
  Synthetic oligonucleotide
aagacgcctttgaaactcctatcgaacgagaaagaagcttcgaccaattctttcgagcgg

SEQ ID NO: 97738 - DNA, 60 bp, Artificial
  Synthetic oligonucleotide
ggcccttggaacacatattagacactaaagattggcttgaaagtgaatggggcacgtaca

SEQ ID NO: 97739 - DNA, 60 bp, Artificial
  Synthetic oligonucleotide
caataataggggctttgtacttcctggctataagtatgttgggcctggtaacggccttga

SEQ ID NO: 97740 - DNA, 60 bp, Artificial
  Synthetic oligonucleotide
acctgccgggcatttctgactcgtttgtgaactgggtggccgagaaggaatgggagctgc

SEQ ID NO: 97741 - DNA, 60 bp, Artificial
  Synthetic oligonucleotide
ctgacctgatgatggagaggatccgaagaccttggagctgaaggtggaacacaggacctg

SEQ ID NO: 97742 - DNA, 60 bp, Artificial
  Synthetic oligonucleotide
tcagtagaccagaaggtcacagaagtaggtcaaggtcatatagaaggtcaaaggtcaagg

SEQ ID NO: 97743 - DNA, 60 bp, Artificial
  Synthetic oligonucleotide
aggagatccttatactgttagagttaaaaatcgtatggatgcacatgtaaagcgtactcc

SEQ ID NO: 97744 - DNA, 60 bp, Artificial
  Synthetic oligonucleotide
caagaacaggagactcaaacaccttccatctacaaaacctcatcggaaagtcctacgctc

SEQ ID NO: 97745 - DNA, 60 bp, Artificial
  Synthetic oligonucleotide
ctttccaaacaagaagatacttcgaattcgacgctgccaatgatggaaacttcgacggaa

SEQ ID NO: 97746 - DNA, 60 bp, Artificial
  Synthetic oligonucleotide
gatgaacttatatctctatggtctaaagagcagcgacagttcagcaacagaaacacaacg

SEQ ID NO: 97747 - DNA, 60 bp, Artificial
  Synthetic oligonucleotide
gataatcatcgtagcagacaaaaaactggacaaaataaacactcttgtactccaaggacc

SEQ ID NO: 97748 - DNA, 60 bp, Artificial
  Synthetic oligonucleotide
cagcaacagaaacacaacgatataagatggtaaaatcaatgatgaagacctacggatgga

SEQ ID NO: 97749 - DNA, 60 bp, Artificial
  Synthetic oligonucleotide
gaggcacatcatttgagactctcacatttacagacaccccatatttagaaatatttaagg

SEQ ID NO: 97750 - DNA, 60 bp, Artificial
  Synthetic oligonucleotide
tgcagaatatatccaaaagaaaaccagactacgacaatatgcagtggataaaatacatgt

SEQ ID NO: 97751 - DNA, 60 bp, Artificial
  Synthetic oligonucleotide
taaggatactactggactacataatcaactatcaactaaggaagccgacgtaacattggc

SEQ ID NO: 97752 - DNA, 59 bp, Artificial
  Synthetic oligonucleotide
ggactccggctacccaggcatggtgggacacttttcttctattgacgacatatttcgtc

SEQ ID NO: 97753 - DNA, 60 bp, Artificial
  Synthetic oligonucleotide
gcgagtatccatcatttaaattagtggtatgacgtcacatattaagttaacggtttctgc

SEQ ID NO: 97754 - DNA, 60 bp, Artificial
  Synthetic oligonucleotide
cctacgctctcttcgaggaacccagaatcagtcaaataacagtggacgacttcaaactcc

SEQ ID NO: 97755 - DNA, 60 bp, Artificial
  Synthetic oligonucleotide
cttacgtcgcttacaaaagactaaaatccctatcgtcagtcagtcatttagagtcaggga

SEQ ID NO: 97756 - DNA, 60 bp, Artificial
  Synthetic oligonucleotide
gacggactcaccggtctcccagtctctaactgacgagtgaagaggctattccaagtgact

SEQ ID NO: 97757 - DNA, 60 bp, Artificial
  Synthetic oligonucleotide
gccaacaacgacatccgtgtaccagaaatcttagcttggataatcatcgtagcagacaaa

SEQ ID NO: 97758 - DNA, 60 bp, Artificial
  Synthetic oligonucleotide
ggacccgtaccagaggacaatataaagacaaactcagaggaatattaacatactacaaca

SEQ ID NO: 97759 - DNA, 60 bp, Artificial
  Synthetic oligonucleotide
gcgtcacttacaaaagacgtaaccgctttcgtccatcactcacatatatctttctctacc

SEQ ID NO: 97760 - DNA, 60 bp, Artificial
  Synthetic oligonucleotide
cagtgaaccaacagaagtctttcaaaacgtcttcggggaaagacaaacccaaggatacaa

SEQ ID NO: 97761 - DNA, 60 bp, Artificial
  Synthetic oligonucleotide
catcagtgacacatcagattcctccggatcagatgacgaaaatctgggtacaccacatcg

SEQ ID NO: 97762 - DNA, 60 bp, Artificial
  Synthetic oligonucleotide
ggtgaccactggcacatcacatactccggacacccaaccaataagaccagacatagagct

SEQ ID NO: 97763 - DNA, 60 bp, Artificial
  Synthetic oligonucleotide
cgagagggaacaggaaacggaacaattcaacttggaagtgaatcagaaacctcccttgga

SEQ ID NO: 97764 - DNA, 60 bp, Artificial
  Synthetic oligonucleotide
gctacaatcctcgcctatttgggagttacctttgctgccagagccgaagctgaagcgact

SEQ ID NO: 97765 - DNA, 60 bp, Artificial
  Synthetic oligonucleotide
aactgatcctaaggtctgcgtggataacctgggaattcgagagggaacaggaaacggaac

SEQ ID NO: 97766 - DNA, 60 bp, Artificial
  Synthetic oligonucleotide
aagagacgaagacgcagtagacggaccatgtccatatatgactactacaagagaagaccg

SEQ ID NO: 97767 - DNA, 60 bp, Artificial
  Synthetic oligonucleotide
ctgttccagttttcagacgaggaagacaactctcaaactcctccaagaacttcaacacca

SEQ ID NO: 97768 - DNA, 60 bp, Artificial
  Synthetic oligonucleotide
cagaaaatatggccaaggacatactgcatacacgtcagggcgaaccagaatcacttagtg

SEQ ID NO: 97769 - DNA, 60 bp, Artificial
  Synthetic oligonucleotide
aaaacagtgcagaatatgactacctccaacacttagtcaaaaccaagtcagcaagaacag

SEQ ID NO: 97770 - DNA, 54 bp, Artificial
  Synthetic oligonucleotide
aaaaccttccacctgacaagacaaataaaaggcctctcagacaggatgaacagc

SEQ ID NO: 97771 - DNA, 60 bp, Artificial
  Synthetic oligonucleotide
gaccagacccacacagatgtctacaattcaatactggagactcaatacatattactttcc

SEQ ID NO: 97772 - DNA, 60 bp, Artificial
  Synthetic oligonucleotide
ggagggatgcacataatgaagacgaagaacacgccgaaggatcaagtggaccagacccac

SEQ ID NO: 97773 - DNA, 58 bp, Artificial
  Synthetic oligonucleotide
aggatgtgtcgcaagtttggggatgttacaatatcttcacgcaccatgtactggacaa

SEQ ID NO: 97774 - DNA, 60 bp, Artificial
  Synthetic oligonucleotide
ccaccagacaagatcaccagcgacgacttcctaggactcttccaagaatacgaaaaggaa

SEQ ID NO: 97775 - DNA, 60 bp, Artificial
  Synthetic oligonucleotide
tggggtggtcaattaaaatgggacaaaccatcccttggaaacctagtctacccagcagac

SEQ ID NO: 97776 - DNA, 60 bp, Artificial
  Synthetic oligonucleotide
aaggaccaaatggagacgaacttaaacttggctgcagagtacaagccgacttcttcctac

SEQ ID NO: 97777 - DNA, 60 bp, Artificial
  Synthetic oligonucleotide
gtaagtacaagtgactgactaagtgacgatccattaaattcctaattgacgcaagtgacg

SEQ ID NO: 97778 - DNA, 60 bp, Artificial
  Synthetic oligonucleotide
ggattcatggaacaaatgcgaaccggtgacagaaaagcctatacaatccatggtgacact

SEQ ID NO: 97779 - DNA, 60 bp, Artificial
  Synthetic oligonucleotide
atggtgacactagaaattggtatggcggagaaataccaacaaccggacccaccttcatcc

SEQ ID NO: 97780 - DNA, 60 bp, Artificial
  Synthetic oligonucleotide
cagtcatttagagtcagggatattgtccgccgtcacttagagcgcgaagcgcgagtatcc

SEQ ID NO: 97781 - DNA, 60 bp, Artificial
  Synthetic oligonucleotide
agaccagacatagagctacaatcctcgcctatttgggagttacctttgctgccagagccg

SEQ ID NO: 97782 - DNA, 60 bp, Artificial
  Synthetic oligonucleotide
acctcatcggaaagtcctacgctctcttcgaggaacccagaatcagtcaaataacagtgg

SEQ ID NO: 97783 - DNA, 60 bp, Artificial
  Synthetic oligonucleotide
gacttcttcctacacctagaagtacgactcccaccacaaggatgtgtcgcaagtttgggg

SEQ ID NO: 97784 - DNA, 60 bp, Artificial
  Synthetic oligonucleotide
gtgaattgcttcgagaacgcacgaacgaaactcactccagccagggaatttctccaagcc

SEQ ID NO: 97785 - DNA, 60 bp, Artificial
  Synthetic oligonucleotide
tctaccgtggtgcttcatagggaacagacccgtttctctactgcctctgcaacgagtgtt

SEQ ID NO: 97786 - DNA, 60 bp, Artificial
  Synthetic oligonucleotide
ccgctttcgtccatcactcacatatatctttctctacctttcagacaacataccccaaca

SEQ ID NO: 97787 - DNA, 60 bp, Artificial
  Synthetic oligonucleotide
atatgactactacaagagaagaccgcgctgaagaaaaacctaaagaaaacagtgcagaat

SEQ ID NO: 97788 - DNA, 60 bp, Artificial
  Synthetic oligonucleotide
ggaaatcgactggaacctaccgatggaggagagagctgtagtagcggaacacaacccgac

SEQ ID NO: 97789 - DNA, 60 bp, Artificial
  Synthetic oligonucleotide
aaaccacaaccaagaagactctccggacgaacgccaaacttcaccattacagatcatggt

SEQ ID NO: 97790 - DNA, 60 bp, Artificial
  Synthetic oligonucleotide
ttgataaacaagtggaaagtacaacatggtacaccttcgtcatcagagaaaaaccacaac

SEQ ID NO: 97791 - DNA, 60 bp, Artificial
  Synthetic oligonucleotide
tcgaaataaaagaaccagaaactccaacaccacaaaagagacaggcggaggagacaaccg

SEQ ID NO: 97792 - DNA, 60 bp, Artificial
  Synthetic oligonucleotide
gcggaggagacaaccgacgacatcaggaaagcgatcatggaagcaatggaaatcgactgg

SEQ ID NO: 97793 - DNA, 60 bp, Artificial
  Synthetic oligonucleotide
aagagacaggcggaggagacaaccgacgacatcaggaaagcgatcatggaagcaatggaa

SEQ ID NO: 97794 - DNA, 60 bp, Artificial
  Synthetic oligonucleotide
tctcagccagaactatgcaataactccacttgcatcggatctcgaggacctggctttaga

SEQ ID NO: 97795 - DNA, 60 bp, Artificial
  Synthetic oligonucleotide
cgcctctcagccagaactatgcactaactccacttgcatcggatctcgaggacctggctt

SEQ ID NO: 97796 - DNA, 60 bp, Artificial
  Synthetic oligonucleotide
ggctggaactatgttaaagtttgccatgctatttgctgtgttctaaacagacaaggaggc

SEQ ID NO: 97797 - DNA, 60 bp, Artificial
  Synthetic oligonucleotide
ggtaaagaatggttaccaatctaccatggcaagctactgtgctaaatggggcaaagttcc

SEQ ID NO: 97798 - DNA, 60 bp, Artificial
  Synthetic oligonucleotide
ggttggtaaagaatggttaccaatctaccatggcaagctactgtgctaaatggggcaaag

SEQ ID NO: 97799 - DNA, 60 bp, Artificial
  Synthetic oligonucleotide
aaagaaggcgaacgccatctagtgagcaaactatacactgatgacatgcggccagaaacg

SEQ ID NO: 97800 - DNA, 60 bp, Artificial
  Synthetic oligonucleotide
gaatggttaccaatctaccatggcaagctactgcgctaaatggggcaaagttcctgattg

SEQ ID NO: 97801 - DNA, 60 bp, Artificial
  Synthetic oligonucleotide
acaccgaaaagtacgcctctcagccagaactatgcactaactccacttgcatcggatctc

SEQ ID NO: 97802 - DNA, 60 bp, Artificial
  Synthetic oligonucleotide
tcacgacaccgaaaagtacgcctctcagccagaactatgcactaactccacttgcatcgg

SEQ ID NO: 97803 - DNA, 60 bp, Artificial
  Synthetic oligonucleotide
gtacgcctctcagccagaactatgcactaactccacttgcatcggatctcgaggacctgg

SEQ ID NO: 97804 - DNA, 60 bp, Artificial
  Synthetic oligonucleotide
cgaaaagtacgcctctcagccagaactatgcactaactccacttgcatcggatctcgagg

SEQ ID NO: 97805 - DNA, 60 bp, Artificial
  Synthetic oligonucleotide
gaaacccagaacactggggaagctggttccaaagcctgccaagatggtcaactgagccca

SEQ ID NO: 97806 - DNA, 60 bp, Artificial
  Synthetic oligonucleotide
ggggaagctggttccaaagcctgccaagatggtcaactgagcccaacttggtcagagatc

SEQ ID NO: 97807 - DNA, 60 bp, Artificial
  Synthetic oligonucleotide
actgagcccaacttggtcagagatcgaggaggatttgagagcgtgcttcggtgcggaacc

SEQ ID NO: 97808 - DNA, 60 bp, Artificial
  Synthetic oligonucleotide
tgcaataactccacttgcatcggatctcgaggacctggctttagagccttggagcacacc

SEQ ID NO: 97809 - DNA, 60 bp, Artificial
  Synthetic oligonucleotide
actccacttgcatcggatctcgaggacctggctttagagccttggagcacaccaaatact

SEQ ID NO: 97810 - DNA, 55 bp, Artificial
  Synthetic oligonucleotide
cttgcatcggatctcgaggacctggctttagagccttggagcacaccaaatactc

SEQ ID NO: 97811 - DNA, 60 bp, Artificial
  Synthetic oligonucleotide
ctgagcccaacttggtcagagatcgaggaggatttgagagcgtgcttcggtgcggaaccg

SEQ ID NO: 97812 - DNA, 52 bp, Artificial
  Synthetic oligonucleotide
ttggactaaggtacgatggcgcctccagctaaaagagctaaaagaggtaagg

SEQ ID NO: 97813 - DNA, 60 bp, Artificial
  Synthetic oligonucleotide
caccattcacgacaccgaaaagtacgcctctcagccagaactatgcactaactccacttg

SEQ ID NO: 97814 - DNA, 60 bp, Artificial
  Synthetic oligonucleotide
aaactaactttttaaaagagggcgaacgccatctagtgagcaaactatacactgatgaca

SEQ ID NO: 97815 - DNA, 60 bp, Artificial
  Synthetic oligonucleotide
cagacaaggaggcaaaagaaatactgttttatttcatggaccagccagcacaggcaaatc

SEQ ID NO: 97816 - DNA, 60 bp, Artificial
  Synthetic oligonucleotide
ttttaaacagacaaggaggcaaaagaaatactgttttatttcatggaccagccagcacag

SEQ ID NO: 97817 - DNA, 60 bp, Artificial
  Synthetic oligonucleotide
aaacagacaaggaggcaaaagaaatactgttttatttcacggaccagccagtacaggcaa

SEQ ID NO: 97818 - DNA, 60 bp, Artificial
  Synthetic oligonucleotide
ggcccatgatctgtgcttggttggtaaagaatggttaccaatctaccatggcaagctact

SEQ ID NO: 97819 - DNA, 60 bp, Artificial
  Synthetic oligonucleotide
tgatttgtgcttggttggtaaagaatggttaccaatctaccatggcaagctactgtgcta

SEQ ID NO: 97820 - DNA, 60 bp, Artificial
  Synthetic oligonucleotide
gacaagaatgaatggcccatgatttgtgcttggttggtaaagaatggttaccaatctacc

SEQ ID NO: 97821 - DNA, 60 bp, Artificial
  Synthetic oligonucleotide
ggaaaaaatccttacctgtacttctctgctgctgatcaacgctttattgaccaaaccaag

SEQ ID NO: 97822 - DNA, 60 bp, Artificial
  Synthetic oligonucleotide
tctggaaaaaatccttacctgtacttctctgctgctgatcaacgctttattgaccaaacc

SEQ ID NO: 97823 - DNA, 60 bp, Artificial
  Synthetic oligonucleotide
ctgggaccaggaaacagccttgaccaaggagaaccaaccaatccatctgacgccgctgcc

SEQ ID NO: 97824 - DNA, 60 bp, Artificial
  Synthetic oligonucleotide
gggaattattatgcgagtaaacacttccaaagtaagcgaaagaataaactagcgagagtg

SEQ ID NO: 97825 - DNA, 60 bp, Artificial
  Synthetic oligonucleotide
taggaaatgaaactaagatcaggactcagacaattgagcaatggaagggattgtgtgggg

SEQ ID NO: 97826 - DNA, 60 bp, Artificial
  Synthetic oligonucleotide
ggggagagaacataacaatgccaatgaagtacaaggaacacaagacacacatgttcagga

SEQ ID NO: 97827 - DNA, 60 bp, Artificial
  Synthetic oligonucleotide
ctgaagtggtcgaattcatagtcgatgtcgtggaagtggctttcatggtggcagaggctg

SEQ ID NO: 97828 - DNA, 60 bp, Artificial
  Synthetic oligonucleotide
gtagaattgggaagcgaggcagtaaatgcacatataaaatttcctaacaggatgattccg

SEQ ID NO: 97829 - DNA, 60 bp, Artificial
  Synthetic oligonucleotide
ccgggcaacaataaagtgataagataaaatcgtgcgtttgagtatccacatcacacatag

SEQ ID NO: 97830 - DNA, 60 bp, Artificial
  Synthetic oligonucleotide
gaggctgtacaggtcgttgcagacacagtcaattactttactggcggcgatagtgctgcg

SEQ ID NO: 97831 - DNA, 60 bp, Artificial
  Synthetic oligonucleotide
ggcgatagtgctgcgaagaacgatcagagcgatccggagacgcaggcagctaatgaggtc

SEQ ID NO: 97832 - DNA, 60 bp, Artificial
  Synthetic oligonucleotide
cgatccggtaagacaaagatttccagaattagaacaggaggagagaaatacatttgcagg

SEQ ID NO: 97833 - DNA, 60 bp, Artificial
  Synthetic oligonucleotide
tcaagagagaagggatactggatcataaccctcttgttacattttactctggtctcattg

SEQ ID NO: 97834 - DNA, 60 bp, Artificial
  Synthetic oligonucleotide
gcaggattactagcaatagaagcagcaccagaccaaagacaattagggcgcgataataac

SEQ ID NO: 97835 - DNA, 60 bp, Artificial
  Synthetic oligonucleotide
ctagctccgcgataagccttatcaggctctccgcctacggcgagcagcgggccttcggcc

SEQ ID NO: 97836 - DNA, 60 bp, Artificial
  Synthetic oligonucleotide
cttgagagattcgccagtaataagcgaagtagcagcataccagaccaacgatgaaccacc

SEQ ID NO: 97837 - DNA, 60 bp, Artificial
  Synthetic oligonucleotide
ccatgaagagtaacagactcatagacaaaagattttggaagccagaaggatggaccaaaa

SEQ ID NO: 97838 - DNA, 60 bp, Artificial
  Synthetic oligonucleotide
ggagtacagtctacaacaggcagactacatagagggaaacacatggataggagaagattt

SEQ ID NO: 97839 - DNA, 60 bp, Artificial
  Synthetic oligonucleotide
tctagtaaaacataaatgttacaccattcaggactttaagatgatgcagagaagcgacga

SEQ ID NO: 97840 - DNA, 60 bp, Artificial
  Synthetic oligonucleotide
taaggcttatcgcggagctaggggcggtgcgtcggcagacccctatatattggtaaacct

SEQ ID NO: 97841 - DNA, 60 bp, Artificial
  Synthetic oligonucleotide
gtaacagtgggaaaacgcagctgattgaggctctaacgggcctgataaacacagccataa

SEQ ID NO: 97842 - DNA, 58 bp, Artificial
  Synthetic oligonucleotide
tagcagtcaggagaagtatatgaagagtaaggagaagaaggaacagccaaagacatcg

SEQ ID NO: 97843 - DNA, 60 bp, Artificial
  Synthetic oligonucleotide
gtcggacagagcagacagatttgtatcgacggggcatacatgatgtttaagataatagag

SEQ ID NO: 97844 - DNA, 60 bp, Artificial
  Synthetic oligonucleotide
tactggtacattcaaagacacatttcaaacagggccagtttagtcggacagagcagacag

SEQ ID NO: 97845 - DNA, 53 bp, Artificial
  Synthetic oligonucleotide
ccagcaaacaagaagaggaagttctgcctcacaagcgcagctctggagaagca

SEQ ID NO: 97846 - DNA, 60 bp, Artificial
  Synthetic oligonucleotide
gtcagtgacatggaggagacttccagtgatgaggaggtgcctagcagtcaggagaagtat

SEQ ID NO: 97847 - DNA, 60 bp, Artificial
  Synthetic oligonucleotide
atgtacacgttaataaggtaaaatggttgggagttacagataaagtcagtgacatggagg

SEQ ID NO: 97848 - DNA, 60 bp, Artificial
  Synthetic oligonucleotide
tatgaacttttgtagtcagggagtagttatagacaacgaatatccagacaatcagatggg

SEQ ID NO: 97849 - DNA, 60 bp, Artificial
  Synthetic oligonucleotide
gtagtgcggcggcggaagatgacattccagaagattgtgacgacttcctagaaacttctg

SEQ ID NO: 97850 - DNA, 60 bp, Artificial
  Synthetic oligonucleotide
caggcagctaatgaggtcagcagtacagcagaatcgacaaacgtaggaggaactcagggc

SEQ ID NO: 97851 - DNA, 60 bp, Artificial
  Synthetic oligonucleotide
ctagagccatgaacccagttaaatatgacagtgcggtagaaagatcattcggatacgacg

SEQ ID NO: 97852 - DNA, 60 bp, Artificial
  Synthetic oligonucleotide
cagaccaatatgctacagacatattctttatgccatatgttcacacacagagaggcataa

SEQ ID NO: 97853 - DNA, 54 bp, Artificial
  Synthetic oligonucleotide
cagaatttattggctattgagattgcattacaagaaccaagcagtgtagcgcaa

SEQ ID NO: 97854 - DNA, 60 bp, Artificial
  Synthetic oligonucleotide
tatatatgaagaagctcacgtaaccaggacaacagattatgcagaatgggctaggaatga

SEQ ID NO: 97855 - DNA, 60 bp, Artificial
  Synthetic oligonucleotide
gcatgaacggtatggctaaagacaaagtgaacattacaccaacaacctatgatatatatg

SEQ ID NO: 97856 - DNA, 59 bp, Artificial
  Synthetic oligonucleotide
aaaaccccagcgattcattccagcgccaccgcaataaacccgttgatctcaaacacatc

SEQ ID NO: 97857 - DNA, 60 bp, Artificial
  Synthetic oligonucleotide
ggaatgtacatacatccacaacataagtgctgcagttcatgatagatgtaaggataattg

SEQ ID NO: 97858 - DNA, 51 bp, Artificial
  Synthetic oligonucleotide
gacactgccagttgcatatatgccgtgggccatgtcatcgcaaagatcccc

SEQ ID NO: 97859 - DNA, 60 bp, Artificial
  Synthetic oligonucleotide
gagatctagtgaactttgtaaataccttgctctgtcataagattaatgctatagctgtga

SEQ ID NO: 97860 - DNA, 60 bp, Artificial
  Synthetic oligonucleotide
caaaagtcacatcagaacacaaccacgtatttgcattcacagacttgagagattcgccag

SEQ ID NO: 97861 - DNA, 60 bp, Artificial
  Synthetic oligonucleotide
gtagcaagagggttttattccgcggctacgagaagatacttcaacacgacaacaaacaac

SEQ ID NO: 97862 - DNA, 60 bp, Artificial
  Synthetic oligonucleotide
gggacaggaaatacgcaagtgttcatggaacatattactacagtagcgatgcggagttct

SEQ ID NO: 97863 - DNA, 56 bp, Artificial
  Synthetic oligonucleotide
ggaaggaacaccacgtacatgaagctatacgtatcgatggtactaactctaagttt

SEQ ID NO: 97864 - DNA, 60 bp, Artificial
  Synthetic oligonucleotide
ccagaacacaacataagcttaaaggtttcacagattcaggaggttaggaatggaaagatg

SEQ ID NO: 97865 - DNA, 60 bp, Artificial
  Synthetic oligonucleotide
atgctaaccatgaaggaggaggatttcttgagccaagtctggttgccatacatacaaggc

SEQ ID NO: 97866 - DNA, 60 bp, Artificial
  Synthetic oligonucleotide
gcagatgtattttggagtgataatctaaggcaattttggatgatgatatttggagagtgt

SEQ ID NO: 97867 - DNA, 60 bp, Artificial
  Synthetic oligonucleotide
tggtcaaacacgacaaacagtaaatatctcaggagactgttgggaataaacggcaacagt

SEQ ID NO: 97868 - DNA, 60 bp, Artificial
  Synthetic oligonucleotide
ggtttgggaaatcttgctctgggtaactacataaactcgtggggtatggacaacatatcc

SEQ ID NO: 97869 - DNA, 60 bp, Artificial
  Synthetic oligonucleotide
ggggtatggacaacatatccaagagcgaggacagttgggctatcatagccaccaggggca

SEQ ID NO: 97870 - DNA, 59 bp, Artificial
  Synthetic oligonucleotide
cactcaggagagggacgacttgtacgagaaagcttgtcagtttaagagggataggaata

SEQ ID NO: 97871 - DNA, 60 bp, Artificial
  Synthetic oligonucleotide
gggtgtgtgacaagagtcctctccgattggtctagcagtgaagttctcagcacgatggcg

SEQ ID NO: 97872 - DNA, 60 bp, Artificial
  Synthetic oligonucleotide
ggaagtaagtatgcagatagaggaccaataagtcatatggaagcaacaaagaggaactct

SEQ ID NO: 97873 - DNA, 60 bp, Artificial
  Synthetic oligonucleotide
gggacatgtatactatccagatcccaaaggtgaagaaaggataaagatagcaagtaaagc

SEQ ID NO: 97874 - DNA, 60 bp, Artificial
  Synthetic oligonucleotide
acatagagcatcaccacctgttaacattttcaaagtgtctgtatatgcatcctcatagtt

SEQ ID NO: 97875 - DNA, 60 bp, Artificial
  Synthetic oligonucleotide
ctcagctaggaatggagcttgtttccatctatataccttcactctatctacaaatgctag

SEQ ID NO: 97876 - DNA, 60 bp, Artificial
  Synthetic oligonucleotide
gaccaagaataataccgatacaactaaggatgtaagttattcatcttctaatccgagagc

SEQ ID NO: 97877 - DNA, 60 bp, Artificial
  Synthetic oligonucleotide
gttcagaaatatctgccaacacaattaccatatagattttcctctgaatatgttcatggt

SEQ ID NO: 97878 - DNA, 54 bp, Artificial
  Synthetic oligonucleotide
gtatgatgctgctgctgtagtgggagaacccatcttgacatatgtttatcaacc

SEQ ID NO: 97879 - DNA, 60 bp, Artificial
  Synthetic oligonucleotide
gtagcatcatttgtaacatcattaccaaagcatcaggttggaatgtatacaaccttaaag

SEQ ID NO: 97880 - DNA, 55 bp, Artificial
  Synthetic oligonucleotide
caattatccttggaattatttcccaatacaccaatatttcaaaagctacaagcgg

SEQ ID NO: 97881 - DNA, 60 bp, Artificial
  Synthetic oligonucleotide
ctaccttttgacagtaatactgttccatttgctggattgtatgttaatgcttccttgtca

SEQ ID NO: 97882 - DNA, 60 bp, Artificial
  Synthetic oligonucleotide
ttttgatgttacttgtgaatgtgttgtaggatacagaacatatactgacagaccatttgc

SEQ ID NO: 97883 - DNA, 52 bp, Artificial
  Synthetic oligonucleotide
tcgtcgcaggccaagacgtcgctaaggtaccggcgaaaaggtccgaaaggcg

SEQ ID NO: 97884 - DNA, 60 bp, Artificial
  Synthetic oligonucleotide
taacttgtctagcgattctattagcttctcttgagtcgtcgcaggccaagacgtcgctaa

SEQ ID NO: 97885 - DNA, 60 bp, Artificial
  Synthetic oligonucleotide
cggtttggagtaatctacccttctgtttcaggtacgtaatacacctccttatgaacgtcc

SEQ ID NO: 97886 - DNA, 60 bp, Artificial
  Synthetic oligonucleotide
cgtgcaggacaaagatttacaccacctcctctttcaggtgacgaacgagatagaagtcca

SEQ ID NO: 97887 - DNA, 60 bp, Artificial
  Synthetic oligonucleotide
aggattttgcatctacagctgccatcggaatacgcgcagtcatggacgacgtggacatga

SEQ ID NO: 97888 - DNA, 60 bp, Artificial
  Synthetic oligonucleotide
gccaccgtccgttggaaatgaaatagaggatgatatcgtcccactgatctgatgcgattg

SEQ ID NO: 97889 - DNA, 60 bp, Artificial
  Synthetic oligonucleotide
ggacatgatcgtcgtgggttgatataaggcacaaatttcctgggtaatctctagctgttc

SEQ ID NO: 97890 - DNA, 60 bp, Artificial
  Synthetic oligonucleotide
cagctgccatcggaatacgcgcagtcatggacgacgtggacatgatcgtcgtgggttgat

SEQ ID NO: 97891 - DNA, 60 bp, Artificial
  Synthetic oligonucleotide
ctacaggtttattaggtactagtgtcattagtgctggaacgggtgttgctggaggagctg

SEQ ID NO: 97892 - DNA, 60 bp, Artificial
  Synthetic oligonucleotide
gtactagtgtcattagtgctggaacgggtgttgctggaggagctgctactggacttgctg

SEQ ID NO: 97893 - DNA, 60 bp, Artificial
  Synthetic oligonucleotide
gagcgggagcgtcagtatgggatcagagctgagaccgttgatatcggaggtacaacagga

SEQ ID NO: 97894 - DNA, 60 bp, Artificial
  Synthetic oligonucleotide
tgcgtgagctaacaagaccaaataattatagtgttattgaaggaagtgatatagaattac

SEQ ID NO: 97895 - DNA, 60 bp, Artificial
  Synthetic oligonucleotide
cgctgttttccactcctcttgagaagaatcctccaaatccgtctctagcagtctcatcca

SEQ ID NO: 97896 - DNA, 60 bp, Artificial
  Synthetic oligonucleotide
agaaacgctgttttccactcctcttgagaagaatcctccaaatccgtctctagcagtctc

SEQ ID NO: 97897 - DNA, 50 bp, Artificial
  Synthetic oligonucleotide
ggaggagctgctactggacttgctgctagtgatattggattgggtgctgg

SEQ ID NO: 97898 - DNA, 60 bp, Artificial
  Synthetic oligonucleotide
ctgaagaacacgacaaagcatatgcaaatgccaaatcatcaatagatgtaataaacgcag

SEQ ID NO: 97899 - DNA, 60 bp, Artificial
  Synthetic oligonucleotide
aatttacattctttgattggaaaaactggattacaaattaaaacagctattgaacaacgg

SEQ ID NO: 97900 - DNA, 60 bp, Artificial
  Synthetic oligonucleotide
tccatacggtaatccgaccacggaccctcccactttagcgaactgaagccaccgtccgtt

SEQ ID NO: 97901 - DNA, 60 bp, Artificial
  Synthetic oligonucleotide
tagcgaactgaagccaccgtccgttggaaatgaaatagaggatgatatcgtcccactgat

SEQ ID NO: 97902 - DNA, 60 bp, Artificial
  Synthetic oligonucleotide
cacttggaggagaccatacacatattgtattacactttggtaatttacgctcaagcacat

SEQ ID NO: 97903 - DNA, 60 bp, Artificial
  Synthetic oligonucleotide
agtatttatcttctaatggttgataaccagccataaatgttggattacaatatggttgtg

SEQ ID NO: 97904 - DNA, 51 bp, Artificial
  Synthetic oligonucleotide
tgcacgtaagtatcgtaagtctttatgagttaaccattgtcttgtagatat

SEQ ID NO: 97905 - DNA, 60 bp, Artificial
  Synthetic oligonucleotide
ctgtaaagcttgatatccatacggtaatccgaccacggaccctcccactttagcgaactg

SEQ ID NO: 97906 - DNA, 60 bp, Artificial
  Synthetic oligonucleotide
ccacctgttaacattttcaaagtgtctgtatatgcatcctcatagtttggttcattccac

SEQ ID NO: 97907 - DNA, 60 bp, Artificial
  Synthetic oligonucleotide
cctcatagtttggttcattccacaaaagcacacgtttagatgttgcttcttgtaaactga

SEQ ID NO: 97908 - DNA, 60 bp, Artificial
  Synthetic oligonucleotide
tgtaaactgaaattattagtcttattcattatacctaattgtccatagttcattagataa

SEQ ID NO: 97909 - DNA, 60 bp, Artificial
  Synthetic oligonucleotide
tccattgatctgttcgcatacgttttatattatgttgcatgcttaccagctttgtacacc

SEQ ID NO: 97910 - DNA, 60 bp, Artificial
  Synthetic oligonucleotide
cagctttgtacacccctgatgcttttgatgatcctttgtacacccctgatgctctcgatg

SEQ ID NO: 97911 - DNA, 60 bp, Artificial
  Synthetic oligonucleotide
ggatatggcatgttatgtcacagaaatttggtacttcaaatggatgattcatgagtgcta

SEQ ID NO: 97912 - DNA, 61 bp, Artificial
  Synthetic oligonucleotide
cgtctgcattctgaataatccaatatataacataatggttcgataatgcaatgatcacacc

SEQ ID NO: 97913 - DNA, 60 bp, Artificial
  Synthetic oligonucleotide
tagcagtctcatccaaaaacccggcatcgtcacgcattcgttgccataccgttcccatag

SEQ ID NO: 97914 - DNA, 60 bp, Artificial
  Synthetic oligonucleotide
aaaacccggcatcgtcacgcattcgttgccataccgttcccatagtgtcatccaaagctg

SEQ ID NO: 97915 - DNA, 60 bp, Artificial
  Synthetic oligonucleotide
taccgcgcacgcctggtagagatattccagaacttcaagaacacagtgatcatagtattg

SEQ ID NO: 97916 - DNA, 60 bp, Artificial
  Synthetic oligonucleotide
gagtggaagactcattaccctctacttctcacagaaataacgatcaaattcctgattcaa

SEQ ID NO: 97917 - DNA, 60 bp, Artificial
  Synthetic oligonucleotide
gagcaagtagtaagaaattaccaggaacagcaaagcctcagagtctcgagggaactggag

SEQ ID NO: 97918 - DNA, 60 bp, Artificial
  Synthetic oligonucleotide
tgattcaattgatgtggatatggcttctcactcaggtgtaccagatagtgttggcaatcc

SEQ ID NO: 97919 - DNA, 60 bp, Artificial
  Synthetic oligonucleotide
acatcattggctactttgaatcaaaataagaatggagtatattgtattggtttgaataaa

SEQ ID NO: 97920 - DNA, 60 bp, Artificial
  Synthetic oligonucleotide
aaaatattgaatcaaaaaattgctgctgtagacaatgttaatccagctcatgttatatat

SEQ ID NO: 97921 - DNA, 60 bp, Artificial
  Synthetic oligonucleotide
ggctgaagggtatgaaggaatgttggaagatctatatggtgtgaataataatgtagcatc

SEQ ID NO: 97922 - DNA, 60 bp, Artificial
  Synthetic oligonucleotide
gaagttgttgctgcgggcccaatatctcaccatcggaagaaacgctgttttccactcctc

SEQ ID NO: 97923 - DNA, 60 bp, Artificial
  Synthetic oligonucleotide
acgatgtcacgttgaagttgttgctgcgggcccaatatctcaccatcggaagaaacgctg

SEQ ID NO: 97924 - DNA, 60 bp, Artificial
  Synthetic oligonucleotide
gcatgacgcacagtgtaaatccaggaggagagaattggatttgggagagccaactggaag

SEQ ID NO: 97925 - DNA, 55 bp, Artificial
  Synthetic oligonucleotide
caactggaagtgagagaggaatggccaacaattacgaacaatcaaggaacgaaga

SEQ ID NO: 97926 - DNA, 60 bp, Artificial
  Synthetic oligonucleotide
gataataacgggtcacaggcaagcacaacccaaatgttacgagacgacatcgaaagatgc

SEQ ID NO: 97927 - DNA, 60 bp, Artificial
  Synthetic oligonucleotide
ggggccttaaaatccaccaccacatgatccacagagtatataagaggtataaatgaaggg

SEQ ID NO: 97928 - DNA, 60 bp, Artificial
  Synthetic oligonucleotide
gtataaatgaagggagagtcagtagtatggaatcagtctgcagtgaacattcgccgtgtg

SEQ ID NO: 97929 - DNA, 60 bp, Artificial
  Synthetic oligonucleotide
gaagaaccgatgattacaccagtaaacgtaggaacatggaaattattattggaaggaaaa

SEQ ID NO: 97930 - DNA, 60 bp, Artificial
  Synthetic oligonucleotide
gatcaccacagctacaccaataacaaacaacgtgcatatgaacgaaacctcacaaatact

SEQ ID NO: 97931 - DNA, 60 bp, Artificial
  Synthetic oligonucleotide
gcggattccacttggatcaactaccaggagcaggatcagtactatttgaagaaccgatga

SEQ ID NO: 97932 - DNA, 60 bp, Artificial
  Synthetic oligonucleotide
cccggagaagacaactcaaagctacaaaacattatacaatggatcgaatatatgttcaaa

SEQ ID NO: 97933 - DNA, 60 bp, Artificial
  Synthetic oligonucleotide
agaaagagacaacagcggattccacttggatcaactaccaggagcaggatcagtactatt

SEQ ID NO: 97934 - DNA, 60 bp, Artificial
  Synthetic oligonucleotide
ctattgcatccgttacggtatcgaaacagtcaatatctatggaaataaaatccaacaaca

SEQ ID NO: 97935 - DNA, 60 bp, Artificial
  Synthetic oligonucleotide
ctgaaataatggtggagatattaaatgaagaatatatcaaaaacttcacacccggagaag

SEQ ID NO: 97936 - DNA, 60 bp, Artificial
  Synthetic oligonucleotide
gcacaagagtcagaaccagaatcaccaagtttcttagtgcaacaagcgcaggaaatgcag

SEQ ID NO: 97937 - DNA, 60 bp, Artificial
  Synthetic oligonucleotide
gaaagcattaaacgctgtagcactaggagtaacctggatcaaaggagaaatcacattcga

SEQ ID NO: 97938 - DNA, 60 bp, Artificial
  Synthetic oligonucleotide
cgctgtagcactaggagtaacctggatcaaaggagaaatcacattcgaagtatattcagt

SEQ ID NO: 97939 - DNA, 60 bp, Artificial
  Synthetic oligonucleotide
aaaggaaccaatatacaagggaaatcaacttccagcaattaacaaataactatatgtgga

SEQ ID NO: 97940 - DNA, 60 bp, Artificial
  Synthetic oligonucleotide
gaacttgagacaaacggaattcacatatgaaactacaacatatgccacgtcaggagcaac

SEQ ID NO: 97941 - DNA, 60 bp, Artificial
  Synthetic oligonucleotide
gaacagaacatcatatccaagaatgcacattgcacaaccacaagttccagacgaaacagg

SEQ ID NO: 97942 - DNA, 60 bp, Artificial
  Synthetic oligonucleotide
cagacgaaacaggattcatgaaattcagatatcaagtacgaatgagcacaaaactacatt

SEQ ID NO: 97943 - DNA, 60 bp, Artificial
  Synthetic oligonucleotide
aaactacatttaaacttccacatgtatccagattacgccacaaataacaaccttgaatat

SEQ ID NO: 97944 - DNA, 60 bp, Artificial
  Synthetic oligonucleotide
cttccacatgtatccagattacgccacaaataacaaccttgaatatatgcatagacaaac

SEQ ID NO: 97945 - DNA, 60 bp, Artificial
  Synthetic oligonucleotide
cgaaagatgcggtattgaaagcattgctgacagcgcaagcgaagataacggagatggagt

SEQ ID NO: 97946 - DNA, 60 bp, Artificial
  Synthetic oligonucleotide
aaagaaaacgagaagcagacggaggatcaggacaaggagtcggaaaaggaaacagcaacg

SEQ ID NO: 97947 - DNA, 54 bp, Artificial
  Synthetic oligonucleotide
aacagcaacgcagtaaaagaaggatatggaccaaacattacggaaatggtccca

SEQ ID NO: 97948 - DNA, 60 bp, Artificial
  Synthetic oligonucleotide
ggaaatgcagaagcgactatcactttttccaaagttaaatttctcaggaactacattctc

SEQ ID NO: 97949 - DNA, 60 bp, Artificial
  Synthetic oligonucleotide
tgtattgttaacgcacatggcaatgaacaggcaacaggcagtaagaccagaaagatacga

SEQ ID NO: 97950 - DNA, 54 bp, Artificial
  Synthetic oligonucleotide
gcatctccaccgtggatatacaaggcaactgtattgttaacgcacatggcaatg

SEQ ID NO: 97951 - DNA, 60 bp, Artificial
  Synthetic oligonucleotide
gagatggagttgatgggacgtgcatctccaccgtggatatacaaggcaactgtattgtta

SEQ ID NO: 97952 - DNA, 60 bp, Artificial
  Synthetic oligonucleotide
tgaaagcattgctgacagcgcaagcgaagataacggagatggagttgatgggacgtgcat

SEQ ID NO: 97953 - DNA, 60 bp, Artificial
  Synthetic oligonucleotide
gggaccaaacagacattggaaataatcaaagtatcaatatcatgaaagcattaaacgctg

SEQ ID NO: 97954 - DNA, 60 bp, Artificial
  Synthetic oligonucleotide
atcgccacaacaagggccaagcaagcgccgagctttatcacctttgatcacggagaccac

SEQ ID NO: 97955 - DNA, 60 bp, Artificial
  Synthetic oligonucleotide
gaggactggagatatatcgccacaacaagggccaagcaagcgccgagctttatcaccttt

SEQ ID NO: 97956 - DNA, 60 bp, Artificial
  Synthetic oligonucleotide
catggcaatgaacaggcaacaggcagtaagaccagaaagatacgagcaacaaccacgcca

SEQ ID NO: 97957 - DNA, 60 bp, Artificial
  Synthetic oligonucleotide
gaaaacgagaagcagacggaggatcaggacaaggagtcggaaaaggaaacagcaacgcag

SEQ ID NO: 97958 - DNA, 60 bp, Artificial
  Synthetic oligonucleotide
cgggtcacaggcaagcacaacccaaatgttacgagacgacatcgaaagatgcggtattga

SEQ ID NO: 97959 - DNA, 60 bp, Artificial
  Synthetic oligonucleotide
atttatcacgtggttaaaacacaaaaatatctagacttcaattatgtaaccaatcaaaac

SEQ ID NO: 97960 - DNA, 60 bp, Artificial
  Synthetic oligonucleotide
gtcagaaccagaatcaccaagtttcttagtgcaacaagcgcaggaaatgcagaagcgact

SEQ ID NO: 97961 - DNA, 60 bp, Artificial
  Synthetic oligonucleotide
agcaatcagattaagtgaggaagcaaaacaagaagcagaggaatggcagacagcactaca

SEQ ID NO: 97962 - DNA, 60 bp, Artificial
  Synthetic oligonucleotide
ctcatcagtcggccaccaggtcttgtagagccaatacatatggcaatcgtgttcgtgaaa

SEQ ID NO: 97963 - DNA, 60 bp, Artificial
  Synthetic oligonucleotide
cagaggaatggcagacagcactacaatggaacacgatggaagaggaacaaaaagaaaacg

SEQ ID NO: 97964 - DNA, 60 bp, Artificial
  Synthetic oligonucleotide
catggacttatattaaccttccaattggaacacacggacgtggaaatttagaaagtattt

SEQ ID NO: 97965 - DNA, 60 bp, Artificial
  Synthetic oligonucleotide
agaaacaacgtaatacgttttaatttttttgagtgtatttgaagtgacgtcagtaaacct

SEQ ID NO: 97966 - DNA, 60 bp, Artificial
  Synthetic oligonucleotide
cgggatccccgtgtgagccgataggctagggtggcgaagcttaggtttactgacgtcact

SEQ ID NO: 97967 - DNA, 60 bp, Artificial
  Synthetic oligonucleotide
ccccgtgtgtcccctgttaatgtccacctcaaagtataagctaaatttccacctccgatg

SEQ ID NO: 97968 - DNA, 60 bp, Artificial
  Synthetic oligonucleotide
cattagttcgggatccccgtgtgtcccctgttaatgtccacctcaaagtataagctaaat

SEQ ID NO: 97969 - DNA, 60 bp, Artificial
  Synthetic oligonucleotide
ccgatgatccgaaatcccctgttaatgtccacctcaaagtataagctaaatttccacctc

SEQ ID NO: 97970 - DNA, 60 bp, Artificial
  Synthetic oligonucleotide
aaactccacttgttaaactccacctcagaacacaagctaaatttccacctccgatgatcc

SEQ ID NO: 97971 - DNA, 60 bp, Artificial
  Synthetic oligonucleotide
cagaaatatactgttaaactccacttgttaaactccacctcagaacacaagctaaatttc

SEQ ID NO: 97972 - DNA, 60 bp, Artificial
  Synthetic oligonucleotide
tagacaaacaatcttactaccacaagtagcagaaactaatggaattgtagcatgtatgcc

SEQ ID NO: 97973 - DNA, 60 bp, Artificial
  Synthetic oligonucleotide
ccttgaatatatgcatagacaaacaatcttactaccacaagtagcagaaactaatggaat

SEQ ID NO: 97974 - DNA, 60 bp, Artificial
  Synthetic oligonucleotide
gtgcctcctggctataagtacctgggaccagggaacagccttgaccaaggagaaccaacc

SEQ ID NO: 97975 - DNA, 60 bp, Artificial
  Synthetic oligonucleotide
tacttcggctacagcaccccctgggggtattttgactttaacagattccactgccacttc

SEQ ID NO: 97976 - DNA, 60 bp, Artificial
  Synthetic oligonucleotide
acctacttcggctacagcaccccctgggggtattttgactttaacagattccactgccac

SEQ ID NO: 97977 - DNA, 60 bp, Artificial
  Synthetic oligonucleotide
ctgcaggcggtggcgcaccaatggcagacaataacgaaggcgccgacggagtgggtagtt

SEQ ID NO: 97978 - DNA, 60 bp, Artificial
  Synthetic oligonucleotide
tacaatggcttcaggcggtggcgcaccaatggcagacaataacgaaggcgccgacggagt

SEQ ID NO: 97979 - DNA, 60 bp, Artificial
  Synthetic oligonucleotide
acagtggctgcaggcggtggcgcaccaatggcagacaataacgaaggtgccgacggagtg

SEQ ID NO: 97980 - DNA, 60 bp, Artificial
  Synthetic oligonucleotide
acaagtttgggatctaatacaatggcttcaggcggtggcgcaccaatggcagacaataac

SEQ ID NO: 97981 - DNA, 60 bp, Artificial
  Synthetic oligonucleotide
aatacaatggcttcaggcggtggcgcaccaatggcagacaataacgagggtgccgatgga

SEQ ID NO: 97982 - DNA, 60 bp, Artificial
  Synthetic oligonucleotide
tgacaatccgtacctgcggtataaccacgccgacgccgagtttcaggagcgtctgcaaga

SEQ ID NO: 97983 - DNA, 60 bp, Artificial
  Synthetic oligonucleotide
gattcaggaggaccaggcctcgtacatctccttcaacgccgcctccaactcgcggtccca

SEQ ID NO: 97984 - DNA, 60 bp, Artificial
  Synthetic oligonucleotide
gatccaggaggaccaggcgtcctacatctccttcaacgccgcctccaactcgcggtcaca

SEQ ID NO: 97985 - DNA, 60 bp, Artificial
  Synthetic oligonucleotide
tccaggaggaccaggcctcgtacatctccttcaacgccgcctccaactcgcggtcccaga

SEQ ID NO: 97986 - DNA, 60 bp, Artificial
  Synthetic oligonucleotide
aggaccaggcgtcctacatctccttcaacgccgcctccaactcgcggtcacaaatcaagg

SEQ ID NO: 97987 - DNA, 60 bp, Artificial
  Synthetic oligonucleotide
aggaccaggcctcgtacatctccttcaacgccgcctccaactcgcggtcccagatcaagg

SEQ ID NO: 97988 - DNA, 60 bp, Artificial
  Synthetic oligonucleotide
atctatttctttatacgaaaacggggagagcgtgcaatatacattagaggagaaagtggg

SEQ ID NO: 97989 - DNA, 60 bp, Artificial
  Synthetic oligonucleotide
catctatttctttatacgaaaacggggagagcgtgcaatatacattagaggagaaagtgg

SEQ ID NO: 97990 - DNA, 60 bp, Artificial
  Synthetic oligonucleotide
atggcagaggaattggaaaaaatgggcaatcaattctttggatacgttactgggcaaagt

SEQ ID NO: 97991 - DNA, 60 bp, Artificial
  Synthetic oligonucleotide
cttgaccaaggagaaccaaccaatccatctgacgccgctgccaaagagcacgacgaggcc

SEQ ID NO: 97992 - DNA, 60 bp, Artificial
  Synthetic oligonucleotide
cttaaccaaggagaaccaaccaatccatctgacgctgctgctaaagagcacgacgaggcc

SEQ ID NO: 97993 - DNA, 60 bp, Artificial
  Synthetic oligonucleotide
ttctattaaaaccacacttaaagagctggtgcataaaagagtaacctcaccagaagactg

SEQ ID NO: 97994 - DNA, 60 bp, Artificial
  Synthetic oligonucleotide
ctctattaaaaccacacttaaagagctggtgcataaaagagtaacctcaccagaagactg

SEQ ID NO: 97995 - DNA, 60 bp, Artificial
  Synthetic oligonucleotide
ggtgccgacggagtgggcaattcctcgggaaattggcattgcgattcccaatggctggac

SEQ ID NO: 97996 - DNA, 60 bp, Artificial
  Synthetic oligonucleotide
gtgccgatggagtgggtaattcctcaggaaattggcattgcgattcccaatggctgggcg

SEQ ID NO: 97997 - DNA, 51 bp, Artificial
  Synthetic oligonucleotide
gccttgaccaaggagaaccaaccaatccatctgacgccgctgccaaagagc

SEQ ID NO: 97998 - DNA, 60 bp, Artificial
  Synthetic oligonucleotide
gccttgaccaaggagaaccaaccaatccatctgacgccgctgccaaagagcacgacgagg

SEQ ID NO: 97999 - DNA, 60 bp, Artificial
  Synthetic oligonucleotide
ggtggaagaagctggtaactttggacagcaagtaaaccagtttaaagccatttgctctgg

SEQ ID NO: 98000 - DNA, 60 bp, Artificial
  Synthetic oligonucleotide
cctgggaccaggaaacagccttgaccaaggagaaccaaccaatccatctgacgccgctgc

SEQ ID NO: 98001 - DNA, 60 bp, Artificial
  Synthetic oligonucleotide
acaaggaggcaaaagaaatactgttttatttcatggaccagccagtacaggcaaatccat

SEQ ID NO: 98002 - DNA, 60 bp, Artificial
  Synthetic oligonucleotide
gacaaggaggcaaaagaaatactgttttatttcatggaccagccagtacaggcaaatcca

SEQ ID NO: 98003 - DNA, 60 bp, Artificial
  Synthetic oligonucleotide
tcaggtgatgtgtgttatccaataggatgaaagcgcgcgcatgagttctcgcgagacttc

SEQ ID NO: 98004 - DNA, 60 bp, Artificial
  Synthetic oligonucleotide
gggtataaaaggggtgagtgaacgagcccgccgccattctctgctctggactgctagagg

SEQ ID NO: 98005 - DNA, 60 bp, Artificial
  Synthetic oligonucleotide
ggggtataaaggggtgagtgaacgagcccgccgccattctctgctctgaactgctagagg

SEQ ID NO: 98006 - DNA, 60 bp, Artificial
  Synthetic oligonucleotide
gatgtgtgttatccaataggatgaaagcgcgcgaatgagatctcgcgagacttccggggt

SEQ ID NO: 98007 - DNA, 60 bp, Artificial
  Synthetic oligonucleotide
gcgagacttccggggtataaaaggggtgagtgaacgagcccgccgccattctctgctctg

SEQ ID NO: 98008 - DNA, 60 bp, Artificial
  Synthetic oligonucleotide
ttcaatcgattccattgccacttctccccccgagactggcaaagactcatcaacaaccac

SEQ ID NO: 98009 - DNA, 60 bp, Artificial
  Synthetic oligonucleotide
ctacgggcctatcaactttgacggcaccacaggttcgggtgctaatgcagcctatgcagg

SEQ ID NO: 98010 - DNA, 60 bp, Artificial
  Synthetic oligonucleotide
cgggaatcatctctacgggcctatcaactttgacggcaccacaggttcgggtgctaatgc

SEQ ID NO: 98011 - DNA, 60 bp, Artificial
  Synthetic oligonucleotide
ggcacctgcaccctatgaatgtatccagaatattaacagcagtgataataccaagaatgc

SEQ ID NO: 98012 - DNA, 60 bp, Artificial
  Synthetic oligonucleotide
cagagctggtccaaatgatttgaatgaattctacaagaattgggcacctgcaccctatga

SEQ ID NO: 98013 - DNA, 60 bp, Artificial
  Synthetic oligonucleotide
cccaatgatgtatttatgttaccacaatatgcttattgtacacttcaaggaaattcgggg

SEQ ID NO: 98014 - DNA, 60 bp, Artificial
  Synthetic oligonucleotide
ggggactacaaggaagacaagcatgggatgctccaggatttgttcaagctagtacctatg

SEQ ID NO: 98015 - DNA, 57 bp, Artificial
  Synthetic oligonucleotide
ttaataatttgggtacttatgttgaatctagacctattggaactcgttatatttcta

SEQ ID NO: 98016 - DNA, 60 bp, Artificial
  Synthetic oligonucleotide
agaattgttgtcacgtggttgtttacatgcttgctaaaacacgcccaccaaaaaacccgt

SEQ ID NO: 98017 - DNA, 60 bp, Artificial
  Synthetic oligonucleotide
taactgtccagggaaactgcttatctggtgggaggagggcaagatgacaaacaaaatggt

SEQ ID NO: 98018 - DNA, 60 bp, Artificial
  Synthetic oligonucleotide
ggctgtatggtccagctactaccggcaaaaccatcatcgctcaagctattgcacatgctg

SEQ ID NO: 98019 - DNA, 60 bp, Artificial
  Synthetic oligonucleotide
gtagacatcaaaggcaaacccgctgaaatgtgtcctcaaacaccctgtattattactagc

SEQ ID NO: 98020 - DNA, 60 bp, Artificial
  Synthetic oligonucleotide
gggaaactgcttatctggtgggaggagggcaagatgacaaacaaaatggtggagacggct

SEQ ID NO: 98021 - DNA, 60 bp, Artificial
  Synthetic oligonucleotide
gagcaccaagaacccctagaggaacgcatgtttatgttcagacttaatactaaactgcca

SEQ ID NO: 98022 - DNA, 60 bp, Artificial
  Synthetic oligonucleotide
actgccatcgacctttggcaagatcacagaagaggaagtcaaacagtttattacctgggg

SEQ ID NO: 98023 - DNA, 60 bp, Artificial
  Synthetic oligonucleotide
cttcggatgagccgccaaaagagaaggtcgcgcgtattgatgactctctaaccaggtatg

SEQ ID NO: 98024 - DNA, 60 bp, Artificial
  Synthetic oligonucleotide
ttcagagtgcctaccacaggagagtataaaaggccagcccccgaggcgaaagctcattct

SEQ ID NO: 98025 - DNA, 60 bp, Artificial
  Synthetic oligonucleotide
aagagatcggagctagcgactgttcctaagcaaccagagaatccggcgggagacggaccg

SEQ ID NO: 98026 - DNA, 60 bp, Artificial
  Synthetic oligonucleotide
cgactggttggtgaaacatggaattactacagaacgagaattctgccacgccaaccgccc

SEQ ID NO: 98027 - DNA, 60 bp, Artificial
  Synthetic oligonucleotide
attctgccacgccaaccgccctttgtacctgtctatgctggcttctacttcgggtgctgg

SEQ ID NO: 98028 - DNA, 60 bp, Artificial
  Synthetic oligonucleotide
acgaatatcgtcgcttggaagccattcgtgcggaatctcatcaagagatcggagctagcg

SEQ ID NO: 98029 - DNA, 60 bp, Artificial
  Synthetic oligonucleotide
gtgctgtgggcatttacgaatatcgtcgcttggaagccattcgtgcggaatctcatcaag

SEQ ID NO: 98030 - DNA, 60 bp, Artificial
  Synthetic oligonucleotide
cgggagacaatccctacataaaatataatcacgcggacgaacagttccagaaagacctac

SEQ ID NO: 98031 - DNA, 60 bp, Artificial
  Synthetic oligonucleotide
tcttatttgaagaactactttttcagaaagactttagctcctcccaattataccgaggaa

SEQ ID NO: 98032 - DNA, 60 bp, Artificial
  Synthetic oligonucleotide
caatttgagacaatgccaggtatggtgtggtctaatagagacatttacttacaggggcct

SEQ ID NO: 98033 - DNA, 60 bp, Artificial
  Synthetic oligonucleotide
tcgctatgatccagaactagcagctgctctcttctacggctggacctgcaagaactttgg

SEQ ID NO: 98034 - DNA, 60 bp, Artificial
  Synthetic oligonucleotide
caggggcctatttgggctaaaattccaaatacagatggacattttcatccttctcccaga

SEQ ID NO: 98035 - DNA, 60 bp, Artificial
  Synthetic oligonucleotide
aaaagttcagctactacttcatctccagctgctactgcagtaaacagaacaattgaagac

SEQ ID NO: 98036 - DNA, 60 bp, Artificial
  Synthetic oligonucleotide
tgcagtaaacagaacaattgaagacgaaatacagggtaccaataattttggtaatgctag

SEQ ID NO: 98037 - DNA, 60 bp, Artificial
  Synthetic oligonucleotide
gtcgatacctttggcctaattaatccagaagaagtcatcagtacccattatgttaaaagc

SEQ ID NO: 98038 - DNA, 60 bp, Artificial
  Synthetic oligonucleotide
gtgaaattcggagattctttggaaaggaactacaatggtttgcccaggttgaatggtgtc

SEQ ID NO: 98039 - DNA, 60 bp, Artificial
  Synthetic oligonucleotide
tcctccaactaccttcaatccaatgccacagactagtttcattactgaatacagtacagg

SEQ ID NO: 98040 - DNA, 60 bp, Artificial
  Synthetic oligonucleotide
ccacgccaaccgccctttgtacctgtctatgctggcttctacttcgggtgctgggcagat

SEQ ID NO: 98041 - DNA, 60 bp, Artificial
  Synthetic oligonucleotide
cgggtgctgggcagattaaaagagcgctggaccaggcgaaacacatgatgaccagcacca

SEQ ID NO: 98042 - DNA, 60 bp, Artificial
  Synthetic oligonucleotide
accagcaccatgtcagcagaggattacctgacaacagaagaggatgtgatcgaaccacct

SEQ ID NO: 98043 - DNA, 60 bp, Artificial
  Synthetic oligonucleotide
acctggcagcaggaggggctttgtggtgcctgggtatcggtatcttgggcctggtaatag

SEQ ID NO: 98044 - DNA, 60 bp, Artificial
  Synthetic oligonucleotide
cttgggcctggtaatagcttggaccgtggaaagcccgttaacaaagcagacgaggctgct

SEQ ID NO: 98045 - DNA, 60 bp, Artificial
  Synthetic oligonucleotide
aaccggtcaatcctaaacctgtaaaacacattagcgaagctcactcgcaacctggcagca

SEQ ID NO: 98046 - DNA, 60 bp, Artificial
  Synthetic oligonucleotide
accagctccacctaaaggcggagaagaagaagctacatcgtcacaatctggagggagccc

SEQ ID NO: 98047 - DNA, 60 bp, Artificial
  Synthetic oligonucleotide
gacggaccggcacctcgagtgactgcaggaacccgccattttatggaaaccatcgactgg

SEQ ID NO: 98048 - DNA, 60 bp, Artificial
  Synthetic oligonucleotide
aaagacctacaaggtgataccagtctagccggcaacgcggctaacgctctatttcaaggc

SEQ ID NO: 98049 - DNA, 60 bp, Artificial
  Synthetic oligonucleotide
tctggagggagcccagcaggttccgatactagcggcacatctgtcatggctacaggagga

SEQ ID NO: 98050 - DNA, 60 bp, Artificial
  Synthetic oligonucleotide
acaaagtcaaccagaacttgggtgctccccacttacgggaatcatctctacgggcctatc

SEQ ID NO: 98051 - DNA, 60 bp, Artificial
  Synthetic oligonucleotide
ggagttccgccggatatgcaaatgagcaatcgcgcaaagcattttgggtagtcaccatga

SEQ ID NO: 98052 - DNA, 60 bp, Artificial
  Synthetic oligonucleotide
gatatcagccagagttgaaagaagaagatgactggcctgaggaatatttaaccagtgaag

SEQ ID NO: 98053 - DNA, 60 bp, Artificial
  Synthetic oligonucleotide
ggcgttttacgaggttgtgtttcgtttgccaagagacaataacaacttgttggatgaaga

SEQ ID NO: 98054 - DNA, 59 bp, Artificial
  Synthetic oligonucleotide
aaaacccgttgagcagggcactcgccccacccctagtgatcgcgcgcgctctctcttgg

SEQ ID NO: 98055 - DNA, 60 bp, Artificial
  Synthetic oligonucleotide
cgcgatcactaggggtggggcgagtgccctgctcaacgggttttttggtgggcggagcaa

SEQ ID NO: 98056 - DNA, 60 bp, Artificial
  Synthetic oligonucleotide
accagtgaagatgccagctttatcggactagcgtatgctgtgctaagtgaaattcggaga

SEQ ID NO: 98057 - DNA, 60 bp, Artificial
  Synthetic oligonucleotide
cctgaggaatatttaaccagtgaagatgccagctttatcggactagcgtatgctgtgcta

SEQ ID NO: 98058 - DNA, 60 bp, Artificial
  Synthetic oligonucleotide
tctgctagtactccaacaaaaaaaaataaaccttctgaacatagtggaagtgcattacca

SEQ ID NO: 98059 - DNA, 60 bp, Artificial
  Synthetic oligonucleotide
acaactaaatcggctgcaacatgctgcctccttttatccttgattttggtgcttgcccca

SEQ ID NO: 98060 - DNA, 60 bp, Artificial
  Synthetic oligonucleotide
gaacggccaaattgggagcggatgaacgagggacagcgcagatatgccatggaacaatat

SEQ ID NO: 98061 - DNA, 59 bp, Artificial
  Synthetic oligonucleotide
ggaacaatataatttagcattagtacgacgaggacaatattttgaaccacctattgctg

SEQ ID NO: 98062 - DNA, 60 bp, Artificial
  Synthetic oligonucleotide
atatgccagttaattataataaaccacctccttatgaacggccaaattgggagcggatga

SEQ ID NO: 98063 - DNA, 60 bp, Artificial
  Synthetic oligonucleotide
cgtgctgatacagaggcaatagggcagtttattcaagaagctacacattcacataaccct

SEQ ID NO: 98064 - DNA, 60 bp, Artificial
  Synthetic oligonucleotide
acattcacataaccctatatcacagacacaaggtgtaattggtgccgttggtttagcagg

SEQ ID NO: 98065 - DNA, 60 bp, Artificial
  Synthetic oligonucleotide
ccagtctcgtcgtgtgaacgtttcgatggctggaggctttcgaagcaatcgtctaatgtc

SEQ ID NO: 98066 - DNA, 60 bp, Artificial
  Synthetic oligonucleotide
gattttaaagaacgttgctcgtcgccctgacgtacaaaaatactttgtgatattttccca

SEQ ID NO: 98067 - DNA, 60 bp, Artificial
  Synthetic oligonucleotide
ctcttccgaaagattcagctctttgctccagtcgtctagccagtgcattagctcgttcag

SEQ ID NO: 98068 - DNA, 60 bp, Artificial
  Synthetic oligonucleotide
agtgacttcagcttgtccttgaaccggtcctccagagggctctcctccaacagcttccac

SEQ ID NO: 98069 - DNA, 60 bp, Artificial
  Synthetic oligonucleotide
tcttctttcgcttcagggaagttcttgaactggcacctgcacgtcctgcttgtgtagggg

SEQ ID NO: 98070 - DNA, 60 bp, Artificial
  Synthetic oligonucleotide
ctacctgacgacataggtacaactacagctccggctaaacgatgggcattgacaacatct

SEQ ID NO: 98071 - DNA, 60 bp, Artificial
  Synthetic oligonucleotide
acaacaatttgatctcgtcttttacggcgtcggttagctctaggacgcgctggaatatcc

SEQ ID NO: 98072 - DNA, 60 bp, Artificial
  Synthetic oligonucleotide
actctgagtaacacaaatagcgcaccaattatttttatcctgtattatatctaaaacgtc

SEQ ID NO: 98073 - DNA, 58 bp, Artificial
  Synthetic oligonucleotide
cattagctcgttcagatgattcgcaggcatatacatcgctaatatagtatccactgtc

SEQ ID NO: 98074 - DNA, 60 bp, Artificial
  Synthetic oligonucleotide
gactatgatcaaaagcaaactgaggtactgtatctggatgctccattaacccaacataaa

SEQ ID NO: 98075 - DNA, 56 bp, Artificial
  Synthetic oligonucleotide
ggtccactgtgaaattcaagcggatcattgcagttctccacgcctgagtccggtcc

SEQ ID NO: 98076 - DNA, 60 bp, Artificial
  Synthetic oligonucleotide
ctctaggtcatttacaagtaggaggtgttgatttaaagacaggagaagcactttctaata

SEQ ID NO: 98077 - DNA, 60 bp, Artificial
  Synthetic oligonucleotide
catataccactgatctgcactatcatctgctcgaggatttgccattctataccagcactg

SEQ ID NO: 98078 - DNA, 60 bp, Artificial
  Synthetic oligonucleotide
aatgtatggtacaactactcgtacaacaaatactccgactgtacctgcaatatcaacagg

SEQ ID NO: 98079 - DNA, 60 bp, Artificial
  Synthetic oligonucleotide
caaaataaatttactcgtattgcaaaaggtttaagaaacaatccccacttgtttggtagt

SEQ ID NO: 98080 - DNA, 53 bp, Artificial
  Synthetic oligonucleotide
tcagttaggatgcctagtacaggatttagtgcagttgaaggagccaattctag

SEQ ID NO: 98081 - DNA, 60 bp, Artificial
  Synthetic oligonucleotide
atgctcctttaactactagagcaagacattaccaagattctatttacttgccaggtgata

SEQ ID NO: 98082 - DNA, 60 bp, Artificial
  Synthetic oligonucleotide
tatactgtatatgcttcacaaactatagatagtgggtttcctcaatacaataaatattgt

SEQ ID NO: 98083 - DNA, 60 bp, Artificial
  Synthetic oligonucleotide
ccacgcctgagtccggtcctcctccatcttggcctgatattgtagagtcggataaagctg

SEQ ID NO: 98084 - DNA, 60 bp, Artificial
  Synthetic oligonucleotide
agttctccacgcctgagtccggtcctcctccatcttggcctgatattgtagagtcggata

SEQ ID NO: 98085 - DNA, 60 bp, Artificial
  Synthetic oligonucleotide
taaagcacagtatgcacagcattggaaattagttaatccacgtgcaggacaaaaacgaat

SEQ ID NO: 98086 - DNA, 60 bp, Artificial
  Synthetic oligonucleotide
ataaaaccttacggtgtaaagtgggataaggtatctaaagcacagtatgcacagcattgg

SEQ ID NO: 98087 - DNA, 60 bp, Artificial
  Synthetic oligonucleotide
cacgtggagtcgttagtatgtctacgtccggcttagagtcagtgcctttgttaccagtga

SEQ ID NO: 98088 - DNA, 60 bp, Artificial
  Synthetic oligonucleotide
gtgcaagctgtgggcttggggcaagcaccaagatcaaggttaaaaagggcgggaaacacg

SEQ ID NO: 98089 - DNA, 60 bp, Artificial
  Synthetic oligonucleotide
gctccattaacccaacataaatttgtggacacattatctgcttgattctacgccaaacat

SEQ ID NO: 98090 - DNA, 60 bp, Artificial
  Synthetic oligonucleotide
gaatagtgcaacagtggaatatggtggaatagagccaaaagtacatagtggatacggtgc

SEQ ID NO: 98091 - DNA, 64 bp, Artificial
  Synthetic oligonucleotide
gtgtctacaagattcctacaaaattgaacaagattttcacccatttgaaaggtaagtaactcag

SEQ ID NO: 98092 - DNA, 60 bp, Artificial
  Synthetic oligonucleotide
cgtcttttacggcgtcggttagctctaggacgcgctggaatatccccgacttctggtcca

SEQ ID NO: 98093 - DNA, 59 bp, Artificial
  Synthetic oligonucleotide
tacactagccctagtatctatagcatccttaacctcttttgaatctaatcttttacaag

SEQ ID NO: 98094 - DNA, 60 bp, Artificial
  Synthetic oligonucleotide
acctggaaatacaatacaagacgcaaaaactggaagtgattttattgcacaaggacacga

SEQ ID NO: 98095 - DNA, 59 bp, Artificial
  Synthetic oligonucleotide
gtaacatatggacggtaacctggttcatgaaattcagtttctgctacacactcatcata

SEQ ID NO: 98096 - DNA, 60 bp, Artificial
  Synthetic oligonucleotide
cgtccggcatcatctcccatagtgactccaaagcggctccaaaagtcggtgagacggcca

SEQ ID NO: 98097 - DNA, 60 bp, Artificial
  Synthetic oligonucleotide
tggaatatccccgacttctggtccactgtgaaattcaagcggatcattgcagttctccac

SEQ ID NO: 98098 - DNA, 60 bp, Artificial
  Synthetic oligonucleotide
gcattaccaggcacttcaggtaatacagatggttcaatgggttctagtacaatgttagat

SEQ ID NO: 98099 - DNA, 60 bp, Artificial
  Synthetic oligonucleotide
cctccaacagcttccaccatgtcgctggatgagacgctatctcgtccggcatcatctccc

SEQ ID NO: 98100 - DNA, 60 bp, Artificial
  Synthetic oligonucleotide
cgtcttctttactacaaacacaataatgactatattcgcgtccaaaggtccatccattca

SEQ ID NO: 98101 - DNA, 60 bp, Artificial
  Synthetic oligonucleotide
cgtcacattttaaccaatctgttaataactcattctgcaatgttactggtaaaacctctg

SEQ ID NO: 98102 - DNA, 60 bp, Artificial
  Synthetic oligonucleotide
cagtgccttgggaattacgtcgtttaccatttgcagagagagatagacttataaaacctt

SEQ ID NO: 98103 - DNA, 64 bp, Artificial
  Synthetic oligonucleotide
cccttggttcataattaggttcattccatataataatccttctattatggcaatcctgatatgc

SEQ ID NO: 98104 - DNA, 60 bp, Artificial
  Synthetic oligonucleotide
aaaactgcaccaatgttgcaaacatttgatcgcccatatttctatggtaaaccacaaaga

SEQ ID NO: 98105 - DNA, 60 bp, Artificial
  Synthetic oligonucleotide
ggaacaaggaggattgtacaatgaggcaggatatcaaggagcaacatgtggcgatcaaga

SEQ ID NO: 98106 - DNA, 60 bp, Artificial
  Synthetic oligonucleotide
cttagatgcgtttcaacagaaccatttacgtatccaagaggcaatgtatcagatattcca

SEQ ID NO: 98107 - DNA, 60 bp, Artificial
  Synthetic oligonucleotide
ggcaatgtatcagatattccattacgttcacaatttacagctgctactaaaactgcacca

SEQ ID NO: 98108 - DNA, 60 bp, Artificial
  Synthetic oligonucleotide
gagacccatatactgttagagttaagaatcgtatggatgcacatgtaaaacgcactccag

SEQ ID NO: 98109 - DNA, 60 bp, Artificial
  Synthetic oligonucleotide
ccatcagctcagaaggtcaaaggtcagtagaccagaaggtcacagaagtaggtcaaggtc

SEQ ID NO: 98110 - DNA, 60 bp, Artificial
  Synthetic oligonucleotide
caccaatcgcagttgcagggacatctggattagtcaagtcaagcccttcggatctgttca

SEQ ID NO: 98111 - DNA, 60 bp, Artificial
  Synthetic oligonucleotide
ccatcagctcagaaggtcaaaggtcagtagacagaaggtcatagaagtaggtcaaggtca

SEQ ID NO: 98112 - DNA, 59 bp, Artificial
  Synthetic oligonucleotide
tctattcaatgaatttccaggaccaagatatttatatccaggaacagttaatccacgtc

SEQ ID NO: 98113 - DNA, 60 bp, Artificial
  Synthetic oligonucleotide
gaccttgacctacttctgtgaccttctggtctactgacctttgaccttctgagctgatgg

SEQ ID NO: 98114 - DNA, 60 bp, Artificial
  Synthetic oligonucleotide
tccgaagggcttgacttgactaatccagatgtccctgcaactgcgattggtgtaagagca

SEQ ID NO: 98115 - DNA, 57 bp, Artificial
  Synthetic oligonucleotide
cttctatgaccttctgtctactgacctttgaccttctgagctgatggtctactgacc

SEQ ID NO: 98116 - DNA, 60 bp, Artificial
  Synthetic oligonucleotide
cgaacagactggtacgatgtcttcatctatttctttgtacgaaaacggggagagcgtgca

SEQ ID NO: 98117 - DNA, 60 bp, Artificial
  Synthetic oligonucleotide
gaacagcaagagcacaaaattagccgtagatcagatgctggcagtactaacggaagactt

SEQ ID NO: 98118 - DNA, 60 bp, Artificial
  Synthetic oligonucleotide
aagtcttccgttagaactgccagcatctgatctacggctaattttgtgctcttgctgttc

SEQ ID NO: 98119 - DNA, 60 bp, Artificial
  Synthetic oligonucleotide
cagatccgaagggcttgacttgactaatccagatgtccctgcaactgcgattggtgtaag

SEQ ID NO: 98120 - DNA, 60 bp, Artificial
  Synthetic oligonucleotide
gaaatagatgaagacatcgtaccagtctgttcgcttgaattcccagatgaatttgactgg

SEQ ID NO: 98121 - DNA, 60 bp, Artificial
  Synthetic oligonucleotide
agaaatagatgaagacatcgtaccagtctgttcgcttgaattcccagatgaatttgactg

SEQ ID NO: 98122 - DNA, 60 bp, Artificial
  Synthetic oligonucleotide
aattcaagcgaacagactggtacgatgtcttcatctatttctttgtacgaaaacggggag

SEQ ID NO: 98123 - DNA, 60 bp, Artificial
  Synthetic oligonucleotide
gcgaacagactggtacgatgtcttcatctatttctttgtacgaaaacggggagagcgtgc

SEQ ID NO: 98124 - DNA, 60 bp, Artificial
  Synthetic oligonucleotide
cgttactgggcaaagtattaaaccttccagcgcatatatcagcgatgtcattatcttacg

SEQ ID NO: 98125 - DNA, 51 bp, Artificial
  Synthetic oligonucleotide
aaaccttccagcgcatatatcagcgatgtcattatcttacgagatattcag

SEQ ID NO: 98126 - DNA, 60 bp, Artificial
  Synthetic oligonucleotide
tgggcaaagtgttaaaccttccagcgcatatatcagcgatgtcattatcttacgagatat

SEQ ID NO: 98127 - DNA, 52 bp, Artificial
  Synthetic oligonucleotide
ggacatcttgcgtgagtacggaagaagtagacgaaacggattgttcggattt

SEQ ID NO: 98128 - DNA, 60 bp, Artificial
  Synthetic oligonucleotide
cctctaacgtatattgcacgctctccccgttttcgtacaaagaaatagatgaagacatcg

SEQ ID NO: 98129 - DNA, 54 bp, Artificial
  Synthetic oligonucleotide
aattcctcgggaaattggcattgcgattccacatggatgggcgacagagtcatc

SEQ ID NO: 98130 - DNA, 54 bp, Artificial
  Synthetic oligonucleotide
ctcaggaaattggcattgcgattcccaatggctgggagacacagtcattaccaa

SEQ ID NO: 98131 - DNA, 60 bp, Artificial
  Synthetic oligonucleotide
cgccggattctgacatggatccgaatctgattgagcaggcacccctgaccgtggccgaaa

SEQ ID NO: 98132 - DNA, 60 bp, Artificial
  Synthetic oligonucleotide
ccgccggattctgacatggacttgaatctgattgagcaggcacccctgaccgtggccgaa

SEQ ID NO: 98133 - DNA, 60 bp, Artificial
  Synthetic oligonucleotide
ctgactcttttgtgagctgggtggccgagaaggaatgggagctgccgccggattctgaca

SEQ ID NO: 98134 - DNA, 60 bp, Artificial
  Synthetic oligonucleotide
tgggagctgccgccggattctgacatggacttgaatctgattgagcaggcacccctgacc

SEQ ID NO: 98135 - DNA, 60 bp, Artificial
  Synthetic oligonucleotide
ccccggattctgacatggatctgaatctgattgagcaggcacccctgaccgtggccgaga

SEQ ID NO: 98136 - DNA, 57 bp, Artificial
  Synthetic oligonucleotide
aaagagtaacctcaccagaagactggatgatgatgcagccagacagttacattgaaa

SEQ ID NO: 98137 - DNA, 57 bp, Artificial
  Synthetic oligonucleotide
agagagtaacctcaccagaagactggatgatgatgcagccagacagttacattgaaa

SEQ ID NO: 98138 - DNA, 57 bp, Artificial
  Synthetic oligonucleotide
aaagagtaacctcaccagaggactggatgatgatgcagccagacagttacattgaaa

SEQ ID NO: 98139 - DNA, 60 bp, Artificial
  Synthetic oligonucleotide
agagagtaacctcaccagaagactggatgatgatgcagccagacagttacattgaaatga

SEQ ID NO: 98140 - DNA, 55 bp, Artificial
  Synthetic oligonucleotide
ggggtattttgacttcaacagattccactgccacttttcaccacgtgactggcaa

SEQ ID NO: 98141 - DNA, 60 bp, Artificial
  Synthetic oligonucleotide
cgcggagtttcaggagcgccttaaagaagatacgtcttttgggggcaacctcggacgagc

SEQ ID NO: 98142 - DNA, 60 bp, Artificial
  Synthetic oligonucleotide
caggagaatcatttgtcggaagcccagtttcctccgaagtggtagccgcgtcgtgggagg

SEQ ID NO: 98143 - DNA, 60 bp, Artificial
  Synthetic oligonucleotide
ggttttaggttgggtgcctcctggctataagtacctgggaccagggaacagccttgacca

SEQ ID NO: 98144 - DNA, 60 bp, Artificial
  Synthetic oligonucleotide
ctgcatcattgatggttgcattagatagtaataatactatgccatttactccagcagcta

SEQ ID NO: 98145 - DNA, 60 bp, Artificial
  Synthetic oligonucleotide
ttgtaacaccttggtcattggttgatgcaaatgcttggggagtttggtttaatccaggag

SEQ ID NO: 98146 - DNA, 60 bp, Artificial
  Synthetic oligonucleotide
ggctaactatacacatcattggggaaaagtaccagaatgggatgaaaactgggcggagcc

SEQ ID NO: 98147 - DNA, 60 bp, Artificial
  Synthetic oligonucleotide
accaagttctaactcctctgactccggacgtagtggaccttgcactggaaccgtggagta

SEQ ID NO: 98148 - DNA, 60 bp, Artificial
  Synthetic oligonucleotide
cctctgactccggacgtagtggaccttgcactggaaccgtggagtactccagatacgcct

SEQ ID NO: 98149 - DNA, 60 bp, Artificial
  Synthetic oligonucleotide
agacttgtacatttaaatatgccagaaagtgaaaattatagaagagtggttgtaaataat

SEQ ID NO: 98150 - DNA, 60 bp, Artificial
  Synthetic oligonucleotide
cttggcgttactcacaaagacgtgcaagcgagtccgacgtggtccgaaatagaggcagac

SEQ ID NO: 98151 - DNA, 60 bp, Artificial
  Synthetic oligonucleotide
cgtggtccgaaatagaggcagacctgagagccatctttacttctgaacaattggaagaag

SEQ ID NO: 98152 - DNA, 58 bp, Artificial
  Synthetic oligonucleotide
aattggaagaagattttcgagacgacttggattaaggtacgatggcacctccggcaaa

SEQ ID NO: 98153 - DNA, 60 bp, Artificial
  Synthetic oligonucleotide
ccagcagctatgagatctgagacattgggtttttatccatggaaaccaaccataccaact

SEQ ID NO: 98154 - DNA, 60 bp, Artificial
  Synthetic oligonucleotide
aaacacctgagagatttacatatatagcacatcaagatacaggaagatatccagaaggag

SEQ ID NO: 98155 - DNA, 55 bp, Artificial
  Synthetic oligonucleotide
tatggtcctttaactgcattaaataatgtaccaccagtttatccaaatggtcaaa

SEQ ID NO: 98156 - DNA, 60 bp, Artificial
  Synthetic oligonucleotide
ctaaactaagagcctctcatacttggaatccaattcaacaaatgagtattaatgtagata

SEQ ID NO: 98157 - DNA, 60 bp, Artificial
  Synthetic oligonucleotide
aaactatattactgaagctactattatgagaccagctgaggttggttatagtgcaccata

SEQ ID NO: 98158 - DNA, 60 bp, Artificial
  Synthetic oligonucleotide
ttattcttttgaggcgtctacacaagggccatttaaaacacctattgcagcaggacgggg

SEQ ID NO: 98159 - DNA, 60 bp, Artificial
  Synthetic oligonucleotide
taaaactgcagttaacggaaacatggctttagatgatacacatgcacaaattgtaacacc

SEQ ID NO: 98160 - DNA, 58 bp, Artificial
  Synthetic oligonucleotide
gggtggttggttggtttgcccttagaatatgttaaggaccaaaaaaaatcaataaaag

SEQ ID NO: 98161 - DNA, 60 bp, Artificial
  Synthetic oligonucleotide
tggggagtttggtttaatccaggagattggcaactaattgttaatactatgagtgagttg

SEQ ID NO: 98162 - DNA, 60 bp, Artificial
  Synthetic oligonucleotide
caacaatcaaaccaacttggcgttactcacaaagacgtgcaagcgagtccgacgtggtcc

SEQ ID NO: 98163 - DNA, 60 bp, Artificial
  Synthetic oligonucleotide
aatggaaaggatgttcgctggaacaactataccaaaccaattcaaaatgaagagctaaca

SEQ ID NO: 98164 - DNA, 60 bp, Artificial
  Synthetic oligonucleotide
ttctgggggtgtggggatttctacgggtactttcaataatcagacggaatttaaattttt

SEQ ID NO: 98165 - DNA, 60 bp, Artificial
  Synthetic oligonucleotide
gcaaccagtatactgaggaagttatggagggagtaaattggttaaagaaacatgcagaaa

SEQ ID NO: 98166 - DNA, 60 bp, Artificial
  Synthetic oligonucleotide
agacaaaccatagaccgttactgacattcgcttcttgtctttgacagagtgaacctctct

SEQ ID NO: 98167 - DNA, 60 bp, Artificial
  Synthetic oligonucleotide
catgcagaaaatgaagcattttcgtttgtttttaaatgtgacaacgtccaactaaatgga

SEQ ID NO: 98168 - DNA, 60 bp, Artificial
  Synthetic oligonucleotide
gtgcctccaggttataaatatcttgggcctgggaacagtcttgaccaaggagaaccaact

SEQ ID NO: 98169 - DNA, 60 bp, Artificial
  Synthetic oligonucleotide
ggctacgcagacaaatgaatatgtattggagtagatggttggtgactctttgttcggtga

SEQ ID NO: 98170 - DNA, 60 bp, Artificial
  Synthetic oligonucleotide
ggagaaccaactaacccttctgacgccgctgcaaaagaacacgacgaagcttacgctgct

SEQ ID NO: 98171 - DNA, 60 bp, Artificial
  Synthetic oligonucleotide
cagtcttgaccaaggagaaccaactaacccttctgacgccgctgcaaaagaacacgacga

SEQ ID NO: 98172 - DNA, 60 bp, Artificial
  Synthetic oligonucleotide
atatttctcgccagcagatcaacgctttatagatcaaactaaggacgctaaagattgggg

SEQ ID NO: 98173 - DNA, 60 bp, Artificial
  Synthetic oligonucleotide
ctgggaatcggaagttgatagtctcgccaaaaagcaagtacaaacttttgatgcattaat

SEQ ID NO: 98174 - DNA, 60 bp, Artificial
  Synthetic oligonucleotide
gacggtggtcaacctgctgtcagaaatgaaagagctacaggatctgggaacgggtctgga

SEQ ID NO: 98175 - DNA, 60 bp, Artificial
  Synthetic oligonucleotide
tgggcgggaaaaggtggcgggctaattgtgggcgtggttaaaggtataaaagacaaacca

SEQ ID NO: 98176 - DNA, 60 bp, Artificial
  Synthetic oligonucleotide
aagtgtcaatcaaatgtactttgcgggacttggttagtaaaagagtaacatcacctgaag

SEQ ID NO: 98177 - DNA, 60 bp, Artificial
  Synthetic oligonucleotide
cactttacactgaacaaatgaaaccagaaaccgttgaaaccacagtgacgacagcacagg

SEQ ID NO: 98178 - DNA, 60 bp, Artificial
  Synthetic oligonucleotide
aatgactgtaccaataaaaatttaatttggattgaagaagctggtaactttggtcaacaa

SEQ ID NO: 98179 - DNA, 57 bp, Artificial
  Synthetic oligonucleotide
tatcattgctcaagccatagcacaagctgtgggtaatgttggttgttataatgcagc

SEQ ID NO: 98180 - DNA, 60 bp, Artificial
  Synthetic oligonucleotide
aacaaaaacagcatttgaattaatacttgaaaaagcagataatactaaactaactaactt

SEQ ID NO: 98181 - DNA, 60 bp, Artificial
  Synthetic oligonucleotide
cattaagttagtatgtaagcttccaggagactttggtttggttgataaagaagaatggcc

SEQ ID NO: 98182 - DNA, 55 bp, Artificial
  Synthetic oligonucleotide
ttctggacaaacaattagaattgatcaaaaaggtaaaggaagtaagcaaattgaa

SEQ ID NO: 98183 - DNA, 60 bp, Artificial
  Synthetic oligonucleotide
ggttatataggagttcaacaagataaaagacgtggtgtaactcaaatgggaaatacaaac

SEQ ID NO: 98184 - DNA, 60 bp, Artificial
  Synthetic oligonucleotide
taacacatacatggcaaacaaatagagcattgggcttaccaccatttctaaattctttgc

SEQ ID NO: 98185 - DNA, 60 bp, Artificial
  Synthetic oligonucleotide
agaacaggtgatgaatttgctacaggaacatttttttttgattgtaaaccatgtagacta

SEQ ID NO: 98186 - DNA, 60 bp, Artificial
  Synthetic oligonucleotide
gagatattattttcaatgggatagaacattaataccatctcatactggaactagtggcac

SEQ ID NO: 98187 - DNA, 58 bp, Artificial
  Synthetic oligonucleotide
aaagaaagtggctattttttaagtactgattctggttggaaatttaactttatgaagt

SEQ ID NO: 98188 - DNA, 60 bp, Artificial
  Synthetic oligonucleotide
ccaaatgaatgtgtttggtttattcaacatgaatggggaaaagatcaaggctggcattgt

SEQ ID NO: 98189 - DNA, 60 bp, Artificial
  Synthetic oligonucleotide
attgtcatgttttacttcatagtaagaacttacaacaagcaactggtaaatggctacgca

SEQ ID NO: 98190 - DNA, 60 bp, Artificial
  Synthetic oligonucleotide
ttgtgtgtttaaacttgggcgggaaaaggtggcgggctaattgtgggcgtggttaaaggt

SEQ ID NO: 98191 - DNA, 60 bp, Artificial
  Synthetic oligonucleotide
gctcagagaaattgcagaagatagtgaatgggtgactatattaacatacagacataagca

SEQ ID NO: 98192 - DNA, 60 bp, Artificial
  Synthetic oligonucleotide
cgtcatacgtacgctccttggtcagttggttctaaagaatgataggcggtttgtgtgttt

SEQ ID NO: 98193 - DNA, 60 bp, Artificial
  Synthetic oligonucleotide
ctccttggtcagttggttctaaagaatgataggcggtttgtgtgtttaaacttgggcggg

SEQ ID NO: 98194 - DNA, 60 bp, Artificial
  Synthetic oligonucleotide
agattaaagagaagctggtgacccgcatctaccgcggggtcgagccgcagcttccgaact

SEQ ID NO: 98195 - DNA, 60 bp, Artificial
  Synthetic oligonucleotide
acgcggcctccgtcttcctgggctgggcgcaaaagaagttcgggaagaggaacaccatct

SEQ ID NO: 98196 - DNA, 60 bp, Artificial
  Synthetic oligonucleotide
gatctaccaaatcctggagctgaacgggtacgatccgcagtacgcggcctccgtcttcct

SEQ ID NO: 98197 - DNA, 60 bp, Artificial
  Synthetic oligonucleotide
catctaccgaatcctcgagatgaacgggtacgatccgcagtacgcggcctccgtcttcct

SEQ ID NO: 98198 - DNA, 60 bp, Artificial
  Synthetic oligonucleotide
tgacaaagacggctccggactacctggtgggcagcaacccgccggaggacattaccaaaa

SEQ ID NO: 98199 - DNA, 60 bp, Artificial
  Synthetic oligonucleotide
ctgacaaagacggctccggactacctggtgggcagcaacccgccggaggacattaccaaa

SEQ ID NO: 98200 - DNA, 60 bp, Artificial
  Synthetic oligonucleotide
aggccgcgctggacaatgcctccaaaatcatgagcctgacaaagacggctccggactacc

SEQ ID NO: 98201 - DNA, 60 bp, Artificial
  Synthetic oligonucleotide
atctaccgcggggtcgagccgcagcttccgaactggttcgcggtgaccaagacgcgtaat

SEQ ID NO: 98202 - DNA, 60 bp, Artificial
  Synthetic oligonucleotide
cgcggtcacaaatcaaggccgcgctggacaatgcctccaaaatcatgagcctgacaaaga

SEQ ID NO: 98203 - DNA, 60 bp, Artificial
  Synthetic oligonucleotide
ctggtggaccgcgggatcacgtcagaaaagcaatggattcaggaggaccaggcctcgtac

SEQ ID NO: 98204 - DNA, 60 bp, Artificial
  Synthetic oligonucleotide
aaggccgcgctggacaatgcctccaagatcatgagcctgacaaagacggctccggactac

SEQ ID NO: 98205 - DNA, 60 bp, Artificial
  Synthetic oligonucleotide
gacccgcatctaccgcggggtcgagccgcagcttccgaactggttcgcggtgaccaagac

SEQ ID NO: 98206 - DNA, 60 bp, Artificial
  Synthetic oligonucleotide
tgaccaagacgcgtaatggcgccggaggcgggaacaaggtggtggacgactgctacatcc

SEQ ID NO: 98207 - DNA, 60 bp, Artificial
  Synthetic oligonucleotide
aacaaggtggtggacgactgctacatccccaactacctgctccccaagacccagcccgag

SEQ ID NO: 98208 - DNA, 60 bp, Artificial
  Synthetic oligonucleotide
gagccgcagcttccgaactggttcgcggtgaccaaaacgcgaaatggcgccgggggcggg

SEQ ID NO: 98209 - DNA, 60 bp, Artificial
  Synthetic oligonucleotide
ttaagcgcctgtttgaatctcgcggagcgtaaacggctggtggcgcagcatctgacgcac

SEQ ID NO: 98210 - DNA, 60 bp, Artificial
  Synthetic oligonucleotide
ccaattctgacgcgccggtcatcaggtcaaaaacctccgccaggtacatggagctggtcg

SEQ ID NO: 98211 - DNA, 54 bp, Artificial
  Synthetic oligonucleotide
tgctacatccccaactacctgctccccaagacccagcccgagctccagtgggcg

SEQ ID NO: 98212 - DNA, 60 bp, Artificial
  Synthetic oligonucleotide
ataagcgcctgtttgaatctcgcggagcgtaaacggctggtggcgcagcatctgacgcac

SEQ ID NO: 98213 - DNA, 60 bp, Artificial
  Synthetic oligonucleotide
caacaccaggacaaccgtcggggtcttgtgcttccgggttacaaatacctcggacccggt

SEQ ID NO: 98214 - DNA, 60 bp, Artificial
  Synthetic oligonucleotide
atcaggacaacgctcggggtcttgtgcttccgggttacaaatacctcggacccggcaacg

SEQ ID NO: 98215 - DNA, 60 bp, Artificial
  Synthetic oligonucleotide
accaggacaaccgtcggggtcttgtgcttccgggttacaaatacctcggacccggtaacg

SEQ ID NO: 98216 - DNA, 60 bp, Artificial
  Synthetic oligonucleotide
gagctggtcgggtggctggtggaccgcgggatcacgtcagaaaagcaatggatccaggag

SEQ ID NO: 98217 - DNA, 54 bp, Artificial
  Synthetic oligonucleotide
gcgtggaccaaaagtgcaagtcatcggcccagatcgacccaactcccgtgatcg

SEQ ID NO: 98218 - DNA, 60 bp, Artificial
  Synthetic oligonucleotide
cgcggaagctccggtggactacgcggacaggtaccaaaacaaatgttctcgtcacgtggg

SEQ ID NO: 98219 - DNA, 60 bp, Artificial
  Synthetic oligonucleotide
cggaagcaccggcggactacgcggacaggtaccaaaacaaatgttctcgtcacgtgggca

SEQ ID NO: 98220 - DNA, 60 bp, Artificial
  Synthetic oligonucleotide
agccgtgtgcacccattgtaaacattccccaccgtgtcctcagccaggaaccgtcaccca

SEQ ID NO: 98221 - DNA, 60 bp, Artificial
  Synthetic oligonucleotide
gtaggggttgactttgtatgggatggtgtgaggggattgcctgtttgctgtgtggaacat

SEQ ID NO: 98222 - DNA, 57 bp, Artificial
  Synthetic oligonucleotide
cagcactggtgcaggcgggggaggtagcaaccctacaaaaagcatgtggagtgaagg

SEQ ID NO: 98223 - DNA, 60 bp, Artificial
  Synthetic oligonucleotide
ctggcactagccaaaacaccagaatttccctacgccccgggccagtatctcagccatacc

SEQ ID NO: 98224 - DNA, 60 bp, Artificial
  Synthetic oligonucleotide
gaccacgcaattcagccacaaaactttatgcctgggccactaataaattcagtgtctacc

SEQ ID NO: 98225 - DNA, 60 bp, Artificial
  Synthetic oligonucleotide
ccctaacttagatgacagttttaaaactcaatttgcagccctaggcgggtggggtttgca

SEQ ID NO: 98226 - DNA, 60 bp, Artificial
  Synthetic oligonucleotide
ccagacttagtgcgctgcagttgtcatgtaggagcctctaacccattttctgtgttaact

SEQ ID NO: 98227 - DNA, 60 bp, Artificial
  Synthetic oligonucleotide
ttattaagtccactattgtggaagctgcaaaagccattttaggtggtcagccaaccaggg

SEQ ID NO: 98228 - DNA, 60 bp, Artificial
  Synthetic oligonucleotide
aaatacccatatgtgctaggtcagggacaagacacactagctccagaactgcccatttgg

SEQ ID NO: 98229 - DNA, 60 bp, Artificial
  Synthetic oligonucleotide
ccatgtagttattggtggtccaggactaaatgctagaaacttaactgtgtgcgtagaagg

SEQ ID NO: 98230 - DNA, 60 bp, Artificial
  Synthetic oligonucleotide
cacatttgatttccctggaataaatgcagatgccctccacccagatctccaaaccacccc

SEQ ID NO: 98231 - DNA, 60 bp, Artificial
  Synthetic oligonucleotide
aactctccagacctatatagtcatcattttcagagccatggacagttatctgaccacccc

SEQ ID NO: 98232 - DNA, 60 bp, Artificial
  Synthetic oligonucleotide
cagctgcgttccctgacactttcttttctggttgcttttgactggaactcacttgctgtt

SEQ ID NO: 98233 - DNA, 60 bp, Artificial
  Synthetic oligonucleotide
gccattcgctggaaagggaacaaaagcggggttaaagtttcaaaccatggtaaattggct

SEQ ID NO: 98234 - DNA, 60 bp, Artificial
  Synthetic oligonucleotide
ctccaggcgcctggaacagtgaaaccccgcgctctagtacgcccgtccccgggaccagtt

SEQ ID NO: 98235 - DNA, 60 bp, Artificial
  Synthetic oligonucleotide
ccaaagtaactgttggatgtgtggaaacaaacgctcacgcagagccacttaaacagagga

SEQ ID NO: 98236 - DNA, 60 bp, Artificial
  Synthetic oligonucleotide
ctgactgtggcaatagaaacatcatttgggctgaagagtgtggtaactttggtaactggg

SEQ ID NO: 98237 - DNA, 60 bp, Artificial
  Synthetic oligonucleotide
gcaactataaaagacatgggacttaatgaacaataccttaagaaggtactatgtaccatc

SEQ ID NO: 98238 - DNA, 60 bp, Artificial
  Synthetic oligonucleotide
atgtaccatcctaaccaagcaaggtggaaagagaggttgtatttggttctatggaccggg

SEQ ID NO: 98239 - DNA, 54 bp, Artificial
  Synthetic oligonucleotide
attaattctcaaccaatattcgttagcaaccaacaccagctcgcttcgctcgcg

SEQ ID NO: 98240 - DNA, 60 bp, Artificial
  Synthetic oligonucleotide
ttgggcgcttcgcgcttgctaacttcatattggttgagaattaatccgtgtctttcctgt

SEQ ID NO: 98241 - DNA, 60 bp, Artificial
  Synthetic oligonucleotide
aatacctgggatagacaaccaattcaactaagccatgagatgcctgaactgtacttaggt

SEQ ID NO: 98242 - DNA, 60 bp, Artificial
  Synthetic oligonucleotide
gacaaccaattcaactaagccatgagatgcctgaactgtacttaggtaagtgccgttggt

SEQ ID NO: 98243 - DNA, 60 bp, Artificial
  Synthetic oligonucleotide
cgcttggggtgtatggatgagtcctaaagactttcaacaaatgaaaacactgtgtagtga

SEQ ID NO: 98244 - DNA, 60 bp, Artificial
  Synthetic oligonucleotide
ccaaggtaacgcatctaccaagcaattcaacaatgacttaactgcgtcgttacaggttgc

SEQ ID NO: 98245 - DNA, 60 bp, Artificial
  Synthetic oligonucleotide
ggtaacagcactggcggctttaataacacaacagaattcaaagtaataaacaatgaagtg

SEQ ID NO: 98246 - DNA, 60 bp, Artificial
  Synthetic oligonucleotide
aagtgtatattacttgtcacgctactagaatggtacacattaaccaagctgacacagacg

SEQ ID NO: 98247 - DNA, 60 bp, Artificial
  Synthetic oligonucleotide
gatgattttcaccaacaagtaatgacaccttggtatatagtagatagcaacgcttggggt

SEQ ID NO: 98248 - DNA, 60 bp, Artificial
  Synthetic oligonucleotide
ttacaggttgctttagatactaacaacatactgccatatactccagctgcgccgttgggg

SEQ ID NO: 98249 - DNA, 60 bp, Artificial
  Synthetic oligonucleotide
atcctaacattcaaaaagttgcaacagaaacactaacctgggatgcagtacaagatgatt

SEQ ID NO: 98250 - DNA, 60 bp, Artificial
  Synthetic oligonucleotide
aatatagactgggaagatggccaagacgcgccaaaagtaactgaccaaactgactcagca

SEQ ID NO: 98251 - DNA, 60 bp, Artificial
  Synthetic oligonucleotide
aagaagttgctaatccagttcagcaaccttctaaaaaactgtactcagctcaaagtactt

SEQ ID NO: 98252 - DNA, 55 bp, Artificial
  Synthetic oligonucleotide
ctactgaagctgaacaaatggacactgagcaagcaactaaccaaactgctgaagc

SEQ ID NO: 98253 - DNA, 60 bp, Artificial
  Synthetic oligonucleotide
tacatgaatagtgaacaacctaaatactgtgtacttccttattttaccagaaagtggcgg

SEQ ID NO: 98254 - DNA, 60 bp, Artificial
  Synthetic oligonucleotide
caaactcgagtgccacaactgccacgaagaatactggcaactcacaacctactactgcaa

SEQ ID NO: 98255 - DNA, 60 bp, Artificial
  Synthetic oligonucleotide
tatgaggttactttactttacagagactactggaccaaactcgagtgccacaactgccac

SEQ ID NO: 98256 - DNA, 55 bp, Artificial
  Synthetic oligonucleotide
catctatactactaacctaactatggcctaatgtatgcagtgtcggcgtcgccga

SEQ ID NO: 98257 - DNA, 60 bp, Artificial
  Synthetic oligonucleotide
cctgtgttcctacttcagtatataaagaaagtttcctataggtgggtttgcggtctatct

SEQ ID NO: 98258 - DNA, 60 bp, Artificial
  Synthetic oligonucleotide
ccctgcggtctaccacggagaggacaccatagaggaaatggattctactgaagctgaaca

SEQ ID NO: 98259 - DNA, 60 bp, Artificial
  Synthetic oligonucleotide
ggagtgcgagcagtgtgcctgcaaagcagcacaagagacctcggcatgagtaaaagtaaa

SEQ ID NO: 98260 - DNA, 60 bp, Artificial
  Synthetic oligonucleotide
gacaacaaaccaaccaaagcaacaccgccactgaggacaacctcttctgacctaaggtta

SEQ ID NO: 98261 - DNA, 60 bp, Artificial
  Synthetic oligonucleotide
gcagaggagactgcaggacctgtatgtgcagttgaagaaggagattaacgacggtgaagg

SEQ ID NO: 98262 - DNA, 60 bp, Artificial
  Synthetic oligonucleotide
gaggaagtagtgtggtatataagcagaggttgcttggagcaaagcacagaccggttacag

SEQ ID NO: 98263 - DNA, 60 bp, Artificial
  Synthetic oligonucleotide
taaggatgttcaaaaatccttaggttggtttatgaaaagactaaataaagacctagcagt

SEQ ID NO: 98264 - DNA, 60 bp, Artificial
  Synthetic oligonucleotide
aacacttaactaacaatgagataaacttttgtaaactaaccttggggaagacgttgctgt

SEQ ID NO: 98265 - DNA, 60 bp, Artificial
  Synthetic oligonucleotide
ccaaccaaagcaacaccgccactgaggacaacctcttctgacctaaggttagcttttgac

SEQ ID NO: 98266 - DNA, 60 bp, Artificial
  Synthetic oligonucleotide
gatataatggatgctaatatagactgggaagatggccaagacgcgccaaaagtaactgac

SEQ ID NO: 98267 - DNA, 60 bp, Artificial
  Synthetic oligonucleotide
actttgctggaggaccaagacagtggagtgacacaaccaaaggtgcaggtacacacagtc

SEQ ID NO: 98268 - DNA, 60 bp, Artificial
  Synthetic oligonucleotide
ggttacagggtagttactttgctggaggaccaagacagtggagtgacacaaccaaaggtg

SEQ ID NO: 98269 - DNA, 60 bp, Artificial
  Synthetic oligonucleotide
cggagctgacctaatttacatacaaggacaagataataccagactaggtcacttttgggg

SEQ ID NO: 98270 - DNA, 60 bp, Artificial
  Synthetic oligonucleotide
ctgcaaaccaaagacagatacaacacacaaagtaacctcaaaagaaaacggagctgacct

SEQ ID NO: 98271 - DNA, 60 bp, Artificial
  Synthetic oligonucleotide
ctaaccttaagctatcaaagtacacgttgcttggggctacctcctctctgcaaaccaaag

SEQ ID NO: 98272 - DNA, 60 bp, Artificial
  Synthetic oligonucleotide
gtaaaccatgtaaactaaccttaagctatcaaagtacacgttgcttggggctacctcctc

SEQ ID NO: 98273 - DNA, 60 bp, Artificial
  Synthetic oligonucleotide
cattctcagaacgggagataactttcatacaggcttgtatgagtttaacagtaaaccatg

SEQ ID NO: 98274 - DNA, 60 bp, Artificial
  Synthetic oligonucleotide
gtgccgttggtaagtaacacattttaaatgccaactttaaaccaacatcaatttatgagg

SEQ ID NO: 98275 - DNA, 60 bp, Artificial
  Synthetic oligonucleotide
accaaaggtgcaggtacacacagtcaacacttacaacagaactttagtactaggtacatc

SEQ ID NO: 98276 - DNA, 54 bp, Artificial
  Synthetic oligonucleotide
actactgcaaagagtgcagaaagtgtgaacacggaaaactgcgacacaccaaaa

SEQ ID NO: 98277 - DNA, 60 bp, Artificial
  Synthetic oligonucleotide
aaggtaactttgaaatagggttacaatatggaagaagtactatcaaatatatctactaaa

SEQ ID NO: 98278 - DNA, 61 bp, Artificial
  Synthetic oligonucleotide
cctggtgtatttactaaagacaagtatcacaaacagataccaaacaacaaaggtaactttg

SEQ ID NO: 98279 - DNA, 60 bp, Artificial
  Synthetic oligonucleotide
tggaatacccattcatgaaagaagtaactactactcagacaatgagatagagcaacatac

SEQ ID NO: 98280 - DNA, 60 bp, Artificial
  Synthetic oligonucleotide
cagaaaccacggtggagacaacgaggtagacctattagatggaatacccattcatgaaag

SEQ ID NO: 98281 - DNA, 58 bp, Artificial
  Synthetic oligonucleotide
gagaggcaagcttgtactaaaaggcaaactaagccaagtaacatgctggaatcctgtt

SEQ ID NO: 98282 - DNA, 60 bp, Artificial
  Synthetic oligonucleotide
caagaaacctcatatggatcacaaacctagcatgaacaacaacgctccatttgtatgtaa

SEQ ID NO: 98283 - DNA, 60 bp, Artificial
  Synthetic oligonucleotide
tgaagtattagatgatgctgctcagatgaaaaagctacttaactcataccaaccaacagt

SEQ ID NO: 98284 - DNA, 60 bp, Artificial
  Synthetic oligonucleotide
aactttagtggtgaacaggagctaaactttccacatgaagtattagatgatgctgctcag

SEQ ID NO: 98285 - DNA, 60 bp, Artificial
  Synthetic oligonucleotide
agtgtcgtatttcgcggagcgtagcggagcgcataccaagctgccacgtcacagccacgt

SEQ ID NO: 98286 - DNA, 60 bp, Artificial
  Synthetic oligonucleotide
cggctcctggaaagaagagaccgttgattgaatccccccagcagcccgactcctccacgg

SEQ ID NO: 98287 - DNA, 60 bp, Artificial
  Synthetic oligonucleotide
gtgtcgcagacgcaggagcagaacaaggaaaaccagaaccccaattctgacgcgccggtc

SEQ ID NO: 98288 - DNA, 60 bp, Artificial
  Synthetic oligonucleotide
tgtgcgcggtcatcgacggaaactcgaccaccttcgagcaccaacaaccactccaggacc

SEQ ID NO: 98289 - DNA, 60 bp, Artificial
  Synthetic oligonucleotide
caccccggtacctgcgaatcctgcaacgaccttcagctctactccggtaaactccttcat

SEQ ID NO: 98290 - DNA, 50 bp, Artificial
  Synthetic oligonucleotide
ggggtgccgatggagtgggtaatgcctcaggaaattggcattgcgattcc

SEQ ID NO: 98291 - DNA, 60 bp, Artificial
  Synthetic oligonucleotide
agggaacagccttgaccaaggagaaccaaccaacccttctgacgccgctgccaaagaaca

SEQ ID NO: 98292 - DNA, 60 bp, Artificial
  Synthetic oligonucleotide
ggccagggaacagccttgaccaaggagaaccaaccaatccatctgacgccgctgccaaag

SEQ ID NO: 98293 - DNA, 60 bp, Artificial
  Synthetic oligonucleotide
gggaccagggaacagccttgaccaaggagaaccaaccaatccatctgacgccgctgccaa

SEQ ID NO: 98294 - DNA, 60 bp, Artificial
  Synthetic oligonucleotide
gtgggtagttcctcgggaaattggcattgcgattccacatggctgggcgacagagtcatc

SEQ ID NO: 98295 - DNA, 60 bp, Artificial
  Synthetic oligonucleotide
cagagacagaatgcttaacattcatctaacacatacattgcctggtgactttggtttggt

SEQ ID NO: 98296 - DNA, 56 bp, Artificial
  Synthetic oligonucleotide
gatagaatgcttaacattcatctaacacatacattgcctggtgactttggtttggt

SEQ ID NO: 98297 - DNA, 60 bp, Artificial
  Synthetic oligonucleotide
ccgtggttagaataggctgtgaggaaagaccagaacacactcaaccaatcagagacagaa

SEQ ID NO: 98298 - DNA, 60 bp, Artificial
  Synthetic oligonucleotide
acagtggtcaaaataggctgcgaggaaagaccagaacacactcaaccaatcagagacaga

SEQ ID NO: 98299 - DNA, 60 bp, Artificial
  Synthetic oligonucleotide
gcgtgcttttgcacctaagctttctactgactctgagcctgggacttctggtgtgagcac

SEQ ID NO: 98300 - DNA, 60 bp, Artificial
  Synthetic oligonucleotide
ggggtactaatgtatgactacctgttttacaggcctgaaatcacttggttctaggttggg

SEQ ID NO: 98301 - DNA, 60 bp, Artificial
  Synthetic oligonucleotide
gcgagcttttgcacctaagctttctactgactctgaacctggcacttctggtgtgagcag

SEQ ID NO: 98302 - DNA, 60 bp, Artificial
  Synthetic oligonucleotide
tggtggggtattaatgtttaattacctgttttacaggcctgaaatcacttggttttaggt

SEQ ID NO: 98303 - DNA, 60 bp, Artificial
  Synthetic oligonucleotide
gtttaattacctgttttacaggcctgaaatcacttggttttaggttgggtgcctcctggc

SEQ ID NO: 98304 - DNA, 55 bp, Artificial
  Synthetic oligonucleotide
actacctgttttacaggcctgaaatcacttggttttaggttgggtgcctcctggc

SEQ ID NO: 98305 - DNA, 60 bp, Artificial
  Synthetic oligonucleotide
ggttggtggggtattaatatgtgactacctgttttacaggcctgaaatcacttggttcta

SEQ ID NO: 98306 - DNA, 60 bp, Artificial
  Synthetic oligonucleotide
aatatgtgactacctgttttacaggcctgaaatcacttggttctaggttgggtgcctcca

SEQ ID NO: 98307 - DNA, 60 bp, Artificial
  Synthetic oligonucleotide
acctgccgggcatttctgactcgtttgtgagctgggtggccgagaaggaatgggagctgc

SEQ ID NO: 98308 - DNA, 60 bp, Artificial
  Synthetic oligonucleotide
gcgtgagtaaggccccggaggccctcttctttgttcagttcgagaagggcgagagctact

SEQ ID NO: 98309 - DNA, 60 bp, Artificial
  Synthetic oligonucleotide
tggcgccgcgtgagtaaggccccggaggccctcttctttgttcagttcgagaagggcgag

SEQ ID NO: 98310 - DNA, 60 bp, Artificial
  Synthetic oligonucleotide
gtgcctcctggctacaagtacctgggaccagggaacagccttgaccaaggagaaccaacc

SEQ ID NO: 98311 - DNA, 60 bp, Artificial
  Synthetic oligonucleotide
atcggctaccgaaggcaccttcccgccgttcccagcggatatctacacgatcccgcagta

SEQ ID NO: 98312 - DNA, 60 bp, Artificial
  Synthetic oligonucleotide
tgagtacaacgaggccgatagacgtttccaggaacgtctcaaagacgatacctctttcgg

SEQ ID NO: 98313 - DNA, 60 bp, Artificial
  Synthetic oligonucleotide
catccgacccaaagcgatgcgctttagactctttaacatccaggttaaagaagtcactgt

SEQ ID NO: 98314 - DNA, 60 bp, Artificial
  Synthetic oligonucleotide
gtctagataaaggaaaacccgtcaacgaggcagacgctgccgccttagagcacgacaagg

SEQ ID NO: 98315 - DNA, 60 bp, Artificial
  Synthetic oligonucleotide
aaacccgtcaacgaggcagacgctgccgccttagagcacgacaaggcttacgacctcgaa

SEQ ID NO: 98316 - DNA, 60 bp, Artificial
  Synthetic oligonucleotide
tggtcccaggatcacctgacccctgtgatcccagaattcctggtgcggaaggcggagtct

SEQ ID NO: 98317 - DNA, 60 bp, Artificial
  Synthetic oligonucleotide
ccgatgactttggtaaggtgaccaaacaggaggtgcgtcaattcttcaggtggtcccagg

SEQ ID NO: 98318 - DNA, 60 bp, Artificial
  Synthetic oligonucleotide
gacggcgccacacggcgctgcgtcatacgcgcgcgcgcaccggcgagatgaggtcgtact

SEQ ID NO: 98319 - DNA, 60 bp, Artificial
  Synthetic oligonucleotide
gactcgtttacccgatgactttggtaaggtgaccaaacaggaggtgcgtcaattcttcag

SEQ ID NO: 98320 - DNA, 60 bp, Artificial
  Synthetic oligonucleotide
cagccaaggcgattctgggaggatctcgggtgagagtggaccaaaaatgcaaagcttcgg

SEQ ID NO: 98321 - DNA, 60 bp, Artificial
  Synthetic oligonucleotide
ggcattacctcaccggagtgctggccagtttccaagacaggctcgctcgctcactcgggc

SEQ ID NO: 98322 - DNA, 54 bp, Artificial
  Synthetic oligonucleotide
tccatccgtccccgcttattggcgggtttggctgcaagcatccccctccccaga

SEQ ID NO: 98323 - DNA, 60 bp, Artificial
  Synthetic oligonucleotide
cccttcggaaacgttccagacggccaaagtggcctccttcatcaaccagtactcgaccgg

SEQ ID NO: 98324 - DNA, 60 bp, Artificial
  Synthetic oligonucleotide
attacctcaccggagtgctggccagtttccaagacaggctcgctcgctcactcgggccgg

SEQ ID NO: 98325 - DNA, 60 bp, Artificial
  Synthetic oligonucleotide
tttgccgtctccgacacgggatcctattccgaacctcgtcccatcggtacccgttacctt

SEQ ID NO: 98326 - DNA, 60 bp, Artificial
  Synthetic oligonucleotide
ctatataagcccgacaaagcggcccgcgctcgcagagcagcagcaggcgtcggagagcgc

SEQ ID NO: 98327 - DNA, 60 bp, Artificial
  Synthetic oligonucleotide
cgttctatggatgcgttaactggaccaacgagaactttccgttcaacgactgcgtcgaaa

SEQ ID NO: 98328 - DNA, 60 bp, Artificial
  Synthetic oligonucleotide
ataaaagcgtgcctgcaccgagaactgcgtgccagtctcgcgcgacttcacttcgaggag

SEQ ID NO: 98329 - DNA, 60 bp, Artificial
  Synthetic oligonucleotide
aaggcggagtctcgcaaaagacccgccccttccggggaaggctatataagcccgacaaag

SEQ ID NO: 98330 - DNA, 60 bp, Artificial
  Synthetic oligonucleotide
cgcgaacaaggtccgggccgagtcgtatattcccgcctacctgatcccgaaacagcaacc

SEQ ID NO: 98331 - DNA, 60 bp, Artificial
  Synthetic oligonucleotide
cctacctgatcccgaaacagcaaccggaagtgcagtgggcgtggactaacgtgcccgagt

SEQ ID NO: 98332 - DNA, 60 bp, Artificial
  Synthetic oligonucleotide
agcaaccggaagtgcagtgggcgtggactaacgtgcccgagtatataaaagcgtgcctgc

SEQ ID NO: 98333 - DNA, 60 bp, Artificial
  Synthetic oligonucleotide
ccgatcgaaccgacgccggtcattattaccagtaacaccaacatgtgttatgtcatcgac

SEQ ID NO: 98334 - DNA, 60 bp, Artificial
  Synthetic oligonucleotide
gtgcccgagtatataaaagcgtgcttgcaccgagaactgcgtgccagtctcgcgcgactt

SEQ ID NO: 98335 - DNA, 60 bp, Artificial
  Synthetic oligonucleotide
ctaggccctttcaacggtctagataaaggagaacccgtcaacgaggcagacgctgccgcc

SEQ ID NO: 98336 - DNA, 60 bp, Artificial
  Synthetic oligonucleotide
aatcagcaaactcaagaatctcctgaaaaggacgattcgagaggtctcgtgttcccgggt

SEQ ID NO: 98337 - DNA, 50 bp, Artificial
  Synthetic oligonucleotide
cccctgtacagaacataacgtgtctcgttgttatcaatgtcattcgggcg

SEQ ID NO: 98338 - DNA, 60 bp, Artificial
  Synthetic oligonucleotide
cggagagcgcggagccggttcccaccaggtatcgtatcaaatgctcgaaacattgcggga

SEQ ID NO: 98339 - DNA, 60 bp, Artificial
  Synthetic oligonucleotide
cctcatcctaaggcaaatcagcaaactcaagaatctcctgaaaaggacgattcgagaggt

SEQ ID NO: 98340 - DNA, 60 bp, Artificial
  Synthetic oligonucleotide
ggcactgagccatcctatgctccctgcacgattcaccatttgatgggcaagagtcgcggg

SEQ ID NO: 98341 - DNA, 60 bp, Artificial
  Synthetic oligonucleotide
gacccagcgtacgtggggagtattttggtcgggtggtgccagaagaaatggggcaagcga

SEQ ID NO: 98342 - DNA, 60 bp, Artificial
  Synthetic oligonucleotide
gctcacaaccagacgctagaccggctgatgaatcctctcgtcgatcagtacctgtgggct

SEQ ID NO: 98343 - DNA, 60 bp, Artificial
  Synthetic oligonucleotide
atggggcaagcgaaacacgctgtggctgttcggacctgcgaccaccggcaagaccaacat

SEQ ID NO: 98344 - DNA, 60 bp, Artificial
  Synthetic oligonucleotide
cgctacatggagctcgtggattggctcgtggagaaggggatcaccaccgagaaggaatgg

SEQ ID NO: 98345 - DNA, 60 bp, Artificial
  Synthetic oligonucleotide
acccgcgtcagcaaacgctacatggagctcgtggattggctcgtggagaaggggatcacc

SEQ ID NO: 98346 - DNA, 60 bp, Artificial
  Synthetic oligonucleotide
cgtcagaaccgcatctacaagattctggaactgaaccactacgacccagcgtacgtgggg

SEQ ID NO: 98347 - DNA, 60 bp, Artificial
  Synthetic oligonucleotide
gagctcgtggattggctcgtggagaaggggatcaccaccgagaaggaatggctgctggaa

SEQ ID NO: 98348 - DNA, 60 bp, Artificial
  Synthetic oligonucleotide
caccttcccgccgttcccagcggatatctacacgatcccgcagtatggttactgcacgct

SEQ ID NO: 98349 - DNA, 60 bp, Artificial
  Synthetic oligonucleotide
tcccgcagtacgggtactgcacgctaaactacaacaacgaggcggtggatcgttcggcct

SEQ ID NO: 98350 - DNA, 60 bp, Artificial
  Synthetic oligonucleotide
cgttcggccttctactgtctggactactttccctcagacatgctgcggacaggaaataac

SEQ ID NO: 98351 - DNA, 60 bp, Artificial
  Synthetic oligonucleotide
aagcgaaacacgctgtggctgttcggacatgcgaccaccggcaagaccaacatcgcggag

SEQ ID NO: 98352 - DNA, 60 bp, Artificial
  Synthetic oligonucleotide
gcggagaacctgaccgtcaagccatgcaaaacacgctggcttttagcaggaccgtctacg

SEQ ID NO: 98353 - DNA, 60 bp, Artificial
  Synthetic oligonucleotide
caaaaatttcgggggcgcgaacaaggtccgggccgagtcgtatattcccgcctacctgat

SEQ ID NO: 98354 - DNA, 60 bp, Artificial
  Synthetic oligonucleotide
ctccgattcgttcgtcaactggattacgtcgcgagaatggacgttgcctgaggacgccga

SEQ ID NO: 98355 - DNA, 60 bp, Artificial
  Synthetic oligonucleotide
ggtacctggaatctccgattcgttcgtcaactggattacgtcgcgagaatggacgttgcc

SEQ ID NO: 98356 - DNA, 50 bp, Artificial
  Synthetic oligonucleotide
caactgacgctcggcgacaaaatccaacgggagattcgaaatcactgggg

SEQ ID NO: 98357 - DNA, 60 bp, Artificial
  Synthetic oligonucleotide
ggacgttgcctgaggacgccgattgggatttggaccaggtcgatcaagttcaactgacgc

SEQ ID NO: 98358 - DNA, 60 bp, Artificial
  Synthetic oligonucleotide
ttgcctgaggacgccgattgggatttggaccaggtcgatcaagttcaactgacgctcggc

SEQ ID NO: 98359 - DNA, 60 bp, Artificial
  Synthetic oligonucleotide
ctggggaggcaaggttggtcactacttttttagaaccaagcgcgcttttgcacctaagct

SEQ ID NO: 98360 - DNA, 60 bp, Artificial
  Synthetic oligonucleotide
gagacagaatgctcaacattcatctaacacatacattgcctggtgactttggtttggttg

SEQ ID NO: 98361 - DNA, 60 bp, Artificial
  Synthetic oligonucleotide
gacagaatgctcaacattcatctaacacatacattgcctggtgactttggtttggttgac

SEQ ID NO: 98362 - DNA, 60 bp, Artificial
  Synthetic oligonucleotide
caatctaccatggcttgttactgtgctaaatggggcaaagttcctgattggtcagaggac

SEQ ID NO: 98363 - DNA, 60 bp, Artificial
  Synthetic oligonucleotide
gagagaccagaacacactcaaccaatcagagacagaatgcttaacattcatctaacacat

SEQ ID NO: 98364 - DNA, 60 bp, Artificial
  Synthetic oligonucleotide
gcaagctactgtgctaaatggggcaaagttcctgattggacagaaaactgggcggagccg

SEQ ID NO: 98365 - DNA, 60 bp, Artificial
  Synthetic oligonucleotide
ggcaagttactgtgctaaatggggcaaagttcctgattggacagaaaactgggcggagcc

SEQ ID NO: 98366 - DNA, 60 bp, Artificial
  Synthetic oligonucleotide
atcgaccatggcaagttactgtgctaaatggggcaaagttcctgattggacagaaaactg

SEQ ID NO: 98367 - DNA, 60 bp, Artificial
  Synthetic oligonucleotide
ctgttcccggatataaatatcttggtcctggaaattcacttaacagaggtcaacctacta

SEQ ID NO: 98368 - DNA, 60 bp, Artificial
  Synthetic oligonucleotide
tgctggtacagcttgaataccaatatgaacactcggttgaatttgtggattttcatgtcc

SEQ ID NO: 98369 - DNA, 60 bp, Artificial
  Synthetic oligonucleotide
cagatacaaccaagtgttcatattggtattcaagctgtaccagcattaactacaggagct

SEQ ID NO: 98370 - DNA, 60 bp, Artificial
  Synthetic oligonucleotide
cggactagaattaataagcagtgctccagtagttaatgctggtacagcttgaataccaat

SEQ ID NO: 98371 - DNA, 60 bp, Artificial
  Synthetic oligonucleotide
ctagacatgtcaattttgcctaaacctatacttaatatgtcccacgatatggatactcag

SEQ ID NO: 98372 - DNA, 60 bp, Artificial
  Synthetic oligonucleotide
gctgcatattaagtataggtttaggcaaaattgacaagtctagaccattaagtctagcag

SEQ ID NO: 98373 - DNA, 60 bp, Artificial
  Synthetic oligonucleotide
tcatatagaaggtcaaaggtcaaggtcaccgtgacgtcatcaagtactctatacatgctg

SEQ ID NO: 98374 - DNA, 53 bp, Artificial
  Synthetic oligonucleotide
aagtactcagcatgtatagagtacttgatgacgtcacggtgaccttgaccttt

SEQ ID NO: 98375 - DNA, 60 bp, Artificial
  Synthetic oligonucleotide
gaaggtcaaaggtcaaggtcaccgtgacgtcatcaagtactctatacatgctgagtactt

SEQ ID NO: 98376 - DNA, 60 bp, Artificial
  Synthetic oligonucleotide
gcttcttctgcctagagtactttcccagcaagatgctgagaacgggcaacaactttgagt

SEQ ID NO: 98377 - DNA, 60 bp, Artificial
  Synthetic oligonucleotide
cagtacaactggacattacatctatatatcccatagaatctgtccaagaatttaacggac

SEQ ID NO: 98378 - DNA, 60 bp, Artificial
  Synthetic oligonucleotide
taatttacgagagtcaccaacaagatcaccctctagtgaacaatgtagcatggtggcaac

SEQ ID NO: 98379 - DNA, 60 bp, Artificial
  Synthetic oligonucleotide
ataatatacgagagtcatcaggagaatcctctagtgaacaatgtagcatggtggcaactt

SEQ ID NO: 98380 - DNA, 60 bp, Artificial
  Synthetic oligonucleotide
cttggttctaggttgggtgcctccaggctacaagtacctgggaccagggaacagccttaa

SEQ ID NO: 98381 - DNA, 60 bp, Artificial
  Synthetic oligonucleotide
ttctattaaaaccacacttaaagagctagtgcataaaagagtaacctcaccagaagactg

SEQ ID NO: 98382 - DNA, 60 bp, Artificial
  Synthetic oligonucleotide
ggtgcctccaggctacaagtacctgggaccagggaacagccttaaccaaggagaaccaac

SEQ ID NO: 98383 - DNA, 60 bp, Artificial
  Synthetic oligonucleotide
tctgacaactttgtagactgggtaactggtcaaatttgggagctgcctcccgagtcagat

SEQ ID NO: 98384 - DNA, 59 bp, Artificial
  Synthetic oligonucleotide
ctgacagctttgtggactgggtaactggtcaaatttgggagctgcctcccgagtcagat

SEQ ID NO: 98385 - DNA, 60 bp, Artificial
  Synthetic oligonucleotide
ctctgctctggactgctagaggaccctcgctgccatggctaccttctatgaagtcattgt

SEQ ID NO: 98386 - DNA, 60 bp, Artificial
  Synthetic oligonucleotide
ctctggactgctagaggaccctcgctgccatggctaccttctatgaagtcattgttcgcg

SEQ ID NO: 98387 - DNA, 60 bp, Artificial
  Synthetic oligonucleotide
ggactgctagaggaccctcgctgccatggctaccttctatgaagtcattgttcgcgtccc

SEQ ID NO: 98388 - DNA, 60 bp, Artificial
  Synthetic oligonucleotide
gaactgctagaggaccctcgctgccatggctaccttctacgaagtcattgttcgcgtccc

SEQ ID NO: 98389 - DNA, 60 bp, Artificial
  Synthetic oligonucleotide
aagaagggcggagccaataaggtggtggattctgggtatattcccgcctacctgctgccg

SEQ ID NO: 98390 - DNA, 60 bp, Artificial
  Synthetic oligonucleotide
ccaataaggtggtggattctgggtatattcccgcctacctgctgccgaaggtccaaccag

SEQ ID NO: 98391 - DNA, 60 bp, Artificial
  Synthetic oligonucleotide
cccagatcaacgactgggtcgccatcaccaaggtaaagaagggcggagccaataaggtgg

SEQ ID NO: 98392 - DNA, 60 bp, Artificial
  Synthetic oligonucleotide
gactgggtcgccatcaccaaggtaaagaagggcggagccaataaggtggtggattctggg

SEQ ID NO: 98393 - DNA, 60 bp, Artificial
  Synthetic oligonucleotide
gtatattcccgcctacctgctgccgaaggtccaaccggagcttcagtgggcgtggacaaa

SEQ ID NO: 98394 - DNA, 60 bp, Artificial
  Synthetic oligonucleotide
gtggattctgggtatattcccgcctacctgctgccgaaggtccaaccggagcttcagtgg

SEQ ID NO: 98395 - DNA, 60 bp, Artificial
  Synthetic oligonucleotide
gattctgggtatattcccgcctacctgctgccgaaggtccaaccagagcttcagtgggcg

SEQ ID NO: 98396 - DNA, 60 bp, Artificial
  Synthetic oligonucleotide
ttgaaccccagatcaacgactgggtcgccatcaccaaggtaaagaagggcggagccaata

SEQ ID NO: 98397 - DNA, 52 bp, Artificial
  Synthetic oligonucleotide
cggcatctcttctatggtccttggccgctacgtgagtcagattcgcgcccag

SEQ ID NO: 98398 - DNA, 60 bp, Artificial
  Synthetic oligonucleotide
tgagcagcctcagctgacggttgctgacagaattcgccgcgtgttcctgtacgagtggaa

SEQ ID NO: 98399 - DNA, 60 bp, Artificial
  Synthetic oligonucleotide
ctgacagctttgtggactgggtaactggtcaaatttgggagctgcctccagagtcagatt

SEQ ID NO: 98400 - DNA, 60 bp, Artificial
  Synthetic oligonucleotide
gcagcctcagctgacggttgctgacagaattcgccgcgtgttcctgtacgagtggaacaa

SEQ ID NO: 98401 - DNA, 60 bp, Artificial
  Synthetic oligonucleotide
tgagcagcctcagctgacggtggctgacagaattcgccgcgtgttcctgtacgagtggaa

SEQ ID NO: 98402 - DNA, 60 bp, Artificial
  Synthetic oligonucleotide
tgatagaattcgccgcgtgttcctgtacgagtggaacaaattttccaagcaggagtccaa

SEQ ID NO: 98403 - DNA, 60 bp, Artificial
  Synthetic oligonucleotide
gcagcctcagctgacggtggctgacagaattcgccgcgtgttcctgtacgagtggaacaa

SEQ ID NO: 98404 - DNA, 60 bp, Artificial
  Synthetic oligonucleotide
tttgaaaagggatctgaatattttcatctgcacacgctcgtggagacctccggcatctct

SEQ ID NO: 98405 - DNA, 58 bp, Artificial
  Synthetic oligonucleotide
gtgcagtttgaaaagggatctgaatattttcatctgcacacgcttgtggagacctccg

SEQ ID NO: 98406 - DNA, 60 bp, Artificial
  Synthetic oligonucleotide
ccaagggacggaggctattttcttagcagtgactctggctggaaaactaactttttgaaa

SEQ ID NO: 98407 - DNA, 60 bp, Artificial
  Synthetic oligonucleotide
gtacaggcaaatctattattgcacaagccatagcacaggcagttggtaatgttggttgct

SEQ ID NO: 98408 - DNA, 60 bp, Artificial
  Synthetic oligonucleotide
acttaaagagctggtgcataaaagagtaacctcaccagaagactggatgatgatgcagcc

SEQ ID NO: 98409 - DNA, 60 bp, Artificial
  Synthetic oligonucleotide
ttggttctaggttgggtacctccaggctacaagtacctgggaccagggaacagccttgac

SEQ ID NO: 98410 - DNA, 60 bp, Artificial
  Synthetic oligonucleotide
cctggggccagggaacagccttgaccaaggagaaccaaccaatccatctgacgccgctgc

SEQ ID NO: 98411 - DNA, 60 bp, Artificial
  Synthetic oligonucleotide
cctgggaccagggaacagccttgaccaaggagaaccaaccaatccatctgacgccgctgc

SEQ ID NO: 98412 - DNA, 60 bp, Artificial
  Synthetic oligonucleotide
agggtgtgaagagagaccagaacacactcaaccaatcagagacagaatgttaaacattca

SEQ ID NO: 98413 - DNA, 58 bp, Artificial
  Synthetic oligonucleotide
agggtgtgaagagagaccagaacacactcaaccaatcagagacagaatgttaaacatt

SEQ ID NO: 98414 - DNA, 60 bp, Artificial
  Synthetic oligonucleotide
gcatacaattacccggtactaactatgttgggcctggcaatgagctacaagctgggcctc

SEQ ID NO: 98415 - DNA, 60 bp, Artificial
  Synthetic oligonucleotide
catacaattacccggtactaactatgttgggcctggcaatgagctacaagctgggcctcc

SEQ ID NO: 98416 - DNA, 60 bp, Artificial
  Synthetic oligonucleotide
ttggttctaggttgggtacctcctggctacaagtacctgggaccagggaacagccttgac

SEQ ID NO: 98417 - DNA, 60 bp, Artificial
  Synthetic oligonucleotide
ggttgggtgcctcctggctacaagtacctgggaccagggaacagccttgaccaaggagaa

SEQ ID NO: 98418 - DNA, 60 bp, Artificial
  Synthetic oligonucleotide
ttaccgtggttagaataggctgtgaggaaagaccagaacacactcaaccaatcagagaca

SEQ ID NO: 98419 - DNA, 60 bp, Artificial
  Synthetic oligonucleotide
acagtggtcagaataggctgcgaagaaagaccagaacacactcaaccaatcagagacaga

SEQ ID NO: 98420 - DNA, 60 bp, Artificial
  Synthetic oligonucleotide
tctgacgcacgtgtcgcagacgcaggagcagaacaaggaaaaccagaaccccaattctga

SEQ ID NO: 98421 - DNA, 60 bp, Artificial
  Synthetic oligonucleotide
ggttggtggcgcagcatctgacgcacgtgtcgcagacgcaggagcagaacaaagagaatc

SEQ ID NO: 98422 - DNA, 60 bp, Artificial
  Synthetic oligonucleotide
taatggcgccggaggcgggaacaaggtggtggacgactgctacatccccaactacctgct

SEQ ID NO: 98423 - DNA, 55 bp, Artificial
  Synthetic oligonucleotide
ccaagggacggaggctattttcttagcagtgactctggctggaaaactaactttt

SEQ ID NO: 98424 - DNA, 55 bp, Artificial
  Synthetic oligonucleotide
gcgccgcgtgagtaaggccccggaggccctcttctttgtccagttcgagaagggg

SEQ ID NO: 98425 - DNA, 60 bp, Artificial
  Synthetic oligonucleotide
gccgacaggtaccaaaacaaatgttctcgtcacgcgggcatgcttcagatgctgtttccc

SEQ ID NO: 98426 - DNA, 60 bp, Artificial
  Synthetic oligonucleotide
ttctattaaaaccacacttaaagaactggtgcataaaagagtaacctcaccagaagactg

SEQ ID NO: 98427 - DNA, 60 bp, Artificial
  Synthetic oligonucleotide
caggcctgaaatcacttggttctaggttgggtacctccaggctacaagtacctggggcca

SEQ ID NO: 98428 - DNA, 60 bp, Artificial
  Synthetic oligonucleotide
ggtaactttggacagcaagtaaaccagtttaaagccatttgctctggtcaaacaattcgc

SEQ ID NO: 98429 - DNA, 60 bp, Artificial
  Synthetic oligonucleotide
aggcgccgacggagtgggtaatgcctcaggaaattggcattgcgattccacatggctggg

SEQ ID NO: 98430 - DNA, 60 bp, Artificial
  Synthetic oligonucleotide
gccgacggagtgggtaatgcctcaggaaattggcattgcgattccacatggctgggcgac

SEQ ID NO: 98431 - DNA, 60 bp, Artificial
  Synthetic oligonucleotide
cgacggagtgggtaatgcctcaggaaattggcattgcgattccacatggctgggcgacag

SEQ ID NO: 98432 - DNA, 60 bp, Artificial
  Synthetic oligonucleotide
gaccccacagctacagatgcaaaacaacaccacagacatggatatgaaaagcctgaagaa

SEQ ID NO: 98433 - DNA, 60 bp, Artificial
  Synthetic oligonucleotide
tgcccggcatttctgacagctttgtgaactgggtggccgagaaggaatgggagttgccgc

SEQ ID NO: 98434 - DNA, 60 bp, Artificial
  Synthetic oligonucleotide
ccagtatatggcatggttaactggaataatgaaaactttccatttaatgatgtagcagga

SEQ ID NO: 98435 - DNA, 60 bp, Artificial
  Synthetic oligonucleotide
gtaccagtgtatggaatggtgaattggaataatgaaaactttccatttaatgatgtagcg

SEQ ID NO: 98436 - DNA, 60 bp, Artificial
  Synthetic oligonucleotide
aaaagtgttccagtatatggcatggttaactggaataatgaaaactttccatttaatgat

SEQ ID NO: 98437 - DNA, 52 bp, Artificial
  Synthetic oligonucleotide
ttgtaccggaagtcccgcctaccggcggcgaccggcggcatctgatttggtg

SEQ ID NO: 98438 - DNA, 60 bp, Artificial
  Synthetic oligonucleotide
ccccattgtcccagacaccagtatcagcagcagtggtggtgaaagctctgaagaactcag

SEQ ID NO: 98439 - DNA, 60 bp, Artificial
  Synthetic oligonucleotide
gatctccaaaccacccccattgtcccagacaccagtatcagcagcagtggtggtgaaagc

SEQ ID NO: 98440 - DNA, 60 bp, Artificial
  Synthetic oligonucleotide
gctaacttggtgtaatgcacaaagctggagccactatgaaaactgggcaataaactacac

SEQ ID NO: 98441 - DNA, 60 bp, Artificial
  Synthetic oligonucleotide
ccagtatatggcatggttaactggaataatgaaaactttccatttaatgatgtagcaggg

SEQ ID NO: 98442 - DNA, 60 bp, Artificial
  Synthetic oligonucleotide
gaaagctctgaagaactcagtgaaagcagctttcttaacctcatcaccccaggcgcctgg

SEQ ID NO: 98443 - DNA, 60 bp, Artificial
  Synthetic oligonucleotide
tggtgaaagctctgaagaactcagtgaaagcagctttttcaacctcatcactccaggcgc

SEQ ID NO: 98444 - DNA, 57 bp, Artificial
  Synthetic oligonucleotide
aaaatttaaaagaagacaccaaatcagatgccgccggtcgccgccggtaggcgggac

SEQ ID NO: 98445 - DNA, 60 bp, Artificial
  Synthetic oligonucleotide
ctgcccctgtggcccattttcaaggaagtttaccggaagtgcccgcgtacaacgcctcag

SEQ ID NO: 98446 - DNA, 60 bp, Artificial
  Synthetic oligonucleotide
gaggagaaaatgcagtattatctagtgaagacttacacaagcctgggcaagttagcgtac

SEQ ID NO: 98447 - DNA, 60 bp, Artificial
  Synthetic oligonucleotide
gaggagaagatgcagtattatctagtgaagacttacacaagcctgggcaagttagcgtac

SEQ ID NO: 98448 - DNA, 60 bp, Artificial
  Synthetic oligonucleotide
gcagtattatctagtgaagacttacacaagcctgggcaagttagcatacaattacccggt

SEQ ID NO: 98449 - DNA, 60 bp, Artificial
  Synthetic oligonucleotide
gcctgggcaagttagcgtacaactacccggtactaactatgttgggcctggcaatgagct

SEQ ID NO: 98450 - DNA, 60 bp, Artificial
  Synthetic oligonucleotide
acagtgaaaccccgcgctctagtacgcccgtccccgggaccagttcaggagaatcatttg

SEQ ID NO: 98451 - DNA, 60 bp, Artificial
  Synthetic oligonucleotide
cgcccatccccgggaccagttcaggagaatcatttgtcggaagcccagtttcctccgaag

SEQ ID NO: 98452 - DNA, 60 bp, Artificial
  Synthetic oligonucleotide
cgcccatccccgggaccagttcaggagaatcatttgtcggaagctcagtttcctccgaag

SEQ ID NO: 98453 - DNA, 60 bp, Artificial
  Synthetic oligonucleotide
gggaccagttcaggagaatcatttgtcggaagcccagtttcctccgaagtggtagccgcg

SEQ ID NO: 98454 - DNA, 60 bp, Artificial
  Synthetic oligonucleotide
gcgtacaactacccggtactaactatgttgggcctggcaatgagctacaagctgggcccc

SEQ ID NO: 98455 - DNA, 60 bp, Artificial
  Synthetic oligonucleotide
gcagctgcccctgtggcccattttcaaggaagtttgccggaagttcccgcttacaacgcc

SEQ ID NO: 98456 - DNA, 60 bp, Artificial
  Synthetic oligonucleotide
tgacgtcacaggaaatgacgtaattgtccgccatcttgtaccggaagtcccgcctaccgg

SEQ ID NO: 98457 - DNA, 60 bp, Artificial
  Synthetic oligonucleotide
gacgtcacaggaaatgacgtaactgtccgccatcttgtaccggaagtcccgcctaccggc

SEQ ID NO: 98458 - DNA, 60 bp, Artificial
  Synthetic oligonucleotide
acgtcacaggaaatgacgtaactgtccgccatcttgtaccggaagtcccgcctaccggcg

SEQ ID NO: 98459 - DNA, 60 bp, Artificial
  Synthetic oligonucleotide
ccgccggtaggcgggacttccggtacaagatggcggacaattacgtcatttcctgtgacg

SEQ ID NO: 98460 - DNA, 60 bp, Artificial
  Synthetic oligonucleotide
tcgccgccggtaggcgggacttccggtacaagatggcggacaattacgtcatttcctgtg

SEQ ID NO: 98461 - DNA, 60 bp, Artificial
  Synthetic oligonucleotide
ccggtcgccgccggtaggcgggacttccggtacaagatggcggacaattacgtcatttcc

SEQ ID NO: 98462 - DNA, 60 bp, Artificial
  Synthetic oligonucleotide
tcagatgccgccggtcgccgccggtaggcgggacttccggtacaagatggcggacagtta

SEQ ID NO: 98463 - DNA, 60 bp, Artificial
  Synthetic oligonucleotide
atcagatgccgccggtcgccgccggtaggcgggacttccggtacaagatggcggacaatt

SEQ ID NO: 98464 - DNA, 60 bp, Artificial
  Synthetic oligonucleotide
ccaaatcagatgccgccggtcgccgccggtaggcgggacttccggtacaagatggcggac

SEQ ID NO: 98465 - DNA, 50 bp, Artificial
  Synthetic oligonucleotide
ttgtaccggaagtcccgcctaccggcggcgaccggcggcatctgatttgg

SEQ ID NO: 98466 - DNA, 60 bp, Artificial
  Synthetic oligonucleotide
agagactggtcccgtatctttcaatacttatgttcatcgcccaggaatgtcaaagaagtg

SEQ ID NO: 98467 - DNA, 60 bp, Artificial
  Synthetic oligonucleotide
agtggcagtagttaacttatgcactggatatattcctacatgtacactaggttgtacttt

SEQ ID NO: 98468 - DNA, 60 bp, Artificial
  Synthetic oligonucleotide
cggaggaaattggtcaattaatggaattgttgaggacctacgccggagtatcgcagagcg

SEQ ID NO: 98469 - DNA, 60 bp, Artificial
  Synthetic oligonucleotide
ccgatctcctttcgaataagccactggcagcgtttataaaatcttgacactctggttcgt

SEQ ID NO: 98470 - DNA, 60 bp, Artificial
  Synthetic oligonucleotide
gtcgtcagccagcaaccatgtcttttcgtattccacgtgaagcctgtcaaacgctgttct

SEQ ID NO: 98471 - DNA, 60 bp, Artificial
  Synthetic oligonucleotide
cgtgaagcctgtcaaacgctgttctgctttgcggacatccaaaactaactgtcatctcag

SEQ ID NO: 98472 - DNA, 60 bp, Artificial
  Synthetic oligonucleotide
gcgacctactggatttccaatccaacgcgggaatccgaatatcaggctttactacgatgg

SEQ ID NO: 98473 - DNA, 60 bp, Artificial
  Synthetic oligonucleotide
tggatggaggagaaaatgccgatacctttagcgaaatggcaaggtgcatgtctaccgcgg

SEQ ID NO: 98474 - DNA, 60 bp, Artificial
  Synthetic oligonucleotide
cctacgccggagtatcgcagagcgaatgccaaaatgcatgtacgtcgtcagcgaacacgg

SEQ ID NO: 98475 - DNA, 60 bp, Artificial
  Synthetic oligonucleotide
ccccgatgttcgaactcaaatcgacagcgcgcaaagaatatgggacagccatttcagcgg

SEQ ID NO: 98476 - DNA, 60 bp, Artificial
  Synthetic oligonucleotide
gtagacgacgacgcattcgaaagaatgttagagtcatccaactatcagaaagagactggt

SEQ ID NO: 98477 - DNA, 60 bp, Artificial
  Synthetic oligonucleotide
cgccacgggcagctgtagatgtagtttcttactcaacgccgctgctttccaactatgtag

SEQ ID NO: 98478 - DNA, 60 bp, Artificial
  Synthetic oligonucleotide
gggtggagtagtggtatatcgatgcaaattaattagggtttcttttgacgcacgatcact

SEQ ID NO: 98479 - DNA, 60 bp, Artificial
  Synthetic oligonucleotide
aggaagcgaggtgccacccgcacgtttaggagcgggttcagaaccggagctatcggcagg

SEQ ID NO: 98480 - DNA, 60 bp, Artificial
  Synthetic oligonucleotide
tgcgaacgaattctttcatagacgactgatcgttctcggtattcgttggatccatgggct

SEQ ID NO: 98481 - DNA, 60 bp, Artificial
  Synthetic oligonucleotide
ttgttctgatttaatgtggccagggagctcgtagagctattggtttcaaaagctgtgcga

SEQ ID NO: 98482 - DNA, 60 bp, Artificial
  Synthetic oligonucleotide
caaggttggtccacgggcacactcattaaactcgttgtcccaagataggcgttatcagtg

SEQ ID NO: 98483 - DNA, 60 bp, Artificial
  Synthetic oligonucleotide
taggattgccagtatctgggtccccatcgttcgcagcagccgtcccaggaagcgaggtgc

SEQ ID NO: 98484 - DNA, 60 bp, Artificial
  Synthetic oligonucleotide
cgtcgtagtcccaatccaaatcaggatcctcctccacgccacctaaaacatacggtggta

SEQ ID NO: 98485 - DNA, 60 bp, Artificial
  Synthetic oligonucleotide
aacagtccatacgtgaaaatggccaaaaccatacaacaggaagtgtttcgcaggatgacc

SEQ ID NO: 98486 - DNA, 60 bp, Artificial
  Synthetic oligonucleotide
ggttcgttaccagcattgcgtaacatagcaaatttactggaattaggctcctgtacgctg

SEQ ID NO: 98487 - DNA, 60 bp, Artificial
  Synthetic oligonucleotide
ttatccttgctaacatccgtagcattaaaataatcggcatcgtgttgaaatgcaacctta

SEQ ID NO: 98488 - DNA, 51 bp, Artificial
  Synthetic oligonucleotide
gtgaacgtgatgtcctgtccgttggacccgtggactgtcgaatgtgctggt

SEQ ID NO: 98489 - DNA, 60 bp, Artificial
  Synthetic oligonucleotide
tgtattaaaatttacaaacaggaaggatcaaatacagaatgtcgacccgaacgattggtg

SEQ ID NO: 98490 - DNA, 60 bp, Artificial
  Synthetic oligonucleotide
cgggtatagaagcgaatagatgcgtttcatatattaaaactggtatgcctggcaggagtt

SEQ ID NO: 98491 - DNA, 60 bp, Artificial
  Synthetic oligonucleotide
agttgctcgttaaacgacatttcggtgatttcacgtgtttggaaaattttttaccgcaat

SEQ ID NO: 98492 - DNA, 60 bp, Artificial
  Synthetic oligonucleotide
cactttctctgtaaacataattgggtattttaataggtgctttgactcgaaccctcatgg

SEQ ID NO: 98493 - DNA, 58 bp, Artificial
  Synthetic oligonucleotide
tggatgtttgacgcttcaacctccatggggtcgtcgtcccatatttacccgaacagac

SEQ ID NO: 98494 - DNA, 60 bp, Artificial
  Synthetic oligonucleotide
gtagtcgccccaagaagtgttcatgatttcttcggttgtgggtggagtagtggtatatcg

SEQ ID NO: 98495 - DNA, 60 bp, Artificial
  Synthetic oligonucleotide
ggcaacggaactaacgggtaacatgcattattcctctgatcgcgttgctattacccgacc

SEQ ID NO: 98496 - DNA, 60 bp, Artificial
  Synthetic oligonucleotide
gtagaatatgacttgaacaatcgttcctctggccaccaattcggattattgtagtcgccc

SEQ ID NO: 98497 - DNA, 54 bp, Artificial
  Synthetic oligonucleotide
attaagtacagtggtgccgacagtaaacgaagcgtcaaccttggtgatgtgttc

SEQ ID NO: 98498 - DNA, 60 bp, Artificial
  Synthetic oligonucleotide
atgaccttcactgtcacacaacaaattacctggacccacgaagctactaccgaaccacgt

SEQ ID NO: 98499 - DNA, 60 bp, Artificial
  Synthetic oligonucleotide
ggtatcctacagcgggacgattcaaacggaccaccaacagactggcgtgaatggatcgac

SEQ ID NO: 98500 - DNA, 60 bp, Artificial
  Synthetic oligonucleotide
gtcccatatttacccgaacagacgtaggtacaggtgtagtgacagttgcgtcgactggag

SEQ ID NO: 98501 - DNA, 60 bp, Artificial
  Synthetic oligonucleotide
gtagtggaagctttgcccatttctttagttagtcccgaagagtgtgcagcggcgttttga

SEQ ID NO: 98502 - DNA, 60 bp, Artificial
  Synthetic oligonucleotide
ggaacctacaacaatatcagtactcatcaaaatgtcaaactcgcaagaagtgaaccaaca

SEQ ID NO: 98503 - DNA, 60 bp, Artificial
  Synthetic oligonucleotide
caattcaacgacgaggaggaaataccatgtggccaacggtatcctacagcgggacgattc

SEQ ID NO: 98504 - DNA, 60 bp, Artificial
  Synthetic oligonucleotide
ccacgtgatacctttattgctagtacctgaagcacctaatttaatacgttttctctcgtt

SEQ ID NO: 98505 - DNA, 60 bp, Artificial
  Synthetic oligonucleotide
gctagtgttaggtttgttcgggtatattgctgtctcgctgcctgtcaagaactgatcggc

SEQ ID NO: 98506 - DNA, 52 bp, Artificial
  Synthetic oligonucleotide
ttttgccaattgggccgctccggtggaggaggacctaaataacgaaattctc

SEQ ID NO: 98507 - DNA, 60 bp, Artificial
  Synthetic oligonucleotide
tagtcacccagcttttaacgatagattgcggagttacgaatggatgtcagctggcttctt

SEQ ID NO: 98508 - DNA, 60 bp, Artificial
  Synthetic oligonucleotide
cgtggtcgccactcgcttcaccgctgttaggattgccgttaccgtcgtagtcccaatcca

SEQ ID NO: 98509 - DNA, 60 bp, Artificial
  Synthetic oligonucleotide
ttgccgttgctagtgctgttgtccggggctgaggtgtttgccacgtggtcgccactcgct

SEQ ID NO: 98510 - DNA, 60 bp, Artificial
  Synthetic oligonucleotide
atcggcaggtcgtttgctacccgatccgctagagcttgccatggatccagatgcgcttcc

SEQ ID NO: 98511 - DNA, 60 bp, Artificial
  Synthetic oligonucleotide
ctttctataacattcccgaattttacgctaatacaaatataaactggatagacatgaaag

SEQ ID NO: 98512 - DNA, 60 bp, Artificial
  Synthetic oligonucleotide
gcaatctatcgaagaacttatatataggtatccttgttgccccccggaagctttctataa

SEQ ID NO: 98513 - DNA, 60 bp, Artificial
  Synthetic oligonucleotide
ccaagagggcccgcggcaaaagaagtcgcgacggaagcagcgattccgaatgattaggga

SEQ ID NO: 98514 - DNA, 60 bp, Artificial
  Synthetic oligonucleotide
tatttcaacgcgtacggttcagatatttgcaatatgtattacagtatttcggagagttta

SEQ ID NO: 98515 - DNA, 60 bp, Artificial
  Synthetic oligonucleotide
tgtcaagaactgatcggctaaatcgacaccacgctttgcgatcaatccgagagctgttgc

SEQ ID NO: 98516 - DNA, 60 bp, Artificial
  Synthetic oligonucleotide
cctactacactagaagaactacgacgctcgaataaactgttgaaccgattgatgaacgac

SEQ ID NO: 98517 - DNA, 60 bp, Artificial
  Synthetic oligonucleotide
agaatcgtaaggtactgaccaatgattggctacatcgatataatgcgaaccggaacattc

SEQ ID NO: 98518 - DNA, 60 bp, Artificial
  Synthetic oligonucleotide
tatacacgatcggcaatacatacgatgaaaatttcctactggtgtatcggtaggcgagtt

SEQ ID NO: 98519 - DNA, 60 bp, Artificial
  Synthetic oligonucleotide
cagataaaaaactctcctcgagtacaatggtctcgggcggcattagcaagaacttggcgt

SEQ ID NO: 98520 - DNA, 60 bp, Artificial
  Synthetic oligonucleotide
gctacgttaccacgaaatttaaacgcgtcgcagatttcttttatacacgatcggcaatac

SEQ ID NO: 98521 - DNA, 60 bp, Artificial
  Synthetic oligonucleotide
gaggatcccgaaaacgatacacatattccgacaccaatggtacgagcgttttaggtaaac

SEQ ID NO: 98522 - DNA, 60 bp, Artificial
  Synthetic oligonucleotide
atagcgcgaactgaatttaattttaaactttgagtataatcctctatctcaggaaaaaac

SEQ ID NO: 98523 - DNA, 60 bp, Artificial
  Synthetic oligonucleotide
ccgttttattacgcgatgcaaaattctgttaacgattcatcgttatctggttggccttgt

SEQ ID NO: 98524 - DNA, 60 bp, Artificial
  Synthetic oligonucleotide
gttgaaccgattgatgaacgacattaagcacaactaattccaaaagaactaatctcactc

SEQ ID NO: 98525 - DNA, 60 bp, Artificial
  Synthetic oligonucleotide
gcgtactcgaatagcgtgttcaggagattggatggaaatgacgtctgataagtagcgccg

SEQ ID NO: 98526 - DNA, 60 bp, Artificial
  Synthetic oligonucleotide
ccgacgacatcggtacttgcggatttaggttccatacttgttgaagccacgttttcagat

SEQ ID NO: 98527 - DNA, 60 bp, Artificial
  Synthetic oligonucleotide
ccggatacaaatcgtgaatcgttcgaagtcggaggggtttattgtctccgggtctattaa

SEQ ID NO: 98528 - DNA, 60 bp, Artificial
  Synthetic oligonucleotide
gtgccggacgtacctacgtttaccgcgttagctagtgttaaaggaggttcgaaagacgct

SEQ ID NO: 98529 - DNA, 60 bp, Artificial
  Synthetic oligonucleotide
gagatggtttatacgtaaccaaagctacaactcctcctggtagtgttgctcgagcatctg

SEQ ID NO: 98530 - DNA, 60 bp, Artificial
  Synthetic oligonucleotide
ctttcgctccttcttccatactaatttcattaccaacaactatacgtcgattaactacgt

SEQ ID NO: 98531 - DNA, 60 bp, Artificial
  Synthetic oligonucleotide
tagcggctaataatggtgcagtattccaacgaatagtttttaaacgtacatctttaaagt

SEQ ID NO: 98532 - DNA, 60 bp, Artificial
  Synthetic oligonucleotide
atgaaagtaataattctgcttctcaaccatctcttcatattggaattcaacccgtacccg

SEQ ID NO: 98533 - DNA, 60 bp, Artificial
  Synthetic oligonucleotide
ctcctaacgaaagacctaattgggaaaggttaaacgaaggacaaagacgatacgcttggg

SEQ ID NO: 98534 - DNA, 60 bp, Artificial
  Synthetic oligonucleotide
tgtgcgatgatactggcgttgagtatgatttacttccacaatatacaatgcgagatggtt

SEQ ID NO: 98535 - DNA, 60 bp, Artificial
  Synthetic oligonucleotide
cccgtacccgctctcacaacaacaagtataccttctacttctattgataatcagtttact

SEQ ID NO: 98536 - DNA, 54 bp, Artificial
  Synthetic oligonucleotide
aattagaatcgcgcgagggtcatccacacggacacccgttgaatccaaaagacg

SEQ ID NO: 98537 - DNA, 60 bp, Artificial
  Synthetic oligonucleotide
aaatttcacgtggcttagaatcgaatacttggactgacgtatttatgactacacctttag

SEQ ID NO: 98538 - DNA, 60 bp, Artificial
  Synthetic oligonucleotide
cgaaaagtgtgccgtatactagtggtattgaacgtgttgccgatctcgtttcaggcgaca

SEQ ID NO: 98539 - DNA, 60 bp, Artificial
  Synthetic oligonucleotide
tcaggcgacagtccaggtacagttctcctcggccacgattatattggaccaggcaatccg

SEQ ID NO: 98540 - DNA, 60 bp, Artificial
  Synthetic oligonucleotide
gtacccggtactggaacagctatggaagttggtagtactactggtaatgctagttctgcg

SEQ ID NO: 98541 - DNA, 60 bp, Artificial
  Synthetic oligonucleotide
gattaataaattgaaaacagtatgcaggcatattagaatgacgagtataaaaaggaaagt

SEQ ID NO: 98542 - DNA, 60 bp, Artificial
  Synthetic oligonucleotide
ggcgcagccggactcttaggtaaacggacatttgaacgtacctttggacaacagtatcca

SEQ ID NO: 98543 - DNA, 59 bp, Artificial
  Synthetic oligonucleotide
gacagtcgaattggagaacaaatcttctcgggaaacatccccgattttggatcactttt

SEQ ID NO: 98544 - DNA, 60 bp, Artificial
  Synthetic oligonucleotide
tcaagcaatgatacctactgcaattactaccgaattaacaaattcagcgtacaatcaatt

SEQ ID NO: 98545 - DNA, 60 bp, Artificial
  Synthetic oligonucleotide
ctagttctgcgaaacgtaaagcagaaagtgcaggtggaattggaaagaaacgacctggca

SEQ ID NO: 98546 - DNA, 56 bp, Artificial
  Synthetic oligonucleotide
ggagacgataaggaacttacgtctactgaccgaattgctaaagaacacgacgtaca

SEQ ID NO: 98547 - DNA, 60 bp, Artificial
  Synthetic oligonucleotide
agaattcggcggaccaataacacacaatgcattcatttttggattaccgtcaagaccttc

SEQ ID NO: 98548 - DNA, 60 bp, Artificial
  Synthetic oligonucleotide
atttcagaacaacaatctgctcccactgctcctatcgaacatccggttaataacgcagac

SEQ ID NO: 98549 - DNA, 60 bp, Artificial
  Synthetic oligonucleotide
ccgaagtacacgaacatccgcccgatatcgaatccgaagacgaaggtttagagtatttag

SEQ ID NO: 98550 - DNA, 60 bp, Artificial
  Synthetic oligonucleotide
taaccggagttgaagaattagatccttgcaggtttttgttgagccatatttgtccagggc

SEQ ID NO: 98551 - DNA, 60 bp, Artificial
  Synthetic oligonucleotide
cgagggctccgagttcgtggacgcgcttcctggaacgcaaaggctttcgaagaaatcggt

SEQ ID NO: 98552 - DNA, 58 bp, Artificial
  Synthetic oligonucleotide
ctttcgaagaaatcggtagatactggcgtcgttaaagaaggggcatctgcaggtactt

SEQ ID NO: 98553 - DNA, 60 bp, Artificial
  Synthetic oligonucleotide
aagctagtatctctagaatgataatattcatacggatctaaattattagcataaaatata

SEQ ID NO: 98554 - DNA, 60 bp, Artificial
  Synthetic oligonucleotide
agttgctccgctttcgtttagatgctggttcacttcgtcgatcaactgtttggccaaccc

SEQ ID NO: 98555 - DNA, 60 bp, Artificial
  Synthetic oligonucleotide
tcgaatgttcttggagcacctacccagctggctttacgagacgacgatacttcgaccaat

SEQ ID NO: 98556 - DNA, 60 bp, Artificial
  Synthetic oligonucleotide
tggccaacccagctattaccgagttctgagacatcgtgtataggcagtcggtttctttga

SEQ ID NO: 98557 - DNA, 60 bp, Artificial
  Synthetic oligonucleotide
tcaacgcttatccacagtacggtgcctctactggtactgtacaaattgcgaaaggtactg

SEQ ID NO: 98558 - DNA, 60 bp, Artificial
  Synthetic oligonucleotide
cagatggcacctaagcgtatcccacctttgaaagcacctcctaacgaaagacctaattgg

SEQ ID NO: 98559 - DNA, 60 bp, Artificial
  Synthetic oligonucleotide
cgtcattataaacctaaaatgggtcttataaccactccaatcgacgctattatcaacgct

SEQ ID NO: 98560 - DNA, 60 bp, Artificial
  Synthetic oligonucleotide
atcaattttacggagttcaaaacacaaacgccggttttcttactggttctccgcgtcatc

SEQ ID NO: 98561 - DNA, 60 bp, Artificial
  Synthetic oligonucleotide
tctgctcccactgctcctatcgaacatccggttaataacgcagacgatagtgacgacgaa

SEQ ID NO: 98562 - DNA, 60 bp, Artificial
  Synthetic oligonucleotide
gtgacgacgaagtaggtgggcctatagaagtacaagccgaagtacacgaacatccgcccg

SEQ ID NO: 98563 - DNA, 60 bp, Artificial
  Synthetic oligonucleotide
ggtacctatacgcgagtggtcgttgacgttgtggttgttttacgaagtaaaatatatagc

SEQ ID NO: 98564 - DNA, 60 bp, Artificial
  Synthetic oligonucleotide
cggaggtgaaaacgtagctcctactgcatttgctgctaatcaagcaatgatacctactgc

SEQ ID NO: 98565 - DNA, 60 bp, Artificial
  Synthetic oligonucleotide
cgagatcatctgtgattcgattaaatccttctgccatggttttaaaatcttccggataca

SEQ ID NO: 98566 - DNA, 60 bp, Artificial
  Synthetic oligonucleotide
gaaagcactcaaattcaagatattcaatgtgcaagttaaagaagtcacgacgcaagacca

SEQ ID NO: 98567 - DNA, 60 bp, Artificial
  Synthetic oligonucleotide
gtaatagtggaggagaagcaagtgcagctgccaccgaaggctccgaacctgtggcagcac

SEQ ID NO: 98568 - DNA, 60 bp, Artificial
  Synthetic oligonucleotide
cctgccaagctacaacaaccacatgtaccaagccatcacaagcggaacaaacccagactc

SEQ ID NO: 98569 - DNA, 55 bp, Artificial
  Synthetic oligonucleotide
tgttgggcctggtaacggccttgataaagggccacctgtcaataaagcggacagc

SEQ ID NO: 98570 - DNA, 60 bp, Artificial
  Synthetic oligonucleotide
ctagagcctttaggcctagtagaagaacctgtaaacatggctcctgctaaaaagagtagt

SEQ ID NO: 98571 - DNA, 60 bp, Artificial
  Synthetic oligonucleotide
taatgaacaccagctgccctatgttctgggctcggccacggaggggacgatgccaccgtt

SEQ ID NO: 98572 - DNA, 60 bp, Artificial
  Synthetic oligonucleotide
catagcatgttcgctcattcacaggatttagacaggctaatgaatcctctcctagatcag

SEQ ID NO: 98573 - DNA, 60 bp, Artificial
  Synthetic oligonucleotide
ggttgcattcattcgttgctctgctctcacagagaacggacctcaggtcaggaaaatggc

SEQ ID NO: 98574 - DNA, 60 bp, Artificial
  Synthetic oligonucleotide
tgaccggaagcacgtgaccggaacttacgtcacttcccccctcccctgattggctggttc

SEQ ID NO: 98575 - DNA, 60 bp, Artificial
  Synthetic oligonucleotide
ggcattttctaggcctcttcagatttcttctgacaaattctatgaagttatcatcaggct

SEQ ID NO: 98576 - DNA, 60 bp, Artificial
  Synthetic oligonucleotide
ctggtatgagactgcagccgcatcttggcggcatttgaaagctggagcccccaagccaaa

SEQ ID NO: 98577 - DNA, 60 bp, Artificial
  Synthetic oligonucleotide
tcatcaggctaccctcggatattgatcaagatgtgcctggtttgtctcttaactttgtag

SEQ ID NO: 98578 - DNA, 60 bp, Artificial
  Synthetic oligonucleotide
ttggaagaaggcagtgagtacatccatctgcattgctgtattgcccaggggaatgtccga

SEQ ID NO: 98579 - DNA, 60 bp, Artificial
  Synthetic oligonucleotide
attaagagcgagccctgagctctttgcttcagttgctcctctgccttccagtccggacac

SEQ ID NO: 98580 - DNA, 60 bp, Artificial
  Synthetic oligonucleotide
cgaatgagccttccgagcctcctaagatatgggctccacctactagggaggagctagagg

SEQ ID NO: 98581 - DNA, 60 bp, Artificial
  Synthetic oligonucleotide
agcagcaaagaactatagcaatctggttgattggctcattgagatgggtatcacctctga

SEQ ID NO: 98582 - DNA, 60 bp, Artificial
  Synthetic oligonucleotide
cagtccggacacatctcctaagagaaagaaaacccgtggggagtatcaggtacgctgtgc

SEQ ID NO: 98583 - DNA, 60 bp, Artificial
  Synthetic oligonucleotide
cctgcagatcctccactagagtatgtaaatcagaagtggaattcttacattacacagtat

SEQ ID NO: 98584 - DNA, 60 bp, Artificial
  Synthetic oligonucleotide
ccccaacgaaaagacaataataggggctttgtacttcctggctataagtatgttgggcct

SEQ ID NO: 98585 - DNA, 60 bp, Artificial
  Synthetic oligonucleotide
ccaagccaaaatcaaaccagcaatctcagtctgtgtctacagacagaaaaccccaacgaa

SEQ ID NO: 98586 - DNA, 60 bp, Artificial
  Synthetic oligonucleotide
ggcttccaggacccaaacttctagaccaaagggtaagagcatacagtggaggaacagata

SEQ ID NO: 98587 - DNA, 60 bp, Artificial
  Synthetic oligonucleotide
accggctcaaaacataataggaattgcaaaagacccctacaggtcaggcagtactctggc

SEQ ID NO: 98588 - DNA, 60 bp, Artificial
  Synthetic oligonucleotide
cctgcaaccaggtccagtagctactacacatacagaagatcaggcttccagtgtaccggc

SEQ ID NO: 98589 - DNA, 60 bp, Artificial
  Synthetic oligonucleotide
ggaaaccccatccttctccaaacctgggaggttttggtctccataatccacctccccagg

SEQ ID NO: 98590 - DNA, 60 bp, Artificial
  Synthetic oligonucleotide
ctgtgaaaggagcatttggtgcaatggggagaaattggcttccaggacccaaacttctag

SEQ ID NO: 98591 - DNA, 60 bp, Artificial
  Synthetic oligonucleotide
cctagatcagtacctgtggaatttctctgaggttaatggtggcaggaatgcacagttcaa

SEQ ID NO: 98592 - DNA, 60 bp, Artificial
  Synthetic oligonucleotide
tgagcaagaaatagcaccaactaacggtgtagggtggagaccttatggattgaccgtaac

SEQ ID NO: 98593 - DNA, 60 bp, Artificial
  Synthetic oligonucleotide
cctacaggtcaggcagtactctggcaggaatttcagacatcatggtaacagatgagcaag

SEQ ID NO: 98594 - DNA, 60 bp, Artificial
  Synthetic oligonucleotide
tgtccgatcttttgttctggggagatacatgtctcaaattaaagactcaattctgagaga

SEQ ID NO: 98595 - DNA, 60 bp, Artificial
  Synthetic oligonucleotide
gtgcatgattgtggatggaaattctactacaatggaacacagaattcctttggaggaaag

SEQ ID NO: 98596 - DNA, 60 bp, Artificial
  Synthetic oligonucleotide
gggagcgtcctatgcggatgggtgaaaagagaattcaacaaaagaaatgccatatggctc

SEQ ID NO: 98597 - DNA, 60 bp, Artificial
  Synthetic oligonucleotide
gctctacggacctgcgaccaccggaaagaccaacatagccgaggctattgcccatgctgt

SEQ ID NO: 98598 - DNA, 60 bp, Artificial
  Synthetic oligonucleotide
tttaatgactgcgttgataaaatgcttatatggtgggaggagggaaaaatgaccaataaa

SEQ ID NO: 98599 - DNA, 60 bp, Artificial
  Synthetic oligonucleotide
gaccaataaagtagtggaatccgcaaaagcgatactgggggggtctgctgtacgagttga

SEQ ID NO: 98600 - DNA, 60 bp, Artificial
  Synthetic oligonucleotide
gtgacgcacttcctttgatgacgtatttccggttgtcaaggctgatcgggcgcatgcgcc

SEQ ID NO: 98601 - DNA, 60 bp, Artificial
  Synthetic oligonucleotide
gagactggaggctatgtagaagataggctgattggtaccaggtatttgactcagaatctg

SEQ ID NO: 98602 - DNA, 60 bp, Artificial
  Synthetic oligonucleotide
aaggaagtgcgtcaccggaagtcacgtgacaggagacacgtcaccggaagtcacatgacc

SEQ ID NO: 98603 - DNA, 60 bp, Artificial
  Synthetic oligonucleotide
ggtctgggaactcagaaaagaaaactccaagagatggaaccctgagatccaatttaccag

SEQ ID NO: 98604 - DNA, 60 bp, Artificial
  Synthetic oligonucleotide
tggcgcgcaaaaagtcctgctgtccttgagtctcattggagggttcgttcgttcgaacca

SEQ ID NO: 98605 - DNA, 60 bp, Artificial
  Synthetic oligonucleotide
cgcccgatctgccatgaaaattaaaccggaaatacgtcatcaaaggaagtgcgtcaccgg

SEQ ID NO: 98606 - DNA, 59 bp, Artificial
  Synthetic oligonucleotide
ctgggagcactacctggcatggtctggcagaacagagatatttacctgcagggtcctat

SEQ ID NO: 98607 - DNA, 60 bp, Artificial
  Synthetic oligonucleotide
ctttttgcgcgccaggaaatggtgcaatctaggagagtgtataaggagagctttttccgg

SEQ ID NO: 98608 - DNA, 60 bp, Artificial
  Synthetic oligonucleotide
cctaccacagaaggagaccaacacccaggaacactaccagcagctaacacaagaaaaggt

SEQ ID NO: 98609 - DNA, 60 bp, Artificial
  Synthetic oligonucleotide
caattctatttcatgggccagcatcaacaggaaaaagtataattgctcaacacattgcaa

SEQ ID NO: 98610 - DNA, 60 bp, Artificial
  Synthetic oligonucleotide
gaagcaggaaacttctctaaccaagtaaaccaattcaaagccatatgttcaggtcaaaca

SEQ ID NO: 98611 - DNA, 60 bp, Artificial
  Synthetic oligonucleotide
aatttaatcaaaaatacactagaaataacaactcttactctagcaagaacaaaaacagca

SEQ ID NO: 98612 - DNA, 60 bp, Artificial
  Synthetic oligonucleotide
aaaaacagcatatgacttaatacttgaaaaggcaaaaccaagcatgctaccaacatttaa

SEQ ID NO: 98613 - DNA, 60 bp, Artificial
  Synthetic oligonucleotide
cagcatgcacaattggaactacattaaagtctgccatgctataacttgtgtactaaacag

SEQ ID NO: 98614 - DNA, 60 bp, Artificial
  Synthetic oligonucleotide
gtgcctttgctccaaaactctcagaaacagactcaccaactacatctcaacaaccagagg

SEQ ID NO: 98615 - DNA, 60 bp, Artificial
  Synthetic oligonucleotide
agaatcaggggtggcgggacaaatggtacaagacgatgcacacacacaaatggtaacacc

SEQ ID NO: 98616 - DNA, 60 bp, Artificial
  Synthetic oligonucleotide
ctgaacacgcaaaagactacggaggtaaaattggacattacttcttcagagcaaagcgtg

SEQ ID NO: 98617 - DNA, 57 bp, Artificial
  Synthetic oligonucleotide
ttttacccatggttacctacaaaaccaactcaatacagatattacctatcatgcacc

SEQ ID NO: 98618 - DNA, 60 bp, Artificial
  Synthetic oligonucleotide
ggacaatcacaacaaataacagactcaatacaaacaggactacacagtgacattatgttc

SEQ ID NO: 98619 - DNA, 60 bp, Artificial
  Synthetic oligonucleotide
ctccacaggaatatatcactttgacacaaaaccactaaaattaactcactcatggcaaac

SEQ ID NO: 98620 - DNA, 60 bp, Artificial
  Synthetic oligonucleotide
ctctcagatttccacatcagtgaaaacttcgccagcggacaacaactacgcagcaactcc

SEQ ID NO: 98621 - DNA, 60 bp, Artificial
  Synthetic oligonucleotide
aactactaactgaacctaccacagaaggagaccaacacccaggaacactaccagcagcta

SEQ ID NO: 98622 - DNA, 58 bp, Artificial
  Synthetic oligonucleotide
ggggagggcttggttagaatcactgcacacgcatcaagactcatacatctaaatatgc

SEQ ID NO: 98623 - DNA, 60 bp, Artificial
  Synthetic oligonucleotide
cagaatttcaatacttgggggagggcttggttagaatcactgcacacgcatcaagactca

SEQ ID NO: 98624 - DNA, 60 bp, Artificial
  Synthetic oligonucleotide
acatgtactaaattcagaatcaggggtggcgggacaaatggtacaagacgatgcacacac

SEQ ID NO: 98625 - DNA, 60 bp, Artificial
  Synthetic oligonucleotide
aagcaacaatggctagctatatgcatcattggggaaatgtacctgattggtccgaaaaat

SEQ ID NO: 98626 - DNA, 60 bp, Artificial
  Synthetic oligonucleotide
caactcctgtaataatgactacaaatgaagacataactaaagttagaataggatgcgagg

SEQ ID NO: 98627 - DNA, 60 bp, Artificial
  Synthetic oligonucleotide
agatgtactagcatagaagactggatgatgacagatccagacagttatatagaaatgatg

SEQ ID NO: 98628 - DNA, 60 bp, Artificial
  Synthetic oligonucleotide
cctgaaactgtggaaacaacggttactacagctcaggaagccaaaagaggcagaatacaa

SEQ ID NO: 98629 - DNA, 60 bp, Artificial
  Synthetic oligonucleotide
ctcagctcagattctggcttcatgacaaatttcttaaaagaaggcgagagacacttagtc

SEQ ID NO: 98630 - DNA, 60 bp, Artificial
  Synthetic oligonucleotide
ggcgagagacacttagtcagtcacctatttactgaagcaaataaacctgaaactgtggaa

SEQ ID NO: 98631 - DNA, 65 bp, Artificial
  Synthetic oligonucleotide
gagtagatggttaataatgcaatgcaaagtacctctaacaccagttgaaagaataaaattaaggg

SEQ ID NO: 98632 - DNA, 60 bp, Artificial
  Synthetic oligonucleotide
cggacaccaagtccaacttggtcggaaatagaaaccgacataagagcctgctttggtgaa

SEQ ID NO: 98633 - DNA, 60 bp, Artificial
  Synthetic oligonucleotide
taaagggacatctaatacaaactctaactcaatgagtgaaaatgtggaacaacacaaccc

SEQ ID NO: 98634 - DNA, 60 bp, Artificial
  Synthetic oligonucleotide
ctcaacaaccagaggtaagaagatcgccgagaaaacacccagggtctaaaccaccaggaa

SEQ ID NO: 98635 - DNA, 60 bp, Artificial
  Synthetic oligonucleotide
aacaacacaaccctattaatgcaggcactgaattgtctgcaacaggaaatgaatctgggg

SEQ ID NO: 98636 - DNA, 60 bp, Artificial
  Synthetic oligonucleotide
gagcctgctttggtgaaaactgtgcacccacaacaaaccttgaataaggtaggatggcgc

SEQ ID NO: 98637 - DNA, 57 bp, Artificial
  Synthetic oligonucleotide
ggggttggtgtgtctacaggtactttcaataatcaaacagaatttcaatacttgggg

SEQ ID NO: 98638 - DNA, 60 bp, Artificial
  Synthetic oligonucleotide
tggacttttagaagaaactgaatggccactaatatgtgcttggttggtaaagaaaggtta

SEQ ID NO: 98639 - DNA, 60 bp, Artificial
  Synthetic oligonucleotide
cctaaccagaaaactgccaggtgattttggacttttagaagaaactgaatggccactaat

SEQ ID NO: 98640 - DNA, 60 bp, Artificial
  Synthetic oligonucleotide
ttgaatactccaatggtggaccatttctaactcctatagtaccaacagcagacacacaat

SEQ ID NO: 98641 - DNA, 60 bp, Artificial
  Synthetic oligonucleotide
tcaagactcatacatctaaatatgccagaacacgaaacatacaaaagaatacatgtacta

SEQ ID NO: 98642 - DNA, 54 bp, Artificial
  Synthetic oligonucleotide
gtaaatgtggaagagctccaaagcaacaatttaatcaacaggcaccactaaacc

SEQ ID NO: 98643 - DNA, 60 bp, Artificial
  Synthetic oligonucleotide
cttaaccacatcttcacaagagctagaaagatacacattcaatccacaaagtaaatgtgg

SEQ ID NO: 98644 - DNA, 60 bp, Artificial
  Synthetic oligonucleotide
gcaactccaatacaggaggacctggatttagctttagccttggagccgtggagcgagcca

SEQ ID NO: 98645 - DNA, 60 bp, Artificial
  Synthetic oligonucleotide
catggcaaacaaacagatctctaggactgcctccaaaactactaactgaacctaccacag

SEQ ID NO: 98646 - DNA, 60 bp, Artificial
  Synthetic oligonucleotide
ccagcagctaacacaagaaaaggttatcaccaaacaattaataatagctacacagaagca

SEQ ID NO: 98647 - DNA, 60 bp, Artificial
  Synthetic oligonucleotide
gcaccaaacctaacagatgatttcaatgctgactctcctcaacaacctagaataataact

SEQ ID NO: 98648 - DNA, 59 bp, Artificial
  Synthetic oligonucleotide
cactaacattcacagcaaaaatgagatccagtaatatgtggaaccctattcaacaacac

SEQ ID NO: 98649 - DNA, 60 bp, Artificial
  Synthetic oligonucleotide
aggagggaaatctaacatgcatttcatgaatacactcaatacatatggaccattaacagc

SEQ ID NO: 98650 - DNA, 60 bp, Artificial
  Synthetic oligonucleotide
ggataaagaacttgatacagatctaaaacctagactacatgttacagctccatttgtttg

SEQ ID NO: 98651 - DNA, 60 bp, Artificial
  Synthetic oligonucleotide
agaaataactctgtaaataaaaactcagttacttggttaatcatgtactactatcattgt

SEQ ID NO: 98652 - DNA, 60 bp, Artificial
  Synthetic oligonucleotide
tggaataactacaacaaagatacaacagatgcggaaatgataaacctacaaagaggagca

SEQ ID NO: 98653 - DNA, 60 bp, Artificial
  Synthetic oligonucleotide
aaagatacaacagatgcggaaatgataaacctacaaagaggagcagaaacatcatgggac

SEQ ID NO: 98654 - DNA, 58 bp, Artificial
  Synthetic oligonucleotide
acacttactcggaagaggtactaaaagctaccaactggcttcaagataatgctcaaaa

SEQ ID NO: 98655 - DNA, 60 bp, Artificial
  Synthetic oligonucleotide
cagaaatcgacagtctcacaaaacggcaagtactgatttttgactctcttgttaaaaaat

SEQ ID NO: 98656 - DNA, 60 bp, Artificial
  Synthetic oligonucleotide
gtccaagtgactgctactggttcatacagcatgaacatggtcaagatactggctatcact

SEQ ID NO: 98657 - DNA, 60 bp, Artificial
  Synthetic oligonucleotide
gcagaaacatcatgggaccaggcaacagacatggaatgggaatcagaaatcgacagcctc

SEQ ID NO: 98658 - DNA, 56 bp, Artificial
  Synthetic oligonucleotide
ataaatagaattgtacaagctttatggagacagtagaattagcacctcgttatgct

SEQ ID NO: 98659 - DNA, 60 bp, Artificial
  Synthetic oligonucleotide
tcaatttagaccttttatcagaggttcaattccatctggtgcaggtcaattaaatcctat

SEQ ID NO: 98660 - DNA, 55 bp, Artificial
  Synthetic oligonucleotide
actattaatttagagccaaatcaatatattatattaagattaagaataatttcca

SEQ ID NO: 98661 - DNA, 60 bp, Artificial
  Synthetic oligonucleotide
gccgcctcaagaatattgcgataaactccgttatctaggcggtattcggcccttgtgaca

SEQ ID NO: 98662 - DNA, 56 bp, Artificial
  Synthetic oligonucleotide
ctaattaaatttatttcaaggataaatgtaccaggtaaacataatttataagagat

SEQ ID NO: 98663 - DNA, 60 bp, Artificial
  Synthetic oligonucleotide
gataaaattattagtattcaatatgaatttaaagaggttatacgtattttgcgctgttat

SEQ ID NO: 98664 - DNA, 60 bp, Artificial
  Synthetic oligonucleotide
gcgctgttataacagcaataaattctttatctcaatctgatcttattcaaatacgtgaat

SEQ ID NO: 98665 - DNA, 60 bp, Artificial
  Synthetic oligonucleotide
atacgtgaattaattgaaactaatataattcgattatctaaaacttttaatggtgatatt

SEQ ID NO: 98666 - DNA, 60 bp, Artificial
  Synthetic oligonucleotide
ggaattagatactcctgcagtgagcaatcaactacaattatttgaagatgaagatactgt

SEQ ID NO: 98667 - DNA, 60 bp, Artificial
  Synthetic oligonucleotide
agcaaaactacatgatgctgcagatacattggaatattatggcattagctttctaagaga

SEQ ID NO: 98668 - DNA, 60 bp, Artificial
  Synthetic oligonucleotide
ttctaagagaatattatatagcttattttcaatatactatatatgcagaaactcaaaaat

SEQ ID NO: 98669 - DNA, 55 bp, Artificial
  Synthetic oligonucleotide
gatcttaaagcaggaacaggcaatactgtaagtttaacaagacgtaattggaacc

SEQ ID NO: 98670 - DNA, 52 bp, Artificial
  Synthetic oligonucleotide
ggatagattatttgatattaattttagagatggaagattatcaggatttaag

SEQ ID NO: 98671 - DNA, 60 bp, Artificial
  Synthetic oligonucleotide
aaaatttgcaaatatccaatagcagcctcgacagataccgcctgggggggtcttgatcga

SEQ ID NO: 98672 - DNA, 60 bp, Artificial
  Synthetic oligonucleotide
gtgggtctttagtacaagatactctggaataggagaaccaagtgtattaggagctacaac

SEQ ID NO: 98673 - DNA, 60 bp, Artificial
  Synthetic oligonucleotide
agctagaagagaatttagtttaagttcaggaatgactgaaacatcttggggttctacatc

SEQ ID NO: 98674 - DNA, 60 bp, Artificial
  Synthetic oligonucleotide
ctgctgaataaagaacaaaaggatactatggaccaaagaaataaatatgaaattctcgct

SEQ ID NO: 98675 - DNA, 60 bp, Artificial
  Synthetic oligonucleotide
tcgcaaaaacacaatcacaattattaactagaggtataactaatgtacaaattaatgatc

SEQ ID NO: 98676 - DNA, 60 bp, Artificial
  Synthetic oligonucleotide
aaaataacttcaatgccgcctcaagaatattgcgataaactccgttatctaggcggtatt

SEQ ID NO: 98677 - DNA, 60 bp, Artificial
  Synthetic oligonucleotide
ggagtttatcgcaatattcttgaggcggcattgaagttattttaagggggcggtactcga

SEQ ID NO: 98678 - DNA, 60 bp, Artificial
  Synthetic oligonucleotide
atcatatttaatatatattaaccaataataaactcgagtaccgcccccttaaaataactt

SEQ ID NO: 98679 - DNA, 60 bp, Artificial
  Synthetic oligonucleotide
tgagatatgaattagcaagaaaacaacgagaggaaatgacaagaaaagaaactgaaagac

SEQ ID NO: 98680 - DNA, 60 bp, Artificial
  Synthetic oligonucleotide
gcaagaaaacaacgagaggaaatgacaagaaaagaaactgaaagactcaaaagaattgag

SEQ ID NO: 98681 - DNA, 60 bp, Artificial
  Synthetic oligonucleotide
tttcaaagtctcttatcactgacgtagatcttgatcgcgaaggcagcctatgataaaaca

SEQ ID NO: 98682 - DNA, 60 bp, Artificial
  Synthetic oligonucleotide
ggcggtatctgtcgaggctgctattggatatttgcaaattttcatacaaaatggcagaca

SEQ ID NO: 98683 - DNA, 60 bp, Artificial
  Synthetic oligonucleotide
ttggagttcaaagatgtccatggggtcctagtgcgctattacctagatataattttgctt

SEQ ID NO: 98684 - DNA, 60 bp, Artificial
  Synthetic oligonucleotide
atagctagaagagaatttagtttaagttcaggaatgactgaaacatcttggggttctaca

SEQ ID NO: 98685 - DNA, 60 bp, Artificial
  Synthetic oligonucleotide
gtagcaggaattataagagatagtgctaaacttataagaaccgcaagtaatcaagcttgt

SEQ ID NO: 98686 - DNA, 60 bp, Artificial
  Synthetic oligonucleotide
tcttgatcgaagttggtgatgtcacaagggccgaataccgcctagataacggagtttatc

SEQ ID NO: 98687 - DNA, 56 bp, Artificial
  Synthetic oligonucleotide
tcaatttaatttaggaactatatttttaagtaatagagatatatgtgcaacttttg

SEQ ID NO: 98688 - DNA, 60 bp, Artificial
  Synthetic oligonucleotide
tgatagcggagataaggctgttttatcataggctgccttcgcgatcaagatctacgtcag

SEQ ID NO: 98689 - DNA, 60 bp, Artificial
  Synthetic oligonucleotide
aattattacactgaaagaattttaactaatgctcctatcgcatcttataatagtgctatt

SEQ ID NO: 98690 - DNA, 60 bp, Artificial
  Synthetic oligonucleotide
ggagttcaaagatgtccatggggtcctagtgcgctattacctagatataattttgcttgg

SEQ ID NO: 98691 - DNA, 60 bp, Artificial
  Synthetic oligonucleotide
tatatcaacctcttgatctttgatacatacaggcaatttattccactctttggataattt

SEQ ID NO: 98692 - DNA, 60 bp, Artificial
  Synthetic oligonucleotide
aatttatatcctttactccaattccatgaatcaaacacagaatcccacttataaattttt

SEQ ID NO: 98693 - DNA, 60 bp, Artificial
  Synthetic oligonucleotide
gcgtaaaatgacaatccttttggttcacaggatggtttatgtaaatcggttaaacgtaac

SEQ ID NO: 98694 - DNA, 60 bp, Artificial
  Synthetic oligonucleotide
gcggagataaggctgttttatcataggctgccttcgcgatcaagatctacgtcagtgata

SEQ ID NO: 98695 - DNA, 60 bp, Artificial
  Synthetic oligonucleotide
ggaccgactagtgctgttggatcattaaattgtgttcaaaatccattacaaactgtatat

SEQ ID NO: 98696 - DNA, 60 bp, Artificial
  Synthetic oligonucleotide
cttttatcagaggttcaattccatctggtgcaggtcaattaaatcctatttcaactactg

SEQ ID NO: 98697 - DNA, 60 bp, Artificial
  Synthetic oligonucleotide
tctacgtcagtgataagagactttgaaatttttgtctgccattttgtatgaaaatttgca

SEQ ID NO: 98698 - DNA, 60 bp, Artificial
  Synthetic oligonucleotide
aatggcagacaaaaatttcaaagtctcttatcactgacgtagatcttgatcgcgaaggca

SEQ ID NO: 98699 - DNA, 60 bp, Artificial
  Synthetic oligonucleotide
ctttataagcgtaaaatgacaatccttttggttcacaggatggtttatgtaaatcggtta

SEQ ID NO: 98700 - DNA, 60 bp, Artificial
  Synthetic oligonucleotide
atgatgtagcaggaattataagagatagtgctaaacttataagaaccgcaagtaatcaag

SEQ ID NO: 98701 - DNA, 60 bp, Artificial
  Synthetic oligonucleotide
agtttctacatatataccacatagttttaggccatccattaaagttactatcattaaatt

SEQ ID NO: 98702 - DNA, 60 bp, Artificial
  Synthetic oligonucleotide
aggcggtatctgtcgaggctgctattggatatttgcaaattttcatacaaaatggcagac

SEQ ID NO: 98703 - DNA, 60 bp, Artificial
  Synthetic oligonucleotide
agaatcattaattgattctaaacaaaataatgtagttaaagtaaataatggtgtatattt

SEQ ID NO: 98704 - DNA, 60 bp, Artificial
  Synthetic oligonucleotide
ttaccttcaacaagtctagatgtaaaggatttaattaatactaataatgtaatatctatg

SEQ ID NO: 98705 - DNA, 60 bp, Artificial
  Synthetic oligonucleotide
aggcggtattcggcccttgtgacatcaccaacttcgatcaagacccccccaggcggtatc

SEQ ID NO: 98706 - DNA, 60 bp, Artificial
  Synthetic oligonucleotide
caatggactgtaagacaacttaatataaacttcttttgctcttcatgttcagggccaaat

SEQ ID NO: 98707 - DNA, 60 bp, Artificial
  Synthetic oligonucleotide
gatcgaagttggtgatgtcacaagggccgaataccgcctagataacggagtttatcgcaa

SEQ ID NO: 98708 - DNA, 60 bp, Artificial
  Synthetic oligonucleotide
ggggtacaggttactgacagcactacagggcgcctatgcatgttagtagaccatgaatat

SEQ ID NO: 98709 - DNA, 60 bp, Artificial
  Synthetic oligonucleotide
atggacagttatctgaccacccccatgccttatcatccagtagcagtcatgcagaaccta

SEQ ID NO: 98710 - DNA, 60 bp, Artificial
  Synthetic oligonucleotide
ttataagtttcctccagtgcccccagaaaatttagagggctgcagtcaacacttttatga

SEQ ID NO: 98711 - DNA, 60 bp, Artificial
  Synthetic oligonucleotide
gacagccaaaagccgtgtgcacccattgtaaacactccccaccgtgccctcagccaggat

SEQ ID NO: 98712 - DNA, 60 bp, Artificial
  Synthetic oligonucleotide
gctaaaacagttacagggtttaaacatgcacacctatttccccaataaaggaacccagca

SEQ ID NO: 98713 - DNA, 60 bp, Artificial
  Synthetic oligonucleotide
gaagttcccgcttacaacgcctcagaaaaatacccaagcatgacttcagttaattctgca

SEQ ID NO: 98714 - DNA, 60 bp, Artificial
  Synthetic oligonucleotide
acctgtctggattgcaaagctttgtagattatgagtaaagaaagtggcaaatggtgggaa

SEQ ID NO: 98715 - DNA, 60 bp, Artificial
  Synthetic oligonucleotide
gcgcgccgcttgtcttagtgtcaaggcaaccccaagcaagctggcccagagccaacccta

SEQ ID NO: 98716 - DNA, 60 bp, Artificial
  Synthetic oligonucleotide
ccctccacccagacctccaaaccaccccaattgtcacagacaccagtatcagcagcagtg

SEQ ID NO: 98717 - DNA, 60 bp, Artificial
  Synthetic oligonucleotide
tagcgatgctggggagtctagcggcacaggggcagaggttgtgccatttaatgggaaggg

SEQ ID NO: 98718 - DNA, 60 bp, Artificial
  Synthetic oligonucleotide
tactttgtcaaaactatgaccccctattggtggggcagcatgtgttaaagtggattgata

SEQ ID NO: 98719 - DNA, 60 bp, Artificial
  Synthetic oligonucleotide
taacctcatcaccccaggcgcctggaacactgaaaccccgcgctctagtacgcccatccc

SEQ ID NO: 98720 - DNA, 60 bp, Artificial
  Synthetic oligonucleotide
gcagaccagtttcgtgaactgttagttggggttgattatgtgtgggacggtgtaaggggt

SEQ ID NO: 98721 - DNA, 60 bp, Artificial
  Synthetic oligonucleotide
gttctggactgtgctaacgataactggtggtgctctttactggatttagacacttctgac

SEQ ID NO: 98722 - DNA, 60 bp, Artificial
  Synthetic oligonucleotide
ggggccagggttaaatcccagaaaccttactgtgtgtgtagaggggttatttaataatgt

SEQ ID NO: 98723 - DNA, 60 bp, Artificial
  Synthetic oligonucleotide
gggccaattggaggtattaaatcaatgggaattactaccttagttcagtatgccgtggga

SEQ ID NO: 98724 - DNA, 60 bp, Artificial
  Synthetic oligonucleotide
acacaaaatggccccgatggcctgtgcacatcaaagtggccgacggacccgaattcgaat

SEQ ID NO: 98725 - DNA, 60 bp, Artificial
  Synthetic oligonucleotide
ccattccctgtcagttatcaacaaatggaactctgtcataaagacgcctttgaaactcct

SEQ ID NO: 98726 - DNA, 60 bp, Artificial
  Synthetic oligonucleotide
aatggaagctgtgaatagaagagtaaactattgggatgaaccaaactttgaaccagatgc

SEQ ID NO: 98727 - DNA, 60 bp, Artificial
  Synthetic oligonucleotide
ggaagctgtgaatagaagagtaaactattgggatgaaccaaactttgaaccagatgcaac

SEQ ID NO: 98728 - DNA, 60 bp, Artificial
  Synthetic oligonucleotide
cgagcggtggaacgaagaatgggaatcctcgcagatcagttatgcagagcttttgagaat

SEQ ID NO: 98729 - DNA, 60 bp, Artificial
  Synthetic oligonucleotide
cgagcggtggaacgcagaatgggaatcctcgcagatcagttatgcagagcttttgagaat

SEQ ID NO: 98730 - DNA, 60 bp, Artificial
  Synthetic oligonucleotide
tccaaggaagaataaggcaatccctatcgacccggttgacacggaacacatacgcaacat

SEQ ID NO: 98731 - DNA, 60 bp, Artificial
  Synthetic oligonucleotide
ccaaggaagaataaggcaatccctatcgacccggttgacacggaacacatacgcaacatc

SEQ ID NO: 98732 - DNA, 60 bp, Artificial
  Synthetic oligonucleotide
ggaagctgttaatagaagagtaaactattgggatgaaccaaactttgaaccagatgctac

SEQ ID NO: 98733 - DNA, 60 bp, Artificial
  Synthetic oligonucleotide
gcaattccatatgcctcgtattcattttccttatcataattatcttggtccgggtactga

SEQ ID NO: 98734 - DNA, 60 bp, Artificial
  Synthetic oligonucleotide
ccacatgcctcgtattcattttccttatcataattatcttggtccgggcagtgataactt

SEQ ID NO: 98735 - DNA, 60 bp, Artificial
  Synthetic oligonucleotide
ttttccacatgcctcgtattcattttccttatcataattatcttggtccgggcagtgata

SEQ ID NO: 98736 - DNA, 59 bp, Artificial
  Synthetic oligonucleotide
caagcctagctacgatgaagtattacttaacgctcatcttacagaacaaagcaaaagaa

SEQ ID NO: 98737 - DNA, 50 bp, Artificial
  Synthetic oligonucleotide
accacgacgcgcgaagcgcgtcacttcgtgtggtcacttcgtagcgaaaa

SEQ ID NO: 98738 - DNA, 60 bp, Artificial
  Synthetic oligonucleotide
gccattccctgtcagttatcaacaaatggaactctgtcataaagacgcctttgaaactcc

SEQ ID NO: 98739 - DNA, 60 bp, Artificial
  Synthetic oligonucleotide
ccctgtcagttatcaacaaatggaactctgtcataaagacgcctttgaaactcctatcga

SEQ ID NO: 98740 - DNA, 60 bp, Artificial
  Synthetic oligonucleotide
ctttcgagcggtggaacgcagagtgggaatcctcgcagatcagttatgcagagcttttga

SEQ ID NO: 98741 - DNA, 60 bp, Artificial
  Synthetic oligonucleotide
attgcgatgaccacgacgcgcgaagcgcgtcacttcgtgtggtcactacgtatcgcaata

SEQ ID NO: 98742 - DNA, 60 bp, Artificial
  Synthetic oligonucleotide
tttcgagcggtggaacgaagaatgggaatcctcgcagatcagttatgcagagcttttgag

SEQ ID NO: 98743 - DNA, 60 bp, Artificial
  Synthetic oligonucleotide
cgagcggtggaacgcagagtgggaatcctcgcagatcagttatgcagagcttttgagaat

SEQ ID NO: 98744 - DNA, 50 bp, Artificial
  Synthetic oligonucleotide
ttttcgctacgaagtgaccacacgaagtgacgcgcttcgcgcgtcgtggt

SEQ ID NO: 98745 - DNA, 60 bp, Artificial
  Synthetic oligonucleotide
cccgttaatggaagctgttaatagaagagtaaactattgggatgaaccaaactttgaacc

SEQ ID NO: 98746 - DNA, 60 bp, Artificial
  Synthetic oligonucleotide
cccagaaggtacccgtaggtaacaagtgacactatggatctgatctggggccaaccacct

SEQ ID NO: 98747 - DNA, 60 bp, Artificial
  Synthetic oligonucleotide
gcgccaccttaattctaccatatgtgaatgcaatcccaatggattccggcatcaagcaca

SEQ ID NO: 98748 - DNA, 60 bp, Artificial
  Synthetic oligonucleotide
ctcgccgagtctttgcgcttgagaaacgtgtgttgggcgcaatgcagttcaagaccaaga

SEQ ID NO: 98749 - DNA, 60 bp, Artificial
  Synthetic oligonucleotide
ccagggtacgctcctcgttgtcgcagtaccagagcacaaaatccaagcgcaatcaaatcc

SEQ ID NO: 98750 - DNA, 60 bp, Artificial
  Synthetic oligonucleotide
aaggtggccgtccaacctgagagacaccgatgccactgctgttgataagcccacccaacc

SEQ ID NO: 98751 - DNA, 60 bp, Artificial
  Synthetic oligonucleotide
gggttagaggcccttgatcttgggaccagcgcggggtacccctatgtggctttaggaatc

SEQ ID NO: 98752 - DNA, 60 bp, Artificial
  Synthetic oligonucleotide
tgggaaaagtaatagggatccatattggaggcaacggggcacagggcttcgcagcagctc

SEQ ID NO: 98753 - DNA, 60 bp, Artificial
  Synthetic oligonucleotide
gcaggagcatttggccaacagagtggagccgcatatgttgggagctataagattatgaac

SEQ ID NO: 98754 - DNA, 60 bp, Artificial
  Synthetic oligonucleotide
gtgacgactgctccccaatcaattttaaaaagtgcatgccgctcatctgtggtaaggccc

SEQ ID NO: 98755 - DNA, 60 bp, Artificial
  Synthetic oligonucleotide
gctttgcagcgtacctggtatgactccttttaactcgactccaattttgactatccggtt

SEQ ID NO: 98756 - DNA, 60 bp, Artificial
  Synthetic oligonucleotide
ggtaccagtcccatgttattcttggggttggatttgcagagccaggtgattgtggtggta

SEQ ID NO: 98757 - DNA, 60 bp, Artificial
  Synthetic oligonucleotide
cgtgtgggactttggcttacaatcctccattactctcgtggtcccttggatctcgtcagg

SEQ ID NO: 98758 - DNA, 60 bp, Artificial
  Synthetic oligonucleotide
caacgcaaacaccatgcatccagtcaccgtggcagatggtagggccctccagcgcagatt

SEQ ID NO: 98759 - DNA, 60 bp, Artificial
  Synthetic oligonucleotide
gtggggtatatagtcttccacccgacccaaaccactttgacggttaccaagaacaggctg

SEQ ID NO: 98760 - DNA, 60 bp, Artificial
  Synthetic oligonucleotide
ccgtcccgacgtgtcgcaaacggctgcactgcaaggtgaaaccgggcatatgattaagga

SEQ ID NO: 98761 - DNA, 60 bp, Artificial
  Synthetic oligonucleotide
cccgccctgtggtagatatgatgaaggaagctgcagtgccgctgaaaagtccatctgccg

SEQ ID NO: 98762 - DNA, 60 bp, Artificial
  Synthetic oligonucleotide
gatttgtgaactttacatctagctcttgcataacgccttgtttcatctagtcgccttcca

SEQ ID NO: 98763 - DNA, 60 bp, Artificial
  Synthetic oligonucleotide
acacccaccccgtaacttagaagtactgaacacaaccgaccaatagcggcgtgacagcca

SEQ ID NO: 98764 - DNA, 60 bp, Artificial
  Synthetic oligonucleotide
aatttggctggaaggcctactcatcgcacactcatgtacaatttccccacgcgagctgga

SEQ ID NO: 98765 - DNA, 60 bp, Artificial
  Synthetic oligonucleotide
ggaatgtcatcgaggcactctttcaaggaccgcccgcatacaaaccactcaggattgatg

SEQ ID NO: 98766 - DNA, 60 bp, Artificial
  Synthetic oligonucleotide
gccaccatctgcggtaccatctatgtagtttaccggctctttgctggtctccagggaccc

SEQ ID NO: 98767 - DNA, 60 bp, Artificial
  Synthetic oligonucleotide
gtccaactacggaccaagcttgaactcctgacttatgcccgctttgatattgagtttacc

SEQ ID NO: 98768 - DNA, 60 bp, Artificial
  Synthetic oligonucleotide
ctcgcggatgcgggcaagagctttggcctaatcatgacacctccagacaagagcagtgag

SEQ ID NO: 98769 - DNA, 60 bp, Artificial
  Synthetic oligonucleotide
ccctgcatgctaccaaaattccaacccacacccgtaattgatatcccaggtgaagtgaag

SEQ ID NO: 98770 - DNA, 60 bp, Artificial
  Synthetic oligonucleotide
ggcacattgactggctgtgctgtaggctgtaaccctgagacattttggagcaagatacca

SEQ ID NO: 98771 - DNA, 60 bp, Artificial
  Synthetic oligonucleotide
gacgcaatggacgggcagatcatggcgatgcgtgtagacccaggagctgatgggccacta

SEQ ID NO: 98772 - DNA, 60 bp, Artificial
  Synthetic oligonucleotide
gccttccaactatttaggtcaactggtggttaggacgtgcgaagatctagatagtgcaca

SEQ ID NO: 98773 - DNA, 60 bp, Artificial
  Synthetic oligonucleotide
atgttccaccaggagccagcgctccagacggccaggactcatttcagtggcaatccagct

SEQ ID NO: 98774 - DNA, 60 bp, Artificial
  Synthetic oligonucleotide
cagttaccgccactctatcgctattggggtgcaccggttccccctggcgctggctcaagg

SEQ ID NO: 98775 - DNA, 60 bp, Artificial
  Synthetic oligonucleotide
cagacattcatgaatccattcgttggaccaaggacgcaaaatccacccaggaccatgtga

SEQ ID NO: 98776 - DNA, 60 bp, Artificial
  Synthetic oligonucleotide
cattcaatctcgactgaagccaccccagcactacaagcagccgagacaggcgccacttcc

SEQ ID NO: 98777 - DNA, 60 bp, Artificial
  Synthetic oligonucleotide
cctggtactggaaaatctcttgccacttctgttcttgctcgaatgctaactgttgagact

SEQ ID NO: 98778 - DNA, 66 bp, Artificial
  Synthetic oligonucleotide
ctagcttaaattatttcaacatcaattattttaaagacgcagcttcaagtggtgcttctagattgg

SEQ ID NO: 98779 - DNA, 60 bp, Artificial
  Synthetic oligonucleotide
gccgccatcccagaacatcaattggcatctgcaacaagtggaaatgtatcagtcgggtac

SEQ ID NO: 98780 - DNA, 60 bp, Artificial
  Synthetic oligonucleotide
cacttcagggtccatactcaggggaacctaaacccaaaagcagagctccagagagaagag

SEQ ID NO: 98781 - DNA, 60 bp, Artificial
  Synthetic oligonucleotide
cactagacataaatcctcaacccctttcattggaagagagtgtgtttggtattgagggat

SEQ ID NO: 98782 - DNA, 60 bp, Artificial
  Synthetic oligonucleotide
aagaggattcagagctgatgagcgccactctttccttatacaccctacctttcctgtggc

SEQ ID NO: 98783 - DNA, 60 bp, Artificial
  Synthetic oligonucleotide
cttaacaactgatgatactcaatccccatcagcgtttccatacttccacccgaccaagga

SEQ ID NO: 98784 - DNA, 60 bp, Artificial
  Synthetic oligonucleotide
cagccgttgcccataatccaatgggtttgcggtcgtaatgcgtaagtgcgggatgggacc

SEQ ID NO: 98785 - DNA, 60 bp, Artificial
  Synthetic oligonucleotide
agtaccattacccgacaaaagctggatattgtgggggtgttttgtacaaggttggctcta

SEQ ID NO: 98786 - DNA, 60 bp, Artificial
  Synthetic oligonucleotide
gatccacaaactgtaattgccactctcacccttctaggttgttcaggctcaccatggagg

SEQ ID NO: 98787 - DNA, 60 bp, Artificial
  Synthetic oligonucleotide
gatgctgcggaaaccggacacaccagctctgttcaacctgaagatatgattgaaactaga

SEQ ID NO: 98788 - DNA, 60 bp, Artificial
  Synthetic oligonucleotide
ggcaagaaggacaaccataccccagattcacaatcccttttatgagcattgcatcagcct

SEQ ID NO: 98789 - DNA, 60 bp, Artificial
  Synthetic oligonucleotide
ttcaaactatgatggtagcctacatcccgtttggtttaaatgtcttagtatgctcttaga

SEQ ID NO: 98790 - DNA, 60 bp, Artificial
  Synthetic oligonucleotide
ataggcaatgctaagtgctgtccatttatctgtggaaaagctgtagagtttaaagataga

SEQ ID NO: 98791 - DNA, 60 bp, Artificial
  Synthetic oligonucleotide
tgccgcatttaccacaaggccaaacatataaaagcatggtgtcctcgcccaccaagggct

SEQ ID NO: 98792 - DNA, 60 bp, Artificial
  Synthetic oligonucleotide
tgacaaacccacacaacctgatacatcatccaacagattctacaccttggacagtcgttc

SEQ ID NO: 98793 - DNA, 60 bp, Artificial
  Synthetic oligonucleotide
cccctatgtgaatgctgtcccaatggattctatgcttagacataacaattggagcttggt

SEQ ID NO: 98794 - DNA, 60 bp, Artificial
  Synthetic oligonucleotide
tgagtcctccggcccctgaatgcggctaaccttaaccctgcagctagagcacacaagcca

SEQ ID NO: 98795 - DNA, 60 bp, Artificial
  Synthetic oligonucleotide
cctgcaggttcaggtttctttaatctgtttctctataagaacactcattttcacgctttc

SEQ ID NO: 98796 - DNA, 60 bp, Artificial
  Synthetic oligonucleotide
cctgcaggttcagggttcttagatctgtttctctataagaacactcattttcacgctttc

SEQ ID NO: 98797 - DNA, 60 bp, Artificial
  Synthetic oligonucleotide
gccatcctctcctttgcacgccgtgggaccatacaggagaagttgatctccgtggcagga

SEQ ID NO: 98798 - DNA, 60 bp, Artificial
  Synthetic oligonucleotide
gcggaaccgactactttgggtgtccgtgtttccttttatttttattacggctgcttatgg

SEQ ID NO: 98799 - DNA, 60 bp, Artificial
  Synthetic oligonucleotide
gagagtcctccggcccctgaatgcggctaatcccaaccacggagcaaatgctcacaatcc

SEQ ID NO: 98800 - DNA, 60 bp, Artificial
  Synthetic oligonucleotide
cgtgtgctcatcttgagtcctccggcccctgaatgcggctaaccttaaccccgtagccat

SEQ ID NO: 98801 - DNA, 60 bp, Artificial
  Synthetic oligonucleotide
ctggtcgaaggcgttcgcaataagactggtcgtcacttggctgttctatcgtttcaggct

SEQ ID NO: 98802 - DNA, 60 bp, Artificial
  Synthetic oligonucleotide
ttgctctggatggtgtcaccaagctgacaaatgcggactgaacctcacaaagcgacacac

SEQ ID NO: 98803 - DNA, 60 bp, Artificial
  Synthetic oligonucleotide
actgaacctcacaaagcgacacacctgtggtagcgctgcccaaaagggagcggaactccc

SEQ ID NO: 98804 - DNA, 60 bp, Artificial
  Synthetic oligonucleotide
taatagcgccttttgggatgcaggagccccacctgccaggtgtgaagtggagtgagtgga

SEQ ID NO: 98805 - DNA, 60 bp, Artificial
  Synthetic oligonucleotide
aatgccctggaggcaagctggttacagccctgaccaggggccctgcccgtgactctcgat

SEQ ID NO: 98806 - DNA, 60 bp, Artificial
  Synthetic oligonucleotide
ccctttgtatcgacatgatggcggcgtctaaggtgtatagagtttgcgagcagactctgc

SEQ ID NO: 98807 - DNA, 60 bp, Artificial
  Synthetic oligonucleotide
caaaacaattcgtttgactggactccacaactatgacaacacttgctggttgaatgcctt

SEQ ID NO: 98808 - DNA, 60 bp, Artificial
  Synthetic oligonucleotide
tggtgtctaaggacgcgttagagcgaactctccctcagaaacagggcaacgttagtcgcc

SEQ ID NO: 98809 - DNA, 60 bp, Artificial
  Synthetic oligonucleotide
cggaggtgaccttccttaagcgtgcttttgttcctgacggggccttttacaagccagtga

SEQ ID NO: 98810 - DNA, 60 bp, Artificial
  Synthetic oligonucleotide
gaagaaaatgactcaagtgacaggaattatgaattcaccacaccaggcacgcactgtgtt

SEQ ID NO: 98811 - DNA, 60 bp, Artificial
  Synthetic oligonucleotide
cccctgatgagcattcagcttatgatccttcaactaagccaaaaccaaagacccaggaag

SEQ ID NO: 98812 - DNA, 60 bp, Artificial
  Synthetic oligonucleotide
cctcacgcgggtactgtggtgctgcaattgttgctggctcacctgcccgcataattggca

SEQ ID NO: 98813 - DNA, 60 bp, Artificial
  Synthetic oligonucleotide
gccattggatgtgacccagatgtggactggactcggtttggccttgagttggagcgtttc

SEQ ID NO: 98814 - DNA, 60 bp, Artificial
  Synthetic oligonucleotide
tgattcagtgcatgcctatgaagagaaaaggtataacatctacggtggcttggcatccgg

SEQ ID NO: 98815 - DNA, 60 bp, Artificial
  Synthetic oligonucleotide
cagtgaggaagtccatcttaacatcggatgggactgtaatgcccaatgtcttgtcctatg

SEQ ID NO: 98816 - DNA, 60 bp, Artificial
  Synthetic oligonucleotide
agcttacacataccaacaactttcagtttttccccaccagttactaaatttgaggacaaa

SEQ ID NO: 98817 - DNA, 60 bp, Artificial
  Synthetic oligonucleotide
agaccaccgtccacagtgtcagacccagttaccagacttggaccctcgctttccaggcac

SEQ ID NO: 98818 - DNA, 60 bp, Artificial
  Synthetic oligonucleotide
ggtcaagaacggctgggatgtggttgtgcaggtgaatgcttcatttgctcactccggggc

SEQ ID NO: 98819 - DNA, 60 bp, Artificial
  Synthetic oligonucleotide
tgaggacaaattcatcagtgcatttggtgatgccctacattgggccaggtccaacaacaa

SEQ ID NO: 98820 - DNA, 60 bp, Artificial
  Synthetic oligonucleotide
ctcaattgatgcagacctaggagacaatgtgattagccctgaaggccagggcagcaacac

SEQ ID NO: 98821 - DNA, 60 bp, Artificial
  Synthetic oligonucleotide
ttgattgggtgagtgaccagactggtataaaagatctaaaatcaggagcaccgccactcg

SEQ ID NO: 98822 - DNA, 60 bp, Artificial
  Synthetic oligonucleotide
ttcttggaattcggctttttgatgagcatttcggcaatagaggtctgttcactcggaaaa

SEQ ID NO: 98823 - DNA, 60 bp, Artificial
  Synthetic oligonucleotide
gcccatcataaatgggcaggctgttaaattggctctttctggtggagaagtgacagcttt

SEQ ID NO: 98824 - DNA, 60 bp, Artificial
  Synthetic oligonucleotide
ttttcaaacttgcaacactagctgtggcagctatgaggacaaaggacccagtagtggtgg

SEQ ID NO: 98825 - DNA, 60 bp, Artificial
  Synthetic oligonucleotide
ctggagacaaggagatttccgcacaggaccagaaatggctcttgcgtgcggcgcatgtat

SEQ ID NO: 98826 - DNA, 60 bp, Artificial
  Synthetic oligonucleotide
attgacgtgccgccgatgccccatgtggtagttggtaggcagcttttgggccggtttgtg

SEQ ID NO: 98827 - DNA, 60 bp, Artificial
  Synthetic oligonucleotide
tccaaaaggacagatttatggctggtgattactctgatttggtctatcaatcatttttga

SEQ ID NO: 98828 - DNA, 60 bp, Artificial
  Synthetic oligonucleotide
tttgtggtattcctggccttgacaagatggagcaggacaccgcccctgggctgccctacg

SEQ ID NO: 98829 - DNA, 60 bp, Artificial
  Synthetic oligonucleotide
ggcaacctacaattggcttcctggtgcacactttggttccattttgctgacttctgatgc

SEQ ID NO: 98830 - DNA, 60 bp, Artificial
  Synthetic oligonucleotide
gttgcagggatgtcccccactgttgtgtttaagattgcaggctctcgttcacaagcctgt

SEQ ID NO: 98831 - DNA, 60 bp, Artificial
  Synthetic oligonucleotide
cctggtgcacattttggttccattttgctgacttctgatgcgcatgacaaaggagggtgt

SEQ ID NO: 98832 - DNA, 60 bp, Artificial
  Synthetic oligonucleotide
ctgacttctgatgcgcatgacaaaggagggtgctacctgcggtatcgttttccgcgcgcc

SEQ ID NO: 98833 - DNA, 60 bp, Artificial
  Synthetic oligonucleotide
gttaccaacgtgggagaggatggtgaacccggtgagacagagccccgccacgctttgtca

SEQ ID NO: 98834 - DNA, 60 bp, Artificial
  Synthetic oligonucleotide
aggctcccatcgacgcaatggtcaacgggcctcttccaaatccagaggcaccgattagag

SEQ ID NO: 98835 - DNA, 60 bp, Artificial
  Synthetic oligonucleotide
gtggtgtctgtgcctgaatcagattcttttatgtcctcagtacctgataattcgactcca

SEQ ID NO: 98836 - DNA, 60 bp, Artificial
  Synthetic oligonucleotide
ctgcccgacaagcaggttaccaacgtgggagaggatggtgaacccggtgagacagagccc

SEQ ID NO: 98837 - DNA, 60 bp, Artificial
  Synthetic oligonucleotide
ttactggtgcagcagccactaaggcaaagtttctggttgcttttgtgcctccccacagcg

SEQ ID NO: 98838 - DNA, 60 bp, Artificial
  Synthetic oligonucleotide
ttacattcttgcagctatgatgaaggcttatgaaaactttgagccggatgacattcaagt

SEQ ID NO: 98839 - DNA, 60 bp, Artificial
  Synthetic oligonucleotide
gctgctttgaacgactccgaccccagactggaggttaacttgcgtgattctctgttctca

SEQ ID NO: 98840 - DNA, 60 bp, Artificial
  Synthetic oligonucleotide
acaatcctggtaacttagaagacttaaatcatcgtacaataggtgctgtcacatccagtg

SEQ ID NO: 98841 - DNA, 60 bp, Artificial
  Synthetic oligonucleotide
gtacacccatccaggtgaacaaggtatagagttagatagtgcagctgaggaaggaggagc

SEQ ID NO: 98842 - DNA, 60 bp, Artificial
  Synthetic oligonucleotide
ccatggacatccggcgtacagtttaggtacacagatcctgacacatacaccagtgctggt

SEQ ID NO: 98843 - DNA, 60 bp, Artificial
  Synthetic oligonucleotide
gactccgagtacacaatattggcaactgcttcccaacccaacacagctaaatatgccagt

SEQ ID NO: 98844 - DNA, 60 bp, Artificial
  Synthetic oligonucleotide
ccccatgaacaacaaaggtgccactgacagcttggaggagtaccgtatcccactcacagt

SEQ ID NO: 98845 - DNA, 60 bp, Artificial
  Synthetic oligonucleotide
gctgcaagctcatcgtctgccggccagtctttctcaatggatccttccaagtttactgaa

SEQ ID NO: 98846 - DNA, 60 bp, Artificial
  Synthetic oligonucleotide
ccataacacacctccacccgaatgtattagtgacctactcaagtctgttgattctgagga

SEQ ID NO: 98847 - DNA, 60 bp, Artificial
  Synthetic oligonucleotide
catattcagagatgagatttatgaggttgaaggaggcatgccatcagggtgttcgggcac

SEQ ID NO: 98848 - DNA, 60 bp, Artificial
  Synthetic oligonucleotide
cagctgaacctggagattgtggtggagtcttgcgatgtgtgcatggtccgatcggcttgt

SEQ ID NO: 98849 - DNA, 60 bp, Artificial
  Synthetic oligonucleotide
gccagaagagacagtatcaccacttatggaggaaacctcaaattcggggcagtttacacc

SEQ ID NO: 98850 - DNA, 60 bp, Artificial
  Synthetic oligonucleotide
acggctctccagggtcagggaaatcactaaccacgtccattattggtagagccatagcag

SEQ ID NO: 98851 - DNA, 60 bp, Artificial
  Synthetic oligonucleotide
tagaaataccccactggtgacagtgttctagcctgcgtggctgcctgcacacccacacgg

SEQ ID NO: 98852 - DNA, 60 bp, Artificial
  Synthetic oligonucleotide
agtcctccggcccctgaatgcggctaatcctaactgcggagcagatacccacatgccagt

SEQ ID NO: 98853 - DNA, 60 bp, Artificial
  Synthetic oligonucleotide
tccaggtgtggtcactggatcagcagtggggtgtgatcctgaagtgttttggtcaactat

SEQ ID NO: 98854 - DNA, 60 bp, Artificial
  Synthetic oligonucleotide
ctcttacaatttcaaattggacatggcaattcttgctaaagagggagagaaatatggtct

SEQ ID NO: 98855 - DNA, 60 bp, Artificial
  Synthetic oligonucleotide
gagctccagagagaagagttgttacccaaggtccagaagaagaatttggccgctcactac

SEQ ID NO: 98856 - DNA, 60 bp, Artificial
  Synthetic oligonucleotide
ctgtagcgcactatgctgctcaactctcaactcttgacataaaccctcagcctctctcgc

SEQ ID NO: 98857 - DNA, 60 bp, Artificial
  Synthetic oligonucleotide
catttaccgaacaaacacaaaaggcgatgatgtgattccaaactgtgattgcactgattg

SEQ ID NO: 98858 - DNA, 60 bp, Artificial
  Synthetic oligonucleotide
ggctaaacatataaaggcatggtgtccacgcccaccaagagccgtaccttatcagcacac

SEQ ID NO: 98859 - DNA, 60 bp, Artificial
  Synthetic oligonucleotide
tagctcagatcctcaaactatagttgctaccttaactttacttggttgctcaggttcacc

SEQ ID NO: 98860 - DNA, 60 bp, Artificial
  Synthetic oligonucleotide
tttattgatcttagaaagtttcaatgtgctgaagaacaaggaatctcagattatgtggaa

SEQ ID NO: 98861 - DNA, 60 bp, Artificial
  Synthetic oligonucleotide
gcataaagagtctgattcatggcttaagaaattcactgaagcttgtaatgcagcacgtgg

SEQ ID NO: 98862 - DNA, 60 bp, Artificial
  Synthetic oligonucleotide
acactttggagagtcgcacctggacaactgcttcgactggatggtggtggaaattacccg

SEQ ID NO: 98863 - DNA, 60 bp, Artificial
  Synthetic oligonucleotide
accaaggtttgttaatagttgctgctattccagaacaccaacttgcttctgcattgactg

SEQ ID NO: 98864 - DNA, 60 bp, Artificial
  Synthetic oligonucleotide
ctcagccaccctcattctcccatacgtcaatgctgtcccaatggactctatgcttagaca

SEQ ID NO: 98865 - DNA, 60 bp, Artificial
  Synthetic oligonucleotide
ctggcaagaaggacaaccatacccaagatttaccattccctttatgagtattgcatcagc

SEQ ID NO: 98866 - DNA, 60 bp, Artificial
  Synthetic oligonucleotide
gtaggcatgagtatcagagctttgttgaccgtatacgcagtgtatccgctggccgtgcac

SEQ ID NO: 98867 - DNA, 60 bp, Artificial
  Synthetic oligonucleotide
ggtgttggatttgtaacatggaagattagcttgcaagaaatggcacaaatcaggagaaaa

SEQ ID NO: 98868 - DNA, 60 bp, Artificial
  Synthetic oligonucleotide
caggaaatatttacccacccgtgaggatgattaccctgcttgtaaccttgctttattggc

SEQ ID NO: 98869 - DNA, 60 bp, Artificial
  Synthetic oligonucleotide
ccactacccaacaaaagctgggtactgcggtggtgtgctgtataaggtgggctctattct

SEQ ID NO: 98870 - DNA, 60 bp, Artificial
  Synthetic oligonucleotide
ctcgcttacaacctagtgtgtttcatgatgttttccctggaacaaaagaacctgctgttc

SEQ ID NO: 98871 - DNA, 60 bp, Artificial
  Synthetic oligonucleotide
gcaatctccgtctgcattcccgtatttccacccaacaaaggagatattcatacctggaga

SEQ ID NO: 98872 - DNA, 60 bp, Artificial
  Synthetic oligonucleotide
gggaagaagacagaagaagaagcagtgcagctcgggcaatggaagccatatttcaaggta

SEQ ID NO: 98873 - DNA, 60 bp, Artificial
  Synthetic oligonucleotide
cccagtcaacaacacagaaggtaatgtgaaatctgcaaacatgtacactgtccatttagc

SEQ ID NO: 98874 - DNA, 66 bp, Artificial
  Synthetic oligonucleotide
cgaagattttactttgatttagatatccaagttaagaaagaatacctcatgggtggcaaattagac

SEQ ID NO: 98875 - DNA, 59 bp, Artificial
  Synthetic oligonucleotide
taaatcttttagaaaaacaaatagagtcaattaggcttgctccatcctgtgaccaagaa

SEQ ID NO: 98876 - DNA, 60 bp, Artificial
  Synthetic oligonucleotide
tcaaaggtggaaaaaggaatgagcctgttgctgtgctcatacatggctctccaggaactg

SEQ ID NO: 98877 - DNA, 60 bp, Artificial
  Synthetic oligonucleotide
gagaaaggcattccaaccctccaatccccatctgttgaggcgtgtgggtattcagacagg

SEQ ID NO: 98878 - DNA, 60 bp, Artificial
  Synthetic oligonucleotide
cgctgcttcaagtggtgcttctagattggacttttcccaagatcctagcaaattcaccga

SEQ ID NO: 98879 - DNA, 60 bp, Artificial
  Synthetic oligonucleotide
cgcacaagtatctagacagaatgttgggacacactctacacaaaatgcagtgactaatgg

SEQ ID NO: 98880 - DNA, 60 bp, Artificial
  Synthetic oligonucleotide
ttcctaacattcaacctagcacatccgtttcaagtcactctgtgccagctctggatgctg

SEQ ID NO: 98881 - DNA, 60 bp, Artificial
  Synthetic oligonucleotide
gtatcgcctttgatgtattaagactggtcgttccctgcatacccagcagtagacctggca

SEQ ID NO: 98882 - DNA, 60 bp, Artificial
  Synthetic oligonucleotide
gcttcatgttttgtggttctgctagtacaacactgaaattactgctggcatacacgcccc

SEQ ID NO: 98883 - DNA, 60 bp, Artificial
  Synthetic oligonucleotide
gcagtggttggttacggtgtgtggccatcatacttgacacctgatgatgctactgccatt

SEQ ID NO: 98884 - DNA, 60 bp, Artificial
  Synthetic oligonucleotide
cggcgccgggaaaccgacaagcagagatcaggccatgcaagccacttacgctatttggga

SEQ ID NO: 98885 - DNA, 60 bp, Artificial
  Synthetic oligonucleotide
caggcgacttgggaatagctcccaattctgatttcggcaccctcttctttgctggaacga

SEQ ID NO: 98886 - DNA, 60 bp, Artificial
  Synthetic oligonucleotide
acaaagcaaatacacggaaaggctggtgtgggtctgcaatcctggccgatcttggtggga

SEQ ID NO: 98887 - DNA, 60 bp, Artificial
  Synthetic oligonucleotide
cgttggtcgtcttgtcggatacggaacagttcatgatggggaacatccagcttcttgtgc

SEQ ID NO: 98888 - DNA, 60 bp, Artificial
  Synthetic oligonucleotide
gcgcatccatgtaccccgaaagactgctttgcgcccgactgttgccagacaggtcttcca

SEQ ID NO: 98889 - DNA, 60 bp, Artificial
  Synthetic oligonucleotide
ctcccggagtttagacctgttacaattgcccattatcctgctgttgagcgccgcattact

SEQ ID NO: 98890 - DNA, 60 bp, Artificial
  Synthetic oligonucleotide
gtgaaccagttgtgatcgtgttgcgcggtgatgctggtcagggaaagtcattgtcaagtc

SEQ ID NO: 98891 - DNA, 60 bp, Artificial
  Synthetic oligonucleotide
gatagagtgagaacaagcctggcaaagacaggatataagattacacccgctaacaaaact

SEQ ID NO: 98892 - DNA, 60 bp, Artificial
  Synthetic oligonucleotide
ctctttcatgttcttgcttggctaacacattcctagccgctctctcccggaattttgccc

SEQ ID NO: 98893 - DNA, 60 bp, Artificial
  Synthetic oligonucleotide
tcccaccaagcccaccacccaggtgctgcatgaggtaagttctctctcagaagggcgaac

SEQ ID NO: 98894 - DNA, 60 bp, Artificial
  Synthetic oligonucleotide
aggattggaagccaggattttcagacatggccagctttgggccgaaacacatgcagaagt

SEQ ID NO: 98895 - DNA, 60 bp, Artificial
  Synthetic oligonucleotide
cgatcctgatttggacatggaagttgtgttcgagacacaaggcaattcaacctcatccga

SEQ ID NO: 98896 - DNA, 60 bp, Artificial
  Synthetic oligonucleotide
caaggcgtgtcccaattccgtcattttaacaccagggccgcagtttgatccggcttatga

SEQ ID NO: 98897 - DNA, 60 bp, Artificial
  Synthetic oligonucleotide
gcaagccttggatggacttgaggggatggaccctatggacaagaacacttccccaggcct

SEQ ID NO: 98898 - DNA, 60 bp, Artificial
  Synthetic oligonucleotide
ccccttgacctattcgactggtgcttcaacaagccttgacatcaccgcctcaattcaacc

SEQ ID NO: 98899 - DNA, 60 bp, Artificial
  Synthetic oligonucleotide
ctgcctaatggaacaagaacgcaaaccaacaggaagggtcctttcgctatggaccaccaa

SEQ ID NO: 98900 - DNA, 60 bp, Artificial
  Synthetic oligonucleotide
ttgtgaagggacgtaccctggcggtgaatcggcacatggcagagtctgactggacctcca

SEQ ID NO: 98901 - DNA, 60 bp, Artificial
  Synthetic oligonucleotide
cccgtataaagcccaaaactcttcaattgctagatgtccagggtccaaatccgactatgg

SEQ ID NO: 98902 - DNA, 60 bp, Artificial
  Synthetic oligonucleotide
ccgccatgctttgtgccgccaccctagctctcacacaagtggtgaagatggctaaggctg

SEQ ID NO: 98903 - DNA, 60 bp, Artificial
  Synthetic oligonucleotide
gtcgtctgtgacgatgtaggggcccggaacctggtcctgtcttcttgacgagtattccta

SEQ ID NO: 98904 - DNA, 60 bp, Artificial
  Synthetic oligonucleotide
ctgaaggatgcccagaaggtaccccactggctgggatctgatctggggcctcggtgcgcg

SEQ ID NO: 98905 - DNA, 60 bp, Artificial
  Synthetic oligonucleotide
ccaacttttgagagtgtggagtacagatggaggagcctgttctggtaatagcgcggtcac

SEQ ID NO: 98906 - DNA, 60 bp, Artificial
  Synthetic oligonucleotide
aattcaaaacaatcttcactactcccccccctcgttttcctgtgatctcacttttccaac

SEQ ID NO: 98907 - DNA, 52 bp, Artificial
  Synthetic oligonucleotide
tcgagaccaatcccgggcctttcacgtttaaaccaagacaacggccggtttt

SEQ ID NO: 98908 - DNA, 60 bp, Artificial
  Synthetic oligonucleotide
ctccagcgattccccgagcacgcgaagaggatttcagaccttcgtaatggaatggctgcc

SEQ ID NO: 98909 - DNA, 60 bp, Artificial
  Synthetic oligonucleotide
aaagcagttggacattctagaaagacaaataaccacaatgcatgtgtcaaacccctctca

SEQ ID NO: 98910 - DNA, 60 bp, Artificial
  Synthetic oligonucleotide
tagaatgattcgatatgattatccaacaaagaccggccaatgtggaggcgtgttgtgcac

SEQ ID NO: 98911 - DNA, 60 bp, Artificial
  Synthetic oligonucleotide
tggtggtattttaagatgtgtgcatggcccaataggtttgttaacagcaggagggagtgg

SEQ ID NO: 98912 - DNA, 60 bp, Artificial
  Synthetic oligonucleotide
tgcaagtaacctggtagttcaagcaatgtatgtacctcctggagcaccaaacccagaaaa

SEQ ID NO: 98913 - DNA, 60 bp, Artificial
  Synthetic oligonucleotide
cctcccagcttacgaccagttgtggtacagggtcctaacactgagtttgcactgtccctg

SEQ ID NO: 98914 - DNA, 60 bp, Artificial
  Synthetic oligonucleotide
gcttctctctctccagtttggtttgagtgcctagagagggttttggctaagttgggtttc

SEQ ID NO: 98915 - DNA, 60 bp, Artificial
  Synthetic oligonucleotide
ccgccagccaactacgtaaaagctagtaacatcttgtttgtaacttggcgttcgatcagg

SEQ ID NO: 98916 - DNA, 60 bp, Artificial
  Synthetic oligonucleotide
catagtggctgtcttcttgttgttgttatcccagaacaccaattggcatctcacaaaggc

SEQ ID NO: 98917 - DNA, 60 bp, Artificial
  Synthetic oligonucleotide
ctagctcatcatcagcaggtcagtctttctcaacggacccatcaaaattcacagaaccag

SEQ ID NO: 98918 - DNA, 60 bp, Artificial
  Synthetic oligonucleotide
ctaaagagatattttagatctgatgagcagtttccctttctagtccacccagtcatgcca

SEQ ID NO: 98919 - DNA, 60 bp, Artificial
  Synthetic oligonucleotide
caccttgagtcccccaacaatccttaacccagaggcactagctagaagatttggatttga

SEQ ID NO: 98920 - DNA, 60 bp, Artificial
  Synthetic oligonucleotide
ctggtgcacaaggaccaactaacagaagggatgcaatgcttggaacacatgttgtctggg

SEQ ID NO: 98921 - DNA, 60 bp, Artificial
  Synthetic oligonucleotide
cacccagagtgtccccatattgacagctaatgaaacaggtgccactatgccaactaaccc

SEQ ID NO: 98922 - DNA, 60 bp, Artificial
  Synthetic oligonucleotide
ctcactactgatgacaggcaatcacccagtgcattacccaactatgaaccaactcccaga

SEQ ID NO: 98923 - DNA, 60 bp, Artificial
  Synthetic oligonucleotide
aaaacatgatacaacacctaatgtggatgaaaaatttcagcacattcaagcagcaacttc

SEQ ID NO: 98924 - DNA, 60 bp, Artificial
  Synthetic oligonucleotide
gtctgtggcggaaccgactactttgggtgtccgtgtttccttttatttttattatggctg

SEQ ID NO: 98925 - DNA, 60 bp, Artificial
  Synthetic oligonucleotide
cgtaacgggtaactctgcagcggaaccgactactttgggtgtccgtgtttccttttattc

SEQ ID NO: 98926 - DNA, 60 bp, Artificial
  Synthetic oligonucleotide
cgagagtgtggagtacagatggaggagtctgttctggtagtagtgcagtcactggcacaa

SEQ ID NO: 98927 - DNA, 60 bp, Artificial
  Synthetic oligonucleotide
tgtcgtgccatcattcgagagtgtggagtacagatggaggagtctgttctggtagtagtg

SEQ ID NO: 98928 - DNA, 60 bp, Artificial
  Synthetic oligonucleotide
gtcataccgtgtctcatggacgggcaactcatggcatttgactactcaaattttgatgct

SEQ ID NO: 98929 - DNA, 60 bp, Artificial
  Synthetic oligonucleotide
aaatgtacaataggaagcatcacatccagtggtgttatgtacaagcacttctgtttcccc

SEQ ID NO: 98930 - DNA, 60 bp, Artificial
  Synthetic oligonucleotide
ctttcacggtcataaattactacaaagatgcagccagttcatcatcagctggccaatcgt

SEQ ID NO: 98931 - DNA, 60 bp, Artificial
  Synthetic oligonucleotide
cagttccaatggattctatgcttagacataacaattggagtttggtgataatacctatat

SEQ ID NO: 98932 - DNA, 60 bp, Artificial
  Synthetic oligonucleotide
ttctgtggttttggggttttccacttctgttttaaaaatcttcctctagggcgtagtgtt

SEQ ID NO: 98933 - DNA, 56 bp, Artificial
  Synthetic oligonucleotide
aaaagtgtttccatctaaaactgatccagcgctacagtggcttgaagatcatgagg

SEQ ID NO: 98934 - DNA, 60 bp, Artificial
  Synthetic oligonucleotide
cactccagctgacaaaagcgacaaaggttttgttcttggtcactccattaccgatgtcac

SEQ ID NO: 98935 - DNA, 60 bp, Artificial
  Synthetic oligonucleotide
ggcaaaatctctaaattcagaacctgggtgaaagaatgtatcaataagattaaagggttt

SEQ ID NO: 98936 - DNA, 60 bp, Artificial
  Synthetic oligonucleotide
tttctaaattcagaacctgggtgaaagaatgtatcaataagatcaaaggcttccttgaac

SEQ ID NO: 98937 - DNA, 61 bp, Artificial
  Synthetic oligonucleotide
ggcaaaatctctaaattcagaacctgggtgaaagaatgtatcaataagattaaagggtttc

SEQ ID NO: 98938 - DNA, 60 bp, Artificial
  Synthetic oligonucleotide
ccactattccccatagtagacctggcagatgaggctagaaattccccactggtgacagtg

SEQ ID NO: 98939 - DNA, 61 bp, Artificial
  Synthetic oligonucleotide
catggcatttgattatacaaattatgatggtagtattcacccaatttggtttcaagctctg

SEQ ID NO: 98940 - DNA, 60 bp, Artificial
  Synthetic oligonucleotide
tgctgacctggtagtaatacaaacactagttgtaaggcccacgaaggatgcccagaaggt

SEQ ID NO: 98941 - DNA, 60 bp, Artificial
  Synthetic oligonucleotide
ctgctgatttggtagtaatgcaaacactagttgtaaggcccacgaaggatgcccagaagg

SEQ ID NO: 98942 - DNA, 60 bp, Artificial
  Synthetic oligonucleotide
gcctttccagggccttttcgagattccaagctacagatcactttacctgcgttgggtgaa

SEQ ID NO: 98943 - DNA, 60 bp, Artificial
  Synthetic oligonucleotide
gaccaataggtgataatcctccagattatctaaggtcaagcacttctgtttccccggtct

SEQ ID NO: 98944 - DNA, 60 bp, Artificial
  Synthetic oligonucleotide
ggtgtgaagagcctattgagctacctaagagtcctccggcccctgaatgcggctaatccc

SEQ ID NO: 98945 - DNA, 60 bp, Artificial
  Synthetic oligonucleotide
cacatatgttagatttgactctgagtataccattctagcaactgcctcacagccgtcaaa

SEQ ID NO: 98946 - DNA, 60 bp, Artificial
  Synthetic oligonucleotide
ggattagggtccaggtatggtggtgtgtttactagcaacgttaagatcatgaactaccac

SEQ ID NO: 98947 - DNA, 60 bp, Artificial
  Synthetic oligonucleotide
tcagcggtttattccctaccacctgacccaaagcactttgatggttaccaacaacaagaa

SEQ ID NO: 98948 - DNA, 60 bp, Artificial
  Synthetic oligonucleotide
ggacctgctgaaccaggtgactgtggtggtattctgaggtgtgtccatggcccaataggc

SEQ ID NO: 98949 - DNA, 60 bp, Artificial
  Synthetic oligonucleotide
agaacacaccctatggaataacagtcttgaatcacatgggtagtatggctttcagagtgg

SEQ ID NO: 98950 - DNA, 60 bp, Artificial
  Synthetic oligonucleotide
accccggagccctgtgttgcaatccagtaacattagggtcgtaatgagcaatttcgggac

SEQ ID NO: 98951 - DNA, 60 bp, Artificial
  Synthetic oligonucleotide
gcttacgaccagttatggtacagggccccaacacagaatttgcactgtccctattgagaa

SEQ ID NO: 98952 - DNA, 60 bp, Artificial
  Synthetic oligonucleotide
caccacctggtgcacaagggccaacaaacagaaaggatgccatgcttgggacacatgttg

SEQ ID NO: 98953 - DNA, 60 bp, Artificial
  Synthetic oligonucleotide
cagtcaacatgagaatgaaattgggaaatctctataaagcattccaccagaacccagggg

SEQ ID NO: 98954 - DNA, 60 bp, Artificial
  Synthetic oligonucleotide
ggaggcaatggtagacaagggttctcagcacaattgaggaggcaatatttcattgaaaaa

SEQ ID NO: 98955 - DNA, 60 bp, Artificial
  Synthetic oligonucleotide
ctaaaaccattgttccacagggcttaccaactaccaccctaccaggctcaggacaattcc

SEQ ID NO: 98956 - DNA, 60 bp, Artificial
  Synthetic oligonucleotide
gtggcaaagccattagtttggtggatagggctaccaacattagatatagtgtagaccagc

SEQ ID NO: 98957 - DNA, 59 bp, Artificial
  Synthetic oligonucleotide
ggtggtgttggaaattgccagacgcccttaaagacatgggagttttcggtcagaacatg

SEQ ID NO: 98958 - DNA, 60 bp, Artificial
  Synthetic oligonucleotide
cacccgcattgaactcaccaaatgttgaggcttgtggttatagtgatagagtccagcaga

SEQ ID NO: 98959 - DNA, 60 bp, Artificial
  Synthetic oligonucleotide
ctagtatcatcatgttttaaaataggcgttcgatcaggtggatcccccctccactagttt

SEQ ID NO: 98960 - DNA, 60 bp, Artificial
  Synthetic oligonucleotide
cagatggaccaaagatcccaggaatacacaggatcatgtcaggtctttatgcatgttggc

SEQ ID NO: 98961 - DNA, 60 bp, Artificial
  Synthetic oligonucleotide
ccagagtgttcctacactgacagccaatgaaacaggcgccaccatgccaaccaacccatc

SEQ ID NO: 98962 - DNA, 60 bp, Artificial
  Synthetic oligonucleotide
gcaacgcagccaaaggtttagaatggattgccaacaagatatcaaagctgattgagtgga

SEQ ID NO: 98963 - DNA, 54 bp, Artificial
  Synthetic oligonucleotide
ggggttgtacccacccctggggcccacgcggcgctagtactctggtacgttagt

SEQ ID NO: 98964 - DNA, 54 bp, Artificial
  Synthetic oligonucleotide
ggggttgtacccacccctggggcccacgcggcgccagtactctggtacgctagt

SEQ ID NO: 98965 - DNA, 60 bp, Artificial
  Synthetic oligonucleotide
cctctttgagattccaagttacagatcactttacctgcgttgggtgaacgccgtgtgcgg

SEQ ID NO: 98966 - DNA, 51 bp, Artificial
  Synthetic oligonucleotide
gccttattattgacaaggtgtgaagagccccgtgtgcttaatgtgaatcct

SEQ ID NO: 98967 - DNA, 60 bp, Artificial
  Synthetic oligonucleotide
ttaccttgtttgcaatctggcgttcgatcaggtggttccccccactagtttggtcgatga

SEQ ID NO: 98968 - DNA, 60 bp, Artificial
  Synthetic oligonucleotide
tgatagggtcgcggctggtcgagtcccacacactataataccagtagactttcatgtgat

SEQ ID NO: 98969 - DNA, 60 bp, Artificial
  Synthetic oligonucleotide
tgatagggtcgcggctggtcgagtcccacacactataaaaccagtagactttcatgcaat

SEQ ID NO: 98970 - DNA, 60 bp, Artificial
  Synthetic oligonucleotide
cgactcattttagtaaccctacctcagtcgaattggattgggttatactgttgtaggggt

SEQ ID NO: 98971 - DNA, 60 bp, Artificial
  Synthetic oligonucleotide
gatgctagtctcctagcccaatcaggaaaagactatggactaaccatgactccagcagac

SEQ ID NO: 98972 - DNA, 60 bp, Artificial
  Synthetic oligonucleotide
cctgtttggagaaagagatgatagaatacagacttaaatcttatgattggtggagaatga

SEQ ID NO: 98973 - DNA, 60 bp, Artificial
  Synthetic oligonucleotide
accagcctgtcgtaacgcgcaagttcgtggcggaaccgactactttgggtgtccgtgttt

SEQ ID NO: 98974 - DNA, 60 bp, Artificial
  Synthetic oligonucleotide
tccgggaattccggagtccctcttggaagtccatggtgaggggacttgatacctcaccgc

SEQ ID NO: 98975 - DNA, 60 bp, Artificial
  Synthetic oligonucleotide
tgcgaagagtccactgagctagttggtattcctccggcccctgaatgcggctaatcctaa

SEQ ID NO: 98976 - DNA, 60 bp, Artificial
  Synthetic oligonucleotide
ggtgtgaagagcctattgagctacaagagagtcctccggcccctgaatgcggctaatccc

SEQ ID NO: 98977 - DNA, 60 bp, Artificial
  Synthetic oligonucleotide
gagtctattgagctaattggtagtcctccggcccctgaatgcggctaatcctaactgcgg

SEQ ID NO: 98978 - DNA, 60 bp, Artificial
  Synthetic oligonucleotide
gagaataatgaaagtggaatttactcagtgttcaatgaatgtggtctccaaaacgctttt

SEQ ID NO: 98979 - DNA, 60 bp, Artificial
  Synthetic oligonucleotide
gtcagaggataatgaaagtggaatttactcagtgttcaatgaatgtggtctccaaaacgc

SEQ ID NO: 98980 - DNA, 60 bp, Artificial
  Synthetic oligonucleotide
catggtgcgaagagtctattgagctaattggtagtcctccggcccctgaatgcggctaat

SEQ ID NO: 98981 - DNA, 60 bp, Artificial
  Synthetic oligonucleotide
tccccaacactagacctggcagatgaggctagaaactccccactggcgacagtgttctag

SEQ ID NO: 98982 - DNA, 60 bp, Artificial
  Synthetic oligonucleotide
tgtttccccaacactagacctggcagatgaggctagaaactccccactggcgacagtgtt

SEQ ID NO: 98983 - DNA, 60 bp, Artificial
  Synthetic oligonucleotide
ccgccgttggcttgactcattttagtaaccctacctcagtcgaattggattgggttatac

SEQ ID NO: 98984 - DNA, 60 bp, Artificial
  Synthetic oligonucleotide
caaaccccagctcaagaattgggcttggcagtgggaatgaatccctggacagattgggat

SEQ ID NO: 98985 - DNA, 60 bp, Artificial
  Synthetic oligonucleotide
aaaagaaaagattgcgcaaggaaagacccgctgcattgaagcctgttcaattgactatgt

SEQ ID NO: 98986 - DNA, 60 bp, Artificial
  Synthetic oligonucleotide
atcctctcgatcggatcgcaacgctttacccaggaagccacttgggtgtacgcggccgtt

SEQ ID NO: 98987 - DNA, 60 bp, Artificial
  Synthetic oligonucleotide
ttaattcctgcaggttcagggttctttaatctgtttctctataagaacactcattttcac

SEQ ID NO: 98988 - DNA, 60 bp, Artificial
  Synthetic oligonucleotide
gagaattatgaaagtggagtttactcagtgttcaatgaatgtggtctccaaaacgctttt

SEQ ID NO: 98989 - DNA, 60 bp, Artificial
  Synthetic oligonucleotide
ggaatttactcagtgttcaatgaatgtggtctccaaaacgctttttaggaagagtcccat

SEQ ID NO: 98990 - DNA, 60 bp, Artificial
  Synthetic oligonucleotide
ggctaatacttctatgaagagatgccttggatagggtaacagcggcggatattggtgagt

SEQ ID NO: 98991 - DNA, 60 bp, Artificial
  Synthetic oligonucleotide
cggcggatattggtgagttgttaagacaaaaaccattcaacgccggaggactggctctca

SEQ ID NO: 98992 - DNA, 60 bp, Artificial
  Synthetic oligonucleotide
cggaaccgactactttgggtgtccgtgtttcattttattcctatactggctgcttatggt

SEQ ID NO: 98993 - DNA, 60 bp, Artificial
  Synthetic oligonucleotide
gcggaaccgactactttgggtgtccgtgtttcctcttattcttgtactggctgcttatgg

SEQ ID NO: 98994 - DNA, 60 bp, Artificial
  Synthetic oligonucleotide
tgccagtgggcagtctgtcgtaacgggtaactctgcagcggaaccgactactttgggtgt

SEQ ID NO: 98995 - DNA, 55 bp, Artificial
  Synthetic oligonucleotide
taatgagtaattgcgggatgggaccaactactttgggtgtccgtgtttcactttt

SEQ ID NO: 98996 - DNA, 60 bp, Artificial
  Synthetic oligonucleotide
gaaccctttcagggaacgttcgagattccaagctacagatcactttacctgcgttgggtg

SEQ ID NO: 98997 - DNA, 60 bp, Artificial
  Synthetic oligonucleotide
tcattaacctcagaacaaacaatactgctacaattattgtgccttacataaactcagtgc

SEQ ID NO: 98998 - DNA, 60 bp, Artificial
  Synthetic oligonucleotide
gccttaattgtgacatggtgtgaagacccacgtgtgcttaattgtgagtcctccggcccc

SEQ ID NO: 98999 - DNA, 60 bp, Artificial
  Synthetic oligonucleotide
ggtgagtacacccctcactagtctggtcgatgaggctgagaattccccacgggcgaccgt

SEQ ID NO: 99000 - DNA, 56 bp, Artificial
  Synthetic oligonucleotide
cattgtgtcttatccatttgaactacaaccagaattactagcactcgctggtaaaa

SEQ ID NO: 99001 - DNA, 56 bp, Artificial
  Synthetic oligonucleotide
tattgtatcctatccatttgaactgcaaccagaattactagcactcgctggtaaaa

SEQ ID NO: 99002 - DNA, 60 bp, Artificial
  Synthetic oligonucleotide
gccttaattgtgacatggtgcgaagacccacgtgtgcttaattgtgagtcctccggcccc

SEQ ID NO: 99003 - DNA, 60 bp, Artificial
  Synthetic oligonucleotide
gggaaatctcttaatctttccacaccagttcattaacctcagaacaaacaatactgctac

SEQ ID NO: 99004 - DNA, 60 bp, Artificial
  Synthetic oligonucleotide
gtttcagggccctgtttacaaagatttagaaatagatgtccataacacacctccacctga

SEQ ID NO: 99005 - DNA, 60 bp, Artificial
  Synthetic oligonucleotide
cacatgggtagtatagctttcagaatagtcaatgatcatgacgtacacacaactctcgtc

SEQ ID NO: 99006 - DNA, 60 bp, Artificial
  Synthetic oligonucleotide
ccccagtgtcttctttgaggttggtaaaatggctaggtttagtgtaccattcgtaggcat

SEQ ID NO: 99007 - DNA, 60 bp, Artificial
  Synthetic oligonucleotide
ggtgctgtcacatccagtgacggctagtacaagcacttctgtttccccggagcggagtat

SEQ ID NO: 99008 - DNA, 60 bp, Artificial
  Synthetic oligonucleotide
accacatattcagagatgagatttatgaggttgagggaggtatgccatcaggatgttcag

SEQ ID NO: 99009 - DNA, 60 bp, Artificial
  Synthetic oligonucleotide
atgtaacacacaccacatattcagagatgagatttatgaggttgaaggaggcatgccatc

SEQ ID NO: 99010 - DNA, 60 bp, Artificial
  Synthetic oligonucleotide
cacagggtccatactcaggcaatccctcacataccaagttaaaaccacccactttgcggc

SEQ ID NO: 99011 - DNA, 60 bp, Artificial
  Synthetic oligonucleotide
cacagggtccatactcaggcaatccctcacatgttaaactaaaaccacctaccctacggc

SEQ ID NO: 99012 - DNA, 60 bp, Artificial
  Synthetic oligonucleotide
atggaactgggttttacaaacctgtgatggcctcaaagacccttgaggctatcctctcct

SEQ ID NO: 99013 - DNA, 51 bp, Artificial
  Synthetic oligonucleotide
atggaactgggttttacaaacctgtgatggcctcaaagacccttgaggcta

SEQ ID NO: 99014 - DNA, 58 bp, Artificial
  Synthetic oligonucleotide
cccctagtagacctggcagatgaggctagaaataccccactggtaacagtgttctagc

SEQ ID NO: 99015 - DNA, 60 bp, Artificial
  Synthetic oligonucleotide
gcggaaccgactactttgggtgtccgtgtttcctatttcctttacactggctgcttatgg

SEQ ID NO: 99016 - DNA, 50 bp, Artificial
  Synthetic oligonucleotide
tgtcgtaacgggtaactctgcagcggaaccgactactttgggtgtccgtg

SEQ ID NO: 99017 - DNA, 60 bp, Artificial
  Synthetic oligonucleotide
attttcccggtgccattgctctggatggtgtcaccaagctgacaaatgcggactgaacct

SEQ ID NO: 99018 - DNA, 60 bp, Artificial
  Synthetic oligonucleotide
cggcttgctggattttcccggtgccattgctctggatggtgtcaccaagctggcagatgc

SEQ ID NO: 99019 - DNA, 60 bp, Artificial
  Synthetic oligonucleotide
cgccgcgaggcggtcctctctggccaaaagcccagcgttaatagcgccttctgggatgca

SEQ ID NO: 99020 - DNA, 60 bp, Artificial
  Synthetic oligonucleotide
gcggaactcccccgccgcgaggcggtcctctctggccaaaagcccagcgttaatagcgcc

SEQ ID NO: 99021 - DNA, 60 bp, Artificial
  Synthetic oligonucleotide
gtatagcgccaggtaaccggacagcggcttgctggattttcccggtgccattgctctgga

SEQ ID NO: 99022 - DNA, 60 bp, Artificial
  Synthetic oligonucleotide
agtgagtggatctccaatttggtctgttctgaactacaccatctactgctgtgaagaatg

SEQ ID NO: 99023 - DNA, 60 bp, Artificial
  Synthetic oligonucleotide
cgcgaggcggtcctctctggccaaaagcccagcgttaatagcgccttttgggatgcagga

SEQ ID NO: 99024 - DNA, 60 bp, Artificial
  Synthetic oligonucleotide
cgcaatggtcaacgggcctcttccaaatccagaggcaccgattagagtggtgtctgtgcc

SEQ ID NO: 99025 - DNA, 60 bp, Artificial
  Synthetic oligonucleotide
cgcaatggtcaacgggcctcttccaaatccagaggcaccgattagagtggtgtctgtgcg

SEQ ID NO: 99026 - DNA, 60 bp, Artificial
  Synthetic oligonucleotide
caatttggtctgttctgaactacaccatctactgctgtgaagaatgccctggaggcaagc

SEQ ID NO: 99027 - DNA, 60 bp, Artificial
  Synthetic oligonucleotide
ctccaatttggcctgttctgaactacaccatctactgctgtgaagaatgtcctgaaggca

SEQ ID NO: 99028 - DNA, 60 bp, Artificial
  Synthetic oligonucleotide
gcctgtgattactcccggttcgacgcgaaccatgcagctgatgcaatgagagttgtcctg

SEQ ID NO: 99029 - DNA, 59 bp, Artificial
  Synthetic oligonucleotide
ctagaaattccccactggcgacagtgttctagcctgcgtggctgcctgcacacccgttt

SEQ ID NO: 99030 - DNA, 56 bp, Artificial
  Synthetic oligonucleotide
ggctagaaataccccactggtgacagtgttctagcctgcgtggctgcctgcacacc

SEQ ID NO: 99031 - DNA, 60 bp, Artificial
  Synthetic oligonucleotide
ggtgtgaagagcctattgagctgcaagagagtcctccggcccctgaatgcggctaatccc

SEQ ID NO: 99032 - DNA, 60 bp, Artificial
  Synthetic oligonucleotide
gtgagtggcttgtcgtaacgcgcaagtctgtggcggaaccgactactttgggtgtccgtg

SEQ ID NO: 99033 - DNA, 60 bp, Artificial
  Synthetic oligonucleotide
tggtcgatgaggctaggagttccccacgggcgaccgtgtcctagcctgcgtggcggccaa

SEQ ID NO: 99034 - DNA, 60 bp, Artificial
  Synthetic oligonucleotide
agccagagggtggcgtgtcgtaacgggcaactctgcagcggaaccgactactttgggagt

SEQ ID NO: 99035 - DNA, 60 bp, Artificial
  Synthetic oligonucleotide
gccaacccagctcttgctgggacgcccttttatagacatggtgtgaagactcgcatgtgc

SEQ ID NO: 99036 - DNA, 60 bp, Artificial
  Synthetic oligonucleotide
gtgagtggcttgtcgtaacgggtaactctgtggcggaaccgactactttgggtgtccgtg

SEQ ID NO: 99037 - DNA, 53 bp, Artificial
  Synthetic oligonucleotide
tgtcgtaacgggcaactctgcagcggaaccgactactttgggtgtccgtgttt

SEQ ID NO: 99038 - DNA, 60 bp, Artificial
  Synthetic oligonucleotide
aaggggtagtgtgtcgtaacgggcaactccgcagcggaaccgactactttgggtgtccgt

SEQ ID NO: 99039 - DNA, 60 bp, Artificial
  Synthetic oligonucleotide
gggaacttattggaagcaacaatttgccgtacggcatcctactgccagcggattcacacc

SEQ ID NO: 99040 - DNA, 60 bp, Artificial
  Synthetic oligonucleotide
cacagtaaaatcctgtaaaggtatgtgtggcggtctgctcatttctaaggtggaagggaa

SEQ ID NO: 99041 - DNA, 60 bp, Artificial
  Synthetic oligonucleotide
ggcccagcagttctaagcaaatcagaccctagacttgaagagccagttgagtgcttaatc

SEQ ID NO: 99042 - DNA, 60 bp, Artificial
  Synthetic oligonucleotide
gcggtttccatttccaagtacaaattaatgtgaatcaaggtgctgcaggaagtgctctgg

SEQ ID NO: 99043 - DNA, 60 bp, Artificial
  Synthetic oligonucleotide
cccaatatgatggttcacttagctcaatgcttctgtgggaggcagtggaagtactggcat

SEQ ID NO: 99044 - DNA, 60 bp, Artificial
  Synthetic oligonucleotide
gcccattggtatttggatccagggtgaaccaggacaagggaaatctttcttaacccacac

SEQ ID NO: 99045 - DNA, 60 bp, Artificial
  Synthetic oligonucleotide
agtccttatgaccagcaaccccgaaatcaagtgatgaaattggcttacctagatagaggc

SEQ ID NO: 99046 - DNA, 60 bp, Artificial
  Synthetic oligonucleotide
ggcacttgagagtttatgtctggacgcccctttctatgccaacgggaataacaacacagg

SEQ ID NO: 99047 - DNA, 60 bp, Artificial
  Synthetic oligonucleotide
gtgatgtgaagaaactggctgaggtggtggcagaatccatgtctaatacagatgatgatg

SEQ ID NO: 99048 - DNA, 60 bp, Artificial
  Synthetic oligonucleotide
actgacactacactataagaataaagttttcccaattgaacaaccctcagttacccaagt

SEQ ID NO: 99049 - DNA, 60 bp, Artificial
  Synthetic oligonucleotide
aagaactgtgaaaccattgccaaggatatttttggaacacataccctgagccaacaccaa

SEQ ID NO: 99050 - DNA, 60 bp, Artificial
  Synthetic oligonucleotide
gggcctaattgctatgccacgacatctgagccagcaaataaggatgtggtacaggcaaca

SEQ ID NO: 99051 - DNA, 60 bp, Artificial
  Synthetic oligonucleotide
cccctttctattctcacaagccattgaggacggttagggacactcacagcttgggtaggc

SEQ ID NO: 99052 - DNA, 60 bp, Artificial
  Synthetic oligonucleotide
acattccagaactcttggggctcacagatgggcctcagcgacccattgtgtatcgaggat

SEQ ID NO: 99053 - DNA, 60 bp, Artificial
  Synthetic oligonucleotide
ctgacacaccatccaccacatatgggcacgatgccaagggttatttcaaatggtctgcta

SEQ ID NO: 99054 - DNA, 60 bp, Artificial
  Synthetic oligonucleotide
atggacgcggaacaaatttgatattgcagagggacctggttcaatgaacatggcaaatgt

SEQ ID NO: 99055 - DNA, 60 bp, Artificial
  Synthetic oligonucleotide
caggtgagtgttgggaggtatcaaagaatggaagagattgggaaacactgaagttaaaag

SEQ ID NO: 99056 - DNA, 60 bp, Artificial
  Synthetic oligonucleotide
ccagtgggtagtgtgtcgtaacgggcaactctgcagcggaaccgactactttgggtgtcc

SEQ ID NO: 99057 - DNA, 56 bp, Artificial
  Synthetic oligonucleotide
tgcgtaagtctgtggcggaaccgactactttgggtgtccgtgtttctctttatttt

SEQ ID NO: 99058 - DNA, 58 bp, Artificial
  Synthetic oligonucleotide
ttgtcaacggtcaagcacttctgtttccccggtcaagattgatacgctccaacagggc

SEQ ID NO: 99059 - DNA, 60 bp, Artificial
  Synthetic oligonucleotide
agacttaaatcatatgattggtggagaatgaggttttatgatcagtgctttgtttgtgac

SEQ ID NO: 99060 - DNA, 60 bp, Artificial
  Synthetic oligonucleotide
cctcgaggccatcctctcctttgcacgccgtgggaccatacaggagaagttgatctccgt

SEQ ID NO: 99061 - DNA, 60 bp, Artificial
  Synthetic oligonucleotide
gctacgtcgtaatgcgtaagttggaggcggaacagactactttcggtactccgtgtttcc

SEQ ID NO: 99062 - DNA, 58 bp, Artificial
  Synthetic oligonucleotide
tacgtcgtaacgcgtaagttggaggcggaacagactactttcggtactccgtgtttct

SEQ ID NO: 99063 - DNA, 60 bp, Artificial
  Synthetic oligonucleotide
ctacgtcgtaacgcgtaagttggaggcggaacagactactttcggtactccgtgtttcct

SEQ ID NO: 99064 - DNA, 53 bp, Artificial
  Synthetic oligonucleotide
acgtcgtaacgcgtaagttggaggcggaacagactactttcggtactccgtgt

SEQ ID NO: 99065 - DNA, 60 bp, Artificial
  Synthetic oligonucleotide
ctagtcgtaatgagtaattgcgggacgggaccaactactttgggtgtccgtgtttcactt

SEQ ID NO: 99066 - DNA, 60 bp, Artificial
  Synthetic oligonucleotide
atcctacccccatgaggttgacgctagtctcctagcccaatcaggaaaagactatggatt

SEQ ID NO: 99067 - DNA, 60 bp, Artificial
  Synthetic oligonucleotide
ggtgtgaagagcctattgagctacatgagagtcctccggcccctgaatgcggctaatcct

SEQ ID NO: 99068 - DNA, 60 bp, Artificial
  Synthetic oligonucleotide
tcaaaggtcaagcacttctgtttccccggtcgatgaggatatgctttacccaaggcaaaa

SEQ ID NO: 99069 - DNA, 55 bp, Artificial
  Synthetic oligonucleotide
aaaaccttagagatcgttatccccacactgcctacacagagcccagtaccatttt

SEQ ID NO: 99070 - DNA, 60 bp, Artificial
  Synthetic oligonucleotide
aaagatcgttatccccacactgcctacacagagcctagtaccacttttgatgtaattagg

SEQ ID NO: 99071 - DNA, 60 bp, Artificial
  Synthetic oligonucleotide
ctgggagtgggttgttcccactcactccacccatgcggtgttgtactctgttattacggt

SEQ ID NO: 99072 - DNA, 60 bp, Artificial
  Synthetic oligonucleotide
ttaaaactgggagtgggttgttcccactcactccacccatgcggtgttgtactctgttat

SEQ ID NO: 99073 - DNA, 60 bp, Artificial
  Synthetic oligonucleotide
ctgggagtgggttgttcccactcactccacccatgcggtgttgtacactgttattacggt

SEQ ID NO: 99074 - DNA, 56 bp, Artificial
  Synthetic oligonucleotide
tagtaccacttttgatgtaattaggttggtcgctccctgcaaacccagcagtagac

SEQ ID NO: 99075 - DNA, 60 bp, Artificial
  Synthetic oligonucleotide
gtgaccccacacatgaaaattgctgtagcacattatgcagcacagttatctacactagac

SEQ ID NO: 99076 - DNA, 60 bp, Artificial
  Synthetic oligonucleotide
gtgaagtgaccacacatatgaaaattgctgtagcacattatgcagcacagctatccacac

SEQ ID NO: 99077 - DNA, 60 bp, Artificial
  Synthetic oligonucleotide
cttattgagtggtaccaatactgcacgaatgatcaagtaccattacccgacaaaagctgg

SEQ ID NO: 99078 - DNA, 60 bp, Artificial
  Synthetic oligonucleotide
gattgtcccagcagagtgttctattgaaagagatttagggatagcaaatatgactatagg

SEQ ID NO: 99079 - DNA, 60 bp, Artificial
  Synthetic oligonucleotide
gattgttccagcagagtgttctattgaaagagatttagggatagcaaatatgactatagg

SEQ ID NO: 99080 - DNA, 60 bp, Artificial
  Synthetic oligonucleotide
caaccaaggaaatattcatacctggacaagttaggaatttaattgaaatgtgccaagttg

SEQ ID NO: 99081 - DNA, 60 bp, Artificial
  Synthetic oligonucleotide
tcatacctggacaagttaggaatttaattgaaatgtgccaagttgatacactcattcctg

SEQ ID NO: 99082 - DNA, 60 bp, Artificial
  Synthetic oligonucleotide
cttaatctcttagagaaacaaatagaaacaattacgcttgcacctgctaatgaccaggaa

SEQ ID NO: 99083 - DNA, 60 bp, Artificial
  Synthetic oligonucleotide
ttggattgttccagcagagtgttctattgaaagagatttagggatagcaaatatgactat

SEQ ID NO: 99084 - DNA, 60 bp, Artificial
  Synthetic oligonucleotide
gggtgagaagcctacttattgacaagatgtgaagagccgcgtgtgctcagtgtgcttcct

SEQ ID NO: 99085 - DNA, 61 bp, Artificial
  Synthetic oligonucleotide
gaacaaattctatacctataacagtatcaattagccctatgttttcagaattctcaggacc

SEQ ID NO: 99086 - DNA, 60 bp, Artificial
  Synthetic oligonucleotide
cttccacccgaccaaggaaatatttatacctggacaagttaggaatttaattgaaatgtg

SEQ ID NO: 99087 - DNA, 60 bp, Artificial
  Synthetic oligonucleotide
ccacccgaccaaggaaatatttatacctggacaagttaggaatttaattgaaatgtgcca

SEQ ID NO: 99088 - DNA, 60 bp, Artificial
  Synthetic oligonucleotide
gcaccataaatgatcacattaaagtggccatctcccattactcggcacaattgaccacac

SEQ ID NO: 99089 - DNA, 60 bp, Artificial
  Synthetic oligonucleotide
gtgccagagagaagagtggttgcacaaggacctgaggaggaatttggtagatcactcatc

SEQ ID NO: 99090 - DNA, 60 bp, Artificial
  Synthetic oligonucleotide
gtggcataatggtagggatgtgtacaagcagtttgaggagcgaatacgtagtgtaagcgc

SEQ ID NO: 99091 - DNA, 60 bp, Artificial
  Synthetic oligonucleotide
tatgttaacacctggctctggacaatttatgaccactgatgatttccaatccccttgtgc

SEQ ID NO: 99092 - DNA, 60 bp, Artificial
  Synthetic oligonucleotide
cgcaaggcgcctacacaaaacctagtaacatcttgaatggtatgtggctggtcgttccgc

SEQ ID NO: 99093 - DNA, 60 bp, Artificial
  Synthetic oligonucleotide
ccgaccctgttaaagatgtgcttgagaaaggcattcctacactccaatccccaaccgtag

SEQ ID NO: 99094 - DNA, 60 bp, Artificial
  Synthetic oligonucleotide
ggtatcaaacaaatcttatagcaccacagaacacaccccaaacagccaagatactatgct

SEQ ID NO: 99095 - DNA, 60 bp, Artificial
  Synthetic oligonucleotide
tgtgcagtactaatcataatttgttagcaccccccaccataacgtctttaccagcaatga

SEQ ID NO: 99096 - DNA, 60 bp, Artificial
  Synthetic oligonucleotide
ctgctggtggtgaggggcatgtggctttcattgatctcaggcatttccattgtgctgaag

SEQ ID NO: 99097 - DNA, 60 bp, Artificial
  Synthetic oligonucleotide
attgtagcaatgataccagaacaccaactggcaagtgcaacctatgggaatgttgccgcc

SEQ ID NO: 99098 - DNA, 60 bp, Artificial
  Synthetic oligonucleotide
tcagcctctggctaccaccctgcttggcgaaattgcaagttactacactcattggactgg

SEQ ID NO: 99099 - DNA, 60 bp, Artificial
  Synthetic oligonucleotide
ggcaacatggtcaaacataccctagattttccctccctttcttaagcatagcctcagcat

SEQ ID NO: 99100 - DNA, 60 bp, Artificial
  Synthetic oligonucleotide
gccaatccataaaccaaagagccctcctcaggaatctcgcatcatcatccagcctgggcc

SEQ ID NO: 99101 - DNA, 60 bp, Artificial
  Synthetic oligonucleotide
gccgagaaggcacaagaagcaatttctggtcttggagctgttgagagtgttgcttccact

SEQ ID NO: 99102 - DNA, 60 bp, Artificial
  Synthetic oligonucleotide
ccacagggacgttggttgcactgcttgccctagatgccactagtatgagtatggaccagg

SEQ ID NO: 99103 - DNA, 60 bp, Artificial
  Synthetic oligonucleotide
cttggtatttggatttcaggtgggccaggtgttgggaagagttttttatccaactatata

SEQ ID NO: 99104 - DNA, 60 bp, Artificial
  Synthetic oligonucleotide
tgagggatggcagtctacagaatggcacttgctgggaacgtgacattggtgggttgggcc

SEQ ID NO: 99105 - DNA, 60 bp, Artificial
  Synthetic oligonucleotide
ttgtaatttgatttctagtgttccatttataacaccaaaagccagtgttgaagccaaggg

SEQ ID NO: 99106 - DNA, 60 bp, Artificial
  Synthetic oligonucleotide
acgcccagtcctagcgatataggaccccctatccatttgttttacctttaccctccacta

SEQ ID NO: 99107 - DNA, 60 bp, Artificial
  Synthetic oligonucleotide
tcacaacaactcaccagattgaaactgtgactatctgtggcaagcaagtgaccttaattg

SEQ ID NO: 99108 - DNA, 60 bp, Artificial
  Synthetic oligonucleotide
ttttcgattggcaaaaacacatgtggctgaaaaattggctaaagtgttgggttctcatga

SEQ ID NO: 99109 - DNA, 60 bp, Artificial
  Synthetic oligonucleotide
atcccattttattctgtcacacctctacgccccacccgacccatgccagcatctcagggg

SEQ ID NO: 99110 - DNA, 60 bp, Artificial
  Synthetic oligonucleotide
tcgcacaccttggtgaaacatttttttggccgtcaatggctggttcgtactgttcaacat

SEQ ID NO: 99111 - DNA, 60 bp, Artificial
  Synthetic oligonucleotide
gccactcctggatgtttttatacagctaacacccaaccagcatatggacaaactaggtat

SEQ ID NO: 99112 - DNA, 60 bp, Artificial
  Synthetic oligonucleotide
ggcatgacagccacagccagcgacaaggctagcgacatagcttggagaggcccaatggaa

SEQ ID NO: 99113 - DNA, 60 bp, Artificial
  Synthetic oligonucleotide
aaagtggctgtgcagaagcatgtagaaaagcttgaaagtgtgctccaggaccagagtggt

SEQ ID NO: 99114 - DNA, 60 bp, Artificial
  Synthetic oligonucleotide
actgagggagttgaacccaatccaggccctattatggttgttggtaaatcaggatccggc

SEQ ID NO: 99115 - DNA, 60 bp, Artificial
  Synthetic oligonucleotide
gtgcatgctccggactgataaggactatatttgtgaacataccactcgtcctaagcacca

SEQ ID NO: 99116 - DNA, 60 bp, Artificial
  Synthetic oligonucleotide
aacccgccagtgagcacatgcaaagcacagcatcaatctatttaaaatctgacacaatgc

SEQ ID NO: 99117 - DNA, 60 bp, Artificial
  Synthetic oligonucleotide
ggaatcacttgttcgtgcctgtgatggccgggttgtcaaattctatcgtggtaagattgc

SEQ ID NO: 99118 - DNA, 60 bp, Artificial
  Synthetic oligonucleotide
ggccgctttaccaatgaggatgttattttcatgaagacaatgaggcaatatttccctggt

SEQ ID NO: 99119 - DNA, 60 bp, Artificial
  Synthetic oligonucleotide
tgcagtggttttggacaaggaaaggctagtgtttggtctgggtacaaacccttgttgtga

SEQ ID NO: 99120 - DNA, 60 bp, Artificial
  Synthetic oligonucleotide
ggctatataacctggcatgttgtgaatcgcctgacagtcaactcaacatccccatccaca

SEQ ID NO: 99121 - DNA, 60 bp, Artificial
  Synthetic oligonucleotide
gacgctggcagattgtgggtgattttcagtgggctaacacagtgacccctggcaacagga

SEQ ID NO: 99122 - DNA, 60 bp, Artificial
  Synthetic oligonucleotide
ctgtgtttgttacctgtgatgtctgtgctacgccagccaccctcatcttgcccttcacta

SEQ ID NO: 99123 - DNA, 60 bp, Artificial
  Synthetic oligonucleotide
gattcaagaggtcactaaaatcagaccctttgggcaaactacaactgcttctggcacaac

SEQ ID NO: 99124 - DNA, 60 bp, Artificial
  Synthetic oligonucleotide
ctcgcaaccttcgcccatttcgcttctgtttgagacttaaaacacttgcctttgagctcc

SEQ ID NO: 99125 - DNA, 60 bp, Artificial
  Synthetic oligonucleotide
agttcctgaggtaccaagttgtgaggggctatgggaaaacccctttgatccacactgcct

SEQ ID NO: 99126 - DNA, 60 bp, Artificial
  Synthetic oligonucleotide
gaaagtgttggtggggccatatgtgtctttgtgttgggagcctttacacatgggtcagga

SEQ ID NO: 99127 - DNA, 60 bp, Artificial
  Synthetic oligonucleotide
caggctagactctttgcccgcccaaaggaaggtaaaatttctaaattcagaacctgggtg

SEQ ID NO: 99128 - DNA, 60 bp, Artificial
  Synthetic oligonucleotide
gggtctttcaatgtggatgcatcagtggatcgcaggtcattgctgaatcttccctatgcc

SEQ ID NO: 99129 - DNA, 60 bp, Artificial
  Synthetic oligonucleotide
caatgtcctcggcccttcaacgaccagggtaagaagaaaccacggcggaggccaatccat

SEQ ID NO: 99130 - DNA, 60 bp, Artificial
  Synthetic oligonucleotide
gaacctgcagccttacaacttgtgtttggacttttctggttttgacgggtctctgagtgc

SEQ ID NO: 99131 - DNA, 60 bp, Artificial
  Synthetic oligonucleotide
agatagttggagttctggacaaggaagttcttgaaggcaagattcagtggtgcaaaggcc

SEQ ID NO: 99132 - DNA, 60 bp, Artificial
  Synthetic oligonucleotide
ttgtgggataccctagagtacacgtaaaacacccaccggtttggcaggacaccgcagagc

SEQ ID NO: 99133 - DNA, 60 bp, Artificial
  Synthetic oligonucleotide
gcggtatgtgctcaggatcaccatgtactactgtcctaaactcaattgtgaaccagctgg

SEQ ID NO: 99134 - DNA, 60 bp, Artificial
  Synthetic oligonucleotide
aaccggtcgggagggcgtcgtaacgggtaactctgtggcggaaccgactactttgggtgt

SEQ ID NO: 99135 - DNA, 60 bp, Artificial
  Synthetic oligonucleotide
acctcctgctttcaaaccgctcaaaatttcagtggaccctgaaaccccagcaccaccagc

SEQ ID NO: 99136 - DNA, 58 bp, Artificial
  Synthetic oligonucleotide
ctgcggcagacacgcaacctagcacacacaatatctccaccgcgaatacaccagccct

SEQ ID NO: 99137 - DNA, 60 bp, Artificial
  Synthetic oligonucleotide
tctgggttgaacacgaggcaatggaacaaggtgtggttgattacatccagcagctcggaa

SEQ ID NO: 99138 - DNA, 60 bp, Artificial
  Synthetic oligonucleotide
gctacgttggtgttgccctacatgaacgctgtgcccatggactcggccataagacatagt

SEQ ID NO: 99139 - DNA, 60 bp, Artificial
  Synthetic oligonucleotide
caaggagtctggctaccctgtcatcaacacaccagccaaaaccaagcttgaacccagtgt

SEQ ID NO: 99140 - DNA, 60 bp, Artificial
  Synthetic oligonucleotide
ctcactactgcaggaagtttgccccactctatgcagcggaagccagaagggtgtttgctc

SEQ ID NO: 99141 - DNA, 60 bp, Artificial
  Synthetic oligonucleotide
tagatggacgcgtgacgccaagcacactcaggatcacgttcgttcactctgtttgctcgc

SEQ ID NO: 99142 - DNA, 60 bp, Artificial
  Synthetic oligonucleotide
gtgactagcttgtcgtaatgcgcaagtctatggcggaaccgactactttgggtgtccgtg

SEQ ID NO: 99143 - DNA, 60 bp, Artificial
  Synthetic oligonucleotide
cccaatgggtgttgtactctgttattccggtaactttgtacgccattttccctccctccc

SEQ ID NO: 99144 - DNA, 60 bp, Artificial
  Synthetic oligonucleotide
gacagaactttgatcattccaacacatgctgatccaggtagagaggttcaagtcaacggc

SEQ ID NO: 99145 - DNA, 60 bp, Artificial
  Synthetic oligonucleotide
gttttgcacactacaaggaccatactcaggtgagcctaaacccaaaaccaagatgcctga

SEQ ID NO: 99146 - DNA, 60 bp, Artificial
  Synthetic oligonucleotide
ccaagggccaatttctctagatgctccgccgccaccagccatagcagatctgttacaatc

SEQ ID NO: 99147 - DNA, 60 bp, Artificial
  Synthetic oligonucleotide
aagccgtttgactcaagatttgttttgtgtagtactaatcactctctcctagctccaccc

SEQ ID NO: 99148 - DNA, 60 bp, Artificial
  Synthetic oligonucleotide
cgcaaagtgcctacacagagcttagtaggattctgaaagatctttggttggtcgctcagc

SEQ ID NO: 99149 - DNA, 60 bp, Artificial
  Synthetic oligonucleotide
caatagtaggcaactctccaggttgtctaaggtcaagcacttctgtttccccggttgacg

SEQ ID NO: 99150 - DNA, 60 bp, Artificial
  Synthetic oligonucleotide
ccatatgtgaatgctgtaccaatggattcaatgcttcgacacaataattggagtttagtc

SEQ ID NO: 99151 - DNA, 66 bp, Artificial
  Synthetic oligonucleotide
gaaacacacatttcttattcaccccacatttccagtagaagaaatatatgaatcaattagatggac

SEQ ID NO: 99152 - DNA, 60 bp, Artificial
  Synthetic oligonucleotide
catacacaccacctgggattgacaagccagctaccagaaaagatgcaatgctgggaacac

SEQ ID NO: 99153 - DNA, 60 bp, Artificial
  Synthetic oligonucleotide
gtcaacatactatgaagtggcaggtggagttccttctggatgttctgggactagcatatt

SEQ ID NO: 99154 - DNA, 60 bp, Artificial
  Synthetic oligonucleotide
agttacagagaagcaggaacaccctgtcgttattacaacacacatatatcacaaagctaa

SEQ ID NO: 99155 - DNA, 60 bp, Artificial
  Synthetic oligonucleotide
caggtgatgtgacaacagctatagttcctagagctagcatgaaaactgttggacccagtg

SEQ ID NO: 99156 - DNA, 60 bp, Artificial
  Synthetic oligonucleotide
ccagtaagatacgcagtgtcagcgctggtcgtgcactgtatatcccaccttatgatctat

SEQ ID NO: 99157 - DNA, 60 bp, Artificial
  Synthetic oligonucleotide
caggtgatgattatattcctagttgtaactgcacagaggctacctattattgtaaacaca

SEQ ID NO: 99158 - DNA, 60 bp, Artificial
  Synthetic oligonucleotide
tacagcaggtggtgaaggccatgtagcatttacagatcttagacagtttcaatgtgctga

SEQ ID NO: 99159 - DNA, 60 bp, Artificial
  Synthetic oligonucleotide
taacaaccaatttcctagccagaatgataacaaatgaaagtgatgtgtattcattacccc

SEQ ID NO: 99160 - DNA, 60 bp, Artificial
  Synthetic oligonucleotide
aggtgttgttactggttctgcagtagggtgtgatcctgagactttctggtccaaaatccc

SEQ ID NO: 99161 - DNA, 60 bp, Artificial
  Synthetic oligonucleotide
aattcttctgaccctcaaacaatcatagcaactctaactttaattggctgcaatggttcg

SEQ ID NO: 99162 - DNA, 60 bp, Artificial
  Synthetic oligonucleotide
tgtaatgccgcgcgtggtcttgagtggattggcaataaaatttcaaagttcatagattgg

SEQ ID NO: 99163 - DNA, 60 bp, Artificial
  Synthetic oligonucleotide
catacccctagtaaaactaaacttcaacctagtgtgttctacgatgtcttcccaggttct

SEQ ID NO: 99164 - DNA, 60 bp, Artificial
  Synthetic oligonucleotide
tccagttaaagatgtcttagaaaaaggaatcccaacactacaatcaccatctgttgaagc

SEQ ID NO: 99165 - DNA, 60 bp, Artificial
  Synthetic oligonucleotide
ctcatggcaatcaggcactaatatgtcaatattctggcaacatggacaaccgttccctag

SEQ ID NO: 99166 - DNA, 60 bp, Artificial
  Synthetic oligonucleotide
cagttcacgtacagtgtaatgctagcaaattccatcaaggtaccctcttagttgcaatga

SEQ ID NO: 99167 - DNA, 60 bp, Artificial
  Synthetic oligonucleotide
gcctgcacactcttatgaggtgtgaagccaaagattggacagggtgtgaagagccgcgtg

SEQ ID NO: 99168 - DNA, 60 bp, Artificial
  Synthetic oligonucleotide
ccaggatctgggcaatttatgacgactgatgacatgcagtcaccttgtgcactaccatgg

SEQ ID NO: 99169 - DNA, 60 bp, Artificial
  Synthetic oligonucleotide
ctaggcaaaatgttggtacacactcaactcaaaattcagtgtcaaatggatcaagtttaa

SEQ ID NO: 99170 - DNA, 60 bp, Artificial
  Synthetic oligonucleotide
tacggatggctagggatacagatttacatatacaaagtggtccaatagagcaaaatccag

SEQ ID NO: 99171 - DNA, 60 bp, Artificial
  Synthetic oligonucleotide
gaccaatcactgtatcaattagtcctatgtgtgctgaattttctggtgcaagagcaaaga

SEQ ID NO: 99172 - DNA, 60 bp, Artificial
  Synthetic oligonucleotide
ctgctggttataatctcacacacccaggtgaggccggtagagttgtgggtcaacagcgtg

SEQ ID NO: 99173 - DNA, 60 bp, Artificial
  Synthetic oligonucleotide
cagtgtgttcgggatagaggggctcgaagctttagacttaaacactagtgctggttttcc

SEQ ID NO: 99174 - DNA, 60 bp, Artificial
  Synthetic oligonucleotide
agatctggctgtgtgcatatttcaagaataaaggttgattacaatgactacaatggagtg

SEQ ID NO: 99175 - DNA, 60 bp, Artificial
  Synthetic oligonucleotide
ataaaattggtcagattctaggtattcatgtaggtggaaatggaagagatggattttcag

SEQ ID NO: 99176 - DNA, 60 bp, Artificial
  Synthetic oligonucleotide
actgcaaatgacaaatattcgatggctggttatattacatgttggtatcaaactaatcta

SEQ ID NO: 99177 - DNA, 60 bp, Artificial
  Synthetic oligonucleotide
cggaaccgactactttgggtgtccgtgtttccttttatctctttgttggctgcttatggt

SEQ ID NO: 99178 - DNA, 60 bp, Artificial
  Synthetic oligonucleotide
aatgtcattaaggtcgtaatgagcaattctgggacgggaccgactactttgggtgtccgt

SEQ ID NO: 99179 - DNA, 60 bp, Artificial
  Synthetic oligonucleotide
cctccggcccctgaatgcggctaaccttaaccctagagccttatgccacgatccagtggt

SEQ ID NO: 99180 - DNA, 60 bp, Artificial
  Synthetic oligonucleotide
gcacttctgtttccccggagcgaggtataagtggtacccaccgccgaaagcctttaaccg

SEQ ID NO: 99181 - DNA, 60 bp, Artificial
  Synthetic oligonucleotide
catcagctggccaatcgttctcaatggacccgtcaaaatttactgaaccggtcaaggaca

SEQ ID NO: 99182 - DNA, 60 bp, Artificial
  Synthetic oligonucleotide
gctacatcctcgcaaccgcaggcagcacgattttcaaacacactgacagtgcaagcaatg

SEQ ID NO: 99183 - DNA, 60 bp, Artificial
  Synthetic oligonucleotide
taccattgatgcagaatcagcaagaacaacaagtctttggtttttccctatttttgggag

SEQ ID NO: 99184 - DNA, 60 bp, Artificial
  Synthetic oligonucleotide
cagacccagacacttacacacacccaggctttatatcatgctggtatcaaacctcattag

SEQ ID NO: 99185 - DNA, 60 bp, Artificial
  Synthetic oligonucleotide
cagcagagggtggtaatgtttcagttttctatgaccagacacatccaggagagagaggaa

SEQ ID NO: 99186 - DNA, 60 bp, Artificial
  Synthetic oligonucleotide
gtggagtcgtgagtctaagggctggtgttggaaattgccggatgctcttaaagacatggg

SEQ ID NO: 99187 - DNA, 60 bp, Artificial
  Synthetic oligonucleotide
gtgatggctcaccttggagattcctgaaaatgtacatcagtaaacacttccacctaccct

SEQ ID NO: 99188 - DNA, 60 bp, Artificial
  Synthetic oligonucleotide
ggagtgggaccagctgagccaggggattgtggtggcatactcaggtgtatacatggacca

SEQ ID NO: 99189 - DNA, 60 bp, Artificial
  Synthetic oligonucleotide
ctgccaacactggatcaccacccagtatacctgttactgtgacaatagcaccaatgaatc

SEQ ID NO: 99190 - DNA, 60 bp, Artificial
  Synthetic oligonucleotide
ctgaggcactaacagaagggttgggagaagaacttgaggaagtgatagtcgacaaagcga

SEQ ID NO: 99191 - DNA, 60 bp, Artificial
  Synthetic oligonucleotide
tacagtttcgttcaaaacataggacggaaccagtatgtgtgttgattcatggcacgccag

SEQ ID NO: 99192 - DNA, 60 bp, Artificial
  Synthetic oligonucleotide
caaaattactccccagtgtcttttataatgtgtttccagggacgaaagagccagcagttt

SEQ ID NO: 99193 - DNA, 60 bp, Artificial
  Synthetic oligonucleotide
cgtggcatccgcagtacggacatagggaaggttcttgtgataccaccttactcagttctt

SEQ ID NO: 99194 - DNA, 60 bp, Artificial
  Synthetic oligonucleotide
agttaggtgagttgtataaggcattccacaagaatcctgggatattaaccgggtctgcag

SEQ ID NO: 99195 - DNA, 60 bp, Artificial
  Synthetic oligonucleotide
gtaaagccaaactgaaagcaccggtactacgtgcagtagttactcaagggcccaacactg

SEQ ID NO: 99196 - DNA, 60 bp, Artificial
  Synthetic oligonucleotide
aggttaaaatcagagtttaccaccgtgctaagcacgtcttggcatggattcccagacccc

SEQ ID NO: 99197 - DNA, 60 bp, Artificial
  Synthetic oligonucleotide
ggatcagatttatgtagttgagggaggaatgccatcaggttgctcaggcactagtatttt

SEQ ID NO: 99198 - DNA, 60 bp, Artificial
  Synthetic oligonucleotide
gatacttcaggccagacaaacagtttcctttccttgttcatcctgttatgccaatgtcag

SEQ ID NO: 99199 - DNA, 60 bp, Artificial
  Synthetic oligonucleotide
cactcaaccctccaactgtgttgaaccctgaagcattagcacgtagattcgggtttgact

SEQ ID NO: 99200 - DNA, 60 bp, Artificial
  Synthetic oligonucleotide
gggcattaagaaaagggcaatattgaacaaagaaacccaagacacaaccaaaatggaaga

SEQ ID NO: 99201 - DNA, 56 bp, Artificial
  Synthetic oligonucleotide
ccccaagcgtgtgcgcacattccagtgttgctacgtcgtaacgcgtaagttggagg

SEQ ID NO: 99202 - DNA, 57 bp, Artificial
  Synthetic oligonucleotide
ccccaagcgtgtgcgcacaaaccagtgttgctacgtcgtaacgcgtaagttggaggc

SEQ ID NO: 99203 - DNA, 57 bp, Artificial
  Synthetic oligonucleotide
tggactatggaactgggttttacaaacctgtgatggcctcaaagacccttgaggcta

SEQ ID NO: 99204 - DNA, 60 bp, Artificial
  Synthetic oligonucleotide
agagggcagcgtgtcgtaatgggcaactctgcagcggaaccgactactttgggtgtccgt

SEQ ID NO: 99205 - DNA, 60 bp, Artificial
  Synthetic oligonucleotide
gtaccgccgttggctcgactcattttagtaaccctacctcagtcgaattggattgggtca

SEQ ID NO: 99206 - DNA, 51 bp, Artificial
  Synthetic oligonucleotide
taaaaaatttactgagatgtgcaatgcagctagaggtctagaatggatagg

SEQ ID NO: 99207 - DNA, 60 bp, Artificial
  Synthetic oligonucleotide
cagtgagtggcttgtcgtaacgcgcaagtctgtggcggaaccgactactttgggtgtccg

SEQ ID NO: 99208 - DNA, 60 bp, Artificial
  Synthetic oligonucleotide
tgtataatggcttttgattacactaattatgatggtagcatacaccctgtatggtttcaa

SEQ ID NO: 99209 - DNA, 60 bp, Artificial
  Synthetic oligonucleotide
caccctgatccttccttacgttaacgccatccccatggactcagccattcgtcactcaaa

SEQ ID NO: 99210 - DNA, 60 bp, Artificial
  Synthetic oligonucleotide
cacggagcagctggtatccccccccgtaacttagaagcctggacaaaccgaccaatagag

SEQ ID NO: 99211 - DNA, 60 bp, Artificial
  Synthetic oligonucleotide
ggacgaggcgatgcttggaactcacgtaatatgggactttgggctacaatcctccatcac

SEQ ID NO: 99212 - DNA, 60 bp, Artificial
  Synthetic oligonucleotide
gcaggtcaaagggttggatagtcgtggagaaagtgaccgaactcaaactggagcgcaatg

SEQ ID NO: 99213 - DNA, 60 bp, Artificial
  Synthetic oligonucleotide
gagacgtgtgaagactgctccccagcaaacttcaagaagtgcatgcccctgatctgcggg

SEQ ID NO: 99214 - DNA, 60 bp, Artificial
  Synthetic oligonucleotide
ctaactagcgatgaggactctaccccttgcatactccccgacttccaaccaaccccagag

SEQ ID NO: 99215 - DNA, 60 bp, Artificial
  Synthetic oligonucleotide
gagcaactttggcgctccttgggtgcgaaggctcaccgtggaagtggctgaagaggaaag

SEQ ID NO: 99216 - DNA, 60 bp, Artificial
  Synthetic oligonucleotide
ttatacagcctatgatgccagtttgagccccatgtggttccacgccctagccgaagtact

SEQ ID NO: 99217 - DNA, 60 bp, Artificial
  Synthetic oligonucleotide
aatcgcagctctctcactacactaggaccctttggccagcaacagggcgccgcctacgtc

SEQ ID NO: 99218 - DNA, 60 bp, Artificial
  Synthetic oligonucleotide
ccgcaccgttcaccgtgcccatggctgcactcgaggataaaggcaaacttttcacctcca

SEQ ID NO: 99219 - DNA, 60 bp, Artificial
  Synthetic oligonucleotide
cccaaatgagcagaaacacagcaggaagccacactaccggcacatacgcaaccggcggct

SEQ ID NO: 99220 - DNA, 60 bp, Artificial
  Synthetic oligonucleotide
gcattgggagtgtatgacacagttatcgtgctgccacgccacgccatgcctggtaagacc

SEQ ID NO: 99221 - DNA, 60 bp, Artificial
  Synthetic oligonucleotide
tgttcgggaatgttcagtatctggcccaccattgcaggaaaaacgcaccgctctatgcag

SEQ ID NO: 99222 - DNA, 60 bp, Artificial
  Synthetic oligonucleotide
ccgccctacagaatgaccccggcaaggcacttgagagcgccatccaaaagcaggttgcaa

SEQ ID NO: 99223 - DNA, 60 bp, Artificial
  Synthetic oligonucleotide
ggcaggaagctggccgaatacgaaggctcagatgtgtactcactcccaccagacccagat

SEQ ID NO: 99224 - DNA, 60 bp, Artificial
  Synthetic oligonucleotide
tggccttccaaactctcgaaccatgatgctacgtccgtggacaagccgactgagccggga

SEQ ID NO: 99225 - DNA, 60 bp, Artificial
  Synthetic oligonucleotide
atggtacggaaggccttgaagcactagacttgggaaccagtgcgggctacccctacgtag

SEQ ID NO: 99226 - DNA, 60 bp, Artificial
  Synthetic oligonucleotide
caatgcacccacccagactaagctagaacccagcgttttcttcgacgtcttcccgggtgt

SEQ ID NO: 99227 - DNA, 60 bp, Artificial
  Synthetic oligonucleotide
ggttgtcagcatgggaaagattgttggcattcacgtaggaggcaatggagcacaagggtt

SEQ ID NO: 99228 - DNA, 60 bp, Artificial
  Synthetic oligonucleotide
ccgttcccgtcgggcgggccttgcatctaccttcatttaaggccctcgaaaggaagtggt

SEQ ID NO: 99229 - DNA, 60 bp, Artificial
  Synthetic oligonucleotide
ttcaggccgccgagaccggggcaacctcaaccgcgcaagatgagagcatgatcgagactc

SEQ ID NO: 99230 - DNA, 60 bp, Artificial
  Synthetic oligonucleotide
gcaaccagcagatcaagactcgtttcagtggcagtcagggtgcaacccctcagcgatcgc

SEQ ID NO: 99231 - DNA, 60 bp, Artificial
  Synthetic oligonucleotide
ggaaccgactactttgggtgtccgtgtttccttttattcctatattggctgcttatggtg

SEQ ID NO: 99232 - DNA, 60 bp, Artificial
  Synthetic oligonucleotide
gcggatccacatctggtaacagatgcctctggggccaaaagccaaggtttaacaaaccct

SEQ ID NO: 99233 - DNA, 50 bp, Artificial
  Synthetic oligonucleotide
ttttagtaaccctacctcagtcgaattggattgggtcatactgttgtagg

SEQ ID NO: 99234 - DNA, 50 bp, Artificial
  Synthetic oligonucleotide
ttttagtaaccctacctcagtcgaattggattgggtcatgctgttgtagg

SEQ ID NO: 99235 - DNA, 56 bp, Artificial
  Synthetic oligonucleotide
tcactttacctgcgttgggtgaacgccgtgtgcggtgacgcataatccctcagaga

SEQ ID NO: 99236 - DNA, 60 bp, Artificial
  Synthetic oligonucleotide
taccgcgcaagtctgtggcggaaccgactactttgggtgtccgtgtttcctgttattttt

SEQ ID NO: 99237 - DNA, 60 bp, Artificial
  Synthetic oligonucleotide
tagtcctccggcccctgaatgcggctaatcctaactgcggagcacataccctcaacccag

SEQ ID NO: 99238 - DNA, 50 bp, Artificial
  Synthetic oligonucleotide
ccccactggtaacagtgttctagcctgcgtggctgcctgcgtgcctctgg

SEQ ID NO: 99239 - DNA, 60 bp, Artificial
  Synthetic oligonucleotide
cgggattcccggagtccctcttgggagtccatggtgaggggacttgatacctcaccgccg

SEQ ID NO: 99240 - DNA, 60 bp, Artificial
  Synthetic oligonucleotide
cgggaatttccggagtccctcttggaagtccatggtgaggggacttgatacctcaccgcc

SEQ ID NO: 99241 - DNA, 60 bp, Artificial
  Synthetic oligonucleotide
cggagttttccggagtccctcttggaagtccatggtgaggggacttgatacctcaccgcc

SEQ ID NO: 99242 - DNA, 55 bp, Artificial
  Synthetic oligonucleotide
ttttccggagcccctcttgggagtccatggtgaggggacttgatacctcaccgcc

SEQ ID NO: 99243 - DNA, 60 bp, Artificial
  Synthetic oligonucleotide
tccgggttttccggagcccctcttgggagtccatggtgaggggacttgatacctcaccgc

SEQ ID NO: 99244 - DNA, 60 bp, Artificial
  Synthetic oligonucleotide
ctggggttgttcccaccccagaggcccacgtggcggctagtacactggtattacggtacc

SEQ ID NO: 99245 - DNA, 60 bp, Artificial
  Synthetic oligonucleotide
cagtgggcagtctgtcgtaatgggcaactctgcagcggaaccgactactttgggtgtccg

SEQ ID NO: 99246 - DNA, 60 bp, Artificial
  Synthetic oligonucleotide
cttctgatttagtcatataccgaacaaacacaaaaggtgatgactatatcccaacttgtg

SEQ ID NO: 99247 - DNA, 60 bp, Artificial
  Synthetic oligonucleotide
aagggtaagccatttgattctagatttgtgttatgtagtaccaatcataatctattagca

SEQ ID NO: 99248 - DNA, 60 bp, Artificial
  Synthetic oligonucleotide
agacctctctgtgcttagggcaaacatcatttggccttaaatgggattctgtgagagggg

SEQ ID NO: 99249 - DNA, 54 bp, Artificial
  Synthetic oligonucleotide
gacagggtattttccagactgttgggagtggtcttgaccacatcctgtctttgg

SEQ ID NO: 99250 - DNA, 60 bp, Artificial
  Synthetic oligonucleotide
gacaggctaaggatgcccttcaggtaccccgaggtaacacgcgacactcgggatctgaga

SEQ ID NO: 99251 - DNA, 60 bp, Artificial
  Synthetic oligonucleotide
cacacagccatcctctagtaagtttgtgagacgtctggtgacgtgtgggaacttattgga

SEQ ID NO: 99252 - DNA, 60 bp, Artificial
  Synthetic oligonucleotide
aacaacattttgctgcaaagcatcctactgccagcggaacaacacctggtaacaggtgcc

SEQ ID NO: 99253 - DNA, 51 bp, Artificial
  Synthetic oligonucleotide
tagattcggatgacattttcaaaacagctctaacagggaaagccaagttca

SEQ ID NO: 99254 - DNA, 60 bp, Artificial
  Synthetic oligonucleotide
gcctctggggccaaaagccaaggtttaacaaaccctttaggattggttctaaacctgaga

SEQ ID NO: 99255 - DNA, 60 bp, Artificial
  Synthetic oligonucleotide
aggtgttcccaattgagaacccatctgtgacacaagttacgttgggtggtaaacctatgg

SEQ ID NO: 99256 - DNA, 60 bp, Artificial
  Synthetic oligonucleotide
cccatccgtgacacaagttacgttgggtggtaaacctatggatttggctatactcaagtg

SEQ ID NO: 99257 - DNA, 60 bp, Artificial
  Synthetic oligonucleotide
cacctcaagatgccactgctattgacaaaccatcgcgcccagacacctcttccaacagat

SEQ ID NO: 99258 - DNA, 60 bp, Artificial
  Synthetic oligonucleotide
gggcagtctgtcgtaacgggcaactctgcagcggaaccgactactttgggtgtccgtgtt

SEQ ID NO: 99259 - DNA, 60 bp, Artificial
  Synthetic oligonucleotide
tacgggtgtgaagccaaatattggacaaggtgtgaagagccccgtgtgctcgtcttgagt

SEQ ID NO: 99260 - DNA, 54 bp, Artificial
  Synthetic oligonucleotide
gaagccaaatattggacaaggtgtgaagagccccgtgtgctcatcctgagtcct

SEQ ID NO: 99261 - DNA, 60 bp, Artificial
  Synthetic oligonucleotide
cccgacggtagacctggcagatgaggctagaaataccccactggcgacagtgttctagcc

SEQ ID NO: 99262 - DNA, 60 bp, Artificial
  Synthetic oligonucleotide
tcctctcctttgcacgccgtgggaccatacaggagaagttgatctccgtggcaggactcg

SEQ ID NO: 99263 - DNA, 60 bp, Artificial
  Synthetic oligonucleotide
gtcgctccactataaacccaatagtagacctggcagatgaggctagaaattccccactgg

SEQ ID NO: 99264 - DNA, 60 bp, Artificial
  Synthetic oligonucleotide
agtgggcagcttgtcgtaacgggtaactctgcagcggaaccgactactttgggtgtccgt

SEQ ID NO: 99265 - DNA, 60 bp, Artificial
  Synthetic oligonucleotide
cacaagatgtggcaaatgctgtggttggatacggggtgtggcctcattatctaacatctc

SEQ ID NO: 99266 - DNA, 60 bp, Artificial
  Synthetic oligonucleotide
gaaacacctgccaatcttacacactagcacaagtgtacaatcgtatccttgatgaggaca

SEQ ID NO: 99267 - DNA, 60 bp, Artificial
  Synthetic oligonucleotide
caaatacaaggggaataatgattgtgtgatgaacgaccacattaaagttgctgtttctca

SEQ ID NO: 99268 - DNA, 60 bp, Artificial
  Synthetic oligonucleotide
tgttgcgcaagggcctgaggaggaatttggaagatcattaatcaagcacaactcatgtgt

SEQ ID NO: 99269 - DNA, 60 bp, Artificial
  Synthetic oligonucleotide
ccatagacacaaaattgaagtcacaactagggtgtatcataaagcaaagcatgtgaaggt

SEQ ID NO: 99270 - DNA, 60 bp, Artificial
  Synthetic oligonucleotide
gttcacatacactagatttgattcagagatcacattggtgccttgtatagctgcaaaagg

SEQ ID NO: 99271 - DNA, 60 bp, Artificial
  Synthetic oligonucleotide
gcaaaagaaaaggtgtgaaccagtagcagttgtcatacatggtgagcccggaactggaaa

SEQ ID NO: 99272 - DNA, 60 bp, Artificial
  Synthetic oligonucleotide
gcatcatgggcgcccaggtatccagacagaacgttggcacacactccacacagaactcgg

SEQ ID NO: 99273 - DNA, 60 bp, Artificial
  Synthetic oligonucleotide
ccccttcccttttgtaacttagaagatgaactcaccgaccaataggtggcatttatccag

SEQ ID NO: 99274 - DNA, 60 bp, Artificial
  Synthetic oligonucleotide
ggtgagggaccttgtgagccaggtgactgtggtggcaaattactatgcaaacatggggtt

SEQ ID NO: 99275 - DNA, 60 bp, Artificial
  Synthetic oligonucleotide
attatgatggtagtatacacccaatttggtttgatgcacttaagattgttttggcaaacc

SEQ ID NO: 99276 - DNA, 60 bp, Artificial
  Synthetic oligonucleotide
caccacctggcataagcaaacccactagtaggaaagaagcaatgttgggtactcatgtgg

SEQ ID NO: 99277 - DNA, 60 bp, Artificial
  Synthetic oligonucleotide
gtgcctatcactatatccataagccctatgtgtgctgaattctctggtgcccgtgcacgc

SEQ ID NO: 99278 - DNA, 60 bp, Artificial
  Synthetic oligonucleotide
gtggcataatggtagagatgtgtacacccaatttgagaagaggatacgcagcgtcagcgc

SEQ ID NO: 99279 - DNA, 60 bp, Artificial
  Synthetic oligonucleotide
gcaatgtgacagctggttataagctcacacaccctggtgagcgcggtagagatgtcagtc

SEQ ID NO: 99280 - DNA, 60 bp, Artificial
  Synthetic oligonucleotide
ggaaccgactactttgggtgtccgtgtttccttttattcttgcattggctgcttatggtg

SEQ ID NO: 99281 - DNA, 60 bp, Artificial
  Synthetic oligonucleotide
tttcagggtctctttgagattccaagctacagatcactttacctgcgttgggtgaacgcc

SEQ ID NO: 99282 - DNA, 60 bp, Artificial
  Synthetic oligonucleotide
tcacaaagaatcagattcatggcttaagaagttcactgaaatgtgcaatgcagctagagg

SEQ ID NO: 99283 - DNA, 60 bp, Artificial
  Synthetic oligonucleotide
gcccttttaaggacatggtgtgaagactcgcatgtgcttggttgtgagtcctccggcccc

SEQ ID NO: 99284 - DNA, 60 bp, Artificial
  Synthetic oligonucleotide
ggtgtgaagagcctattgagctacctgagagtcctccggcccctgaatgcggctaatcct

SEQ ID NO: 99285 - DNA, 60 bp, Artificial
  Synthetic oligonucleotide
caaggcctcttcgagattccaagctacagatcactttacctgcgttgggtgaacgccgtg

SEQ ID NO: 99286 - DNA, 60 bp, Artificial
  Synthetic oligonucleotide
gctacgtcgtaacgcgtaagttggaggcggaacagactactttcggaaccccgtgtttcc

SEQ ID NO: 99287 - DNA, 60 bp, Artificial
  Synthetic oligonucleotide
aagccatcctctcctttgcacgccgtgggaccatacaggagaagttgatctctgtggcag

SEQ ID NO: 99288 - DNA, 60 bp, Artificial
  Synthetic oligonucleotide
ccagactgttgggagtggccttgaccacatcctgtctctggcagacattgaggaagagca

SEQ ID NO: 99289 - DNA, 60 bp, Artificial
  Synthetic oligonucleotide
attttccagactgttgggagtggccttgaccacatcctgtctttggcagatgtggaggag

SEQ ID NO: 99290 - DNA, 60 bp, Artificial
  Synthetic oligonucleotide
ccaggcaaggtatcttccagactgttgggagtggccttgaccacatcctgtctttggcag

SEQ ID NO: 99291 - DNA, 60 bp, Artificial
  Synthetic oligonucleotide
gcggattcacacctggtaacaggtgcccctggggccaaaagccaaggtttaacagaccct

SEQ ID NO: 99292 - DNA, 60 bp, Artificial
  Synthetic oligonucleotide
ggggacgcagatgtttgggacgtcaccttgcagtattaacttggctctcatgaagctctt

SEQ ID NO: 99293 - DNA, 60 bp, Artificial
  Synthetic oligonucleotide
ggggacgcagatgtttgggacgtcaccttgcagtgttaacttggctctcatgaagctctt

SEQ ID NO: 99294 - DNA, 60 bp, Artificial
  Synthetic oligonucleotide
atgtgtgtcccattagctagacgctttgcccagtcaatctattcacaacaacctgtggcc

SEQ ID NO: 99295 - DNA, 60 bp, Artificial
  Synthetic oligonucleotide
cacttgtgactatgtgtgtcccattagctagacgctttgcccagtcaatttattcacaac

SEQ ID NO: 99296 - DNA, 60 bp, Artificial
  Synthetic oligonucleotide
acatggactcagagaacatccttgagtcagcattaaatggtgaagtcacaatcaagcagg

SEQ ID NO: 99297 - DNA, 60 bp, Artificial
  Synthetic oligonucleotide
gacatttggtgatataaagacctcacacaatttccactttccgtgaggaccctaagccaa

SEQ ID NO: 99298 - DNA, 60 bp, Artificial
  Synthetic oligonucleotide
gcccctatggagatagaatttctgaagagaactcctgccttcctcccagggacccgcaaa

SEQ ID NO: 99299 - DNA, 60 bp, Artificial
  Synthetic oligonucleotide
acccaggagtacacgtaaaacacccactggctttggagctgtgccacatgacacctccca

SEQ ID NO: 99300 - DNA, 60 bp, Artificial
  Synthetic oligonucleotide
tagagcatatacagcttgcatgatgatctgaactgttggtccgcaggtaccataaacctg

SEQ ID NO: 99301 - DNA, 60 bp, Artificial
  Synthetic oligonucleotide
atctccactttccgtgaggaccctaagccaaatgacttctttttactttactattcccta

SEQ ID NO: 99302 - DNA, 60 bp, Artificial
  Synthetic oligonucleotide
gtgccacatgacacctcccagcttgacagtgctgtcagaaactgttatataggaataggc

SEQ ID NO: 99303 - DNA, 60 bp, Artificial
  Synthetic oligonucleotide
gggacagatgttgtggggggcttgggaaaacccccttaacctacactgcctgatagggtc

SEQ ID NO: 99304 - DNA, 60 bp, Artificial
  Synthetic oligonucleotide
cactacagaccaatcatttccaggtaaagatgcaatacacacagtcctcaccaaaatttc

SEQ ID NO: 99305 - DNA, 60 bp, Artificial
  Synthetic oligonucleotide
gacaaatttcagtactggagagggtcattggaggttaaattcatgacatttggcagccaa

SEQ ID NO: 99306 - DNA, 60 bp, Artificial
  Synthetic oligonucleotide
gcgttgtcacacttggcttctggatacgtgggattaattgcattctgtacagaggaaggc

SEQ ID NO: 99307 - DNA, 60 bp, Artificial
  Synthetic oligonucleotide
cgggtatttgatgtggcatgttgtcaatcgactcactgtgaattcatcggccccatccaa

SEQ ID NO: 99308 - DNA, 60 bp, Artificial
  Synthetic oligonucleotide
ggtgtgcagtgtggctctacagttttccacatggactcagagaacatccttgagtcagca

SEQ ID NO: 99309 - DNA, 60 bp, Artificial
  Synthetic oligonucleotide
ggcacatgcacattgttgcgattgctccagactagttcctgagggacagatgttgcgggg

SEQ ID NO: 99310 - DNA, 60 bp, Artificial
  Synthetic oligonucleotide
ttctgtacagaggaaggctagtctatgccttgggctcatggtcttcgttgtgaaacggat

SEQ ID NO: 99311 - DNA, 60 bp, Artificial
  Synthetic oligonucleotide
ttttttatgacaatgaaaatcactacagaccaatcatttccaggtaaagatgcaatacac

SEQ ID NO: 99312 - DNA, 60 bp, Artificial
  Synthetic oligonucleotide
gtgagcataacactcgtccaaaacatcagcgtttggttgaaatggtctctggcacattga

SEQ ID NO: 99313 - DNA, 60 bp, Artificial
  Synthetic oligonucleotide
cccttacgggtacttgatgtggcatgttgtcaatcgactcactgtgaattcatcagcccc

SEQ ID NO: 99314 - DNA, 60 bp, Artificial
  Synthetic oligonucleotide
cgtccaaaacatcagcgtttggttgaaatggtctctggcacattgaaccaactccaaggt

SEQ ID NO: 99315 - DNA, 60 bp, Artificial
  Synthetic oligonucleotide
ggtctctggcacattgaaccaactccaaggtatttcaagtgctcgtgaattggcagccag

SEQ ID NO: 99316 - DNA, 60 bp, Artificial
  Synthetic oligonucleotide
ctccaccaagtcaattttgagcctgaactggagtggacacaccgtcctgaacctcttggt

SEQ ID NO: 99317 - DNA, 60 bp, Artificial
  Synthetic oligonucleotide
tggagcgaaatcgggcttggattcttggtataggaacccttggaaccattatgtcacttg

SEQ ID NO: 99318 - DNA, 60 bp, Artificial
  Synthetic oligonucleotide
agttgttagtatttagtataagacatttggtgatataaagacctcacacaatctccactt

SEQ ID NO: 99319 - DNA, 60 bp, Artificial
  Synthetic oligonucleotide
ggtgcaagggaccagaagcattcaaacagcaacttgactctttcttgttggaagcagctc

SEQ ID NO: 99320 - DNA, 60 bp, Artificial
  Synthetic oligonucleotide
ggaagatacagtggtgcaagggaccagaagcattcaaacagcaacttgactctttcttgc

SEQ ID NO: 99321 - DNA, 60 bp, Artificial
  Synthetic oligonucleotide
tgaggtgacatctaagcttaaggcccggtgccccgttcttgacattcaaccttggggtgt

SEQ ID NO: 99322 - DNA, 60 bp, Artificial
  Synthetic oligonucleotide
gcttaaggcccggtgccccgttcttgacattcaaccttggggtgtcgcgaaactcagagc

SEQ ID NO: 99323 - DNA, 60 bp, Artificial
  Synthetic oligonucleotide
gacatctaagcttaaggcccggtgccccgttcttgacattcaaccttggggtgtcgcgaa

SEQ ID NO: 99324 - DNA, 60 bp, Artificial
  Synthetic oligonucleotide
gggtgtcgcaaaacttagagcatatacagcttgcatgatgatctgaactgttggtccgca

SEQ ID NO: 99325 - DNA, 60 bp, Artificial
  Synthetic oligonucleotide
ggcccggtgccccgttcttgacattcaaccttggggtgtcgcgaaactcagagcatacac

SEQ ID NO: 99326 - DNA, 60 bp, Artificial
  Synthetic oligonucleotide
ggagaaagcggccacccttcctgagtttgtctctcatttgccaagacttgtctataagga

SEQ ID NO: 99327 - DNA, 60 bp, Artificial
  Synthetic oligonucleotide
atccatgcaaatgttgagagaaggagtctaatgaacctgccctatgccatcttggatctc

SEQ ID NO: 99328 - DNA, 60 bp, Artificial
  Synthetic oligonucleotide
catgttgtcaatcgactcactgtgaattcatcagccccatccaatattgactgcacagtg

SEQ ID NO: 99329 - DNA, 60 bp, Artificial
  Synthetic oligonucleotide
cccaatacaaggtgaatctcacactcttgttaaacacctgtttgggaggcaatggttagt

SEQ ID NO: 99330 - DNA, 60 bp, Artificial
  Synthetic oligonucleotide
ggtcgcggctggtcgagtcccacacactataaaaccagtagactttcatgcaatggatac

SEQ ID NO: 99331 - DNA, 60 bp, Artificial
  Synthetic oligonucleotide
gttagtttggatgccctacccctattgtcgggtcttatctggtactaatcagatccatgc

SEQ ID NO: 99332 - DNA, 60 bp, Artificial
  Synthetic oligonucleotide
gcgattgctccagactagttcctgagggacagatgttgtggggggctcgggaaaaccccc

SEQ ID NO: 99333 - DNA, 60 bp, Artificial
  Synthetic oligonucleotide
cagggctaagttgttggagaaagcagccacccttcctgagtttgtctctcatttgccaag

SEQ ID NO: 99334 - DNA, 60 bp, Artificial
  Synthetic oligonucleotide
gagttggattctttagtgagagcctgtggggggcgtatagctaaatttcaccggcacaaa

SEQ ID NO: 99335 - DNA, 60 bp, Artificial
  Synthetic oligonucleotide
actcaccgtgaattcatcagccccatccaatattgactgcacagtgttgctccgcgtggg

SEQ ID NO: 99336 - DNA, 53 bp, Artificial
  Synthetic oligonucleotide
ttacagtgggatacaagcacacacatccaggagagtcaggtagaataatagca

SEQ ID NO: 99337 - DNA, 60 bp, Artificial
  Synthetic oligonucleotide
gcaatgcaatgctagtaagttccatcaaggcacactaatggttgttgcaattcctgaaca

SEQ ID NO: 99338 - DNA, 60 bp, Artificial
  Synthetic oligonucleotide
ggttggtggtggaaattgccagatgctctcaaggacatgggaatatttggagagaatatg

SEQ ID NO: 99339 - DNA, 60 bp, Artificial
  Synthetic oligonucleotide
gccaataacaatttcaatcagtccaatgtctgcagagtttagtggagctaggaatgcaac

SEQ ID NO: 99340 - DNA, 60 bp, Artificial
  Synthetic oligonucleotide
ggactcaatgttaagacacaacaactggtcactgttgataatccctgtttgcccattaca

SEQ ID NO: 99341 - DNA, 60 bp, Artificial
  Synthetic oligonucleotide
gatggcacactaatgggcaacttaccaatattcccacaccagtttattaacctccggacc

SEQ ID NO: 99342 - DNA, 60 bp, Artificial
  Synthetic oligonucleotide
tgtcaagttgataccttaatacctgtgaacaatgtacaagcttccaaaaacaacataagt

SEQ ID NO: 99343 - DNA, 60 bp, Artificial
  Synthetic oligonucleotide
cggtatgcttgcacgccagttttactcccctcccctcattgtaacttagaagcaaagcac

SEQ ID NO: 99344 - DNA, 60 bp, Artificial
  Synthetic oligonucleotide
agcaccaaccactctattctaaatcctccaactatcacttctactactgctatgaataga

SEQ ID NO: 99345 - DNA, 60 bp, Artificial
  Synthetic oligonucleotide
gtcaaatggtatcttcagttccctttataccaccaatggcagatttgccagacaaaggta

SEQ ID NO: 99346 - DNA, 60 bp, Artificial
  Synthetic oligonucleotide
cagcaggtggcagtggcaaggtagctttcatcgatctacgtgattttcatgtggctgatg

SEQ ID NO: 99347 - DNA, 60 bp, Artificial
  Synthetic oligonucleotide
ggctggagattgtggaggaaagctgctttgcaagcacggtgtaattggtattgttacagc

SEQ ID NO: 99348 - DNA, 60 bp, Artificial
  Synthetic oligonucleotide
atatatattccttgccaccagcccccaaatattttgatgtacgaccacaaacaggtgtca

SEQ ID NO: 99349 - DNA, 60 bp, Artificial
  Synthetic oligonucleotide
accggaacacctaaatgatagtgtgctcatttgttacagctcggacttagtcatctaccg

SEQ ID NO: 99350 - DNA, 60 bp, Artificial
  Synthetic oligonucleotide
gccatgggtgtcagcaagtcactttcgctttacaactccagacacttactcaaaagctgg

SEQ ID NO: 99351 - DNA, 60 bp, Artificial
  Synthetic oligonucleotide
accataaagcaaaacatatcagtgcctggggccctagaccaccaagagctgtaccatacc

SEQ ID NO: 99352 - DNA, 60 bp, Artificial
  Synthetic oligonucleotide
gctattccagtagatgtagcttctcaacccttagctactaccatgcttggagagctttct

SEQ ID NO: 99353 - DNA, 60 bp, Artificial
  Synthetic oligonucleotide
gcaaatactaccttgaaacttttgattgcatacacacctcctggtgttcctaaaccagac

SEQ ID NO: 99354 - DNA, 60 bp, Artificial
  Synthetic oligonucleotide
accctatgaacaaaataacagggaaagtactcaaatggacaatccgcataatttcagctc

SEQ ID NO: 99355 - DNA, 60 bp, Artificial
  Synthetic oligonucleotide
ggggggcaatggccgagacggcttttcagcaatgctgctcagaagttatttcacaaattt

SEQ ID NO: 99356 - DNA, 60 bp, Artificial
  Synthetic oligonucleotide
gccatgccccctatacatgtgcccacaaaaacaaagttacagcccagtgtctttcatgat

SEQ ID NO: 99357 - DNA, 60 bp, Artificial
  Synthetic oligonucleotide
tcacaaatttccaaggtgtcatcactatgcaggatgatgttagaaatcttgccatgcccc

SEQ ID NO: 99358 - DNA, 60 bp, Artificial
  Synthetic oligonucleotide
tcccttaatgttagatggagattgccttatggcttttgactacagcaattatgatgggag

SEQ ID NO: 99359 - DNA, 60 bp, Artificial
  Synthetic oligonucleotide
gtttggaaacctcttctccagcttccatttgaacccaggaattgttacaggctcagctgt

SEQ ID NO: 99360 - DNA, 60 bp, Artificial
  Synthetic oligonucleotide
gtccaagtactatgaagttgatggtggaatgccatcaggctgtagtggtactagcatatt

SEQ ID NO: 99361 - DNA, 60 bp, Artificial
  Synthetic oligonucleotide
gatggacaaagaacccacgatgcatgcaggagcatgtcttatccttgtgttacttaatgt

SEQ ID NO: 99362 - DNA, 60 bp, Artificial
  Synthetic oligonucleotide
cactcacaggacacacccattacacaaaatccagtagagagatatgttgatgaggtgcta

SEQ ID NO: 99363 - DNA, 60 bp, Artificial
  Synthetic oligonucleotide
ctctgctgaagatgcaaatgcaatagacaaaccgactcgcccagacacgtcatctaaccg

SEQ ID NO: 99364 - DNA, 60 bp, Artificial
  Synthetic oligonucleotide
gtaaagatttctgcttgagaatggcccgtgatacagatttacactcacaggacacaccca

SEQ ID NO: 99365 - DNA, 60 bp, Artificial
  Synthetic oligonucleotide
gctcaggtatcaagacaaaatgttggtacacactcaactcagaattcagtttcaaatggg

SEQ ID NO: 99366 - DNA, 60 bp, Artificial
  Synthetic oligonucleotide
ccaactgttgaagcctgtggttattctgatcgcattatacagattaccagaggagactca

SEQ ID NO: 99367 - DNA, 60 bp, Artificial
  Synthetic oligonucleotide
gcaatagaaggaagcaatggtcacgtggtggtccaatacatgtatgtacctcctggtgcc

SEQ ID NO: 99368 - DNA, 60 bp, Artificial
  Synthetic oligonucleotide
gggtgtgaagccaaatttactgacagggtgtgaagagcctattgtgctcaccttgattcc

SEQ ID NO: 99369 - DNA, 60 bp, Artificial
  Synthetic oligonucleotide
cccgctgctattgcacacgaaccagtgtgtagatagtcgtaatgagcaatagtgggatgg

SEQ ID NO: 99370 - DNA, 56 bp, Artificial
  Synthetic oligonucleotide
aaattatgtccacaaagagtcagatggatggcttaagaaatttactgagatgtgca

SEQ ID NO: 99371 - DNA, 60 bp, Artificial
  Synthetic oligonucleotide
gcaaccaactattcttgaagttggggatgccgtttcctatggaaacattctgttgagtgg

SEQ ID NO: 99372 - DNA, 60 bp, Artificial
  Synthetic oligonucleotide
ccagggtaaactaaatcttgttgctgcactcaagccttgtgacaccggtaaagtaggaaa

SEQ ID NO: 99373 - DNA, 60 bp, Artificial
  Synthetic oligonucleotide
gttccagcccaatgtacaattgagagagaattaaactattgtaatttagtgttgtccatg

SEQ ID NO: 99374 - DNA, 60 bp, Artificial
  Synthetic oligonucleotide
atggaactgtagttaccaatgacatgggttcactgtgtgtcagaatagttacagaccagc

SEQ ID NO: 99375 - DNA, 60 bp, Artificial
  Synthetic oligonucleotide
gagagaagggttgtcattcaaggcccagtggaagagtttggaagatcattaattaaacat

SEQ ID NO: 99376 - DNA, 60 bp, Artificial
  Synthetic oligonucleotide
gacaacttgatggtcattccaacccatgctgatcctgagaaagttgtgcaaattgatggc

SEQ ID NO: 99377 - DNA, 60 bp, Artificial
  Synthetic oligonucleotide
ggaaacaaaatctcaaaattcattgactggttgaaagccatgctaccacaaacacagcta

SEQ ID NO: 99378 - DNA, 60 bp, Artificial
  Synthetic oligonucleotide
gatcccctgaccattgtagcaacacttgcaatgctaggatgtaatggttcaccctggcgc

SEQ ID NO: 99379 - DNA, 59 bp, Artificial
  Synthetic oligonucleotide
gtaccaagttgtgattgcactgactgtactttctactctaaacacaaagatagatactt

SEQ ID NO: 99380 - DNA, 60 bp, Artificial
  Synthetic oligonucleotide
caaacgcagcaccagcgttggacgctgcagaaactggtcataccagccaaacacaaccag

SEQ ID NO: 99381 - DNA, 60 bp, Artificial
  Synthetic oligonucleotide
ccagactagagatgagatgtcaattgaatctttccttggtcggtccggatgcatttcaat

SEQ ID NO: 99382 - DNA, 60 bp, Artificial
  Synthetic oligonucleotide
gaggcttttggccaaggcttcatgtcacaggtcaaggatcagatttctgaattaaaccct

SEQ ID NO: 99383 - DNA, 60 bp, Artificial
  Synthetic oligonucleotide
gacctggcagatgaggctagaagtcccccactggtaacagtgttctagcctgcgtggctg

SEQ ID NO: 99384 - DNA, 60 bp, Artificial
  Synthetic oligonucleotide
agctgacaaaagcgacaaaggttttgttcttggtcactccatcaccgatgtcactttcct

SEQ ID NO: 99385 - DNA, 60 bp, Artificial
  Synthetic oligonucleotide
cttagaagcatgaacttacagaccaaaaggtgatgatcacccagatcattaaaggtcaag

SEQ ID NO: 99386 - DNA, 60 bp, Artificial
  Synthetic oligonucleotide
gagttgtccccactcactctacccacgcggtgttgtacactgttattacggtaactttgt

SEQ ID NO: 99387 - DNA, 50 bp, Artificial
  Synthetic oligonucleotide
ccccttcactagtctggtcgatgaggctgagaaatccccacgggcgaccg

SEQ ID NO: 99388 - DNA, 60 bp, Artificial
  Synthetic oligonucleotide
tgttcttatggttacaatatatagagtatattgtaatcatgggtgcacaagtgtctacac

SEQ ID NO: 99389 - DNA, 60 bp, Artificial
  Synthetic oligonucleotide
aatatatagagtatattgtaatcatgggtgcacaagtgtctacacaaaagagtggttcgc

SEQ ID NO: 99390 - DNA, 60 bp, Artificial
  Synthetic oligonucleotide
cccagtagtagacctggcagatgaggctagaaataccccactggcgacagtgttctagcc

SEQ ID NO: 99391 - DNA, 60 bp, Artificial
  Synthetic oligonucleotide
ccccatagtagacctggcagatgaggctagaaataccccactggagacagtgttctagcc

SEQ ID NO: 99392 - DNA, 60 bp, Artificial
  Synthetic oligonucleotide
cagataacccgtggagattccaccataacatcccaagacattgcaaatgcagttgttggt

SEQ ID NO: 99393 - DNA, 57 bp, Artificial
  Synthetic oligonucleotide
tcaagtggtgcttccaggttagatttctcccaagatcctagtaaatttactgatcct

SEQ ID NO: 99394 - DNA, 60 bp, Artificial
  Synthetic oligonucleotide
cattgacatggtgtgaagacctgcatgtgcttggttgtgattcctccggcccctgaatgc

SEQ ID NO: 99395 - DNA, 60 bp, Artificial
  Synthetic oligonucleotide
aacagcctgtgggttgttcccaccccagaggcccacgtggcggctagtactctggtatta

SEQ ID NO: 99396 - DNA, 60 bp, Artificial
  Synthetic oligonucleotide
ctccactttcggtgtgtgaccctaagccattggacttctttactttactattcctcccca

SEQ ID NO: 99397 - DNA, 60 bp, Artificial
  Synthetic oligonucleotide
ctaatctccactttcggtgtgtgaccctaagccattggacttctttactttactattcct

SEQ ID NO: 99398 - DNA, 60 bp, Artificial
  Synthetic oligonucleotide
ttagtataagaccaatggtgatataaagaccacacctaatctccactttcagtgtgtgac

SEQ ID NO: 99399 - DNA, 60 bp, Artificial
  Synthetic oligonucleotide
ttagtataagaccaatggtgatataaagaccacacctaatctccactttcggtgtgtgac

SEQ ID NO: 99400 - DNA, 60 bp, Artificial
  Synthetic oligonucleotide
ggtgatataaagaccacacctaatctccactttcggtgtgtgaccctaagccattagact

SEQ ID NO: 99401 - DNA, 60 bp, Artificial
  Synthetic oligonucleotide
gtataagactaatggtgatataaagaccacacctaatctccactttcggtgtgtgaccct

SEQ ID NO: 99402 - DNA, 60 bp, Artificial
  Synthetic oligonucleotide
ctctagggtgtagtgttgtgggataccctagagtacacgtaaaacacccaccggtttggc

SEQ ID NO: 99403 - DNA, 60 bp, Artificial
  Synthetic oligonucleotide
gcgtagtgttgtgggataccctagagtacacgttaaacacccactggtttggtaggacac

SEQ ID NO: 99404 - DNA, 60 bp, Artificial
  Synthetic oligonucleotide
gcttttcacaaagaccaatagttggtaatcatccagattacttaaggtcaagcacttctg

SEQ ID NO: 99405 - DNA, 53 bp, Artificial
  Synthetic oligonucleotide
agtaatcatccagattacttaaggtcaagcacttctgtttccccggttgatgt

SEQ ID NO: 99406 - DNA, 60 bp, Artificial
  Synthetic oligonucleotide
cacaccctgtgggtgtgaagccaaataatggacaaggtgtgaagagccccgtgtgctcgc

SEQ ID NO: 99407 - DNA, 61 bp, Artificial
  Synthetic oligonucleotide
catgttaggtgaagcatttggaaatggatttgtagatagtgtaaaagaacatatacatgcc

SEQ ID NO: 99408 - DNA, 60 bp, Artificial
  Synthetic oligonucleotide
ggcttgtcgtaacgcgcaagtctgtggcggaaccgactactttgggtgtccgtgtttccg

SEQ ID NO: 99409 - DNA, 60 bp, Artificial
  Synthetic oligonucleotide
cagtaggacctagtgacatgtatgtgcatgttggaaacctaatctatagaaatctacatc

SEQ ID NO: 99410 - DNA, 60 bp, Artificial
  Synthetic oligonucleotide
ggacctagtgacatgtatgtgcatgttggaaacctaatatacagaaatctacacttgttc

SEQ ID NO: 99411 - DNA, 51 bp, Artificial
  Synthetic oligonucleotide
gcgacagtgttctagcctgcgtggctgcctgcacaccctcacgggtgtgaa

SEQ ID NO: 99412 - DNA, 60 bp, Artificial
  Synthetic oligonucleotide
gcggaaccgactactttgggtgtccgtgtttccttttattcttatattggctgcttatgg

SEQ ID NO: 99413 - DNA, 60 bp, Artificial
  Synthetic oligonucleotide
cggaaccgactactttgggtgtccgtgtttccttttattcttatattggctgcttatggt

SEQ ID NO: 99414 - DNA, 60 bp, Artificial
  Synthetic oligonucleotide
cggaaccgactactttgggtgtccgtgtttccttttattcttatactggctacttatggt

SEQ ID NO: 99415 - DNA, 60 bp, Artificial
  Synthetic oligonucleotide
ggcggaaccgactactttgggtgtccgtgtttccttttattttataatggctgcttatgg

SEQ ID NO: 99416 - DNA, 60 bp, Artificial
  Synthetic oligonucleotide
aggggtctcctagagagcttggccgtcgggccttataccccgatttgctgagcttctcta

SEQ ID NO: 99417 - DNA, 60 bp, Artificial
  Synthetic oligonucleotide
aggggtctcctagagagcttggccgtcgggccttacaccccgacttgctgagtttctcta

SEQ ID NO: 99418 - DNA, 60 bp, Artificial
  Synthetic oligonucleotide
cggagttttccgagcctctcttggaagtccatggtgaggggacttgatacctcaccgccg

SEQ ID NO: 99419 - DNA, 60 bp, Artificial
  Synthetic oligonucleotide
ggtactcaaccactggtgacaggctaaggatgcccttcaggtaccccgaggtaacatgtg

SEQ ID NO: 99420 - DNA, 60 bp, Artificial
  Synthetic oligonucleotide
accttctcagatgcaggagcatgtgctgtccttgtgtcacttaatgtggcataatgggca

SEQ ID NO: 99421 - DNA, 60 bp, Artificial
  Synthetic oligonucleotide
atactggacaaggtgcgaagagccccgtgtgctcatcttgagtcctccggcccctgaatg

SEQ ID NO: 99422 - DNA, 60 bp, Artificial
  Synthetic oligonucleotide
tcaaagacccttgaggctatcctctcctttgcacgccgtgggaccatacaggagaagttg

SEQ ID NO: 99423 - DNA, 60 bp, Artificial
  Synthetic oligonucleotide
taccatcatgcctccccgattatgtgatgttttctgccctgctgggtggagcaccctcgg

SEQ ID NO: 99424 - DNA, 60 bp, Artificial
  Synthetic oligonucleotide
catgcctccccgattatgtgatgttttctgccctgctgggtggagcaccctcgggttgag

SEQ ID NO: 99425 - DNA, 57 bp, Artificial
  Synthetic oligonucleotide
ctggggttgttcccaccccagaggcccacgtggcggctagtacactggtatcacggt

SEQ ID NO: 99426 - DNA, 57 bp, Artificial
  Synthetic oligonucleotide
ctggggttgttcccaccccagaggcccacgtggcggctagtactctggtattacggt

SEQ ID NO: 99427 - DNA, 53 bp, Artificial
  Synthetic oligonucleotide
ttttagtaaccctacctcagtcgaattggattgggttatactgttgtaggggt

SEQ ID NO: 99428 - DNA, 58 bp, Artificial
  Synthetic oligonucleotide
ggctagaagttccccactggcgacagtgttctagcctgcgtggctgcctgcacaccct

SEQ ID NO: 99429 - DNA, 54 bp, Artificial
  Synthetic oligonucleotide
ctagaaactccccactggcgacagtgttctagcctgcgtggctgcctgcacacc

SEQ ID NO: 99430 - DNA, 60 bp, Artificial
  Synthetic oligonucleotide
aaaccagtaatattaaggtcgtaatgagcaattccgggacgggaccgactactttgggtg

SEQ ID NO: 99431 - DNA, 60 bp, Artificial
  Synthetic oligonucleotide
tggcccgaaaccctatcggacactgacgccaccgcaattgacaaaccaactgaaccgggg

SEQ ID NO: 99432 - DNA, 60 bp, Artificial
  Synthetic oligonucleotide
acaaggcttttcacacgaacccgggcaccctaactggatgtgccgttggatgtaaccctg

SEQ ID NO: 99433 - DNA, 60 bp, Artificial
  Synthetic oligonucleotide
ccgctggaccaaggatgctaaatctacccaggatcatgttaggtccctgtgcttattggc

SEQ ID NO: 99434 - DNA, 60 bp, Artificial
  Synthetic oligonucleotide
tatcatgttagtcgccgctcaaccaaatttctctcttcgcatcatgaaagatcgcccaga

SEQ ID NO: 99435 - DNA, 60 bp, Artificial
  Synthetic oligonucleotide
ccttgtggcgttcgctgatttgcgcgatctgctctggattgaggatgacgcgatggagca

SEQ ID NO: 99436 - DNA, 60 bp, Artificial
  Synthetic oligonucleotide
tttcagtggcagtcatcttgcaatccctcagtcatttcgagcacagaactaccacccgcc

SEQ ID NO: 99437 - DNA, 60 bp, Artificial
  Synthetic oligonucleotide
ccacgaatcgacttgaacctgtttgctgcctgatccacggaacacccggtactggcaagt

SEQ ID NO: 99438 - DNA, 60 bp, Artificial
  Synthetic oligonucleotide
gctcggtgtgtacgacaccttcatggtccttccccgccacgccatggctcatggggaggt

SEQ ID NO: 99439 - DNA, 60 bp, Artificial
  Synthetic oligonucleotide
cccgagcacaagatccaggcacaacaaacaccggcgttcgataggaccaaccctggggaa

SEQ ID NO: 99440 - DNA, 60 bp, Artificial
  Synthetic oligonucleotide
ggctgctgaaaccggcgccacttcaaacgccagtgatgagagccttattgagacccgcaa

SEQ ID NO: 99441 - DNA, 60 bp, Artificial
  Synthetic oligonucleotide
cacttctgtttccccggtccgcaaggatcgttacccgcccgacccactacgagaagccta

SEQ ID NO: 99442 - DNA, 60 bp, Artificial
  Synthetic oligonucleotide
tgtgctggcctcaacgaatgccaaccacattcacccggtcactgttgcagatgggaaggc

SEQ ID NO: 99443 - DNA, 60 bp, Artificial
  Synthetic oligonucleotide
ccgggccaacatcaagactacaggggcattcggacaacagtctggtgctgtgtgtgtggg

SEQ ID NO: 99444 - DNA, 60 bp, Artificial
  Synthetic oligonucleotide
gcaaggacgcaggttaccccatcatcaatgctcccactaagaccaagttgcatcccagtg

SEQ ID NO: 99445 - DNA, 60 bp, Artificial
  Synthetic oligonucleotide
acagtcaccgcaaccctctcactcttaggctgctctggatcaccatggcgctggcttaag

SEQ ID NO: 99446 - DNA, 60 bp, Artificial
  Synthetic oligonucleotide
cccctcgtttgtggcaaggccctccaacttcgcagcaagaagggtgacggcatgaggtat

SEQ ID NO: 99447 - DNA, 60 bp, Artificial
  Synthetic oligonucleotide
acaacgttgagggccaaagcggcgttgcacggtaccgcattccccttagtgtgcaggatg

SEQ ID NO: 99448 - DNA, 60 bp, Artificial
  Synthetic oligonucleotide
tacacccctcactagtctggtcgatgaggctgagaattccccacgggcgaccgtgtctca

SEQ ID NO: 99449 - DNA, 60 bp, Artificial
  Synthetic oligonucleotide
gtaaacccctcactagtctggtcgatgaggctgagaattccccacgggcgaccgtgtctc

SEQ ID NO: 99450 - DNA, 60 bp, Artificial
  Synthetic oligonucleotide
gcctgtcgtaacgcgcaagtccgtggcggaaccgactactttgggtgtccgtgtttcctt

SEQ ID NO: 99451 - DNA, 60 bp, Artificial
  Synthetic oligonucleotide
ggatgcccagaaggtaccccattgtatgggatctgatctggggccgcggtgcacatgctt

SEQ ID NO: 99452 - DNA, 60 bp, Artificial
  Synthetic oligonucleotide
ccagaaggtaccccattgtatgggatctgatctggggcctcggtgcacgtgctctacacg

SEQ ID NO: 99453 - DNA, 60 bp, Artificial
  Synthetic oligonucleotide
ctgaaggatgcccagaaggtaccccattgtatgggatctgatctggggcctcggtgcaca

SEQ ID NO: 99454 - DNA, 60 bp, Artificial
  Synthetic oligonucleotide
ggatgcccagaaggtaccccattgtatgggatctgatctggggcctcggtgcacatgctt

SEQ ID NO: 99455 - DNA, 60 bp, Artificial
  Synthetic oligonucleotide
ggggtcgttgtgccatcatttgagagtgtggagtacagatggaggagtctgttctggtag

SEQ ID NO: 99456 - DNA, 60 bp, Artificial
  Synthetic oligonucleotide
ggattttgataaggtgagagcaagcctcgcaaagacaggatataagataactcccgctaa

SEQ ID NO: 99457 - DNA, 60 bp, Artificial
  Synthetic oligonucleotide
ggcaagcctggcaaagacaggatataagataactcccgcaaacaaaacctccacctttcc

SEQ ID NO: 99458 - DNA, 60 bp, Artificial
  Synthetic oligonucleotide
ggcagcggaaatccccacctggtaacaggtgcctctgcggccaaaagccacgtgtataag

SEQ ID NO: 99459 - DNA, 60 bp, Artificial
  Synthetic oligonucleotide
tgggagatccggattgccagtctactcgatatcgcaggctgggtccgtgactacccactc

SEQ ID NO: 99460 - DNA, 59 bp, Artificial
  Synthetic oligonucleotide
accccagtgccacgttgtgagttggatagttgtggaaagagtcaaatggctctcctcaa

SEQ ID NO: 99461 - DNA, 59 bp, Artificial
  Synthetic oligonucleotide
accccagtgccacgttgtgagttggatagttgtggaaagagtcaaatggctcacctcaa

SEQ ID NO: 99462 - DNA, 60 bp, Artificial
  Synthetic oligonucleotide
tgggagatccggattgccagtctgctcgatatcgcaggctgggtccgtgactacccactc

SEQ ID NO: 99463 - DNA, 60 bp, Artificial
  Synthetic oligonucleotide
ctgaaggatgcccagaaggtaccccattgtatgggatctgatctggggccgcggtgcaca

SEQ ID NO: 99464 - DNA, 60 bp, Artificial
  Synthetic oligonucleotide
ctgaaggatgcccagaaggtaccccattgtatgggatctgatctggggcctcggtgcacg

SEQ ID NO: 99465 - DNA, 59 bp, Artificial
  Synthetic oligonucleotide
taccgcgcaagtctgtggcggaaccgactactttgggtgtccgtgtttcctgttatttt

SEQ ID NO: 99466 - DNA, 60 bp, Artificial
  Synthetic oligonucleotide
ttgagctacataagagtcctccggcccctgaatgcggctaatcccaacctcggagcaggt

SEQ ID NO: 99467 - DNA, 60 bp, Artificial
  Synthetic oligonucleotide
gcagtgtgtcgtaacgggcgactctgcagcggaaccgactactttgggtgtccgtgtttc

SEQ ID NO: 99468 - DNA, 60 bp, Artificial
  Synthetic oligonucleotide
gtgagtggcttgtcgtaacgagcaattctgtggcggaaccgactactttgggtgtccgtg

SEQ ID NO: 99469 - DNA, 55 bp, Artificial
  Synthetic oligonucleotide
taatgagtaattgcgggatgggaccaactactttgggtgtccgtgtttctctttt

SEQ ID NO: 99470 - DNA, 60 bp, Artificial
  Synthetic oligonucleotide
acttaaggtcaagcacttctgtttccccggtcaaagttgatatgctccaccagggcaaaa

SEQ ID NO: 99471 - DNA, 60 bp, Artificial
  Synthetic oligonucleotide
aatacagcggatgggtatcccaccatccgacccactgggtgtagtactctggtattatgt

SEQ ID NO: 99472 - DNA, 60 bp, Artificial
  Synthetic oligonucleotide
aaaacagcggatgggtaccccaccatccgacccactgggtgtagtactctggtacttcgt

SEQ ID NO: 99473 - DNA, 60 bp, Artificial
  Synthetic oligonucleotide
aaaacagcggatgggtatcccaccatccgacccactgggtgtagtactctggtactctgt

SEQ ID NO: 99474 - DNA, 60 bp, Artificial
  Synthetic oligonucleotide
aaaacagcggatgggttccctaccatccgacccactgggtgtagtactctggtactctgt

SEQ ID NO: 99475 - DNA, 60 bp, Artificial
  Synthetic oligonucleotide
aaaacagcggatgggtatcccaccatccgacccactgggtgtagtactctggtattatgt

SEQ ID NO: 99476 - DNA, 60 bp, Artificial
  Synthetic oligonucleotide
ttaaaacagcggatgggtatcccaccatccgacccactgggtgtagtactctggtactct

SEQ ID NO: 99477 - DNA, 60 bp, Artificial
  Synthetic oligonucleotide
ttaatacagcggatgggtatcccaccatccgacccactgggtgtagtactctggtattat

SEQ ID NO: 99478 - DNA, 60 bp, Artificial
  Synthetic oligonucleotide
ttaaaacagcggatgggtatcccaccatccgacccactgggtgtagtactctggtattat

SEQ ID NO: 99479 - DNA, 60 bp, Artificial
  Synthetic oligonucleotide
ttaaaacagcggatgggtaccccaccatccgacccactgggtgtagtactctggtacttc

SEQ ID NO: 99480 - DNA, 60 bp, Artificial
  Synthetic oligonucleotide
agtcctccggcccctgaatgcggctaatcctaactgcggagcacatgcccacaaaccagt

SEQ ID NO: 99481 - DNA, 60 bp, Artificial
  Synthetic oligonucleotide
cccagctacagatcactttacctgcgttgggtgaacgccgtgtgcggtgacgcataaccc

SEQ ID NO: 99482 - DNA, 60 bp, Artificial
  Synthetic oligonucleotide
gctttcatgaaactccttgatcttccacaagaggtaggctacgggtgaaacctcttaagc

SEQ ID NO: 99483 - DNA, 60 bp, Artificial
  Synthetic oligonucleotide
gctctcatgaagctctttgatcttccacaagaggtaggctacgggtgaaacctcttaagc

SEQ ID NO: 99484 - DNA, 60 bp, Artificial
  Synthetic oligonucleotide
attgagctagttggtagtcctccggcccctgaatgcggctaatcctaactgcggagcgcg

SEQ ID NO: 99485 - DNA, 60 bp, Artificial
  Synthetic oligonucleotide
ggctttcatgaatctctttgatcttccacaaggggtaggctacgggtgaaacctcttagg

SEQ ID NO: 99486 - DNA, 60 bp, Artificial
  Synthetic oligonucleotide
gctttcatgaatctctttgatcttccacaaggggtaggctacgggtgaaacctcttaggc

SEQ ID NO: 99487 - DNA, 60 bp, Artificial
  Synthetic oligonucleotide
gtccatacagaatgcaattttgggtattcatgttgctggaggaaattcaattcttgtggc

SEQ ID NO: 99488 - DNA, 60 bp, Artificial
  Synthetic oligonucleotide
tagatgttccccactggcgacagtgttctagcctgcgtggctgcctgcgcactctctgag

SEQ ID NO: 99489 - DNA, 60 bp, Artificial
  Synthetic oligonucleotide
cggcgtgtcgtaatgggtaactctgcagcggaaccgactactttgggtgtccgtgtttcc

SEQ ID NO: 99490 - DNA, 60 bp, Artificial
  Synthetic oligonucleotide
ttgagctagctggtagtcctccggcccctgaatgcggctaatcctaactgtggagcaggc

SEQ ID NO: 99491 - DNA, 60 bp, Artificial
  Synthetic oligonucleotide
gaggagcaacaattctgctacaattattgtgccatatgtaaatgcagtcccaatggattc

SEQ ID NO: 99492 - DNA, 60 bp, Artificial
  Synthetic oligonucleotide
ccatatgtaaatgcagtcccaatggattctatgcttagacataacaactggagcctagtt

SEQ ID NO: 99493 - DNA, 60 bp, Artificial
  Synthetic oligonucleotide
atgtaaatgcagtcccaatggattctatgctcagacataacaattggagtttagtgataa

SEQ ID NO: 99494 - DNA, 60 bp, Artificial
  Synthetic oligonucleotide
caaacctgtgatggcttcgaagaccctcgaggctatcctctcctttgcacgccgtgggac

SEQ ID NO: 99495 - DNA, 60 bp, Artificial
  Synthetic oligonucleotide
tccaaggtctctttgagattccaagctacagatcactttacctgcgttgggtgaacgccg

SEQ ID NO: 99496 - DNA, 60 bp, Artificial
  Synthetic oligonucleotide
tgaaatgctcatgaaacgtgtgtgtaggcgtagcggctacttgaatgccagcggaacccc

SEQ ID NO: 99497 - DNA, 60 bp, Artificial
  Synthetic oligonucleotide
gggagagggtggttgatgaattgaaagcaaggtttcgatctaagcttggcatacacaaac

SEQ ID NO: 99498 - DNA, 60 bp, Artificial
  Synthetic oligonucleotide
ctagccctttgaatggtgttgtgcccgtgaagatggagcctgcagttcttagccctcatg

SEQ ID NO: 99499 - DNA, 58 bp, Artificial
  Synthetic oligonucleotide
ggtgtcactctgcattaaagttgccccgtcaacaaagttttcatcccaagtgtttagg

SEQ ID NO: 99500 - DNA, 60 bp, Artificial
  Synthetic oligonucleotide
cgctgcccaaacttcttttttccccttcctgcaccccatgaggcttcttcaaggtcaatt

SEQ ID NO: 99501 - DNA, 60 bp, Artificial
  Synthetic oligonucleotide
ggcattttctctccatccattgagcagaaagcggtggcgtggttggatcgcaaccaagaa

SEQ ID NO: 99502 - DNA, 60 bp, Artificial
  Synthetic oligonucleotide
ccccacacattttttgctgcccacttgaaagatgagttgcgcaagaaggaaaagattgcg

SEQ ID NO: 99503 - DNA, 60 bp, Artificial
  Synthetic oligonucleotide
gctctgacatgattatccgcatgaaagacccaaaacaacagcggaaccccaagaccattg

SEQ ID NO: 99504 - DNA, 60 bp, Artificial
  Synthetic oligonucleotide
tggtttggaagattgcagagaacatgcagtttgcccagtctacagatgagcaggcagagg

SEQ ID NO: 99505 - DNA, 60 bp, Artificial
  Synthetic oligonucleotide
gacaattgttaggaggcctaggtatgacgggctgaaggatgccctggaggtacccgcagg

SEQ ID NO: 99506 - DNA, 60 bp, Artificial
  Synthetic oligonucleotide
ctaagcttaattcacccactagaactggacgaaaccgcttggaataagtttggttctctc

SEQ ID NO: 99507 - DNA, 60 bp, Artificial
  Synthetic oligonucleotide
agttaggcttctttgctatattgttctttattgtcatgcccctaatatgcttacaacaat

SEQ ID NO: 99508 - DNA, 60 bp, Artificial
  Synthetic oligonucleotide
caagagtgatttcaattgcatggttttgacagatccagctgctctagagaggcgtttccc

SEQ ID NO: 99509 - DNA, 60 bp, Artificial
  Synthetic oligonucleotide
gatgatgcaggacaaaatcgggaagagaaggatttggctctgctgtgccagtgcatctca

SEQ ID NO: 99510 - DNA, 60 bp, Artificial
  Synthetic oligonucleotide
ggtgtgtggatctccagtgagccaggtcagggaaaatctttctttactcacatgcttagc

SEQ ID NO: 99511 - DNA, 60 bp, Artificial
  Synthetic oligonucleotide
cctacaccaatttgcctcatgttctgatgaatgctgccaccacgtctcaggctgatttgt

SEQ ID NO: 99512 - DNA, 60 bp, Artificial
  Synthetic oligonucleotide
ccatcccatacacctggggaaactggatgagaccaactaggggatctgtcattggatggc

SEQ ID NO: 99513 - DNA, 60 bp, Artificial
  Synthetic oligonucleotide
gaacgctatccggcttggggtcaatcacgctattttgctgcagtccgatgtggctttcat

SEQ ID NO: 99514 - DNA, 60 bp, Artificial
  Synthetic oligonucleotide
ggttgcatcgattcagctaccacaggcattttggcccaatgaacgctatccggcttgggg

SEQ ID NO: 99515 - DNA, 60 bp, Artificial
  Synthetic oligonucleotide
accagaatctgaaaatgtggaggccgcacaaggagaggaagccgccactgccgttggcct

SEQ ID NO: 99516 - DNA, 60 bp, Artificial
  Synthetic oligonucleotide
actctgcataccctattattctgaggcaccattgcgctgtgttaaggggccacattcagc

SEQ ID NO: 99517 - DNA, 60 bp, Artificial
  Synthetic oligonucleotide
gaggaagatgatggtaaatggacacatgctatgactgcacccctggattattttactgag

SEQ ID NO: 99518 - DNA, 60 bp, Artificial
  Synthetic oligonucleotide
ttgaatcaatggcgagtgtgcatgcaggactatgaagtggctctgcatcgcatgctacgc

SEQ ID NO: 99519 - DNA, 60 bp, Artificial
  Synthetic oligonucleotide
gggatgcacattgctgggaacggacaggttgcgcgggccgcagcagttcacttcatttca

SEQ ID NO: 99520 - DNA, 57 bp, Artificial
  Synthetic oligonucleotide
gatccttctttctgcatctcttttatccctacttgccgttccatgggattattcctc

SEQ ID NO: 99521 - DNA, 60 bp, Artificial
  Synthetic oligonucleotide
ggcaccatatatgcaggatttggaacactgctttgcccaaacagcctacatttcatcccc

SEQ ID NO: 99522 - DNA, 60 bp, Artificial
  Synthetic oligonucleotide
cactcataaaacctattcctacaaagtggcatcaaagaaaggcatgtgcggtggactcct

SEQ ID NO: 99523 - DNA, 60 bp, Artificial
  Synthetic oligonucleotide
gagcaaccagaagctgtgatgattctccatgagccagttataaattcgcaacaccttgtg

SEQ ID NO: 99524 - DNA, 60 bp, Artificial
  Synthetic oligonucleotide
ggcttatgagcagagtttggacattgaggtgttgcctattgtttatggggatgatgtgat

SEQ ID NO: 99525 - DNA, 56 bp, Artificial
  Synthetic oligonucleotide
acatggtgcattgtgtcgcttcttctgtttctggacgggagagcttaacttgcata

SEQ ID NO: 99526 - DNA, 60 bp, Artificial
  Synthetic oligonucleotide
aaacacctgatgctcctgtgcgcttgtgctaccaaccagaggatcctttgagacaactta

SEQ ID NO: 99527 - DNA, 60 bp, Artificial
  Synthetic oligonucleotide
gattgggtaaaacaacacatgattagatggggcaactttgtgatgaggaataaaggctgg

SEQ ID NO: 99528 - DNA, 60 bp, Artificial
  Synthetic oligonucleotide
cccctggtgactcaattggccgcattctcgatccaatggaggagacactctgttcattgg

SEQ ID NO: 99529 - DNA, 60 bp, Artificial
  Synthetic oligonucleotide
cctgctgggagtgctctatggactatggcagaacctggaacaccgtggtgatgagagatc

SEQ ID NO: 99530 - DNA, 60 bp, Artificial
  Synthetic oligonucleotide
catggaagaaaaggaaatggactcagatcgtgttgcggcatccaccactactaacgctgg

SEQ ID NO: 99531 - DNA, 60 bp, Artificial
  Synthetic oligonucleotide
gccctagaccaccaggtgctaatactgtcatatttacacaaggcaaaagaactgccagga

SEQ ID NO: 99532 - DNA, 56 bp, Artificial
  Synthetic oligonucleotide
ggggagagaactgaacctggaggaactaatggctattttcaatggtctcatacgca

SEQ ID NO: 99533 - DNA, 60 bp, Artificial
  Synthetic oligonucleotide
gaaactcactgtgtatgcatcaacctttaacaagggtagattgagaatggccttcttccc

SEQ ID NO: 99534 - DNA, 60 bp, Artificial
  Synthetic oligonucleotide
taaaccccatagtagacctggcagatgaggctagaaataccccactggagacagtgttct

SEQ ID NO: 99535 - DNA, 60 bp, Artificial
  Synthetic oligonucleotide
ctgcagcggaaccgactactttgggtgtccgtgtttccttttattcttacattggctgct

SEQ ID NO: 99536 - DNA, 60 bp, Artificial
  Synthetic oligonucleotide
cacaccctatgggtgtgaagccatacaatggacaaggtgtgaagagccccgtgtgctcac

SEQ ID NO: 99537 - DNA, 60 bp, Artificial
  Synthetic oligonucleotide
ggtgtgaagactcgcgtgtgcttagctgtgagtcctccggcccctgaatgcggctaacct

SEQ ID NO: 99538 - DNA, 60 bp, Artificial
  Synthetic oligonucleotide
ggtgtgaagacctgcatgtgcttgattgtgagtcctccggcccctgaatgcggctaacct

SEQ ID NO: 99539 - DNA, 60 bp, Artificial
  Synthetic oligonucleotide
actagcctgtcgtaacgcgcaagtctgtggcggaaccgactactttgggtgtccgtgttt

SEQ ID NO: 99540 - DNA, 60 bp, Artificial
  Synthetic oligonucleotide
gataggctgtacccacggccgaagatgaacccgtccgttatccggctacctacttcggga

SEQ ID NO: 99541 - DNA, 60 bp, Artificial
  Synthetic oligonucleotide
agatgacagggtgtgaagagcctactgagctgggtagtagtcctccggcccctgaatgcg

SEQ ID NO: 99542 - DNA, 60 bp, Artificial
  Synthetic oligonucleotide
cagggtgtgaagagcctactgagctgggtagtagtctccggcccctgaatgcggctaatc

SEQ ID NO: 99543 - DNA, 60 bp, Artificial
  Synthetic oligonucleotide
ctccggcccctgaatgcggctaatcctaaccacggagcgtccaccagcaatccagctggc

SEQ ID NO: 99544 - DNA, 60 bp, Artificial
  Synthetic oligonucleotide
taggctgtacccacggccgaagatgaacccgtccgttatccggctacctacttcgggaag

SEQ ID NO: 99545 - DNA, 60 bp, Artificial
  Synthetic oligonucleotide
tcagcacgaccccggtgtagatcgggctgatgggtctccgcataccccacgggtgaccgt

SEQ ID NO: 99546 - DNA, 60 bp, Artificial
  Synthetic oligonucleotide
tcagcacgaccccggtgtagatcgggctgatgggtctccgcataccccacgggcgaccgg

SEQ ID NO: 99547 - DNA, 60 bp, Artificial
  Synthetic oligonucleotide
tcagcacgaccccggtgtagatcgggctgatgggtctccgcataccccacgggcgaccgt

SEQ ID NO: 99548 - DNA, 60 bp, Artificial
  Synthetic oligonucleotide
ctagttggtagtcctccggcccctgaatgcggctaatcctaactgcggagcacacacccc

SEQ ID NO: 99549 - DNA, 60 bp, Artificial
  Synthetic oligonucleotide
ccgccgttggcttgactcattttagtaaccctacctcagtcgaattggattgggtcatac

SEQ ID NO: 99550 - DNA, 60 bp, Artificial
  Synthetic oligonucleotide
cctgtttggagaaagagatgatagaatatagacttaaatcttatgattggtggagaatga

SEQ ID NO: 99551 - DNA, 61 bp, Artificial
  Synthetic oligonucleotide
cctgtttggagaaagagatgatagaatatagacttaaatcttatgattggtggagaatgag

SEQ ID NO: 99552 - DNA, 60 bp, Artificial
  Synthetic oligonucleotide
ttacaaccagtaatagttagtgcaagtacttctgtttccccggagcggagtatagatggc

SEQ ID NO: 99553 - DNA, 60 bp, Artificial
  Synthetic oligonucleotide
gcagcctgtcgtaacgggcaactctgcagcggaaccgactactttgggtgtccgtgtttc

SEQ ID NO: 99554 - DNA, 60 bp, Artificial
  Synthetic oligonucleotide
aaaacagctgtggggttgttcccaccccagaggcccacgtggcggctagtactccggtat

SEQ ID NO: 99555 - DNA, 60 bp, Artificial
  Synthetic oligonucleotide
ctggtcgtaatgagtaattgcgggatgggaccaactactttggatgtccgtgtttcttgt

SEQ ID NO: 99556 - DNA, 60 bp, Artificial
  Synthetic oligonucleotide
atctggtcgtaatgagtaattgcgggatgggaccaactactttggatgtccgtgtttctt

SEQ ID NO: 99557 - DNA, 60 bp, Artificial
  Synthetic oligonucleotide
cagccagtgcgcacaaaccagtgtgtagctggtcgtaatgagtaattgcgggatgggacc

SEQ ID NO: 99558 - DNA, 60 bp, Artificial
  Synthetic oligonucleotide
cagccaatgtacacaatccagtgtattattggtcgtaatgagtaattgcgggatgggacc

SEQ ID NO: 99559 - DNA, 60 bp, Artificial
  Synthetic oligonucleotide
gcatgtagctagtcgtaatgagcaattgcgggatgggaccaactactttgggtgtccgtg

SEQ ID NO: 99560 - DNA, 60 bp, Artificial
  Synthetic oligonucleotide
cactccagctgacaaaagcgacaaaggttttgttcttggtcactccatcaccgatgtcac

SEQ ID NO: 99561 - DNA, 60 bp, Artificial
  Synthetic oligonucleotide
acgtacgtgcttggtgtccacgcgccccgcgaatggccccttacaagtacattaggaacc

SEQ ID NO: 99562 - DNA, 60 bp, Artificial
  Synthetic oligonucleotide
tgcttggcagtcagcagctaacccatcagcaatctttagtgccaacactgttcctgctag

SEQ ID NO: 99563 - DNA, 60 bp, Artificial
  Synthetic oligonucleotide
ccggttcacttgagataactttcatgtttactgggtcattcatgacaacggggaagctgc

SEQ ID NO: 99564 - DNA, 60 bp, Artificial
  Synthetic oligonucleotide
caggttgggctctgttatgtaagactctttcagggacctccccaatttaagccgctcaag

SEQ ID NO: 99565 - DNA, 60 bp, Artificial
  Synthetic oligonucleotide
accatacacaggattgcccaatgctaaacccaagccaccagtacttagggaggtgagggc

SEQ ID NO: 99566 - DNA, 60 bp, Artificial
  Synthetic oligonucleotide
ggaacaacataaccacgactggggcctttggtcagcagagtggagccatttatgtgggca

SEQ ID NO: 99567 - DNA, 60 bp, Artificial
  Synthetic oligonucleotide
ttcctgatttcacaccaacccaagaaatccacattccaggagaggtcaagaatctacagg

SEQ ID NO: 99568 - DNA, 60 bp, Artificial
  Synthetic oligonucleotide
cgctgacggtatggtggagaggtgcctgcaaacctttgtgaaagtgatctcagcggttgt

SEQ ID NO: 99569 - DNA, 60 bp, Artificial
  Synthetic oligonucleotide
acgattggctcaaaaagtttacctcctatgtcaatgcctttaagggcctggactgggttg

SEQ ID NO: 99570 - DNA, 60 bp, Artificial
  Synthetic oligonucleotide
ctggaagcgcaggtcgcaactttggaacactcctgcccaaccactgaacaacaggagacc

SEQ ID NO: 99571 - DNA, 60 bp, Artificial
  Synthetic oligonucleotide
ctccataaccctagttgtcccttggatctgcggcggatattatagagacgtgaacagggc

SEQ ID NO: 99572 - DNA, 60 bp, Artificial
  Synthetic oligonucleotide
ggcacggaaggccttgaagctctggatttaacaacaagtgctggatacccttatgttacc

SEQ ID NO: 99573 - DNA, 60 bp, Artificial
  Synthetic oligonucleotide
agccatgaggtgttattttggcaatttgtacaaggctttccaccaaaacccaggcaccct

SEQ ID NO: 99574 - DNA, 60 bp, Artificial
  Synthetic oligonucleotide
gggagtcaaagaaccagctgctcttcatccaaaggaccccaggcttgaggttaacttgga

SEQ ID NO: 99575 - DNA, 60 bp, Artificial
  Synthetic oligonucleotide
tgcactgcaggcggcagaaacgggcgccagctctaatgctagtgatgagggcatgatgga

SEQ ID NO: 99576 - DNA, 60 bp, Artificial
  Synthetic oligonucleotide
gccagaggaaatgaaagaggcggtggatcattatgctaatcagcttttggcactagacat

SEQ ID NO: 99577 - DNA, 60 bp, Artificial
  Synthetic oligonucleotide
ggtgtgggtggtctatacacgtgcaatgtaatgccacgaagtttcatcagggcacattac

SEQ ID NO: 99578 - DNA, 60 bp, Artificial
  Synthetic oligonucleotide
ggtggctcaattgaccttaggaaacagcactatcactactcaagaggcagcgaacatcac

SEQ ID NO: 99579 - DNA, 60 bp, Artificial
  Synthetic oligonucleotide
cacattaaggacaagatgggtatgcaaatgagtaagaacaccgctgggtctcacaccact

SEQ ID NO: 99580 - DNA, 60 bp, Artificial
  Synthetic oligonucleotide
gcccatgaaagagatttacgaatctatcaggtggaccagagatgcacgcaacacacaaga

SEQ ID NO: 99581 - DNA, 60 bp, Artificial
  Synthetic oligonucleotide
tgagaattctaaaggatagacctgacattacacaaacagcagcattgcaagccccagttg

SEQ ID NO: 99582 - DNA, 60 bp, Artificial
  Synthetic oligonucleotide
caccgcttatgatgccagcttgtctccactcatgtttcaggctcttcagatggttttgga

SEQ ID NO: 99583 - DNA, 60 bp, Artificial
  Synthetic oligonucleotide
cagacacagcagctggtcccttttggtgatacctgttgtaccattggcctgcgctactgg

SEQ ID NO: 99584 - DNA, 60 bp, Artificial
  Synthetic oligonucleotide
gccaagattgagcttttcacctatatgagatttgacatcgagtttactcttgttgccacc

SEQ ID NO: 99585 - DNA, 60 bp, Artificial
  Synthetic oligonucleotide
cccgcaccaatggatcaacctgagaacaaacaactctgccacacttgtactaccatacgc

SEQ ID NO: 99586 - DNA, 60 bp, Artificial
  Synthetic oligonucleotide
gtacgaggagttttgccgcaagatcagatcagtaccagttggcagagctcttcacttacc

SEQ ID NO: 99587 - DNA, 60 bp, Artificial
  Synthetic oligonucleotide
cgattcctccagacagtgaccattttgacggataccagcagcaggccgtggtagttatgg

SEQ ID NO: 99588 - DNA, 60 bp, Artificial
  Synthetic oligonucleotide
gggaaaatgtagagtgggaagattacaacagagatattcttgtggctagaaccaccgccc

SEQ ID NO: 99589 - DNA, 60 bp, Artificial
  Synthetic oligonucleotide
ccagacccatatgctccttgccttcgggaatctcggaaccaggtgactgtggtggtatcc

SEQ ID NO: 99590 - DNA, 60 bp, Artificial
  Synthetic oligonucleotide
gaagggttggatcgtggaagtgccagtaacagcaacaaccctagaaaggaatgtcagcat

SEQ ID NO: 99591 - DNA, 60 bp, Artificial
  Synthetic oligonucleotide
cctctgatttgcggtgaggcgtaccaactcgttgaccgccgcaatgggatgcgttactcc

SEQ ID NO: 99592 - DNA, 60 bp, Artificial
  Synthetic oligonucleotide
cgggacagtgtggtggagtggttctttctacagggaaagtgctaggtatccacattgggg

SEQ ID NO: 99593 - DNA, 60 bp, Artificial
  Synthetic oligonucleotide
gagacatcagagctatgattccggagaacccgtgtggaactaatgaggcagttgtttgtg

SEQ ID NO: 99594 - DNA, 60 bp, Artificial
  Synthetic oligonucleotide
gatcatgttctcgtccttccaaaacactcacacccagcggagatagttgtggttgatgga

SEQ ID NO: 99595 - DNA, 60 bp, Artificial
  Synthetic oligonucleotide
ggagtccaacacccagttggattgcggtcaagcacttctgtttccccggacctagtagtg

SEQ ID NO: 99596 - DNA, 60 bp, Artificial
  Synthetic oligonucleotide
ggccatcctctcctttgcacgccgtgggaccatacaggaaaagttgatctctgtggcagg

SEQ ID NO: 99597 - DNA, 60 bp, Artificial
  Synthetic oligonucleotide
ggttgttcccaccccagaggcccacgtggcggctagtactccggtattgcggtacccttg

SEQ ID NO: 99598 - DNA, 60 bp, Artificial
  Synthetic oligonucleotide
gtatgtggctggtcgttccgctaaaccccatagtagacctggcagatgaggctagaaatt

SEQ ID NO: 99599 - DNA, 60 bp, Artificial
  Synthetic oligonucleotide
tactcaggagagcctaagcccaaaagtaaagctccagaaagaagggtagtcactcagggc

SEQ ID NO: 99600 - DNA, 60 bp, Artificial
  Synthetic oligonucleotide
cagttctgaccctcaaaccataattgctactcttaccctcctaggttgctcaggctcacc

SEQ ID NO: 99601 - DNA, 60 bp, Artificial
  Synthetic oligonucleotide
tggagagggaccctgtgaaccaggtgattgtggaggtaaactattatgtaaacatggggt

SEQ ID NO: 99602 - DNA, 60 bp, Artificial
  Synthetic oligonucleotide
cagagctgatgagcgccattcttttcttgtacatcctaccttccctgtggcagagatcca

SEQ ID NO: 99603 - DNA, 60 bp, Artificial
  Synthetic oligonucleotide
cagctatccacactagatataaatccccagcccctttcattagaggaaagtgtgtttggt

SEQ ID NO: 99604 - DNA, 60 bp, Artificial
  Synthetic oligonucleotide
caaacatccaacctagttcatctgtgtcaagtcattcagctcccgccttagacgctgcgg

SEQ ID NO: 99605 - DNA, 60 bp, Artificial
  Synthetic oligonucleotide
ttaaccctgcagccgctgcccataatccaatgggtttacggtcgcaacgcgcaagtgcgg

SEQ ID NO: 99606 - DNA, 60 bp, Artificial
  Synthetic oligonucleotide
tggagagccgttcttggacgtcctcttcatctggctggtggtggaaattacctgatgccc

SEQ ID NO: 99607 - DNA, 60 bp, Artificial
  Synthetic oligonucleotide
aagttttcgaccatgtgatgttaacactaaaataggtaatgccaagtgctgcccattcat

SEQ ID NO: 99608 - DNA, 60 bp, Artificial
  Synthetic oligonucleotide
ccactgcctcgctggtcgtgccatgggttagtgctagccactttagattcaccacacctg

SEQ ID NO: 99609 - DNA, 60 bp, Artificial
  Synthetic oligonucleotide
ggccgttccttaccaacacacacattccactaattatataccatacaaaggtgagatcac

SEQ ID NO: 99610 - DNA, 60 bp, Artificial
  Synthetic oligonucleotide
ttcccctggtactggaaaatctcttgccacttcagttctcgctcggatgctaactgttga

SEQ ID NO: 99611 - DNA, 60 bp, Artificial
  Synthetic oligonucleotide
cacacaatccccatcagcattcccttattttcacccaaccaaggaaatattcatacctgg

SEQ ID NO: 99612 - DNA, 60 bp, Artificial
  Synthetic oligonucleotide
gagaagtggtgccatcacgaaactccgaagacaacaaaagacctagtgatgatagttggc

SEQ ID NO: 99613 - DNA, 60 bp, Artificial
  Synthetic oligonucleotide
gctagttagtagtcctccggcccctgaatgcggctaatcctaactgcggagcacataccc

SEQ ID NO: 99614 - DNA, 55 bp, Artificial
  Synthetic oligonucleotide
taacgagcaattgcgggacgggaccaactactttgggtgtccgtgtttcactttt

SEQ ID NO: 99615 - DNA, 60 bp, Artificial
  Synthetic oligonucleotide
tcggtgcacatgctttacatgtgtttagtcgaggttaaaaaacgtctaggcccccctaac

SEQ ID NO: 99616 - DNA, 60 bp, Artificial
  Synthetic oligonucleotide
ccacactgcctgatagggtcgcggctggtcgagtcccatacactataataccagttgact

SEQ ID NO: 99617 - DNA, 60 bp, Artificial
  Synthetic oligonucleotide
gaaaacccccttaacctacactgcctgatagggtcgcggctggtcgagtcccacacacta

SEQ ID NO: 99618 - DNA, 56 bp, Artificial
  Synthetic oligonucleotide
taatgagcaattgcgggatgggaccaactactttgggtgtccgtgtttcctgtttt

SEQ ID NO: 99619 - DNA, 60 bp, Artificial
  Synthetic oligonucleotide
aaaacccctttgatccacactgcctgatagggtcgcggctggtcgagtcccatacactat

SEQ ID NO: 99620 - DNA, 60 bp, Artificial
  Synthetic oligonucleotide
accagtgggcagtctgtcgtaacgggcaactctgcagcggaaccgactactttgggtgtc

SEQ ID NO: 99621 - DNA, 60 bp, Artificial
  Synthetic oligonucleotide
gcctcaaagacccttgaggctatcctctcctttgcacgccgtgggaccatacaggagaag

SEQ ID NO: 99622 - DNA, 60 bp, Artificial
  Synthetic oligonucleotide
tgtgaagagcccactgagctacaagagagtcctccggcccctgaatgcggctaatcccaa

SEQ ID NO: 99623 - DNA, 50 bp, Artificial
  Synthetic oligonucleotide
tgtcgtaacgggcaactctgcagcggaaccgactactttgggtgtccgtg

SEQ ID NO: 99624 - DNA, 60 bp, Artificial
  Synthetic oligonucleotide
cactttacctgcgttgggtgaacgccgtgtgcggtgacgcataacccctcagatgtcaca

SEQ ID NO: 99625 - DNA, 54 bp, Artificial
  Synthetic oligonucleotide
tctagtgatcttgtcatttaccgcacaaatactacaggtgatgacatagtccca

SEQ ID NO: 99626 - DNA, 60 bp, Artificial
  Synthetic oligonucleotide
agccaaggggcagtgtgtcgtaacgggcaactctgcagcggaaccgactactttgggtgt

SEQ ID NO: 99627 - DNA, 60 bp, Artificial
  Synthetic oligonucleotide
gaggcatttggaaatggatttgtagatagtgtgaaggagcatgtgcatgccattaaccca

SEQ ID NO: 99628 - DNA, 60 bp, Artificial
  Synthetic oligonucleotide
ttgagctacatgagagtcctccggcccctgaatgcggctaatcctaaccatggagcaggc

SEQ ID NO: 99629 - DNA, 60 bp, Artificial
  Synthetic oligonucleotide
ggtgtggtcactggatcagcagtggggtgtgatcctgaagtgttttggtcaactatacca

SEQ ID NO: 99630 - DNA, 55 bp, Artificial
  Synthetic oligonucleotide
aggtattgtcactggatcagcagtggggtgtgatccagaggtgttttggtcaaaa

SEQ ID NO: 99631 - DNA, 60 bp, Artificial
  Synthetic oligonucleotide
caagaggtaggctacgggtgaaacctcttaagctagtacttctatgaagagatgctttgg

SEQ ID NO: 99632 - DNA, 60 bp, Artificial
  Synthetic oligonucleotide
agtcctccggcccctgaatgcggctaaccttaaccctggagccttggggtacaatccagt

SEQ ID NO: 99633 - DNA, 60 bp, Artificial
  Synthetic oligonucleotide
ggggacgcagatgtttgggacgtcaccttgcagtgttaacttggctctcatgaacctctt

SEQ ID NO: 99634 - DNA, 60 bp, Artificial
  Synthetic oligonucleotide
ggccaccgctgtcaaaagctcttaaccgttatccgccaattaactacgcaacggttagta

SEQ ID NO: 99635 - DNA, 60 bp, Artificial
  Synthetic oligonucleotide
ccagtgatggctagtacaagcacttctgtttccccggagcggagtatagatggccaccgc

SEQ ID NO: 99636 - DNA, 60 bp, Artificial
  Synthetic oligonucleotide
ctgtcacatccagtgatggctagtacaagcacttctgtttccccggagcggagtatagat

SEQ ID NO: 99637 - DNA, 60 bp, Artificial
  Synthetic oligonucleotide
ccccggagcggagtatagatggccaccgctgtcaaaagctcttaaccgttatccgccagt

SEQ ID NO: 99638 - DNA, 60 bp, Artificial
  Synthetic oligonucleotide
ccccggagcggagtataaatggccaccgctgtcaaaagctcttaaccgttatccgccaat

SEQ ID NO: 99639 - DNA, 60 bp, Artificial
  Synthetic oligonucleotide
gtaccgccgttggctcgattctttttagtaaccctacctcagtcgaattggattgggtta

SEQ ID NO: 99640 - DNA, 60 bp, Artificial
  Synthetic oligonucleotide
ggctatcctctcctttgcacgccgtgggaccatacaggagaagttgatttcagtggcagg

SEQ ID NO: 99641 - DNA, 60 bp, Artificial
  Synthetic oligonucleotide
tctggtaatagcgcggtcactggcacaacgcgttacccggtaagccaaccgggtgtacac

SEQ ID NO: 99642 - DNA, 60 bp, Artificial
  Synthetic oligonucleotide
cctattgagctagttggtagtcctccggcccctgaatgcggctaatcctaactgcggagc

SEQ ID NO: 99643 - DNA, 60 bp, Artificial
  Synthetic oligonucleotide
cgacgtcactttcctcaaaagacacttccacatggactatggaactgggttttacaaacc

SEQ ID NO: 99644 - DNA, 60 bp, Artificial
  Synthetic oligonucleotide
gggtggcagatggcgtgccataactctattagtgagataccacgcttgtggaacttatgc

SEQ ID NO: 99645 - DNA, 60 bp, Artificial
  Synthetic oligonucleotide
gatttcatggggtggcagatggcgtgccataactctattagtgagataccacgcttgtgg

SEQ ID NO: 99646 - DNA, 60 bp, Artificial
  Synthetic oligonucleotide
cttcaatcctacttaatggagttatgcctccatggaaaagacacttacttatattacatc

SEQ ID NO: 99647 - DNA, 60 bp, Artificial
  Synthetic oligonucleotide
aggatgcccagaaggtacccgtaggtaacaagcgacactatggatctgatctggggccag

SEQ ID NO: 99648 - DNA, 60 bp, Artificial
  Synthetic oligonucleotide
aggatgcccagaaggtacccgtaggtaacaagtggcactatggatctgatctggggccag

SEQ ID NO: 99649 - DNA, 60 bp, Artificial
  Synthetic oligonucleotide
aggatgcccagaaggtacccgtaggtaacaagtgacactatggatctgatctggggccag

SEQ ID NO: 99650 - DNA, 60 bp, Artificial
  Synthetic oligonucleotide
ggatgcccagaaggtacccgtaggtaacaagtgacactatggatctgatctggggccaac

SEQ ID NO: 99651 - DNA, 60 bp, Artificial
  Synthetic oligonucleotide
ggcccgcgaaggatgcccagaaggtacccgtaggtaacaagtgacactatggatctgatc

SEQ ID NO: 99652 - DNA, 60 bp, Artificial
  Synthetic oligonucleotide
ccgccgttggctcgactcattttagtaaccctacctcagtcgaattggattgggttatac

SEQ ID NO: 99653 - DNA, 60 bp, Artificial
  Synthetic oligonucleotide
ctggctctcatccagtggatgcattgagtggattgtttgtcagggctgtctctaggctta

SEQ ID NO: 99654 - DNA, 57 bp, Artificial
  Synthetic oligonucleotide
aaaaccattcaacgccggaggactgactctcatccagtggatgcattgagtggattg

SEQ ID NO: 99655 - DNA, 60 bp, Artificial
  Synthetic oligonucleotide
cactcaaggactgccaacatttataacacctggatctggtcaattcttaactacagatga

SEQ ID NO: 99656 - DNA, 60 bp, Artificial
  Synthetic oligonucleotide
cctggtgaagcgggcagggatgttgggaaaactgaccgcaagcaaaacaaccgacagcct

SEQ ID NO: 99657 - DNA, 60 bp, Artificial
  Synthetic oligonucleotide
caggaagacaaaaggcgcacccatgttgtggacgtcatgactgctatatttcaaggacca

SEQ ID NO: 99658 - DNA, 60 bp, Artificial
  Synthetic oligonucleotide
gccagatgtggtcccctgaatccaaaggatggtggtggaagttacctgatgctttgaagg

SEQ ID NO: 99659 - DNA, 60 bp, Artificial
  Synthetic oligonucleotide
gctagttattacactcattggacagggagccttcgatttagtttcatgttttgtggttct

SEQ ID NO: 99660 - DNA, 60 bp, Artificial
  Synthetic oligonucleotide
cagctggtggtgagggccatgttgctttcattgatttgagacatttcttatgtgctgagg

SEQ ID NO: 99661 - DNA, 60 bp, Artificial
  Synthetic oligonucleotide
tggaccaagaaaccctcacagatgcaggaacatgttttatccttgtgtcatttaatgtgg

SEQ ID NO: 99662 - DNA, 60 bp, Artificial
  Synthetic oligonucleotide
ccagttttatatcccttcccccccttgtaacttagaagacatgcgaatcgaccaatagca

SEQ ID NO: 99663 - DNA, 60 bp, Artificial
  Synthetic oligonucleotide
gtcccagagaggagggtggttgcacaaggtccggaggaagaatttggccgctctctaatc

SEQ ID NO: 99664 - DNA, 60 bp, Artificial
  Synthetic oligonucleotide
ggcatcaagtggagcttccaaattagaattttcacaagaccccagcaaattcacagaccc

SEQ ID NO: 99665 - DNA, 60 bp, Artificial
  Synthetic oligonucleotide
gcagtaatgatacatggttcacctgggactggcaaatctatcacaacaagctttctggca

SEQ ID NO: 99666 - DNA, 60 bp, Artificial
  Synthetic oligonucleotide
ccgcacaatcacattatggcaccacagtagttaatgacatgggcacattatgctttagga

SEQ ID NO: 99667 - DNA, 60 bp, Artificial
  Synthetic oligonucleotide
aaggagaaataacagtgacaaagaaggtggctgaatgtggacttccaacgatacacactc

SEQ ID NO: 99668 - DNA, 60 bp, Artificial
  Synthetic oligonucleotide
gaaagtaatccgactacatccaactcagcacctgcactggacgctgcagaaactggccat

SEQ ID NO: 99669 - DNA, 60 bp, Artificial
  Synthetic oligonucleotide
gtcacaggatctgcggtgggatgtgaccctgagaccttttggtcaaagataccagtgatg

SEQ ID NO: 99670 - DNA, 60 bp, Artificial
  Synthetic oligonucleotide
aagctacagatcactttacctgcgttgggtgaacgccgtgtgcggtgacgcataatcccc

SEQ ID NO: 99671 - DNA, 60 bp, Artificial
  Synthetic oligonucleotide
agctacagatcactttacctgcgttgggtgaacgccgtgtgcggtgacgcataatccctc

SEQ ID NO: 99672 - DNA, 60 bp, Artificial
  Synthetic oligonucleotide
tagtcctccggcccctgaatgcggctaatcctaactgcggagcacatgccctcaaaccag

SEQ ID NO: 99673 - DNA, 60 bp, Artificial
  Synthetic oligonucleotide
gatggggactgcataatggcttttgattacacaaattatgatggaagcatacacccagtg

SEQ ID NO: 99674 - DNA, 60 bp, Artificial
  Synthetic oligonucleotide
accctcgaggctatcctctcctttgcacgccgtgggaccatacaggagaagttgatctcc

SEQ ID NO: 99675 - DNA, 60 bp, Artificial
  Synthetic oligonucleotide
acccttgaggctatcctctcctttgcacgccgtgggaccatacaggagaagttgatctcg

SEQ ID NO: 99676 - DNA, 53 bp, Artificial
  Synthetic oligonucleotide
acccttgaggctatcctctcctttgcacgccgtgggaccatacaggagaagtt

SEQ ID NO: 99677 - DNA, 60 bp, Artificial
  Synthetic oligonucleotide
ctgggtccaggttgttcccacctggatctcctacatggagttgtactctattatcccggt

SEQ ID NO: 99678 - DNA, 60 bp, Artificial
  Synthetic oligonucleotide
cagctaggatgcttaaatataattacccaacaaaatcaggatactgtggtggtatactat

SEQ ID NO: 99679 - DNA, 60 bp, Artificial
  Synthetic oligonucleotide
gtgtcagcgctggtcgtgcactgtatatacctccttatgacttgcttttgcatgagtggt

SEQ ID NO: 99680 - DNA, 60 bp, Artificial
  Synthetic oligonucleotide
cgtgacaggtcaagcacttctgtttccccggtcaaagttgatatgcttcaccaaggcaaa

SEQ ID NO: 99681 - DNA, 60 bp, Artificial
  Synthetic oligonucleotide
tggcgtcgaagaccctcgaagctatcctctcctttgcacgccgtgggaccatacaggaga

SEQ ID NO: 99682 - DNA, 60 bp, Artificial
  Synthetic oligonucleotide
gcttcgaagaccctcgaagctatcctctcctttgcacgccgtgggaccatacaggagaag

SEQ ID NO: 99683 - DNA, 60 bp, Artificial
  Synthetic oligonucleotide
gcacttctgtttccccggagcgaggtataggctgtacccactgccgaaagcctttaaccg

SEQ ID NO: 99684 - DNA, 60 bp, Artificial
  Synthetic oligonucleotide
catcaacaagtacaataggaagcatcacatccagtggtgttttgtacaagcacttctgtt

SEQ ID NO: 99685 - DNA, 60 bp, Artificial
  Synthetic oligonucleotide
gcggatctacatctggtaacagatgcctctggggccaaaagccaaggtttaacagaccct

SEQ ID NO: 99686 - DNA, 60 bp, Artificial
  Synthetic oligonucleotide
gggcagtctgtcgtaatgggcaactccgcagcggaaccgactactttgggtgtccgtgtt

SEQ ID NO: 99687 - DNA, 57 bp, Artificial
  Synthetic oligonucleotide
gggttccatacaggtgttgctattggcatagatcctgactgtcagtgggatgaatta

SEQ ID NO: 99688 - DNA, 56 bp, Artificial
  Synthetic oligonucleotide
ggtttcacacaggtgttgctattggcatagatcctgatagacagtgggatgaatta

SEQ ID NO: 99689 - DNA, 60 bp, Artificial
  Synthetic oligonucleotide
gggtttcatacaggtgttgctattggcatagatcctgatagacagtgggatgaattattc

SEQ ID NO: 99690 - DNA, 57 bp, Artificial
  Synthetic oligonucleotide
ggtttccatacaggtgttgctattggcatagatcctgatagacagtgggatgaatta

SEQ ID NO: 99691 - DNA, 60 bp, Artificial
  Synthetic oligonucleotide
gattttccctccactagtttggtcgatgaggctaggaattccccacgggtgaccgtgtcc

SEQ ID NO: 99692 - DNA, 60 bp, Artificial
  Synthetic oligonucleotide
ttcccctccactagtttggtcgatgaggctaggaattccccacgggtgaccgtgtcctag

SEQ ID NO: 99693 - DNA, 60 bp, Artificial
  Synthetic oligonucleotide
ttcgatcaggtggatttcccctccactagtttggtcgatgaggctaggaattccccacgg

SEQ ID NO: 99694 - DNA, 60 bp, Artificial
  Synthetic oligonucleotide
atgcatgagtctgtccttgtatcttactcatctgatctagtcatataccgaacaaacaca

SEQ ID NO: 99695 - DNA, 54 bp, Artificial
  Synthetic oligonucleotide
ggtaacaggagcctctgcggccaaaagccacgtggataagatccacctttgtgt

SEQ ID NO: 99696 - DNA, 55 bp, Artificial
  Synthetic oligonucleotide
tggtaacaggagcctctgcggccaaaagccacgtggataagatccacctttgtgt

SEQ ID NO: 99697 - DNA, 60 bp, Artificial
  Synthetic oligonucleotide
aacagctgtagcgaccacacaaaggcagcggaacccctctcctggtaacaggagcctctg

SEQ ID NO: 99698 - DNA, 60 bp, Artificial
  Synthetic oligonucleotide
acaagaaaacagctgtagcgaccacacaaaggcagcggaacccctctcctggtaacagga

SEQ ID NO: 99699 - DNA, 52 bp, Artificial
  Synthetic oligonucleotide
tagtatctgcaagaagacagctgtagcgaccacacaaaggcagcggaacccc

SEQ ID NO: 99700 - DNA, 60 bp, Artificial
  Synthetic oligonucleotide
gcctccccgattatgtgatgctttctgccctgctgggtggagcaccctcgggttgagaaa

SEQ ID NO: 99701 - DNA, 60 bp, Artificial
  Synthetic oligonucleotide
gcgacgtggttggagatctaagtcaaccgactccgacgaaactaccatcatgcctccccg

SEQ ID NO: 99702 - DNA, 60 bp, Artificial
  Synthetic oligonucleotide
cctccatcgcgacgtggttggagatctaagtcaaccgactccgacgaaactaccatcatg

SEQ ID NO: 99703 - DNA, 60 bp, Artificial
  Synthetic oligonucleotide
gccactagggtgtacgcggccgttctgacgttggaattcttttaggcaaaagttgtgtag

SEQ ID NO: 99704 - DNA, 60 bp, Artificial
  Synthetic oligonucleotide
agccacaaggtgcggtgctaactaaatccctagcaccccaggcaggaattcaaaacctcc

SEQ ID NO: 99705 - DNA, 60 bp, Artificial
  Synthetic oligonucleotide
agccacaaggtgcggtgctaactaaatccctagcaccccaggcaggaattcaaaacatcc

SEQ ID NO: 99706 - DNA, 60 bp, Artificial
  Synthetic oligonucleotide
taattcggcccctgtgttgagccccttgttgaagtgtttccctccatcgcgacgtggttg

SEQ ID NO: 99707 - DNA, 60 bp, Artificial
  Synthetic oligonucleotide
cggcctctgtgttgagccccttgttgaagtgtttccctccatcgcgacgtggttggagat

SEQ ID NO: 99708 - DNA, 54 bp, Artificial
  Synthetic oligonucleotide
aaaacacctctcacttgccgctcttcacacccattaatttaattcggcctctgt

SEQ ID NO: 99709 - DNA, 60 bp, Artificial
  Synthetic oligonucleotide
tcacacccatcattctaattcggcccctgtgttgagccccttgttgaagtgtttccctcc

SEQ ID NO: 99710 - DNA, 60 bp, Artificial
  Synthetic oligonucleotide
ccccttgacgaattcgcgttggaaaagcacctctcacttgccgctcttcacacccatcat

SEQ ID NO: 99711 - DNA, 60 bp, Artificial
  Synthetic oligonucleotide
cgcgttggaaaagcacctctcacttgccgctcttcacacccattaattcatttcggcctc

SEQ ID NO: 99712 - DNA, 60 bp, Artificial
  Synthetic oligonucleotide
gcggacggagatcatcccccggttaccccctttcgacgcgggtactgcgatagtgccacc

SEQ ID NO: 99713 - DNA, 60 bp, Artificial
  Synthetic oligonucleotide
catccccttgacgaattcgcgttggaaaagcacctctcacttgccgctcttcacacccat

SEQ ID NO: 99714 - DNA, 59 bp, Artificial
  Synthetic oligonucleotide
gtcgcggacggagatcatcccccggttaccccctttcgacgcgggtactgcgatagtgc

SEQ ID NO: 99715 - DNA, 60 bp, Artificial
  Synthetic oligonucleotide
gggaaggttctagcccaggccggcaaccccgtcatggactttgagcttttctgtgccaag

SEQ ID NO: 99716 - DNA, 60 bp, Artificial
  Synthetic oligonucleotide
ccaagccggtaaccccgtcatggactttgagcttttctgtgccaagaatatggttgcccc

SEQ ID NO: 99717 - DNA, 60 bp, Artificial
  Synthetic oligonucleotide
gttgtccccacctatgattctatgctttacagatggcttagcttatttagatgaacatcc

SEQ ID NO: 99718 - DNA, 60 bp, Artificial
  Synthetic oligonucleotide
gttgtccctacctatagttctatgctttatagatggcttagcttatttagatgaacatcc

SEQ ID NO: 99719 - DNA, 60 bp, Artificial
  Synthetic oligonucleotide
gctatgaaaatcaattttctgtgattatggatgatctaggacaaaatcctgatggcgaag

SEQ ID NO: 99720 - DNA, 60 bp, Artificial
  Synthetic oligonucleotide
tcaattttctgtgattatggatgatctaggacaaaatcccgatggtgaagatttcaccgt

SEQ ID NO: 99721 - DNA, 60 bp, Artificial
  Synthetic oligonucleotide
ggtattgcctcactttctgctgttataaaactagcctccaaatttaaagaatcaatttgg

SEQ ID NO: 99722 - DNA, 60 bp, Artificial
  Synthetic oligonucleotide
gtcctagatattcaaggaggcgggaaggttctagcccaggccggtaaccccgtcatggac

SEQ ID NO: 99723 - DNA, 60 bp, Artificial
  Synthetic oligonucleotide
ttgtccctacctatagttctatgctttatagatggcttagcttatttagatgaacatccc

SEQ ID NO: 99724 - DNA, 60 bp, Artificial
  Synthetic oligonucleotide
tgaacatcccctcgatcggatcgcaacgctttaccctagaagccactagggtgtacgcgg

SEQ ID NO: 99725 - DNA, 60 bp, Artificial
  Synthetic oligonucleotide
tggtgagtgcataatggcttttgattacacgaattatgatggaagcatacaccctatgtg

SEQ ID NO: 99726 - DNA, 60 bp, Artificial
  Synthetic oligonucleotide
ggggaatgtataatggcttttgattacacgaattatgatggaagtatacaccctatctgg

SEQ ID NO: 99727 - DNA, 60 bp, Artificial
  Synthetic oligonucleotide
ttccctcccttaaataaattaagattaccactactgaggggagtagaccgactccgctcc

SEQ ID NO: 99728 - DNA, 60 bp, Artificial
  Synthetic oligonucleotide
cctcccttaaataaattaagattaccactactgaggggagtagaccgactccgctccagc

SEQ ID NO: 99729 - DNA, 53 bp, Artificial
  Synthetic oligonucleotide
cgacagtgttctagcctgcgtggctgcctgcacaccctttcgggtgtgaagcc

SEQ ID NO: 99730 - DNA, 59 bp, Artificial
  Synthetic oligonucleotide
aatccccactggcgacagtgttccagcctgcgtggctgcctgcacacccatacgggtgt

SEQ ID NO: 99731 - DNA, 58 bp, Artificial
  Synthetic oligonucleotide
gcttccccactggtaacagtgttccagcctgcgtggctgcctgcacacccttacgggt

SEQ ID NO: 99732 - DNA, 60 bp, Artificial
  Synthetic oligonucleotide
gcttccccactggtaacagtgttccagcctgcgtggctgcctgcacacccttacgggtgt

SEQ ID NO: 99733 - DNA, 60 bp, Artificial
  Synthetic oligonucleotide
ccaccagttttctggctagaatgttgacaaatgagagtgacatatattcgctcccaccag

SEQ ID NO: 99734 - DNA, 64 bp, Artificial
  Synthetic oligonucleotide
ctgacatgcatgattctatactagtttcttattcctctgatttagtcatataccgaacaaacac

SEQ ID NO: 99735 - DNA, 60 bp, Artificial
  Synthetic oligonucleotide
ctattgagctagttggtagtcctccggcccctgaatgcggctaatcccaactgcggagca

SEQ ID NO: 99736 - DNA, 60 bp, Artificial
  Synthetic oligonucleotide
gcaaaaacaactgcgatcgttatccgcaaagtgcctacgcaaagcctagtagcacctttg

SEQ ID NO: 99737 - DNA, 57 bp, Artificial
  Synthetic oligonucleotide
ggcagtgtgtcgtaacgggcaactctgcagcggaaccgactactttgggtgtccgtg

SEQ ID NO: 99738 - DNA, 60 bp, Artificial
  Synthetic oligonucleotide
cgtaacgggcaactctgcagcggaaccgactactttgggtgtccgtgtttccttttattc

SEQ ID NO: 99739 - DNA, 55 bp, Artificial
  Synthetic oligonucleotide
tcactttacctgcgttgggtgaacgccgtgtgcggtgacgcataatccctcagat

SEQ ID NO: 99740 - DNA, 60 bp, Artificial
  Synthetic oligonucleotide
agacctctctgtgcttggggcaaacatcatttggccttaaatgggattctgtgagagggg

SEQ ID NO: 99741 - DNA, 60 bp, Artificial
  Synthetic oligonucleotide
agacctctctgtgcttagggcaaacattacttggccttaaatgggattctgtgagagggg

SEQ ID NO: 99742 - DNA, 60 bp, Artificial
  Synthetic oligonucleotide
agacctctctgtgcttagggcaaacactacttggccttaaatgggattctgtgagagggg

SEQ ID NO: 99743 - DNA, 60 bp, Artificial
  Synthetic oligonucleotide
catggtgtgaagagtctattgagctaattggtagtcctccggcccctgaatgcggctaat

SEQ ID NO: 99744 - DNA, 60 bp, Artificial
  Synthetic oligonucleotide
gctcaatctatttagatgaacatcctctcgatcggatcgcaacgtgttacccaggaagcc

SEQ ID NO: 99745 - DNA, 55 bp, Artificial
  Synthetic oligonucleotide
tggcgacaagagcctctgcggccaaaagccccgtggataagatccactgctgtga

SEQ ID NO: 99746 - DNA, 60 bp, Artificial
  Synthetic oligonucleotide
gtcgtatgggtcgtaatgagtaattctgggatgggaccgactactttgggtgtccgtgtt

SEQ ID NO: 99747 - DNA, 60 bp, Artificial
  Synthetic oligonucleotide
actttacctgcgttgggtgaacgccgtgtgcggtgacgcataatccctcagatgtcacaa

SEQ ID NO: 99748 - DNA, 60 bp, Artificial
  Synthetic oligonucleotide
cttaaatgggattctgtgagaggggatccctccattgacagctggactgttctttggggc

SEQ ID NO: 99749 - DNA, 51 bp, Artificial
  Synthetic oligonucleotide
aaagctatgcttggtacacatgtcatatgggatgttggtttgcaatcaaca

SEQ ID NO: 99750 - DNA, 60 bp, Artificial
  Synthetic oligonucleotide
ggtgtgaagagcctattgagctacataagagtcctccggcccctgaatgcggctaatcct

SEQ ID NO: 99751 - DNA, 52 bp, Artificial
  Synthetic oligonucleotide
gaggggacttgatacctcaccgccgtttgcctaggctataggctaaattttc

SEQ ID NO: 99752 - DNA, 53 bp, Artificial
  Synthetic oligonucleotide
tgaggggacttgatacctcaccgccgtttgcctaggctataggctaaattttc

SEQ ID NO: 99753 - DNA, 60 bp, Artificial
  Synthetic oligonucleotide
cttggttgacccagaaggagtcaatcttgaaattaccgtattgacactgggatggaatga

SEQ ID NO: 99754 - DNA, 60 bp, Artificial
  Synthetic oligonucleotide
cgggtggtcgagtaccacaaaatagagaggaggcaatgctagggactaatgtgatctggg

SEQ ID NO: 99755 - DNA, 60 bp, Artificial
  Synthetic oligonucleotide
atgtcgatggttttgataacacagggtatgtatctgcttggtttcaaacgaacatggtag

SEQ ID NO: 99756 - DNA, 60 bp, Artificial
  Synthetic oligonucleotide
ctgcaacccaggaacagcccaggagtttagacgcacacccctgggagatgtgtgtaggta

SEQ ID NO: 99757 - DNA, 60 bp, Artificial
  Synthetic oligonucleotide
gagtgattgggctactcaccggaggcgatgagggaagggttgcctttgcagacataagag

SEQ ID NO: 99758 - DNA, 60 bp, Artificial
  Synthetic oligonucleotide
cggcaagtgcttcccggtgtgttttcaagggccaggaatagaaaagttccaggcgagcga

SEQ ID NO: 99759 - DNA, 60 bp, Artificial
  Synthetic oligonucleotide
ccaaattcaatggagcaggctgtatatggaatggatggtcttgaagctttagatctgagc

SEQ ID NO: 99760 - DNA, 60 bp, Artificial
  Synthetic oligonucleotide
attaccacctggcaaccactgaggatcgcgagaaagaaatttggtcagatccaagaaggg

SEQ ID NO: 99761 - DNA, 60 bp, Artificial
  Synthetic oligonucleotide
ccaggacacacacctaaacaagatgactactgatagggcgaacataaagactgttaccaa

SEQ ID NO: 99762 - DNA, 60 bp, Artificial
  Synthetic oligonucleotide
tacatcagccaaggatgatttctcgatgcgcttgttgcgggatacagcagagatttcgca

SEQ ID NO: 99763 - DNA, 60 bp, Artificial
  Synthetic oligonucleotide
gccatcacacaaggaagtattgagttcaagagaaggttgagctggcagggcttaagagtg

SEQ ID NO: 99764 - DNA, 57 bp, Artificial
  Synthetic oligonucleotide
gatatccatcctttggaagcataaatggacagggaaatggctctgattacggtgcat

SEQ ID NO: 99765 - DNA, 60 bp, Artificial
  Synthetic oligonucleotide
cctggtgtaaaacaacccgctgttctgagtaagaaagatccccgctgtcaagtgaatttc

SEQ ID NO: 99766 - DNA, 60 bp, Artificial
  Synthetic oligonucleotide
gcaactgccgtggataagcccacacagcccgatgtagcctcaaatagattttacactctt

SEQ ID NO: 99767 - DNA, 60 bp, Artificial
  Synthetic oligonucleotide
tccactatcactactcaggaagccgccaatgtggtggtcgcatatggacaatggcctgaa

SEQ ID NO: 99768 - DNA, 59 bp, Artificial
  Synthetic oligonucleotide
taactgaaccattacccacgctgaagtcccctagtgctgaggcatgtgggtacagcgac

SEQ ID NO: 99769 - DNA, 60 bp, Artificial
  Synthetic oligonucleotide
gatgcagctagcaatgcagcaagcaaaatggactattcccaggatccggacaagttcacg

SEQ ID NO: 99770 - DNA, 60 bp, Artificial
  Synthetic oligonucleotide
gggttagcggttcatgtgcaatgtaatgcttcaaaatttcatcagggcactctactggtc

SEQ ID NO: 99771 - DNA, 60 bp, Artificial
  Synthetic oligonucleotide
gatcttctctgtagcgttgactcaggggaggtccgagattattgcagacgaaggggctgg

SEQ ID NO: 99772 - DNA, 60 bp, Artificial
  Synthetic oligonucleotide
gtgctacgttagtcttgccctatgtgggagcaacaccactggacacaccgatcaagcata

SEQ ID NO: 99773 - DNA, 60 bp, Artificial
  Synthetic oligonucleotide
gagtgttcatgaaacccaagcatgtacgagtatggtgcccaagaccgtgtcgtaccttac

SEQ ID NO: 99774 - DNA, 60 bp, Artificial
  Synthetic oligonucleotide
gaacccgtatgtttattaatccatgggagtcctggtgctggaaagtctgtggcaacttca

SEQ ID NO: 99775 - DNA, 60 bp, Artificial
  Synthetic oligonucleotide
atgttgtacacaagccctttcttgctcgcatctacaaatgccagtagcatacatgccccc

SEQ ID NO: 99776 - DNA, 60 bp, Artificial
  Synthetic oligonucleotide
acatgcccccacaatatcagatagcaaggctctgaacaggcggttccattttgatgttaa

SEQ ID NO: 99777 - DNA, 60 bp, Artificial
  Synthetic oligonucleotide
gagatcatggatcaatataagaaggagggcagaataaacatgccagaggcagcaaggcca

SEQ ID NO: 99778 - DNA, 60 bp, Artificial
  Synthetic oligonucleotide
ccactggtatgtggtaaggcaatacaattggttgaccgccgcttgggcattagatactca

SEQ ID NO: 99779 - DNA, 60 bp, Artificial
  Synthetic oligonucleotide
gccatcacccaagggctgccagtactcaatacacccggctctgggcagtttgtgactaca

SEQ ID NO: 99780 - DNA, 60 bp, Artificial
  Synthetic oligonucleotide
gatactttaggtcagatgagagatttcctttcctaattcatccagttatgcctatgagtg

SEQ ID NO: 99781 - DNA, 60 bp, Artificial
  Synthetic oligonucleotide
accactggtgcaactacacaagtgcctataacaataacaatggctccaatggcgtgcgag

SEQ ID NO: 99782 - DNA, 60 bp, Artificial
  Synthetic oligonucleotide
tatctgtggcaatcctcgacaaatccctccataatcggagcagttggtgaagtcccaggc

SEQ ID NO: 99783 - DNA, 60 bp, Artificial
  Synthetic oligonucleotide
cctactcacagagtattgatgtataatttccatacaaggatagggcagtgtggcggagtg

SEQ ID NO: 99784 - DNA, 60 bp, Artificial
  Synthetic oligonucleotide
tgagtccatgttggttcgcagccctaaaagtattgttggaaaagattggatttggagata

SEQ ID NO: 99785 - DNA, 60 bp, Artificial
  Synthetic oligonucleotide
caagggccttatactggcctgttcaaagcaaagcacaaaagtaccaccttgagaactgcg

SEQ ID NO: 99786 - DNA, 60 bp, Artificial
  Synthetic oligonucleotide
cgctttgatcttgaggtgactatagtggctgtgaatttgactggaaatggaggagtgcgt

SEQ ID NO: 99787 - DNA, 57 bp, Artificial
  Synthetic oligonucleotide
agtgcttgaatttgccagctttcaaggcacttgagcgggagtggtatgataaatttt

SEQ ID NO: 99788 - DNA, 60 bp, Artificial
  Synthetic oligonucleotide
atgcggtggaaactggagccacttcgcaagctagtgttgagtccaccattgagacgcggg

SEQ ID NO: 99789 - DNA, 60 bp, Artificial
  Synthetic oligonucleotide
gtccaccattgagacgcgggccgtgcagaatcgtcatcgcacttctgagatgagcgtgga

SEQ ID NO: 99790 - DNA, 57 bp, Artificial
  Synthetic oligonucleotide
gagtgttcccacccaacaggcccactgggtgttgtactctggtattacggtaccttt

SEQ ID NO: 99791 - DNA, 60 bp, Artificial
  Synthetic oligonucleotide
ctttaaggattctcattattatgtgtctggaggtatgccatcgggatgctcagggaccag

SEQ ID NO: 99792 - DNA, 60 bp, Artificial
  Synthetic oligonucleotide
atggtacgctgtgcaaacggcggaaattaatcctaccgttaaccgcccacctactccgag

SEQ ID NO: 99793 - DNA, 60 bp, Artificial
  Synthetic oligonucleotide
tggagttgcgctcagcaggtgaccctgacctgccagctccggctgatggacctgggcttt

SEQ ID NO: 99794 - DNA, 60 bp, Artificial
  Synthetic oligonucleotide
gggctagctggtttcctccggcctcctgaatgcggctaaccttaaccccagagcatatgg

SEQ ID NO: 99795 - DNA, 60 bp, Artificial
  Synthetic oligonucleotide
tgttgcttttgacaattattgagacatcacatagacataatgggagctcaagtaagcagg

SEQ ID NO: 99796 - DNA, 60 bp, Artificial
  Synthetic oligonucleotide
ggcatcaagaagcgggacctctttaagccaaatagagaccttagcaagtttaaagagtgt

SEQ ID NO: 99797 - DNA, 60 bp, Artificial
  Synthetic oligonucleotide
tggaaatgcatttggtgctgggtttacagatgagattagcagctatgcacaacaaattaa

SEQ ID NO: 99798 - DNA, 60 bp, Artificial
  Synthetic oligonucleotide
gctggaggcacagatggccacacttgaacacgccgctccaaatcaggagaaacaagaacg

SEQ ID NO: 99799 - DNA, 60 bp, Artificial
  Synthetic oligonucleotide
gcagaaaatatgctccactgtatgccagtgaagctaggcgtgtcttccagatggaaaaga

SEQ ID NO: 99800 - DNA, 60 bp, Artificial
  Synthetic oligonucleotide
ggccgtgagggagcgtgctgattttgtgaatagactgaagcaattgccactgctggaggc

SEQ ID NO: 99801 - DNA, 60 bp, Artificial
  Synthetic oligonucleotide
ccaaaataagccagctgtgtggtgtaacaatagcagaacgccaatcagattcatggttaa

SEQ ID NO: 99802 - DNA, 60 bp, Artificial
  Synthetic oligonucleotide
ttcttgaaggatgagttaaggccgctgtcaaaagtagaagccggaaaaacacgattaatt

SEQ ID NO: 99803 - DNA, 60 bp, Artificial
  Synthetic oligonucleotide
cctattgagctactaaagagtcctccggcccctgaatgcggctaatcccaaccacggagc

SEQ ID NO: 99804 - DNA, 60 bp, Artificial
  Synthetic oligonucleotide
ccaagaagtagaaaagatgctatgctggggactcatgttgtttgggatgttggcctgcag

SEQ ID NO: 99805 - DNA, 60 bp, Artificial
  Synthetic oligonucleotide
ggagtgtccttggtatccatgtaggtggtaatggaagggatgggttctctgcaatgctac

SEQ ID NO: 99806 - DNA, 59 bp, Artificial
  Synthetic oligonucleotide
aaaaggcataccaactcttcaatcacccacggttgaagcatgcgggtattcagatagga

SEQ ID NO: 99807 - DNA, 60 bp, Artificial
  Synthetic oligonucleotide
tagttgccatgatacctgaacaccaactggctagtgcagagagaggaaatgtcacggctg

SEQ ID NO: 99808 - DNA, 60 bp, Artificial
  Synthetic oligonucleotide
gcttggaaacagactttagaacagctttattctccaagtacaagggaaacaacacatgcc

SEQ ID NO: 99809 - DNA, 58 bp, Artificial
  Synthetic oligonucleotide
ggtatacgcagtgtaagcgctggacgtgcactgtatattcctccctacgagctccttc

SEQ ID NO: 99810 - DNA, 60 bp, Artificial
  Synthetic oligonucleotide
gcagtggggtgtgacccagaaacattttggtcaaagatccctgtaatgcttgatggggac

SEQ ID NO: 99811 - DNA, 60 bp, Artificial
  Synthetic oligonucleotide
agcacctttgaagtcatttggttggtcgctccgctgttccccacagtagacctggcagat

SEQ ID NO: 99812 - DNA, 60 bp, Artificial
  Synthetic oligonucleotide
gccaagggctgcctgttatgatgacaccaggttctgggcagttcatgaccactgatgatt

SEQ ID NO: 99813 - DNA, 60 bp, Artificial
  Synthetic oligonucleotide
aggaactgttctgatcctcaaactataattgcaacactaacattgattgggtgctctggt

SEQ ID NO: 99814 - DNA, 60 bp, Artificial
  Synthetic oligonucleotide
tccatgaataaccccccaccgcctgcaatagctgatttattgcaatcagtgagaacccca

SEQ ID NO: 99815 - DNA, 60 bp, Artificial
  Synthetic oligonucleotide
ccaaagataccagagaggagaattgtggcgcaagggccggaagaagaatttggtaggtct

SEQ ID NO: 99816 - DNA, 60 bp, Artificial
  Synthetic oligonucleotide
catgcaaaatcctggtggtgaggacatgtcactcttctgtcagatggtctccagtgttac

SEQ ID NO: 99817 - DNA, 60 bp, Artificial
  Synthetic oligonucleotide
cacatggcaatctggcacaaatgcatctgtgttttggcagcatggacagccataccctag

SEQ ID NO: 99818 - DNA, 60 bp, Artificial
  Synthetic oligonucleotide
gttagttgttccaaatattagagaaagccattcaagtacttcaaactcagcaccagcact

SEQ ID NO: 99819 - DNA, 60 bp, Artificial
  Synthetic oligonucleotide
attggtgagggcccttgtgaaccaggtgactgtggtgggaaacttttatgcaaacatgga

SEQ ID NO: 99820 - DNA, 55 bp, Artificial
  Synthetic oligonucleotide
taatgcgtaagtgcgggatgggaccaactactttgggtgtccgtgtttcctgttt

SEQ ID NO: 99821 - DNA, 55 bp, Artificial
  Synthetic oligonucleotide
ttccccactggcgacagtgttctagcctgcgtggctgcctgcacaccctcacggg

SEQ ID NO: 99822 - DNA, 60 bp, Artificial
  Synthetic oligonucleotide
cagcaacttcaatcctacttaatggagttatgcctccatggaaaagacatttaccaacgt

SEQ ID NO: 99823 - DNA, 60 bp, Artificial
  Synthetic oligonucleotide
cagcaacttcaatcctacttaatggagttatgcctccatggaaaagacacttatcaacac

SEQ ID NO: 99824 - DNA, 60 bp, Artificial
  Synthetic oligonucleotide
cagcaactccaatcctacttaatggagttatgcctccatggaaaagacatttaccagcac

SEQ ID NO: 99825 - DNA, 60 bp, Artificial
  Synthetic oligonucleotide
ctagtacttctatgaagagatgctttggatagggtaacagcggcgcatattggtgagttg

SEQ ID NO: 99826 - DNA, 60 bp, Artificial
  Synthetic oligonucleotide
ctagttggtagtcctccggcccctgaatgcggctaatcctaactgcggagcacatacccc

SEQ ID NO: 99827 - DNA, 60 bp, Artificial
  Synthetic oligonucleotide
cttatgtggtgtttgcctctgaggtactcaggggcatttaggtttttcctcattctcaaa

SEQ ID NO: 99828 - DNA, 60 bp, Artificial
  Synthetic oligonucleotide
catggtgtgaagagtctattgagctagttagtagtcctccggcccctgaatgcggctaat

SEQ ID NO: 99829 - DNA, 60 bp, Artificial
  Synthetic oligonucleotide
ggaggccgcgttggcggcccgcctatggcgaaagccataggacgcctcttagatgacagg

SEQ ID NO: 99830 - DNA, 60 bp, Artificial
  Synthetic oligonucleotide
acgggtgaccgtggcggaggccgcgttggcggcccgcctatggcgaaagccataggacgc

SEQ ID NO: 99831 - DNA, 60 bp, Artificial
  Synthetic oligonucleotide
ggtgcgaagagtctattgagctaactggtagtcctccggcccctgaatgcggctaatcct

SEQ ID NO: 99832 - DNA, 60 bp, Artificial
  Synthetic oligonucleotide
catgtgcttgattgtgagtcctccggcccctgaatgcggctaaccttaaccccggagcct

SEQ ID NO: 99833 - DNA, 60 bp, Artificial
  Synthetic oligonucleotide
ccctacctcctcctggacacaacatgcttcctggactttggtgattgccgtggtagcccc

SEQ ID NO: 99834 - DNA, 60 bp, Artificial
  Synthetic oligonucleotide
ccacttcctcctggacacaacatgcttcctggactttggtgattgcagtggttgctcccc

SEQ ID NO: 99835 - DNA, 60 bp, Artificial
  Synthetic oligonucleotide
ggcgttggaagcaatgttgtcatactatcgtccagggactctatctgagaaactcacttc

SEQ ID NO: 99836 - DNA, 60 bp, Artificial
  Synthetic oligonucleotide
ttgctcgatgccaacgaggacgcccaaaaagcaatgaagattataaagacgttaagttct

SEQ ID NO: 99837 - DNA, 60 bp, Artificial
  Synthetic oligonucleotide
cgtccagggactctatctgagaaactcacttcaatcactatgcttgccgtgcattctggc

SEQ ID NO: 99838 - DNA, 60 bp, Artificial
  Synthetic oligonucleotide
ccattacctcgcaagatgtggccaatgcagttgttggttatggcgtgtggcctcattatt

SEQ ID NO: 99839 - DNA, 60 bp, Artificial
  Synthetic oligonucleotide
tcttcggctggttacatcacttgctggtatcagacaaatttgataatacctccaaatgct

SEQ ID NO: 99840 - DNA, 60 bp, Artificial
  Synthetic oligonucleotide
ggaagattctcggttggtcgctcagttacaaccccagtaacagacctggcagatgaggct

SEQ ID NO: 99841 - DNA, 60 bp, Artificial
  Synthetic oligonucleotide
ctccgctttcacaacacttaaattgctgattgcatacacaccaccaggaattgatgttcc

SEQ ID NO: 99842 - DNA, 60 bp, Artificial
  Synthetic oligonucleotide
cagggataaaagcatgtacacaatcagacttggtggagagactgatattaaggaggccat

SEQ ID NO: 99843 - DNA, 60 bp, Artificial
  Synthetic oligonucleotide
tctttgtagcactaaccactctcttttggctccccccactatcacatctctgcaggccat

SEQ ID NO: 99844 - DNA, 60 bp, Artificial
  Synthetic oligonucleotide
ggataaaaggcggacacatgttgtggatgtcatgtctgctatatttcagggccccatctc

SEQ ID NO: 99845 - DNA, 60 bp, Artificial
  Synthetic oligonucleotide
gtccctgagaggagggtggtcgcacagggtcctgaggaagaatttggtcgatcactgatc

SEQ ID NO: 99846 - DNA, 60 bp, Artificial
  Synthetic oligonucleotide
gagcctgctgtgttgactgaaagagatccccgtctgacaactgactttaacacggctttg

SEQ ID NO: 99847 - DNA, 60 bp, Artificial
  Synthetic oligonucleotide
cacatacagtacaatttactaattggtgagggaccatgtgaacctggggattgtggtggc

SEQ ID NO: 99848 - DNA, 59 bp, Artificial
  Synthetic oligonucleotide
aaaagcaggagcagagattgtggcttctgtcagacctagagacaatgttagacaagtaa

SEQ ID NO: 99849 - DNA, 60 bp, Artificial
  Synthetic oligonucleotide
gggttgatcccacccaaaccacccacgtggtgtagtacactgttatctcggtaactttgt

SEQ ID NO: 99850 - DNA, 60 bp, Artificial
  Synthetic oligonucleotide
atgaagttgaaggaggtgtaccatctggatgttcaggaaccagcatattcaacaccatga

SEQ ID NO: 99851 - DNA, 60 bp, Artificial
  Synthetic oligonucleotide
tggaccaaaaaaccctcgcagatgcaagagcacgtcctgtccttgtgtcacttaatgtgg

SEQ ID NO: 99852 - DNA, 60 bp, Artificial
  Synthetic oligonucleotide
gcagccattgcccacaaaccagtgggtctatggttgtaatgagcaattgcgggatgggac

SEQ ID NO: 99853 - DNA, 60 bp, Artificial
  Synthetic oligonucleotide
cctggatctggtcaattcttaacaacggacgattaccagtcccctagtgcattaccatgg

SEQ ID NO: 99854 - DNA, 60 bp, Artificial
  Synthetic oligonucleotide
gatgttggaaagatggatcgtgaaagaaacgaccgacaacctagtgatgatagctggctg

SEQ ID NO: 99855 - DNA, 60 bp, Artificial
  Synthetic oligonucleotide
gcacccctcccagaaaagagagatgattacacatggcaatctggcaccaatgcatctgta

SEQ ID NO: 99856 - DNA, 60 bp, Artificial
  Synthetic oligonucleotide
cctatggaaatttattttcgacctttcacaggaacccaggcattataacaggatctgcag

SEQ ID NO: 99857 - DNA, 60 bp, Artificial
  Synthetic oligonucleotide
gctccagccctagatgcagcagagactggtcataccagtaatgtacaaccagaggacatg

SEQ ID NO: 99858 - DNA, 60 bp, Artificial
  Synthetic oligonucleotide
taacatcattaaacaaaagaagagaagtgaacctgtagcagtgatgatacatggctcacc

SEQ ID NO: 99859 - DNA, 60 bp, Artificial
  Synthetic oligonucleotide
gcaggatttccatatataagcatggggattaagaaaagagacttgatcaataacagcaca

SEQ ID NO: 99860 - DNA, 60 bp, Artificial
  Synthetic oligonucleotide
gaaactcctcagacccccacactgttgttgccacattaacattaattggctgttctggtt

SEQ ID NO: 99861 - DNA, 60 bp, Artificial
  Synthetic oligonucleotide
cgggtactgtggaggcgtgctttacaagatagggcaaattatgggaatacatgtgggtgg

SEQ ID NO: 99862 - DNA, 60 bp, Artificial
  Synthetic oligonucleotide
gaaccagtgagtgtaatcttcccagcatacataacccgtgtaaaaccaaattacaaccta

SEQ ID NO: 99863 - DNA, 60 bp, Artificial
  Synthetic oligonucleotide
cctttggaaaccttttctcaaaatttcatttgaacccaggtattgttactggatcagcgg

SEQ ID NO: 99864 - DNA, 60 bp, Artificial
  Synthetic oligonucleotide
cttctcaaatgcacgagcatgttctgtctttgtgtcatttaatgtggcataatggacgtg

SEQ ID NO: 99865 - DNA, 60 bp, Artificial
  Synthetic oligonucleotide
gcacatacaatacaacttgttaattggtgaagggccttgtgagccaggtgattgtggtgg

SEQ ID NO: 99866 - DNA, 60 bp, Artificial
  Synthetic oligonucleotide
aactgcgatcgttatccgcaaggcgcctacacaaagcttagtagcattctgaaagttgtc

SEQ ID NO: 99867 - DNA, 60 bp, Artificial
  Synthetic oligonucleotide
ccgcactacttgtcatctgaagacgccactgcaattgacaaaccctcccgtcctgacaca

SEQ ID NO: 99868 - DNA, 60 bp, Artificial
  Synthetic oligonucleotide
gacccacaaaccatattggcaacactaacactgattggatgttcaggatctccatggagg

SEQ ID NO: 99869 - DNA, 60 bp, Artificial
  Synthetic oligonucleotide
gaagaggatcggcgcagaagacaaatggttgacgtcatgtcagctatattccaggggcca

SEQ ID NO: 99870 - DNA, 60 bp, Artificial
  Synthetic oligonucleotide
acaggccttgggatatatgatagaactttgattgtgccaacccatgctgatcctggaaag

SEQ ID NO: 99871 - DNA, 60 bp, Artificial
  Synthetic oligonucleotide
gtcaaagcatggtgtccgcggccacccagagcacttgaatacacacgcgctcaccgtact

SEQ ID NO: 99872 - DNA, 60 bp, Artificial
  Synthetic oligonucleotide
gctttgtctctgggtgcaaagatttctgcttgcgcatggcccgagacaccaatttgcaca

SEQ ID NO: 99873 - DNA, 60 bp, Artificial
  Synthetic oligonucleotide
gtgataatcccaatttgccctcttgagacaatgagcaccatcaccacggtacctattaca

SEQ ID NO: 99874 - DNA, 60 bp, Artificial
  Synthetic oligonucleotide
gttattttacacactggacagggagtttacgtttcagttttatgttctgtggtactgcca

SEQ ID NO: 99875 - DNA, 60 bp, Artificial
  Synthetic oligonucleotide
caccatgggcgcacaagtatccaggcaaaatgttggaactcactccacacagaattctgt

SEQ ID NO: 99876 - DNA, 60 bp, Artificial
  Synthetic oligonucleotide
gttttgtgtagtacaaaccattctctcttggcaccacccacaataacctcgctccctgct

SEQ ID NO: 99877 - DNA, 60 bp, Artificial
  Synthetic oligonucleotide
tagtccgactccgcaccgatacgtcgcaccagtagaccggttcgcttaggacccttctac

SEQ ID NO: 99878 - DNA, 60 bp, Artificial
  Synthetic oligonucleotide
ctcaagagcctactgcgctaggtcggttctcctccggagccgtgaatgctgctaatccca

SEQ ID NO: 99879 - DNA, 60 bp, Artificial
  Synthetic oligonucleotide
cttcgatgtatactggtcctgccttgtccagtgctaaactcactctagcatacaccccgc

SEQ ID NO: 99880 - DNA, 60 bp, Artificial
  Synthetic oligonucleotide
atagagtacaacaaatcacactcgggaattcaacaataacaacacaagaagcagccaacg

SEQ ID NO: 99881 - DNA, 60 bp, Artificial
  Synthetic oligonucleotide
ggtggcgccatatccaatggtgtctatgtacaagcacttctgtttcccaggagcgaggta

SEQ ID NO: 99882 - DNA, 60 bp, Artificial
  Synthetic oligonucleotide
ccccaactttacgcccagttgttgtgcaaggaccaaacacagaatttgcactatccctgt

SEQ ID NO: 99883 - DNA, 60 bp, Artificial
  Synthetic oligonucleotide
ggagtgatgaaaggggttgggccggcagagctaggagactgcggtgggattttgagatgc

SEQ ID NO: 99884 - DNA, 60 bp, Artificial
  Synthetic oligonucleotide
ttcaccagtaattttgttctagcctccacaaattctaacacactaagccccccaacaatc

SEQ ID NO: 99885 - DNA, 60 bp, Artificial
  Synthetic oligonucleotide
ggccaagtaatagctagacataaggttagggagtttaacataaatccagtcaacacggca

SEQ ID NO: 99886 - DNA, 60 bp, Artificial
  Synthetic oligonucleotide
cgttgaagcatggattccaagagcacccagagcactaccctacacatcaatagggcgcac

SEQ ID NO: 99887 - DNA, 60 bp, Artificial
  Synthetic oligonucleotide
ggtccaagtcaattgtgccacaaggtttgccaactacaactttgccggggtcaggacaat

SEQ ID NO: 99888 - DNA, 60 bp, Artificial
  Synthetic oligonucleotide
cggtgttctgactggatcagcagtgggttgtgatcctgatgtgttttggtctgtcatccc

SEQ ID NO: 99889 - DNA, 60 bp, Artificial
  Synthetic oligonucleotide
ctggccactgcatctcaacctgattcagcaaactattcaagcaatttggtggtccaagcc

SEQ ID NO: 99890 - DNA, 60 bp, Artificial
  Synthetic oligonucleotide
cgagattccaagctacagatcactttacctgcgttgggtgaacgccgtgtgcggtgacgc

SEQ ID NO: 99891 - DNA, 60 bp, Artificial
  Synthetic oligonucleotide
gagattccaagctacagatcactttacctgcgttgggtgaacgccgtgtgcggtgacgca

SEQ ID NO: 99892 - DNA, 60 bp, Artificial
  Synthetic oligonucleotide
acattctggtcaaagatccctgtcatgttagatggtgaatgcataatggcttttgattat

SEQ ID NO: 99893 - DNA, 60 bp, Artificial
  Synthetic oligonucleotide
agtcaccctagtacttcaaattcagctcctgcactggatgctgcagagacggggcacaca

SEQ ID NO: 99894 - DNA, 60 bp, Artificial
  Synthetic oligonucleotide
tgcggaacggcaggcaccacacttaaattactagttgcctacacacctcctggaattgcc

SEQ ID NO: 99895 - DNA, 60 bp, Artificial
  Synthetic oligonucleotide
gggttacacacacacacatgttaccaactacaaaccatcagaaggagactacagtgtcag

SEQ ID NO: 99896 - DNA, 60 bp, Artificial
  Synthetic oligonucleotide
ggaacatggattccctactatacacacccctagcaaaaccaaattacaacccagtgtatt

SEQ ID NO: 99897 - DNA, 60 bp, Artificial
  Synthetic oligonucleotide
ccggcccctgaatgcggctaaccttaaacccgcagccattactcacaatccagtgagcag

SEQ ID NO: 99898 - DNA, 60 bp, Artificial
  Synthetic oligonucleotide
gcagaagaacaaggtatcacagactacatacatatgctaggggaagcctttggaagtgga

SEQ ID NO: 99899 - DNA, 60 bp, Artificial
  Synthetic oligonucleotide
attacacacaccctggtgaaaggggtagggatgttgggcaggagagagaaagtaccagct

SEQ ID NO: 99900 - DNA, 60 bp, Artificial
  Synthetic oligonucleotide
cgcagtgttagcgctggacgtgcactgtatatccctccctatgaagtgctcttgcatgag

SEQ ID NO: 99901 - DNA, 60 bp, Artificial
  Synthetic oligonucleotide
gcaggaggataggcaccgtaggagtgttgtggatgtgatgacagcaatatttcaaggacc

SEQ ID NO: 99902 - DNA, 60 bp, Artificial
  Synthetic oligonucleotide
tttgatcttccacaagaggtaggctacgggtgaaacctcttaagctagtacttctatgaa

SEQ ID NO: 99903 - DNA, 60 bp, Artificial
  Synthetic oligonucleotide
gagcccgcggttctccacaagaaggacaagaggttggaggttgactttgaggaggccctc

SEQ ID NO: 99904 - DNA, 60 bp, Artificial
  Synthetic oligonucleotide
ggagattgaggatgcctatgatctgaatgacaccacccagacctccctcgagctcacagt

SEQ ID NO: 99905 - DNA, 60 bp, Artificial
  Synthetic oligonucleotide
gccaaccacatccacccagtgacagtagcagacgggaaggccctacaacgccgctttcac

SEQ ID NO: 99906 - DNA, 60 bp, Artificial
  Synthetic oligonucleotide
tgccccaggaccccgatcattttgacggctacgcagagcaggcagttgtgatcatggacg

SEQ ID NO: 99907 - DNA, 60 bp, Artificial
  Synthetic oligonucleotide
ccgcagagacaggcgccacctcaaatgctagtgatgagagcctcattgagacccgcaacg

SEQ ID NO: 99908 - DNA, 60 bp, Artificial
  Synthetic oligonucleotide
attgcagcgctcctggtatgactccttttaactcaacccaatttgaattatccggtctaa

SEQ ID NO: 99909 - DNA, 60 bp, Artificial
  Synthetic oligonucleotide
agacccctgcccctccagcaattgcggacctcctggctagtgtcgattccgaggaagttc

SEQ ID NO: 99910 - DNA, 60 bp, Artificial
  Synthetic oligonucleotide
tagccagccgcgttacggtcaagcactcctgtttccccggtccacaaggatcgttacccg

SEQ ID NO: 99911 - DNA, 60 bp, Artificial
  Synthetic oligonucleotide
ctgggatgctccgggtcaccgtggcgctggctcaagtctaaaatttgttcgatcctcggc

SEQ ID NO: 99912 - DNA, 60 bp, Artificial
  Synthetic oligonucleotide
aaaccgagcggacatcaagaccaccggagcgttcggtcagcaatccggcgcggtgtgcgt

SEQ ID NO: 99913 - DNA, 60 bp, Artificial
  Synthetic oligonucleotide
ctctttggctttgactacactgcgtacgatgctagtctctcccccgtgtggttccaatgc

SEQ ID NO: 99914 - DNA, 60 bp, Artificial
  Synthetic oligonucleotide
tgttctgtggaacgttcatgtcgacgggcaaagtggtcgtagcatacactccgcctgggg

SEQ ID NO: 99915 - DNA, 60 bp, Artificial
  Synthetic oligonucleotide
ccgacacggatgccaccgcaattgacaaaccgactgaaccaggcgtctcagccgagcggt

SEQ ID NO: 99916 - DNA, 60 bp, Artificial
  Synthetic oligonucleotide
aaacaccgccggatcccacaccacaaggacctacgcgaccggtgggtcgagcatccatta

SEQ ID NO: 99917 - DNA, 60 bp, Artificial
  Synthetic oligonucleotide
tggcatcctccgctgccagcacggttgcatgggaatactcacagccggcgggaacaattt

SEQ ID NO: 99918 - DNA, 60 bp, Artificial
  Synthetic oligonucleotide
atgtaccacccggagccaccctcccagagaaccaagactcctttcaatggcaatcgtcct

SEQ ID NO: 99919 - DNA, 60 bp, Artificial
  Synthetic oligonucleotide
gatccaagcacagcagaccccggcatttaatagaaccaaccctggtgaggatggcgctga

SEQ ID NO: 99920 - DNA, 60 bp, Artificial
  Synthetic oligonucleotide
ctgtggcggaaccgactactttgggtgtccgtgtttccttttattctcattatggctgct

SEQ ID NO: 99921 - DNA, 59 bp, Artificial
  Synthetic oligonucleotide
ctggaaacctttccagaacaacttgttagctttgaaaatgagttggtgttgcatgggaa

SEQ ID NO: 99922 - DNA, 60 bp, Artificial
  Synthetic oligonucleotide
tttggaaacctttccagaacaacttgttagctttgaaaatgagttggtgttgcatgggaa

SEQ ID NO: 99923 - DNA, 60 bp, Artificial
  Synthetic oligonucleotide
ccctcaggagccccatgtacaactgtgctaaactctatatgtaatttgctggtttgtaca

SEQ ID NO: 99924 - DNA, 60 bp, Artificial
  Synthetic oligonucleotide
ccctcaggagccccatgtacaactgtgctaaattctatatgcaatctgctggtttgtaca

SEQ ID NO: 99925 - DNA, 60 bp, Artificial
  Synthetic oligonucleotide
cctgcgggttcagggttctttaatctgtttctctataagaacactcaattttcacgcttt

SEQ ID NO: 99926 - DNA, 60 bp, Artificial
  Synthetic oligonucleotide
ctgcaggttcagggttctttaatctgtttctctataagaacactcaattttcacgctttc

SEQ ID NO: 99927 - DNA, 60 bp, Artificial
  Synthetic oligonucleotide
ttccccaccagcgatggtggtccagcctgcgtggctgcctgcacaccctatgggtgtgaa

SEQ ID NO: 99928 - DNA, 60 bp, Artificial
  Synthetic oligonucleotide
ttgtgaacaaggtgtgaagagcctattgagctacctgagagtcctccggcccctgaatgc

SEQ ID NO: 99929 - DNA, 60 bp, Artificial
  Synthetic oligonucleotide
gtgccacacccgtgaccctaactctgccatttacatcaaccacctggcgcaagagcacga

SEQ ID NO: 99930 - DNA, 60 bp, Artificial
  Synthetic oligonucleotide
gagaatcatgaaagtggaatttactcagtgttcaatgaatgtagtctccaaaacgctttt

SEQ ID NO: 99931 - DNA, 60 bp, Artificial
  Synthetic oligonucleotide
ggaatccatgttggtggtaatggaagagatggatttgctgcaatgttgttaagatcttac

SEQ ID NO: 99932 - DNA, 60 bp, Artificial
  Synthetic oligonucleotide
ctctcgccttgacacatcttccaataggttttacaccttaaagagtataatttggtctgg

SEQ ID NO: 99933 - DNA, 60 bp, Artificial
  Synthetic oligonucleotide
agcctgtatgagaaacaagttgagagtttgagagtggcagatattaagacacaggaaaag

SEQ ID NO: 99934 - DNA, 60 bp, Artificial
  Synthetic oligonucleotide
atacaaaattggacaggtgctggggatacatgtaggtggaaatggtagagatgggttctc

SEQ ID NO: 99935 - DNA, 60 bp, Artificial
  Synthetic oligonucleotide
ctactttgggtgtccgtgtttctcttttatccttatgtttgcttatggtgacaatatatg

SEQ ID NO: 99936 - DNA, 60 bp, Artificial
  Synthetic oligonucleotide
taagatattttcccttagaacggatattgcttcacagcctctagccactactctaattgg

SEQ ID NO: 99937 - DNA, 60 bp, Artificial
  Synthetic oligonucleotide
tgacaagggtctaccacaaggctaaacatgtcaaagcgtggtgtccacggccacctaggg

SEQ ID NO: 99938 - DNA, 60 bp, Artificial
  Synthetic oligonucleotide
cgtatccgggtgtaaagacttctgcttgcgcatggctcgggacacgagtctacacatgca

SEQ ID NO: 99939 - DNA, 60 bp, Artificial
  Synthetic oligonucleotide
ccccatggactcgatgcggagtcacaacaactggagtctggtaataatcccaatctgtcc

SEQ ID NO: 99940 - DNA, 60 bp, Artificial
  Synthetic oligonucleotide
gtgtcatttaatgtggcataacggacgtgacgcatacaaaggattcgtggagaaaatacg

SEQ ID NO: 99941 - DNA, 60 bp, Artificial
  Synthetic oligonucleotide
cagtgtctttggtacagatggtctggaagcccttgatctaaataccagtgcaggatttcc

SEQ ID NO: 99942 - DNA, 60 bp, Artificial
  Synthetic oligonucleotide
ccaccaccacccgccatcactgacttacttcaagccgtcagaactcctgaagtcattaag

SEQ ID NO: 99943 - DNA, 60 bp, Artificial
  Synthetic oligonucleotide
gtcttgtgtagcacaaatcattctcttttggcaccacctacaatcacctcacttcctgct

SEQ ID NO: 99944 - DNA, 60 bp, Artificial
  Synthetic oligonucleotide
tcttctgacccgcaaaccatactagcaacacttacattaattggatgttcaggatcccca

SEQ ID NO: 99945 - DNA, 59 bp, Artificial
  Synthetic oligonucleotide
ctatgaagttgagggaggtgtcccatctgggtgttctggaaccagcatattcaatacta

SEQ ID NO: 99946 - DNA, 60 bp, Artificial
  Synthetic oligonucleotide
gaccttattcaggagaacccaaacccaaaactaagattccagaacggcgtgtggtggctc

SEQ ID NO: 99947 - DNA, 60 bp, Artificial
  Synthetic oligonucleotide
accttggttccgtgtatttcagctctcagccaagatatcggacacattacaatgcagtat

SEQ ID NO: 99948 - DNA, 60 bp, Artificial
  Synthetic oligonucleotide
caggagtgttagtgctggtcgcgcactctatatcccaccgtatgaactcttgttgcatga

SEQ ID NO: 99949 - DNA, 60 bp, Artificial
  Synthetic oligonucleotide
cgttcgatcaggtggattttccctccactagtttggtcgatgaggctaggaattccccac

SEQ ID NO: 99950 - DNA, 60 bp, Artificial
  Synthetic oligonucleotide
ctgactctcatccagtggatgcattgagtggattgactgtcagggctgtctttaggctta

SEQ ID NO: 99951 - DNA, 60 bp, Artificial
  Synthetic oligonucleotide
cactccagctgacaaaagcgacaaaggttttgttcttggtcactctattactgatgtcac

SEQ ID NO: 99952 - DNA, 60 bp, Artificial
  Synthetic oligonucleotide
agagaggttttcctccggagccgtgaatgctgctaatcccaacctccgagcgtgtgcgca

SEQ ID NO: 99953 - DNA, 60 bp, Artificial
  Synthetic oligonucleotide
cggagccgtgaatgctgctaatcccaacctccgagcgtgtgcgcacaatccagtgttgct

SEQ ID NO: 99954 - DNA, 60 bp, Artificial
  Synthetic oligonucleotide
gctgctaatcccaacctccgagcgtgtgcgcacaatccagtgttgctacgtcgtaacgcg

SEQ ID NO: 99955 - DNA, 60 bp, Artificial
  Synthetic oligonucleotide
ttacgggtgtgaagccaaatattggacaaggtgtgaagagccccgtgtgctcatcttgag

SEQ ID NO: 99956 - DNA, 60 bp, Artificial
  Synthetic oligonucleotide
gcctcgaagaccctcgaggctatcctctcctttgcacgccgtgggaccatacaggaaaag

SEQ ID NO: 99957 - DNA, 60 bp, Artificial
  Synthetic oligonucleotide
tacagccaacaccacccttaagttactattagcttacacaccacctggaataaagaagcc

SEQ ID NO: 99958 - DNA, 60 bp, Artificial
  Synthetic oligonucleotide
aaattttctagctaggatgataacaaatgatagtgacatatactcattacctcctgaccc

SEQ ID NO: 99959 - DNA, 60 bp, Artificial
  Synthetic oligonucleotide
ccatgggttagtgccagccactttagatacacaaccccagacaattattcatctgctgga

SEQ ID NO: 99960 - DNA, 60 bp, Artificial
  Synthetic oligonucleotide
tggaagagacacatacaagcagtttgaggacaagatacgcagtgttagcgctggtcgtgc

SEQ ID NO: 99961 - DNA, 60 bp, Artificial
  Synthetic oligonucleotide
tgcgtatggccagagacactgatacacacacacagattgttcctataactcaaaacccag

SEQ ID NO: 99962 - DNA, 60 bp, Artificial
  Synthetic oligonucleotide
tgatggacactttcttaaatggcctataacattacaagaggtggcacaaattaggagaaa

SEQ ID NO: 99963 - DNA, 60 bp, Artificial
  Synthetic oligonucleotide
gatgcagcagagactggacatacaagcagtatacaacctgaggataccatagaaacaaga

SEQ ID NO: 99964 - DNA, 60 bp, Artificial
  Synthetic oligonucleotide
aacaaacacaaaaggtgatgactacatacctacatgtgattgcactcaagctacctacta

SEQ ID NO: 99965 - DNA, 60 bp, Artificial
  Synthetic oligonucleotide
cacaaggaatcagacacttggttgaagaaatttactgaaatgtgcaatgcagctaggggt

SEQ ID NO: 99966 - DNA, 60 bp, Artificial
  Synthetic oligonucleotide
gggaaggtcatgttgctttcatagatttaagacatttccattgtgctgaagagcaaggta

SEQ ID NO: 99967 - DNA, 60 bp, Artificial
  Synthetic oligonucleotide
acgcacaccagaggtcattaagtactgtgagtataacaagtggataatcccagctgagtg

SEQ ID NO: 99968 - DNA, 60 bp, Artificial
  Synthetic oligonucleotide
atgctcgatgttgtccttttatctgtggcaaagcagtcactttcagggatcgcaacacct

SEQ ID NO: 99969 - DNA, 60 bp, Artificial
  Synthetic oligonucleotide
gtgttatgtagtacaaaccataacatgttagccccacccactataacttcattaccagca

SEQ ID NO: 99970 - DNA, 60 bp, Artificial
  Synthetic oligonucleotide
gaggaaggtgtctttggaatggaaggattagaggctttggatttgaacacaagtgcaggg

SEQ ID NO: 99971 - DNA, 60 bp, Artificial
  Synthetic oligonucleotide
gagaaaggaattccaactctacagtctccaacagtagaagcttgtggctactcagataga

SEQ ID NO: 99972 - DNA, 60 bp, Artificial
  Synthetic oligonucleotide
cccaggtagtaaagagccagcagttctttctagtaaagatcccagattagaagtggattt

SEQ ID NO: 99973 - DNA, 60 bp, Artificial
  Synthetic oligonucleotide
cgctgagttctctggagcaagagcgaaaccgatggcagtaggccaaggacttccggtgta

SEQ ID NO: 99974 - DNA, 60 bp, Artificial
  Synthetic oligonucleotide
cacagaccaataggtggtaactaaccaagttactaaaggtcaagcacttctgtttccccg

SEQ ID NO: 99975 - DNA, 60 bp, Artificial
  Synthetic oligonucleotide
tgttccaccaggtgctccactgcccacaaagagagatgattacacatggcaatctggtac

SEQ ID NO: 99976 - DNA, 61 bp, Artificial
  Synthetic oligonucleotide
ggtttcaagctcttaagctagttttagaaaatctaggatttgaatctggcctaatagatag

SEQ ID NO: 99977 - DNA, 60 bp, Artificial
  Synthetic oligonucleotide
ggtcgatctggttacacagttcatgtgcagtgcaatgctagcaaattccaccaaggtaca

SEQ ID NO: 99978 - DNA, 60 bp, Artificial
  Synthetic oligonucleotide
aagctaaacacgtcaaagcctggtgccctagagctcctagagcagtcccttacacacaca

SEQ ID NO: 99979 - DNA, 60 bp, Artificial
  Synthetic oligonucleotide
tacacacaccctggtgaatctggtagagatgttggacaagacagaaggagcaatgacaaa

SEQ ID NO: 99980 - DNA, 60 bp, Artificial
  Synthetic oligonucleotide
tctgggaatccatgttggtgggaatggaagggatggattttctgcaatgctactaaggtc

SEQ ID NO: 99981 - DNA, 60 bp, Artificial
  Synthetic oligonucleotide
caggccttggaatttatgacaggacaataattataccaacacatgccgacccaggtggtg

SEQ ID NO: 99982 - DNA, 60 bp, Artificial
  Synthetic oligonucleotide
ggctaaccttaaacctgcagccagtgcacataagccaatgtgtatctggtcgtaatgagt

SEQ ID NO: 99983 - DNA, 60 bp, Artificial
  Synthetic oligonucleotide
ctatggtcaacgggcctcttccaaatccagaggcgccaattcgagtggtgtctgttccag

SEQ ID NO: 99984 - DNA, 60 bp, Artificial
  Synthetic oligonucleotide
gaccaataggtggtaactaaccaagttactaaaggtcaagcacttctgtttccccggctg

SEQ ID NO: 99985 - DNA, 60 bp, Artificial
  Synthetic oligonucleotide
ggaccaataggcagtaaccacccaggttgctaaaggtcaagcacttctgtttccccggtc

SEQ ID NO: 99986 - DNA, 60 bp, Artificial
  Synthetic oligonucleotide
gcccagaaggtacccgtaggtaacaagtgacactatggatctgatctggggccagctacc

SEQ ID NO: 99987 - DNA, 60 bp, Artificial
  Synthetic oligonucleotide
tctccggaattcccggagtccctcttgggagtccatggtgaggggacttgatacctcacc

SEQ ID NO: 99988 - DNA, 60 bp, Artificial
  Synthetic oligonucleotide
actagtttggtcgatgaggctaggaactccccacgggtgaccgtgtcctagcctgcgtgg

SEQ ID NO: 99989 - DNA, 60 bp, Artificial
  Synthetic oligonucleotide
taggaactccccacgggtgaccgtgtcctagcctgcgtggcggccaacccagctcttgct

SEQ ID NO: 99990 - DNA, 60 bp, Artificial
  Synthetic oligonucleotide
taggaactccccacgggtgaccgtgtcctagcctgcgtggcggccaacccagcttttgct

SEQ ID NO: 99991 - DNA, 60 bp, Artificial
  Synthetic oligonucleotide
ttccccacgggtgaccgtgtcctagcctgcgtggcggccaacccagcttatgctgggacg

SEQ ID NO: 99992 - DNA, 60 bp, Artificial
  Synthetic oligonucleotide
acgggtgaccgtgtcctagcctgcgtggcggccaacccagcttatgctgggacgcctttt

SEQ ID NO: 99993 - DNA, 60 bp, Artificial
  Synthetic oligonucleotide
accgtgtcctagcctgcgtggcggccaacccagcttatgctgggacgcccttttaaggac

SEQ ID NO: 99994 - DNA, 60 bp, Artificial
  Synthetic oligonucleotide
ccgaatgcggctaacctaaaccccggagccttgagacacaatccagtgttagcaaggtcg

SEQ ID NO: 99995 - DNA, 60 bp, Artificial
  Synthetic oligonucleotide
gcacttctgtttccccggagcggagtatagacggccactgctgtcaaaagctcttaaccg

SEQ ID NO: 99996 - DNA, 60 bp, Artificial
  Synthetic oligonucleotide
gatcattaaaggtcaagcacttctgtttccccggtcaatgttgatatgcttcaacaaggc

SEQ ID NO: 99997 - DNA, 60 bp, Artificial
  Synthetic oligonucleotide
atcgttacccgcaaagtgcctacgcaaagcctagtagcactttagaagttgtctggctgg

SEQ ID NO: 99998 - DNA, 60 bp, Artificial
  Synthetic oligonucleotide
taaggatgcccttcaggtaccccgaggtaacacgcgacactcgggatctgagaaggggac

SEQ ID NO: 99999 - DNA, 60 bp, Artificial
  Synthetic oligonucleotide
ctaaggatgcccttcaggtaccccgaggtaacacgcgacactcgggatctgagaagggga

SEQ ID NO: 100000 - DNA, 60 bp, Artificial
  Synthetic oligonucleotide
gagcctttccagggcctctttgagattccaagctacagatcactttacctgcgttgggtg

SEQ ID NO: 100001 - DNA, 60 bp, Artificial
  Synthetic oligonucleotide
gctctcatgaacctctttgatcttccacaaggggtaggctacgggtgaaacctcttaggc

SEQ ID NO: 100002 - DNA, 60 bp, Artificial
  Synthetic oligonucleotide
ttgtcgtaacgagcaattctgtggcggaaccgactactttgggtgtccgtgtttcctttt

SEQ ID NO: 100003 - DNA, 60 bp, Artificial
  Synthetic oligonucleotide
ccctcctggtaacaggagcctctgcggccaaaagccacgtggataagatccacctttgtg

SEQ ID NO: 100004 - DNA, 52 bp, Artificial
  Synthetic oligonucleotide
cccctcctggtaacaggagcctctgcggccaaaagccacgtggataagatcc

SEQ ID NO: 100005 - DNA, 60 bp, Artificial
  Synthetic oligonucleotide
tgaacatcctctcgatcggatcgcaacgctttaccctagaagccactagggtgtacgcgg

SEQ ID NO: 100006 - DNA, 60 bp, Artificial
  Synthetic oligonucleotide
gcctgtcgtaacgcgcaagtctgtggcggaaccgactactttgggtgtccgtgtttcctt

SEQ ID NO: 100007 - DNA, 60 bp, Artificial
  Synthetic oligonucleotide
ggtgacggtggtccaggctgcgttggcggcctacctatggctaacgccatgggacgctag

SEQ ID NO: 100008 - DNA, 60 bp, Artificial
  Synthetic oligonucleotide
ggcgacggtggtccaggctgcgttggcggcctacctatggctaacgccatgggacgctag

SEQ ID NO: 100009 - DNA, 60 bp, Artificial
  Synthetic oligonucleotide
catggtgcgaagagtctattgagctagttggtagtcctccggcccctgaatgcggctaat

SEQ ID NO: 100010 - DNA, 60 bp, Artificial
  Synthetic oligonucleotide
cttatgcccacacagccatcctctagtaagtttgcaaggtgtctgatgaggcgtgggaac

SEQ ID NO: 100011 - DNA, 60 bp, Artificial
  Synthetic oligonucleotide
gccccacagggtctctagtggaattccaaaattcatggggttcccaaatggacttgactg

SEQ ID NO: 100012 - DNA, 60 bp, Artificial
  Synthetic oligonucleotide
acccattatggcaatgtgctttagaagctgtcacaatagtattagtaacacagtctacag

SEQ ID NO: 100013 - DNA, 56 bp, Artificial
  Synthetic oligonucleotide
acccattatggcaatgtgctttagaagctgtcacaatagtattagtaacacagtct

SEQ ID NO: 100014 - DNA, 60 bp, Artificial
  Synthetic oligonucleotide
ccttgacaaggaaatagaaccagagagactgcaaagtatcatggcagaatcatttggagc

SEQ ID NO: 100015 - DNA, 60 bp, Artificial
  Synthetic oligonucleotide
actggacagagaaatagaaccagagagactgcaaagtatcatggcagattcatttggagc

SEQ ID NO: 100016 - DNA, 60 bp, Artificial
  Synthetic oligonucleotide
gtgtgtatctagtcgtaatgagcaattgcgggacgggaccaactactttgggtgtccgtg

SEQ ID NO: 100017 - DNA, 60 bp, Artificial
  Synthetic oligonucleotide
gtcctccggcccctgaatgcggctaaccttaaccctggagcccagcagcataatccaatg

SEQ ID NO: 100018 - DNA, 60 bp, Artificial
  Synthetic oligonucleotide
ggctatcctctcctttgcacgccgtgggaccatacaggagaagttgatctccgtggcagg

SEQ ID NO: 100019 - DNA, 60 bp, Artificial
  Synthetic oligonucleotide
atggaactgggttttacaaacctgtgatggcctcaaagaccctcgaggccattctctcct

SEQ ID NO: 100020 - DNA, 51 bp, Artificial
  Synthetic oligonucleotide
atggaactgggttttacaaacctgtgatggcctcaaagaccctcgaggcca

SEQ ID NO: 100021 - DNA, 60 bp, Artificial
  Synthetic oligonucleotide
atgcaaaaagagttgagcctgttgcagttatgttccatgggaatccaggaacaggtaaat

SEQ ID NO: 100022 - DNA, 60 bp, Artificial
  Synthetic oligonucleotide
cctcaagcaaaactaaaagtgacatatatacaatcccttaaacaattgccactactggag

SEQ ID NO: 100023 - DNA, 60 bp, Artificial
  Synthetic oligonucleotide
acacaaagaatcagactcatggttgaagaaatttacagagatgtgtaatgctgcacgtgg

SEQ ID NO: 100024 - DNA, 57 bp, Artificial
  Synthetic oligonucleotide
tgactctaaaggatggtggtggaagcttccagatgctttaaaggacatgggcatttt

SEQ ID NO: 100025 - DNA, 60 bp, Artificial
  Synthetic oligonucleotide
ccccaccaggagtcccaaaaccagatactaggaagaaagcaatgctgggcacacatcttg

SEQ ID NO: 100026 - DNA, 60 bp, Artificial
  Synthetic oligonucleotide
ggcagaatgttggtactcattcaacacagaactcagtctcaaatggttcaagtctaaact

SEQ ID NO: 100027 - DNA, 60 bp, Artificial
  Synthetic oligonucleotide
ctgatccagtcaaagatgtactcaccaaaggagtaccaacacttcagtctccatctgttg

SEQ ID NO: 100028 - DNA, 60 bp, Artificial
  Synthetic oligonucleotide
ccatcccagttgatgtggcctctcagcctcttgctacgacattgattggtgaaatagcta

SEQ ID NO: 100029 - DNA, 60 bp, Artificial
  Synthetic oligonucleotide
aagacatagccaatgcagttgtagcatatggagtatggcccagctatctcactgcaaaag

SEQ ID NO: 100030 - DNA, 58 bp, Artificial
  Synthetic oligonucleotide
aaatttggctggtcgctcagttgcgcaatcccacgcaatagacctggcagatggggct

SEQ ID NO: 100031 - DNA, 60 bp, Artificial
  Synthetic oligonucleotide
ccttgggttagtgcaagtcacttcagattcaccacccctgacacgtactctaaagctggg

SEQ ID NO: 100032 - DNA, 60 bp, Artificial
  Synthetic oligonucleotide
cctgcagctgttgcacaagatccattgtgtatacagtcgtaatgagcaattgcgggatgg

SEQ ID NO: 100033 - DNA, 60 bp, Artificial
  Synthetic oligonucleotide
gcggcacagcaaacacgacattaaaactacttatagcttacaccccaccaggagtcccaa

SEQ ID NO: 100034 - DNA, 60 bp, Artificial
  Synthetic oligonucleotide
ccccagaacgtagagtagtaacgcagggaccagtagaagaatttggcagaagcttgataa

SEQ ID NO: 100035 - DNA, 60 bp, Artificial
  Synthetic oligonucleotide
taattattagaaataatgctgatccccagactataatagcaaccctcactcttcttggat

SEQ ID NO: 100036 - DNA, 60 bp, Artificial
  Synthetic oligonucleotide
gcccgaatttaccacaagatcttagaggaggataaaagaagacaatgcctttctaatgct

SEQ ID NO: 100037 - DNA, 60 bp, Artificial
  Synthetic oligonucleotide
gtgagaattataaagatggaaatggtagaattcagttagattgtgcactcaagccatgta

SEQ ID NO: 100038 - DNA, 60 bp, Artificial
  Synthetic oligonucleotide
gtaccatttatcccacccatggcagaccttccggataagggcaaacccttctcatccaga

SEQ ID NO: 100039 - DNA, 60 bp, Artificial
  Synthetic oligonucleotide
gtgccagctgagaataccattgaacgagacttaaatgtggcaaactcagtaataaccata

SEQ ID NO: 100040 - DNA, 60 bp, Artificial
  Synthetic oligonucleotide
gttcgtacgccagaggtcatcaagtattgtgaggataacaaatggattgtgccagctgag

SEQ ID NO: 100041 - DNA, 60 bp, Artificial
  Synthetic oligonucleotide
cagtgtccattagcccaatgtttgctgaattttctggagcaagaaatgcagtggttcaac

SEQ ID NO: 100042 - DNA, 60 bp, Artificial
  Synthetic oligonucleotide
gttccacctggagcccctataccaaagaagagagatgactatacttggcagtcaggcacc

SEQ ID NO: 100043 - DNA, 60 bp, Artificial
  Synthetic oligonucleotide
caaggagacaataatggacatgtggtgcttcaatttatgtttgttccacctggagcccct

SEQ ID NO: 100044 - DNA, 60 bp, Artificial
  Synthetic oligonucleotide
acaattatgagactagaattggaccacactgattacaatgctgaagggaaaaattttaca

SEQ ID NO: 100045 - DNA, 60 bp, Artificial
  Synthetic oligonucleotide
gcaactccgctccagttttggacgctgcagaaacaggtcatacgaaccaagtacagcctg

SEQ ID NO: 100046 - DNA, 60 bp, Artificial
  Synthetic oligonucleotide
ctgtgttttgtttctggttgcaaggatttttgcttgcgaatggctagggatacagactta

SEQ ID NO: 100047 - DNA, 60 bp, Artificial
  Synthetic oligonucleotide
gctgtcaacccaaacacaaactgctcaggaaatatttgccatcccagttgatgtggcctc

SEQ ID NO: 100048 - DNA, 60 bp, Artificial
  Synthetic oligonucleotide
gaccatgtgaaccaggagactgtggtggaaaattactatgcaagcatggtgtcattggca

SEQ ID NO: 100049 - DNA, 60 bp, Artificial
  Synthetic oligonucleotide
atacatcctacttttccaatttctgaaatacacaactcaatcagatggaccagaagcccc

SEQ ID NO: 100050 - DNA, 60 bp, Artificial
  Synthetic oligonucleotide
cgcagtgttagtgctggtcgcgcactgtatatccctccatttgaagtgctcagacatgag

SEQ ID NO: 100051 - DNA, 60 bp, Artificial
  Synthetic oligonucleotide
ggcggtggttatccaaaccatcaatgatcaagtacttctgtctccccggtaggtgtgaat

SEQ ID NO: 100052 - DNA, 60 bp, Artificial
  Synthetic oligonucleotide
ggttgttcccaccatgattacctacgggtgtagtacacttgtatcccggtacatttgtgc

SEQ ID NO: 100053 - DNA, 60 bp, Artificial
  Synthetic oligonucleotide
gtggcagggaagactagagttatagaggccagcagtatcaatgacacagtacaatttaga

SEQ ID NO: 100054 - DNA, 60 bp, Artificial
  Synthetic oligonucleotide
ggctaaactgtaatggtactttaatggggaatctacccattttcccacatcaatttatca

SEQ ID NO: 100055 - DNA, 60 bp, Artificial
  Synthetic oligonucleotide
cgggatagatggacttgaagccctggacttacataccagtgcaggatacccttacaccac

SEQ ID NO: 100056 - DNA, 60 bp, Artificial
  Synthetic oligonucleotide
ctccccggtaggtgtgaatatgctttaaccaaggcagaagctaatcctatcgttatccgc

SEQ ID NO: 100057 - DNA, 60 bp, Artificial
  Synthetic oligonucleotide
gcagtacttaggtgaagcttttggaactggatttgtagatagtgtaagagagcatgtaca

SEQ ID NO: 100058 - DNA, 60 bp, Artificial
  Synthetic oligonucleotide
ttccataacaatccaggcatagtcactggttctgcagttggatgtgaccctgacactttt

SEQ ID NO: 100059 - DNA, 60 bp, Artificial
  Synthetic oligonucleotide
gagttatgaaaatgccacgttcctgaaaagaggattccaaccagaccaaaaacattcatt

SEQ ID NO: 100060 - DNA, 60 bp, Artificial
  Synthetic oligonucleotide
tctaaccacagatgacaatcagtctccctcagcactaccatggtttcatccctctaagga

SEQ ID NO: 100061 - DNA, 60 bp, Artificial
  Synthetic oligonucleotide
ctcaacactcattcgctactcgtcggatttagtcatataccgcacaaacaccagaggtga

SEQ ID NO: 100062 - DNA, 60 bp, Artificial
  Synthetic oligonucleotide
atgaaaaccagggtctcatcaagaataagactgatgttagtgttgcaggttttaacccgg

SEQ ID NO: 100063 - DNA, 60 bp, Artificial
  Synthetic oligonucleotide
ggtgataaagaaccagccgttcttagtaagcatgatccaagactagagactgatttccac

SEQ ID NO: 100064 - DNA, 60 bp, Artificial
  Synthetic oligonucleotide
caggattaggtgtgcatgataatgttatgattatacctacacattcagaaccaggtagcc

SEQ ID NO: 100065 - DNA, 60 bp, Artificial
  Synthetic oligonucleotide
cctgagcatgaagatgattacatggagtgcaaccttgctttggtggctaatcaggaacaa

SEQ ID NO: 100066 - DNA, 60 bp, Artificial
  Synthetic oligonucleotide
ctgtggaggagtattatacaagattggtcatatcattggaatacatgtaggagggaatgg

SEQ ID NO: 100067 - DNA, 60 bp, Artificial
  Synthetic oligonucleotide
ccattttctagtattgcctcagcttattacatgttttatgatggatactcggatgacagc

SEQ ID NO: 100068 - DNA, 60 bp, Artificial
  Synthetic oligonucleotide
taaggtcacaattacagctagagtctaccacaaggccaaacatattagtgcatggggccc

SEQ ID NO: 100069 - DNA, 60 bp, Artificial
  Synthetic oligonucleotide
cagttatccacacttgatataaacccagcaccactgtcattagaagaatgtgtgttcggg

SEQ ID NO: 100070 - DNA, 60 bp, Artificial
  Synthetic oligonucleotide
caaagtggcaattagagctaatattaaaactgttggaccctcagatctttacgtgcatgt

SEQ ID NO: 100071 - DNA, 60 bp, Artificial
  Synthetic oligonucleotide
ccactgccgaaagcctttaaccgttatccgccaaccaactacgtaaaagctagtatcatc

SEQ ID NO: 100072 - DNA, 60 bp, Artificial
  Synthetic oligonucleotide
agtcctccggcccctgaatgcggctaatcctaactgcggagcaggtacccacgaaccagt

SEQ ID NO: 100073 - DNA, 60 bp, Artificial
  Synthetic oligonucleotide
ctcgttttagtaaccctacctcagtcgaattggattgggttatattgttgtaggggtaaa

SEQ ID NO: 100074 - DNA, 54 bp, Artificial
  Synthetic oligonucleotide
actggcgacagtgttctagcctgcgtggctgcctgcacaccctatgggtgtgaa

SEQ ID NO: 100075 - DNA, 60 bp, Artificial
  Synthetic oligonucleotide
aaattaagattaccactactgaggggagtagtccgactccgctccgacaatgtcgcacca

SEQ ID NO: 100076 - DNA, 60 bp, Artificial
  Synthetic oligonucleotide
ggggcagtgtgtcgtaacgggtaactctgcagcggaaccgactactttgggtgtccgtgt

SEQ ID NO: 100077 - DNA, 59 bp, Artificial
  Synthetic oligonucleotide
gaggggacttgatacctcaccgccgtttgcctaggctataggctaaatttccctttccc

SEQ ID NO: 100078 - DNA, 60 bp, Artificial
  Synthetic oligonucleotide
ggaaccgactactttgggtgtccgtgtttccttttatctctttgttggctgcttatggtg

SEQ ID NO: 100079 - DNA, 60 bp, Artificial
  Synthetic oligonucleotide
ccaagtcccaaattcacaagagtccagtctatggtgcagtggaagttaaaatgggcccag

SEQ ID NO: 100080 - DNA, 60 bp, Artificial
  Synthetic oligonucleotide
aacccaaattcacaagagtccagtctatggtgcagtggaagtcaaaatgggcccagcagt

SEQ ID NO: 100081 - DNA, 60 bp, Artificial
  Synthetic oligonucleotide
gtacatcaatactaaaacccaaattcacaagagtccagtctatggtgcagtggaagtcaa

SEQ ID NO: 100082 - DNA, 60 bp, Artificial
  Synthetic oligonucleotide
agagggcagtgtgtcgtaacgggcaactctgcagcggaaccgactactttgggtgtccgt

SEQ ID NO: 100083 - DNA, 58 bp, Artificial
  Synthetic oligonucleotide
gattggcctgtcgtaacgcgcaagtccgtggcggaaccgactactttgggtgtccgtg

SEQ ID NO: 100084 - DNA, 51 bp, Artificial
  Synthetic oligonucleotide
gcgcaagcctggttatttcccagagtctacttttatagtaggaaaattaga

SEQ ID NO: 100085 - DNA, 60 bp, Artificial
  Synthetic oligonucleotide
ctggtctgggcggttggttctctagtttgcttaaccttgggacaaagctactagctgaca

SEQ ID NO: 100086 - DNA, 60 bp, Artificial
  Synthetic oligonucleotide
ggtgtctgttccagaatcagattcgttcatgtcttcagtgccagacaattcaaccccact

SEQ ID NO: 100087 - DNA, 60 bp, Artificial
  Synthetic oligonucleotide
cgccttagcggagctggtacatcgactccaacgactggcaaccagaacatgtcaggaaac

SEQ ID NO: 100088 - DNA, 60 bp, Artificial
  Synthetic oligonucleotide
cgccttctgggatgcaggaaccccacctgccaggtgtgaagtggactaagtggatctcca

SEQ ID NO: 100089 - DNA, 60 bp, Artificial
  Synthetic oligonucleotide
ggggatgaaccactatttcaaatggatgtgtcgctcagtgcagctgaattgcatggcact

SEQ ID NO: 100090 - DNA, 60 bp, Artificial
  Synthetic oligonucleotide
tcagccaaaccagggcacgcagtgttttaccttcttacaagtgagggttggatttgtgtt

SEQ ID NO: 100091 - DNA, 60 bp, Artificial
  Synthetic oligonucleotide
tgtgccttattcttccccatctgacttcatggctgtttattctgcggatgcaacggttgt

SEQ ID NO: 100092 - DNA, 60 bp, Artificial
  Synthetic oligonucleotide
cctgaaagatgagattcgcccacttgaaaaggtgagagcaggcaaaacccgtttgattga

SEQ ID NO: 100093 - DNA, 60 bp, Artificial
  Synthetic oligonucleotide
ctggttctgctattggatgtgacccagatgtggattggactcggtttggtcttgagctgg

SEQ ID NO: 100094 - DNA, 60 bp, Artificial
  Synthetic oligonucleotide
caggtctctctccgaacggtgaacgacatcttcactctgcttaagaattcagattggttt

SEQ ID NO: 100095 - DNA, 60 bp, Artificial
  Synthetic oligonucleotide
ctgctcctttgtcccagtttgacaagcgcttggctgatggtgtaaagttggatgaagtgg

SEQ ID NO: 100096 - DNA, 60 bp, Artificial
  Synthetic oligonucleotide
ttttcctattttcaagaaaagctgcagccatacatgaagaccattccaggcaagatatca

SEQ ID NO: 100097 - DNA, 60 bp, Artificial
  Synthetic oligonucleotide
aagccatttgtggcattcccggccttgacaagatggaacaggacaccgctcccgggttgc

SEQ ID NO: 100098 - DNA, 60 bp, Artificial
  Synthetic oligonucleotide
atttggttactgattgttctgctttgggtgtttatgataactcctatttggttcccttgc

SEQ ID NO: 100099 - DNA, 59 bp, Artificial
  Synthetic oligonucleotide
catacatgactaggagagctaagtttcatcgcttggctgctgattttgctatgtttctt

SEQ ID NO: 100100 - DNA, 60 bp, Artificial
  Synthetic oligonucleotide
cccgctcgtgactctcgatcgacgcggggtcaaaaactgtctaagcagcagcagaaacgc

SEQ ID NO: 100101 - DNA, 60 bp, Artificial
  Synthetic oligonucleotide
ggtgagtggcctcattcacaatcacacggccacgcctggatttgtccactgcctggagac

SEQ ID NO: 100102 - DNA, 60 bp, Artificial
  Synthetic oligonucleotide
ggagcaccaaccaagaccactgatgcctggcagctaaaaggtggaggcaactccgtcagg

SEQ ID NO: 100103 - DNA, 60 bp, Artificial
  Synthetic oligonucleotide
ggtcaagaatggctgggatgtggttgtacaagtaaatgcctcctttgcacactccggagc

SEQ ID NO: 100104 - DNA, 55 bp, Artificial
  Synthetic oligonucleotide
atggtgtcaccaagctggcagatgcggagtgaaccttacgaagcgacacacctgt

SEQ ID NO: 100105 - DNA, 60 bp, Artificial
  Synthetic oligonucleotide
ctcatgagaaggcattaaagtggtctgagcttgaggaaccagcctacacgtaccagcagc

SEQ ID NO: 100106 - DNA, 56 bp, Artificial
  Synthetic oligonucleotide
cccctgtcattgactggtcgaaggcgctcgcaataagactggtcgttgcttggctt

SEQ ID NO: 100107 - DNA, 60 bp, Artificial
  Synthetic oligonucleotide
ctgtgcatttggttatgccctacattggacctggcccaacaacaaatttgaccctccaca

SEQ ID NO: 100108 - DNA, 60 bp, Artificial
  Synthetic oligonucleotide
tgacaagcaggtcacaaatgtgggagaggatggcgagcccggtgagacagaaccacggca

SEQ ID NO: 100109 - DNA, 60 bp, Artificial
  Synthetic oligonucleotide
gacatcagatgggactgttatgcctaatgtcttgtcttacgcagcccagacctcgcgggg

SEQ ID NO: 100110 - DNA, 60 bp, Artificial
  Synthetic oligonucleotide
gcgctcaagtgcagagcttcccggctttaagggttactgctcgtaatgagagcacatgac

SEQ ID NO: 100111 - DNA, 60 bp, Artificial
  Synthetic oligonucleotide
tgccctcggcccattccaccggctttcactcgccctgctgacaaaactaggcacaagttc

SEQ ID NO: 100112 - DNA, 60 bp, Artificial
  Synthetic oligonucleotide
cttgcagctatgatgaaggcttttgagaactttgagccggatgatatccaggtgatttgc

SEQ ID NO: 100113 - DNA, 60 bp, Artificial
  Synthetic oligonucleotide
tccacttacaattggctgcccggtgctcactttggctctatattgctgacatctgatgca

SEQ ID NO: 100114 - DNA, 60 bp, Artificial
  Synthetic oligonucleotide
gcccgcatcattggcattcattctgctggtactgggtctgtagccttttgctccctggtg

SEQ ID NO: 100115 - DNA, 60 bp, Artificial
  Synthetic oligonucleotide
cggaggtcaccttccttaagcgggcttttgttcctgacggggccttttacaaaccagtga

SEQ ID NO: 100116 - DNA, 60 bp, Artificial
  Synthetic oligonucleotide
cctgcattcatcttttacacccattactgtttcttgtccagaagctctcaagcggaggtt

SEQ ID NO: 100117 - DNA, 60 bp, Artificial
  Synthetic oligonucleotide
cagttggctggccactgcgaaccagaacagtatgagcgcctgtttgagccttttgctggg

SEQ ID NO: 100118 - DNA, 60 bp, Artificial
  Synthetic oligonucleotide
tggctcaggcaatttctcttcttttagtgggtaaacagggtagtgtgtggagttgtcccc

SEQ ID NO: 100119 - DNA, 60 bp, Artificial
  Synthetic oligonucleotide
tcaaaagcatcagccgatttgaatgcattgtcaacgtcactgggtgagctgaccggcatg

SEQ ID NO: 100120 - DNA, 60 bp, Artificial
  Synthetic oligonucleotide
gcaggaagaggcgcgccagtggttcaaggacatgcaacagcgtgctctcgctgtgaaaga

SEQ ID NO: 100121 - DNA, 60 bp, Artificial
  Synthetic oligonucleotide
cagggcaacgttgttcgtcttgatgatgatgtgagggtgtctgtcccgcgccgaaccaaa

SEQ ID NO: 100122 - DNA, 60 bp, Artificial
  Synthetic oligonucleotide
tatggaactgggttttacaaacctgtgatggcttcgaagaccctcgaggctatcctctcc

SEQ ID NO: 100123 - DNA, 60 bp, Artificial
  Synthetic oligonucleotide
ccagggcctctttgagattccaagctacagatcactttacctgcgttgggtgaacgccgt

SEQ ID NO: 100124 - DNA, 60 bp, Artificial
  Synthetic oligonucleotide
tcagggcctctttgagattccaagctacagatcactttacctgcgttgggtgaacgccgt

SEQ ID NO: 100125 - DNA, 60 bp, Artificial
  Synthetic oligonucleotide
ggggacctcgccattgaatgctggacatttctttggggccttatgttttgtttgcctctg

SEQ ID NO: 100126 - DNA, 60 bp, Artificial
  Synthetic oligonucleotide
cctgacctctctgtgcttagggcaaacaaaacttggccttaaatgaggtcctgtgagagg

SEQ ID NO: 100127 - DNA, 60 bp, Artificial
  Synthetic oligonucleotide
ttcaagaggggtctccggaattcccggagtccctcttgggagtccatggtgaggggactt

SEQ ID NO: 100128 - DNA, 60 bp, Artificial
  Synthetic oligonucleotide
gaggtcctgtgagaggggacctcgccattgaatgctggacatttctttggggccttatgt

SEQ ID NO: 100129 - DNA, 60 bp, Artificial
  Synthetic oligonucleotide
ttaaatgaggctctgtgagagggggcctcgccattgaatgctggacatttctttggggcc

SEQ ID NO: 100130 - DNA, 60 bp, Artificial
  Synthetic oligonucleotide
gccttaaatgaggtcctgtgagagggggcctcgccattgaatgctggacatttctttggg

SEQ ID NO: 100131 - DNA, 60 bp, Artificial
  Synthetic oligonucleotide
gtcatattcatcagatttagtcatataccgaacaaacactgtaggtgatgactatatacc

SEQ ID NO: 100132 - DNA, 60 bp, Artificial
  Synthetic oligonucleotide
ggtcaggttgaatgatgagaaatggacagaaatgaaggatgataaaattgtttcattggt

SEQ ID NO: 100133 - DNA, 60 bp, Artificial
  Synthetic oligonucleotide
agctagctggtagtcctccggcccctgaatgcggctaatcctaactgcggagcacatgct

SEQ ID NO: 100134 - DNA, 60 bp, Artificial
  Synthetic oligonucleotide
ccaaccacctctatcttggtgggttggttaaaaaacgtctagtgggccaaacccaggggg

SEQ ID NO: 100135 - DNA, 60 bp, Artificial
  Synthetic oligonucleotide
ctggggccagctacctctatctaggtgagttggttaaaaaacgtctagtgggccaaaccc

SEQ ID NO: 100136 - DNA, 60 bp, Artificial
  Synthetic oligonucleotide
tgaggctatcctctcctttgcacgccgtgggaccattcaggagaagttgatctcggtggc

SEQ ID NO: 100137 - DNA, 60 bp, Artificial
  Synthetic oligonucleotide
gcaagtctatggtcgtaatgagcaattgtgggatgggaccgactactttgggtgtccgtg

SEQ ID NO: 100138 - DNA, 60 bp, Artificial
  Synthetic oligonucleotide
gagataccaagctacagatcactttacctgcgttgggtgaacgccgtgtgcggtgacgca

SEQ ID NO: 100139 - DNA, 60 bp, Artificial
  Synthetic oligonucleotide
cgagataccaagctacagatcactttacctgcgttgggtgaacgccgtgtgcggtgacgc

SEQ ID NO: 100140 - DNA, 60 bp, Artificial
  Synthetic oligonucleotide
tccggcccctgaatgcggctaatcctaaccacggagcgtccaccagcaatccagctggca

SEQ ID NO: 100141 - DNA, 60 bp, Artificial
  Synthetic oligonucleotide
cttggaagtccatggtgaggggacctgatacctcaccgccgtttgcctaggctataggct

SEQ ID NO: 100142 - DNA, 60 bp, Artificial
  Synthetic oligonucleotide
ttgagctaccaaagagtcctccggcccctgaatgcggctaatcccaaccacggagcaagt

SEQ ID NO: 100143 - DNA, 60 bp, Artificial
  Synthetic oligonucleotide
catggctaaagaaatttactgaaatgtgtaatgcagcgagaggtcttgagtggataggca

SEQ ID NO: 100144 - DNA, 60 bp, Artificial
  Synthetic oligonucleotide
aaaatccggagtgtgcccgtgggccgggcactttcgctgccctcctttaaagcactgcag

SEQ ID NO: 100145 - DNA, 60 bp, Artificial
  Synthetic oligonucleotide
cactgtgggcaagaacaatacgaggagtttctggagaaaatccggagtgtgcccgtgggc

SEQ ID NO: 100146 - DNA, 60 bp, Artificial
  Synthetic oligonucleotide
gacaagatcaatatgaagagtttctggagaaaatccggagtgtgcccgtgggccgggcac

SEQ ID NO: 100147 - DNA, 60 bp, Artificial
  Synthetic oligonucleotide
gctgctaatcctaacctccgagcgtgtgcgcacaatccagtgttgctacgtcgtaacgcg

SEQ ID NO: 100148 - DNA, 60 bp, Artificial
  Synthetic oligonucleotide
cgtgtgcgcacaatccagtgttgctacgtcgtaacgcgcaagttggaggcggaacagact

SEQ ID NO: 100149 - DNA, 60 bp, Artificial
  Synthetic oligonucleotide
ggttcacccagttatgcccatgaaagatatacatgagtcaatcagatggacaaaggatcc

SEQ ID NO: 100150 - DNA, 60 bp, Artificial
  Synthetic oligonucleotide
agtgattggcctgtcgtaacgcgcaagtccgtggcggaaccgactactttgggtgtccgt

SEQ ID NO: 100151 - DNA, 60 bp, Artificial
  Synthetic oligonucleotide
ccatcactccagctgacaaaagcgacaaaggttttgttcttggtcactccattaccgatg

SEQ ID NO: 100152 - DNA, 60 bp, Artificial
  Synthetic oligonucleotide
cgggtatgatcaacagagtgtagtcataatggatgatatcatgcaaaatccaagtggtga

SEQ ID NO: 100153 - DNA, 60 bp, Artificial
  Synthetic oligonucleotide
tttgatggatacgatcagcaaagtgtagtcataatggatgatatcatgcaaaatcctggt

SEQ ID NO: 100154 - DNA, 60 bp, Artificial
  Synthetic oligonucleotide
gcgtgtcaaggactacggattcctgaaccttgctggcaggccaacacatagagttttgat

SEQ ID NO: 100155 - DNA, 60 bp, Artificial
  Synthetic oligonucleotide
gacggattggatttgttgagtgcaagcactttattgatcaactttgctgcagccaccacc

SEQ ID NO: 100156 - DNA, 60 bp, Artificial
  Synthetic oligonucleotide
gggtaagatagtgggtgtccacgtaggaggtaacggtgcccaaggttttgccgcctccct

SEQ ID NO: 100157 - DNA, 60 bp, Artificial
  Synthetic oligonucleotide
caaggttttccacaccaaccctggaaccatctccggctgtgccgttggatgcgaccctga

SEQ ID NO: 100158 - DNA, 60 bp, Artificial
  Synthetic oligonucleotide
tgcacccacccaaaccaaattagagcccagtgttttctttgatgttttccccggggtgaa

SEQ ID NO: 100159 - DNA, 60 bp, Artificial
  Synthetic oligonucleotide
tcgcgtcgtacccgtatgagattgatgccagcctcttggcagaagctggtaaaagctttg

SEQ ID NO: 100160 - DNA, 60 bp, Artificial
  Synthetic oligonucleotide
gcccactgaaccaggtgtatcagcggagcgcttttataccctccgttccaagccgtggca

SEQ ID NO: 100161 - DNA, 60 bp, Artificial
  Synthetic oligonucleotide
cacttctgtctccccggccagaaatggtcgtcacccgccctctctactacgagaagccta

SEQ ID NO: 100162 - DNA, 60 bp, Artificial
  Synthetic oligonucleotide
ggcacgctccttgtgcttgcaatcccagaacaccaaatcgccacacaagagcagcccgct

SEQ ID NO: 100163 - DNA, 60 bp, Artificial
  Synthetic oligonucleotide
aactggatgaaaaagttcactgagatgtgcaacgccttcagaggcctagactggatcgca

SEQ ID NO: 100164 - DNA, 60 bp, Artificial
  Synthetic oligonucleotide
gggattcatgtacttcaggacactcgaagacgcagcacaccaagtaaggttccgcatctg

SEQ ID NO: 100165 - DNA, 60 bp, Artificial
  Synthetic oligonucleotide
gacttgagcttggcggaagtggccctctctcctccagccttctaggtaccttagcaaagc

SEQ ID NO: 100166 - DNA, 60 bp, Artificial
  Synthetic oligonucleotide
cttccaaatttgtgctagcttctactaatgcaggccaagttactccgccaaccgtggctg

SEQ ID NO: 100167 - DNA, 59 bp, Artificial
  Synthetic oligonucleotide
gcagccgagaccacgccgcttgtccccattactgtgactatcgcaccgatggagacgga

SEQ ID NO: 100168 - DNA, 60 bp, Artificial
  Synthetic oligonucleotide
ctcggtattcgcggacacggacggaccacctgcccaattctcagtacccttcatgagctc

SEQ ID NO: 100169 - DNA, 60 bp, Artificial
  Synthetic oligonucleotide
gcccatcattgtagaaagaacgccccgctttatgccgcagaagctaagcgcgtctaccat

SEQ ID NO: 100170 - DNA, 60 bp, Artificial
  Synthetic oligonucleotide
gtgaaccgtgcgctggcagtcattcagagtgtgtctctcattgctgcagtggctgggacc

SEQ ID NO: 100171 - DNA, 60 bp, Artificial
  Synthetic oligonucleotide
gcgtctccctacttaagaagaacattaggacagtcaaaacaggtgcaggcgagtttaccg

SEQ ID NO: 100172 - DNA, 60 bp, Artificial
  Synthetic oligonucleotide
ctccatctaccttcattcaaggcgctcgagaggaaatggtacgactctttctgaattgcc

SEQ ID NO: 100173 - DNA, 60 bp, Artificial
  Synthetic oligonucleotide
ccaagcgcagaagcgtgcggttacagtgatcgcgtagcccagttgacacttggcaacagc

SEQ ID NO: 100174 - DNA, 60 bp, Artificial
  Synthetic oligonucleotide
gactgatactattgagttcgcccgcttgccattgaatattgccttgtattaccttatagc

SEQ ID NO: 100175 - DNA, 60 bp, Artificial
  Synthetic oligonucleotide
ccacgccgcttctgcagcgcagaacaaacaagacttcacccaggacccatccaagttcac

SEQ ID NO: 100176 - DNA, 60 bp, Artificial
  Synthetic oligonucleotide
aacacggttgcttgcccgcgtgtgctctcgggttcggccacttggccgttcactccaact

SEQ ID NO: 100177 - DNA, 60 bp, Artificial
  Synthetic oligonucleotide
ccaccaggatttgattaccgtgggagcaaccctcgcccttctaggttgtgaaggctctcc

SEQ ID NO: 100178 - DNA, 60 bp, Artificial
  Synthetic oligonucleotide
gaacctgtatgtgcactgattcatggctcacctggtaccggtcagtcgttggctactatg

SEQ ID NO: 100179 - DNA, 60 bp, Artificial
  Synthetic oligonucleotide
ccgacgtctactccctaccgcctgacccggatcattttgatggctaccaacaacaagccg

SEQ ID NO: 100180 - DNA, 60 bp, Artificial
  Synthetic oligonucleotide
gggagttcgtccagttgagagccaagatgtcctggtttacttacatgcgctttgacgtgg

SEQ ID NO: 100181 - DNA, 60 bp, Artificial
  Synthetic oligonucleotide
gtgagcatggtgttatgggcattcttacggttggcggtggagaccatgtcgggtttgcag

SEQ ID NO: 100182 - DNA, 60 bp, Artificial
  Synthetic oligonucleotide
atcgcgcaagggcgatgggatgagatacagcctggacaccctgattagtgagcttcggcg

SEQ ID NO: 100183 - DNA, 60 bp, Artificial
  Synthetic oligonucleotide
ccgctgagactggtgccacgtcaactgccagggatgagagcatgattgagacccgcacta

SEQ ID NO: 100184 - DNA, 60 bp, Artificial
  Synthetic oligonucleotide
agttgctggtaccacgacatccacccactcagtagccacggacagcacaccagccctgca

SEQ ID NO: 100185 - DNA, 60 bp, Artificial
  Synthetic oligonucleotide
ggcaatcttaccagcgtgatctacttgttactagagttgatgctcacgggtgtgacacca

SEQ ID NO: 100186 - DNA, 60 bp, Artificial
  Synthetic oligonucleotide
cccgaggcccatttcaatggaggatgcaatttacggtacagaggggcttgaggcacttga

SEQ ID NO: 100187 - DNA, 60 bp, Artificial
  Synthetic oligonucleotide
cccacgtgcacccagacaagcaccatacaagaagaggtacaacctggtattcagtgggga

SEQ ID NO: 100188 - DNA, 51 bp, Artificial
  Synthetic oligonucleotide
tttaaacagcggatgggtatcccaccatccgacccactgggtgtagtactc

SEQ ID NO: 100189 - DNA, 51 bp, Artificial
  Synthetic oligonucleotide
ttaaaacagcggatgggtatcccaccatccgacccacagggtgtagtgctc

SEQ ID NO: 100190 - DNA, 60 bp, Artificial
  Synthetic oligonucleotide
agggtggcttgtcgtaacgcgcaagtctgtggcggaaccgactactttgggtgtccgtgt

SEQ ID NO: 100191 - DNA, 59 bp, Artificial
  Synthetic oligonucleotide
gaggggacttgatacctcaccgccgtttgcctaggctataggctaaattttcccttttc

SEQ ID NO: 100192 - DNA, 60 bp, Artificial
  Synthetic oligonucleotide
tgaggggacttgatacctcaccgccgtttgcctaggctataggctaaattttccctttcc

SEQ ID NO: 100193 - DNA, 60 bp, Artificial
  Synthetic oligonucleotide
atttggagcatttaccaatttaccacatgtgttaatgaacttggccgagactacccaggc

SEQ ID NO: 100194 - DNA, 60 bp, Artificial
  Synthetic oligonucleotide
ggatgaacagaggaaaccagcttatggccatgctaaatattttgcagctgttcggtgtgg

SEQ ID NO: 100195 - DNA, 60 bp, Artificial
  Synthetic oligonucleotide
cacagcacccatcagcaccaacgttaccatttacaccagacttttcgaatgttgacacgt

SEQ ID NO: 100196 - DNA, 60 bp, Artificial
  Synthetic oligonucleotide
tagggcccaactgttatgcgacaacatctgagccagaaaacaaggatgtggtgcaagcaa

SEQ ID NO: 100197 - DNA, 60 bp, Artificial
  Synthetic oligonucleotide
ccctacattaccagtggccaaaccaaaaggcactttccctgtttcacagagggagttcaa

SEQ ID NO: 100198 - DNA, 60 bp, Artificial
  Synthetic oligonucleotide
gctcaaccacaggccacataacccattgtgcaggttaccagcatgatgagatcatactgc

SEQ ID NO: 100199 - DNA, 60 bp, Artificial
  Synthetic oligonucleotide
gagctgaagtgaccggttcacgcaaggacgaaccaccatcattgaaaccaaggatggagg

SEQ ID NO: 100200 - DNA, 60 bp, Artificial
  Synthetic oligonucleotide
gcccggtcagggcaaatcattcctaacacacacactttctaaacaactacaaaagacttg

SEQ ID NO: 100201 - DNA, 60 bp, Artificial
  Synthetic oligonucleotide
gcaactacacaaaccagtgattgactctgatcacgtggtctttaacgagaggtggctgat

SEQ ID NO: 100202 - DNA, 60 bp, Artificial
  Synthetic oligonucleotide
gcctgtctatccactctattagttatggatgttacatcatcttctgtgttatccccgtca

SEQ ID NO: 100203 - DNA, 60 bp, Artificial
  Synthetic oligonucleotide
gcaaaccattacaccaacagaattgggactaacctcagcacaagatgatggccctttagg

SEQ ID NO: 100204 - DNA, 60 bp, Artificial
  Synthetic oligonucleotide
ggctggtcaaacaataccaaacgtaactaaacatctaagataacatagccctatgcctgg

SEQ ID NO: 100205 - DNA, 60 bp, Artificial
  Synthetic oligonucleotide
gcccagtgtggagaagagagcagttgaatggttggaaagaaataaagagcatgtgtgcag

SEQ ID NO: 100206 - DNA, 60 bp, Artificial
  Synthetic oligonucleotide
ccacttggatgaggaagacacatggtaaacctattggcctattccagattgaagtcctaa

SEQ ID NO: 100207 - DNA, 52 bp, Artificial
  Synthetic oligonucleotide
acttagtacgacagcagcacaatcagtagcattggttggggagagggctttt

SEQ ID NO: 100208 - DNA, 60 bp, Artificial
  Synthetic oligonucleotide
ttctacacaagcaaattagttatagccaccacaaataaacctgatttttccagtacagtc

SEQ ID NO: 100209 - DNA, 60 bp, Artificial
  Synthetic oligonucleotide
cagggcttgctgttggtatcaatccgtacagagattggcacttcatgattaatgcactca

SEQ ID NO: 100210 - DNA, 60 bp, Artificial
  Synthetic oligonucleotide
ccagtggattgtttggtcaagaagtcagcatcaaaatatagggtcaataaatttcaggtc

SEQ ID NO: 100211 - DNA, 60 bp, Artificial
  Synthetic oligonucleotide
cagggaattgttactgaagtcacacccatacagcccatgtacattaacaccaaatcccaa

SEQ ID NO: 100212 - DNA, 60 bp, Artificial
  Synthetic oligonucleotide
gggactgagagcatgttgatctggatgactgagcagggtatcatcacaaaagaagttcag

SEQ ID NO: 100213 - DNA, 60 bp, Artificial
  Synthetic oligonucleotide
gacactatctgtcccctcttattccaacaagccattacggacagttagatcatccaatgc

SEQ ID NO: 100214 - DNA, 60 bp, Artificial
  Synthetic oligonucleotide
ggagacaatcaagagcattgcagatatggcgaccggtgtaactaaaaccattgatgccac

SEQ ID NO: 100215 - DNA, 60 bp, Artificial
  Synthetic oligonucleotide
gcccagaaggtacccgcaggtaacaagagacactgtggatctgatctggggccacctacc

SEQ ID NO: 100216 - DNA, 60 bp, Artificial
  Synthetic oligonucleotide
tcgtggatcttatgcccacacagccatcctctagtaagtttgcaaggtgtctgatgaggc

SEQ ID NO: 100217 - DNA, 60 bp, Artificial
  Synthetic oligonucleotide
caacacttggaagaagcagttagaggaccagaccctcgatgatttggatgatgcagtttc

SEQ ID NO: 100218 - DNA, 60 bp, Artificial
  Synthetic oligonucleotide
cagcaccaacaaatagggttaatcggaacaatactcttaactgctggccttatgtcaacc

SEQ ID NO: 100219 - DNA, 60 bp, Artificial
  Synthetic oligonucleotide
gagagtggcttgtcgtaacgcgtaagtctgtggcggaaccgactactttgggtgtccgtg

SEQ ID NO: 100220 - DNA, 60 bp, Artificial
  Synthetic oligonucleotide
gagcctattgtgctggcctggttttcctccggagccgtgaatgctgataatcctaacccc

SEQ ID NO: 100221 - DNA, 60 bp, Artificial
  Synthetic oligonucleotide
cagtgcgacgcccaaaacctttagttcttggtttgacttgatcacactcccaaactcaaa

SEQ ID NO: 100222 - DNA, 60 bp, Artificial
  Synthetic oligonucleotide
acaaacccacccaacccggcgtgtccgcagagcgcttctacaccttaccatcggtgcagt

SEQ ID NO: 100223 - DNA, 60 bp, Artificial
  Synthetic oligonucleotide
ggcacgcttcttgtcgttgccgtaccagagcacaagatccaagcacagtcgaatcccagc

SEQ ID NO: 100224 - DNA, 60 bp, Artificial
  Synthetic oligonucleotide
cgtggcagccagtcacgcatcggtcaagcacttctgtttccccggtccttacggatcgtt

SEQ ID NO: 100225 - DNA, 60 bp, Artificial
  Synthetic oligonucleotide
gggccgggcactctcgctgccatcgttcaaagctttgcagcgttcctggtatgactcctt

SEQ ID NO: 100226 - DNA, 60 bp, Artificial
  Synthetic oligonucleotide
tattaagaggttgcgctcagccacaatcccagtggtagctccgagtgatggggctcgcga

SEQ ID NO: 100227 - DNA, 60 bp, Artificial
  Synthetic oligonucleotide
cttcatggtcctgccacgtcatgcaatggcgcacggagagattatgattgatggaaagac

SEQ ID NO: 100228 - DNA, 60 bp, Artificial
  Synthetic oligonucleotide
gtcaatcgtgctttgatagtgctgcagtctgcgacccttattgcaaccatatgtggtgtc

SEQ ID NO: 100229 - DNA, 60 bp, Artificial
  Synthetic oligonucleotide
cacggcgctataatattgggaatgtcattgaagcgctctttcaggggccacccgtttaca

SEQ ID NO: 100230 - DNA, 60 bp, Artificial
  Synthetic oligonucleotide
taccttgcccaccattgtagaagaaatgcacctttgtatgccgcagaggctcgccgagtc

SEQ ID NO: 100231 - DNA, 60 bp, Artificial
  Synthetic oligonucleotide
ccgttcacccaggatgagaccatacgtatcccgtttcactggaatctacaccgacgcacc

SEQ ID NO: 100232 - DNA, 60 bp, Artificial
  Synthetic oligonucleotide
accgtgaccattgccccaatgtgcaccgagtataatggattgcgcgctgccgtcacgcag

SEQ ID NO: 100233 - DNA, 60 bp, Artificial
  Synthetic oligonucleotide
ctaacaacagacgactttcagaccccttgtatgctacctaaattccaacctactcccgtt

SEQ ID NO: 100234 - DNA, 60 bp, Artificial
  Synthetic oligonucleotide
gcagttcgtgtagatccaggggccgatggtccaatgcagtccactttacttggtgtcttc

SEQ ID NO: 100235 - DNA, 60 bp, Artificial
  Synthetic oligonucleotide
acaccacccggaggtgatcaaccagggagtagacaacaagccatgctaggcacacacgtg

SEQ ID NO: 100236 - DNA, 60 bp, Artificial
  Synthetic oligonucleotide
tgaaggaggccgcagtgccgttgaaaagcccgtccgctgaggcgtgtggttatagtgaca

SEQ ID NO: 100237 - DNA, 60 bp, Artificial
  Synthetic oligonucleotide
cttatggtgacgatgtcattgcctcgtacccatttgagattgacgccaaattgctcgcgg

SEQ ID NO: 100238 - DNA, 60 bp, Artificial
  Synthetic oligonucleotide
gagatcttttgttaaggacagacgcttcccctttctgatccatccggccatgaaaatgtc

SEQ ID NO: 100239 - DNA, 60 bp, Artificial
  Synthetic oligonucleotide
ttatgttgacaacggcaagctcgacattaagaaggcaactgagacatgtgaagattgctc

SEQ ID NO: 100240 - DNA, 60 bp, Artificial
  Synthetic oligonucleotide
ggaaaagtgatagggatccacattgggggtaatggggcacagggcttttccgctgcacta

SEQ ID NO: 100241 - DNA, 60 bp, Artificial
  Synthetic oligonucleotide
gaagggctggaggctttagaccttgggactagtgcaggatacccctatgtagctttgggg

SEQ ID NO: 100242 - DNA, 60 bp, Artificial
  Synthetic oligonucleotide
cccaggcacgctaaccggttgcgccgtaggttgtaaccctgagacattttggagtaagat

SEQ ID NO: 100243 - DNA, 60 bp, Artificial
  Synthetic oligonucleotide
ggatatgagtttgttttgtcagatggtttccaccgctccctttgttgtccctatggctgc

SEQ ID NO: 100244 - DNA, 60 bp, Artificial
  Synthetic oligonucleotide
ttatgagggcagtggggtgtacagcctcccgccagatccagaccatttcgacggctatca

SEQ ID NO: 100245 - DNA, 60 bp, Artificial
  Synthetic oligonucleotide
ccaatcccatgttacccttggagttggctttgcagaaccaggtgactgcggtggcatcct

SEQ ID NO: 100246 - DNA, 60 bp, Artificial
  Synthetic oligonucleotide
ccccactgaagcttctattttgatgtttgttgcagcccaaccaaacttctccctacgcat

SEQ ID NO: 100247 - DNA, 59 bp, Artificial
  Synthetic oligonucleotide
cgtcgtttgggattcctacgagagggacctgctcgtcacacgtgcggacgcacatggga

SEQ ID NO: 100248 - DNA, 60 bp, Artificial
  Synthetic oligonucleotide
ctagcttggagggcttctatggtcgtgccggattagtcgccatgtttactactgaagggg

SEQ ID NO: 100249 - DNA, 60 bp, Artificial
  Synthetic oligonucleotide
agtgctccagacggtcaagactcatttcagtggcaatccagttgcaacccctcggtgatc

SEQ ID NO: 100250 - DNA, 60 bp, Artificial
  Synthetic oligonucleotide
cggttcagatactgtagttgagaagattataaggaatgtcatcaagttgctgtctgccct

SEQ ID NO: 100251 - DNA, 60 bp, Artificial
  Synthetic oligonucleotide
cggcccctgaatgcggctaaccttaaccccggagccttgtgacataatccaatgtcatta

SEQ ID NO: 100252 - DNA, 60 bp, Artificial
  Synthetic oligonucleotide
gtttgggtcgtaatgagcaattccgggacgggaccgactactttgggtgtccgtgtttcc

SEQ ID NO: 100253 - DNA, 60 bp, Artificial
  Synthetic oligonucleotide
cgctacgaataccccactaaaactgggcagtgtggtggcgtcttatgctcaactggcaaa

SEQ ID NO: 100254 - DNA, 60 bp, Artificial
  Synthetic oligonucleotide
ggtgttggcccagctgaacctggggattgtggtggaatcttacgatgcatacatggacca

SEQ ID NO: 100255 - DNA, 60 bp, Artificial
  Synthetic oligonucleotide
aaccccggagccttgaggcacaatccagtgcccgcgaggtcgtaacgagaaattctggga

SEQ ID NO: 100256 - DNA, 60 bp, Artificial
  Synthetic oligonucleotide
ggctcagggaagtcactgaccacatcgattattggcagggccatagcagaaagatacaaa

SEQ ID NO: 100257 - DNA, 60 bp, Artificial
  Synthetic oligonucleotide
cctgactcccaatacccttttctcatacatccagtgatgccaatgcaggacatctacgag

SEQ ID NO: 100258 - DNA, 60 bp, Artificial
  Synthetic oligonucleotide
ccacagatgacaggcaatcacccagtgcaatgccaaactatgaaccaactccaccaatcc

SEQ ID NO: 100259 - DNA, 60 bp, Artificial
  Synthetic oligonucleotide
acatggcagagtgcctcaaaccccagtgtcttctttgaagttggcaaaacagcacggttt

SEQ ID NO: 100260 - DNA, 60 bp, Artificial
  Synthetic oligonucleotide
ctattgagctagttggtgatcctccggcccctgaatgcggctaatcctaactgcggagca

SEQ ID NO: 100261 - DNA, 60 bp, Artificial
  Synthetic oligonucleotide
ctattgagctagttagtaatcctccggcccctgaatgcggctaatcctaactgcggagca

SEQ ID NO: 100262 - DNA, 60 bp, Artificial
  Synthetic oligonucleotide
tcgaggctatcctctcctttgcacgccgtgggaccatccaggagaagttgatctccgtgg

SEQ ID NO: 100263 - DNA, 60 bp, Artificial
  Synthetic oligonucleotide
ttatagacatggtgtgaagactcgcatgtgcttggttgtgattcctccggcccctgaatg

SEQ ID NO: 100264 - DNA, 60 bp, Artificial
  Synthetic oligonucleotide
agtgggtggtgtgtcgtaacgggcaactctgcagcggaaccgactactttgggtgtccgt

SEQ ID NO: 100265 - DNA, 60 bp, Artificial
  Synthetic oligonucleotide
tgccctatgaatgatcatattagagtgtcagttgcacattactcagctcaattagccact

SEQ ID NO: 100266 - DNA, 60 bp, Artificial
  Synthetic oligonucleotide
gccagatgaatgatcacattagagttgctgttgcacattactcagctcaattagccactt

SEQ ID NO: 100267 - DNA, 58 bp, Artificial
  Synthetic oligonucleotide
tcagtcggattggattgggttgtactgttgtaggggtaaatttttctttaattcggag

SEQ ID NO: 100268 - DNA, 55 bp, Artificial
  Synthetic oligonucleotide
gtcgaattggattgggtcatactgttgtaggggtaaatttttctttaattcggag

SEQ ID NO: 100269 - DNA, 56 bp, Artificial
  Synthetic oligonucleotide
gtcgaattggattgggtcatactgttgtaggggtaaatttttctttaattcggaga

SEQ ID NO: 100270 - DNA, 60 bp, Artificial
  Synthetic oligonucleotide
gacgctagtctcctagcccaatcaggaaaagactatggactaaccatgactccagcagat

SEQ ID NO: 100271 - DNA, 60 bp, Artificial
  Synthetic oligonucleotide
gacgctagtctcctagcccaatcaggaaaagactatggactaaccatgactccagccgat

SEQ ID NO: 100272 - DNA, 60 bp, Artificial
  Synthetic oligonucleotide
gacgctagtctcctagcccaatcaggaaaagactatggactaaccatgactccagctgac

SEQ ID NO: 100273 - DNA, 60 bp, Artificial
  Synthetic oligonucleotide
ggttgacgctagtctcctagcccaatcaggaaaagactatggactaaccatgactccagc

SEQ ID NO: 100274 - DNA, 52 bp, Artificial
  Synthetic oligonucleotide
tacggaactgggttttacaaacctgtgatggcctcgaagaccctcgaggcta

SEQ ID NO: 100275 - DNA, 52 bp, Artificial
  Synthetic oligonucleotide
tatggaactgggttttacaaacctgtgatggcctcgaagaccctcgaggcta

SEQ ID NO: 100276 - DNA, 60 bp, Artificial
  Synthetic oligonucleotide
aaacaccccactggcgacagtgttctagcctgcgtggctgcctgcacaccctgtgggtgt

SEQ ID NO: 100277 - DNA, 61 bp, Artificial
  Synthetic oligonucleotide
gattgaaagtcagagaataatgaaagtggaattttctcagtgttcaatgaatgtagtctcc

SEQ ID NO: 100278 - DNA, 60 bp, Artificial
  Synthetic oligonucleotide
gcactctctgagtgcgaagccatacatttgacaaggtgtgaagagccccgtgtgctcacc

SEQ ID NO: 100279 - DNA, 60 bp, Artificial
  Synthetic oligonucleotide
aggtggtaagccgagctctccctcggccttgttctgaatgcacacatgtctaggggctaa

SEQ ID NO: 100280 - DNA, 60 bp, Artificial
  Synthetic oligonucleotide
gccgagctcttcctcggtcttgttctgaatgcacacatgtctaggggctaaggatgtcct

SEQ ID NO: 100281 - DNA, 60 bp, Artificial
  Synthetic oligonucleotide
taggggctaaggatgtcctacaggtacccgcacgtaaccttcagagagtgtggatctgag

SEQ ID NO: 100282 - DNA, 60 bp, Artificial
  Synthetic oligonucleotide
taggggctaaggatgtcctacaggtacccgcacgtaaccttcagagagtgcggatctgag

SEQ ID NO: 100283 - DNA, 60 bp, Artificial
  Synthetic oligonucleotide
tcctacaggtacccgcacgtaaccttcagagagtgtggatctgagtaggagactgtggtg

SEQ ID NO: 100284 - DNA, 55 bp, Artificial
  Synthetic oligonucleotide
ttttgagcagtcacgtgcttacaacattcctaatgtgagacaacgactgcgcaag

SEQ ID NO: 100285 - DNA, 60 bp, Artificial
  Synthetic oligonucleotide
ttcagagtatgaagctgttactggcattgagaatttggactcagtggagacgacaacgtc

SEQ ID NO: 100286 - DNA, 60 bp, Artificial
  Synthetic oligonucleotide
gctgttactggcattgagaatttggactcagtggagacgacaacgtcgcccggacttccc

SEQ ID NO: 100287 - DNA, 60 bp, Artificial
  Synthetic oligonucleotide
gctgttactggcattgagaatttggactcagtggagacaacaacgtcacctggactaccc

SEQ ID NO: 100288 - DNA, 60 bp, Artificial
  Synthetic oligonucleotide
gacttccctacacgacagcggggatcccgagagaggcgctgtttgacccagacaaaactc

SEQ ID NO: 100289 - DNA, 60 bp, Artificial
  Synthetic oligonucleotide
gagtgtggtagcgctgtgtgagttggcggtggaaccccctcgtggtgacacgagcccccg

SEQ ID NO: 100290 - DNA, 60 bp, Artificial
  Synthetic oligonucleotide
gccccacatcttgtggatcttgccgtggacatgtttctggcatgtgtttctcaagcctgc

SEQ ID NO: 100291 - DNA, 60 bp, Artificial
  Synthetic oligonucleotide
cctccgcggtgacttttcaaagcatgtgtttcagacttttctcaaagatgagctccggag

SEQ ID NO: 100292 - DNA, 60 bp, Artificial
  Synthetic oligonucleotide
cctccgtggcgacttttcaaagcatgtgtttcagacttttctcaaggatgagctccggag

SEQ ID NO: 100293 - DNA, 60 bp, Artificial
  Synthetic oligonucleotide
acccagacaaaactcaattgattggccccgccgccgagagactccaggagttcctccgtg

SEQ ID NO: 100294 - DNA, 60 bp, Artificial
  Synthetic oligonucleotide
ttgacccagacaaaactcaattgattggccccgccgccgagaggctccaggagttcctcc

SEQ ID NO: 100295 - DNA, 60 bp, Artificial
  Synthetic oligonucleotide
ccaaaagcccagtgtttacagcacctctcacatccagggaaaccccaccctggcgctcac

SEQ ID NO: 100296 - DNA, 55 bp, Artificial
  Synthetic oligonucleotide
ccccgtggccaaaagcccagtgtttacagcacctctcacatccaggacgacccca

SEQ ID NO: 100297 - DNA, 60 bp, Artificial
  Synthetic oligonucleotide
acaagagttcattcttcccagaagtttcaactttggcagacgttgtgtttctcaaacgtc

SEQ ID NO: 100298 - DNA, 60 bp, Artificial
  Synthetic oligonucleotide
ccagctgataagagttctgttttcccagaagtttcaactttggcagacgttgtgtttctc

SEQ ID NO: 100299 - DNA, 60 bp, Artificial
  Synthetic oligonucleotide
ctaaacccctattgatgtgttggtcgtttgccaatcggagggcgacaggcgcaggtcgcc

SEQ ID NO: 100300 - DNA, 60 bp, Artificial
  Synthetic oligonucleotide
aactaaacccctattgatgtgttggtcgtttgccaatcggagggcgacaggcacaggtcg

SEQ ID NO: 100301 - DNA, 60 bp, Artificial
  Synthetic oligonucleotide
acgcgaagccgggcacactgcgagagaagctgctgtcaaccacggacttggcggttcatc

SEQ ID NO: 100302 - DNA, 60 bp, Artificial
  Synthetic oligonucleotide
aaacgtcgatttaaacctgatgaagaattcccattcctgttcaaaccagtgatggatgtg

SEQ ID NO: 100303 - DNA, 60 bp, Artificial
  Synthetic oligonucleotide
gaagattactcttgatgcttggctctcagaaagaatggcacctcaatgttttgagacccg

SEQ ID NO: 100304 - DNA, 60 bp, Artificial
  Synthetic oligonucleotide
gattgcttttcttccaactaaacccctattgatgtgttggtcgtttgccaatcggagggc

SEQ ID NO: 100305 - DNA, 60 bp, Artificial
  Synthetic oligonucleotide
gaagattactcttgatgcttggctctcagaaagaatggcacctcaaagttttgagacccg

SEQ ID NO: 100306 - DNA, 60 bp, Artificial
  Synthetic oligonucleotide
cactgcgagagaagctgctgtcaaccacggacttggcggttcatcttggaccgctggagt

SEQ ID NO: 100307 - DNA, 60 bp, Artificial
  Synthetic oligonucleotide
aagccgggcacactgcgggagaagctgctgtcaaccacggacttggcggttcatcttgga

SEQ ID NO: 100308 - DNA, 60 bp, Artificial
  Synthetic oligonucleotide
ccgcaattttgacttgtgagttgttccctaccagataccccagatttacccgttacccta

SEQ ID NO: 100309 - DNA, 60 bp, Artificial
  Synthetic oligonucleotide
ctccgcaattttgacctgtgaggtgctccctaccagataccccagatttacccgttaccc

SEQ ID NO: 100310 - DNA, 60 bp, Artificial
  Synthetic oligonucleotide
gtcttttagcttaaggtgttagatgtaaggtacgtgggctttcttttggtttacttcttc

SEQ ID NO: 100311 - DNA, 60 bp, Artificial
  Synthetic oligonucleotide
gagtcttttagcttaaggtgttagatgtaaggtacgtgggctttcttttggtttacttct

SEQ ID NO: 100312 - DNA, 60 bp, Artificial
  Synthetic oligonucleotide
gtcttttagtttaaggtgttagatgtaaggtacgtgggctttcttttggtttacttcttc

SEQ ID NO: 100313 - DNA, 60 bp, Artificial
  Synthetic oligonucleotide
gacgttgtgtttctcaaacgtcgatttaaacctgatgaagaattcccattcctgttcaaa

SEQ ID NO: 100314 - DNA, 60 bp, Artificial
  Synthetic oligonucleotide
gcagacgttgtgtttctcaaacgtcaatttaaacctgatgaagaattcccattcctgttt

SEQ ID NO: 100315 - DNA, 60 bp, Artificial
  Synthetic oligonucleotide
ccaaaggctggtgttggaagttgcccgatgctcttaaggacatgggagtatttggccaga

SEQ ID NO: 100316 - DNA, 60 bp, Artificial
  Synthetic oligonucleotide
gtgggccgcgcattggcagaacattttaattcatctgtttattctttacctcctgatcca

SEQ ID NO: 100317 - DNA, 60 bp, Artificial
  Synthetic oligonucleotide
ggaccagcagaaccaggagactgtggtgggatacttagatgtatacatggccccatcgga

SEQ ID NO: 100318 - DNA, 60 bp, Artificial
  Synthetic oligonucleotide
cacacactggtctggatctcttagaatttcactcatgtacacaggaccagccctatccag

SEQ ID NO: 100319 - DNA, 60 bp, Artificial
  Synthetic oligonucleotide
ccaagagcacctagagccttgccatacgtgtctattggacgcactaactaccccagagat

SEQ ID NO: 100320 - DNA, 60 bp, Artificial
  Synthetic oligonucleotide
ctggccacggcttcacaaccagaggcgtccagttattccagcaatctaacagtccaggca

SEQ ID NO: 100321 - DNA, 60 bp, Artificial
  Synthetic oligonucleotide
gcttggcattcaggtgagaaagactacaatgatttcataaccaagatcagaacaacagac

SEQ ID NO: 100322 - DNA, 60 bp, Artificial
  Synthetic oligonucleotide
accttactctgggaatccagttcataacaaactcaaaccacccactttaaaaccagttgt

SEQ ID NO: 100323 - DNA, 60 bp, Artificial
  Synthetic oligonucleotide
ccaagcttcatcctagtgtgttttacaatgtgttccctggaagcaaacaacccgctgtgc

SEQ ID NO: 100324 - DNA, 60 bp, Artificial
  Synthetic oligonucleotide
cttcagatctaatcatttaccgaacaaacactataggtgatgattatatcccttcttgtg

SEQ ID NO: 100325 - DNA, 60 bp, Artificial
  Synthetic oligonucleotide
tcatttaccgaacaaacactataggtgatgactttatcccatcttgtgattgcactgaag

SEQ ID NO: 100326 - DNA, 60 bp, Artificial
  Synthetic oligonucleotide
gctatcctctcctttgcacgccgtgggaccatacaggagaagttgatctccgtggcaggg

SEQ ID NO: 100327 - DNA, 60 bp, Artificial
  Synthetic oligonucleotide
aaaacccgctagtcggaccccacaccgcccctgcgtcggccctcgtgcaggcattcatct

SEQ ID NO: 100328 - DNA, 56 bp, Artificial
  Synthetic oligonucleotide
gcttctccctggccctcggaatcggtgccctcaccgccatcgcagcctcggctgct

SEQ ID NO: 100329 - DNA, 58 bp, Artificial
  Synthetic oligonucleotide
cctacatctcacccactcccaacacctctagtggactccacgccccgtggacgttcta

SEQ ID NO: 100330 - DNA, 60 bp, Artificial
  Synthetic oligonucleotide
tgaactcgccgcccacctcctcttcactggctccgctcagcactacggccgcctggtcgt

SEQ ID NO: 100331 - DNA, 60 bp, Artificial
  Synthetic oligonucleotide
gcctggaaatgggcccaccgcctccttgactggatccccggtaaggccaagacagacccc

SEQ ID NO: 100332 - DNA, 60 bp, Artificial
  Synthetic oligonucleotide
tcaacgacggcgcactcgcaatgcgcaacgtcgagtggattggtgagaccgcctggaaat

SEQ ID NO: 100333 - DNA, 60 bp, Artificial
  Synthetic oligonucleotide
aacgacggcgcactcgcaatgcgcaacgtcgagtggattggtgagactgcctggaaatgg

SEQ ID NO: 100334 - DNA, 60 bp, Artificial
  Synthetic oligonucleotide
aatcatgctccactactcagactccatattggctctcggatctgagaaactccccattga

SEQ ID NO: 100335 - DNA, 60 bp, Artificial
  Synthetic oligonucleotide
ccactactcagactccatattggctctcggatctgagaaactccccattgatcacatcac

SEQ ID NO: 100336 - DNA, 60 bp, Artificial
  Synthetic oligonucleotide
tgaaacctctactgccctaggaatgccaggcaggtaccccaccttcgggtgggatctgag

SEQ ID NO: 100337 - DNA, 60 bp, Artificial
  Synthetic oligonucleotide
aacctctactgccctaggaatgccaggcaggtaccccacctccgggtgggatctgagcct

SEQ ID NO: 100338 - DNA, 60 bp, Artificial
  Synthetic oligonucleotide
tcggagtcatggctgcaacacgggtttcacgatctgtgctcgctgctgtggctcactctg

SEQ ID NO: 100339 - DNA, 60 bp, Artificial
  Synthetic oligonucleotide
gcgctcttcgacgccgcgtccacctgcggatcaacgtcacctcaaatggagtgccatttg

SEQ ID NO: 100340 - DNA, 60 bp, Artificial
  Synthetic oligonucleotide
atgggtgccctcagacgccgcgtccacctgcggatcaacgtcacctcaaacggagtccca

SEQ ID NO: 100341 - DNA, 58 bp, Artificial
  Synthetic oligonucleotide
aaggcacccactacacctccaaggtcatcgtggtcacctccaacttccacgagcctaa

SEQ ID NO: 100342 - DNA, 60 bp, Artificial
  Synthetic oligonucleotide
gctgtccccggcatctccaacaatgtcgtccatgtcgagtccggcaacggtctcaacaag

SEQ ID NO: 100343 - DNA, 60 bp, Artificial
  Synthetic oligonucleotide
accgcaaacccatcttcacttgcaccactttccttgctgtcctcggctttctctgctctg

SEQ ID NO: 100344 - DNA, 60 bp, Artificial
  Synthetic oligonucleotide
tctggaagtaccgcaaacccatcttcacttgcaccactttcctcgctgtcctcggtttcc

SEQ ID NO: 100345 - DNA, 60 bp, Artificial
  Synthetic oligonucleotide
cgccgcgtccacctgcggatcaacgtcacctcaaacggagtcccatttgaccccaccaat

SEQ ID NO: 100346 - DNA, 60 bp, Artificial
  Synthetic oligonucleotide
tgaagtccggcctggcgtcaacgtcaaccggatgtcccgcttgcacccctctcccgccta

SEQ ID NO: 100347 - DNA, 59 bp, Artificial
  Synthetic oligonucleotide
accgctgaagtccggcctggcgtcaacgtcaaccggatgtcccgcttgcacccctcccc

SEQ ID NO: 100348 - DNA, 57 bp, Artificial
  Synthetic oligonucleotide
gtggtctggtcccggaccaccgttactccattcagcttcttcggaacctgttcggag

SEQ ID NO: 100349 - DNA, 60 bp, Artificial
  Synthetic oligonucleotide
tgtcggagtcatggctgcaacacgggtttcacgatctgtgctcgctgctgtggctcactc

SEQ ID NO: 100350 - DNA, 60 bp, Artificial
  Synthetic oligonucleotide
gtggctcactccgctgctcaccgcacctaccacactgtccttgactgctatgataggctc

SEQ ID NO: 100351 - DNA, 60 bp, Artificial
  Synthetic oligonucleotide
atggctgcaacacgggtttcacgatctgtgctcgctgctgtggctcactctgctgctcac

SEQ ID NO: 100352 - DNA, 60 bp, Artificial
  Synthetic oligonucleotide
gtggctcactctgccgctcaccgcacctaccacactgtccttgactgctatgataggctt

SEQ ID NO: 100353 - DNA, 60 bp, Artificial
  Synthetic oligonucleotide
gtggctcactctgctgctcaccgcacctaccacactgtccttgactgctatgataggctt

SEQ ID NO: 100354 - DNA, 60 bp, Artificial
  Synthetic oligonucleotide
tatcgagggaatcgatgctgccgggaaggccgcctccaaggccatcacgcggaagctgga

SEQ ID NO: 100355 - DNA, 53 bp, Artificial
  Synthetic oligonucleotide
gacaaattggctctcctctctcttccaggtgcctaccaagcaaagaccccgga

SEQ ID NO: 100356 - DNA, 60 bp, Artificial
  Synthetic oligonucleotide
ctccttcgtgcgtgcttacccagactcctcctgggctgccatgtacaacacccactccat

SEQ ID NO: 100357 - DNA, 60 bp, Artificial
  Synthetic oligonucleotide
atcgacggaatcgatgctgccgggaaggccgcctccaaagcgatcacgcgaaagctggac

SEQ ID NO: 100358 - DNA, 60 bp, Artificial
  Synthetic oligonucleotide
cccttcatcaagacaccaggtctttcctccttaaggctagccccggcgtgtgaattcacg

SEQ ID NO: 100359 - DNA, 60 bp, Artificial
  Synthetic oligonucleotide
ccccttcatcaagacaccaggtctttcctccttaaggctagtcccgatgtgtgaattcac

SEQ ID NO: 100360 - DNA, 53 bp, Artificial
  Synthetic oligonucleotide
gcccctaagccatggttgtactgcactatcatcctaagacggtccttcttcgg

SEQ ID NO: 100361 - DNA, 60 bp, Artificial
  Synthetic oligonucleotide
gagttctcccaggtatacgatctggactacaagtgttttgatgctaccctcccctctgct

SEQ ID NO: 100362 - DNA, 60 bp, Artificial
  Synthetic oligonucleotide
ccaggtatacgatctggactacaagtgttttgatgctaccctcccctctgctgtcttcac

SEQ ID NO: 100363 - DNA, 60 bp, Artificial
  Synthetic oligonucleotide
gcccactcctccatggtgatataaagaccacccacacttttcgggtgagcccctaagcca

SEQ ID NO: 100364 - DNA, 60 bp, Artificial
  Synthetic oligonucleotide
gcccactcctccatggtgatataaagaccacccacttccttcgggtgagcccctaagcca

SEQ ID NO: 100365 - DNA, 60 bp, Artificial
  Synthetic oligonucleotide
ggcctggacatgggccaggcggctggatacccctggaacacccttgggcgctcccggcga

SEQ ID NO: 100366 - DNA, 60 bp, Artificial
  Synthetic oligonucleotide
cctggacatgggccaggcggctggatacccctggaacacccttgggcgctcccggcgatc

SEQ ID NO: 100367 - DNA, 60 bp, Artificial
  Synthetic oligonucleotide
tcccatccatgctatcgtcgctggccggatgctcctcggtggtctcatcgactacatgca

SEQ ID NO: 100368 - DNA, 60 bp, Artificial
  Synthetic oligonucleotide
atccacgctatcgtcgctggccggatgctcctcggtggtctcatagactacatgcagggg

SEQ ID NO: 100369 - DNA, 60 bp, Artificial
  Synthetic oligonucleotide
gtgaattcacatcgggcaactagtggtgtcactgtgcgctcccaatctcggccgcggagt

SEQ ID NO: 100370 - DNA, 60 bp, Artificial
  Synthetic oligonucleotide
aattcacgttgggcaactagtggtgtcactgtgcgctcccaatctcggccgcggagtgct

SEQ ID NO: 100371 - DNA, 60 bp, Artificial
  Synthetic oligonucleotide
aatctcggccgcggagtgctgttccccaagccaaacccctggcccttcactatgtgcctg

SEQ ID NO: 100372 - DNA, 60 bp, Artificial
  Synthetic oligonucleotide
gcggagtgctgttccccaagccaaacccctggcccttcactatgtgcctggcaagcatat

SEQ ID NO: 100373 - DNA, 60 bp, Artificial
  Synthetic oligonucleotide
ctggtaacaggtgccccagtgtgcgtaaccttcttccgtccccggacggtagtgattggt

SEQ ID NO: 100374 - DNA, 60 bp, Artificial
  Synthetic oligonucleotide
gacaggtgccccagtgtgcgtaaccttcttccgtctccggacggtagtgattggttaaga

SEQ ID NO: 100375 - DNA, 60 bp, Artificial
  Synthetic oligonucleotide
cggacggtagtgattggttaagacttggcgtaaggttcatgtgccaacgccctgtgcggg

SEQ ID NO: 100376 - DNA, 60 bp, Artificial
  Synthetic oligonucleotide
tgtaaggttcatgtgccaacgccctgtgcgggatgaaacctctactgccctaggaatgcc

SEQ ID NO: 100377 - DNA, 60 bp, Artificial
  Synthetic oligonucleotide
ttaaaacagctctggggttgttcccaccccagaggcccacgtggcggctagtactctggt

SEQ ID NO: 100378 - DNA, 60 bp, Artificial
  Synthetic oligonucleotide
gcggccagcccagcttatgctgggacgccttaagtatgacatggtgtgaagactcgcgtg

SEQ ID NO: 100379 - DNA, 60 bp, Artificial
  Synthetic oligonucleotide
aaagatacctgtaatgttagatggagattgtataatggcttttgattacacaaattatga

SEQ ID NO: 100380 - DNA, 60 bp, Artificial
  Synthetic oligonucleotide
tgaggctatcctctcctttgcacgccgtgggaccatacaggagaagttgatctccgtggc

SEQ ID NO: 100381 - DNA, 60 bp, Artificial
  Synthetic oligonucleotide
ccctcgaagctatcctctcctttgcacgccgtgggaccatacaggagaagttgatctccg

SEQ ID NO: 100382 - DNA, 56 bp, Artificial
  Synthetic oligonucleotide
taatgcgcaagtgcgggatgggaccaactactttgggtgtccgtgtttcttatttt

SEQ ID NO: 100383 - DNA, 60 bp, Artificial
  Synthetic oligonucleotide
gggagcaatgcagttcaagaccaagaatcgaattgaacctgtttgctgcctgatccacgg

SEQ ID NO: 100384 - DNA, 53 bp, Artificial
  Synthetic oligonucleotide
aaaaccattcaacgccggaggactggctctcatccagtggatgcattaagtgg

SEQ ID NO: 100385 - DNA, 60 bp, Artificial
  Synthetic oligonucleotide
attccccactggtgacagtggtccagcctgcgtggctgcctgcacacctctatgaggtgt

SEQ ID NO: 100386 - DNA, 60 bp, Artificial
  Synthetic oligonucleotide
cccagggctggacgtattttgacaccactcacactccagttcatgtcccacgcaaaacca

SEQ ID NO: 100387 - DNA, 60 bp, Artificial
  Synthetic oligonucleotide
cccagcaaggctgagcagtccgttgagcgaggatttacgtttcagcttgcacagtgggag

SEQ ID NO: 100388 - DNA, 60 bp, Artificial
  Synthetic oligonucleotide
acgctcgcaaactccctgcggaatgagcagtgtcgtggtgccggacactcccgccccgag

SEQ ID NO: 100389 - DNA, 60 bp, Artificial
  Synthetic oligonucleotide
gacagccaatactacccacacacacagcggcgacacccagttgaatccttttgtgacacc

SEQ ID NO: 100390 - DNA, 60 bp, Artificial
  Synthetic oligonucleotide
gcatgtgtttctcaagcctgcaaccgaagccgaacagccacatgaacagtttgagcgtgg

SEQ ID NO: 100391 - DNA, 60 bp, Artificial
  Synthetic oligonucleotide
gctcgaacctcggtggcatctttgcccaatcacgtgacagacactaccagagagacaggg

SEQ ID NO: 100392 - DNA, 60 bp, Artificial
  Synthetic oligonucleotide
ctccaaccacttctggcattcggtattatctcacggcttggcagtccattctccagacag

SEQ ID NO: 100393 - DNA, 60 bp, Artificial
  Synthetic oligonucleotide
gccgtatgacaggcaatttgtgtccagtgaaccttctgcgcctccaccagtatacacacc

SEQ ID NO: 100394 - DNA, 60 bp, Artificial
  Synthetic oligonucleotide
cagatgctgggctgaaatttgactttgctagagacctcacccgtcgcttccgccgcgagc

SEQ ID NO: 100395 - DNA, 60 bp, Artificial
  Synthetic oligonucleotide
gtcgcgctggtcagggaaagagtgttgcggccactgtcatcgccaaggcagtatccatag

SEQ ID NO: 100396 - DNA, 60 bp, Artificial
  Synthetic oligonucleotide
gccctgggttgatgcatcgactcgcccagcgcgttcattgcgaggagaatcaggcccttt

SEQ ID NO: 100397 - DNA, 60 bp, Artificial
  Synthetic oligonucleotide
cccgtgtgcctaattctcctcatgagcaaggaactgcttcgcgtacactcgtgcgcacta

SEQ ID NO: 100398 - DNA, 60 bp, Artificial
  Synthetic oligonucleotide
gtgcgaggtggatccaggtgtaccgctcgtagcacaaggagctagcacaggactcacagt

SEQ ID NO: 100399 - DNA, 60 bp, Artificial
  Synthetic oligonucleotide
ttggaccgctggagtacgcgaggcttttccgcccatttgtggaagttgggtactgcgtgc

SEQ ID NO: 100400 - DNA, 60 bp, Artificial
  Synthetic oligonucleotide
cactttacctgcgttgggtgaacgccgtgtgcggtgacgcataatccctcagagatcaca

SEQ ID NO: 100401 - DNA, 60 bp, Artificial
  Synthetic oligonucleotide
ctgttattacggtaactttatacgacggttttatctcccccccccccttatgtaacttag

SEQ ID NO: 100402 - DNA, 60 bp, Artificial
  Synthetic oligonucleotide
cactggatgcaccaccacctcctgctataacggatttattacggtctgttagaactccag

SEQ ID NO: 100403 - DNA, 60 bp, Artificial
  Synthetic oligonucleotide
aggcaagtacaaaatttccaaactagagatgaaatgagtattgagagtttcctaggcaga

SEQ ID NO: 100404 - DNA, 60 bp, Artificial
  Synthetic oligonucleotide
ttcagaggttactctggtgccatgcattgcagctaaagggaatgacataggccatgtagt

SEQ ID NO: 100405 - DNA, 60 bp, Artificial
  Synthetic oligonucleotide
ctctcttggcccctcctacaattacatctctgccagccatgaataggcgtttcttcttag

SEQ ID NO: 100406 - DNA, 60 bp, Artificial
  Synthetic oligonucleotide
gtggtaaagctgtaactttcaaagaccgcaacacatgtcagagttatacccttagtcaga

SEQ ID NO: 100407 - DNA, 60 bp, Artificial
  Synthetic oligonucleotide
cctaagggcagcagacgcaaacacacaagagaaaattaagttagaaatcgataccctcca

SEQ ID NO: 100408 - DNA, 60 bp, Artificial
  Synthetic oligonucleotide
gaaggggatcaaaatacatcccgttatggcaccattgctagtaatcacatggggacactg

SEQ ID NO: 100409 - DNA, 60 bp, Artificial
  Synthetic oligonucleotide
gctttcttgccaggatgataaccaatgagagtgatgtgtattctttgccacctgacccta

SEQ ID NO: 100410 - DNA, 60 bp, Artificial
  Synthetic oligonucleotide
ccggcccctgaatgcggctaaccttaaacccgcagccatggtccacaatccagtggatgt

SEQ ID NO: 100411 - DNA, 60 bp, Artificial
  Synthetic oligonucleotide
caattccactgtgctgaggaacaaggtataacagactacatccatatgcttggtgaagct

SEQ ID NO: 100412 - DNA, 60 bp, Artificial
  Synthetic oligonucleotide
ggaaatatcctggggatccatgtgggtggtaatggcagggatgggttttctgcaatgtta

SEQ ID NO: 100413 - DNA, 60 bp, Artificial
  Synthetic oligonucleotide
catgctgatcctggaaaacaagtccagataaatggaatcaatgtcaatgttagcgattca

SEQ ID NO: 100414 - DNA, 60 bp, Artificial
  Synthetic oligonucleotide
tgttcattacagggcccatactctggggaacccaagcctaagactaagatacctgaaaga

SEQ ID NO: 100415 - DNA, 60 bp, Artificial
  Synthetic oligonucleotide
ccaaggcactctaattgtggcaatgatcccagaacatcagttagctagtgcaagacatgg

SEQ ID NO: 100416 - DNA, 60 bp, Artificial
  Synthetic oligonucleotide
gggactcatcatcaaaaggttggtggtggaaactaccagatgcattgaaagacatgggca

SEQ ID NO: 100417 - DNA, 60 bp, Artificial
  Synthetic oligonucleotide
tcactgatcccgttaaagatgttcttgaaaagggaattccaactttgcagtcaccaacag

SEQ ID NO: 100418 - DNA, 60 bp, Artificial
  Synthetic oligonucleotide
gacccacaaacaatcattgctactctaaccttgattggctgttcaggatcaccatggcgt

SEQ ID NO: 100419 - DNA, 60 bp, Artificial
  Synthetic oligonucleotide
gcagcacggggattagaatggattggcaacaagatttcaaaattcatagagtggatgaag

SEQ ID NO: 100420 - DNA, 60 bp, Artificial
  Synthetic oligonucleotide
gcaccctacatttccagttcaggagatacatgaatcaatcagatggacaaagaaaccctc

SEQ ID NO: 100421 - DNA, 60 bp, Artificial
  Synthetic oligonucleotide
ccatgggttagcgctagccattttagaaacacaaccccagatacctattcacttgcaggc

SEQ ID NO: 100422 - DNA, 58 bp, Artificial
  Synthetic oligonucleotide
gtgtcagcgctggacgtgcactgtatatacctccttatgacctccttttgcatgagtg

SEQ ID NO: 100423 - DNA, 56 bp, Artificial
  Synthetic oligonucleotide
aaaacaacagcgatcgttatccgcaaggtgcctacacagagcttagtaccgcctta

SEQ ID NO: 100424 - DNA, 60 bp, Artificial
  Synthetic oligonucleotide
tctttagacaaacctatggtaacctatttgcagcatttcacaaaaatcctggcattatta

SEQ ID NO: 100425 - DNA, 60 bp, Artificial
  Synthetic oligonucleotide
gagggcacgaaagaaccagcagtattatctgagagtgacccgcgcttgaaaactgatttt

SEQ ID NO: 100426 - DNA, 60 bp, Artificial
  Synthetic oligonucleotide
cacagcccttagcaaccacattaataggagaaattgctagttactacacacactggaccg

SEQ ID NO: 100427 - DNA, 60 bp, Artificial
  Synthetic oligonucleotide
gcccaatgtttgcagaattttcaggagcaagagcaagaagccagggtattccaaccatgc

SEQ ID NO: 100428 - DNA, 60 bp, Artificial
  Synthetic oligonucleotide
ggggtatagacggtcaccactgtcaaaagcccttaaccgttacccgccaaccaactacgt

SEQ ID NO: 100429 - DNA, 60 bp, Artificial
  Synthetic oligonucleotide
gttcgatcaggtggtaaccccccactagtttggtcgatgaggctgagaactccccacggg

SEQ ID NO: 100430 - DNA, 60 bp, Artificial
  Synthetic oligonucleotide
ccctgaatgcggctaaccctaaccccggagccacgcggcataatccaatgtcgtatgggt

SEQ ID NO: 100431 - DNA, 60 bp, Artificial
  Synthetic oligonucleotide
cctcagttgactttctccctccaatggctagtttagataacaagggaatgttatttacca

SEQ ID NO: 100432 - DNA, 60 bp, Artificial
  Synthetic oligonucleotide
ccagggaccagtgtacaaggacctggaaatagatgtgtgtaacacaccaccaccagagtg

SEQ ID NO: 100433 - DNA, 60 bp, Artificial
  Synthetic oligonucleotide
gaggatgtggaggggttagaagctacactggtaattcattcaaaccacttcaccaataca

SEQ ID NO: 100434 - DNA, 60 bp, Artificial
  Synthetic oligonucleotide
gtgctccggcattgaactcacctaatgtcgaggcgtgtggatacagtgatagggtacaac

SEQ ID NO: 100435 - DNA, 60 bp, Artificial
  Synthetic oligonucleotide
gtggcaacaagattcaaagggttggtgttggaaactaccagatgcactcaaagatatggg

SEQ ID NO: 100436 - DNA, 60 bp, Artificial
  Synthetic oligonucleotide
cttggctactgcatcacaaccagataactcaaagtattccagcaacttgactgtacaggc

SEQ ID NO: 100437 - DNA, 60 bp, Artificial
  Synthetic oligonucleotide
caggagctagcatgcccgtggagccatcagatagtgttgagactagattaacctatatgc

SEQ ID NO: 100438 - DNA, 60 bp, Artificial
  Synthetic oligonucleotide
ggtggaatgccttctggttgttctgggaccagcattttcaattctatgattaacaatata

SEQ ID NO: 100439 - DNA, 60 bp, Artificial
  Synthetic oligonucleotide
agaagtgtggacaaggtacgattgggaaagagcaggttaattgaagcctccagtttgaat

SEQ ID NO: 100440 - DNA, 60 bp, Artificial
  Synthetic oligonucleotide
gactattccatggacctcgggagtgcaattcagatacacggacaaggacacttacactag

SEQ ID NO: 100441 - DNA, 60 bp, Artificial
  Synthetic oligonucleotide
gccaacgacaaccctgccaggttcgggacagtttctcaccactgatgataggcaatcccc

SEQ ID NO: 100442 - DNA, 60 bp, Artificial
  Synthetic oligonucleotide
cctgacactttctggtccgttataccatgtttgatggatggacacctgatggctttcgat

SEQ ID NO: 100443 - DNA, 60 bp, Artificial
  Synthetic oligonucleotide
gtgatcaaggtatagacctcagtacagcagaagagacaaacggccctgtaaagaacccgg

SEQ ID NO: 100444 - DNA, 60 bp, Artificial
  Synthetic oligonucleotide
gaaagacagataaccacaatgcacatttccaatcctacgcaggaaaagagaaaatacctg

SEQ ID NO: 100445 - DNA, 60 bp, Artificial
  Synthetic oligonucleotide
cccggttctggaaaatctctgactacatcaattgtagggcgcgcattggctgaacatttc

SEQ ID NO: 100446 - DNA, 60 bp, Artificial
  Synthetic oligonucleotide
agtcacggtcactgccactttggctctgttgggctgtgatggttccccttggagattctt

SEQ ID NO: 100447 - DNA, 60 bp, Artificial
  Synthetic oligonucleotide
ggtggtattttaagatgtattcatggtccaataggtttacttacagcaggtggtggaggc

SEQ ID NO: 100448 - DNA, 60 bp, Artificial
  Synthetic oligonucleotide
atcacaaacagatgcattaccagagggcttgggagaagagcttgaggaagtcattgtcga

SEQ ID NO: 100449 - DNA, 60 bp, Artificial
  Synthetic oligonucleotide
tatattggagatggcgttttcaagactacacttttaggagagattgctcagtactacaca

SEQ ID NO: 100450 - DNA, 60 bp, Artificial
  Synthetic oligonucleotide
ctagccattgtagcaacaggtgctcatggtgcagaaaccataccacattgcaactgtacc

SEQ ID NO: 100451 - DNA, 60 bp, Artificial
  Synthetic oligonucleotide
cgtgtttccaggcagtaaagaacctgcagtcctcagtgataatgatcccagacttgaagt

SEQ ID NO: 100452 - DNA, 60 bp, Artificial
  Synthetic oligonucleotide
gtccaggcatggatcccaagggcaccaagagcactaccatatgtgtcaattggacgttca

SEQ ID NO: 100453 - DNA, 60 bp, Artificial
  Synthetic oligonucleotide
gcattcaggacagaaggaatatgaacacttcattgaaaggataagatcagtgaacatcgg

SEQ ID NO: 100454 - DNA, 60 bp, Artificial
  Synthetic oligonucleotide
tctaaattggggacgcagatgtttgggacgtcaccttgcagtattaacttggctctcatg

SEQ ID NO: 100455 - DNA, 60 bp, Artificial
  Synthetic oligonucleotide
ttgtaaatattaattcctgcaggttcaggattctttaatctgtttctctataagaacact

SEQ ID NO: 100456 - DNA, 60 bp, Artificial
  Synthetic oligonucleotide
gtcctgtttggagaaagagatgatagaatatagacttaaatcatatgattggtggagaat

SEQ ID NO: 100457 - DNA, 60 bp, Artificial
  Synthetic oligonucleotide
atcacccgcaagactgaaaatgtgaagaaaatgaatagcctggttgcccagtccccacca

SEQ ID NO: 100458 - DNA, 60 bp, Artificial
  Synthetic oligonucleotide
cggccacaaacacccaatctactgttggtcgactctgtggttacggagaagcccaccacg

SEQ ID NO: 100459 - DNA, 60 bp, Artificial
  Synthetic oligonucleotide
gttgctacaacaaatttgcccaaattccgccctgttacggttgcccattaccctgctgtt

SEQ ID NO: 100460 - DNA, 60 bp, Artificial
  Synthetic oligonucleotide
cgcggcggtctttccgtctctcgacaagcgcgcgtgcaacatacagagtaacgcgaagaa

SEQ ID NO: 100461 - DNA, 60 bp, Artificial
  Synthetic oligonucleotide
tatggcctgcaaacatggatacccagatgtgtgccctatttgcacagccgttgacgctac

SEQ ID NO: 100462 - DNA, 60 bp, Artificial
  Synthetic oligonucleotide
ggaatgttggaatagttgtccctacctatagttctatgctttatagatggcttagcttat

SEQ ID NO: 100463 - DNA, 60 bp, Artificial
  Synthetic oligonucleotide
taaagcaggaaattcggccacaaacacacaatctactgttggtcgactctgtggttacgg

SEQ ID NO: 100464 - DNA, 60 bp, Artificial
  Synthetic oligonucleotide
gctgggcaaggtaagtctgtgaccagccaaattatcgcccaatccgtgtcaaagatggcc

SEQ ID NO: 100465 - DNA, 60 bp, Artificial
  Synthetic oligonucleotide
ccccgtttgctcactgcatttggggaagacagcttctgggacgcttcgcttccaaatttc

SEQ ID NO: 100466 - DNA, 60 bp, Artificial
  Synthetic oligonucleotide
gctacgaaaaccaattctctgtgattatggatgatctaggacaaaatcctgatggtgaag

SEQ ID NO: 100467 - DNA, 60 bp, Artificial
  Synthetic oligonucleotide
ctcccgactcccgaccctaacccaggttcctcggaacaggaacaccaatttactcatccc

SEQ ID NO: 100468 - DNA, 60 bp, Artificial
  Synthetic oligonucleotide
gagaagtagataagttagaatccaaattgatttatcatccccttgacgaattcgcgttgg

SEQ ID NO: 100469 - DNA, 60 bp, Artificial
  Synthetic oligonucleotide
gcgacgtggttggagatctaagtcaaccgactccgacgaaactaccatcatgtctccccg

SEQ ID NO: 100470 - DNA, 60 bp, Artificial
  Synthetic oligonucleotide
ctctatactgtggaagggtatgtgttgccccttccttcttggagaacgtgcgcggcggtc

SEQ ID NO: 100471 - DNA, 60 bp, Artificial
  Synthetic oligonucleotide
cactgaaccagtcaaagacttgatgttaaagggcgcaccagctttgaactcacccaacat

SEQ ID NO: 100472 - DNA, 60 bp, Artificial
  Synthetic oligonucleotide
aaaacaccgcacagaaccagtatgtgtcctcatacacggtacaccaggatcaggtaaatc

SEQ ID NO: 100473 - DNA, 60 bp, Artificial
  Synthetic oligonucleotide
ctacacatggcaaagtgcaactaatcccagtgtgttcttcaatgtaggaaaatctgccag

SEQ ID NO: 100474 - DNA, 60 bp, Artificial
  Synthetic oligonucleotide
agtgttgtcctcttatttgtggaaaggccttgagcttggttgacaggcacactaatgtca

SEQ ID NO: 100475 - DNA, 56 bp, Artificial
  Synthetic oligonucleotide
gcacgcctgtttcccatttgtacccttccttaatctccttcccccgtaacgttaga

SEQ ID NO: 100476 - DNA, 60 bp, Artificial
  Synthetic oligonucleotide
acttagaggtaaagacaaggtcagattgggcaaaagcagattgattgaggcatccagttt

SEQ ID NO: 100477 - DNA, 60 bp, Artificial
  Synthetic oligonucleotide
cccctcaagtggagcaaacagtgtacatgcttggctttgttagtgcatgcccagatttta

SEQ ID NO: 100478 - DNA, 60 bp, Artificial
  Synthetic oligonucleotide
actctgtcttaaggcgtaggtggcttgacttgttctaatctgtcttttgcttatatatat

SEQ ID NO: 100479 - DNA, 59 bp, Artificial
  Synthetic oligonucleotide
tgtgctctaccggcaaaatctacggcatacatgtgggaggaaatggaagacaaggtttt

SEQ ID NO: 100480 - DNA, 60 bp, Artificial
  Synthetic oligonucleotide
ccacatcttcagggaccaaatctatgtagtagagggcggtatgccatcagggtgttcagg

SEQ ID NO: 100481 - DNA, 60 bp, Artificial
  Synthetic oligonucleotide
gatgacctaatcacagtcacggccacactagcactacttggttgtgatgggtctccatgg

SEQ ID NO: 100482 - DNA, 60 bp, Artificial
  Synthetic oligonucleotide
tagttattcccacccatgcacaaccatccgatcaagtattaatcaatggattctctacta

SEQ ID NO: 100483 - DNA, 60 bp, Artificial
  Synthetic oligonucleotide
ggagctacactaccaacaacaccctcagacaatgtggaaaccagaacaactttaatgcac

SEQ ID NO: 100484 - DNA, 60 bp, Artificial
  Synthetic oligonucleotide
ccaaaccctgttagtcccattaaaaccagagaatcaatcaacacctacgggttagggccc

SEQ ID NO: 100485 - DNA, 60 bp, Artificial
  Synthetic oligonucleotide
aggaccagccctttccagtgcaaaactacttattgcttatacaccacctggaacagccgg

SEQ ID NO: 100486 - DNA, 60 bp, Artificial
  Synthetic oligonucleotide
caacaagtggtgctgctccatcaatatctatcacagtaacaattgcacccatgtacctgg

SEQ ID NO: 100487 - DNA, 60 bp, Artificial
  Synthetic oligonucleotide
gaaatccccagccatgaacgcctgaatgaggagtggcgcgagatgttcatttgaatggct

SEQ ID NO: 100488 - DNA, 60 bp, Artificial
  Synthetic oligonucleotide
ggtggccaacggtggaacacccagtgttgacattaatgtttccttggctccatgcaatgt

SEQ ID NO: 100489 - DNA, 60 bp, Artificial
  Synthetic oligonucleotide
tcacctcagtccctgttttgctttccccatcagctgattaatcctaggacaaattcatca

SEQ ID NO: 100490 - DNA, 60 bp, Artificial
  Synthetic oligonucleotide
atttcatggtggctgtattggtgtgtttgctgttcctgagtttagtgtcttctctcggcc

SEQ ID NO: 100491 - DNA, 60 bp, Artificial
  Synthetic oligonucleotide
cagtgcaacagaccctattgagaaagccaaagactcagtggataattatgcgctaccctc

SEQ ID NO: 100492 - DNA, 60 bp, Artificial
  Synthetic oligonucleotide
cctgcgggaccctgtaatacgtcagtccctacatgccacctatttgagatgtgggctatc

SEQ ID NO: 100493 - DNA, 60 bp, Artificial
  Synthetic oligonucleotide
ccagtgcttcaaatgagaaccccgtccctctgtcagttgagagcattggttcgtccaggg

SEQ ID NO: 100494 - DNA, 60 bp, Artificial
  Synthetic oligonucleotide
ggattctccacttcagccagctgagacgggatgtgacaaggcaatggcacccagtgcttc

SEQ ID NO: 100495 - DNA, 60 bp, Artificial
  Synthetic oligonucleotide
catatgagaagcacaacgggaggtttcaaactaccacagtcctgtttgtgcgtgatcgga

SEQ ID NO: 100496 - DNA, 60 bp, Artificial
  Synthetic oligonucleotide
tatgtgacaatttggcaatacactaacttggcatcccctcccaattcaccagctttggct

SEQ ID NO: 100497 - DNA, 60 bp, Artificial
  Synthetic oligonucleotide
actgcccctagccggaatgtattggctatggattactctggatttgatgcttcacatact

SEQ ID NO: 100498 - DNA, 60 bp, Artificial
  Synthetic oligonucleotide
gtggcaccatatgattttacccctgtgcgaactccttataccaagacagattttcccatg

SEQ ID NO: 100499 - DNA, 60 bp, Artificial
  Synthetic oligonucleotide
ccaggggtcctatgaggctactgcaataaaacccacaaaacctaatagacaatctctttt

SEQ ID NO: 100500 - DNA, 60 bp, Artificial
  Synthetic oligonucleotide
tggtcaggattattgaagaaatacttgcagccctaaccctgattttgtctcttatttcca

SEQ ID NO: 100501 - DNA, 60 bp, Artificial
  Synthetic oligonucleotide
ccaaggaccaaatgatgactcctggtttacaactttctacaagaaatggaacttgagagc

SEQ ID NO: 100502 - DNA, 60 bp, Artificial
  Synthetic oligonucleotide
ttcagattttgcttttaaaccaagaccactggcaccacttctgcgtcttgaaccatctga

SEQ ID NO: 100503 - DNA, 60 bp, Artificial
  Synthetic oligonucleotide
tcagagaatgggttctggagccgcttcaagaaagggcacctccaaggtccaatgcaggat

SEQ ID NO: 100504 - DNA, 60 bp, Artificial
  Synthetic oligonucleotide
ctagaacctctttgaagccaacatttgtgtgtgttgacccaaaattggaacctgcagctc

SEQ ID NO: 100505 - DNA, 60 bp, Artificial
  Synthetic oligonucleotide
gctaagactgattctcctcctgtgcctaagcctagatcctgcaagaaagagggttgctgc

SEQ ID NO: 100506 - DNA, 60 bp, Artificial
  Synthetic oligonucleotide
aaagctgtcattttgtccaagcatgtgggcgactcactgcagcttccatggggcattcga

SEQ ID NO: 100507 - DNA, 60 bp, Artificial
  Synthetic oligonucleotide
ccgggaagacccgcgtcatagatgtggcagggtttgggcatgctatagttggccggatgt

SEQ ID NO: 100508 - DNA, 60 bp, Artificial
  Synthetic oligonucleotide
gcttgcgccggactgacttgtggaacccaaagactggttcttcattggagctgatggctg

SEQ ID NO: 100509 - DNA, 60 bp, Artificial
  Synthetic oligonucleotide
taaccctcttgaaagacctgctctggcgcgagctaaagcgcaattgtcaccgggtattgc

SEQ ID NO: 100510 - DNA, 60 bp, Artificial
  Synthetic oligonucleotide
ccgggtattgcaccaatggtggcgacagggtacagaagagcaagtactcctgactgggca

SEQ ID NO: 100511 - DNA, 60 bp, Artificial
  Synthetic oligonucleotide
ggtgcagcaacagttttgtcaagacagcatttgctcaaccttcttgagggattcctggaa

SEQ ID NO: 100512 - DNA, 60 bp, Artificial
  Synthetic oligonucleotide
gagctgccgccagttacgctgccgatggccctgttggcatcctctgttatggtgatgaca

SEQ ID NO: 100513 - DNA, 60 bp, Artificial
  Synthetic oligonucleotide
ggacttgtaactggtaagtgataatccttggaagctaggtactcgttacgcaagttttgg

SEQ ID NO: 100514 - DNA, 60 bp, Artificial
  Synthetic oligonucleotide
gaattgtaggcttgttttggcctggacatcacagggctttaacgcaccaatgccaaccac

SEQ ID NO: 100515 - DNA, 60 bp, Artificial
  Synthetic oligonucleotide
ccggttggaatacaggatcagctgttggagttaatccagacttggcctggacacagatct

SEQ ID NO: 100516 - DNA, 60 bp, Artificial
  Synthetic oligonucleotide
atattgattctctctgttattctaaacaccactgggatgatgaaacctaccgccttgacg

SEQ ID NO: 100517 - DNA, 60 bp, Artificial
  Synthetic oligonucleotide
cacagctgcccctgtttatggcaagatccctgcaagtagcccatcttatatgccaggaga

SEQ ID NO: 100518 - DNA, 58 bp, Artificial
  Synthetic oligonucleotide
gacagggtcgcggctggccgtctgtactttgtatagtcagttgaaactcaccatggca

SEQ ID NO: 100519 - DNA, 60 bp, Artificial
  Synthetic oligonucleotide
ctccaagacaccttacaaagtgactgcagccgataagagtgagcagatcgactggcgtga

SEQ ID NO: 100520 - DNA, 60 bp, Artificial
  Synthetic oligonucleotide
gcgctaccctcattcacatggaaaccagcgcaaactccagtattcacatgctcagtacca

SEQ ID NO: 100521 - DNA, 60 bp, Artificial
  Synthetic oligonucleotide
gcgcggcgcacctgggcagggtaagagtgtgtgttctgagatgcttgccagaatgctttc

SEQ ID NO: 100522 - DNA, 60 bp, Artificial
  Synthetic oligonucleotide
cttgtgctcaggtcatcatccacagcgggattggctgtttctgtgtgggtgaaatttgaa

SEQ ID NO: 100523 - DNA, 60 bp, Artificial
  Synthetic oligonucleotide
gaagccatccccaagaaagcagagagcacgatgaaggactctcatctgccatgactgtga

SEQ ID NO: 100524 - DNA, 60 bp, Artificial
  Synthetic oligonucleotide
tgagaaaatgtgctgcccatgttaacccaagattgatgggcatgtttcctgaatttgacc

SEQ ID NO: 100525 - DNA, 60 bp, Artificial
  Synthetic oligonucleotide
ctgaagttgagtatgatttatggtaccctaatcctttggaccccgcctcactggtttgtg

SEQ ID NO: 100526 - DNA, 60 bp, Artificial
  Synthetic oligonucleotide
cctacaccaagcccgatgggactctagatctcgtccgagccctccaagcaactggtaagg

SEQ ID NO: 100527 - DNA, 60 bp, Artificial
  Synthetic oligonucleotide
agctgccctaagtttgatgtgacatcagttgccgatgagggtacatcaggtggcccggca

SEQ ID NO: 100528 - DNA, 60 bp, Artificial
  Synthetic oligonucleotide
gattgccaacactaacttgccttcttttaaccccattactgtgtctgatccagctgctat

SEQ ID NO: 100529 - DNA, 60 bp, Artificial
  Synthetic oligonucleotide
tactccaactcatacactgacgcagttgatctatctggagcaatgtcttcgcaggaatca

SEQ ID NO: 100530 - DNA, 60 bp, Artificial
  Synthetic oligonucleotide
ccggtgaggatttccggctgttctgccagctggtatccactactgaatgtattgtgccca

SEQ ID NO: 100531 - DNA, 60 bp, Artificial
  Synthetic oligonucleotide
gtgacagcccatggctactgtggctctgtcatggtcgcagatgctggagtctggaaaggc

SEQ ID NO: 100532 - DNA, 60 bp, Artificial
  Synthetic oligonucleotide
ctgctcacctgccatatgctcttgttgcacaggaaacaccattcaaggcccttatgtcca

SEQ ID NO: 100533 - DNA, 60 bp, Artificial
  Synthetic oligonucleotide
tggcccggcagtctcacggtttgtgacccttagggcccaatcgtggtcgacatctcaaga

SEQ ID NO: 100534 - DNA, 60 bp, Artificial
  Synthetic oligonucleotide
ccagttcactgttggacgacaataccgtgacatcacaagcaattttataatcagtctgcc

SEQ ID NO: 100535 - DNA, 60 bp, Artificial
  Synthetic oligonucleotide
cgactggcgtgacatcacacagtgcacgttccttaaacggggatttgtgctggatggtag

SEQ ID NO: 100536 - DNA, 60 bp, Artificial
  Synthetic oligonucleotide
attttgtactccgactgcgtcgcattcaagcatggcagacacaccttgtctttcctagaa

SEQ ID NO: 100537 - DNA, 60 bp, Artificial
  Synthetic oligonucleotide
ggacatggtgcgaagagtctattgagctagttagtagtcctccggcccctgaatgcggct

SEQ ID NO: 100538 - DNA, 60 bp, Artificial
  Synthetic oligonucleotide
agtaaccctacctcagtcgaattggattgggttatactgttgtaggggtaaatttttctt

SEQ ID NO: 100539 - DNA, 56 bp, Artificial
  Synthetic oligonucleotide
agtaaccctacctcagtcgaattggattgggttatactgttgtaggggtaaatttt

SEQ ID NO: 100540 - DNA, 60 bp, Artificial
  Synthetic oligonucleotide
ctatgaagagatgctttggatagggtaacagcggcggatattggtgagttgttaagacaa

SEQ ID NO: 100541 - DNA, 60 bp, Artificial
  Synthetic oligonucleotide
acttctatgaagagatgctttggatagggtaacagcggcggatattggtgagttgtatga

SEQ ID NO: 100542 - DNA, 60 bp, Artificial
  Synthetic oligonucleotide
ctagtacttctatgaagagatgctttggatagggtaacagcggcggatattggtgagttg

SEQ ID NO: 100543 - DNA, 60 bp, Artificial
  Synthetic oligonucleotide
ggctaatacttctatgaagagatgctttggatagggtaacagcggcggatattggtgagt

SEQ ID NO: 100544 - DNA, 60 bp, Artificial
  Synthetic oligonucleotide
tgaggctatcctctcctttgcacgccgtgggaccatacaggagaagctgatctccgtggc

SEQ ID NO: 100545 - DNA, 60 bp, Artificial
  Synthetic oligonucleotide
gggcagcctgtcgtaatgggcaactctgcagcggaaccgactactttgggtgtccgtgtt

SEQ ID NO: 100546 - DNA, 60 bp, Artificial
  Synthetic oligonucleotide
ctgcagcggaaccgactactttgggtgtccgtgtttccttttattctcatactggctgct

SEQ ID NO: 100547 - DNA, 58 bp, Artificial
  Synthetic oligonucleotide
ttttagtaaccctacctcagtcgaattggattgggttatactgttgtaggggtaaatt

SEQ ID NO: 100548 - DNA, 60 bp, Artificial
  Synthetic oligonucleotide
tgtcgtaatgggtaactccgcagcggaaccgactactttgggtgtccgtgtttcctttta

SEQ ID NO: 100549 - DNA, 60 bp, Artificial
  Synthetic oligonucleotide
ccagtgtgtactcactcccaccagacccagatcacttcgatgggtacaaacagcaagcgg

SEQ ID NO: 100550 - DNA, 60 bp, Artificial
  Synthetic oligonucleotide
ttcttcctccactcttgacttcaccattcctttcatctcccaatcctactggaaaatcac

SEQ ID NO: 100551 - DNA, 60 bp, Artificial
  Synthetic oligonucleotide
gcccttaaggtaggaactgaccttgtgctgtgatctcggtgcggaagtgctactgcgtag

SEQ ID NO: 100552 - DNA, 60 bp, Artificial
  Synthetic oligonucleotide
ccgactcccatgatgaaatactcagacactactctgaatccatagccgcgctcggttcag

SEQ ID NO: 100553 - DNA, 60 bp, Artificial
  Synthetic oligonucleotide
gaccttctaaactccactgctaacctctctcttgctgcttctgacatacgtgaggcttcc

SEQ ID NO: 100554 - DNA, 60 bp, Artificial
  Synthetic oligonucleotide
ctctcggaatcggggcactggcgatcggggctggtgttatggccgttcaaactgccaaag

SEQ ID NO: 100555 - DNA, 60 bp, Artificial
  Synthetic oligonucleotide
ccgtcgcgatggtgggcagcccttgggactattctgcttccaacaactgcacccactttg

SEQ ID NO: 100556 - DNA, 60 bp, Artificial
  Synthetic oligonucleotide
ccctgtctctgctctcgcgtttacattgttcgcgcacagcgcatgacctacacccactgg

SEQ ID NO: 100557 - DNA, 60 bp, Artificial
  Synthetic oligonucleotide
gcgatccctgtccacttcactctggtgttcttgaccccaaacccagataccaaaagcccc

SEQ ID NO: 100558 - DNA, 60 bp, Artificial
  Synthetic oligonucleotide
cgtcgtgactcccgccaataaaggctctgactttcctgattcttctaccctctacgacgt

SEQ ID NO: 100559 - DNA, 60 bp, Artificial
  Synthetic oligonucleotide
ggtagtcagacttacgagatgatcggcggcaatccctctggatgtgtcggcacctccatc

SEQ ID NO: 100560 - DNA, 60 bp, Artificial
  Synthetic oligonucleotide
gtgcgcaacagtatgttcacggtcttccgtgttcaccacattcggaacactgctttcgtg

SEQ ID NO: 100561 - DNA, 60 bp, Artificial
  Synthetic oligonucleotide
caagtgtatgacttggactacaagtgttttgatgccaccctcccttcctgcgcattcaga

SEQ ID NO: 100562 - DNA, 60 bp, Artificial
  Synthetic oligonucleotide
cttgtcatggacccctcaaacttcaagctcttctccatctcccaccgcactgctaagcgc

SEQ ID NO: 100563 - DNA, 60 bp, Artificial
  Synthetic oligonucleotide
aaccaggccctccgcaactaccaacttgctctcacgcagaaccggatggctgatgcaggt

SEQ ID NO: 100564 - DNA, 60 bp, Artificial
  Synthetic oligonucleotide
cactctggacgtcgaatctgttgtccacgaacccgtcgcatatggttacaagacacccag

SEQ ID NO: 100565 - DNA, 60 bp, Artificial
  Synthetic oligonucleotide
cgcatctgcattgtccctacccacatcgttccagacaacactatccagatccaactcggg

SEQ ID NO: 100566 - DNA, 60 bp, Artificial
  Synthetic oligonucleotide
ctggcactgggaaatccttgcttggctccctccttgcctctgtcctcgctcagaagctct

SEQ ID NO: 100567 - DNA, 60 bp, Artificial
  Synthetic oligonucleotide
ttcgggcatgcctcaacttggtaagaaagacgccaaggcaaagggcccaaaacccgcccc

SEQ ID NO: 100568 - DNA, 60 bp, Artificial
  Synthetic oligonucleotide
tcccaaagtcaccgccggcctgactcgtgtggttgaggcagctccagtgcacgccatcgt

SEQ ID NO: 100569 - DNA, 60 bp, Artificial
  Synthetic oligonucleotide
ccctaacctggtctcttctgctccttttatcgtgcccatggccaacctcgaggctaaggg

SEQ ID NO: 100570 - DNA, 60 bp, Artificial
  Synthetic oligonucleotide
ccacgcaccactttccagtactctgacaatccctccactcctgagaccaacctgcgccgt

SEQ ID NO: 100571 - DNA, 60 bp, Artificial
  Synthetic oligonucleotide
gaaggagatgactgtgatctggacccctacctcccgccagtatcgtgacctccgtcgctt

SEQ ID NO: 100572 - DNA, 60 bp, Artificial
  Synthetic oligonucleotide
gctggtcagaatggaatgcagtacaacaccctagccaaccccacctaccccttttccgcc

SEQ ID NO: 100573 - DNA, 60 bp, Artificial
  Synthetic oligonucleotide
tccgtcgctttctgggctcccacccctaccctactggccacctcatctctgctttccaag

SEQ ID NO: 100574 - DNA, 60 bp, Artificial
  Synthetic oligonucleotide
ccggatgaccagcgtccattctacatccaccctgtgatggacccggacacctatgagcag

SEQ ID NO: 100575 - DNA, 60 bp, Artificial
  Synthetic oligonucleotide
ccttcttatctgcttccaactccttttctgtccggggcatgtcgatgccgaccctggccc

SEQ ID NO: 100576 - DNA, 60 bp, Artificial
  Synthetic oligonucleotide
caaccccgactgcccttccgaacctggtccgtcaggtgaccgcacatggctcctggacac

SEQ ID NO: 100577 - DNA, 60 bp, Artificial
  Synthetic oligonucleotide
ccgtggtttcgttcctcgcaacccgcccaaacttactgcctactcccaacccaacatggt

SEQ ID NO: 100578 - DNA, 60 bp, Artificial
  Synthetic oligonucleotide
tcacctacttccgcggcgatccccgggttgccttcaccatctccaacccggcagcctaca

SEQ ID NO: 100579 - DNA, 60 bp, Artificial
  Synthetic oligonucleotide
gacacagtctgcctgtccttcccctacctttcagttctttctgctattcccacttcctac

SEQ ID NO: 100580 - DNA, 60 bp, Artificial
  Synthetic oligonucleotide
gcctcaaggcgtgcgggacttaaaggaaggtgtccaggctgttcgtaacactgaatggct

SEQ ID NO: 100581 - DNA, 60 bp, Artificial
  Synthetic oligonucleotide
cctgctgggatcaagctccttggtttccatgtggccggaatcgtgggctctactggcttc

SEQ ID NO: 100582 - DNA, 60 bp, Artificial
  Synthetic oligonucleotide
gagcggcataaaactcgaacttctggcacgttccaccaccccttctcctatcccaacccc

SEQ ID NO: 100583 - DNA, 60 bp, Artificial
  Synthetic oligonucleotide
ccatccgggcgtgaatgtgaacaggaaatcacagcttgggcactctcctgcctatggcgc

SEQ ID NO: 100584 - DNA, 60 bp, Artificial
  Synthetic oligonucleotide
aacccgcccctactcaccttactcttgagcgtgcgattgcatcaaacgctcctctttctt

SEQ ID NO: 100585 - DNA, 60 bp, Artificial
  Synthetic oligonucleotide
cggcgcatgttcgcgtcgtcgtaagtctggattcccaaggcccactcggttcaacttcgg

SEQ ID NO: 100586 - DNA, 60 bp, Artificial
  Synthetic oligonucleotide
ttcccactctcatccgaacgctgactcaggaagaagcaatcaatggcactccaaacctgg

SEQ ID NO: 100587 - DNA, 60 bp, Artificial
  Synthetic oligonucleotide
caaacatgctccaggattttgcccgaaacttccgtggacgcgtggatgatgttgtcggct

SEQ ID NO: 100588 - DNA, 60 bp, Artificial
  Synthetic oligonucleotide
cgacccggtccctctcccaatctcattgccctcaacccatcttctacccagcacggtaac

SEQ ID NO: 100589 - DNA, 60 bp, Artificial
  Synthetic oligonucleotide
acctttgtctacccctacaccatcctcaacctctaccagtctaacaccgcaacattggag

SEQ ID NO: 100590 - DNA, 60 bp, Artificial
  Synthetic oligonucleotide
tggtggtgaacggtactcagttccacgctggtgcccttctcatatacgccgtcccggaac

SEQ ID NO: 100591 - DNA, 60 bp, Artificial
  Synthetic oligonucleotide
tcacctctctctgctaccttgccttccactctggcccgaagacctacgggcgctggtgcg

SEQ ID NO: 100592 - DNA, 60 bp, Artificial
  Synthetic oligonucleotide
ctatccctaagaccactctctccgtggcattttcctctcagtgtcctgctccctcacggg

SEQ ID NO: 100593 - DNA, 60 bp, Artificial
  Synthetic oligonucleotide
ccaataccaccacctgtgtgcactcgccgtggactttctacattgcgatcctcaccccct

SEQ ID NO: 100594 - DNA, 60 bp, Artificial
  Synthetic oligonucleotide
cttcgaccaactggctcttgctctgctccccggttctgctcaggtgaaggactcttccca

SEQ ID NO: 100595 - DNA, 59 bp, Artificial
  Synthetic oligonucleotide
gttcgacgctgatgatgccctccgtccccttgaccttccttctaaataccttacctctc

SEQ ID NO: 100596 - DNA, 59 bp, Artificial
  Synthetic oligonucleotide
atactcaggacactcgccttgctcttgtccccgtttcacccgcttggctctctgcatct

SEQ ID NO: 100597 - DNA, 60 bp, Artificial
  Synthetic oligonucleotide
ccaaccaacgggccgctcgatccatgggcgcgcttgaacgcagactccacctccggatct

SEQ ID NO: 100598 - DNA, 60 bp, Artificial
  Synthetic oligonucleotide
ctccccaagcccactggcaacatcatctcccaaggccaaagtcagaccaacatttacggt

SEQ ID NO: 100599 - DNA, 60 bp, Artificial
  Synthetic oligonucleotide
cgatcgttgctaggttggatcgggcctctggtgttagctcccgccttgctgctctcatca

SEQ ID NO: 100600 - DNA, 60 bp, Artificial
  Synthetic oligonucleotide
ggcttggaccttggctcagcgattggcactgaccctgatacagattggactgctttcgcc

SEQ ID NO: 100601 - DNA, 60 bp, Artificial
  Synthetic oligonucleotide
ggggacgccaactgttaggacgctttgcatctagatttcaaacaaaccccggcttggacc

SEQ ID NO: 100602 - DNA, 60 bp, Artificial
  Synthetic oligonucleotide
aagcttttgaggaaatttcaggaaaaccacaattggattgtttcaatactgattgcaggc

SEQ ID NO: 100603 - DNA, 60 bp, Artificial
  Synthetic oligonucleotide
gagcaattggaattgaagcagactgtactgaattcaccagagctgtaaacttgatcaccg

SEQ ID NO: 100604 - DNA, 60 bp, Artificial
  Synthetic oligonucleotide
gctccagaatttgacacttcctcctactctgcagtcgacgaccctattggagaagagccc

SEQ ID NO: 100605 - DNA, 60 bp, Artificial
  Synthetic oligonucleotide
gtgacagactcaaggaaaacgagtttggtttagatgagcaacatagatggttaagctttc

SEQ ID NO: 100606 - DNA, 60 bp, Artificial
  Synthetic oligonucleotide
ccaggtatggacccaatggaaaaggacacatcgcccggcttgccttacacccaacaaggc

SEQ ID NO: 100607 - DNA, 60 bp, Artificial
  Synthetic oligonucleotide
ctgcgcctccattttggccatgagaaatggtagaaaagcatacacagattgtgccagtgc

SEQ ID NO: 100608 - DNA, 60 bp, Artificial
  Synthetic oligonucleotide
ccccaaccaagtatacccctcaaggtgtggacaacgctgagaaaggaaaagtttcagatg

SEQ ID NO: 100609 - DNA, 60 bp, Artificial
  Synthetic oligonucleotide
acgcctctcacctaccctgttggttgccctactaattctgacattcttacactcgtgtcg

SEQ ID NO: 100610 - DNA, 60 bp, Artificial
  Synthetic oligonucleotide
agagttttggttaggggtggtctcccgtcagggtgcgccgccacgagcatgttgaacaca

SEQ ID NO: 100611 - DNA, 60 bp, Artificial
  Synthetic oligonucleotide
caccccacgtctttcccactcctaacccgactcccacctcgggtccaatgaaaggaccaa

SEQ ID NO: 100612 - DNA, 60 bp, Artificial
  Synthetic oligonucleotide
cccttgacgaattcgaaacgagatgttctccctcccttgccgcttgttcacacccataca

SEQ ID NO: 100613 - DNA, 60 bp, Artificial
  Synthetic oligonucleotide
gcttcctgtgcagacaccgccacagacaaggtgcttgctgcagagaggtattacactctc

SEQ ID NO: 100614 - DNA, 60 bp, Artificial
  Synthetic oligonucleotide
ccttttgaccacgttcgaatacctcttccacatgtgctggcaggcaagcagggtggagtt

SEQ ID NO: 100615 - DNA, 60 bp, Artificial
  Synthetic oligonucleotide
tttaattcggcctcctgtgacaagcccctcggtgaaagaacctctctcttttcgacgtgg

SEQ ID NO: 100616 - DNA, 60 bp, Artificial
  Synthetic oligonucleotide
cttttcgacgtggttggaattaacatcatttccgacgaaagtgctatcatgcctccccga

SEQ ID NO: 100617 - DNA, 60 bp, Artificial
  Synthetic oligonucleotide
accatacgtgaacatttgcccaacatcatcctggacacagcatgcaaattggaccattgt

SEQ ID NO: 100618 - DNA, 60 bp, Artificial
  Synthetic oligonucleotide
gcagacaaggcacaagttacacaatcctgtttgttggtcaaaggacacctctttgtggtc

SEQ ID NO: 100619 - DNA, 60 bp, Artificial
  Synthetic oligonucleotide
tccagatttgaccactactgtctgtctgtctttgatggctggaattgacattctcactaa

SEQ ID NO: 100620 - DNA, 60 bp, Artificial
  Synthetic oligonucleotide
gagggagaacaagcagcttactctggaggtaagaaaggtgagaaacaaacgctccaggtc

SEQ ID NO: 100621 - DNA, 60 bp, Artificial
  Synthetic oligonucleotide
ctggtaatgacatggactatgtgttgacttgcctgagacagacaaatgctgccctacagg

SEQ ID NO: 100622 - DNA, 60 bp, Artificial
  Synthetic oligonucleotide
cgcactgctggcagtgcattcagggaagagtgtctacgacgagattttcgacccatttcg

SEQ ID NO: 100623 - DNA, 60 bp, Artificial
  Synthetic oligonucleotide
catgccaacacaccggttcagattttggagcttcaagaccctatttcaatctacagagtt

SEQ ID NO: 100624 - DNA, 60 bp, Artificial
  Synthetic oligonucleotide
ggctggtggtggcggtatggctgctgctacgataatcactcaggaaatggttgaagctgc

SEQ ID NO: 100625 - DNA, 60 bp, Artificial
  Synthetic oligonucleotide
cagagtgtcatcggacaccgcaggcaacacggctacaaacactcaatccacagtgggtcg

SEQ ID NO: 100626 - DNA, 60 bp, Artificial
  Synthetic oligonucleotide
gtattcattacagagctacaacacaccgaggttggtgcggatcagcgctcatatgccatg

SEQ ID NO: 100627 - DNA, 60 bp, Artificial
  Synthetic oligonucleotide
tatcgtacacaccacctggtgcagggaaaccaacgactagagaccaagccatgcaagcca

SEQ ID NO: 100628 - DNA, 60 bp, Artificial
  Synthetic oligonucleotide
actcaaaggaacacgacacgaaagagattcggtgcaaatgagatcggtgaacaaatctgg

SEQ ID NO: 100629 - DNA, 60 bp, Artificial
  Synthetic oligonucleotide
cgtttgttctgccttatacttctccactatctgtcctacctgctgtttggtttaacggat

SEQ ID NO: 100630 - DNA, 60 bp, Artificial
  Synthetic oligonucleotide
gaggatggttttcctaagccctccggtagagaagccaagaatgtcctgaaggtaccccgc

SEQ ID NO: 100631 - DNA, 60 bp, Artificial
  Synthetic oligonucleotide
cagggaacacgcaggtactttctattccacaactccagataatactgttccagtatatgg

SEQ ID NO: 100632 - DNA, 60 bp, Artificial
  Synthetic oligonucleotide
gcgcatcgaaacagctgtagcgacctcacagtagcagcggactcccctcttggcgacaag

SEQ ID NO: 100633 - DNA, 60 bp, Artificial
  Synthetic oligonucleotide
cgctttagtgacatatcaagtctctctgtcctgctcttgcatggccaattccatgctagc

SEQ ID NO: 100634 - DNA, 60 bp, Artificial
  Synthetic oligonucleotide
caaaaccacaaggtcaactaatgaatatccttggaagcgcggctgatgcattcaagaaca

SEQ ID NO: 100635 - DNA, 60 bp, Artificial
  Synthetic oligonucleotide
cgaaattcccggttttggtctgtctcgctctggacgtcttcttgtgtgtatgggcgaaaa

SEQ ID NO: 100636 - DNA, 60 bp, Artificial
  Synthetic oligonucleotide
gaccaggtcgctttctctaagcacacaactaatttggaagagcttccatctgttttctcc

SEQ ID NO: 100637 - DNA, 60 bp, Artificial
  Synthetic oligonucleotide
gaatggtacccgactgacctccttactgttgacctggacgacgacgtgtttcatcccccg

SEQ ID NO: 100638 - DNA, 60 bp, Artificial
  Synthetic oligonucleotide
gcactcctttcacttccaattttataatagcaacaaccaatcttccgaagttccggcctg

SEQ ID NO: 100639 - DNA, 60 bp, Artificial
  Synthetic oligonucleotide
tccggccattggcactcaaccaccaaaactattggcaatggacagtttatcctcaccaaa

SEQ ID NO: 100640 - DNA, 56 bp, Artificial
  Synthetic oligonucleotide
aaaacaagcacgatcacgccgtagctaggccagaacctgtggtcgttgtgttgcga

SEQ ID NO: 100641 - DNA, 60 bp, Artificial
  Synthetic oligonucleotide
ccttgtcagcttcccatctctactcctaagtgtttctaccacattgtcttcactggctcc

SEQ ID NO: 100642 - DNA, 60 bp, Artificial
  Synthetic oligonucleotide
ctatccgtgaaaagggtacgtgttgccccttccttcttcggagaattcacacggcggtct

SEQ ID NO: 100643 - DNA, 60 bp, Artificial
  Synthetic oligonucleotide
gacatcagccagtgctatgttgtcagttatggcgacgactgtgtgttgtctgtgcctgag

SEQ ID NO: 100644 - DNA, 60 bp, Artificial
  Synthetic oligonucleotide
gctgagcactccagactagttcctgaggtgggaaatacatggggggcactgggaaaaccc

SEQ ID NO: 100645 - DNA, 60 bp, Artificial
  Synthetic oligonucleotide
ggaggttctggaaggaaagatacagtggtgcaagggtcctgaagccttcaaacaacaact

SEQ ID NO: 100646 - DNA, 60 bp, Artificial
  Synthetic oligonucleotide
ctaagattagaccttttggccaaacaacaacagcttctgggaccacttcctgccaaacct

SEQ ID NO: 100647 - DNA, 60 bp, Artificial
  Synthetic oligonucleotide
agggacatgacttttaattcacccgctaaaggaacaccaattacctatgatggccttccc

SEQ ID NO: 100648 - DNA, 60 bp, Artificial
  Synthetic oligonucleotide
gattttaaggtggcagtgcaaaagcatgttgaaaagttggagagtgtgttgcaggatcag

SEQ ID NO: 100649 - DNA, 60 bp, Artificial
  Synthetic oligonucleotide
cctaataccattttattcaggaacacccctccgcccaaccaggccaactactgacaggag

SEQ ID NO: 100650 - DNA, 60 bp, Artificial
  Synthetic oligonucleotide
taagctcacagacccagatgctctagaaaggaggttcccaattcggctcaatattcgccc

SEQ ID NO: 100651 - DNA, 60 bp, Artificial
  Synthetic oligonucleotide
ggactctgaggacatcatgaaatctgccctcaatggagaggtcaccatcaagcaagagaa

SEQ ID NO: 100652 - DNA, 59 bp, Artificial
  Synthetic oligonucleotide
tcacacactctggttaaacatctttttggccgacaatggcttgttcgcactgttcaaca

SEQ ID NO: 100653 - DNA, 60 bp, Artificial
  Synthetic oligonucleotide
atgatgggcctatacggtgctttctctacatgattgaggttggtcggtttacacaggagg

SEQ ID NO: 100654 - DNA, 60 bp, Artificial
  Synthetic oligonucleotide
aatcctatgccaatccgacgggctcaaaacacatggatggttatgtgtcccaggagattc

SEQ ID NO: 100655 - DNA, 60 bp, Artificial
  Synthetic oligonucleotide
aatgctgttgaacccagatctttaatgaatctgccatatgccatcttggacctccgtacc

SEQ ID NO: 100656 - DNA, 60 bp, Artificial
  Synthetic oligonucleotide
ccaactcctcagtgtttctatgacgtggacacaaagccagcctacgggcagaccaggtac

SEQ ID NO: 100657 - DNA, 60 bp, Artificial
  Synthetic oligonucleotide
agcgctactctggaaagattctttaccaccagcctcgcaaaaccgcctatcagaagtcac

SEQ ID NO: 100658 - DNA, 60 bp, Artificial
  Synthetic oligonucleotide
gccacgtctcccattgtcaatccaacccatcatggaatgtagttggtaattcctgtacag

SEQ ID NO: 100659 - DNA, 60 bp, Artificial
  Synthetic oligonucleotide
attgggacacatccccagggattaagtacaagggtgaaaccaaacgccagcttgttctca

SEQ ID NO: 100660 - DNA, 60 bp, Artificial
  Synthetic oligonucleotide
cctgctgggaacgtgacattggtggacttggcctcgagcattggaatcctattaatggtg

SEQ ID NO: 100661 - DNA, 60 bp, Artificial
  Synthetic oligonucleotide
caatttgtgtctcgacttctctggttttgatggatctttgagtgctagaattttggagga

SEQ ID NO: 100662 - DNA, 60 bp, Artificial
  Synthetic oligonucleotide
gtagccattttctagcgcttggtacagctagtatggttacacagtgtgcgtcagcttggg

SEQ ID NO: 100663 - DNA, 60 bp, Artificial
  Synthetic oligonucleotide
gttgtgggataccctagagtacacgttaaacacccactggtttggtaggacaccacagag

SEQ ID NO: 100664 - DNA, 60 bp, Artificial
  Synthetic oligonucleotide
ggctatcttgagtggcatgttgttaatcgcctgacagtcaacgcaactgcaccaaacacc

SEQ ID NO: 100665 - DNA, 60 bp, Artificial
  Synthetic oligonucleotide
cagaaattggtagaaatggtttctggcaccctcaatcaactcaatgggatacctagtgct

SEQ ID NO: 100666 - DNA, 60 bp, Artificial
  Synthetic oligonucleotide
gtttgaggagttggatgaattgaaacttgactttgattttgatcggctggaagaacaagc

SEQ ID NO: 100667 - DNA, 60 bp, Artificial
  Synthetic oligonucleotide
ggaggtcttgagaatgaagttgtgaggattgtcatccggacagtgatccgcatcgtctgc

SEQ ID NO: 100668 - DNA, 60 bp, Artificial
  Synthetic oligonucleotide
atgatcaaggaaagagaaaaccacggcggaggccaattcacaaacctgttaatccaccac

SEQ ID NO: 100669 - DNA, 59 bp, Artificial
  Synthetic oligonucleotide
atgccaacatttgcccttttctttgacaaatttcagttttggaggggatctctggaggt

SEQ ID NO: 100670 - DNA, 60 bp, Artificial
  Synthetic oligonucleotide
accatcaccaacttatacagccttacgtgtcaatcacattgaaactttggcccttcacga

SEQ ID NO: 100671 - DNA, 60 bp, Artificial
  Synthetic oligonucleotide
ctatcctctcctttgcacgccgtgggaccatacaggagaagttgatctccgtggcaggac

SEQ ID NO: 100672 - DNA, 57 bp, Artificial
  Synthetic oligonucleotide
cgtaatgagtaattacgggatgggaccgactactttgggtgtccgtgtttcactttt

SEQ ID NO: 100673 - DNA, 60 bp, Artificial
  Synthetic oligonucleotide
tagtcctccggcccctgaatgcggctaatcctaaccacggagcgtccaccagcaatccag

SEQ ID NO: 100674 - DNA, 60 bp, Artificial
  Synthetic oligonucleotide
tgagctacataagagtcctccggcccctgaatgcggctaatcctaaccacggagcaggcg

SEQ ID NO: 100675 - DNA, 60 bp, Artificial
  Synthetic oligonucleotide
agcgggtagtgtgtcgtaacgggcaactctgcagcggaaccgactactttgggtgtccgt

SEQ ID NO: 100676 - DNA, 60 bp, Artificial
  Synthetic oligonucleotide
tagtcctccggcccctgaatgcggctaatcctaactgcggagcacgtgcttccaatccag

SEQ ID NO: 100677 - DNA, 60 bp, Artificial
  Synthetic oligonucleotide
catgcctccccgattatgtgatgctttctgccctgctgggtggagcatcctcgggttgag

SEQ ID NO: 100678 - DNA, 60 bp, Artificial
  Synthetic oligonucleotide
catgtctccccgattatgtgatgctttctgccctgctgggtggagcatcctcgggttgag

SEQ ID NO: 100679 - DNA, 60 bp, Artificial
  Synthetic oligonucleotide
tttgagattccaagctacagatcactttacctgcgttgggtgaacgccgtgtgcggtgac

SEQ ID NO: 100680 - DNA, 60 bp, Artificial
  Synthetic oligonucleotide
cgttcgagattccaagctacagatcactttacctgcgttgggtgaacgccgtgtgcggtg

SEQ ID NO: 100681 - DNA, 60 bp, Artificial
  Synthetic oligonucleotide
agctagttggtagtcctccggcccctgaatgcggctaatcctaactgcggagcacacacc

SEQ ID NO: 100682 - DNA, 60 bp, Artificial
  Synthetic oligonucleotide
cgtaatgggcaactctgcagcggaaccgactactttgggtgtccgtgtttccttttattc

SEQ ID NO: 100683 - DNA, 60 bp, Artificial
  Synthetic oligonucleotide
gtggttgtaaggtcgtaatgagcaattccgggacgggaccgactactttgggtgtccgtg

SEQ ID NO: 100684 - DNA, 60 bp, Artificial
  Synthetic oligonucleotide
ctgtttggagaaagagatgatagaatacagacttaaatcttatgattggtggagaatgag

SEQ ID NO: 100685 - DNA, 60 bp, Artificial
  Synthetic oligonucleotide
taattgactcggaccatgtggtcttcaatgagagatggttaattcatggcggtatgccat

SEQ ID NO: 100686 - DNA, 60 bp, Artificial
  Synthetic oligonucleotide
ttgtgattcctccggcccctgaatgcggctaaccttaaccctggagccttgtgtcacaaa

SEQ ID NO: 100687 - DNA, 60 bp, Artificial
  Synthetic oligonucleotide
cagtgtgtcgtaacgggcaactctgcagcggaaccgactactttgggtgtccgtgtttcc

SEQ ID NO: 100688 - DNA, 60 bp, Artificial
  Synthetic oligonucleotide
gtagtgcagtcactggcacaacgcgttacccggtaagccaatcgggtgtacacggtcgtc

SEQ ID NO: 100689 - DNA, 60 bp, Artificial
  Synthetic oligonucleotide
gagctagttagtagtcctccggcccctgaatgcggctaatcctaactgcggagcacacgc

SEQ ID NO: 100690 - DNA, 60 bp, Artificial
  Synthetic oligonucleotide
ttaaaactggatccaggttgttcccacctggatctcccaaagggagtggaactctgttat

SEQ ID NO: 100691 - DNA, 60 bp, Artificial
  Synthetic oligonucleotide
ggtgcgaagagcctattgagctacaagagagtcctccggcccctgaatgcggctaatccc

SEQ ID NO: 100692 - DNA, 60 bp, Artificial
  Synthetic oligonucleotide
gttgaggtcgtaatgagtaattctgggatgggaccgactactttgggtgtccgtgtttcc

SEQ ID NO: 100693 - DNA, 50 bp, Artificial
  Synthetic oligonucleotide
aatgagcaattgcgggatgggaccaactactttgggtgtccgtgtttcac

SEQ ID NO: 100694 - DNA, 50 bp, Artificial
  Synthetic oligonucleotide
caacgcgcaagtgcgggatgggaccaactactttgggtgtccgtgtttcc

SEQ ID NO: 100695 - DNA, 60 bp, Artificial
  Synthetic oligonucleotide
gggacgggaccgactactttgggtgtccgtgtttccttttatttcattattgttcttatg

SEQ ID NO: 100696 - DNA, 60 bp, Artificial
  Synthetic oligonucleotide
ggacgggaccgactactttgggtgtccgtgtttccttttatttcattattgttcttatgg

SEQ ID NO: 100697 - DNA, 60 bp, Artificial
  Synthetic oligonucleotide
aagagtctattgagctagttggtagtcctccggcccctgaatgcggctaatcctaactgc

SEQ ID NO: 100698 - DNA, 60 bp, Artificial
  Synthetic oligonucleotide
aaaggggtctcctagagagcttggccgtcgggccttataccccgacttgctgagcttctc

SEQ ID NO: 100699 - DNA, 60 bp, Artificial
  Synthetic oligonucleotide
ttgaaaggggtctcctagagagcttggccgtcgggccttataccccgacttgctgagctc

SEQ ID NO: 100700 - DNA, 60 bp, Artificial
  Synthetic oligonucleotide
tttgaaaggggtctcctagagagcttggccgtcgggccttataccccgacttgctgagct

SEQ ID NO: 100701 - DNA, 60 bp, Artificial
  Synthetic oligonucleotide
ctttgagattccaagctacagatcactttacctgcgttgggtgaacgccgtgtgcggcga

SEQ ID NO: 100702 - DNA, 60 bp, Artificial
  Synthetic oligonucleotide
agccagagggcagtgtgtcgtaacgggcaactctgcagcggaaccgactactttgggtgt

SEQ ID NO: 100703 - DNA, 60 bp, Artificial
  Synthetic oligonucleotide
gaaagtttcaatgtgctgaagaacaaggaatctcagattatgtggaacaccttggccaag

SEQ ID NO: 100704 - DNA, 56 bp, Artificial
  Synthetic oligonucleotide
caatttatagcgtataagttgtcatcatgggcgcacaagtatctagacagaatgtt

SEQ ID NO: 100705 - DNA, 60 bp, Artificial
  Synthetic oligonucleotide
aatgtgtgttatatggtgacaatttatagcgtataagttgtcatcatgggcgcacaagta

SEQ ID NO: 100706 - DNA, 60 bp, Artificial
  Synthetic oligonucleotide
gtgggatgggaccaactactttgggtgtccgtgtttcctattttttccttaatgtgtgtt

SEQ ID NO: 100707 - DNA, 58 bp, Artificial
  Synthetic oligonucleotide
cgtaccccactggcgacagtggtccagcctgcgtggctgcctgctcgcccatatgggc

SEQ ID NO: 100708 - DNA, 60 bp, Artificial
  Synthetic oligonucleotide
tagaccatgtgatgtggacaataaaataggaaatgcacgctgttgtccatttgtgtgcgg

SEQ ID NO: 100709 - DNA, 60 bp, Artificial
  Synthetic oligonucleotide
gtgatgtggacaataaaataggaaatgcacgctgttgtccatttgtgtgcggcaaagcag

SEQ ID NO: 100710 - DNA, 60 bp, Artificial
  Synthetic oligonucleotide
gtgatgtagatatcaaaataggaaatgcacgctgttgtccatttgtgtgtggaaaagcag

SEQ ID NO: 100711 - DNA, 60 bp, Artificial
  Synthetic oligonucleotide
gtgagcagatggtcgtaatgagcaattgtgggatgggaccgactactttgggtgtccgtg

SEQ ID NO: 100712 - DNA, 60 bp, Artificial
  Synthetic oligonucleotide
gctagttagtagtcctccggcccctgaatgcggctaatcctaactgtggagcacatgccc

SEQ ID NO: 100713 - DNA, 60 bp, Artificial
  Synthetic oligonucleotide
ccactggtgacaggctaaggatgcccttcaggtaccctgaggtaacacgcgacactcggg

SEQ ID NO: 100714 - DNA, 60 bp, Artificial
  Synthetic oligonucleotide
tcccaaatactttgatggatatgatcaacagagtgtagttattatggatgatgtgatgca

SEQ ID NO: 100715 - DNA, 57 bp, Artificial
  Synthetic oligonucleotide
ggggcagtgtgtcgtaacgggcaactctgcagcggaaccgactactttgggtgtccg

SEQ ID NO: 100716 - DNA, 60 bp, Artificial
  Synthetic oligonucleotide
ggcggcgtgtcgtaatgggtaactctgcagcggaaccgactactttgggtgtccgtgttt

SEQ ID NO: 100717 - DNA, 51 bp, Artificial
  Synthetic oligonucleotide
gtcacaagccatgattggtatgagatacaagaaagtgagtattaccctaag

SEQ ID NO: 100718 - DNA, 60 bp, Artificial
  Synthetic oligonucleotide
ctgtaccgccgttggctcgactcattttagcaaccctacctcagtcgaattggattgggt

SEQ ID NO: 100719 - DNA, 60 bp, Artificial
  Synthetic oligonucleotide
accccactggtaacagtgttctagcctgcgtggctgcctgcgcacccctccgggtgcgaa

SEQ ID NO: 100720 - DNA, 60 bp, Artificial
  Synthetic oligonucleotide
ccaggcaaggtattttccagactgttgggagtggccttgaccacatcctgtctttggcag

SEQ ID NO: 100721 - DNA, 60 bp, Artificial
  Synthetic oligonucleotide
atgtccagacaaggtattttccagactgttgggagtggccttgaccacatcctgtctttg

SEQ ID NO: 100722 - DNA, 60 bp, Artificial
  Synthetic oligonucleotide
tctaggcttaatctcagacctctctgtgcttagggcaaacattacttggccttaaatggg

SEQ ID NO: 100723 - DNA, 60 bp, Artificial
  Synthetic oligonucleotide
ctaggtttaatctcagacctctctgtgcttagggcaaacaccatttggccttaaatggga

SEQ ID NO: 100724 - DNA, 60 bp, Artificial
  Synthetic oligonucleotide
cgaacaaacacaataggtgatgactatattccaatgtgtgattgtacagatgccacttac

SEQ ID NO: 100725 - DNA, 60 bp, Artificial
  Synthetic oligonucleotide
ctttttaccttttattatgcttatggtgacaatatatagatgcatatattgacaccatgg

SEQ ID NO: 100726 - DNA, 58 bp, Artificial
  Synthetic oligonucleotide
caaggtcgtaatgagtaattccgggacgggaccgactactttgggtgtccgtgtttcc

SEQ ID NO: 100727 - DNA, 59 bp, Artificial
  Synthetic oligonucleotide
gggtaccaacaacaggaagttgtgattatggatgatctaaaccaaaacccagatggtca

SEQ ID NO: 100728 - DNA, 60 bp, Artificial
  Synthetic oligonucleotide
ggttgttcccaccccagaggcccacgtggcggctagtactccggtattacggtacccttg

SEQ ID NO: 100729 - DNA, 60 bp, Artificial
  Synthetic oligonucleotide
ctccccgattatgtgatgttttctgccctgctgggcggagcattctcgggttgatacacc

SEQ ID NO: 100730 - DNA, 60 bp, Artificial
  Synthetic oligonucleotide
catgcctccccgattatgtgatgttttctgccctgctgggcggagcattctcgggttgag

SEQ ID NO: 100731 - DNA, 60 bp, Artificial
  Synthetic oligonucleotide
gcctccccgattatgtgatgttttctgccctgctgggcggagcattctcgggttgataca

SEQ ID NO: 100732 - DNA, 60 bp, Artificial
  Synthetic oligonucleotide
ataggaggcaccacatccagtggtgttttgtacaagcacttctgtttccccggagcgagg

SEQ ID NO: 100733 - DNA, 60 bp, Artificial
  Synthetic oligonucleotide
ggtgtttagtacaagcacttctgtttccccggagcgaggtataggctgtacccactgcca

SEQ ID NO: 100734 - DNA, 60 bp, Artificial
  Synthetic oligonucleotide
ccagtggtgtttagtacaagcacttctgtttccccggagcgaggtataggctgtacccac

SEQ ID NO: 100735 - DNA, 60 bp, Artificial
  Synthetic oligonucleotide
gatgctagtctcctagcccaatcaggaaaagactatggactaaccatgacaccagctgac

SEQ ID NO: 100736 - DNA, 60 bp, Artificial
  Synthetic oligonucleotide
tggacgctagtctcctagcccaatcaggaaaagactatggactcactatgacaccagctg

SEQ ID NO: 100737 - DNA, 60 bp, Artificial
  Synthetic oligonucleotide
gacgctagtctcctagcccaatcaggaaaagactatggactaaccatgacaccagctgac

SEQ ID NO: 100738 - DNA, 60 bp, Artificial
  Synthetic oligonucleotide
gacgctagtctcctagcccaatcaggaaaagactacggactcacgatgacaccagccgac

SEQ ID NO: 100739 - DNA, 60 bp, Artificial
  Synthetic oligonucleotide
gacgctagtctcctagcccaatcaggaaaagactatggactaaccatgaccccagctgac

SEQ ID NO: 100740 - DNA, 60 bp, Artificial
  Synthetic oligonucleotide
gacgctagtctcctagcccaatcaggaaaagactacggactaacaatgactccagctgac

SEQ ID NO: 100741 - DNA, 60 bp, Artificial
  Synthetic oligonucleotide
gacgctagtctcctagcccaatcaggaaaagactacggactaaccatgactccagctgac

SEQ ID NO: 100742 - DNA, 60 bp, Artificial
  Synthetic oligonucleotide
ccagtgagcagatggtcgtaatgagcaattgtgggatgggaccgactactttgggtgtcc

SEQ ID NO: 100743 - DNA, 60 bp, Artificial
  Synthetic oligonucleotide
agactcgcatgtgcttggttgtgactcctccggcccctgaatgcggctaaccttaacccc

SEQ ID NO: 100744 - DNA, 60 bp, Artificial
  Synthetic oligonucleotide
gcccacgcaaagcctagtaacactttgaaaggtctatggttggtcgttcagctaaacccc

SEQ ID NO: 100745 - DNA, 60 bp, Artificial
  Synthetic oligonucleotide
aagtgtaataccataattaaacaaaagaagagaagtgaaccagtcgccattatggtgcac

SEQ ID NO: 100746 - DNA, 60 bp, Artificial
  Synthetic oligonucleotide
gaagaggataaacggcggagaaatgtggtcgatgtcatgtcagcaatcttccagggccct

SEQ ID NO: 100747 - DNA, 60 bp, Artificial
  Synthetic oligonucleotide
ccaggggcaccattacccaggaagagagatgattacacttggcaatctggtacaaatgcc

SEQ ID NO: 100748 - DNA, 60 bp, Artificial
  Synthetic oligonucleotide
ctacgccacttccattgtgcagaagagcagggcatcacagactacatacacatgttaggt

SEQ ID NO: 100749 - DNA, 60 bp, Artificial
  Synthetic oligonucleotide
caccctatatggttccaggctctcaaggaagtactatccaatctgggttttcaacctaat

SEQ ID NO: 100750 - DNA, 58 bp, Artificial
  Synthetic oligonucleotide
agtttgaaaggaagatacgcagtgtcagcgctggtcgcgcactgtatatccctcccta

SEQ ID NO: 100751 - DNA, 60 bp, Artificial
  Synthetic oligonucleotide
ggccaacacaactctcaaacttttaatagcatacacaccaccaggtatagttaaacccag

SEQ ID NO: 100752 - DNA, 60 bp, Artificial
  Synthetic oligonucleotide
ggttcttgtggttccgaacattaaggaaagccactccagcacatcaaattcagcaccagc

SEQ ID NO: 100753 - DNA, 60 bp, Artificial
  Synthetic oligonucleotide
gtggtcgcacaaggaccagaggaagaatttggccgatcactcattaaacacaactcttgc

SEQ ID NO: 100754 - DNA, 60 bp, Artificial
  Synthetic oligonucleotide
gttccatgatgtctttccagggagtaaagagccagctgtactctcagagcatgaccctag

SEQ ID NO: 100755 - DNA, 55 bp, Artificial
  Synthetic oligonucleotide
ttttgcagcacaaaccaatctcttctagctccaccaaccatcacgtcactctcag

SEQ ID NO: 100756 - DNA, 60 bp, Artificial
  Synthetic oligonucleotide
ccaggtgagacgggcagggatgtcggtataactgttcgtgaacatccaaacaaacaacct

SEQ ID NO: 100757 - DNA, 60 bp, Artificial
  Synthetic oligonucleotide
cttcacgagatgccaccgctatagataagccttcacaaccagacacatcttccaataggt

SEQ ID NO: 100758 - DNA, 60 bp, Artificial
  Synthetic oligonucleotide
ggttgttcccaccccagaggcccacgtggcggctagtacactggtatcacggtacccttg

SEQ ID NO: 100759 - DNA, 60 bp, Artificial
  Synthetic oligonucleotide
ctattgagctaattggtagtcctccggcccctgaatgcggctaatcctaaccgcggagca

SEQ ID NO: 100760 - DNA, 60 bp, Artificial
  Synthetic oligonucleotide
ctattgagctaattggtagtcctccggcccctgaatgcggctaatcctaaccgcagagca

SEQ ID NO: 100761 - DNA, 60 bp, Artificial
  Synthetic oligonucleotide
ccccatgaagttgacgctagtctcctagcccaatcaggaaaagactatggactaactatg

SEQ ID NO: 100762 - DNA, 60 bp, Artificial
  Synthetic oligonucleotide
acccccatgaggttgacgctagtctcctagcccaatcaggaaaagactatggactgacca

SEQ ID NO: 100763 - DNA, 60 bp, Artificial
  Synthetic oligonucleotide
ggttgacgccagtctcctagcccaatcaggaaaagactatggactaaccatgactccagc

SEQ ID NO: 100764 - DNA, 60 bp, Artificial
  Synthetic oligonucleotide
ggttgacgcaagtctcctagcccaatcaggaaaagactatggactaaccatgactccagc

SEQ ID NO: 100765 - DNA, 60 bp, Artificial
  Synthetic oligonucleotide
acccccatgaggttgacgctagtctcctagcccaatcaggaaaagactatggactaacca

SEQ ID NO: 100766 - DNA, 60 bp, Artificial
  Synthetic oligonucleotide
ccccatgaggttgacgctagtctcctagcccaatcaggaaaagactatggactaactatg

SEQ ID NO: 100767 - DNA, 60 bp, Artificial
  Synthetic oligonucleotide
ttacccccatgaggttgacgctagtctcctagcccaatcaggaaaagactatggactaac

SEQ ID NO: 100768 - DNA, 60 bp, Artificial
  Synthetic oligonucleotide
acccccatgaagttgacgctagtctcctagcccaatcaggaaaagactatggactaacta

SEQ ID NO: 100769 - DNA, 60 bp, Artificial
  Synthetic oligonucleotide
ccagagggcagtgtgtcgtaatgggcaactctgcagcggaaccgactactttgggtgtcc

SEQ ID NO: 100770 - DNA, 60 bp, Artificial
  Synthetic oligonucleotide
ccagggggcagtgtgtcgtaacgggtaactctgcagcggaaccgactactttgggtgtcc

SEQ ID NO: 100771 - DNA, 60 bp, Artificial
  Synthetic oligonucleotide
ccagagagactgcaaagtatcatggcagaatcatttggagccgaagtgactgggtcgcgt

SEQ ID NO: 100772 - DNA, 60 bp, Artificial
  Synthetic oligonucleotide
gcggatcaacacctggtaacaggtgcccctggggccaaaagccacggtttaacagaccct

SEQ ID NO: 100773 - DNA, 60 bp, Artificial
  Synthetic oligonucleotide
aacagaccctttaggattggttaaaacctgagtaattatggaagatacttagtacctacc

SEQ ID NO: 100774 - DNA, 60 bp, Artificial
  Synthetic oligonucleotide
cggaaccgactactttgggtgtccgtgtttccttttatttcaacttggctgcttatggtg

SEQ ID NO: 100775 - DNA, 60 bp, Artificial
  Synthetic oligonucleotide
gcggaaccgactactttgggtgtccgtgtttccttttattctcaaactggctgcttatgg

SEQ ID NO: 100776 - DNA, 60 bp, Artificial
  Synthetic oligonucleotide
ggcggaaccgactactttgggtgtccgtgtttccttttattttatgctggctgcttatgg

SEQ ID NO: 100777 - DNA, 60 bp, Artificial
  Synthetic oligonucleotide
gcaaaaacatctgcgatcgttatccgcaaagcaactacgcaaagcctagtatcacttttg

SEQ ID NO: 100778 - DNA, 60 bp, Artificial
  Synthetic oligonucleotide
gcgatcgttatccgcaaagcaactacgcaaagcctagtatcacttttgagagtatgtggt

SEQ ID NO: 100779 - DNA, 60 bp, Artificial
  Synthetic oligonucleotide
gcctgcgtgcctctggtaggcacgaagccatatatttgacaaggtgtgaagagccccgtg

SEQ ID NO: 100780 - DNA, 60 bp, Artificial
  Synthetic oligonucleotide
gcgtgctccttgtgagcacgaagccatatatttgacaaggtgtgaagagccccgtgtgct

SEQ ID NO: 100781 - DNA, 60 bp, Artificial
  Synthetic oligonucleotide
attccccactggtaacagtgttctagcctgcgtggctgcctgcgtgctccttgtgagcac

SEQ ID NO: 100782 - DNA, 60 bp, Artificial
  Synthetic oligonucleotide
tgcgtggctgcctgcgtgcctctggtaggcacgaagccatatatttgacaaggtgtgaag

SEQ ID NO: 100783 - DNA, 60 bp, Artificial
  Synthetic oligonucleotide
attgtgtcatttaatgtggcataatggtagagatatatacaagcagtttgagcagaagat

SEQ ID NO: 100784 - DNA, 60 bp, Artificial
  Synthetic oligonucleotide
aagactcgcgtgtgcttagctgtgagtcctccggcccctgaatgcggctaacctaaaccc

SEQ ID NO: 100785 - DNA, 55 bp, Artificial
  Synthetic oligonucleotide
aattgtgagtcctccggcccctgaatgcggctaacctaaaccctggagccttgag

SEQ ID NO: 100786 - DNA, 60 bp, Artificial
  Synthetic oligonucleotide
gtgtctcagcctgcgtggcggccaacccagcttctgctgggacgccaattcattgacatg

SEQ ID NO: 100787 - DNA, 60 bp, Artificial
  Synthetic oligonucleotide
ttacaaacctgtgatggcttcgaagaccctcgaggctatcctctcctttgcacgccgtgg

SEQ ID NO: 100788 - DNA, 60 bp, Artificial
  Synthetic oligonucleotide
tacaaacctgtgatggcttcgaagaccctcgaggctatcctctcctttgcacgccgtggg

SEQ ID NO: 100789 - DNA, 60 bp, Artificial
  Synthetic oligonucleotide
cagctagagtgcacaatccagtgtatttctagtcgtaatgagcaattgcgggatgggacc

SEQ ID NO: 100790 - DNA, 60 bp, Artificial
  Synthetic oligonucleotide
cagctagcgtgtacaatccagtacaaagctagtcgtaatgagcaattgcgggatgggacc

SEQ ID NO: 100791 - DNA, 60 bp, Artificial
  Synthetic oligonucleotide
gacagaaaggaagcaatgttgggcactcatgtagtgtgggatgtaggtttacagtcaaca

SEQ ID NO: 100792 - DNA, 50 bp, Artificial
  Synthetic oligonucleotide
gtgccagggcgggtactgccgtaagtgccaccccaaaacaacaacaaacc

SEQ ID NO: 100793 - DNA, 60 bp, Artificial
  Synthetic oligonucleotide
ggtgcgaagagtctattgagctagctggtagtcctccggcccctgaatgcggctaatccc

SEQ ID NO: 100794 - DNA, 60 bp, Artificial
  Synthetic oligonucleotide
agtagtcctccggcccctgaatgcggctaatcctaaccacggagcgtccaccggcaaacc

SEQ ID NO: 100795 - DNA, 60 bp, Artificial
  Synthetic oligonucleotide
aaataccccactggcgacagtgttctagcctgcgtggctgcctgcacaccctatgggtgt

SEQ ID NO: 100796 - DNA, 60 bp, Artificial
  Synthetic oligonucleotide
cctggggatccatgtgggtggtaatggcagggatgggttttctgcaatgttactgaggtc

SEQ ID NO: 100797 - DNA, 60 bp, Artificial
  Synthetic oligonucleotide
gggcgagaagccttattattgacaaggtgtgaagagccgcgtgtgcttggtgtgagtcct

SEQ ID NO: 100798 - DNA, 60 bp, Artificial
  Synthetic oligonucleotide
cctacactgcctgatagggtcgcggctggtcgagtcccacacactataataccagtagac

SEQ ID NO: 100799 - DNA, 60 bp, Artificial
  Synthetic oligonucleotide
cagctaaaccccatagtagacctggcagatgaggctagaaattccccactggcgacagtg

SEQ ID NO: 100800 - DNA, 60 bp, Artificial
  Synthetic oligonucleotide
gataagtatggtttaaatctacccatggtcacctatgtcaaggatgaactcagggcgcca

SEQ ID NO: 100801 - DNA, 60 bp, Artificial
  Synthetic oligonucleotide
cgggctgaatttacccatggtcacctatgtcaaggatgaactcagggctccagataagat

SEQ ID NO: 100802 - DNA, 60 bp, Artificial
  Synthetic oligonucleotide
cctaacgtgtgttgtgcatgtgagagtataatgtgtgggagagatgtatcatgggccttc

SEQ ID NO: 100803 - DNA, 60 bp, Artificial
  Synthetic oligonucleotide
caacactgagaaatgatggattcccagttatgccagactttgaaaagacacacagtttca

SEQ ID NO: 100804 - DNA, 60 bp, Artificial
  Synthetic oligonucleotide
acatgactctcggattgggaagtccgagctggaccatgactgggtgatagcctgccggct

SEQ ID NO: 100805 - DNA, 60 bp, Artificial
  Synthetic oligonucleotide
tcagatcgacaacttcacttcaaccatcggtttggcatgacattgttccaggtgagaagg

SEQ ID NO: 100806 - DNA, 60 bp, Artificial
  Synthetic oligonucleotide
gtgccttagtgaagggaccgtgtgttctagacatggtagttgtgtaggtacaagaggact

SEQ ID NO: 100807 - DNA, 60 bp, Artificial
  Synthetic oligonucleotide
ctgagggatggcatagaccttggctagtaaatattgagcagagtatgaattctggtgcac

SEQ ID NO: 100808 - DNA, 60 bp, Artificial
  Synthetic oligonucleotide
gcagatgactcacaatacactcacttatgcctacccaactaaaacaggacaatgtggtgg

SEQ ID NO: 100809 - DNA, 60 bp, Artificial
  Synthetic oligonucleotide
tcttcaaggacagattgtggctgagagacccgccaggaaaagtgtcaatgtcagatcgac

SEQ ID NO: 100810 - DNA, 60 bp, Artificial
  Synthetic oligonucleotide
ggattgatctatgcagcttggagactctggccaacatctgagcaaggagcatacactgga

SEQ ID NO: 100811 - DNA, 60 bp, Artificial
  Synthetic oligonucleotide
gagtcaatgcacttcaagttttgtacaccattcatttgtggtaaggcctgcaagatttac

SEQ ID NO: 100812 - DNA, 60 bp, Artificial
  Synthetic oligonucleotide
gtgaggtggactttgagaaggctctattctccaaatacgagcagaatgtggctgtccctg

SEQ ID NO: 100813 - DNA, 60 bp, Artificial
  Synthetic oligonucleotide
ggcataccttttacatcaaagtttgtcttggcctcgaccaacctggagaacttggcaccg

SEQ ID NO: 100814 - DNA, 60 bp, Artificial
  Synthetic oligonucleotide
ctggagctgctgttgacttgcctacaagaccaggtccctcatgtgacagatggtatactg

SEQ ID NO: 100815 - DNA, 60 bp, Artificial
  Synthetic oligonucleotide
tcaagtgaggttacgccgagaactgccaagtgggtgaaaactatcttaaaatggttaaca

SEQ ID NO: 100816 - DNA, 60 bp, Artificial
  Synthetic oligonucleotide
acactcctcctggagcaaatccacctgctgatagaacagaagctatgttgggaacccatg

SEQ ID NO: 100817 - DNA, 60 bp, Artificial
  Synthetic oligonucleotide
caacttctggtggtgaggcaacagggcatgttgtttgtggtggcttacctggtgttctca

SEQ ID NO: 100818 - DNA, 60 bp, Artificial
  Synthetic oligonucleotide
atacacaggtggcagtaaccagatcaaaatataggatagtttcagttccagaagagagcc

SEQ ID NO: 100819 - DNA, 60 bp, Artificial
  Synthetic oligonucleotide
ggttcatccagctggtgttccaaccaccagtcccattgtagtgtatgcttcagctagtaa

SEQ ID NO: 100820 - DNA, 60 bp, Artificial
  Synthetic oligonucleotide
gccggtacgcgtgttgtgcgtgctgggatgacagcgcaaatgtaaacaaagacactgtca

SEQ ID NO: 100821 - DNA, 60 bp, Artificial
  Synthetic oligonucleotide
atggagaagctattgatttcccctgttatttcactggtcgaaggaaaagttgtggcccac

SEQ ID NO: 100822 - DNA, 60 bp, Artificial
  Synthetic oligonucleotide
cccatgttacagaatccatcagcagaggagtgtggatattcagataggatgatgcaactt

SEQ ID NO: 100823 - DNA, 60 bp, Artificial
  Synthetic oligonucleotide
gccactaatgggtcacaagtaacaactattaattactatggggcacaatatgcacaggca

SEQ ID NO: 100824 - DNA, 60 bp, Artificial
  Synthetic oligonucleotide
ttcagtcacgatggcaattccttttatatccacagtgcaggcaagatatactggggttga

SEQ ID NO: 100825 - DNA, 60 bp, Artificial
  Synthetic oligonucleotide
gatttggctgagaaaatacttgagtcaaagagagtgctccttgagatgcagaagacagac

SEQ ID NO: 100826 - DNA, 60 bp, Artificial
  Synthetic oligonucleotide
cctttggagaggagggtttgctgttcacgtgcagtgtaatgcaagtaagttccatcaggg

SEQ ID NO: 100827 - DNA, 60 bp, Artificial
  Synthetic oligonucleotide
cgaggatgtagtctatggcatggaaggactggaagctttagatttgaatacatctgctgg

SEQ ID NO: 100828 - DNA, 60 bp, Artificial
  Synthetic oligonucleotide
gaaatgagttcgagtgagcctatggaatctaattggacatgtgtgggtaaataccagcag

SEQ ID NO: 100829 - DNA, 60 bp, Artificial
  Synthetic oligonucleotide
cctcaattcaacaagtaagtgggacacaaaccaacattgctgtgcagatcatgaagtcac

SEQ ID NO: 100830 - DNA, 60 bp, Artificial
  Synthetic oligonucleotide
ctgacatgaagtacatagccccgtatcagattaggctccactgttgtgacactggtgacc

SEQ ID NO: 100831 - DNA, 60 bp, Artificial
  Synthetic oligonucleotide
gtctttccacatcagtatattaatctcaggactaacaatagtgcgacactggtgttgcct

SEQ ID NO: 100832 - DNA, 60 bp, Artificial
  Synthetic oligonucleotide
gagatatgaatgggttgcttgtaatggtagacagtttccagtgtctcaacatcctgcctg

SEQ ID NO: 100833 - DNA, 60 bp, Artificial
  Synthetic oligonucleotide
ggcctacggtgatgacctactggtgtcctatccatttccacttgacccagaggcattagc

SEQ ID NO: 100834 - DNA, 60 bp, Artificial
  Synthetic oligonucleotide
ccaccaaagggagagcccttgactcgtctacaggaagcgcttgaccttcatggcacaaga

SEQ ID NO: 100835 - DNA, 60 bp, Artificial
  Synthetic oligonucleotide
cctccagtttgaatgacactattcacatgaagacacatcttggacgcctgtttgctgtgt

SEQ ID NO: 100836 - DNA, 60 bp, Artificial
  Synthetic oligonucleotide
tcggtacccatttctcattcatccagtgtacccaatggatcaggtgtacgagtctctcag

SEQ ID NO: 100837 - DNA, 60 bp, Artificial
  Synthetic oligonucleotide
gagactggatctggaccatacacagccttaggcatatttgaaagatggtttgttctccca

SEQ ID NO: 100838 - DNA, 60 bp, Artificial
  Synthetic oligonucleotide
ggacatgataacatctgttgttttgattataagaactttgatgcctctcttggatctgtg

SEQ ID NO: 100839 - DNA, 60 bp, Artificial
  Synthetic oligonucleotide
gcgtcccaactcaaacaaaacgcgtcggataatttcttaacacataatcactttaatcat

SEQ ID NO: 100840 - DNA, 60 bp, Artificial
  Synthetic oligonucleotide
gcccttcattgcccaacattgaatgagttcagagatattagaaaacacctgcctgagtca

SEQ ID NO: 100841 - DNA, 60 bp, Artificial
  Synthetic oligonucleotide
gggaggcagtggcaacttaacagcaattgaaacaggtgtagcccaaacatctgctgcaga

SEQ ID NO: 100842 - DNA, 60 bp, Artificial
  Synthetic oligonucleotide
gcttgttcatggaaaacctgggtgtggaaagtcacttttaacatcaattttgggaagaca

SEQ ID NO: 100843 - DNA, 60 bp, Artificial
  Synthetic oligonucleotide
gatgggtacacaggtcaagaggttgtgataatggatgacttgggacagaatccagatgga

SEQ ID NO: 100844 - DNA, 60 bp, Artificial
  Synthetic oligonucleotide
ctttggatgggcacacaagcaaggacctagtgattggctcaaggacttcaatgctgccat

SEQ ID NO: 100845 - DNA, 59 bp, Artificial
  Synthetic oligonucleotide
acctggtaagaatgtttcatttagagtaccatttacgtcaccggggaatttctttgcca

SEQ ID NO: 100846 - DNA, 60 bp, Artificial
  Synthetic oligonucleotide
cccccccccataccttttccccctctttaacggcaatggttaatggactaaggataaagg

SEQ ID NO: 100847 - DNA, 60 bp, Artificial
  Synthetic oligonucleotide
gacttggatgtggttctggagccgctagaagagattccttatcaggtgatgtactgcccc

SEQ ID NO: 100848 - DNA, 60 bp, Artificial
  Synthetic oligonucleotide
ctgttggaagtcgacaaggaacccaggactttgccaaatttgacatgtcttttgaggcca

SEQ ID NO: 100849 - DNA, 60 bp, Artificial
  Synthetic oligonucleotide
ctgcagatgtccaaatggcaactagagtcacaaaggcaacattttctgcacaagacactg

SEQ ID NO: 100850 - DNA, 60 bp, Artificial
  Synthetic oligonucleotide
ccccattacagtgtcaatttgtccaatggagagtgagtttggaggtctgagaaatgcaac

SEQ ID NO: 100851 - DNA, 60 bp, Artificial
  Synthetic oligonucleotide
attggtggggctttgcaactcccctctacaacaccaggagtcccacagattagtgcaccc

SEQ ID NO: 100852 - DNA, 60 bp, Artificial
  Synthetic oligonucleotide
gtccaggcaaggtattttccagactgttgggagtggccttgaccacattctgtctttggc

SEQ ID NO: 100853 - DNA, 60 bp, Artificial
  Synthetic oligonucleotide
ttacttaaggtcaagcacttctgtttccccggtcaacgttgatatgctctaacagggcaa

SEQ ID NO: 100854 - DNA, 60 bp, Artificial
  Synthetic oligonucleotide
caccagggcaaaaacaactgcgatcgttatccgcaaggcgcctacacaaagcttagtagc

SEQ ID NO: 100855 - DNA, 60 bp, Artificial
  Synthetic oligonucleotide
gggtgtgaagccatacgatggacagggtgtgaagagccccgtgtgctcgctttgagtcct

SEQ ID NO: 100856 - DNA, 60 bp, Artificial
  Synthetic oligonucleotide
gctatcctctcctttgcacgccgtgggaccatacaggagaagttgatctccgtggcggga

SEQ ID NO: 100857 - DNA, 60 bp, Artificial
  Synthetic oligonucleotide
tgggcaagaagagtacaatgattttgtgcggaagatacgcagcgtcagcgctggacgcgc

SEQ ID NO: 100858 - DNA, 60 bp, Artificial
  Synthetic oligonucleotide
gcatcatgggcgctcaggtatctagacagaatgttggcacacactcaacgcaaaactcag

SEQ ID NO: 100859 - DNA, 60 bp, Artificial
  Synthetic oligonucleotide
gacaactgatgactaccaatctcccagtgccctgccctggtttcacccgacaaaagagat

SEQ ID NO: 100860 - DNA, 60 bp, Artificial
  Synthetic oligonucleotide
atttattttcagccttccacagaaatcctggaattgtcaccggctccgcagtagggtgcg

SEQ ID NO: 100861 - DNA, 60 bp, Artificial
  Synthetic oligonucleotide
ctctgtcattccggtgaccttgcacgccagttttatcaccccttccctcttgtaacttag

SEQ ID NO: 100862 - DNA, 60 bp, Artificial
  Synthetic oligonucleotide
ggacaacagattcaaagggctggtggtggaagttaccagatgcactcaaggatatgggga

SEQ ID NO: 100863 - DNA, 60 bp, Artificial
  Synthetic oligonucleotide
ctggcaacatggtcaaccctaccctcgattctcacttccatttcttagtatagcctcagc

SEQ ID NO: 100864 - DNA, 60 bp, Artificial
  Synthetic oligonucleotide
gtttcatgttctgtggttcagctggcacaacactcaagctgctgattgcctacacacccc

SEQ ID NO: 100865 - DNA, 60 bp, Artificial
  Synthetic oligonucleotide
tgaaccagttgctgtcatgatacacggcccgcctggaactggaaaatccataaccaccag

SEQ ID NO: 100866 - DNA, 60 bp, Artificial
  Synthetic oligonucleotide
gtggtggggtcttatacaaaataggcaacattctaggtatacatgtaggtggtaatggaa

SEQ ID NO: 100867 - DNA, 60 bp, Artificial
  Synthetic oligonucleotide
atattctggtgaacccaaacccaaaacaaaaaccccagaaagaagagttgttgcacaggg

SEQ ID NO: 100868 - DNA, 60 bp, Artificial
  Synthetic oligonucleotide
cacaaatcactcacttctcacccctccaactatcacctcactatctgcaatgaacagaag

SEQ ID NO: 100869 - DNA, 60 bp, Artificial
  Synthetic oligonucleotide
gaagaagataaacgccgcagaaatgtggtagatgtcatgacagcaatattccaaggtcca

SEQ ID NO: 100870 - DNA, 60 bp, Artificial
  Synthetic oligonucleotide
gccatgtggcgtttatagacttgagacatttccactgtgcagaagagcagggcatcacag

SEQ ID NO: 100871 - DNA, 60 bp, Artificial
  Synthetic oligonucleotide
ggagtacaagccacctgtcccagttaggaatagccccagagacattgtcacagtaggacc

SEQ ID NO: 100872 - DNA, 60 bp, Artificial
  Synthetic oligonucleotide
atcacttgtgtcacctcccagcaccccccaacaagctagaatgctatgttttgtatcagg

SEQ ID NO: 100873 - DNA, 60 bp, Artificial
  Synthetic oligonucleotide
tgtcgtaacgggtaactctgcagcggaaccgactactttgggtgtccgtgtttcctttta

SEQ ID NO: 100874 - DNA, 60 bp, Artificial
  Synthetic oligonucleotide
gcaaaaacaactgagatcgttacccgcaaggtgcctacgcaaagcctagtaaccccttga

SEQ ID NO: 100875 - DNA, 60 bp, Artificial
  Synthetic oligonucleotide
tgaacaaggaccaataggcagtaaccacccaggttgctaaaggtcaagcacttctgtttc

SEQ ID NO: 100876 - DNA, 60 bp, Artificial
  Synthetic oligonucleotide
gaagtcctagtggtacccaacatcagagaaagtcatccaagcacctctaactctgcccca

SEQ ID NO: 100877 - DNA, 60 bp, Artificial
  Synthetic oligonucleotide
gaggagtaataattcagcaactataatagtaccttatgtcaatgcagtcccaatggattc

SEQ ID NO: 100878 - DNA, 60 bp, Artificial
  Synthetic oligonucleotide
accagcggaatgtaaggttgagagggatcttaatatagcaaacaccatcatcacaattat

SEQ ID NO: 100879 - DNA, 60 bp, Artificial
  Synthetic oligonucleotide
cgagcacatctcagggttggtggtggaagttaccagatgcacttaaggacatgggtattt

SEQ ID NO: 100880 - DNA, 60 bp, Artificial
  Synthetic oligonucleotide
caaccgtatctctggttgttccatgggtcagtgctagccatttcaggtacaccactccag

SEQ ID NO: 100881 - DNA, 60 bp, Artificial
  Synthetic oligonucleotide
gtgttagcgctggtcgtgcactgtacattcctccttacgatttgctgctgcatgagtggt

SEQ ID NO: 100882 - DNA, 60 bp, Artificial
  Synthetic oligonucleotide
aagacaggtactaccccatcaaagttactagtcacgactggtatgagattcaggaaagtg

SEQ ID NO: 100883 - DNA, 60 bp, Artificial
  Synthetic oligonucleotide
aattactgctggtggagaggggcatgtggcatttatagatctcaggcaatttcattgtgc

SEQ ID NO: 100884 - DNA, 60 bp, Artificial
  Synthetic oligonucleotide
acttcagcctagtgtattctttgatgtatttccaggtactaaagaaccagctgtcctctc

SEQ ID NO: 100885 - DNA, 60 bp, Artificial
  Synthetic oligonucleotide
attcacggaaatgtgtaatgcagctagaggtttggagtggatcgggaataaaatatctaa

SEQ ID NO: 100886 - DNA, 60 bp, Artificial
  Synthetic oligonucleotide
ccaaggtggaagattcttttgacctgtacaacaaggatggggttaaactagagattactg

SEQ ID NO: 100887 - DNA, 60 bp, Artificial
  Synthetic oligonucleotide
agtggtggctcagggtccagaagaggagtttggaagatcactcattaagcacaactcatg

SEQ ID NO: 100888 - DNA, 60 bp, Artificial
  Synthetic oligonucleotide
gggagggatggattcgctgccatgctattgagatcttacttttctgaaacacagggtgaa

SEQ ID NO: 100889 - DNA, 60 bp, Artificial
  Synthetic oligonucleotide
ggcactttgtgcatgcgaatagtcacaaaccagcaagcacatgaggtggaaattaccacc

SEQ ID NO: 100890 - DNA, 60 bp, Artificial
  Synthetic oligonucleotide
gacatggaagcaattgccaaggagggtaccaagtatggattaacaataacaccagctgac

SEQ ID NO: 100891 - DNA, 60 bp, Artificial
  Synthetic oligonucleotide
atgttgccaatgcagtggtgggttatggcgtgtggcctcactatttaagtgcaacggatg

SEQ ID NO: 100892 - DNA, 60 bp, Artificial
  Synthetic oligonucleotide
acagaaggcttggaagctcttgatcttaacactagtgcaggatttccatacgtgtcgatg

SEQ ID NO: 100893 - DNA, 60 bp, Artificial
  Synthetic oligonucleotide
acattggactggaagcctgcggttcagttttatgttctgtggcactgcaaatactaccct

SEQ ID NO: 100894 - DNA, 60 bp, Artificial
  Synthetic oligonucleotide
tatattgtcaccatgggcgctcaagtatccagacagaatgttggtactcactcaacacaa

SEQ ID NO: 100895 - DNA, 60 bp, Artificial
  Synthetic oligonucleotide
cagctagtacatgcaatccagcatgcagctagtcgtaacgagcaattgcgggacgggacc

SEQ ID NO: 100896 - DNA, 60 bp, Artificial
  Synthetic oligonucleotide
tctcaaaatttcacttaaatccaggcattgtcacaggttctgctgtaggctgtgatcctg

SEQ ID NO: 100897 - DNA, 60 bp, Artificial
  Synthetic oligonucleotide
gtgtggttggtcgttcggctgtaccccacagtagacctggcagatgaggctagatgttcc

SEQ ID NO: 100898 - DNA, 60 bp, Artificial
  Synthetic oligonucleotide
ccatccgcattaccgtggtatcatccaaccaaagaaatcctaataccaggagaggtcaaa

SEQ ID NO: 100899 - DNA, 60 bp, Artificial
  Synthetic oligonucleotide
gccacctggggctccagtaccaactaagagagatgattttgcttggcagtcgggaacaaa

SEQ ID NO: 100900 - DNA, 60 bp, Artificial
  Synthetic oligonucleotide
ccgggactggtaaatcaatgaccacaaactttctagctaggatgataacaagtgagagtg

SEQ ID NO: 100901 - DNA, 60 bp, Artificial
  Synthetic oligonucleotide
gtctagagatgatcccaaagtagtaactgctggaccaagtgatatgtatgtccatgttgg

SEQ ID NO: 100902 - DNA, 60 bp, Artificial
  Synthetic oligonucleotide
caaagacccacaaggcaaattaaatgtgactgctgctttccgaccatgtgatgtggatgc

SEQ ID NO: 100903 - DNA, 60 bp, Artificial
  Synthetic oligonucleotide
gcggcgtagacaggtgatcgatgtcatggccgcaatttttcagggacccatcactcttga

SEQ ID NO: 100904 - DNA, 60 bp, Artificial
  Synthetic oligonucleotide
ggttgacgctagtctcctagcccaatcaggaaaagactatggactaaccatgaccccagc

SEQ ID NO: 100905 - DNA, 60 bp, Artificial
  Synthetic oligonucleotide
ggttgacgctagtctcctagcccaatcaggaaaagactatggattaaccatgacaccagc

SEQ ID NO: 100906 - DNA, 60 bp, Artificial
  Synthetic oligonucleotide
ggttgacgctagtctcctagcccaatcaggaaaagactatggactaaccatgaccccggc

SEQ ID NO: 100907 - DNA, 60 bp, Artificial
  Synthetic oligonucleotide
ggttgacgctagtctcctagcccaatcaggaaaagactatggactaaccatgactcctgc

SEQ ID NO: 100908 - DNA, 60 bp, Artificial
  Synthetic oligonucleotide
ggttgacgctagtctcctagcccaatcaggaaaagactatggactaaccatgactccggc

SEQ ID NO: 100909 - DNA, 60 bp, Artificial
  Synthetic oligonucleotide
gacgctagtctcctagcccaatcaggaaaagactatggactaactatgactccagctgac

SEQ ID NO: 100910 - DNA, 60 bp, Artificial
  Synthetic oligonucleotide
ggttgacgctagtctcctagcccaatcaggaaaagactatggactgaccatgactccagc

SEQ ID NO: 100911 - DNA, 60 bp, Artificial
  Synthetic oligonucleotide
cataacccaagtaaaacaaaattgcaacctagtgtattttatgatattttccctggctcc

SEQ ID NO: 100912 - DNA, 60 bp, Artificial
  Synthetic oligonucleotide
ggcaagtgcttggaatacacgtaggaggaaatggtagagatggattttcagctatgttgc

SEQ ID NO: 100913 - DNA, 60 bp, Artificial
  Synthetic oligonucleotide
ggtagagatggattttcagctatgttgcttagatcctactttacagacacacaaggtcag

SEQ ID NO: 100914 - DNA, 60 bp, Artificial
  Synthetic oligonucleotide
tcttcgagattccaagctacagatcactttacctgcgttgggtgaacgccgtgtgcggcg

SEQ ID NO: 100915 - DNA, 60 bp, Artificial
  Synthetic oligonucleotide
tcttcgagattccaagctacagatcactttacctgcgttgggtgaacgccgtgtgcggtg

SEQ ID NO: 100916 - DNA, 60 bp, Artificial
  Synthetic oligonucleotide
ccttttcgagattccaagctacagatcactttacctgcgttgggtgaacgccgtgtgcgg

SEQ ID NO: 100917 - DNA, 60 bp, Artificial
  Synthetic oligonucleotide
ctttgagataccaagctacagatcactttacctgcgttgggtgaacgccgtgtgcggtga

SEQ ID NO: 100918 - DNA, 52 bp, Artificial
  Synthetic oligonucleotide
actctattattccggtaattttgtacgccagttttatcctcccctcccctta

SEQ ID NO: 100919 - DNA, 60 bp, Artificial
  Synthetic oligonucleotide
attccaagctacagatcactttacctgcgttgggtgaacgccgtgtgcggtgacgcataa

SEQ ID NO: 100920 - DNA, 60 bp, Artificial
  Synthetic oligonucleotide
gggcagcgtgtcgtaatgggcaactctgcagcggaaccgactactttgggtgtccgtgtt

SEQ ID NO: 100921 - DNA, 60 bp, Artificial
  Synthetic oligonucleotide
ggactctatgcttagacacaataattggagtttggtaataatcccaatttgtcctctaga

SEQ ID NO: 100922 - DNA, 60 bp, Artificial
  Synthetic oligonucleotide
tgtacccgggcggtcccactcttcacaggaatctgcacaggtggctttcacctctggaca

SEQ ID NO: 100923 - DNA, 55 bp, Artificial
  Synthetic oligonucleotide
tgtacccgggcggtcccactcttcacaggaatctgcacaggtggctttcacctct

SEQ ID NO: 100924 - DNA, 60 bp, Artificial
  Synthetic oligonucleotide
cccaccatgtactacatgggtagaagtcttcggaccttgggttaaaaaacgtctaggccc

SEQ ID NO: 100925 - DNA, 60 bp, Artificial
  Synthetic oligonucleotide
ggggccttgagcctggataccatggaacaacacattatgtggatgaagaatctggaaacc

SEQ ID NO: 100926 - DNA, 60 bp, Artificial
  Synthetic oligonucleotide
ggggccttgagcctggataccatggaacaacatattatgtggatgaagaatttggaaacc

SEQ ID NO: 100927 - DNA, 60 bp, Artificial
  Synthetic oligonucleotide
gaagaatttggaaacctttccagaacaacttgttagctttgaaaatgagttggtgttgca

SEQ ID NO: 100928 - DNA, 60 bp, Artificial
  Synthetic oligonucleotide
gtcgtaacgcgcaagtctgtggcggaaccgactactttgggtgtccgtgtttccttttgt

SEQ ID NO: 100929 - DNA, 60 bp, Artificial
  Synthetic oligonucleotide
gcgtagtgttgtgggataccctagagtacacattaaacacccactggtttggtaggacac

SEQ ID NO: 100930 - DNA, 60 bp, Artificial
  Synthetic oligonucleotide
gcggaaccgactactttgggtgtccgtgtttcattttattcctatgctggctgcttatgg

SEQ ID NO: 100931 - DNA, 60 bp, Artificial
  Synthetic oligonucleotide
agaaggaaatatgaattgtttacatacacaagatttgactcagaaataacaatagtcacc

SEQ ID NO: 100932 - DNA, 60 bp, Artificial
  Synthetic oligonucleotide
ctatgcttagacataataattggagtttggtgatcataccaatatgtcctttacaggttg

SEQ ID NO: 100933 - DNA, 60 bp, Artificial
  Synthetic oligonucleotide
caatgctgtgccaatggactctatgcttagacataataattggagtttggtcataattcc

SEQ ID NO: 100934 - DNA, 60 bp, Artificial
  Synthetic oligonucleotide
cactccccactggtgacagtggtccagcctgcgtggctgcctgctcaccctattgggtga

SEQ ID NO: 100935 - DNA, 60 bp, Artificial
  Synthetic oligonucleotide
gatatgctttacccaaggcaaaaaccttaaagatcgttatccgcacattaactacgcaaa

SEQ ID NO: 100936 - DNA, 60 bp, Artificial
  Synthetic oligonucleotide
acaaacctgtgatggcttcgaagaccctcgaggctatcctctcctttgcacgccgtgggc

SEQ ID NO: 100937 - DNA, 60 bp, Artificial
  Synthetic oligonucleotide
acaaacctgtgatggcttcgaagaccctcgaggctatcctctcctttgcacgccgtggga

SEQ ID NO: 100938 - DNA, 60 bp, Artificial
  Synthetic oligonucleotide
agtcctccggcccctgaatgcggctaatcctaactgtggagcagatacccacgcaccagt

SEQ ID NO: 100939 - DNA, 60 bp, Artificial
  Synthetic oligonucleotide
gaacaagagatttgtgcgcattccctcacgtttaaaggatgcccgaaatgttctgccctg

SEQ ID NO: 100940 - DNA, 60 bp, Artificial
  Synthetic oligonucleotide
tttcttatcgcttacacaccacctggagcgggcaaaccgacaagccgcgaccaggccatg

SEQ ID NO: 100941 - DNA, 60 bp, Artificial
  Synthetic oligonucleotide
gggcaagccagaatacgaccgactctttgccccatttcgtgaagtaggggtcgttgtgcc

SEQ ID NO: 100942 - DNA, 60 bp, Artificial
  Synthetic oligonucleotide
tcagtgatcttgacgcctgggccacagtttgaccccgcttatgaccagctgagaccccag

SEQ ID NO: 100943 - DNA, 60 bp, Artificial
  Synthetic oligonucleotide
ttcgaccggagcatccaccagcttagacattacagcttcaatccagccagtgagacctgt

SEQ ID NO: 100944 - DNA, 60 bp, Artificial
  Synthetic oligonucleotide
gcggacttgttgatccatgacattgagacgaaccctggacccttcatggccaagccgaag

SEQ ID NO: 100945 - DNA, 60 bp, Artificial
  Synthetic oligonucleotide
gtgccgtacaattctcccctttcagtcctgccagccgtgtggtataatggtcacaagcgg

SEQ ID NO: 100946 - DNA, 60 bp, Artificial
  Synthetic oligonucleotide
ctctgcaatgctgtgtgccgccactttagctctcagtcaggttgtcaagatggcgaaaac

SEQ ID NO: 100947 - DNA, 60 bp, Artificial
  Synthetic oligonucleotide
acctgtcagaccgcgtgttgcaagacaccgccggcaatacggtcacaaacacccaatcaa

SEQ ID NO: 100948 - DNA, 60 bp, Artificial
  Synthetic oligonucleotide
tggattattccaattttgattcaacccattcggtggcgatgttccgtctactggcagagg

SEQ ID NO: 100949 - DNA, 60 bp, Artificial
  Synthetic oligonucleotide
ttgtgctccgcggtgatgcaggacaggggaagtcactttcaagccaggtcattgcccagg

SEQ ID NO: 100950 - DNA, 60 bp, Artificial
  Synthetic oligonucleotide
gagagcctttagacccacaggtgatgctcccctcccgtgctttcagaacaactgtctctt

SEQ ID NO: 100951 - DNA, 60 bp, Artificial
  Synthetic oligonucleotide
ggcagcttgctagtgttcatggcgcctgaataccccaccctcgatgcctttgccatggac

SEQ ID NO: 100952 - DNA, 60 bp, Artificial
  Synthetic oligonucleotide
acgaaagactgccctccgtccaaccgtcgcaagaagggttttccagccagcctacgcccc

SEQ ID NO: 100953 - DNA, 60 bp, Artificial
  Synthetic oligonucleotide
ttccattctgatttcttattcatctgacttagtcatataccgaacaaacacaataggtga

SEQ ID NO: 100954 - DNA, 61 bp, Artificial
  Synthetic oligonucleotide
cttattcatctgacttagtcatataccgaacaaacacaataggtgatgactatataccaac

SEQ ID NO: 100955 - DNA, 60 bp, Artificial
  Synthetic oligonucleotide
gcccaaacttatgatgtgtttgttaatgccctgagtcttgtgtttggccgcttgccccgt

SEQ ID NO: 100956 - DNA, 60 bp, Artificial
  Synthetic oligonucleotide
ttcaaatgatgttgaaggtgttgttgtgggtcagtttgaaggtgaaatgttgcatagatc

SEQ ID NO: 100957 - DNA, 60 bp, Artificial
  Synthetic oligonucleotide
ccccttcccctgagccggggatcttggctcattcccctcttttctatcctccctcattgg

SEQ ID NO: 100958 - DNA, 60 bp, Artificial
  Synthetic oligonucleotide
gtaagatcaggctttgtagcacaactccaggtgaatgttgcccctggcagtagcggactg

SEQ ID NO: 100959 - DNA, 60 bp, Artificial
  Synthetic oligonucleotide
ccttgtggctgtgatggaggacataccctcgggtgtagttgtgtgcgtgtcgctctgcga

SEQ ID NO: 100960 - DNA, 60 bp, Artificial
  Synthetic oligonucleotide
accgcaagaagaagggcattgggtgttggccatggtagtgccatacactactgtgcgatc

SEQ ID NO: 100961 - DNA, 60 bp, Artificial
  Synthetic oligonucleotide
agttgttcccattgccccatataatgctggcccacaaacggattctgaagttcttgctac

SEQ ID NO: 100962 - DNA, 60 bp, Artificial
  Synthetic oligonucleotide
gggctattggcaattttccttcagtacttatggatatatccaggatgactactgccactc

SEQ ID NO: 100963 - DNA, 60 bp, Artificial
  Synthetic oligonucleotide
gacctacagtgtcctactccataccgtgaaggctttgtgaaacccgaaacatacccaatt

SEQ ID NO: 100964 - DNA, 60 bp, Artificial
  Synthetic oligonucleotide
ggcacgcatcatctgtcacgggtcgtgtgaacggcactccattgactatgaacctccttg

SEQ ID NO: 100965 - DNA, 60 bp, Artificial
  Synthetic oligonucleotide
tggactttacggatgacccggcataaacttgacaaccgatgttggatttcccttgtggct

SEQ ID NO: 100966 - DNA, 55 bp, Artificial
  Synthetic oligonucleotide
gttttagaacgcctgaccgagagagagaaacttcatgcggacatgtgcagacaaa

SEQ ID NO: 100967 - DNA, 60 bp, Artificial
  Synthetic oligonucleotide
ttcctgtgcttcctcttggagagatgatcgataggatgtgctggactcgtggtccagagc

SEQ ID NO: 100968 - DNA, 60 bp, Artificial
  Synthetic oligonucleotide
ttgcttctccaatccactagtgggtgaggcgagagaccagctgtctgaacttctcgctgc

SEQ ID NO: 100969 - DNA, 60 bp, Artificial
  Synthetic oligonucleotide
tgatgaggagatagacatagagagaatggtttccttgtataagacagaattcggtgttac

SEQ ID NO: 100970 - DNA, 60 bp, Artificial
  Synthetic oligonucleotide
ttctgcttatgattctactttatctgatgagatattggcagctggtgttgaagtgttggc

SEQ ID NO: 100971 - DNA, 60 bp, Artificial
  Synthetic oligonucleotide
gctaaaatcaatgatttggtggtataattctgattgtataaagactggtgtggctcccgg

SEQ ID NO: 100972 - DNA, 60 bp, Artificial
  Synthetic oligonucleotide
gtagggaatggaactgccactgttgtgtttgaaacttttatgaaggatgaactgcgacca

SEQ ID NO: 100973 - DNA, 60 bp, Artificial
  Synthetic oligonucleotide
gctgaatgctccatctctcgcccttgctggtgagggacatttgattgacacacacacccc

SEQ ID NO: 100974 - DNA, 59 bp, Artificial
  Synthetic oligonucleotide
aagttatagttgaggccagagttttgattaagcctactcctatctgttttatgtgctac

SEQ ID NO: 100975 - DNA, 60 bp, Artificial
  Synthetic oligonucleotide
gcaactttagtgattggtatgctttgtggcgcatctctatttacccttgccactcatgct

SEQ ID NO: 100976 - DNA, 60 bp, Artificial
  Synthetic oligonucleotide
ggtgttgagagatcacaagaattacatcattaggagttgcctcaacatgcttgccctttc

SEQ ID NO: 100977 - DNA, 60 bp, Artificial
  Synthetic oligonucleotide
agacatttcccagagtaattgctgtactcttgctgtcccttttaattcggaaacgtggat

SEQ ID NO: 100978 - DNA, 60 bp, Artificial
  Synthetic oligonucleotide
tcacgtttatgtttatgtgactgcttctcttggacctgacgccgcattctattgcccgcg

SEQ ID NO: 100979 - DNA, 58 bp, Artificial
  Synthetic oligonucleotide
cccctgaataccctgttaatgctattccccagaaaactgagctctttggtgagtccca

SEQ ID NO: 100980 - DNA, 60 bp, Artificial
  Synthetic oligonucleotide
gccgcttgccccgtaatgtgtatgatgttgctcgccgtgtattctcttcccgccccactc

SEQ ID NO: 100981 - DNA, 60 bp, Artificial
  Synthetic oligonucleotide
cagagtcagcatatgaggggtgttccacgcggaaaacagccaggcaactggctcgttcag

SEQ ID NO: 100982 - DNA, 60 bp, Artificial
  Synthetic oligonucleotide
gccttggtcaataaggcgtcccttgctctgcgtaaagtccctgcaacatatgtaacacca

SEQ ID NO: 100983 - DNA, 60 bp, Artificial
  Synthetic oligonucleotide
tccttttgatgatattgtgcagatgcaatgcccgtatactgtagaaagaaagaagtttta

SEQ ID NO: 100984 - DNA, 60 bp, Artificial
  Synthetic oligonucleotide
tagctgcaactcactatggaatcttttgttgaaaccgtaactaagtctttgcctgttgtc

SEQ ID NO: 100985 - DNA, 60 bp, Artificial
  Synthetic oligonucleotide
ttaacggagtggtacaatcctatgaacccaagtgcattcatgcgaaagccccggaggggt

SEQ ID NO: 100986 - DNA, 60 bp, Artificial
  Synthetic oligonucleotide
ggggcctatagcttgtccagtgctggttgacagactcgtgctacgcgtctggttcgagta

SEQ ID NO: 100987 - DNA, 60 bp, Artificial
  Synthetic oligonucleotide
agaaataacaccaacccattcacaggcattgcctctttcgctctgccaaaaagttactat

SEQ ID NO: 100988 - DNA, 60 bp, Artificial
  Synthetic oligonucleotide
caggaacaagtgcaaccacagcaaattccagaacccaagccggtaacagttgccatgccc

SEQ ID NO: 100989 - DNA, 60 bp, Artificial
  Synthetic oligonucleotide
atatgtaacaccatctcatcctcgtgttgaaccgttaggggtttggttgcgcggagctcc

SEQ ID NO: 100990 - DNA, 60 bp, Artificial
  Synthetic oligonucleotide
gatcctcggctgaaggtgcaaattgacggagatcttcctgatcacttgtgcaagaagtgg

SEQ ID NO: 100991 - DNA, 60 bp, Artificial
  Synthetic oligonucleotide
gttttactctcagtctgtttcgcaggtgagctacttgccatgtctagaagtgcgcgaggg

SEQ ID NO: 100992 - DNA, 60 bp, Artificial
  Synthetic oligonucleotide
aattggatattcctgagttgttgccaagcatttctaagtatgtatcttcctctgtccccg

SEQ ID NO: 100993 - DNA, 60 bp, Artificial
  Synthetic oligonucleotide
cccctctgatgtttcagaattcgtccacctcctaaaattctgtgcctatgttgaaactcc

SEQ ID NO: 100994 - DNA, 60 bp, Artificial
  Synthetic oligonucleotide
cctacatgatattgcctccctattctcttatggaaaacacagttcgctcagtgtgtgggc

SEQ ID NO: 100995 - DNA, 60 bp, Artificial
  Synthetic oligonucleotide
gactcgtacacagaaaggcatgtgtggtggtttgctcgttggaaagattgatggagcttt

SEQ ID NO: 100996 - DNA, 60 bp, Artificial
  Synthetic oligonucleotide
attccaagctgcagtctggttgcttttgccctcttcccaatgtgtatgtgcctccaactc

SEQ ID NO: 100997 - DNA, 60 bp, Artificial
  Synthetic oligonucleotide
gctgcactaggtacgtcacggaaagtggttgttcatttggcctttcgtaatcttaggctc

SEQ ID NO: 100998 - DNA, 60 bp, Artificial
  Synthetic oligonucleotide
ccccgagaagttattgaggctaggcgctctaacattcttgataagctatcttatgcaaag

SEQ ID NO: 100999 - DNA, 60 bp, Artificial
  Synthetic oligonucleotide
tgttgatatgtcttctcacggctctgttcttgttccaggaaaatcttcagttgttactgc

SEQ ID NO: 101000 - DNA, 60 bp, Artificial
  Synthetic oligonucleotide
ggccctcaacattccaaaacgtggtgtggttaatttgatgagagccttctgttactggtc

SEQ ID NO: 101001 - DNA, 60 bp, Artificial
  Synthetic oligonucleotide
ggttcacatatttgggctactacactcccgacagtggtggatggaagaaggtggccctca

SEQ ID NO: 101002 - DNA, 60 bp, Artificial
  Synthetic oligonucleotide
ccagttttaggacatacaccttgaccactcctgccgcacttgagagacgttttcctctgg

SEQ ID NO: 101003 - DNA, 65 bp, Artificial
  Synthetic oligonucleotide
gttcactgcattgatgatttaggacaaaataaagatgagaaagacatttcacttatttgccagtg

SEQ ID NO: 101004 - DNA, 60 bp, Artificial
  Synthetic oligonucleotide
gttctgctggatggagatgtcgagagcaaccctggccctctgtatgtttgttcccaacca

SEQ ID NO: 101005 - DNA, 60 bp, Artificial
  Synthetic oligonucleotide
caaggtctctttgagattccaagctacagatcactttacctgcgttgggtgaacgccgtg

SEQ ID NO: 101006 - DNA, 60 bp, Artificial
  Synthetic oligonucleotide
ttagtgagataccacgcttgtggaccttatgctcacacagccatcctctagtaagtttgt

SEQ ID NO: 101007 - DNA, 60 bp, Artificial
  Synthetic oligonucleotide
ccacgcttgtggaccttatgctcacacagccatcctctagtaagtttgtgagacgtctgg

SEQ ID NO: 101008 - DNA, 60 bp, Artificial
  Synthetic oligonucleotide
cctggtaacaggtgcctctggggccaaaagccaaggtttaatagaccctttaggattggt

SEQ ID NO: 101009 - DNA, 60 bp, Artificial
  Synthetic oligonucleotide
ggcgtgccataactctaacagtgagataccacgcttgtggaccttatgctcacacagcca

SEQ ID NO: 101010 - DNA, 60 bp, Artificial
  Synthetic oligonucleotide
ggcgtgccataattctaatagtgagataccacgcttgtggaccttatgctcacacagcca

SEQ ID NO: 101011 - DNA, 60 bp, Artificial
  Synthetic oligonucleotide
ggcgtgccataactctaatagtgagataccacgcttgtggaccttatgctcacacagcca

SEQ ID NO: 101012 - DNA, 60 bp, Artificial
  Synthetic oligonucleotide
gatggagttatgcctccatggaaaagacacttacttatactacatcaaaatcttggatcc

SEQ ID NO: 101013 - DNA, 60 bp, Artificial
  Synthetic oligonucleotide
ggcagatggcgtgccataactctaatagtgagataccacgcttgtggaccttatgctcac

SEQ ID NO: 101014 - DNA, 57 bp, Artificial
  Synthetic oligonucleotide
gactcagaccatgtggtcttcaatgagagatggttgattcatggtggtatgccatca

SEQ ID NO: 101015 - DNA, 60 bp, Artificial
  Synthetic oligonucleotide
taattgactcagaccatgtggtcttcaatgagagatggttgattcatggtggtatgccat

SEQ ID NO: 101016 - DNA, 60 bp, Artificial
  Synthetic oligonucleotide
ggtagtgtgtcgtaatgggcaactctgcagcggaaccgactactttgggtgtccgtgttt

SEQ ID NO: 101017 - DNA, 60 bp, Artificial
  Synthetic oligonucleotide
ctgggacgttcatgaccacaggaaaagttctcctagcatacaccccaccaggaggcgaca

SEQ ID NO: 101018 - DNA, 60 bp, Artificial
  Synthetic oligonucleotide
ttcgttggacgaaagaccccaggcacactgaggaccacgtgcgctcgctatgcctattgg

SEQ ID NO: 101019 - DNA, 60 bp, Artificial
  Synthetic oligonucleotide
cgcgtttaccacctagagaaacgtgtgctcggcgccatgcagttcaagaccaagaatcgc

SEQ ID NO: 101020 - DNA, 60 bp, Artificial
  Synthetic oligonucleotide
actgagatgtgtaacgccttcaggggccttgattggatcgccgcgaagatctcgaaattc

SEQ ID NO: 101021 - DNA, 60 bp, Artificial
  Synthetic oligonucleotide
gtgttggccatccccgaacaccagattgccacccaggagcaaccccaattcgaccgtaca

SEQ ID NO: 101022 - DNA, 60 bp, Artificial
  Synthetic oligonucleotide
agcaaggacgcaggttacccagtcatcaacgcacccacccaaaccaagctggaacccagt

SEQ ID NO: 101023 - DNA, 60 bp, Artificial
  Synthetic oligonucleotide
gaaggactggaggcgttagatctaggcactagtgcaggttacccctacgtggcgatgggc

SEQ ID NO: 101024 - DNA, 60 bp, Artificial
  Synthetic oligonucleotide
gaggggcctcctgttcaattttcagtcccgttcatgagcacagccaacgcatactcaaat

SEQ ID NO: 101025 - DNA, 60 bp, Artificial
  Synthetic oligonucleotide
acgtcgcaccagcagaccggttcgcttaggacccttctgcggattggtatgagtcccttc

SEQ ID NO: 101026 - DNA, 60 bp, Artificial
  Synthetic oligonucleotide
ctggccttcaaagctgtccgaccatgatgccacgtccgtagataaacccaccgaaccggg

SEQ ID NO: 101027 - DNA, 60 bp, Artificial
  Synthetic oligonucleotide
cgaggtttggcagtcataccagcgtgatctcctcgtcaccagagtggacgcacatgggtg

SEQ ID NO: 101028 - DNA, 60 bp, Artificial
  Synthetic oligonucleotide
gaaccgtgctctcgctgtcattcagagtgtttccctcatagccgccgtcgctgggaccat

SEQ ID NO: 101029 - DNA, 60 bp, Artificial
  Synthetic oligonucleotide
gacaccacaccgctggtacccatcacagtgacgatagctcccatggaaaccgaatacaac

SEQ ID NO: 101030 - DNA, 60 bp, Artificial
  Synthetic oligonucleotide
ccctggtaccatttctggttgcgcagttgggtgcgacccggagacgttttggagcaagat

SEQ ID NO: 101031 - DNA, 59 bp, Artificial
  Synthetic oligonucleotide
gccgagcccggagattgcggtggcctgctccgttgcgagcacggggtcatgggcattct

SEQ ID NO: 101032 - DNA, 60 bp, Artificial
  Synthetic oligonucleotide
agtggtcccaacccatggagtgcacgagacgagtgtggagagtttctatggtaggtcggc

SEQ ID NO: 101033 - DNA, 60 bp, Artificial
  Synthetic oligonucleotide
gcctcggcagctcagaacaagcaggacttcacgcaggatccatcaaagttcacacagccc

SEQ ID NO: 101034 - DNA, 60 bp, Artificial
  Synthetic oligonucleotide
catggcccaaactgcagccctacaaaacgaccctggcaaggcgctcgagagtgctataca

SEQ ID NO: 101035 - DNA, 60 bp, Artificial
  Synthetic oligonucleotide
acctagctggcagacctacacacagagttttgatgtacgagttcccaaccaaagccgggc

SEQ ID NO: 101036 - DNA, 60 bp, Artificial
  Synthetic oligonucleotide
gcccgcgcgtgtcctcgggttcactcactgagtgttcactgcaatttcgagtaagatctg

SEQ ID NO: 101037 - DNA, 60 bp, Artificial
  Synthetic oligonucleotide
cgtcaaagtttgttttggcctctaccaacgctgggcaggtgactcctcctactgtggctg

SEQ ID NO: 101038 - DNA, 60 bp, Artificial
  Synthetic oligonucleotide
gggagcacaaatgagcagaagcacagccggaagccacaccactggtacatacgccactgg

SEQ ID NO: 101039 - DNA, 60 bp, Artificial
  Synthetic oligonucleotide
cagatcactttacctgcgttgggtgaacgccgtgtgcggtgacgcataatccctcggaga

SEQ ID NO: 101040 - DNA, 60 bp, Artificial
  Synthetic oligonucleotide
caaggggtaggctacgggtgaaacctcttaagctaatacttctatgaagagatgctttgg

SEQ ID NO: 101041 - DNA, 60 bp, Artificial
  Synthetic oligonucleotide
caagaggtaggctacgggtgaaacctcttaagctaatacttctatgaagagatgctttgg

SEQ ID NO: 101042 - DNA, 60 bp, Artificial
  Synthetic oligonucleotide
aagtgaatgggaagaaggctgtgtatggaatgcactccgctggtggaggtggcctcgcgg

SEQ ID NO: 101043 - DNA, 60 bp, Artificial
  Synthetic oligonucleotide
atggaaattggaaccggatctgtagtacatgtcccaagaaaaaccaaattgcgacgtact

SEQ ID NO: 101044 - DNA, 60 bp, Artificial
  Synthetic oligonucleotide
ctagtggctcaatcaccaaacaatggaaatgacatggaacacattattacgtgcctacgg

SEQ ID NO: 101045 - DNA, 60 bp, Artificial
  Synthetic oligonucleotide
gcagttgataggcggattacgttcgacctcacggttgaagctggacccgcttgcaagacc

SEQ ID NO: 101046 - DNA, 60 bp, Artificial
  Synthetic oligonucleotide
aggcttttcaggaaatccccggagaaccacaactggattgcttcagctctgactgcgctc

SEQ ID NO: 101047 - DNA, 60 bp, Artificial
  Synthetic oligonucleotide
attatcgcccaggcagtgtcaaagcttgcttttggacgtcagtctgtctactccattccc

SEQ ID NO: 101048 - DNA, 60 bp, Artificial
  Synthetic oligonucleotide
ccttcaattacaagattactcctgctaacaagaccagcactttccctcagacttcccacc

SEQ ID NO: 101049 - DNA, 60 bp, Artificial
  Synthetic oligonucleotide
cggtcttcaatggcttgcgacatgaggccgtcgtaccgcagagtcccattccagttacag

SEQ ID NO: 101050 - DNA, 60 bp, Artificial
  Synthetic oligonucleotide
gccacttgggtgtacgcggccgttctgacgttgggattcttcagatgaaagttatgtagg

SEQ ID NO: 101051 - DNA, 60 bp, Artificial
  Synthetic oligonucleotide
ctctttgtcttcactggaaccgccatgaccaaaggcaaattcctcattgcttacacaccc

SEQ ID NO: 101052 - DNA, 60 bp, Artificial
  Synthetic oligonucleotide
ggtggacgctatccctacttctcggctaccaactcagtcccagccactgctcttgctagc

SEQ ID NO: 101053 - DNA, 60 bp, Artificial
  Synthetic oligonucleotide
gtcttctggcctaatgacgagagcgatgtgtctgagacaatggactggactgaccttccg

SEQ ID NO: 101054 - DNA, 60 bp, Artificial
  Synthetic oligonucleotide
ccgcgtagactcagataaagctggaaattcggccgtaaacacccaatcatcagtaggccg

SEQ ID NO: 101055 - DNA, 60 bp, Artificial
  Synthetic oligonucleotide
cgcggcggtctttccgtctctcgaaaagcgcagatgcagcatgctggaaccggtgaagaa

SEQ ID NO: 101056 - DNA, 60 bp, Artificial
  Synthetic oligonucleotide
ccctggttcgatggttgttctctgtggaaccagagaatggtctttctcaagccctccagt

SEQ ID NO: 101057 - DNA, 60 bp, Artificial
  Synthetic oligonucleotide
acccaagcgtgtgtcctatttgcacagccattgacaaaagttccgacggaatgtatctgc

SEQ ID NO: 101058 - DNA, 60 bp, Artificial
  Synthetic oligonucleotide
acccgcaaccccattcaccatggattcctcatggcaaacaccccaacagaacccggtagg

SEQ ID NO: 101059 - DNA, 60 bp, Artificial
  Synthetic oligonucleotide
gccaattctatcttgctcactcccttaccttcctatgcacctgattcgaccactgggccc

SEQ ID NO: 101060 - DNA, 60 bp, Artificial
  Synthetic oligonucleotide
tttcttgcttttctcacctttcacctattataaggctgatcttgaagtgactctcagcgc

SEQ ID NO: 101061 - DNA, 60 bp, Artificial
  Synthetic oligonucleotide
gctatacgcccagtatcggcgacactcgtgaccctcacttgtggtttgtcggagctggca

SEQ ID NO: 101062 - DNA, 60 bp, Artificial
  Synthetic oligonucleotide
ccctctcagtcctccctgcagcttggtttaatggttggtcagattttggcaacaccaagg

SEQ ID NO: 101063 - DNA, 60 bp, Artificial
  Synthetic oligonucleotide
gccacgttgcagaaacagattgggtttcgttcgagctgagagatgttcgacacgagcgcg

SEQ ID NO: 101064 - DNA, 60 bp, Artificial
  Synthetic oligonucleotide
ctagacctgcagggcggaggcagaatcatagctcaggccgggaatcccgtgatggactat

SEQ ID NO: 101065 - DNA, 60 bp, Artificial
  Synthetic oligonucleotide
atcctgacctcaccgctaccatctgtctctccctgatgaccggagtggacgttctcacta

SEQ ID NO: 101066 - DNA, 60 bp, Artificial
  Synthetic oligonucleotide
ccatcctgtgaacacaacaacgggagcgaccttcaaccactgtcttcactaccgcgcgaa

SEQ ID NO: 101067 - DNA, 60 bp, Artificial
  Synthetic oligonucleotide
acagcttctcggccgttttgcctcgcgctttcagacaaaccctggacttgacctcggctc

SEQ ID NO: 101068 - DNA, 60 bp, Artificial
  Synthetic oligonucleotide
ggacttctccgacccgcacaaggcatggaacaggatttcgcctacgcggccaatgactcc

SEQ ID NO: 101069 - DNA, 60 bp, Artificial
  Synthetic oligonucleotide
ttacactagcacctccataacctcagtcgatggatggttgacagtttggcagctcacccc

SEQ ID NO: 101070 - DNA, 60 bp, Artificial
  Synthetic oligonucleotide
ccccaaggtgttgacaatgcagagaaaggcaaagtctctaatgacgatgccacagtggat

SEQ ID NO: 101071 - DNA, 60 bp, Artificial
  Synthetic oligonucleotide
tctcaatcttaggaccaacacctcagttgatttggaagttcccttcacaaacattgcccc

SEQ ID NO: 101072 - DNA, 60 bp, Artificial
  Synthetic oligonucleotide
gcgacatgcctatgaagacaggagagtgctcatcagaggtggcttgccttcaggctgtgc

SEQ ID NO: 101073 - DNA, 60 bp, Artificial
  Synthetic oligonucleotide
agtcctccctcccttgccgctcgttcacacccagaactaacaattcggccccttgtgacg

SEQ ID NO: 101074 - DNA, 60 bp, Artificial
  Synthetic oligonucleotide
caatgcgacgtggttggagattaaaccgactccgacgaaagtgctatcatgcctccccga

SEQ ID NO: 101075 - DNA, 60 bp, Artificial
  Synthetic oligonucleotide
acacaatagatttagctacctggacaacaactctaggcaccttctcccatatcaggattc

SEQ ID NO: 101076 - DNA, 60 bp, Artificial
  Synthetic oligonucleotide
ccatgtcaggaatccagaacctctttcttagagcactaggaattgatgcagaccacggcg

SEQ ID NO: 101077 - DNA, 60 bp, Artificial
  Synthetic oligonucleotide
ccgcgtactataaacagagattaatgcatgatgtggaaacaaacccaggcccgccggtgc

SEQ ID NO: 101078 - DNA, 60 bp, Artificial
  Synthetic oligonucleotide
cggctcagctataggaactgacccggacgttgattggacagtgttcgcacaccagcttgc

SEQ ID NO: 101079 - DNA, 60 bp, Artificial
  Synthetic oligonucleotide
ccccgtcccactctcttccttccttggccctcgaccaccactaccagaatccatgcagat

SEQ ID NO: 101080 - DNA, 60 bp, Artificial
  Synthetic oligonucleotide
ccactgtcagacacctctaccacgtggtcttcactggatcacgcaattcctttggagttg

SEQ ID NO: 101081 - DNA, 60 bp, Artificial
  Synthetic oligonucleotide
ctgtaccgccgttggcttgactcattttagtaaccctacctcagtcgaattggattgggt

SEQ ID NO: 101082 - DNA, 60 bp, Artificial
  Synthetic oligonucleotide
cactttcggtgtgtgaccctaagccattggacttctttactttactattcctccccaccc

SEQ ID NO: 101083 - DNA, 60 bp, Artificial
  Synthetic oligonucleotide
cactttcagtgtgtgaccctaagccattggacttctttactttactattcctccccaccc

SEQ ID NO: 101084 - DNA, 60 bp, Artificial
  Synthetic oligonucleotide
cactttacctgcgttgggtgaacgccgtgtgcggtgacgcataatccctcagatgtcgca

SEQ ID NO: 101085 - DNA, 60 bp, Artificial
  Synthetic oligonucleotide
ctttgagattccaagctacagatcactttacctgcgttgggtgaacgccgtgtgtggtga

SEQ ID NO: 101086 - DNA, 60 bp, Artificial
  Synthetic oligonucleotide
ctgtttcccaggagcgaggtataggctgtacccactgccaaaagcctttaaccgttatcc

SEQ ID NO: 101087 - DNA, 60 bp, Artificial
  Synthetic oligonucleotide
atacaacatctaatgtggatgaaaaatttcagcacatttaagcagcaactccaatcctac

SEQ ID NO: 101088 - DNA, 60 bp, Artificial
  Synthetic oligonucleotide
gcatcaaccaattcaaatacactcagtcctccaacaattttaaatccagaagcactagcc

SEQ ID NO: 101089 - DNA, 60 bp, Artificial
  Synthetic oligonucleotide
agatcaaccagtatcggcaaatgtctgttaataccagaatacagtgtcctacgccgacga

SEQ ID NO: 101090 - DNA, 60 bp, Artificial
  Synthetic oligonucleotide
ggggagaacggggtacaccatccatgtgcaatgtaacgccaccaagttccatagcggctg

SEQ ID NO: 101091 - DNA, 60 bp, Artificial
  Synthetic oligonucleotide
gtggtgttttatgctcaactggcaagatctacggtattcatgttggtggcaatggacggc

SEQ ID NO: 101092 - DNA, 60 bp, Artificial
  Synthetic oligonucleotide
taactacgcaacggttagtaacatcttgtcatttttgaggcgttcgatcaggtgagtaca

SEQ ID NO: 101093 - DNA, 60 bp, Artificial
  Synthetic oligonucleotide
gctgcaagttcatcgtctgccggtcagtccttctcaatggatccttccaagtttaccgaa

SEQ ID NO: 101094 - DNA, 60 bp, Artificial
  Synthetic oligonucleotide
ctcctagtgcaatgccgaattatgaaccaaccccactaatacacatcccaggggaagttc

SEQ ID NO: 101095 - DNA, 60 bp, Artificial
  Synthetic oligonucleotide
aagtgctaatgaaactggggctaccttaccaacaaatccatctgataatgtggagactag

SEQ ID NO: 101096 - DNA, 60 bp, Artificial
  Synthetic oligonucleotide
gtgtgcatggtccgatcggtctgctaacagcgggtgggagtggatatgtatgcttcgcag

SEQ ID NO: 101097 - DNA, 60 bp, Artificial
  Synthetic oligonucleotide
gatgcctctctgtctccagtgtggtttaaatgtcttgagcaagtactttccaggctcggg

SEQ ID NO: 101098 - DNA, 60 bp, Artificial
  Synthetic oligonucleotide
cctcgaagaccctcgaggctatcctctcctttgcacgccgtgggaccatacaggagaagt

SEQ ID NO: 101099 - DNA, 60 bp, Artificial
  Synthetic oligonucleotide
gcctcgaagaccctcgaggctatcctctcctttgcacgccgtgggaccatacaggagaag

SEQ ID NO: 101100 - DNA, 60 bp, Artificial
  Synthetic oligonucleotide
ccgccgatggcttgactcgttttagtaaccctacctcagtcgaattggattgggtcatac

SEQ ID NO: 101101 - DNA, 60 bp, Artificial
  Synthetic oligonucleotide
accgccgatggcttgactcgttttagtaaccctacctcagtcgaattggattgggtcata

SEQ ID NO: 101102 - DNA, 60 bp, Artificial
  Synthetic oligonucleotide
ccgccgttggcttgactcattctagtaaccctacctcagtcgaattggattgggtgatac

SEQ ID NO: 101103 - DNA, 60 bp, Artificial
  Synthetic oligonucleotide
gtaccgccgttggcttgactcattttagtaaccctacctcagtcgaattggattgggtca

SEQ ID NO: 101104 - DNA, 60 bp, Artificial
  Synthetic oligonucleotide
tgtccaaacaaggaattttccagactgttgggagtggccttgaccacatcctgtctttgg

SEQ ID NO: 101105 - DNA, 60 bp, Artificial
  Synthetic oligonucleotide
ccaaacaaggaattttccagactgttgggagtggccttgaccacatcctgtctttggcag

SEQ ID NO: 101106 - DNA, 60 bp, Artificial
  Synthetic oligonucleotide
ccagaaggtacccgtaggtaacaagtgacactatggatctgatctggggccaaccacctc

SEQ ID NO: 101107 - DNA, 60 bp, Artificial
  Synthetic oligonucleotide
cgaggctatcctctcctttgcacgccgtgggaccatacaggagaagttgatctccgtggc

SEQ ID NO: 101108 - DNA, 58 bp, Artificial
  Synthetic oligonucleotide
tgtcgtaacgggcaactctgcagcggaaccgactactttgggtgtccgtgtttctttt

SEQ ID NO: 101109 - DNA, 50 bp, Artificial
  Synthetic oligonucleotide
tggtgacagtgttctagcctgcgtggctgcctgcacaccctattgggtgt

SEQ ID NO: 101110 - DNA, 60 bp, Artificial
  Synthetic oligonucleotide
ccctcttggaagtccatggtgaggggacctgatacctcaccgccgtttgcctaggctata

SEQ ID NO: 101111 - DNA, 58 bp, Artificial
  Synthetic oligonucleotide
tggtgtgtcgtaacgggtaactctgcagcggaaccgactactttgggtgtccgtgttt

SEQ ID NO: 101112 - DNA, 60 bp, Artificial
  Synthetic oligonucleotide
attaaagtaggggatgtagtgtcttatggtaacattttacttagtgggaaccaaacagct

SEQ ID NO: 101113 - DNA, 60 bp, Artificial
  Synthetic oligonucleotide
atgatacaacatttaatgtggatgaaaaatttcagcacattcaagcagcaacttcaatcc

SEQ ID NO: 101114 - DNA, 60 bp, Artificial
  Synthetic oligonucleotide
tctattgcgctgggacggttttcctccggggccgtgaatgctgctaatcccaacctccga

SEQ ID NO: 101115 - DNA, 60 bp, Artificial
  Synthetic oligonucleotide
gctgctaatcccaacctccgagcgtgtgcgcacaacccagtgttgctacgtcgtaatgcg

SEQ ID NO: 101116 - DNA, 60 bp, Artificial
  Synthetic oligonucleotide
gtgggcagcttgtcgtaacgggtaactctgcagcggaaccgactactttgggtgtccgtg

SEQ ID NO: 101117 - DNA, 59 bp, Artificial
  Synthetic oligonucleotide
taacgcgcaagtctgtggcggaaccgactactttgggtgtccgtgtttcctgttatttt

SEQ ID NO: 101118 - DNA, 60 bp, Artificial
  Synthetic oligonucleotide
tgtgaagagcctattgagctacataagagtcctccggcccctgaatgcggctaatcctaa

SEQ ID NO: 101119 - DNA, 60 bp, Artificial
  Synthetic oligonucleotide
aaagagtcctccggcccctgaatgcggctaatcccaaccacggagcaagtgcccacaaac

SEQ ID NO: 101120 - DNA, 60 bp, Artificial
  Synthetic oligonucleotide
atggaactgggttttacaaacctgtgatggcctcgaagaccctcgaggctatcctctcct

SEQ ID NO: 101121 - DNA, 51 bp, Artificial
  Synthetic oligonucleotide
atggaactgggttttacaaacctgtgatggcctcgaagaccctcgaggcta

SEQ ID NO: 101122 - DNA, 60 bp, Artificial
  Synthetic oligonucleotide
ccagaagataccattgagactcgatatgtacaaacctcacaaactagagatgaaatgagc

SEQ ID NO: 101123 - DNA, 60 bp, Artificial
  Synthetic oligonucleotide
ccagaggacatgattgaaacacgatatgtccaaacctcacaaactagagatgaaatgagc

SEQ ID NO: 101124 - DNA, 60 bp, Artificial
  Synthetic oligonucleotide
ctccggcccctgaatgcggctaaccttaaccctggagccttgtgtcacaaaccagtgatg

SEQ ID NO: 101125 - DNA, 60 bp, Artificial
  Synthetic oligonucleotide
ttcctacccccatgaggttgacgctagtctcctagcccaatcaggaaaagactatggact

SEQ ID NO: 101126 - DNA, 59 bp, Artificial
  Synthetic oligonucleotide
ccccactagtctggtcgatgaggctaggaattccccacgggcgaccgtgtcctagcctg

SEQ ID NO: 101127 - DNA, 60 bp, Artificial
  Synthetic oligonucleotide
tttacctgcgttgggtgaacgccgtgtgcggtgacgcataatctcccagagatcacaatt

SEQ ID NO: 101128 - DNA, 60 bp, Artificial
  Synthetic oligonucleotide
acccccatgaagtggacgctagtctcctagcccaatcaggaaaagactatggactcacta

SEQ ID NO: 101129 - DNA, 60 bp, Artificial
  Synthetic oligonucleotide
ctattgagctaattggtagtcctccggcccctgaatgcggctaatcctaactgcggagca

SEQ ID NO: 101130 - DNA, 60 bp, Artificial
  Synthetic oligonucleotide
ccccactggcgacagtgttctagcctgcgtggctgcctgcgtgccttgcgaggcacgaag

SEQ ID NO: 101131 - DNA, 60 bp, Artificial
  Synthetic oligonucleotide
cagtaactggcctgtcgtaacgcgtaagtctgtggcggaaccgactactttgggtgtccg

SEQ ID NO: 101132 - DNA, 60 bp, Artificial
  Synthetic oligonucleotide
gccttgatttcatcaaatcagtccatacagaatgcaatcttgggcatacatgtggctgga

SEQ ID NO: 101133 - DNA, 60 bp, Artificial
  Synthetic oligonucleotide
cactccagctgacaaaagcgacaaaggttttgttcttggtcactccattactgatgtcac

SEQ ID NO: 101134 - DNA, 60 bp, Artificial
  Synthetic oligonucleotide
cactccagctgacaaaagcgacaaaggttttgttcttggtcactccattgccgatgtcac

SEQ ID NO: 101135 - DNA, 60 bp, Artificial
  Synthetic oligonucleotide
ccaaacaaggaattttccagactgttgggagtggccttgaccacatcctgtctctggcag

SEQ ID NO: 101136 - DNA, 60 bp, Artificial
  Synthetic oligonucleotide
cctctttgagattccaagctacagatcactttacctgcgttgggtgaacgccgtgtgcgg

SEQ ID NO: 101137 - DNA, 60 bp, Artificial
  Synthetic oligonucleotide
ctttgagattccaagctacagatcactttacctgcgttgggtgaacgccgtgtgcggtga

SEQ ID NO: 101138 - DNA, 60 bp, Artificial
  Synthetic oligonucleotide
tctttgagattccaagctacagatcactttacctgcgttgggtgaacgccgtgtgcggtg

SEQ ID NO: 101139 - DNA, 60 bp, Artificial
  Synthetic oligonucleotide
ctattgagctacctgagagtcctccggcccctgaatgcggctaatcccaaccacggagca

SEQ ID NO: 101140 - DNA, 60 bp, Artificial
  Synthetic oligonucleotide
tacttaatgaagataagaggcgtagacaagttgtagatgttatgtctgcaatcttccaag

SEQ ID NO: 101141 - DNA, 60 bp, Artificial
  Synthetic oligonucleotide
tgtagatgttatgtctgcaatcttccaagggccaataacccttgaagggcctccaccagc

SEQ ID NO: 101142 - DNA, 60 bp, Artificial
  Synthetic oligonucleotide
gatgttatgtctgcaatcttccaagggccaataacccttgaagggcctccaccagctgcc

SEQ ID NO: 101143 - DNA, 60 bp, Artificial
  Synthetic oligonucleotide
cagtgagtgtatggtcgtaacgagcaattgtgggatgggaccgactactttgggtgtccg

SEQ ID NO: 101144 - DNA, 60 bp, Artificial
  Synthetic oligonucleotide
ttggtcgttcagctaaaccccatagtagacctggcagatgaggctagaaattccccactg

SEQ ID NO: 101145 - DNA, 60 bp, Artificial
  Synthetic oligonucleotide
gcccacacagccatcctctagtaagtttgtaagacgtctgatgacgtgtgggaaaacact

SEQ ID NO: 101146 - DNA, 60 bp, Artificial
  Synthetic oligonucleotide
ggtaacagatgcctctggggccaaaagccaaggtttagcagaccctttaggattggttca

SEQ ID NO: 101147 - DNA, 60 bp, Artificial
  Synthetic oligonucleotide
cagcttgtcgtaacgggcaactctgcagcggaaccgactactttgggtgtccgtgtttcc

SEQ ID NO: 101148 - DNA, 60 bp, Artificial
  Synthetic oligonucleotide
ccaggagcgaggtataggctgtacccactgccaaaagcctttaaccgttatccgccaacc

SEQ ID NO: 101149 - DNA, 58 bp, Artificial
  Synthetic oligonucleotide
acagattctacacattagagagcaagacatgggcatcaaattcaaaaggctggtggtg

SEQ ID NO: 101150 - DNA, 60 bp, Artificial
  Synthetic oligonucleotide
ggaggtgcgtgacacagctaattaccaacccagtgatgatgcatggcttaattttgatgg

SEQ ID NO: 101151 - DNA, 60 bp, Artificial
  Synthetic oligonucleotide
gcacaaggaccagaggaagaatttggacgctccctgattaaacacaatacatgtgtggtc

SEQ ID NO: 101152 - DNA, 60 bp, Artificial
  Synthetic oligonucleotide
tgccgagttttctggagctcgtgcaagaagccaaggtctaccagtactgctcacccccgg

SEQ ID NO: 101153 - DNA, 60 bp, Artificial
  Synthetic oligonucleotide
cgtctggcagtcaggcaccaatgcatccatcttttggcaacacggtcaaccataccctcg

SEQ ID NO: 101154 - DNA, 60 bp, Artificial
  Synthetic oligonucleotide
aaccaacaaagaggaaagatgcaatgcttggaactcatgtagtgtgggatgttggccttc

SEQ ID NO: 101155 - DNA, 60 bp, Artificial
  Synthetic oligonucleotide
catctagtggggcgtctaaacttgagttttcccaagacccgagcaagttcacagatcccg

SEQ ID NO: 101156 - DNA, 60 bp, Artificial
  Synthetic oligonucleotide
acatcactactagggtttatcacaaagcaaaacatgtcaaggcatggtgtccacggcccc

SEQ ID NO: 101157 - DNA, 60 bp, Artificial
  Synthetic oligonucleotide
tgagtgtggcttaccaaccatacatacacctagcaaaactaaattgcaacccagtgtctt

SEQ ID NO: 101158 - DNA, 60 bp, Artificial
  Synthetic oligonucleotide
tgattgtcccaaacatcaatgagagccatcccagcacttccaatgcagcgccagctttag

SEQ ID NO: 101159 - DNA, 60 bp, Artificial
  Synthetic oligonucleotide
gtgctggacgcgcgctgtatattcctccgtacgagttactgctgcatgagtggtatgaga

SEQ ID NO: 101160 - DNA, 60 bp, Artificial
  Synthetic oligonucleotide
aaaccagtcgtttaaggtcaagcacttctgtttccccggtcaatgctgatatgcttcacc

SEQ ID NO: 101161 - DNA, 60 bp, Artificial
  Synthetic oligonucleotide
ccaagaatactcactctgccagatttacaatataataatagaggaagataaacgccgcag

SEQ ID NO: 101162 - DNA, 60 bp, Artificial
  Synthetic oligonucleotide
ctgtgcaagcatggagtaatagggattattacagctggaggtgagggacatgtggcattt

SEQ ID NO: 101163 - DNA, 60 bp, Artificial
  Synthetic oligonucleotide
gcacgacttatcatgcaaattccttcccctttatgccagtgaagctaagagaatcaaggt

SEQ ID NO: 101164 - DNA, 60 bp, Artificial
  Synthetic oligonucleotide
gtcctgtttggagaaagagatgatagaatacagacttaaatcatatgattggtggagaat

SEQ ID NO: 101165 - DNA, 60 bp, Artificial
  Synthetic oligonucleotide
ttgtaaggcccacgaaggatgcccagaaggtacccgtaggtaacaagcgacactatggat

SEQ ID NO: 101166 - DNA, 60 bp, Artificial
  Synthetic oligonucleotide
gcatagctagtcgtaatgagcaattgcgggatgggaccaactactttgggtgtccgtgtt

SEQ ID NO: 101167 - DNA, 60 bp, Artificial
  Synthetic oligonucleotide
gcatggctagtcgtaatgagcaattgcgggatgggaccaactactttgggtgtccgtgtt

SEQ ID NO: 101168 - DNA, 60 bp, Artificial
  Synthetic oligonucleotide
gagcctattgtgctggtttggttatcctccggagccgtgaatgctgctaatcctaacccc

SEQ ID NO: 101169 - DNA, 60 bp, Artificial
  Synthetic oligonucleotide
gcctactgtgctaggttggtcttcctccggagccgtgaatgctgctaatcctaacctccg

SEQ ID NO: 101170 - DNA, 60 bp, Artificial
  Synthetic oligonucleotide
ccaaatattggacaaggtgtgaagagccccgtgtgctcatcttgagtcctccggcccctg

SEQ ID NO: 101171 - DNA, 60 bp, Artificial
  Synthetic oligonucleotide
ggaagatacgcagtgttagcgctggacgtgcactgtatatccctccctatgaagtgctct

SEQ ID NO: 101172 - DNA, 60 bp, Artificial
  Synthetic oligonucleotide
ccctcgaggctatcctctcctttgcacgccgtgggaccatacaggagaagttgatctccg

SEQ ID NO: 101173 - DNA, 60 bp, Artificial
  Synthetic oligonucleotide
ggttgttcccaccccagaggcccacgtggcggctagtacactggtattacggtacccttg

SEQ ID NO: 101174 - DNA, 60 bp, Artificial
  Synthetic oligonucleotide
ctgcacaccctgtgggtgtgaagccaaataatggacaaggtgtgaagagccccgtgtgct

SEQ ID NO: 101175 - DNA, 60 bp, Artificial
  Synthetic oligonucleotide
tgaagagtctattgagctagttagtagtcctccggcccctgaatgcggctaatcctaact

SEQ ID NO: 101176 - DNA, 60 bp, Artificial
  Synthetic oligonucleotide
cgttccgctaaaccccatagtagacctggcagatgaggctagaaattccccactggcgac

SEQ ID NO: 101177 - DNA, 60 bp, Artificial
  Synthetic oligonucleotide
gcctttccaaggtctctttgagattccaagctacagatcactttacctgcgttgggtgaa

SEQ ID NO: 101178 - DNA, 60 bp, Artificial
  Synthetic oligonucleotide
gggtctctttgagattccaagctacagatcactttacctgcgttgggtgaacgccgtgtg

SEQ ID NO: 101179 - DNA, 60 bp, Artificial
  Synthetic oligonucleotide
cgacagtggtccagcctgcgtggctgcctgctcacccttcttgggtgagaagcctaatta

SEQ ID NO: 101180 - DNA, 60 bp, Artificial
  Synthetic oligonucleotide
ctgtcaaaggtcaagcacttctgtttccccggtcaatgaggatatgctttacccaaggca

SEQ ID NO: 101181 - DNA, 60 bp, Artificial
  Synthetic oligonucleotide
agtcctccggcccctgaatgcggctaatcctaactgtggagcagacacccacatgccagt

SEQ ID NO: 101182 - DNA, 60 bp, Artificial
  Synthetic oligonucleotide
tctttggggcctaaggtagtgtttgcctctgaggtactcaggggcatttaggtttttcct

SEQ ID NO: 101183 - DNA, 60 bp, Artificial
  Synthetic oligonucleotide
tctttggggccttatgtggtgtttgcctctgaggtactcaggggcatttaggtttttcct

SEQ ID NO: 101184 - DNA, 60 bp, Artificial
  Synthetic oligonucleotide
tttctttggggccttatgttttgtttgcctctgaggtactcaggggcatttaggtttttc

SEQ ID NO: 101185 - DNA, 60 bp, Artificial
  Synthetic oligonucleotide
ccgagcgtgtgcgcacaatccagtgttgctacgtcgtaacgcgtaagttggaggcggaac

SEQ ID NO: 101186 - DNA, 60 bp, Artificial
  Synthetic oligonucleotide
ggtgtgaagagtctattgagctagttagtagtcctccggcccctgaatgcggctaatcct

SEQ ID NO: 101187 - DNA, 60 bp, Artificial
  Synthetic oligonucleotide
gctatgggaaaacccctttgatccacactgcctgatagggtcgcggctggtcgagtccca

SEQ ID NO: 101188 - DNA, 60 bp, Artificial
  Synthetic oligonucleotide
aaacccagattggaggtggaattcctgaagcgtaaacctggttacttcccagagtccaca

SEQ ID NO: 101189 - DNA, 60 bp, Artificial
  Synthetic oligonucleotide
ctccatcattaaaacccagattggaggtggaattcctgaagcgtaaacctggttatttcc

SEQ ID NO: 101190 - DNA, 60 bp, Artificial
  Synthetic oligonucleotide
actaataaatctgatttttcaagtacagtcttgcaagattctggtgcattaaagagaaga

SEQ ID NO: 101191 - DNA, 60 bp, Artificial
  Synthetic oligonucleotide
agagtccacattcatagtaggaaaattggacactgaaaatatgatacaacatttaatgtg

SEQ ID NO: 101192 - DNA, 55 bp, Artificial
  Synthetic oligonucleotide
agtggatgattatgatgttgtcattgctaagttgatgcccatggtgtttgactaa

SEQ ID NO: 101193 - DNA, 61 bp, Artificial
  Synthetic oligonucleotide
caaaattttggatccatacctgaaagaatggaatatcacagtggatgattatgatgttgtc

SEQ ID NO: 101194 - DNA, 60 bp, Artificial
  Synthetic oligonucleotide
tgagaaatccccacgggcgaccgtgtctcagcctgcgtggcggccagcccagcttatgct

SEQ ID NO: 101195 - DNA, 59 bp, Artificial
  Synthetic oligonucleotide
ggctgagaaatccccacgggtgaccgtgtctcagcctgcgtggcggccagcccagctta

SEQ ID NO: 101196 - DNA, 60 bp, Artificial
  Synthetic oligonucleotide
agcctgcgtggcggccagcccagcttatgctgggacgccttaattgtgacatggtgcgaa

SEQ ID NO: 101197 - DNA, 60 bp, Artificial
  Synthetic oligonucleotide
accgtgtctcagcctgcgtggcggccagcccagctaatgctgggacgccttaattgtgac

SEQ ID NO: 101198 - DNA, 60 bp, Artificial
  Synthetic oligonucleotide
attacttaaggtcaagcacttctgtttccccggtcaaagttgatatgctccaccagggca

SEQ ID NO: 101199 - DNA, 60 bp, Artificial
  Synthetic oligonucleotide
cgtttggccgcattatcttacaccacaagatgctaccgcacttgataaaccatctagacc

SEQ ID NO: 101200 - DNA, 60 bp, Artificial
  Synthetic oligonucleotide
catgcagaatccaagcggagatgacatgaccctgttctgtcagatggtatcaagtgttac

SEQ ID NO: 101201 - DNA, 60 bp, Artificial
  Synthetic oligonucleotide
cctaaatcctggtgtcgttacaggttctgctgtggggtgtgatcctgaggtattttggtc

SEQ ID NO: 101202 - DNA, 60 bp, Artificial
  Synthetic oligonucleotide
gtcgcgcactgtatattcctccctatgatttgctcctgcacgagtggtatgaaaagtttt

SEQ ID NO: 101203 - DNA, 60 bp, Artificial
  Synthetic oligonucleotide
gttccacctggagcaccaattccaaagacaagagaagattatgcttggcaatcagggacc

SEQ ID NO: 101204 - DNA, 60 bp, Artificial
  Synthetic oligonucleotide
ccgttggcttgactcattttagtaaccctacctcagtcgaattggattgggttatactgt

SEQ ID NO: 101205 - DNA, 60 bp, Artificial
  Synthetic oligonucleotide
ggtggggtgggtacacttctcgctcgatgagtgggggtgtggctcattgcccacacctgg

SEQ ID NO: 101206 - DNA, 60 bp, Artificial
  Synthetic oligonucleotide
cgtcctcctggtgcagacacagtaatttacacacaagggaaaagaactgttcgaaagacc

SEQ ID NO: 101207 - DNA, 53 bp, Artificial
  Synthetic oligonucleotide
taggaggtatttacatttgggtatggtcagctctcacagttccatcaggttca

SEQ ID NO: 101208 - DNA, 60 bp, Artificial
  Synthetic oligonucleotide
ggttctgccggctgcttgattgccgcatacatgccaaagacggcccatgatcatatgggt

SEQ ID NO: 101209 - DNA, 60 bp, Artificial
  Synthetic oligonucleotide
tctcgctattttgcagcagtgcgctgtggctttcatatacaagtgcagttgaatgttaac

SEQ ID NO: 101210 - DNA, 60 bp, Artificial
  Synthetic oligonucleotide
caggcattttggcccaatcaagattttccagcatgggggcagtctcgttattttgcagca

SEQ ID NO: 101211 - DNA, 53 bp, Artificial
  Synthetic oligonucleotide
aaaatggttcacttagcgcatggaacttggacaactaatcagcacagacaggc

SEQ ID NO: 101212 - DNA, 53 bp, Artificial
  Synthetic oligonucleotide
aaaatggttcacttggcacatggcacttggacaactaatcagcacagacaggc

SEQ ID NO: 101213 - DNA, 60 bp, Artificial
  Synthetic oligonucleotide
ggctgcatccaaaatgaatcccgttggcaacctgctctccacagtctcctcaaccgttgg

SEQ ID NO: 101214 - DNA, 60 bp, Artificial
  Synthetic oligonucleotide
ggctgcatccaaaatgaatcccgttggcaacctgctttccacagtctcctcaaccgttgg

SEQ ID NO: 101215 - DNA, 60 bp, Artificial
  Synthetic oligonucleotide
gaccactcaggtacacaaccccagtgatgcacacgtctagtaacggcttagtaacgagca

SEQ ID NO: 101216 - DNA, 60 bp, Artificial
  Synthetic oligonucleotide
gaattgctcggacagccactttggaatcaaatggaacaatgattataccaccaaatgagc

SEQ ID NO: 101217 - DNA, 60 bp, Artificial
  Synthetic oligonucleotide
agctactttggaatcaaatggaacaatgattataccaccaaacgagcaaatgacactttg

SEQ ID NO: 101218 - DNA, 60 bp, Artificial
  Synthetic oligonucleotide
acaaatgcattcttgaaagttgctcacacatggtttggcactgattctggaattgctcgg

SEQ ID NO: 101219 - DNA, 60 bp, Artificial
  Synthetic oligonucleotide
gttgctcacacatggtttggcactgattctggaattgcccggacagctactttggaatca

SEQ ID NO: 101220 - DNA, 60 bp, Artificial
  Synthetic oligonucleotide
gcatcaactttcaacaaaggacgcttgaggatggcattcttcccaaacagagagggcgcc

SEQ ID NO: 101221 - DNA, 60 bp, Artificial
  Synthetic oligonucleotide
gttgtctgtgatataggcctgaataacacttttgagatgaccatcccctacacttggggc

SEQ ID NO: 101222 - DNA, 60 bp, Artificial
  Synthetic oligonucleotide
ttgccttggttggtgaaagagcattctatgacccaagaacagctggtgctgcagtaaggt

SEQ ID NO: 101223 - DNA, 60 bp, Artificial
  Synthetic oligonucleotide
ggtgaaagagcattctatgacccaagaacagctggtgctgcagtgaggtgcaaggacctc

SEQ ID NO: 101224 - DNA, 60 bp, Artificial
  Synthetic oligonucleotide
ccctggagcagccacagtaatctacacacaagggaaaagaactgttcgaaagaccaaaac

SEQ ID NO: 101225 - DNA, 52 bp, Artificial
  Synthetic oligonucleotide
gggtcaggaataaaattgacatagctgaaggtccaggagcaatgaacatcgc

SEQ ID NO: 101226 - DNA, 50 bp, Artificial
  Synthetic oligonucleotide
ctagactggacgaagccgcttggaataagtctagtcttatcttgtatgtg

SEQ ID NO: 101227 - DNA, 60 bp, Artificial
  Synthetic oligonucleotide
ctctacacttcagtaggggctgtacccgggcggtcccactcttcacaggaatctgcacag

SEQ ID NO: 101228 - DNA, 60 bp, Artificial
  Synthetic oligonucleotide
ggaatctgcacaggtggctttcacctctggacagtgcattccacacccgctccacggtag

SEQ ID NO: 101229 - DNA, 60 bp, Artificial
  Synthetic oligonucleotide
acaggtggctttcacctctggacagtgcattccacacccgctccacagtagaagatgatg

SEQ ID NO: 101230 - DNA, 60 bp, Artificial
  Synthetic oligonucleotide
ggctttcacctctggacagtgcattccacacccgctccacagtagaagatgatgtgtgtc

SEQ ID NO: 101231 - DNA, 60 bp, Artificial
  Synthetic oligonucleotide
cccgctccacggtagaagatgatgtgtgtctttgcttgtgaaaagcttgtgaaaatcgtg

SEQ ID NO: 101232 - DNA, 60 bp, Artificial
  Synthetic oligonucleotide
ctttgcttgtgaaaagcttgtgaaaatcgtgtgtaggcgtagcggctacttgagtgccag

SEQ ID NO: 101233 - DNA, 60 bp, Artificial
  Synthetic oligonucleotide
agcttgtgaaaatcgtgtgtaggcgtagcggctacttgagtgccagcggattacccctag

SEQ ID NO: 101234 - DNA, 60 bp, Artificial
  Synthetic oligonucleotide
atcgtgtgtaggcgtagcggctacttgagtgccagcggattacccctagtggtaacacta

SEQ ID NO: 101235 - DNA, 60 bp, Artificial
  Synthetic oligonucleotide
gcatgtcatttgaccactcaggtacacaaccccagtgatgcacacgcttagtaatggctt

SEQ ID NO: 101236 - DNA, 60 bp, Artificial
  Synthetic oligonucleotide
caaatcacggcagtttacacacagaggtcagatgcccttatggtttggaaaaggaagttg

SEQ ID NO: 101237 - DNA, 56 bp, Artificial
  Synthetic oligonucleotide
tgactagactggaacccattggcatttgggtttctagtgagccaggacagggtaaa

SEQ ID NO: 101238 - DNA, 51 bp, Artificial
  Synthetic oligonucleotide
actttgcctctgacatggttaattttgtgccaatggaacagatgagacaag

SEQ ID NO: 101239 - DNA, 60 bp, Artificial
  Synthetic oligonucleotide
gttttggacattacaacttgtgaaatcttgtctgccaacaccaaagcactctttcaggca

SEQ ID NO: 101240 - DNA, 60 bp, Artificial
  Synthetic oligonucleotide
ttggtgcggcttttgtgctacatcgttctttattgccatgcaccaaatatgctgacaacc

SEQ ID NO: 101241 - DNA, 58 bp, Artificial
  Synthetic oligonucleotide
cttttcccagggagaaaggaaataactcagtccaaagccttgggaattattggggtca

SEQ ID NO: 101242 - DNA, 60 bp, Artificial
  Synthetic oligonucleotide
ccattgccagagatcttttcccagggagaaaggaaataactcagtccaaagccttgggga

SEQ ID NO: 101243 - DNA, 60 bp, Artificial
  Synthetic oligonucleotide
tttattattaagattttggtgcggcttttgtgctacatcgttctttattgccatgcacca

SEQ ID NO: 101244 - DNA, 60 bp, Artificial
  Synthetic oligonucleotide
agtttattattaagattttggtgcggcttttgtgctacatcgttctctattgccatgcac

SEQ ID NO: 101245 - DNA, 60 bp, Artificial
  Synthetic oligonucleotide
cccactacctgcgcccagggaagccacgtctcgaagcatattggaacgagtggatgaagc

SEQ ID NO: 101246 - DNA, 60 bp, Artificial
  Synthetic oligonucleotide
ggaatcaaatggaacaatgattataccaccaaacgagcaaatgacactttgtgtacccta

SEQ ID NO: 101247 - DNA, 60 bp, Artificial
  Synthetic oligonucleotide
agaccattgccagagatcttttcccagggagaaaggaaataactcagtccaaagccttgg

SEQ ID NO: 101248 - DNA, 60 bp, Artificial
  Synthetic oligonucleotide
gggaggcggccaaggcttactttaatataatgcacagtgatgaaatggattttgccgggg

SEQ ID NO: 101249 - DNA, 60 bp, Artificial
  Synthetic oligonucleotide
atggtgaggggacttgatacctcaccgccgtttgcctaggctataggctaaatttccctt

SEQ ID NO: 101250 - DNA, 60 bp, Artificial
  Synthetic oligonucleotide
atccagtgggtggcctgtcgtaacgggcaactctgcagcggaaccgactactttgggtgt

SEQ ID NO: 101251 - DNA, 60 bp, Artificial
  Synthetic oligonucleotide
catggttaaagaaattcactgaaatgtgcaatgcagctagaggtttagagtggattggca

SEQ ID NO: 101252 - DNA, 53 bp, Artificial
  Synthetic oligonucleotide
aagagtctattgagctgctatagagtcctccggcccctgaatgcggctaatcc

SEQ ID NO: 101253 - DNA, 53 bp, Artificial
  Synthetic oligonucleotide
aagagtctattgagctactatagagtcctccggcccctgaatgcggctaatct

SEQ ID NO: 101254 - DNA, 60 bp, Artificial
  Synthetic oligonucleotide
cgtctaggccccccgaaccacggggacgtggttttcctttgaaaaccacgattgtaagat

SEQ ID NO: 101255 - DNA, 60 bp, Artificial
  Synthetic oligonucleotide
tcctgcaggttcagggttctttaatctgtttctctataagaacactcaattttcacgctt

SEQ ID NO: 101256 - DNA, 60 bp, Artificial
  Synthetic oligonucleotide
tcctgcaggttcagggttctttaatctgtttctctataagaacactcaatttcacgcttc

SEQ ID NO: 101257 - DNA, 60 bp, Artificial
  Synthetic oligonucleotide
tgagctagttagtagtcctccggcccctgaatgcggctaatcctaactgcggagcacgtg

SEQ ID NO: 101258 - DNA, 60 bp, Artificial
  Synthetic oligonucleotide
tcacgagaggggattccactataacctctcaagatgttgcaaatgcagttgttggttatg

SEQ ID NO: 101259 - DNA, 60 bp, Artificial
  Synthetic oligonucleotide
tatgtaaatgctgttccaatggattccatgctaagacacaataattggagcttggttatt

SEQ ID NO: 101260 - DNA, 60 bp, Artificial
  Synthetic oligonucleotide
gcaaactatggagtggtgattcaaagggttggtggtggaagttgcctgatgccttgagag

SEQ ID NO: 101261 - DNA, 60 bp, Artificial
  Synthetic oligonucleotide
ggttctagtagttccaaacattaaggagagtcactcaagcacatccaactcagcaccagc

SEQ ID NO: 101262 - DNA, 60 bp, Artificial
  Synthetic oligonucleotide
gctgggagggatgtgagtataaccaatcgtgatcatgttagtagacaaccaagtgacgaa

SEQ ID NO: 101263 - DNA, 60 bp, Artificial
  Synthetic oligonucleotide
gggtgtaaagatttctgtttacgaatggctagggatacagacttacacaaacagagaggt

SEQ ID NO: 101264 - DNA, 60 bp, Artificial
  Synthetic oligonucleotide
ccctgggttagtgcaagtcattttaggaataccactcctgacacattttcctcagcaggt

SEQ ID NO: 101265 - DNA, 60 bp, Artificial
  Synthetic oligonucleotide
acatcatcattaaacagaagaaaaggagtgaaccagtagcaataatgatacatggtcctc

SEQ ID NO: 101266 - DNA, 60 bp, Artificial
  Synthetic oligonucleotide
actgagtggaagccaaactgctaggatgcttaaatacaactatcccacaaaatcaggata

SEQ ID NO: 101267 - DNA, 60 bp, Artificial
  Synthetic oligonucleotide
atgttggacctagtgatatgtatgttcatgtgggtaacctgatatatagaaatctgcatt

SEQ ID NO: 101268 - DNA, 60 bp, Artificial
  Synthetic oligonucleotide
gcaatggttataataataagaaacagttctgacccacaaactgtgatagccactttaaca

SEQ ID NO: 101269 - DNA, 60 bp, Artificial
  Synthetic oligonucleotide
cttaaagtgaaatatttgagtgagcttaaaaaattgaacctccttgaaaagcagattgaa

SEQ ID NO: 101270 - DNA, 60 bp, Artificial
  Synthetic oligonucleotide
ggtcttcaaggggaataaggaaccagctgtattgtcagaaaaggacccacgacttagtgt

SEQ ID NO: 101271 - DNA, 60 bp, Artificial
  Synthetic oligonucleotide
atgtcactattttgtcagatggtttcaagtgtaacttttattcctccaatggctgatctg

SEQ ID NO: 101272 - DNA, 60 bp, Artificial
  Synthetic oligonucleotide
ctgcagtactaatcattctctcttagctccgcctactattacatcactgtcagcaatgaa

SEQ ID NO: 101273 - DNA, 60 bp, Artificial
  Synthetic oligonucleotide
ctggcaacatggtcaaccttaccccagattttctttgccttttctcagcattgcatctgc

SEQ ID NO: 101274 - DNA, 60 bp, Artificial
  Synthetic oligonucleotide
catccagtggagcctcaaaattagagttttcacaagatccaagcaagttcacagacccag

SEQ ID NO: 101275 - DNA, 60 bp, Artificial
  Synthetic oligonucleotide
tcctaccatacacaacccaaataagactagattacaccccagtgtgttttttgaggtctt

SEQ ID NO: 101276 - DNA, 60 bp, Artificial
  Synthetic oligonucleotide
gatgagctcacagaccaatagccggcaatcatccagattgtcaatggtcaagcacttctg

SEQ ID NO: 101277 - DNA, 60 bp, Artificial
  Synthetic oligonucleotide
ctgtgttctagaatagtaactgaagagcatgggacgcgtgtagagattacaactagagtg

SEQ ID NO: 101278 - DNA, 60 bp, Artificial
  Synthetic oligonucleotide
actctgttatttcggtaactttgtacgccagttttatatccccctccccatgtaacttag

SEQ ID NO: 101279 - DNA, 60 bp, Artificial
  Synthetic oligonucleotide
aagttattacacacactggacagggagcctacgatttagtttcatgttttgtggaacagc

SEQ ID NO: 101280 - DNA, 60 bp, Artificial
  Synthetic oligonucleotide
aacatcggtcatgttgtcatgcaatatatgtatgttcctccgggagcccctttacccaat

SEQ ID NO: 101281 - DNA, 60 bp, Artificial
  Synthetic oligonucleotide
ctccataagagttgacattgcatcacaaccacttgcaaccactatgattggtgaaattgc

SEQ ID NO: 101282 - DNA, 60 bp, Artificial
  Synthetic oligonucleotide
gcagtgttcaacctgaggatatgattgaaactcgttacgtccaaacatcacagaccagag

SEQ ID NO: 101283 - DNA, 60 bp, Artificial
  Synthetic oligonucleotide
tttgcagaattctctggtgcccgtgccagaagtcaaggactgcctgtcatgatgactccg

SEQ ID NO: 101284 - DNA, 60 bp, Artificial
  Synthetic oligonucleotide
gttgcgcactactcggcacaactagctacccttgatattggcccagcaagtatgtctttg

SEQ ID NO: 101285 - DNA, 60 bp, Artificial
  Synthetic oligonucleotide
gggcctatttctatgaataatccaccaccccctgcaatagtagatttattacaatcagtt

SEQ ID NO: 101286 - DNA, 60 bp, Artificial
  Synthetic oligonucleotide
gaaagaagggttgtagcacaaggccctgaagaagaatttggacgctccttgatcaaacac

SEQ ID NO: 101287 - DNA, 60 bp, Artificial
  Synthetic oligonucleotide
gtaattgcagctgaaggacttaaatatgggttaactataacacccgcagacaaatcagac

SEQ ID NO: 101288 - DNA, 60 bp, Artificial
  Synthetic oligonucleotide
gtgaggatgattaccccgattgcaatttagcccttgtagcaaaccaagtagagccaacta

SEQ ID NO: 101289 - DNA, 60 bp, Artificial
  Synthetic oligonucleotide
cactctgatcccggaaaagtagttcaagttgatgggataaacacaaatgttctagatgcc

SEQ ID NO: 101290 - DNA, 60 bp, Artificial
  Synthetic oligonucleotide
actggttctgcagtgggctgtgatccagaaacattttggtcgaagatccctgtgatgtta

SEQ ID NO: 101291 - DNA, 60 bp, Artificial
  Synthetic oligonucleotide
ggtttaagaagtttaatgacatgtgcaatgcagctaagggtttggaatggatagcaaaca

SEQ ID NO: 101292 - DNA, 60 bp, Artificial
  Synthetic oligonucleotide
tgcagaataccagggaatatctgattacatcttgaatttagggaaagcatttggaactgg

SEQ ID NO: 101293 - DNA, 60 bp, Artificial
  Synthetic oligonucleotide
cgtccagaggatggtgttggaagttgcctgatgctcttaaggacatgggcatatttgggc

SEQ ID NO: 101294 - DNA, 60 bp, Artificial
  Synthetic oligonucleotide
gcacttctgtttatccggagcgaggtataagcggtacccactgctgaaagcctttaaccg

SEQ ID NO: 101295 - DNA, 60 bp, Artificial
  Synthetic oligonucleotide
ccaatgaaaacgacagggaggtgttgttcaacaatgtgctatggttagagcagatgtcac

SEQ ID NO: 101296 - DNA, 60 bp, Artificial
  Synthetic oligonucleotide
cagctacaattgtgacaccatacataaactcagccccaatggattcaatgactagacaca

SEQ ID NO: 101297 - DNA, 60 bp, Artificial
  Synthetic oligonucleotide
tcaacaaggagttatgaaaggggtgggaccagctgagccaggagattgtggtggtatact

SEQ ID NO: 101298 - DNA, 60 bp, Artificial
  Synthetic oligonucleotide
tcagaaagatatcaaccacacaccacatattcaaagaccaaatttatgttgtagaagggg

SEQ ID NO: 101299 - DNA, 60 bp, Artificial
  Synthetic oligonucleotide
tggtttgactataacaccaccagacaagtccacacaattccacaaggtgacatgggagaa

SEQ ID NO: 101300 - DNA, 60 bp, Artificial
  Synthetic oligonucleotide
gcactgatggcttagaacccatagaccttaatactagtgcaggatacccatacgttagcc

SEQ ID NO: 101301 - DNA, 60 bp, Artificial
  Synthetic oligonucleotide
tcagagtgtaccatcgcgctaagcacgtcatggcatggataccaagacctcccagagcca

SEQ ID NO: 101302 - DNA, 60 bp, Artificial
  Synthetic oligonucleotide
actcatgaggacatgctaaacttgcaaactccactcccagaaagggacttagcagtggtt

SEQ ID NO: 101303 - DNA, 60 bp, Artificial
  Synthetic oligonucleotide
atgataaaccaccaccagattgcatagtagatctacttaagtcagttgatagtgaagagg

SEQ ID NO: 101304 - DNA, 60 bp, Artificial
  Synthetic oligonucleotide
tggcctcaacaaattcccagacactcaaccctccaactgtgttaaacccagaagctttag

SEQ ID NO: 101305 - DNA, 60 bp, Artificial
  Synthetic oligonucleotide
ggcaccccagggtcagggaaatctcttgccacctccttaattggtagatctattgctgat

SEQ ID NO: 101306 - DNA, 60 bp, Artificial
  Synthetic oligonucleotide
tacagagtgccattaattcaaggccaacaggagcaacaggtctttggtttctctttgttc

SEQ ID NO: 101307 - DNA, 60 bp, Artificial
  Synthetic oligonucleotide
gccaacaacactgacacctggctctgaacaatttctgactactgatgatagacagtcacc

SEQ ID NO: 101308 - DNA, 60 bp, Artificial
  Synthetic oligonucleotide
tggtttgcaatcaacagtagtaatgaacataccttggactgctggagctcaattcagata

SEQ ID NO: 101309 - DNA, 60 bp, Artificial
  Synthetic oligonucleotide
cgcacagatttcaactcagaagagtggctcgcatgaaaatcaaaacatccttaccaacgg

SEQ ID NO: 101310 - DNA, 60 bp, Artificial
  Synthetic oligonucleotide
ggaattcacagccctaggaatctatgacagaatttgtgtaataccaacacactcacaacc

SEQ ID NO: 101311 - DNA, 60 bp, Artificial
  Synthetic oligonucleotide
taaggatataatgctcaagggtgcaccggctttgaactctcccaacattgaagcgtgtgg

SEQ ID NO: 101312 - DNA, 60 bp, Artificial
  Synthetic oligonucleotide
aataaatacacccaacaaaacaaaattgcttccgagtgttttctacaatgtgtttccagg

SEQ ID NO: 101313 - DNA, 60 bp, Artificial
  Synthetic oligonucleotide
ctataattgctacatcatcacaaccacaagatgcacagttctctaacacattaacagtgc

SEQ ID NO: 101314 - DNA, 60 bp, Artificial
  Synthetic oligonucleotide
gtaactgacatagaaaataaactccccactagagagtcaacccacaaggaacagaaactg

SEQ ID NO: 101315 - DNA, 60 bp, Artificial
  Synthetic oligonucleotide
gcactaacagaaggcctaggacaagaacttgaggaagtaatagtcgacaaagcgaaacag

SEQ ID NO: 101316 - DNA, 60 bp, Artificial
  Synthetic oligonucleotide
ccacctggcacgaatcagaatgtgtacatacttgggtttgttagtgcatgtccagacttc

SEQ ID NO: 101317 - DNA, 60 bp, Artificial
  Synthetic oligonucleotide
ccgaatatggctcacctggaaagaaaaggcacccctttcacctctagctttattgttgcc

SEQ ID NO: 101318 - DNA, 60 bp, Artificial
  Synthetic oligonucleotide
ggtcctttcctacggagacgaccttttaattggaactaattaccaaattgattttaatct

SEQ ID NO: 101319 - DNA, 60 bp, Artificial
  Synthetic oligonucleotide
cctgatggcgaagacttcactgtcttttgtcaaatggtttctagcacaaattttcttccg

SEQ ID NO: 101320 - DNA, 59 bp, Artificial
  Synthetic oligonucleotide
ccaggaggtaccccttcctctcggaagggatctgacctggagacacatcacacgtgctt

SEQ ID NO: 101321 - DNA, 60 bp, Artificial
  Synthetic oligonucleotide
cggaccttctttgtgtggacttggacgatgacgtcttctggccttcggacacgagcactc

SEQ ID NO: 101322 - DNA, 60 bp, Artificial
  Synthetic oligonucleotide
gccgttgacgctactcccggctttgaatatttgctcatggcagacggagaatggtaccct

SEQ ID NO: 101323 - DNA, 60 bp, Artificial
  Synthetic oligonucleotide
gcaaacacggatacccagacgtgtgccctatttgcacagccgttgacgctactcccgact

SEQ ID NO: 101324 - DNA, 60 bp, Artificial
  Synthetic oligonucleotide
gcaacctgttaatcccgtgtttaatggtttgagacacgaaactgtgcttgcgcaaagtcc

SEQ ID NO: 101325 - DNA, 60 bp, Artificial
  Synthetic oligonucleotide
gaaatacctggctccaaacctcagcttgcctgctttagtgctgattgtcccctcctacac

SEQ ID NO: 101326 - DNA, 60 bp, Artificial
  Synthetic oligonucleotide
accaatggacaactgtccaacatcctgggtggagctgcaaatgcttttgctactatggca

SEQ ID NO: 101327 - DNA, 60 bp, Artificial
  Synthetic oligonucleotide
cccactccactgcgatgtttgaatgcttaattaacaatttctttacagagcaaaatggat

SEQ ID NO: 101328 - DNA, 60 bp, Artificial
  Synthetic oligonucleotide
ctgctgtcataaaactagcctccaaatttaaagaatcaatttggcccacgcccgtgagag

SEQ ID NO: 101329 - DNA, 60 bp, Artificial
  Synthetic oligonucleotide
cgccatttgggacttgggcttgaattccagcttcaacttcactgcgccttttatatctcc

SEQ ID NO: 101330 - DNA, 60 bp, Artificial
  Synthetic oligonucleotide
tctagctttagtgcccacaagaaaacagctgtagcgaccacacaaaggcagcggaacccc

SEQ ID NO: 101331 - DNA, 60 bp, Artificial
  Synthetic oligonucleotide
tacaccactttcggcgagttcttcaaggctgtgcgcggataccatgctgactattacaga

SEQ ID NO: 101332 - DNA, 60 bp, Artificial
  Synthetic oligonucleotide
cggcgagttcttcaaggctgtgcgcggataccatgctgactattacagacagagactcat

SEQ ID NO: 101333 - DNA, 60 bp, Artificial
  Synthetic oligonucleotide
gcgacgtggttggagatctaagttaaccgactccgacgaaactaccatcatgcctccccg

SEQ ID NO: 101334 - DNA, 60 bp, Artificial
  Synthetic oligonucleotide
tttttctgcttttgatgctagtcttagtccatttatgatcagagaggcaggtagaattat

SEQ ID NO: 101335 - DNA, 51 bp, Artificial
  Synthetic oligonucleotide
ttttctgcctttgatgctagtcttagtccatttatgattagggaggcgggt

SEQ ID NO: 101336 - DNA, 60 bp, Artificial
  Synthetic oligonucleotide
ctgcttttgatgctagtcttagtccatttatgatcagagaggcaggtagaattatgtcag

SEQ ID NO: 101337 - DNA, 60 bp, Artificial
  Synthetic oligonucleotide
acctgtgatggcctcgaagaccctcgaggctatcctctcctttgcacgccgtgggaccat

SEQ ID NO: 101338 - DNA, 60 bp, Artificial
  Synthetic oligonucleotide
cctcagcaattgacaaaccaacacagcctgacacatcttcaaacagattttacaccttag

SEQ ID NO: 101339 - DNA, 60 bp, Artificial
  Synthetic oligonucleotide
taggccagctgcggcaacacagggtctgccagtctacatgacgcccggctcagggcagtt

SEQ ID NO: 101340 - DNA, 60 bp, Artificial
  Synthetic oligonucleotide
tgggcagagtgcttataagagttttgtagagaggattcgcagtgttagcgctggacgtgc

SEQ ID NO: 101341 - DNA, 60 bp, Artificial
  Synthetic oligonucleotide
gccaagcatgttaaagcatggtgccctagggctcccagagcagtcccttacacacacagc

SEQ ID NO: 101342 - DNA, 60 bp, Artificial
  Synthetic oligonucleotide
gcacgatgctgcccatttgtttgcggaaaagcagtctcattcaaggatcgaaattcatgt

SEQ ID NO: 101343 - DNA, 60 bp, Artificial
  Synthetic oligonucleotide
gagccatccaactacatctaatgcagctacagctttggatgctgctgaaactggacacac

SEQ ID NO: 101344 - DNA, 60 bp, Artificial
  Synthetic oligonucleotide
ccctgcagggtccatactcaggtgagcccaagcccaaaactaagattccagagcggaggg

SEQ ID NO: 101345 - DNA, 60 bp, Artificial
  Synthetic oligonucleotide
ttgtggtggtatactttacaagattgggcaagttctggggattcatgtgggtggcaatgg

SEQ ID NO: 101346 - DNA, 60 bp, Artificial
  Synthetic oligonucleotide
aaacaaaagaagagaagtgaaccagtggctattgttgtgcatggcccaccaggtacaggg

SEQ ID NO: 101347 - DNA, 60 bp, Artificial
  Synthetic oligonucleotide
agtatcaccctagaaggtgtgtggttggtcgctcagccgtgaacccgacggtagacctgg

SEQ ID NO: 101348 - DNA, 60 bp, Artificial
  Synthetic oligonucleotide
gggtcattgaggaggaatgtgaactggattatttcagggtgaagtaccttgaatcatctg

SEQ ID NO: 101349 - DNA, 60 bp, Artificial
  Synthetic oligonucleotide
gggtcattgaggaagaatgtgaattggattatttcagggtgaagtaccttgaatcatctg

SEQ ID NO: 101350 - DNA, 60 bp, Artificial
  Synthetic oligonucleotide
ggattatttcagggtgaagtaccttgaatcatctgtcaactcagagcatatcttctcagt

SEQ ID NO: 101351 - DNA, 60 bp, Artificial
  Synthetic oligonucleotide
taaattaaatggtgtgtacaccaacccaacagctagtgagtttatggatgggtatgataa

SEQ ID NO: 101352 - DNA, 60 bp, Artificial
  Synthetic oligonucleotide
aaattaaatggtgtgtacaccaacccaacagctagtgagtttatggatgggtatgataac

SEQ ID NO: 101353 - DNA, 60 bp, Artificial
  Synthetic oligonucleotide
gatgatctggatgatgctgtctcttacatcaagcataattttccagatgcaattccatac

SEQ ID NO: 101354 - DNA, 60 bp, Artificial
  Synthetic oligonucleotide
aatcaaactctagatgatctggatgatgctgtctcttacatcaagcataattttccagat

SEQ ID NO: 101355 - DNA, 60 bp, Artificial
  Synthetic oligonucleotide
aatggtgtgtacaccaacccaacagctagtgagtttatggatgggtatgataaccaggac

SEQ ID NO: 101356 - DNA, 60 bp, Artificial
  Synthetic oligonucleotide
aatggtgtgtacaccaacccaacagctagtgagtttatggacgggtatgataaccaggac

SEQ ID NO: 101357 - DNA, 55 bp, Artificial
  Synthetic oligonucleotide
atttaatttgccttgaacctttctcagtttcacccatgctcgaaaagttggtaca

SEQ ID NO: 101358 - DNA, 60 bp, Artificial
  Synthetic oligonucleotide
gatttaatttgccttgaacctttctcagtttcgccaatgcttgagaagttggtgcaagac

SEQ ID NO: 101359 - DNA, 60 bp, Artificial
  Synthetic oligonucleotide
ataaaaagaaagatttaatttgccttgaacctttctcagtttcgccaatgcttgagaagt

SEQ ID NO: 101360 - DNA, 60 bp, Artificial
  Synthetic oligonucleotide
ttaaaacagcctgtgggttgttcccaccccagaggcccacgtggcggccagtactccggt

SEQ ID NO: 101361 - DNA, 60 bp, Artificial
  Synthetic oligonucleotide
ttgcgggacgggaccgactactttgggtgtccgtgtttcactttttacttataattgctt

SEQ ID NO: 101362 - DNA, 60 bp, Artificial
  Synthetic oligonucleotide
gtggatgtatggtcgtaatgagtaattgtgggatgggaccgactactttgggtgtccgtg

SEQ ID NO: 101363 - DNA, 60 bp, Artificial
  Synthetic oligonucleotide
gcaacccagcgttttccatgacatcttccctggcagcaaagagcctgctgttctgtctag

SEQ ID NO: 101364 - DNA, 60 bp, Artificial
  Synthetic oligonucleotide
ggtaatttgttttctaagtttcatcagaacccaggcattgttacagggtctgcagtaggg

SEQ ID NO: 101365 - DNA, 60 bp, Artificial
  Synthetic oligonucleotide
tcaaggtccatactcaggtgagcccaaaccaatcacaaagaaaccagagagaagagtggt

SEQ ID NO: 101366 - DNA, 60 bp, Artificial
  Synthetic oligonucleotide
gctggtcgcgcactctatataccaccatatgaggtcttgctccacgagtggtatgagaag

SEQ ID NO: 101367 - DNA, 60 bp, Artificial
  Synthetic oligonucleotide
gctcaatccccatctgcactcccctatttccatcccaccaaggagatattcatcccgggt

SEQ ID NO: 101368 - DNA, 60 bp, Artificial
  Synthetic oligonucleotide
caaaagggtggtggtggaaactcccagatgctctcaagaacatgggaatctttggtgaga

SEQ ID NO: 101369 - DNA, 60 bp, Artificial
  Synthetic oligonucleotide
ccagattctagacagaaagcaatgctctcgactcatgtggtgtgggatgttggattgcaa

SEQ ID NO: 101370 - DNA, 60 bp, Artificial
  Synthetic oligonucleotide
gccttgtaatgtagggaagattggaaatgctaaatgttgtcccttgatctgtggaaaagc

SEQ ID NO: 101371 - DNA, 60 bp, Artificial
  Synthetic oligonucleotide
gccccagacctccacgcgctgtagcttatcaacatacatacagtccaaactttgtgcctc

SEQ ID NO: 101372 - DNA, 60 bp, Artificial
  Synthetic oligonucleotide
gaaaaggcgtgcaactggttacaattagtatatatccataaagaatcagatggttggatc

SEQ ID NO: 101373 - DNA, 60 bp, Artificial
  Synthetic oligonucleotide
cggtcaagcacttctgtttcccccggttagattgatacgctccaacagggcgaaaacaac

SEQ ID NO: 101374 - DNA, 60 bp, Artificial
  Synthetic oligonucleotide
ggtctacgctgtgcgggccgaagtaagcttaggaataacagggagtatgccattttctgc

SEQ ID NO: 101375 - DNA, 60 bp, Artificial
  Synthetic oligonucleotide
cgattcacacttcctggtagagtcaccaattacatgcaggtggctcgtgtcccgaccctc

SEQ ID NO: 101376 - DNA, 58 bp, Artificial
  Synthetic oligonucleotide
ccccgggtgcgaggtcccagaagattatagttcaaaggtgtggctgtctcccattaat

SEQ ID NO: 101377 - DNA, 60 bp, Artificial
  Synthetic oligonucleotide
gggagttagggccaaggatctgttgcataggcgttgtatcccctaaccttttacctaccc

SEQ ID NO: 101378 - DNA, 60 bp, Artificial
  Synthetic oligonucleotide
ccaaatctcttatgaaatcttctctgttccctgtttgtacatccactggttcctatactg

SEQ ID NO: 101379 - DNA, 60 bp, Artificial
  Synthetic oligonucleotide
catctgctgggtacccctacaacacaatggggataaggaagagagacttaatcccacaca

SEQ ID NO: 101380 - DNA, 60 bp, Artificial
  Synthetic oligonucleotide
ttccactctaaccctggtacctgcactggatcagctgtgggttgcaatcctgattatcac

SEQ ID NO: 101381 - DNA, 60 bp, Artificial
  Synthetic oligonucleotide
ggattatgacttcagggttggccgcccaggataaaaggcaattgtggtaagtgatgttag

SEQ ID NO: 101382 - DNA, 60 bp, Artificial
  Synthetic oligonucleotide
gctcttttctgaaggcaaagtcatagggatgctcactgccaaatctgaatgtacatatgc

SEQ ID NO: 101383 - DNA, 60 bp, Artificial
  Synthetic oligonucleotide
tttttaaagatcaatattatgttgttcatggagggatgccatcaggatgttcagggacct

SEQ ID NO: 101384 - DNA, 60 bp, Artificial
  Synthetic oligonucleotide
ctgctttcacccaacacgaccgtacacgaaagagctagaggcactttggggcaaagggaa

SEQ ID NO: 101385 - DNA, 60 bp, Artificial
  Synthetic oligonucleotide
aaatgtctcaactgtgataagcctgaaaattttaagcattgtaatcctcttatttgtggt

SEQ ID NO: 101386 - DNA, 60 bp, Artificial
  Synthetic oligonucleotide
ggtcgttacaataatgcttgcagagtctaggaggaggagaaacatactcaatgtggttga

SEQ ID NO: 101387 - DNA, 60 bp, Artificial
  Synthetic oligonucleotide
ccccattgaagttgaggtaattagggaaagaagcaaggtgcagaagtacttaaactggtt

SEQ ID NO: 101388 - DNA, 60 bp, Artificial
  Synthetic oligonucleotide
cctgggctactgggtgaaaatagagtcaggcataagaatgaaagaaaatttgaacattgc

SEQ ID NO: 101389 - DNA, 60 bp, Artificial
  Synthetic oligonucleotide
cccaatactgtgaattgctaaactttagagatcaccaacagagagacctatggagttgtg

SEQ ID NO: 101390 - DNA, 60 bp, Artificial
  Synthetic oligonucleotide
tgtcaactaagagatggtggaagaacccttaccttgttgaggccgttggcgtgaaacaag

SEQ ID NO: 101391 - DNA, 60 bp, Artificial
  Synthetic oligonucleotide
ccaggcgcccttatggacactggggtgtttggacagaacttgagattccactatttatat

SEQ ID NO: 101392 - DNA, 60 bp, Artificial
  Synthetic oligonucleotide
gggagaatcagactcaattccatctgctctaaatgctcacattgaacaagcggtcacaag

SEQ ID NO: 101393 - DNA, 60 bp, Artificial
  Synthetic oligonucleotide
caagcggtcacaagtgcattaaacacccggccacaacacagccatgacaatgggcttgag

SEQ ID NO: 101394 - DNA, 60 bp, Artificial
  Synthetic oligonucleotide
aggtatgatggtgacggtacatttgatccctctgataaacaatatggtgtaaatccagga

SEQ ID NO: 101395 - DNA, 60 bp, Artificial
  Synthetic oligonucleotide
gtgctacctgacagggccgcggctggtcgtttgtgtatggtataaccagtagtaatcccc

SEQ ID NO: 101396 - DNA, 60 bp, Artificial
  Synthetic oligonucleotide
aatgcgtcccgtctgtcccgacggtgaggcgtatggcgcatgctcatggcattacccaat

SEQ ID NO: 101397 - DNA, 60 bp, Artificial
  Synthetic oligonucleotide
actcacaggcatataacccttcccaacaacagatggacccgagtcaatttactaagcctg

SEQ ID NO: 101398 - DNA, 60 bp, Artificial
  Synthetic oligonucleotide
acaactgacagctggtaactcatgcatcaccacacaagaagcggcgaaagccgttgttgc

SEQ ID NO: 101399 - DNA, 60 bp, Artificial
  Synthetic oligonucleotide
cctccagagtcgagatgtcaccagggcctcttgtcaccttggccgatgatggctatctct

SEQ ID NO: 101400 - DNA, 66 bp, Artificial
  Synthetic oligonucleotide
ggatatgtcattgattggagatttattcaaaccaacatatttaggtagattggctaagatgtatgc

SEQ ID NO: 101401 - DNA, 60 bp, Artificial
  Synthetic oligonucleotide
ttgcttttatgcagttcagcacgagcccgccgagcaatgcgggcttgaagacccctttag

SEQ ID NO: 101402 - DNA, 60 bp, Artificial
  Synthetic oligonucleotide
ttgaaagaaacaggaagaattaccatgatgctgatgtgcttgaagtgtgtgaattcatag

SEQ ID NO: 101403 - DNA, 60 bp, Artificial
  Synthetic oligonucleotide
tgctggggaggcactggatttggacacacgaccaggtccctcatgtgatagattttacac

SEQ ID NO: 101404 - DNA, 60 bp, Artificial
  Synthetic oligonucleotide
gcactccagttgggcgagctttatctttgccatcttttgaggtgcttagatacaactggc

SEQ ID NO: 101405 - DNA, 60 bp, Artificial
  Synthetic oligonucleotide
gggcaacaagcacatctctatccctcctgaaacattcattgctatagaccattatgtaga

SEQ ID NO: 101406 - DNA, 53 bp, Artificial
  Synthetic oligonucleotide
ggtgatggggctggggaatctttccagagaaatgtggatgaggcaattgaaaa

SEQ ID NO: 101407 - DNA, 60 bp, Artificial
  Synthetic oligonucleotide
ttcatgatgtgtttgaagggacaaaagaacctgcagctcttcggcctggtgatagccgtc

SEQ ID NO: 101408 - DNA, 60 bp, Artificial
  Synthetic oligonucleotide
cctattttagtgtatgtcaaggtgaaattgtacataaggaatcaactaaggaaagaggtg

SEQ ID NO: 101409 - DNA, 60 bp, Artificial
  Synthetic oligonucleotide
ctgaattctgatcagtttcgggatgtctatgtcccagttggctctgtttcccttttcggt

SEQ ID NO: 101410 - DNA, 60 bp, Artificial
  Synthetic oligonucleotide
gctagcatatagggaaggaaaagttgtagaagactactccagatatacaactggtggagc

SEQ ID NO: 101411 - DNA, 60 bp, Artificial
  Synthetic oligonucleotide
tcaaatccctattactgtaagtgttgcccccatgtgttcttcatttgctggtttgagatc

SEQ ID NO: 101412 - DNA, 60 bp, Artificial
  Synthetic oligonucleotide
cgggagaaacatcagatagtagtggccaaacaagcatggaattgagggaatctaatgcca

SEQ ID NO: 101413 - DNA, 60 bp, Artificial
  Synthetic oligonucleotide
caatagccactgaaatcatatcaaggtcacttgcacaggctacagatacccaaatgcctt

SEQ ID NO: 101414 - DNA, 60 bp, Artificial
  Synthetic oligonucleotide
gggcttgagattatacagggagatgcacccgctctaactgctgcagagtcgggagaaaca

SEQ ID NO: 101415 - DNA, 60 bp, Artificial
  Synthetic oligonucleotide
ggtgtggctgtctcccattaatccaacttgcataaccaagattcaagaccctcctactag

SEQ ID NO: 101416 - DNA, 60 bp, Artificial
  Synthetic oligonucleotide
cccagattcataatggaacctctccccaatctatgacttttcagatgatgttttcacccc

SEQ ID NO: 101417 - DNA, 60 bp, Artificial
  Synthetic oligonucleotide
agctttctacccttttagctcttggtagcatgttaggtgtggatttcatgtcaaaagacc

SEQ ID NO: 101418 - DNA, 60 bp, Artificial
  Synthetic oligonucleotide
ccttccatcagggttgtttattggttgccatggtgcccgaacatcagacaccaaaacagc

SEQ ID NO: 101419 - DNA, 60 bp, Artificial
  Synthetic oligonucleotide
ctgtcagatggtttccaccacagcttttatacctcctatggcctctttggaagagaaggg

SEQ ID NO: 101420 - DNA, 60 bp, Artificial
  Synthetic oligonucleotide
ggaactgaatatccaacagaacagttgaccctcttcccacatcaattcttaaacctgaga

SEQ ID NO: 101421 - DNA, 60 bp, Artificial
  Synthetic oligonucleotide
ccacatctgtgtataggagttcaatgttgacaaacacgaccttgtcatatgatggctgga

SEQ ID NO: 101422 - DNA, 60 bp, Artificial
  Synthetic oligonucleotide
gtaccacctaactgcccctcaacctgccaaattataggactagttagtgcttctgataat

SEQ ID NO: 101423 - DNA, 60 bp, Artificial
  Synthetic oligonucleotide
ggactaggagtgctgcaacaacacaggaacatgtgacatcgttgtgcttattggcttggc

SEQ ID NO: 101424 - DNA, 60 bp, Artificial
  Synthetic oligonucleotide
aaattccccactggcgacagtgttctagcctgcgtggctgcctgcgtgtccttacggaca

SEQ ID NO: 101425 - DNA, 60 bp, Artificial
  Synthetic oligonucleotide
ggagaacaaggcagagaaatagggacttttggggagaatagcgtattagacagacaaccc

SEQ ID NO: 101426 - DNA, 60 bp, Artificial
  Synthetic oligonucleotide
cccctggttcagaacaatttctaacaactgatgatgcccagtcaccttctgctttgccct

SEQ ID NO: 101427 - DNA, 60 bp, Artificial
  Synthetic oligonucleotide
gcatatctataaaacaacatactatgaagtagagggtggaatgccatcaggttgtgctgg

SEQ ID NO: 101428 - DNA, 60 bp, Artificial
  Synthetic oligonucleotide
ggatatggcagaactagctaaagaaggtaacaaatatggtctgacaatcacacctgcaga

SEQ ID NO: 101429 - DNA, 60 bp, Artificial
  Synthetic oligonucleotide
tagatggacaaagaatcccagaaatatgcaggaacatgttctttccctgtgtcaccttat

SEQ ID NO: 101430 - DNA, 60 bp, Artificial
  Synthetic oligonucleotide
cgcacaaatactacaggtgatgacataatcccaacatgcgactgtacactaggtacttac

SEQ ID NO: 101431 - DNA, 60 bp, Artificial
  Synthetic oligonucleotide
cggtgtgattggtataataaccgctggaggtgacaatcatgtagctttcatagatcttag

SEQ ID NO: 101432 - DNA, 60 bp, Artificial
  Synthetic oligonucleotide
gctctgttaggttgctcaggttcaccatggagatttatcaaggagaaagtttgtggatgg

SEQ ID NO: 101433 - DNA, 60 bp, Artificial
  Synthetic oligonucleotide
ctgctgcgcactacacggcccagttgacaacactagatattgacccacagccaattagtc

SEQ ID NO: 101434 - DNA, 60 bp, Artificial
  Synthetic oligonucleotide
atgtgttcccaggtagcaaagagcctgctgtattatccacaagagatccaaggttagagg

SEQ ID NO: 101435 - DNA, 60 bp, Artificial
  Synthetic oligonucleotide
caggagtatattgatacccttaccctaatgttggattcatcaaataaattcttacccctt

SEQ ID NO: 101436 - DNA, 60 bp, Artificial
  Synthetic oligonucleotide
gcggggtcttatataaaataggcttgatcttgggtatacatgtgggaggcaatggaagag

SEQ ID NO: 101437 - DNA, 60 bp, Artificial
  Synthetic oligonucleotide
gggtccccaagccaaccagtagaaaagatgcaatgctctctactcatgtagtatgggatg

SEQ ID NO: 101438 - DNA, 60 bp, Artificial
  Synthetic oligonucleotide
acatgggcatctttggagaaaacctcttctaccacttccttggaagggctggatacacgg

SEQ ID NO: 101439 - DNA, 60 bp, Artificial
  Synthetic oligonucleotide
gccataccagtggatgtagcttcacaacctttggccacaacactgataggagaaatagct

SEQ ID NO: 101440 - DNA, 60 bp, Artificial
  Synthetic oligonucleotide
cacaggatgttgcaaatgctgtagtggcttatggtgtatggccagagtatttatctgctc

SEQ ID NO: 101441 - DNA, 60 bp, Artificial
  Synthetic oligonucleotide
cacatgctggtatcagacaaattttatagtccctcctagcacacccaactcagcagatat

SEQ ID NO: 101442 - DNA, 60 bp, Artificial
  Synthetic oligonucleotide
cagcactagatgctgcagaaacgggtcatacaagtcagacacaacctgaggacatgctgg

SEQ ID NO: 101443 - DNA, 60 bp, Artificial
  Synthetic oligonucleotide
gggttgctcccacccagattacccaagtggtgtagtactctgttattacggtagctttgt

SEQ ID NO: 101444 - DNA, 60 bp, Artificial
  Synthetic oligonucleotide
gtccaagaccaccaagagcagttgcatatcaacacacatatagcccaaattttgtaccgc

SEQ ID NO: 101445 - DNA, 60 bp, Artificial
  Synthetic oligonucleotide
ggaaatacattccagagagtgaagatgattacccagaatgctgcttggcactagttgcaa

SEQ ID NO: 101446 - DNA, 60 bp, Artificial
  Synthetic oligonucleotide
cttgctagcactaatcatactctactccaccctccaacaattacatgcacaacagcaatg

SEQ ID NO: 101447 - DNA, 60 bp, Artificial
  Synthetic oligonucleotide
tgagcctgggaaaaaccactcagaatggaagattacactcaaagaaatggcccagattag

SEQ ID NO: 101448 - DNA, 60 bp, Artificial
  Synthetic oligonucleotide
gagatagaagtaatggagaacacttgtcccttgccacaatatataataggatcacacagg

SEQ ID NO: 101449 - DNA, 60 bp, Artificial
  Synthetic oligonucleotide
atctatgacaacgtaatgataataccaacacacgctgatgcaggtcaggaggtggaagtg

SEQ ID NO: 101450 - DNA, 60 bp, Artificial
  Synthetic oligonucleotide
aaggtcaagcacttctgtttccccggttagatttgatacgctccaacagggcgaaaacag

SEQ ID NO: 101451 - DNA, 60 bp, Artificial
  Synthetic oligonucleotide
ccgcagccaaggtgtgcaaaccagcacattcttggtcgtaacgagtaattgtgggatggg

SEQ ID NO: 101452 - DNA, 60 bp, Artificial
  Synthetic oligonucleotide
cgctccagcactgctgcaccagtgaactggtacgctagtacctttgcacggagtagatgg

SEQ ID NO: 101453 - DNA, 60 bp, Artificial
  Synthetic oligonucleotide
cgctccagcaccgctgcaccagtgaactggtacgctagtacctttgcacggagtagatgg

SEQ ID NO: 101454 - DNA, 59 bp, Artificial
  Synthetic oligonucleotide
agcgtgcccgtgggccgggcactctcgctgccatcattcaaagctttgcagcgtacctg

SEQ ID NO: 101455 - DNA, 59 bp, Artificial
  Synthetic oligonucleotide
aaggttgcgctcaaccacatccccagtggtagctccgagtgatggggctcgcgattccc

SEQ ID NO: 101456 - DNA, 60 bp, Artificial
  Synthetic oligonucleotide
ttttgactatccggtttaattaggttttaattggcacaatacacccgccggatggggtgt

SEQ ID NO: 101457 - DNA, 60 bp, Artificial
  Synthetic oligonucleotide
ccgccgttggctcgactcgttttagcaaccctacctcagtcgaattggattgggttatac

SEQ ID NO: 101458 - DNA, 60 bp, Artificial
  Synthetic oligonucleotide
ccgccgttggcttgactcattttagcaaccctacctcagtcgaattggattgggttatac

SEQ ID NO: 101459 - DNA, 60 bp, Artificial
  Synthetic oligonucleotide
gagttcttactggaagattgatcagattgaatgatgagaaatggacagaaatgaaggatg

SEQ ID NO: 101460 - DNA, 60 bp, Artificial
  Synthetic oligonucleotide
gtgatgataaggtcgtaatgagcaattccgggacgggaccgactactttgggtgtccgtg

SEQ ID NO: 101461 - DNA, 54 bp, Artificial
  Synthetic oligonucleotide
tcgaattggattgggttatactgttgtaggggtaaatttttctttaattcggag

SEQ ID NO: 101462 - DNA, 59 bp, Artificial
  Synthetic oligonucleotide
ctcagtcgaattggattgggttatactgttgtaggggtaaatttttctttaattcggag

SEQ ID NO: 101463 - DNA, 60 bp, Artificial
  Synthetic oligonucleotide
tggcattcgattacacaaattatgatggtagtatacaccctatatggttccaggctctca

SEQ ID NO: 101464 - DNA, 60 bp, Artificial
  Synthetic oligonucleotide
ccataaggtggacaaagaaaccatctcaaatgcaggagcatgttctgtcattgtgtcacc

SEQ ID NO: 101465 - DNA, 60 bp, Artificial
  Synthetic oligonucleotide
ggacaaagaaaccctcacaaatgcaggagcatgttctgtcattgtgtcacttaatgtggc

SEQ ID NO: 101466 - DNA, 60 bp, Artificial
  Synthetic oligonucleotide
aggaagcagttcctctggaagcttcttgaagacaagcaacgtctgtagcgaccctttgca

SEQ ID NO: 101467 - DNA, 60 bp, Artificial
  Synthetic oligonucleotide
gttcctctggaagcttcttgaagacaagcaacgtctgtagcgaccctttgcaggcagcgg

SEQ ID NO: 101468 - DNA, 60 bp, Artificial
  Synthetic oligonucleotide
tggacgcttcttgaagacaagcaacgtctgtagcgaccctttgcaggcagcggaatcccc

SEQ ID NO: 101469 - DNA, 60 bp, Artificial
  Synthetic oligonucleotide
tactgccgaacgacctagccagcaaagttatgggatcagcctttacggctttgctcgatg

SEQ ID NO: 101470 - DNA, 60 bp, Artificial
  Synthetic oligonucleotide
gttctggtagtgtgcagcccctggcacaacgcgttacccggtaagccaaccgggtgtaca

SEQ ID NO: 101471 - DNA, 60 bp, Artificial
  Synthetic oligonucleotide
cgtaacgagaaattctgggacgggaccgactactttgggtgtccgtgtttccttttatct

SEQ ID NO: 101472 - DNA, 60 bp, Artificial
  Synthetic oligonucleotide
gggtgagaagcctaattattgacaaggtgtgaagagccgcgtgtgctcagtgtgcttcct

SEQ ID NO: 101473 - DNA, 60 bp, Artificial
  Synthetic oligonucleotide
gtctgtcgtaacgggcaactctgcagcggaaccgactactttgggtgtccgtgtttcctt

SEQ ID NO: 101474 - DNA, 60 bp, Artificial
  Synthetic oligonucleotide
cagtcctgtttggagaaagagatgatagaatacagacttaaatcttatgattggtggaga

SEQ ID NO: 101475 - DNA, 60 bp, Artificial
  Synthetic oligonucleotide
tcagtcctgtttggagaaagagatgatagaatacagacttaaatcttatgattggtggag

SEQ ID NO: 101476 - DNA, 60 bp, Artificial
  Synthetic oligonucleotide
agtcctccggcccctgaatgcggctaatcctaactgcggagcagatacccacacaccagt

SEQ ID NO: 101477 - DNA, 60 bp, Artificial
  Synthetic oligonucleotide
ctagttagtagtcctccggcccctgaatgcggctaatcctaactgcggagcacgtgccct

SEQ ID NO: 101478 - DNA, 60 bp, Artificial
  Synthetic oligonucleotide
gagaagcctagtaactgaccaagtagttgagaggttgcgctcagccacaaccccagtggt

SEQ ID NO: 101479 - DNA, 60 bp, Artificial
  Synthetic oligonucleotide
ggcaaatgcgtacagcatgtcttatgatgggtatgccaccttcggggacaccggtggtgc

SEQ ID NO: 101480 - DNA, 60 bp, Artificial
  Synthetic oligonucleotide
gccaagagcctattgtgctgggacggtttcctccggggccgtgaatgctgctaatcccaa

SEQ ID NO: 101481 - DNA, 60 bp, Artificial
  Synthetic oligonucleotide
taacgaggttgcgctcagccacaaccccagtggtagctccggaagatggggctcgcacca

SEQ ID NO: 101482 - DNA, 60 bp, Artificial
  Synthetic oligonucleotide
tgaccaagtagttgagaggttgcgctcagccacaaccccagtggtagctctggaagatgg

SEQ ID NO: 101483 - DNA, 60 bp, Artificial
  Synthetic oligonucleotide
cagcagaagcgcgcagggtgtttgcgcttgagaagcgtgtgctgggagcaatgcagttca

SEQ ID NO: 101484 - DNA, 60 bp, Artificial
  Synthetic oligonucleotide
gctaatgcgtacagcatgtcttatgatgggtatgccacctttggagacaccggaggtgcc

SEQ ID NO: 101485 - DNA, 60 bp, Artificial
  Synthetic oligonucleotide
ggcgtcgagtctgaacgactccgtcgcaatgaggtgcgccttcggaaatctctacaaggc

SEQ ID NO: 101486 - DNA, 60 bp, Artificial
  Synthetic oligonucleotide
ccctggagaagcgtgtgctgggagcaatgcagttcaagaccacgaatcgacttgaacctg

SEQ ID NO: 101487 - DNA, 60 bp, Artificial
  Synthetic oligonucleotide
gcgtcgagtctcaatgattccgttgcgatgaggtgcgccttcggaaatctctacaaggct

SEQ ID NO: 101488 - DNA, 60 bp, Artificial
  Synthetic oligonucleotide
gagcccttccagggtctctttgagattccaagctacagatcactttacctgcgttgggtg

SEQ ID NO: 101489 - DNA, 60 bp, Artificial
  Synthetic oligonucleotide
cagtctgtcgtaacgggcaactccgcagcggaaccgactactttgggtgtccgtgtttcc

SEQ ID NO: 101490 - DNA, 60 bp, Artificial
  Synthetic oligonucleotide
cagctgattgcagggatgacaatagcagtgatgcatccggaccctttgactctgctctgc

SEQ ID NO: 101491 - DNA, 60 bp, Artificial
  Synthetic oligonucleotide
gcagggatgacaatagcagtgatgcatccggaccccttaacgttgctttgcttagggaca

SEQ ID NO: 101492 - DNA, 60 bp, Artificial
  Synthetic oligonucleotide
ggttgttcccaccccagaggcccacgtggcggctagtacaccggtattacggtacccttg

SEQ ID NO: 101493 - DNA, 60 bp, Artificial
  Synthetic oligonucleotide
ttaaaacagctctggggttgttcccaccccagaggcccacgtggcggctagtactccggt

SEQ ID NO: 101494 - DNA, 60 bp, Artificial
  Synthetic oligonucleotide
gcccctcttggaagaccatggtgaggggacttgatacctcaccgccgtttgcctaggcta

SEQ ID NO: 101495 - DNA, 60 bp, Artificial
  Synthetic oligonucleotide
caaggtcgtaacgagcaattctgggacgggaccgactactttgggtgtccgtgtttcctg

SEQ ID NO: 101496 - DNA, 60 bp, Artificial
  Synthetic oligonucleotide
cctctttgagatcccaagctacagatcactttacctgcgttgggtgaacgccgtgtgcgg

SEQ ID NO: 101497 - DNA, 60 bp, Artificial
  Synthetic oligonucleotide
cctattgagctaattggtagtcctccggcccctgaatgcggctaatcctaactgcggagc

SEQ ID NO: 101498 - DNA, 60 bp, Artificial
  Synthetic oligonucleotide
ccacaagaggtaggctacgggtgaaacctcttaggctaatacttctatgaagagatgctt

SEQ ID NO: 101499 - DNA, 60 bp, Artificial
  Synthetic oligonucleotide
gaggggacttgatacctcaccgccgtttgcctaggctataggctaattttcccttttccc

SEQ ID NO: 101500 - DNA, 58 bp, Artificial
  Synthetic oligonucleotide
gaggggacttgatacctcaccgccgtttgcctaggctataggctaaacttcccttttc

SEQ ID NO: 101501 - DNA, 53 bp, Artificial
  Synthetic oligonucleotide
taacgagcaattgcgggatgggaccaactactttgggtgtccgtgtttctttt

SEQ ID NO: 101502 - DNA, 51 bp, Artificial
  Synthetic oligonucleotide
aattcactgaaatgtgcaatgcagctagaggtttagagtggattggtaaca

SEQ ID NO: 101503 - DNA, 60 bp, Artificial
  Synthetic oligonucleotide
ctacatggactatggaactgggttttacaaacctgtgatggcctcgaagaccctcgaggc

SEQ ID NO: 101504 - DNA, 60 bp, Artificial
  Synthetic oligonucleotide
gctcactttgagtcctccggcccctgaatgcggctaaccttaaacctgcagccatggctc

SEQ ID NO: 101505 - DNA, 60 bp, Artificial
  Synthetic oligonucleotide
acagtgttctagcctgcgtggctgcctgcacaccctatgggtgtgaagccatactttcga

SEQ ID NO: 101506 - DNA, 57 bp, Artificial
  Synthetic oligonucleotide
ggggtggtgtgtcgtaacgggtaactctgcagcggaaccgactactttgggtgtccg

SEQ ID NO: 101507 - DNA, 60 bp, Artificial
  Synthetic oligonucleotide
tttgatcttccacaaggggtaggctacgggtgaaacctcttaagctaatacttctatgaa

SEQ ID NO: 101508 - DNA, 60 bp, Artificial
  Synthetic oligonucleotide
tgaagagcctattgagctagctggtagtcctccggcccctgaatgcggctaatcctaact

SEQ ID NO: 101509 - DNA, 60 bp, Artificial
  Synthetic oligonucleotide
agagtcctccggcccctgaatgcggctaatcctaaccacggagcaagtgtcctcaaccca

SEQ ID NO: 101510 - DNA, 60 bp, Artificial
  Synthetic oligonucleotide
tgcagagggtcctgggtcaatgaatatggcaaacgtcttaagtactacaggagctcaatc

SEQ ID NO: 101511 - DNA, 60 bp, Artificial
  Synthetic oligonucleotide
gttggaggttatgtgtatcaactggactctgacgatattttcaaaacagcattgacaggt

SEQ ID NO: 101512 - DNA, 60 bp, Artificial
  Synthetic oligonucleotide
gacctagggcgtttgagggtttatgtttggacaccactgacaattccatccagtgcgact

SEQ ID NO: 101513 - DNA, 60 bp, Artificial
  Synthetic oligonucleotide
ccattgttgtctggcacacattcagggaagatcgaagtttatttgagtctcagatgccct

SEQ ID NO: 101514 - DNA, 60 bp, Artificial
  Synthetic oligonucleotide
gctccattcttgactatgcatcagacataattgtggaatcaaaggatcagactaagatga

SEQ ID NO: 101515 - DNA, 60 bp, Artificial
  Synthetic oligonucleotide
gagggcctacaatccaaccctgcctattactaaaccaaaaggaacattcccagtatccca

SEQ ID NO: 101516 - DNA, 60 bp, Artificial
  Synthetic oligonucleotide
ggaggctttcatcgaaccacgccctagtgtctttaagtgttttgcagtaaagttgccgca

SEQ ID NO: 101517 - DNA, 60 bp, Artificial
  Synthetic oligonucleotide
gccaagcaatgtcaaccatgtccactggtgaatgctgggaagtttccaagaacggtagag

SEQ ID NO: 101518 - DNA, 60 bp, Artificial
  Synthetic oligonucleotide
ccttcagtcactcaggttacacttggtggcaagccaatggacctcgccatcttaaagtgc

SEQ ID NO: 101519 - DNA, 60 bp, Artificial
  Synthetic oligonucleotide
caagttaacaatgaactatggcaaggcgtcaaagcttgtgtcaaatctaaatttagggag

SEQ ID NO: 101520 - DNA, 60 bp, Artificial
  Synthetic oligonucleotide
ggtgacttggcaaattttatagatcagagtccatatggtcaacagcaacaaacccaaatg

SEQ ID NO: 101521 - DNA, 60 bp, Artificial
  Synthetic oligonucleotide
gatggactattcccaatatgatggctcactcagttcaatgcttttgtgggaagctgtgga

SEQ ID NO: 101522 - DNA, 60 bp, Artificial
  Synthetic oligonucleotide
ctgcatacgggcagtccagatattttgctgctgtgaggtgtggattccatttccaagtac

SEQ ID NO: 101523 - DNA, 60 bp, Artificial
  Synthetic oligonucleotide
ctggtgttgaggatgtcagtctatgccagtactttcaacagaggccgattgcgcatgggt

SEQ ID NO: 101524 - DNA, 60 bp, Artificial
  Synthetic oligonucleotide
ccacagtcaacacactcacaaatttgacacaacatccttctgctcccactatgcctttca

SEQ ID NO: 101525 - DNA, 60 bp, Artificial
  Synthetic oligonucleotide
aacccacactcttagtcagcatcaagccattgggttggttggtgccattctcttaacagc

SEQ ID NO: 101526 - DNA, 60 bp, Artificial
  Synthetic oligonucleotide
gcagatgatggaacatggagggcagatttgaattttcccacacagggtcatggtactctg

SEQ ID NO: 101527 - DNA, 60 bp, Artificial
  Synthetic oligonucleotide
gcagagtccatgtccaacacagatgatgatgaaattaaggaacaaatttgtgacacagta

SEQ ID NO: 101528 - DNA, 60 bp, Artificial
  Synthetic oligonucleotide
catggcagattcatttggagctgaggtaactgggtcacgcaaggatgaaccaccttctct

SEQ ID NO: 101529 - DNA, 60 bp, Artificial
  Synthetic oligonucleotide
gagcattgcagatatggccactggcttcactaacacaattgattcaactgtcaacgctgt

SEQ ID NO: 101530 - DNA, 60 bp, Artificial
  Synthetic oligonucleotide
gagggcaacttcaagattctgggtatgcatatagctggtaatggtgaaatgggtgtggct

SEQ ID NO: 101531 - DNA, 60 bp, Artificial
  Synthetic oligonucleotide
ccatgcctggtccccactagtcgaaagcatctagccataagatgagtggactaaggacgc

SEQ ID NO: 101532 - DNA, 60 bp, Artificial
  Synthetic oligonucleotide
ggcgtgccataactctactagtgggataccacgcttgtggaccttatgcccacacagcca

SEQ ID NO: 101533 - DNA, 60 bp, Artificial
  Synthetic oligonucleotide
gaccctttaggattggttcaatacctgagttaatatggaaagtgcttagtacctgctgac

SEQ ID NO: 101534 - DNA, 60 bp, Artificial
  Synthetic oligonucleotide
ggacaaagaaaccatctcagatgcaggagcatgtcttgtcactgtgtcatttaatgtggc

SEQ ID NO: 101535 - DNA, 60 bp, Artificial
  Synthetic oligonucleotide
accagcttgatatggaagcaattgcctcggagggtgtcaagtacggattaacaataaccc

SEQ ID NO: 101536 - DNA, 60 bp, Artificial
  Synthetic oligonucleotide
ctgagtgtaacctggccttgtctgctaatcaacccgaaactaccataattagtgttgggg

SEQ ID NO: 101537 - DNA, 60 bp, Artificial
  Synthetic oligonucleotide
gcggtaattttgtacgccagttttatctcccctccccgatatgtaacttagaagctgaac

SEQ ID NO: 101538 - DNA, 60 bp, Artificial
  Synthetic oligonucleotide
gaacctaaacaaaagacaaagattccagaaagaagagttgttgcacaaggtcctgaggag

SEQ ID NO: 101539 - DNA, 64 bp, Artificial
  Synthetic oligonucleotide
ccacaagcacaactcaaaatcaaataccttaatgaacttaagaagctgaaccttttagaaaagc

SEQ ID NO: 101540 - DNA, 60 bp, Artificial
  Synthetic oligonucleotide
gcggtcgttatccgcaaaacaactacgcaaagcctagtaccaccttctagagcatgtggc

SEQ ID NO: 101541 - DNA, 60 bp, Artificial
  Synthetic oligonucleotide
cacctgctttggatgcagctgagactgggcacacaagcagcgttcaaccagaggacatgg

SEQ ID NO: 101542 - DNA, 60 bp, Artificial
  Synthetic oligonucleotide
tacacaccccctggtatacgcaaaccaaagaacagaaaggaagcaatgttgggcactcat

SEQ ID NO: 101543 - DNA, 60 bp, Artificial
  Synthetic oligonucleotide
ttcctggtcaagtgaagaattttgttgagctttgccagattgacactttgatcccaataa

SEQ ID NO: 101544 - DNA, 60 bp, Artificial
  Synthetic oligonucleotide
cgcaccctgacaggtgcgaagccaaatgtttgacaaggtgtgaagagccccgtgtgcttg

SEQ ID NO: 101545 - DNA, 60 bp, Artificial
  Synthetic oligonucleotide
tcatctgaccctcaaacaataatagctacattaacactgattggttgctctggatcacca

SEQ ID NO: 101546 - DNA, 60 bp, Artificial
  Synthetic oligonucleotide
ctatttgacatcacaagatgctactgctatagataaaccctcccgcccagacacctcctc

SEQ ID NO: 101547 - DNA, 60 bp, Artificial
  Synthetic oligonucleotide
ttaaagatgtattggagaaaggcattcccacattacaatccccaactgtcgaggcatgtg

SEQ ID NO: 101548 - DNA, 60 bp, Artificial
  Synthetic oligonucleotide
tccacacaccaagcaagacaaaattacaacctagtgtgtttcatgatgttttccctggaa

SEQ ID NO: 101549 - DNA, 60 bp, Artificial
  Synthetic oligonucleotide
cacaaagcaaagcatgttaaggtatggtgcccgagaccacctagagctgtagagtataca

SEQ ID NO: 101550 - DNA, 60 bp, Artificial
  Synthetic oligonucleotide
ctgcaatcttccaagggccaatctctttggaaggaccgcctccagctgcaataagtgacc

SEQ ID NO: 101551 - DNA, 60 bp, Artificial
  Synthetic oligonucleotide
gcccatgtgaacctggtgactgtggtggtaaactgctgtgtaaacatggagtcattggaa

SEQ ID NO: 101552 - DNA, 60 bp, Artificial
  Synthetic oligonucleotide
ccaagtggtgaggatatgactcttttctgccaaatggtatctagtgtcacgtttatcccc

SEQ ID NO: 101553 - DNA, 60 bp, Artificial
  Synthetic oligonucleotide
gcatcatcacaggttctgcagtgggatgtgacccggaaaccttttggtcgaaaatacccg

SEQ ID NO: 101554 - DNA, 60 bp, Artificial
  Synthetic oligonucleotide
aatctttgccaagttcaactgtacccattaccatttcaataagccctatgtgtgctgaat

SEQ ID NO: 101555 - DNA, 60 bp, Artificial
  Synthetic oligonucleotide
gaaatgctacagctggatacaatctcacacaccctggtgaaggtggtagggatgtcagcc

SEQ ID NO: 101556 - DNA, 60 bp, Artificial
  Synthetic oligonucleotide
tttgagattccaagctacagatcactttacctgcgttgggtgaacgccgtgtgcggcgac

SEQ ID NO: 101557 - DNA, 60 bp, Artificial
  Synthetic oligonucleotide
ttcgagattccaagctacagatcactttacctgcgttgggtgaacgccgtgtgcggcgac

SEQ ID NO: 101558 - DNA, 60 bp, Artificial
  Synthetic oligonucleotide
tgcttatggtgacaattgagagattgttaccatatagctattggattggccatccggtga

SEQ ID NO: 101559 - DNA, 60 bp, Artificial
  Synthetic oligonucleotide
gcttatggtgacaattgagagattgttaccatatagctattggattggccatccggtgac

SEQ ID NO: 101560 - DNA, 60 bp, Artificial
  Synthetic oligonucleotide
ccccccgaaccacggggacgtggttttcctttgaaaaccacgattgtaagatggctacaa

SEQ ID NO: 101561 - DNA, 60 bp, Artificial
  Synthetic oligonucleotide
acgtctgtagcgaccctttgcaggcagcggaaccccccacctggcgacaggtgcctctgc

SEQ ID NO: 101562 - DNA, 60 bp, Artificial
  Synthetic oligonucleotide
tggccagcaaagctatgggatcagcctttacggctttgctcgatgccaacgaggacgccc

SEQ ID NO: 101563 - DNA, 60 bp, Artificial
  Synthetic oligonucleotide
ttgccagcaaagctatgggatcagcttttacggctttgctcgatgccaacgaggacgccc

SEQ ID NO: 101564 - DNA, 60 bp, Artificial
  Synthetic oligonucleotide
ggctgggtccgtgactacccactccccctttcaacgtgaaggctacgatagtgccagggc

SEQ ID NO: 101565 - DNA, 60 bp, Artificial
  Synthetic oligonucleotide
gggtccgtgactacccactcctactttcaacgtgaaggctacgatagtgccagggcgggt

SEQ ID NO: 101566 - DNA, 60 bp, Artificial
  Synthetic oligonucleotide
gggccgggtccgtgactacccactccccctttcaacgtgaaggctacgatagtgccaggg

SEQ ID NO: 101567 - DNA, 50 bp, Artificial
  Synthetic oligonucleotide
cccctttcaacgtgaaggctacgatagtgccagggcgggtcctgccgaaa

SEQ ID NO: 101568 - DNA, 51 bp, Artificial
  Synthetic oligonucleotide
cccctttcaacgtgaaggctacgatagtgccagggcgggtactgccgtaag

SEQ ID NO: 101569 - DNA, 60 bp, Artificial
  Synthetic oligonucleotide
tagccagcaaagttatgggatcagcctttacggctttgctcgatgccaacgaggacgccc

SEQ ID NO: 101570 - DNA, 60 bp, Artificial
  Synthetic oligonucleotide
ggcctgtcgtaacgcgtaagtctgtggcggaaccgactactttgggtgtccgtgtttcct

SEQ ID NO: 101571 - DNA, 60 bp, Artificial
  Synthetic oligonucleotide
ccaaatattggacaaggtgtgaagagccccgtgtgctcgtcttgagtcctccggcccctg

SEQ ID NO: 101572 - DNA, 60 bp, Artificial
  Synthetic oligonucleotide
tcggtgcacgtgctctacacgtgttgagtcgaggttaaaaaacgtctaggccccccgaac

SEQ ID NO: 101573 - DNA, 60 bp, Artificial
  Synthetic oligonucleotide
tggtgacaggctaaggatgcccttcaggtaccccgaggtaacacgcgacactcgggatct

SEQ ID NO: 101574 - DNA, 60 bp, Artificial
  Synthetic oligonucleotide
ccattactccagctgacaaaagcgacaaaggttttgttcttggtcactccattaccgatg

SEQ ID NO: 101575 - DNA, 53 bp, Artificial
  Synthetic oligonucleotide
tggcctcgaagaccctcgaggctatcctctcctttgcacgccgtgggaccata

SEQ ID NO: 101576 - DNA, 60 bp, Artificial
  Synthetic oligonucleotide
caattgagctagtcagtattcctccggcccctgaatgcggctaatcctaactgcggagca

SEQ ID NO: 101577 - DNA, 60 bp, Artificial
  Synthetic oligonucleotide
gcatgttgctagtcgtaacgagcaattgcgggatgggaccaactactttgggtgtccgtg

SEQ ID NO: 101578 - DNA, 60 bp, Artificial
  Synthetic oligonucleotide
gccccgaaccaacgcttcgctcccgccctggacttatgcacagacttgctcaacgcgttc

SEQ ID NO: 101579 - DNA, 60 bp, Artificial
  Synthetic oligonucleotide
aggggcccgtgtgcgaggtagatccaggtgtacccctcgtggcacaaggagcaagcacag

SEQ ID NO: 101580 - DNA, 60 bp, Artificial
  Synthetic oligonucleotide
aagcctatgcgccacgccatttccagcgtgtgcccaattcaccgcacaagcaaacggacg

SEQ ID NO: 101581 - DNA, 60 bp, Artificial
  Synthetic oligonucleotide
cccaacccgtggaaagccagttttcatccttgtcaacaacaacgtggcaggtagagccgt

SEQ ID NO: 101582 - DNA, 60 bp, Artificial
  Synthetic oligonucleotide
tactgcgttcgccccttcggggatgcgcgcagggcctggctccgcaattttgacctgtga

SEQ ID NO: 101583 - DNA, 60 bp, Artificial
  Synthetic oligonucleotide
gcgggctagaggaacctgacagttttgaattgacccttctgcacaagaatgataggcgct

SEQ ID NO: 101584 - DNA, 60 bp, Artificial
  Synthetic oligonucleotide
gtataagacagtggacggcagattggactacgctaaggccacacaaccaacccagatccc

SEQ ID NO: 101585 - DNA, 60 bp, Artificial
  Synthetic oligonucleotide
gcctgcaaccgacgactgaacagacgtgtgaacagtttgagtgtggtagcgctgtgtgag

SEQ ID NO: 101586 - DNA, 60 bp, Artificial
  Synthetic oligonucleotide
ccctctatacaccatcttggctgccagaccgaagcttcattcccggcaagtttactgact

SEQ ID NO: 101587 - DNA, 60 bp, Artificial
  Synthetic oligonucleotide
cgtccgcaaccagacttcccatcctttcaacttctgtgtttcagcggatccagtgcccgg

SEQ ID NO: 101588 - DNA, 60 bp, Artificial
  Synthetic oligonucleotide
cgtggagctggtcactcgcgcccggaggcaggtcacaacaatgaatcaggcaattctggt

SEQ ID NO: 101589 - DNA, 60 bp, Artificial
  Synthetic oligonucleotide
taccagctcactaccctgacgtaccctgcaaataccccccatttgtctgacattgtagtg

SEQ ID NO: 101590 - DNA, 60 bp, Artificial
  Synthetic oligonucleotide
tcactacgacgctgttgaagctggccttaactcgattgcagccgcttggaaggatttggc

SEQ ID NO: 101591 - DNA, 60 bp, Artificial
  Synthetic oligonucleotide
cccatccagcgcccaagacactccaagcaagcacgagcagtcagtagagtgcggctttac

SEQ ID NO: 101592 - DNA, 60 bp, Artificial
  Synthetic oligonucleotide
ggcatacccatttacccagagtttcagaagacacacaattttaagttgccaggtagggtt

SEQ ID NO: 101593 - DNA, 60 bp, Artificial
  Synthetic oligonucleotide
caccagcagataaatcaacaacattccaaacaggaactaaacttacagatgtaacattcc

SEQ ID NO: 101594 - DNA, 60 bp, Artificial
  Synthetic oligonucleotide
agcaaacttttggtcgtctgtttcaggtgtgccacaagaatcctggtacttacactggag

SEQ ID NO: 101595 - DNA, 60 bp, Artificial
  Synthetic oligonucleotide
ccagacacccactcaggttagtaatggatttgaatacaggaatggtgtaacataccaggg

SEQ ID NO: 101596 - DNA, 60 bp, Artificial
  Synthetic oligonucleotide
gttgttagttttgtgttatggtgatgatttattggttgcctatccctatgaattggatcc

SEQ ID NO: 101597 - DNA, 60 bp, Artificial
  Synthetic oligonucleotide
agccatgttagcgacgcgcttcggcgtgctcctttggtgattcggcgactggttacagga

SEQ ID NO: 101598 - DNA, 52 bp, Artificial
  Synthetic oligonucleotide
acctacctttcccgcttggcccagatgtatgcaaattacagaggatctgttg

SEQ ID NO: 101599 - DNA, 60 bp, Artificial
  Synthetic oligonucleotide
ccactttgtcatacaatggatgggtaactgtattccagcaaacagcactggttgtacccc

SEQ ID NO: 101600 - DNA, 60 bp, Artificial
  Synthetic oligonucleotide
gtacacaccatcaaaacccattaatgttagaacaaagacagccttccacccctctgtttt

SEQ ID NO: 101601 - DNA, 60 bp, Artificial
  Synthetic oligonucleotide
tgacgtattccctgggagcaaagagcctgctgcaatgagcacaaatgatccaagattaga

SEQ ID NO: 101602 - DNA, 60 bp, Artificial
  Synthetic oligonucleotide
ggttttcatagcgaaaatgattgctggttgtgcattaattctgagatgttttctaatgtg

SEQ ID NO: 101603 - DNA, 54 bp, Artificial
  Synthetic oligonucleotide
gcttacaatggactgatacccagattggagaatggtctttaccgctgcctgggg

SEQ ID NO: 101604 - DNA, 60 bp, Artificial
  Synthetic oligonucleotide
atgggacaatgtggaggtgttgtattgaaggcagggaagatcttgggtatacacatcggt

SEQ ID NO: 101605 - DNA, 60 bp, Artificial
  Synthetic oligonucleotide
gatgcctatgtttgtgcttttgactataccaattgggatgccagcttgtcacctctctgg

SEQ ID NO: 101606 - DNA, 60 bp, Artificial
  Synthetic oligonucleotide
cccctccacccttaaggtggttgtatcccctacaccctaccctcccttccacataggacg

SEQ ID NO: 101607 - DNA, 60 bp, Artificial
  Synthetic oligonucleotide
ggagatttgatttggatgttgtagtaatgatactggaagataaacctgctgctgtgagaa

SEQ ID NO: 101608 - DNA, 60 bp, Artificial
  Synthetic oligonucleotide
caggaagcctgtacttaggaaagcagttgtgcagggtcccgatatggaatttgccaagtc

SEQ ID NO: 101609 - DNA, 60 bp, Artificial
  Synthetic oligonucleotide
ctgaagttatacgccagaccaataatgtaaataatgtgacccaaattgtttcagcaaccc

SEQ ID NO: 101610 - DNA, 60 bp, Artificial
  Synthetic oligonucleotide
cgcaagtggtaggagacatctgaggtatgacctaagttttaggacaattggcaagtcagg

SEQ ID NO: 101611 - DNA, 60 bp, Artificial
  Synthetic oligonucleotide
cttcggaatggatacacacttcaatctgggaatgcatgactgggtccaagggctcggtca

SEQ ID NO: 101612 - DNA, 60 bp, Artificial
  Synthetic oligonucleotide
ggaccgttgattcagctgtcacccatctattagaagaatcagaaaggaggaaagggttcc

SEQ ID NO: 101613 - DNA, 60 bp, Artificial
  Synthetic oligonucleotide
gatagaggtagactggacatgtcaaagtgcttaccatgtaaggattgcaaaccaaccaac

SEQ ID NO: 101614 - DNA, 60 bp, Artificial
  Synthetic oligonucleotide
ctcaatacagattgtggatggcagaaggtgatgctgataatggtttctgtggagctggat

SEQ ID NO: 101615 - DNA, 60 bp, Artificial
  Synthetic oligonucleotide
cctgttactggtaccctaccatgcagcaaataattggagtcagacaacacatgtatacct

SEQ ID NO: 101616 - DNA, 60 bp, Artificial
  Synthetic oligonucleotide
ttcttaagatctcctacgcaacaccacactggttggagatgcccactaaaggatccgcca

SEQ ID NO: 101617 - DNA, 60 bp, Artificial
  Synthetic oligonucleotide
gctgaaactggtgaatctgacactaactctggtggatcaacaatggagctccaagcaacc

SEQ ID NO: 101618 - DNA, 60 bp, Artificial
  Synthetic oligonucleotide
ggtgattcggcgactggttacaggagagtagacagtgagctatgggcaaacccctacagt

SEQ ID NO: 101619 - DNA, 60 bp, Artificial
  Synthetic oligonucleotide
gagagcccgtgtgtaccttaccaccagtgtcacacacgagaagtcgattggaccgtacac

SEQ ID NO: 101620 - DNA, 60 bp, Artificial
  Synthetic oligonucleotide
tctactactactctttcattttgcaactggatccccaagaaacagagagcccgtgtgtac

SEQ ID NO: 101621 - DNA, 60 bp, Artificial
  Synthetic oligonucleotide
taatgcaattaacagcaggtaattcttgcataacaacacaagaggcagccaaggcggtgg

SEQ ID NO: 101622 - DNA, 60 bp, Artificial
  Synthetic oligonucleotide
ccccacacagcaacaaatggacccatcacaatttaccaaaccggtcacagagatagcagg

SEQ ID NO: 101623 - DNA, 60 bp, Artificial
  Synthetic oligonucleotide
ggcagccaaggcggtggtggcatatggacaatggcccagttacaatatagatgcaggaga

SEQ ID NO: 101624 - DNA, 59 bp, Artificial
  Synthetic oligonucleotide
ttaaaggatgagctgagaccaaaggagaaggtgaagatgggcaaaaccagggttattga

SEQ ID NO: 101625 - DNA, 60 bp, Artificial
  Synthetic oligonucleotide
gcagggtttggtttagcacacaattttgttacactagttattagggttttagttcctctt

SEQ ID NO: 101626 - DNA, 60 bp, Artificial
  Synthetic oligonucleotide
attgctcagttgtgttattccaatcacatatataagaatgagggttataaggttgccggc

SEQ ID NO: 101627 - DNA, 60 bp, Artificial
  Synthetic oligonucleotide
ggcaatgttgatgccacacttccagaagaggcccttatagcaatagaccatttggtttcc

SEQ ID NO: 101628 - DNA, 59 bp, Artificial
  Synthetic oligonucleotide
gaattcagagagggatgttccacatgatgtgatggaattggttaggtgcacaaaatccc

SEQ ID NO: 101629 - DNA, 60 bp, Artificial
  Synthetic oligonucleotide
gatggtttggatttgactacatcagcaggctacccctataacaccatggggattagaaag

SEQ ID NO: 101630 - DNA, 60 bp, Artificial
  Synthetic oligonucleotide
ggaccaagaatgccagctacactcaagaacatgtcacctcgctgtgtctattggcatggc

SEQ ID NO: 101631 - DNA, 60 bp, Artificial
  Synthetic oligonucleotide
ccccactgatacagcatattttgcagattaccaaggagatgtgaaggatgtggtgcaagc

SEQ ID NO: 101632 - DNA, 60 bp, Artificial
  Synthetic oligonucleotide
gtggaagactatctaggccaaattaagcccatcatagatgcaggtaccaacaaggttaag

SEQ ID NO: 101633 - DNA, 60 bp, Artificial
  Synthetic oligonucleotide
tttatattccaagataactggtgagccccataagcaaggaccctctgattggctgaaaga

SEQ ID NO: 101634 - DNA, 60 bp, Artificial
  Synthetic oligonucleotide
gcaaaggttttagagtttaagaactgcaaaactacattaggacaagaagatatatgccag

SEQ ID NO: 101635 - DNA, 60 bp, Artificial
  Synthetic oligonucleotide
gcatgcctatgtgagtggaaacatagtgttagatggtgtggatgttcctgtagtagatgc

SEQ ID NO: 101636 - DNA, 60 bp, Artificial
  Synthetic oligonucleotide
cctgcaacccagacagggccttatgaggtgtgccaaactaagaacgccactgaattaaca

SEQ ID NO: 101637 - DNA, 60 bp, Artificial
  Synthetic oligonucleotide
ctctggctactgaaataattggcagggcaatagcagataagttagataatcagagaccct

SEQ ID NO: 101638 - DNA, 60 bp, Artificial
  Synthetic oligonucleotide
gcctagaccccttgtttcttataaagctaatggtgatgccagacaagatagttccatgta

SEQ ID NO: 101639 - DNA, 60 bp, Artificial
  Synthetic oligonucleotide
atggtgtcaacaaccacctatatcccacccatggcctccctcgatgagaaaggattaccc

SEQ ID NO: 101640 - DNA, 60 bp, Artificial
  Synthetic oligonucleotide
ctattatacctccttttatgatggtgatggcaattttgaccagaacggtgctgcctatgg

SEQ ID NO: 101641 - DNA, 60 bp, Artificial
  Synthetic oligonucleotide
ccccatggcggcgctataccttcaacacataattcacaaatttggaatgcacccaattcg

SEQ ID NO: 101642 - DNA, 60 bp, Artificial
  Synthetic oligonucleotide
gttgtacccacggccaaaagcctttaaccgttatccgccaatcaactacgtaacggctag

SEQ ID NO: 101643 - DNA, 56 bp, Artificial
  Synthetic oligonucleotide
ggcatgtggcattcatagatcttagacactttcattgtgcagaggaacagggtgtg

SEQ ID NO: 101644 - DNA, 60 bp, Artificial
  Synthetic oligonucleotide
gaggtaatattacacaaaacccagtggagaattacatagatgaagtgttgaatgaagtgt

SEQ ID NO: 101645 - DNA, 60 bp, Artificial
  Synthetic oligonucleotide
ttacacaaaacccagtggagaattacatagatgaagtgttaaatgaggttctagtagttc

SEQ ID NO: 101646 - DNA, 60 bp, Artificial
  Synthetic oligonucleotide
gaagtcatttggttggtcgctccgctgttccccacagtagacctggcagatgaggctaga

SEQ ID NO: 101647 - DNA, 60 bp, Artificial
  Synthetic oligonucleotide
aaacaaagaggtaatattacacaaaacccagtggagaattacatagatgaagtgttgaat

SEQ ID NO: 101648 - DNA, 60 bp, Artificial
  Synthetic oligonucleotide
gcgatcgttatccgcaaagtgcctacgcaaagcctagtagcacctttgaagtcatttggt

SEQ ID NO: 101649 - DNA, 60 bp, Artificial
  Synthetic oligonucleotide
cgaagtcatttggttggtcgctccgctgtaacccacagtagacctggcagatgaggctag

SEQ ID NO: 101650 - DNA, 60 bp, Artificial
  Synthetic oligonucleotide
caactgagatcgttatccgcaaagtgcctacgcaaagcctagtaatgctttcgaagtcat

SEQ ID NO: 101651 - DNA, 60 bp, Artificial
  Synthetic oligonucleotide
cctccggcccctgaatgcggctaaccttaaccccacagccattgctcacaatccagtgag

SEQ ID NO: 101652 - DNA, 60 bp, Artificial
  Synthetic oligonucleotide
ggtgcaccctgtcatgcccatgaaagatatacatgagtcaatcagatggaccaaagatcc

SEQ ID NO: 101653 - DNA, 60 bp, Artificial
  Synthetic oligonucleotide
ccagactgttgggagtggccttgaccacatcctgtctttggcagatattgaggaagagca

SEQ ID NO: 101654 - DNA, 60 bp, Artificial
  Synthetic oligonucleotide
tccagaccgttgggagtggccttgaccacatcctgtctttggcagatattgaggaagaac

SEQ ID NO: 101655 - DNA, 60 bp, Artificial
  Synthetic oligonucleotide
ccagaccgttgggagtggccttgaccacatcctgtctttggcagatattgaggaagaaca

SEQ ID NO: 101656 - DNA, 60 bp, Artificial
  Synthetic oligonucleotide
gagatcccaagctacagatcactttacctgcgttgggtgaacgccgtgtgcggtgacgca

SEQ ID NO: 101657 - DNA, 60 bp, Artificial
  Synthetic oligonucleotide
agacatggtgtgaagacctgcatgtgcttggttgtgagtcctccggcccctgaatgcggc

SEQ ID NO: 101658 - DNA, 60 bp, Artificial
  Synthetic oligonucleotide
ttgaaaggggtctcctagaaagcttggccgtcgggccttataccccgacttgccgagttt

SEQ ID NO: 101659 - DNA, 60 bp, Artificial
  Synthetic oligonucleotide
ggcatttgattacaccaattatgatggtagtatacacccaatttggtttgaagctctaaa

SEQ ID NO: 101660 - DNA, 60 bp, Artificial
  Synthetic oligonucleotide
cttttgattacactaattatgatggtagtatacacccaatttggtttgatgcacttaaga

SEQ ID NO: 101661 - DNA, 60 bp, Artificial
  Synthetic oligonucleotide
cctattgagctagtcagtagtcctccggcccctgaatgcggctaatcctaactgcggagc

SEQ ID NO: 101662 - DNA, 59 bp, Artificial
  Synthetic oligonucleotide
taacgcgcaagtccgtggcggaaccgactactttgggtgtccgtgtttcctgttatttt

SEQ ID NO: 101663 - DNA, 60 bp, Artificial
  Synthetic oligonucleotide
tggctcataaaccaatgagcttatggtcgtaatgagcaattgcgggatgggaccgactac

SEQ ID NO: 101664 - DNA, 60 bp, Artificial
  Synthetic oligonucleotide
ccattgcccacaaaccagtgggtctatggttgtaatgagcaattgcgggatgggaccgac

SEQ ID NO: 101665 - DNA, 60 bp, Artificial
  Synthetic oligonucleotide
ccaaacatataaaagcatggtgcccacgcccaccacgagctgtgccttatcaacacactc

SEQ ID NO: 101666 - DNA, 66 bp, Artificial
  Synthetic oligonucleotide
gcttcatgattctattcttgtgtcttattctagtgatttaatcatttaccgaacaaacactgaagg

SEQ ID NO: 101667 - DNA, 60 bp, Artificial
  Synthetic oligonucleotide
tggagagggaccttgtgaaccaggagattgtggaggaaagctgttatgtaaacatggagt

SEQ ID NO: 101668 - DNA, 60 bp, Artificial
  Synthetic oligonucleotide
cctgagaactaacaattcagccactctcatccttccatacattaatgcagttccaatgga

SEQ ID NO: 101669 - DNA, 60 bp, Artificial
  Synthetic oligonucleotide
gatcctcaaaccatagttgctactcttaccctactaggttgttcaggttcaccatggaga

SEQ ID NO: 101670 - DNA, 60 bp, Artificial
  Synthetic oligonucleotide
ggttctattcttggcatacatgtaggtggtaatggtagagatggattttctgcaatgctc

SEQ ID NO: 101671 - DNA, 60 bp, Artificial
  Synthetic oligonucleotide
atacttgcccacccgtgatgatgattacctcggatgcaatcttgctttattggctaatca

SEQ ID NO: 101672 - DNA, 60 bp, Artificial
  Synthetic oligonucleotide
caagagctcctgagagaagagtcgtgacccaaggtccagaagaagagtttggccgttcac

SEQ ID NO: 101673 - DNA, 60 bp, Artificial
  Synthetic oligonucleotide
tttatgatgtctttcctggaacaaaagaacctgctgttttaagtagcaatgaccctagac

SEQ ID NO: 101674 - DNA, 60 bp, Artificial
  Synthetic oligonucleotide
tccagaaaagaggcaatgcttggtacacacctagtgtgggatgttggactccagtcaaca

SEQ ID NO: 101675 - DNA, 60 bp, Artificial
  Synthetic oligonucleotide
cgcaaagcctagtatcacctttgatgtactaagactggtcgtttcctgcaaccccagcag

SEQ ID NO: 101676 - DNA, 60 bp, Artificial
  Synthetic oligonucleotide
ctaaccttaaccctgcagccattgctcataatccaatgagttagtggtcgtaatgcgcaa

SEQ ID NO: 101677 - DNA, 60 bp, Artificial
  Synthetic oligonucleotide
catggaaaatcagcttacaagaaatggcacaagtcagaagaaagtttgaactattcacat

SEQ ID NO: 101678 - DNA, 60 bp, Artificial
  Synthetic oligonucleotide
gatgctgcagagactggacatactagttctgttcaacctgaagatatgatcgagacaagg

SEQ ID NO: 101679 - DNA, 60 bp, Artificial
  Synthetic oligonucleotide
gccgtacctggacatctgcctcattagggtggtggtggaaattacctgacgctcttaaga

SEQ ID NO: 101680 - DNA, 60 bp, Artificial
  Synthetic oligonucleotide
ccaactagcatcagcagtcaaaggaaatgtttcagtggggtataagcacactcatccagg

SEQ ID NO: 101681 - DNA, 60 bp, Artificial
  Synthetic oligonucleotide
cctggctcaagaaatttacagaagcatgcaatgctgctcgtgggctagagtggattggtc

SEQ ID NO: 101682 - DNA, 60 bp, Artificial
  Synthetic oligonucleotide
gcctaggaacaaagttgtctttacccaaggcttgccagtgatgcttacaccaggatctgg

SEQ ID NO: 101683 - DNA, 60 bp, Artificial
  Synthetic oligonucleotide
ctggtactggaaaatcgcttgcaacctctgtccttgctcgaatgttgactgttgagactg

SEQ ID NO: 101684 - DNA, 60 bp, Artificial
  Synthetic oligonucleotide
ggaggctatatttcaaggtatagatcttcacacaccacctccaccagccataactgatct

SEQ ID NO: 101685 - DNA, 60 bp, Artificial
  Synthetic oligonucleotide
gacaaatatggtctaactattacacctgcagacaaatccagtacttttcaggaattaacc

SEQ ID NO: 101686 - DNA, 60 bp, Artificial
  Synthetic oligonucleotide
gtgcctccaaacacaccaagaagtgcaaagatggtctgcatggtgtcagcttgcaaagac

SEQ ID NO: 101687 - DNA, 60 bp, Artificial
  Synthetic oligonucleotide
gtggccgtcatatttaacacctgacgacgctactgccattgacaaaccaactcaaccgga

SEQ ID NO: 101688 - DNA, 60 bp, Artificial
  Synthetic oligonucleotide
cgcagtgtgtccgctggtcgcgcattgtatataccagcctatgaagttcttgagcatgaa

SEQ ID NO: 101689 - DNA, 60 bp, Artificial
  Synthetic oligonucleotide
cctgttgatgttgcttcacacccattagcaaccacctatcttggggaaatgagtagttgc

SEQ ID NO: 101690 - DNA, 60 bp, Artificial
  Synthetic oligonucleotide
caggtatagtgactggatctgcagtaggatgtgacccagaagtcttttggtcaaccatac

SEQ ID NO: 101691 - DNA, 60 bp, Artificial
  Synthetic oligonucleotide
catgggcgcacaagtatctagacaaaatgttggtacacactcaactcaaaatgcagtgac

SEQ ID NO: 101692 - DNA, 60 bp, Artificial
  Synthetic oligonucleotide
caaagatgtgttagagaaaggaatcccaacactccaatcaccaacagttgaggcttgtgg

SEQ ID NO: 101693 - DNA, 60 bp, Artificial
  Synthetic oligonucleotide
gtgtgtttgggatagatggacttgaagctttagatttaaatactagtgcaggttttccct

SEQ ID NO: 101694 - DNA, 60 bp, Artificial
  Synthetic oligonucleotide
aaactccccactggcgacagtgttctagcctgcgtggctgcctgcacaccctctgggtgt

SEQ ID NO: 101695 - DNA, 60 bp, Artificial
  Synthetic oligonucleotide
aaattaagattaccactgctgtggggagtagtccgactccgcaccgatacgtcgcaccag

SEQ ID NO: 101696 - DNA, 60 bp, Artificial
  Synthetic oligonucleotide
aaattaagatctctgccaatgtggggagtagtccgactccgcaccgatacgtcgcaccag

SEQ ID NO: 101697 - DNA, 60 bp, Artificial
  Synthetic oligonucleotide
cgttgcaaccagcagcgcaacggtcaagcacttctgtttccccggcgcaacgcgtcgtta

SEQ ID NO: 101698 - DNA, 60 bp, Artificial
  Synthetic oligonucleotide
aatagaggcgttgtagccagcagcgcaacggtcaagcacttctgtttccccggcgccatg

SEQ ID NO: 101699 - DNA, 60 bp, Artificial
  Synthetic oligonucleotide
attcaaggcgctcgaaaggaagtggtacgattctttctaaattgccaacttgatgatccg

SEQ ID NO: 101700 - DNA, 60 bp, Artificial
  Synthetic oligonucleotide
ggcagtcagacaactggatgaagaaattcactgagatgtgcaatgccttcagaggacttg

SEQ ID NO: 101701 - DNA, 60 bp, Artificial
  Synthetic oligonucleotide
ggccctcgaaaggaagtggtacgattctttctaaattgccaacttgatgatccggtttaa

SEQ ID NO: 101702 - DNA, 60 bp, Artificial
  Synthetic oligonucleotide
tctaaattgccaacttgatgatccggtttaattagcttcaatttggcctgaatacaccca

SEQ ID NO: 101703 - DNA, 60 bp, Artificial
  Synthetic oligonucleotide
cttgatgatccggtttaattagcttcaatttggcctgaatacacccaccggatggggtgt

SEQ ID NO: 101704 - DNA, 56 bp, Artificial
  Synthetic oligonucleotide
atgatccggtttaattagcttcaatttggcctgaatacacccaccggatggggtgt

SEQ ID NO: 101705 - DNA, 60 bp, Artificial
  Synthetic oligonucleotide
accttttgactctagatttgttttgtgtagtacaaaccacagtatgttggcaccaccaac

SEQ ID NO: 101706 - DNA, 60 bp, Artificial
  Synthetic oligonucleotide
cgaccaataggtaacatttatccaaaatgttaaaggtcaagcacttctgtttccccggtc

SEQ ID NO: 101707 - DNA, 60 bp, Artificial
  Synthetic oligonucleotide
cattttagtaaccctacctcagtcgaattggattgggtcatactgttgtaggggtaaatt

SEQ ID NO: 101708 - DNA, 60 bp, Artificial
  Synthetic oligonucleotide
cccagatcattaaaggtcaagcacttctgtttccccggtcaatgaggatatgctttaccc

SEQ ID NO: 101709 - DNA, 60 bp, Artificial
  Synthetic oligonucleotide
aattaagattaccactactgaggggagtagtccgactccgctccggcaatgccgcaccag

SEQ ID NO: 101710 - DNA, 60 bp, Artificial
  Synthetic oligonucleotide
aatcaagattaccactactgaggggagtagtccgactccgctccagcaccgctgcaccag

SEQ ID NO: 101711 - DNA, 60 bp, Artificial
  Synthetic oligonucleotide
ctggggccagctacctctatcttggtgagttggttaaaaaacgtctagtgggccaaaccc

SEQ ID NO: 101712 - DNA, 60 bp, Artificial
  Synthetic oligonucleotide
ggtagtaatgcaaacactagttgtaaggcccacgaaggatgcccagaaggtacccgtagg

SEQ ID NO: 101713 - DNA, 60 bp, Artificial
  Synthetic oligonucleotide
ggtagtaatacaaacactagttgtaaggcccacgaaggatgcccagaaggtacccgtagg

SEQ ID NO: 101714 - DNA, 60 bp, Artificial
  Synthetic oligonucleotide
cgagctacagatcactttacctgcgttgggtgaacgccgtgtgcggtgacgcataatccc

SEQ ID NO: 101715 - DNA, 60 bp, Artificial
  Synthetic oligonucleotide
gcggaaccgactactttgggtgtccgtgtttccttttattctcatgtcggctgcttatgg

SEQ ID NO: 101716 - DNA, 60 bp, Artificial
  Synthetic oligonucleotide
cccaattaaggtaactagtcatgattggtatgagatacaagaaagtgagtactaccccaa

SEQ ID NO: 101717 - DNA, 60 bp, Artificial
  Synthetic oligonucleotide
acttaaggtcaagcacttctgtttccccggtcaacgttgatatgctctaacagggcaaaa

SEQ ID NO: 101718 - DNA, 60 bp, Artificial
  Synthetic oligonucleotide
tagttagtagtcctccggcccctgaatgcggctaatcctaactgcggagcacatgcccac

SEQ ID NO: 101719 - DNA, 60 bp, Artificial
  Synthetic oligonucleotide
gcgacagtgttctagcctgcgtggctgcctgcacaccctcacgggtgtgaagccattcat

SEQ ID NO: 101720 - DNA, 60 bp, Artificial
  Synthetic oligonucleotide
ctattgagctaattggtagtcctccggcccctgaatgcggctaatcccaactgcggagca

SEQ ID NO: 101721 - DNA, 60 bp, Artificial
  Synthetic oligonucleotide
gtgggtggcttgtcgtaatgcgcaagtctatggcggaaccgactactttgggtgtccgtg

SEQ ID NO: 101722 - DNA, 60 bp, Artificial
  Synthetic oligonucleotide
cagtgggcagtctgtcgtaacgggtaactctgcagcggaaccgactactttgggtgtccg

SEQ ID NO: 101723 - DNA, 57 bp, Artificial
  Synthetic oligonucleotide
catcccattacagattcacaactccagatatctacactctagcaggttatgtaacat

SEQ ID NO: 101724 - DNA, 60 bp, Artificial
  Synthetic oligonucleotide
agaaaagaagcaatgcttggaacacacttggtctgggatgtaggtttgcaatcaacagct

SEQ ID NO: 101725 - DNA, 60 bp, Artificial
  Synthetic oligonucleotide
tagtatcatcttggaaggcacagagttggtcgctccactattccccatagtagacctggc

SEQ ID NO: 101726 - DNA, 60 bp, Artificial
  Synthetic oligonucleotide
aggcacgaagccctgtgtttgacaaggtgtgaagagccccgtgtgctcattttgattcct

SEQ ID NO: 101727 - DNA, 60 bp, Artificial
  Synthetic oligonucleotide
catgggcgcacaagtttctagacaaaatgttggtacacattccacacaaaatacagttgc

SEQ ID NO: 101728 - DNA, 60 bp, Artificial
  Synthetic oligonucleotide
ggaaggtcaggctgcattgccattattgagacagaattgaatcatgaagaagggaaatac

SEQ ID NO: 101729 - DNA, 60 bp, Artificial
  Synthetic oligonucleotide
caatccccttcagttgaagcatgtggatactctgacagaatcatacaaataactcgtggt

SEQ ID NO: 101730 - DNA, 60 bp, Artificial
  Synthetic oligonucleotide
tgggagtccattagatggacgaagaacccaagaaacatgcaagaacatgttctctccttg

SEQ ID NO: 101731 - DNA, 60 bp, Artificial
  Synthetic oligonucleotide
gccagtagtggacatacatctaattcagctccagcacttgatgcagcagaaactggacac

SEQ ID NO: 101732 - DNA, 60 bp, Artificial
  Synthetic oligonucleotide
gaatggctagagacactaatctacacagccaaactggggctattacccaaaatccagtgg

SEQ ID NO: 101733 - DNA, 60 bp, Artificial
  Synthetic oligonucleotide
aagcacacaaggccaatagtgggtgattagccaaatcatcaaaggtcaagcacttctgtt

SEQ ID NO: 101734 - DNA, 60 bp, Artificial
  Synthetic oligonucleotide
cttgttgggtgtaggaccttgtaaaccaggtgattgtgggggcaagctcctttgtaaaca

SEQ ID NO: 101735 - DNA, 60 bp, Artificial
  Synthetic oligonucleotide
aggcacatactactgtaaacataaagacagatattaccctgtgagtgtaacaaaacacca

SEQ ID NO: 101736 - DNA, 60 bp, Artificial
  Synthetic oligonucleotide
ccggtaattttgtacgccagttttatattccctaccccgagtaacttagaagataagcac

SEQ ID NO: 101737 - DNA, 60 bp, Artificial
  Synthetic oligonucleotide
aatcaggattttgtggtggggttttgtataagataggtttagtcttaggaatacatgtag

SEQ ID NO: 101738 - DNA, 60 bp, Artificial
  Synthetic oligonucleotide
ctggcagcaagggcagccataccctagattcactatcccgttcatgagtatagcctcagc

SEQ ID NO: 101739 - DNA, 60 bp, Artificial
  Synthetic oligonucleotide
caggccaagaagtggaaatagatggaattaaaaccaaagttagtgatgcatatgacctgc

SEQ ID NO: 101740 - DNA, 60 bp, Artificial
  Synthetic oligonucleotide
tagggacataagaaaatacatcccagaaagtgaggatgactacccagaatgctgtttggc

SEQ ID NO: 101741 - DNA, 63 bp, Artificial
  Synthetic oligonucleotide
ccctgcagattgtaggcttgaacgggatcttaattatgcaaatttaataatatctatgatagc

SEQ ID NO: 101742 - DNA, 60 bp, Artificial
  Synthetic oligonucleotide
cagtgcagatccacatacaatagtagccacactagctttgttgggctgttcaggctcacc

SEQ ID NO: 101743 - DNA, 60 bp, Artificial
  Synthetic oligonucleotide
ggaactgcagtcaccaatgatatgggaactatatgtgtcagaattgttaccgaacaacaa

SEQ ID NO: 101744 - DNA, 60 bp, Artificial
  Synthetic oligonucleotide
atcagggtactttaatagtcgttgccataccagaacatcagttggcttacataggtgggg

SEQ ID NO: 101745 - DNA, 56 bp, Artificial
  Synthetic oligonucleotide
ctgttgtaggatatggagtttggccggaatatctgactgatgatgatgctagtgcc

SEQ ID NO: 101746 - DNA, 60 bp, Artificial
  Synthetic oligonucleotide
gagcgtaacagacaacctagtgatgaaaactggcttaattgtaatggaaccctattagga

SEQ ID NO: 101747 - DNA, 60 bp, Artificial
  Synthetic oligonucleotide
cccaggtgagtcagggagacggattggaggttttgatggtactgagcgtaacagacaacc

SEQ ID NO: 101748 - DNA, 60 bp, Artificial
  Synthetic oligonucleotide
ccagtattcattactccaggctctgcacaattccttaccactgatgatacacaatcacca

SEQ ID NO: 101749 - DNA, 50 bp, Artificial
  Synthetic oligonucleotide
ccagcagaagagatctttgcaatcccagtagacgtagcttctcaaccatt

SEQ ID NO: 101750 - DNA, 60 bp, Artificial
  Synthetic oligonucleotide
taaagatgcagcgtcatctggagcatcaagattggatttttcacaagatcccagcaaatt

SEQ ID NO: 101751 - DNA, 60 bp, Artificial
  Synthetic oligonucleotide
gcacatttacaaaacaacatactatgaagttgaaggtgggatgccttcaggttgtgctgg

SEQ ID NO: 101752 - DNA, 60 bp, Artificial
  Synthetic oligonucleotide
gagcagtcccatatcaacatatttataatccaaatttcaagactactcaacctgagacta

SEQ ID NO: 101753 - DNA, 60 bp, Artificial
  Synthetic oligonucleotide
gacaccctcaccctgatgctagactcatcaaacaaattcttgcccctttatgcactagag

SEQ ID NO: 101754 - DNA, 60 bp, Artificial
  Synthetic oligonucleotide
ccgtacatccaaaagaactgaaccagttggggttattttccatggtgaaccaggtacagg

SEQ ID NO: 101755 - DNA, 60 bp, Artificial
  Synthetic oligonucleotide
ctgacctaccagacaaaggaaaaccattttcatcagattatgtgcttgcgagtactaatc

SEQ ID NO: 101756 - DNA, 60 bp, Artificial
  Synthetic oligonucleotide
acagtgtgcactcagaccatgcaaggaagggaaaattggtaatgcaaaatgctgccctct

SEQ ID NO: 101757 - DNA, 60 bp, Artificial
  Synthetic oligonucleotide
ctggtttgggtatctatgacaatgtaatgataataccaacacatgctgatgcaggccaag

SEQ ID NO: 101758 - DNA, 60 bp, Artificial
  Synthetic oligonucleotide
gctgccctcttatctgtggaaaggctctgcagtttagagatagaagcaacggggagcatt

SEQ ID NO: 101759 - DNA, 60 bp, Artificial
  Synthetic oligonucleotide
cgtgaacaggattaggagtgttagcgctggtcgtgcactctatatcccaccatacgaagt

SEQ ID NO: 101760 - DNA, 60 bp, Artificial
  Synthetic oligonucleotide
cactcacgaaagcaagaacagaaaagagttaacaaactcattacaggcaattttccaggg

SEQ ID NO: 101761 - DNA, 61 bp, Artificial
  Synthetic oligonucleotide
ctagtcttggatacctataagcacattaatctggacaaacttaaaatacttgcatatggag

SEQ ID NO: 101762 - DNA, 60 bp, Artificial
  Synthetic oligonucleotide
ctggaggtgacaaccatgtagcttttatagatcttagggatttccagattgctgaggaac

SEQ ID NO: 101763 - DNA, 59 bp, Artificial
  Synthetic oligonucleotide
acccaggcattgttactggttcagctgtagggtgtgacccagagatattctggtcaaaa

SEQ ID NO: 101764 - DNA, 60 bp, Artificial
  Synthetic oligonucleotide
ggcaattaaaattactgataacatgttagttgctgctgctcactacacagctcaactgtc

SEQ ID NO: 101765 - DNA, 60 bp, Artificial
  Synthetic oligonucleotide
tattgagctagctggtagtcctccggcccctgaatgcggctaatcccaactgcggagcac

SEQ ID NO: 101766 - DNA, 60 bp, Artificial
  Synthetic oligonucleotide
acatccgcattccccttcctcacgtcctgtccggtgaagatggtggtgtctttggtgcgg

SEQ ID NO: 101767 - DNA, 60 bp, Artificial
  Synthetic oligonucleotide
atggccacaaccatggaacaagagacttgcgcgcaccctctcacttttgtggaatgccca

SEQ ID NO: 101768 - DNA, 60 bp, Artificial
  Synthetic oligonucleotide
ggaataaggccggtgtgcgtttgtctatatgttattttccaccatattgccgtcttttgg

SEQ ID NO: 101769 - DNA, 60 bp, Artificial
  Synthetic oligonucleotide
ccgtgcagacccttgtggcacaagctccagtagacgaggtcagtttccattccgtagtcc

SEQ ID NO: 101770 - DNA, 60 bp, Artificial
  Synthetic oligonucleotide
atggcgcgtgcgagaggagaacgttttcggtttgtaccggatcttcaatgcccactacgc

SEQ ID NO: 101771 - DNA, 60 bp, Artificial
  Synthetic oligonucleotide
gcagcgtttccccgaacatgcgaagcgcatttctgatctccggaatggaatggccgccta

SEQ ID NO: 101772 - DNA, 60 bp, Artificial
  Synthetic oligonucleotide
gcacccagacttgcctccttgtgagaggccgcaccttggcagtaaatagacacatggccg

SEQ ID NO: 101773 - DNA, 60 bp, Artificial
  Synthetic oligonucleotide
cgtgtggcagctcactcccctcacttacccaccaggatgcccgacctctgctaagatact

SEQ ID NO: 101774 - DNA, 60 bp, Artificial
  Synthetic oligonucleotide
acagccgtcaagacccaaccgctggccacctatcaagtgaccttgtcctgctcctgtctg

SEQ ID NO: 101775 - DNA, 60 bp, Artificial
  Synthetic oligonucleotide
ctttgactctgctctgcttaggaacattgacggccgccgagattacaagccagacaagtc

SEQ ID NO: 101776 - DNA, 60 bp, Artificial
  Synthetic oligonucleotide
ccctgggccccaatttgaccccgcctatgaccaactcaggccacagcgtctgacagaaat

SEQ ID NO: 101777 - DNA, 60 bp, Artificial
  Synthetic oligonucleotide
ggactgccttcggtgtcgccatgcaaggttttgagcgtgtctacgatgtggactactcca

SEQ ID NO: 101778 - DNA, 60 bp, Artificial
  Synthetic oligonucleotide
acgtaaaacagcactacgccccaccgttgcccgtcaagtcttccaaccagcatatgcccc

SEQ ID NO: 101779 - DNA, 60 bp, Artificial
  Synthetic oligonucleotide
cccacgtccgactgtctttttcccctggcccacttccggagacaagattgatatgacccc

SEQ ID NO: 101780 - DNA, 60 bp, Artificial
  Synthetic oligonucleotide
gatcggctctttgccccattccgtgaggtaggggttgtcgtgccatcattcgagagtgtg

SEQ ID NO: 101781 - DNA, 55 bp, Artificial
  Synthetic oligonucleotide
tgaagccaattagttgacaaggtgtgaagagccccgtgtgctcatcttgattcct

SEQ ID NO: 101782 - DNA, 60 bp, Artificial
  Synthetic oligonucleotide
ggtcgtaatgagcaattctgggacgggaccgactactttgggtgtccgtgtttctcttta

SEQ ID NO: 101783 - DNA, 60 bp, Artificial
  Synthetic oligonucleotide
agcaacattgtcaatttggctaattatgaggatgcaagagccaaagtgtctctagcgctg

SEQ ID NO: 101784 - DNA, 60 bp, Artificial
  Synthetic oligonucleotide
tgcacttggttgcgcggtgttctgtgccgtgtgggtattgggctctacattccaacttac

SEQ ID NO: 101785 - DNA, 60 bp, Artificial
  Synthetic oligonucleotide
gctggaagagctgggactgagccccactggtgctgataagatggaagtcaaggtcacgcc

SEQ ID NO: 101786 - DNA, 60 bp, Artificial
  Synthetic oligonucleotide
atgccatgcttgacgtggcaaaggccaagaaagttggtgcttattgtaaccttgactgct

SEQ ID NO: 101787 - DNA, 60 bp, Artificial
  Synthetic oligonucleotide
ctatgtccatggttctatgccatctggcacacctgctacatcggtgctcaattccataat

SEQ ID NO: 101788 - DNA, 60 bp, Artificial
  Synthetic oligonucleotide
gggaccgtacctggagtgcacggtatatatgcattcccgcatggcaagggcgtgctacct

SEQ ID NO: 101789 - DNA, 60 bp, Artificial
  Synthetic oligonucleotide
gggacacagttcaactcaccattcattatagcatcttctaatctttcccatccttgtccg

SEQ ID NO: 101790 - DNA, 60 bp, Artificial
  Synthetic oligonucleotide
tactatcaccaccttggctaggtttgtggatttggaactgcatggacttagccctttggt

SEQ ID NO: 101791 - DNA, 60 bp, Artificial
  Synthetic oligonucleotide
ccttcacttttacattccccggcacggtagggccaggcactcacatctggtcaaccacgg

SEQ ID NO: 101792 - DNA, 60 bp, Artificial
  Synthetic oligonucleotide
gaaattgtgcaaggagttgggaatctcgcatgtggaaggcatttacacgaaacccatcat

SEQ ID NO: 101793 - DNA, 60 bp, Artificial
  Synthetic oligonucleotide
atcaccaagcgtgtccattaatgtgtacaaaagtgctgtggatctggagttgtatgcacc

SEQ ID NO: 101794 - DNA, 60 bp, Artificial
  Synthetic oligonucleotide
gggtgaatccaacgactcataagtccctctggccttatgcaactggcaagcttgtgtgct

SEQ ID NO: 101795 - DNA, 60 bp, Artificial
  Synthetic oligonucleotide
atgattaaaaaccatttcagagatcaacaacatgatcagtctgcttactctgccgcgatc

SEQ ID NO: 101796 - DNA, 60 bp, Artificial
  Synthetic oligonucleotide
tgttactcaatgcgaccttgttgttggtcttgacttttccaactatgatgctagtctgtc

SEQ ID NO: 101797 - DNA, 60 bp, Artificial
  Synthetic oligonucleotide
gcaggaaaaactaatgtggatggcattgtgtactttgtgcctgagggtgttgcgatagag

SEQ ID NO: 101798 - DNA, 60 bp, Artificial
  Synthetic oligonucleotide
gtggatggcattgtgtactttgtgcctgagggtgttgcgatagagactgagagggaggag

SEQ ID NO: 101799 - DNA, 60 bp, Artificial
  Synthetic oligonucleotide
acattgagagggcggggaccatttactcgaccaacatgaagatggtccaagttctgtttt

SEQ ID NO: 101800 - DNA, 60 bp, Artificial
  Synthetic oligonucleotide
ttccagaagatcagtgacctcgcatccacaccagttagtgtccaagatatagtgctggcc

SEQ ID NO: 101801 - DNA, 60 bp, Artificial
  Synthetic oligonucleotide
gtgtgggagcagttctatcagtgtctgtcttgggtgtgtttgcgtatcacatgattaaaa

SEQ ID NO: 101802 - DNA, 60 bp, Artificial
  Synthetic oligonucleotide
gcctgaagtggagcaacatgttgttgaggacaaggaaccacagggacctttgcacgtgac

SEQ ID NO: 101803 - DNA, 60 bp, Artificial
  Synthetic oligonucleotide
gcagggcagaaggcatgccagggactttgtgcactttggaccatgagaggttcacccttg

SEQ ID NO: 101804 - DNA, 60 bp, Artificial
  Synthetic oligonucleotide
ggacctttgcacgtgacaccttttggcgctgttaaagccatggaggaccctcagttggcg

SEQ ID NO: 101805 - DNA, 60 bp, Artificial
  Synthetic oligonucleotide
gggctctacattccaacttacaaagagctggaggtgaggtatgataggcttgtcaaggat

SEQ ID NO: 101806 - DNA, 60 bp, Artificial
  Synthetic oligonucleotide
catggggcgtgcccattacttgtggggacataaattcaccaaaactgacatgcagtacac

SEQ ID NO: 101807 - DNA, 60 bp, Artificial
  Synthetic oligonucleotide
gttgggaatctcgcatgtggaaggcatttacacgaaacccatcatgtcggacttctggga

SEQ ID NO: 101808 - DNA, 60 bp, Artificial
  Synthetic oligonucleotide
gagggttctgggccaaatttgtggtttggacccaaggttggtggatagaataatggagcc

SEQ ID NO: 101809 - DNA, 60 bp, Artificial
  Synthetic oligonucleotide
cgatcagcgtgagtggaactcaacacagagtgaatggcagttattgggcaagattgacat

SEQ ID NO: 101810 - DNA, 60 bp, Artificial
  Synthetic oligonucleotide
cacggtatatatgcattcccgcatggcaagggcgtgccaccttgccccttgacgcatggt

SEQ ID NO: 101811 - DNA, 60 bp, Artificial
  Synthetic oligonucleotide
gcaggtgagttgcgtgctgttggtacgcatgttctgaataagttgggtagactagacaaa

SEQ ID NO: 101812 - DNA, 60 bp, Artificial
  Synthetic oligonucleotide
tcagagggtattgagtgcttgaagttagttagatcaatacagtcagtcattaggggcgaa

SEQ ID NO: 101813 - DNA, 60 bp, Artificial
  Synthetic oligonucleotide
gattaggatctctcgtagagggataggtgtgccattcaaatccagggagtactctggctc

SEQ ID NO: 101814 - DNA, 60 bp, Artificial
  Synthetic oligonucleotide
ccccataaaacgaggcgccacgtgccgaaaatccctttgcgtttcacagaaccatcctaa

SEQ ID NO: 101815 - DNA, 60 bp, Artificial
  Synthetic oligonucleotide
cctggttctagagtgacacaaggtgagaggttcttccttatcgatcagcgtgagtggaac

SEQ ID NO: 101816 - DNA, 60 bp, Artificial
  Synthetic oligonucleotide
aacccatcatgtcggacttctgggatggatatgctggtcagccagtagtgataatggatg

SEQ ID NO: 101817 - DNA, 60 bp, Artificial
  Synthetic oligonucleotide
gcgtgcccggccacgagagattaagggtagcaatttaaacatgagcaaactattttctac

SEQ ID NO: 101818 - DNA, 60 bp, Artificial
  Synthetic oligonucleotide
cttgactgtttggacttccagaagatcagtgacctcgcatccacaccagttagtgtccaa

SEQ ID NO: 101819 - DNA, 60 bp, Artificial
  Synthetic oligonucleotide
ccagttggtgtcctcctgccctttacggttaaatatggccaatttggagaagaaagggac

SEQ ID NO: 101820 - DNA, 60 bp, Artificial
  Synthetic oligonucleotide
ggttgcatattaaggtcaaggttagcccgaaagaagaattctctactcatgccatgcttg

SEQ ID NO: 101821 - DNA, 60 bp, Artificial
  Synthetic oligonucleotide
ctgggcaagaccagagccatagaggcttgccccgtttcgttcaccatcctatttcgcagg

SEQ ID NO: 101822 - DNA, 60 bp, Artificial
  Synthetic oligonucleotide
gggatgtgtggtggtgccttggtcacttctaacaacaaaatgcagaatgcgattgtaggt

SEQ ID NO: 101823 - DNA, 60 bp, Artificial
  Synthetic oligonucleotide
aaccacagggacctttgcacgtgacaccttttggcgctgttaaagctatggaggaccccc

SEQ ID NO: 101824 - DNA, 60 bp, Artificial
  Synthetic oligonucleotide
ggttcacccttgttactgagagcgaccttaagatggtggaggcagctacatatgtctgcg

SEQ ID NO: 101825 - DNA, 59 bp, Artificial
  Synthetic oligonucleotide
ggaggttgttaaatgtcccactaagttgttctatcaaggagaaattgatgttatgcaag

SEQ ID NO: 101826 - DNA, 52 bp, Artificial
  Synthetic oligonucleotide
tgatagaggagatgctcaagacacgagcacaatgtagtaggatatggaagac

SEQ ID NO: 101827 - DNA, 60 bp, Artificial
  Synthetic oligonucleotide
ggagcctattgttaattccgttcatcagttgggctccatgagatactatgtccatggttc

SEQ ID NO: 101828 - DNA, 60 bp, Artificial
  Synthetic oligonucleotide
caggaagacttggcccgggaagacatcaataaaaataatgaagtggacttgcaggattgt

SEQ ID NO: 101829 - DNA, 60 bp, Artificial
  Synthetic oligonucleotide
tctggataagtggtgctttgccctgtccccacgcatagataggacactcatatgtgagac

SEQ ID NO: 101830 - DNA, 58 bp, Artificial
  Synthetic oligonucleotide
ggggacattgtgagctgtagtggagagaaggcaaaacactttggtgtgtatgttggag

SEQ ID NO: 101831 - DNA, 60 bp, Artificial
  Synthetic oligonucleotide
cccctctgctcacgttgaactacaaaacatcggtaggtgccattaggtttaatactggac

SEQ ID NO: 101832 - DNA, 60 bp, Artificial
  Synthetic oligonucleotide
ttgtgcctgagggtgttgcgatagagactgagaggaaggaacagacccctctgctcacgt

SEQ ID NO: 101833 - DNA, 60 bp, Artificial
  Synthetic oligonucleotide
atgtggttggtcgctccactataaacccaatagtagacctggcagatgaggctagaagtc

SEQ ID NO: 101834 - DNA, 60 bp, Artificial
  Synthetic oligonucleotide
catgtggctggtcgctccactataaacccaatagtagacctggcagatgaggctaggagc

SEQ ID NO: 101835 - DNA, 60 bp, Artificial
  Synthetic oligonucleotide
attatgaaatgatggagttctatttcaatagaggtggaacttactattcaatttcagctg

SEQ ID NO: 101836 - DNA, 60 bp, Artificial
  Synthetic oligonucleotide
gatggagttttatttcaatagaggtggaacttactattcaatttcagctggcaatgttgg

SEQ ID NO: 101837 - DNA, 60 bp, Artificial
  Synthetic oligonucleotide
ccgaccaatagcggcgtgacagccagttacgcaacggtcaagcacttctgtttccccggt

SEQ ID NO: 101838 - DNA, 50 bp, Artificial
  Synthetic oligonucleotide
ggaaggcatgcagatctacaggaaagtctttagggtcttctacctttttt

SEQ ID NO: 101839 - DNA, 50 bp, Artificial
  Synthetic oligonucleotide
gaaaggcatgcagatctacaggaaagtctttagggtcttctacctttttt

SEQ ID NO: 101840 - DNA, 60 bp, Artificial
  Synthetic oligonucleotide
cacagcttgactggggaatgcatgcagatctacaggaaagtctttagggtcttctacctt

SEQ ID NO: 101841 - DNA, 60 bp, Artificial
  Synthetic oligonucleotide
tactaaacacagcttgactggggaatgcatgcagatctacaggaaagtctttagggtctt

SEQ ID NO: 101842 - DNA, 60 bp, Artificial
  Synthetic oligonucleotide
tactgaacacagcttgactgaggaatgcatgcagatctacaggaaagtctttagggtctt

SEQ ID NO: 101843 - DNA, 60 bp, Artificial
  Synthetic oligonucleotide
tactaaacacagcttgacttaggaatgcatgcagatctacaggaaagtctttagggtctt

SEQ ID NO: 101844 - DNA, 60 bp, Artificial
  Synthetic oligonucleotide
ctaaacacagcttgactgaggaatgcatgcagatctacaggaaagtctttagggtcttct

SEQ ID NO: 101845 - DNA, 60 bp, Artificial
  Synthetic oligonucleotide
ccaacctctgaactattccatgtaccaaaatcaggctgatgagcaacttttacaccttgt

SEQ ID NO: 101846 - DNA, 60 bp, Artificial
  Synthetic oligonucleotide
cttatttctaaatccagcctttctttccactgcacaatcctctcatgaatggcagctgca

SEQ ID NO: 101847 - DNA, 59 bp, Artificial
  Synthetic oligonucleotide
gtaaggcttctgtgaaagttagtaaaacctggagtggaactaaaaaaagagctcaaagg

SEQ ID NO: 101848 - DNA, 50 bp, Artificial
  Synthetic oligonucleotide
tgctgctactatagaagttgaaattgcatcccttgctactgtagagggga

SEQ ID NO: 101849 - DNA, 59 bp, Artificial
  Synthetic oligonucleotide
atttctaaatccagcctttctttccactgcacaatcctctcatgaatggcagctgcaaa

SEQ ID NO: 101850 - DNA, 60 bp, Artificial
  Synthetic oligonucleotide
atttctaaatccagcctttctttccactgcacaatcctctcatgaatggcagctgcaaag

SEQ ID NO: 101851 - DNA, 60 bp, Artificial
  Synthetic oligonucleotide
taagcaatcaaggttgcttatgccatgccctgaaggtaaatcccttgactctgcaccagt

SEQ ID NO: 101852 - DNA, 60 bp, Artificial
  Synthetic oligonucleotide
ggtttaccttaaagctttagatccctgtagggggtgtctccaagaaccttctcccagcaa

SEQ ID NO: 101853 - DNA, 60 bp, Artificial
  Synthetic oligonucleotide
ggaggaaaatcacaactaacctctgaactattccatgtaccaaaatcaggctgatgagca

SEQ ID NO: 101854 - DNA, 60 bp, Artificial
  Synthetic oligonucleotide
ggaggaaaatcacaaccaacctctgaactattccatgtaccaaaatcaggctgatgagca

SEQ ID NO: 101855 - DNA, 60 bp, Artificial
  Synthetic oligonucleotide
ggaaaatcacaaccaacctctgaactattccatgtaccaaaatcaggctgatgagcaact

SEQ ID NO: 101856 - DNA, 60 bp, Artificial
  Synthetic oligonucleotide
agataggaacaaagcatatcctgttgaatgttgggttcctgatcccaccagaaatgaaaa

SEQ ID NO: 101857 - DNA, 60 bp, Artificial
  Synthetic oligonucleotide
agataagaacaaagcatatcctgttgaatgttgggttcctgatcccaccagaaatgaaaa

SEQ ID NO: 101858 - DNA, 60 bp, Artificial
  Synthetic oligonucleotide
aggcgtacctagataagaacaaagcatatcctgttgaatgttgggttcctgatcccacca

SEQ ID NO: 101859 - DNA, 60 bp, Artificial
  Synthetic oligonucleotide
ctagataagaacaaagcatatcctgttgaatgttgggttcctgatcccaccagaaatgaa

SEQ ID NO: 101860 - DNA, 60 bp, Artificial
  Synthetic oligonucleotide
tgaacacagagcacaaggcgtacctagataagaacaaagcatatcctgttgaatgttggg

SEQ ID NO: 101861 - DNA, 60 bp, Artificial
  Synthetic oligonucleotide
cacaaggcgtacctagataagaacaaagcatatcctgttgaatgttgggttcctgatccc

SEQ ID NO: 101862 - DNA, 60 bp, Artificial
  Synthetic oligonucleotide
tctttgctgactgggatcataaagtttcaacagttgggctttttcagcagccagctatgg

SEQ ID NO: 101863 - DNA, 60 bp, Artificial
  Synthetic oligonucleotide
gctgactgggatcataaagtttcaacagttgggctttttcagcagccagctatggcttta

SEQ ID NO: 101864 - DNA, 60 bp, Artificial
  Synthetic oligonucleotide
ggatgagaacaaagcatatcctgttgaatgttgggttcctgatcccaccagaaatgaaaa

SEQ ID NO: 101865 - DNA, 60 bp, Artificial
  Synthetic oligonucleotide
tgataagaacaaagcatatcctgttgaatgttgggttcctgatcccaccagaaatgaaaa

SEQ ID NO: 101866 - DNA, 60 bp, Artificial
  Synthetic oligonucleotide
tgctgctactatagaagttgaaattgcatcccttgctactgtagagggcattacaagtac

SEQ ID NO: 101867 - DNA, 60 bp, Artificial
  Synthetic oligonucleotide
agttgggatatagattttttgctgactgggatcataaagtttcaacagttgggctttttc

SEQ ID NO: 101868 - DNA, 60 bp, Artificial
  Synthetic oligonucleotide
tgctgctactatagaagttgaaattgcatcccttgctactgtagaggggattacaagtac

SEQ ID NO: 101869 - DNA, 60 bp, Artificial
  Synthetic oligonucleotide
tgctgctactatagaagttgaaattgcatcccttgccactgtagaggggattacaagtac

SEQ ID NO: 101870 - DNA, 60 bp, Artificial
  Synthetic oligonucleotide
ttttggctgactgggatcataaagtttcaacagttgggctttttcagcagccagctatgg

SEQ ID NO: 101871 - DNA, 60 bp, Artificial
  Synthetic oligonucleotide
tttttggtgactgggatcataaagtttcaacagttgggctttttcagcagccagctatgg

SEQ ID NO: 101872 - DNA, 60 bp, Artificial
  Synthetic oligonucleotide
ggtgggatatagattttttgctgactgggatcataaagtttcaacagttgggctttttca

SEQ ID NO: 101873 - DNA, 60 bp, Artificial
  Synthetic oligonucleotide
gttgggatatagattttttgctgactgggatcataaagtttcaacagttgggctttttca

SEQ ID NO: 101874 - DNA, 60 bp, Artificial
  Synthetic oligonucleotide
tttatgctgactgggatcataaagtttcaacagttgggctttttcagcagccagctatgg

SEQ ID NO: 101875 - DNA, 60 bp, Artificial
  Synthetic oligonucleotide
tttttgctgactgggatcataaagtttcaacagttgggctttttcagcagccagctatgg

SEQ ID NO: 101876 - DNA, 60 bp, Artificial
  Synthetic oligonucleotide
gtatacatacttatttctaaatccagcctttctttccactgcacaatcctctcatgaatg

SEQ ID NO: 101877 - DNA, 60 bp, Artificial
  Synthetic oligonucleotide
gggttcctgatcccaccagaaatgaaaacacaagatattttgggacactaacaggaggag

SEQ ID NO: 101878 - DNA, 60 bp, Artificial
  Synthetic oligonucleotide
catgcttatttctaaatccagcctttctttccactgcacaatcctctcatgaatggcagc

SEQ ID NO: 101879 - DNA, 60 bp, Artificial
  Synthetic oligonucleotide
gtatacatgcttatttctaaatccagcctttctttccactgcacaatcctctcatgaatg

SEQ ID NO: 101880 - DNA, 60 bp, Artificial
  Synthetic oligonucleotide
gaacaaggcatatcctgttgaatgttgggttcctgatcccaccagaaatgaaaacacaag

SEQ ID NO: 101881 - DNA, 60 bp, Artificial
  Synthetic oligonucleotide
gaacaaagcatatcctgttgaatgttgggttcctgatcccaccagaaatgaaaacacaag

SEQ ID NO: 101882 - DNA, 60 bp, Artificial
  Synthetic oligonucleotide
gaatgttgggttcctgatcccaccagaaatgaaaacacaagatattttgggacactaaca

SEQ ID NO: 101883 - DNA, 60 bp, Artificial
  Synthetic oligonucleotide
tgttgaatgttgggttcctgatcccaccagaaatgaaaacacaagatattttgggacact

SEQ ID NO: 101884 - DNA, 60 bp, Artificial
  Synthetic oligonucleotide
gcttatctctaaatccagcctttctttccactgcacaatcctctcatgaatggcagctgc

SEQ ID NO: 101885 - DNA, 60 bp, Artificial
  Synthetic oligonucleotide
gcttatttctaaatccagcctttctttccactgcacaatcctctcatgaatggcagctgc

SEQ ID NO: 101886 - DNA, 60 bp, Artificial
  Synthetic oligonucleotide
ggttctgcgccagctgtcacgacaagcttcagtgaaagttggtaaaacctggactggaac

SEQ ID NO: 101887 - DNA, 53 bp, Artificial
  Synthetic oligonucleotide
tgggtgctgctctagcacttttgggggacctagttgccagtgtatctgaggct

SEQ ID NO: 101888 - DNA, 50 bp, Artificial
  Synthetic oligonucleotide
gtgctgctctagcacttttgggggacctagttgccactgtatctgaggct

SEQ ID NO: 101889 - DNA, 57 bp, Artificial
  Synthetic oligonucleotide
ttcgtgcttcatcctcagtaagcacagcaagcaaatgcagttagtagacatactttt

SEQ ID NO: 101890 - DNA, 60 bp, Artificial
  Synthetic oligonucleotide
gaattccactacccaatctaaatgaggatctaacttgtggaaatatactgatgtgggagg

SEQ ID NO: 101891 - DNA, 60 bp, Artificial
  Synthetic oligonucleotide
gtagagtatcaactcttttctttgctaatactgtatccactgcctgctgacaaatgctct

SEQ ID NO: 101892 - DNA, 58 bp, Artificial
  Synthetic oligonucleotide
tggtagcaaacaatgaagccaagcaacccctgccatatagtgctctagcacagcagac

SEQ ID NO: 101893 - DNA, 60 bp, Artificial
  Synthetic oligonucleotide
cacctgtttagtttcctctggttcttctgggttaaagtcatgctctttaaggcctccctg

SEQ ID NO: 101894 - DNA, 60 bp, Artificial
  Synthetic oligonucleotide
ctgctttgtctcctataaggccttcaatggtgaggcaggtggctgaaagggaaggtactc

SEQ ID NO: 101895 - DNA, 60 bp, Artificial
  Synthetic oligonucleotide
gtacctagatcccaggcactggggtcctaccttgttttctgctatttcacaggccttttg

SEQ ID NO: 101896 - DNA, 58 bp, Artificial
  Synthetic oligonucleotide
tatagctgctataggcctcactcctcaaacatatgctgtaataactggtgcaccgggg

SEQ ID NO: 101897 - DNA, 60 bp, Artificial
  Synthetic oligonucleotide
gctgtcacgacaggcctctgtgaaagttggtaaaacctggactggaactaagagaagagc

SEQ ID NO: 101898 - DNA, 60 bp, Artificial
  Synthetic oligonucleotide
gccacaactgtgctgctggatgagcaaggggttggtcccctgtgtaaagctgacagcttg

SEQ ID NO: 101899 - DNA, 60 bp, Artificial
  Synthetic oligonucleotide
ggagaacaaccagggtgcaggggcagccaatgtatggaatgaatgctcaagtggaggagg

SEQ ID NO: 101900 - DNA, 60 bp, Artificial
  Synthetic oligonucleotide
aggcttacttggacaaaactggtgcttatcctgtggagtgttgggttcccgaccccagta

SEQ ID NO: 101901 - DNA, 60 bp, Artificial
  Synthetic oligonucleotide
gccaaaggaccccgtgcgagttccaaaacttcttataagaggaggcgtagaagtactaga

SEQ ID NO: 101902 - DNA, 60 bp, Artificial
  Synthetic oligonucleotide
gcctaaaagatccataagctccatagattcttctctgttaagcactttgtccattttctc

SEQ ID NO: 101903 - DNA, 60 bp, Artificial
  Synthetic oligonucleotide
ctttacaaatgtggtatgggttatcatggtcatatgggtctggggtttgagaggctggtg

SEQ ID NO: 101904 - DNA, 60 bp, Artificial
  Synthetic oligonucleotide
tcttccttgttacagtactgctagaattccactcccaaatctaaatgaggatctaacttg

SEQ ID NO: 101905 - DNA, 60 bp, Artificial
  Synthetic oligonucleotide
ggggagcctttggagctgcaaggtgtgttgcataactataggacaacctatcctgagggc

SEQ ID NO: 101906 - DNA, 60 bp, Artificial
  Synthetic oligonucleotide
tacacagcaaagcatgcaagagttctattgctaaatacagcttgactaaggaatgcatgc

SEQ ID NO: 101907 - DNA, 60 bp, Artificial
  Synthetic oligonucleotide
cttcatggcaaaataggtcttcatcccacttttcattgaaggagctccaccaggcttccc

SEQ ID NO: 101908 - DNA, 60 bp, Artificial
  Synthetic oligonucleotide
ctagcaccaggaggtgccaatcaaagaattgctcctcaatggatgttgcctttgcttcta

SEQ ID NO: 101909 - DNA, 60 bp, Artificial
  Synthetic oligonucleotide
caggggccaatccttgcagtacaaggtatctggacaaggaggaaaatcagaaccaacctc

SEQ ID NO: 101910 - DNA, 60 bp, Artificial
  Synthetic oligonucleotide
cattctcttcattttatcttcgtctccccctttgtcagggtgaaactccttacactttct

SEQ ID NO: 101911 - DNA, 60 bp, Artificial
  Synthetic oligonucleotide
tgcttaacaaatctggcttgtaaggttttaggtagagggtattcattcatggttaccaaa

SEQ ID NO: 101912 - DNA, 60 bp, Artificial
  Synthetic oligonucleotide
cagtttctgactcctcttctctggcccagtcaagaatacatttccccatgcaaatgttat

SEQ ID NO: 101913 - DNA, 60 bp, Artificial
  Synthetic oligonucleotide
gcagagcttcctcatttaggtctaagccaaaccactgtctgaagcagtcaaagcagtagc

SEQ ID NO: 101914 - DNA, 60 bp, Artificial
  Synthetic oligonucleotide
gtggaatgtagccagacatgacctcagttagggaagtatgtctgggcaggctgccagtgg

SEQ ID NO: 101915 - DNA, 60 bp, Artificial
  Synthetic oligonucleotide
taaccgcaagtaaacacaagaggaagtggaaagcggccagaactccggccagggaacatg

SEQ ID NO: 101916 - DNA, 60 bp, Artificial
  Synthetic oligonucleotide
tgttagtctctccatgggcaaattaacatttaaggcttttcctccacacaaatctaacag

SEQ ID NO: 101917 - DNA, 60 bp, Artificial
  Synthetic oligonucleotide
ggcatggaaggcctacctggagaccccaccatggaacggcacctcgatcaacaaggacaa

SEQ ID NO: 101918 - DNA, 60 bp, Artificial
  Synthetic oligonucleotide
gcacctcgatcaacaaggacaatcccacaccaacccagcccaggactaagagaagacacc

SEQ ID NO: 101919 - DNA, 60 bp, Artificial
  Synthetic oligonucleotide
atgcattcctatgggttgagagcctttggtgggtatggtggagggtataccatagaaggg

SEQ ID NO: 101920 - DNA, 60 bp, Artificial
  Synthetic oligonucleotide
ctctgcaattagtcttcatggtcatatggtaagccggcgtgcaaattatacagatatttc

SEQ ID NO: 101921 - DNA, 60 bp, Artificial
  Synthetic oligonucleotide
gtccagtctgacctgcttgctcaggcgttcttctgattcccgattgattaggagtagtgc

SEQ ID NO: 101922 - DNA, 60 bp, Artificial
  Synthetic oligonucleotide
ggagtagtgcaaggagtgtttcagcctttgtaagaatgcgggcctctaccacgtcggggt

SEQ ID NO: 101923 - DNA, 53 bp, Artificial
  Synthetic oligonucleotide
gtccccgaccccagcaagtccccaagctgatagtaaaaggaggaatagaagta

SEQ ID NO: 101924 - DNA, 60 bp, Artificial
  Synthetic oligonucleotide
ccttcccctgctaaacgaggatataacatgtcccaccctgcttatgtgggaggccgttag

SEQ ID NO: 101925 - DNA, 60 bp, Artificial
  Synthetic oligonucleotide
gatgccccccacctgacagagataccctgctatagctgtgctagaatatcccttcccctg

SEQ ID NO: 101926 - DNA, 60 bp, Artificial
  Synthetic oligonucleotide
taatcaggttggccgagccttgtggaatcagatagaccagagagtacgtgatggccttat

SEQ ID NO: 101927 - DNA, 60 bp, Artificial
  Synthetic oligonucleotide
gccggtgtttacgcctttggaaaagacccatcgttagcccacaacaccatggcacttgcc

SEQ ID NO: 101928 - DNA, 60 bp, Artificial
  Synthetic oligonucleotide
gggtctcagaggaaagccttgcagcagcatcctctattccctaccaggccctgcagtctc

SEQ ID NO: 101929 - DNA, 60 bp, Artificial
  Synthetic oligonucleotide
agccgttatctccctaataactggggcatttgagattggtaccctgacgggccttgcagc

SEQ ID NO: 101930 - DNA, 60 bp, Artificial
  Synthetic oligonucleotide
tgaggggccttcaggcccacctacccaggctatcccacctgttactagagacggcagagc

SEQ ID NO: 101931 - DNA, 60 bp, Artificial
  Synthetic oligonucleotide
cagctgacgcccttgttagtgcagaatcccttgcccttctagaaacagaaatcgggactc

SEQ ID NO: 101932 - DNA, 60 bp, Artificial
  Synthetic oligonucleotide
ggatgaatcccagacagcctggatgtgtccacgggttgtgaagttagtcattagctgtgg

SEQ ID NO: 101933 - DNA, 60 bp, Artificial
  Synthetic oligonucleotide
gcccacggtggacacgcgtgtaggccgctccatcagaatcacgaacaaggcataggatga

SEQ ID NO: 101934 - DNA, 60 bp, Artificial
  Synthetic oligonucleotide
atctatagctgggtgctcctgcatagcccttagcagtgcccccaccccatttttctttat

SEQ ID NO: 101935 - DNA, 60 bp, Artificial
  Synthetic oligonucleotide
gctagcagtaacaaagcatcggtacagtccagtgaaatggcatatccattaagcaaggcc

SEQ ID NO: 101936 - DNA, 60 bp, Artificial
  Synthetic oligonucleotide
caggtgggaggtacgttgccgtttagctgtctcccgctcttttgcacaatctgggcaggc

SEQ ID NO: 101937 - DNA, 60 bp, Artificial
  Synthetic oligonucleotide
ttttagcctttccgtgaacctatcatttctggtcatggtggcctgtttaaagcgtttttc

SEQ ID NO: 101938 - DNA, 60 bp, Artificial
  Synthetic oligonucleotide
tgagctgcttacccctaacctcttgcagccaatggacagcccgatgtcgggacctggtga

SEQ ID NO: 101939 - DNA, 60 bp, Artificial
  Synthetic oligonucleotide
atactgcagaacagcagacccccaaaagcagaagtagaccgtgggacaacaggaaacgta

SEQ ID NO: 101940 - DNA, 60 bp, Artificial
  Synthetic oligonucleotide
taggggagatgctgacatagcgctattccatatatgggcatgtggtatttcgagtgctta

SEQ ID NO: 101941 - DNA, 60 bp, Artificial
  Synthetic oligonucleotide
caggtacagagccctctaaatgatccctgaggttatcgagattcatcatccctaatcccg

SEQ ID NO: 101942 - DNA, 57 bp, Artificial
  Synthetic oligonucleotide
tccttgcaaggactgtctggggtatgtaatagtcattcatggtgatgaggcctgggg

SEQ ID NO: 101943 - DNA, 60 bp, Artificial
  Synthetic oligonucleotide
ggagggttcctgaccatggtctcaagtatatcagctatgtctgtaacccggggtaccaac

SEQ ID NO: 101944 - DNA, 60 bp, Artificial
  Synthetic oligonucleotide
tccctaccctgtaacaggccttttgacctccttattcaatggcctgatgccacgcatgca

SEQ ID NO: 101945 - DNA, 60 bp, Artificial
  Synthetic oligonucleotide
caatctctcaggagtgccattcacatttagggatgcccctgtgcacaggtttagtatggc

SEQ ID NO: 101946 - DNA, 60 bp, Artificial
  Synthetic oligonucleotide
gtccagatccctcaagaaatgagaattccaggtattttgggagctacacaggtggagtgg

SEQ ID NO: 101947 - DNA, 60 bp, Artificial
  Synthetic oligonucleotide
agatgaaaatggggtggggcccttatgcaagggtgatggcctataccttagtagtgcaga

SEQ ID NO: 101948 - DNA, 60 bp, Artificial
  Synthetic oligonucleotide
tgcagaaccattccacccaatacccctcccctctagtaggcccaaagaagcctgatggca

SEQ ID NO: 101949 - DNA, 60 bp, Artificial
  Synthetic oligonucleotide
cccaccgggactcctgcctgacacccctagcacgggaagcagcagaggccctccagcagg

SEQ ID NO: 101950 - DNA, 60 bp, Artificial
  Synthetic oligonucleotide
tactacctcttctcctaggcctatacggtgacctcaccccggagtggagatcccagctta

SEQ ID NO: 101951 - DNA, 60 bp, Artificial
  Synthetic oligonucleotide
tcacagagcagtcctcctgggaccatgggcgggggcctaccacctctacaacggagccta

SEQ ID NO: 101952 - DNA, 60 bp, Artificial
  Synthetic oligonucleotide
ggagacctatagaaacctgagagaatattatgctcagctacctgttgatgcaggccggcc

SEQ ID NO: 101953 - DNA, 60 bp, Artificial
  Synthetic oligonucleotide
agggagcccatggtcagccatctataaacccgatcctctttacagggcgcgcgctcgatc

SEQ ID NO: 101954 - DNA, 60 bp, Artificial
  Synthetic oligonucleotide
cagaggttgaccctccagagccaggctggcgccagaggggaaggccgtacccccactgga

SEQ ID NO: 101955 - DNA, 54 bp, Artificial
  Synthetic oligonucleotide
ccccgggactgctgtccctgtggctaccaatactgcacccagccctgcgcctcc

SEQ ID NO: 101956 - DNA, 60 bp, Artificial
  Synthetic oligonucleotide
gcgggtgctgaggtagccattaggcaaagtagggctctctatgacgtgctagcccgtgct

SEQ ID NO: 101957 - DNA, 58 bp, Artificial
  Synthetic oligonucleotide
cggagcaggtgcacctctcggttcgtttccatttgccggacaacctgctctcacacct

SEQ ID NO: 101958 - DNA, 60 bp, Artificial
  Synthetic oligonucleotide
gctgtggtctgaggttttgcagcttattgcaggtagtaattatcaggtgagcatcaggac

SEQ ID NO: 101959 - DNA, 60 bp, Artificial
  Synthetic oligonucleotide
gagcatcaggacagctttgcacggactttgcagttagcaggcacgcttctatggatgcag

SEQ ID NO: 101960 - DNA, 60 bp, Artificial
  Synthetic oligonucleotide
gaaggatgcctgtgagctctccgcctgcaattagatatagtccatattgaagacattgtc

SEQ ID NO: 101961 - DNA, 60 bp, Artificial
  Synthetic oligonucleotide
aaacccgccatggaaccgcctgaaaccgccgcttcagctccaggtattcgggtgttagac

SEQ ID NO: 101962 - DNA, 60 bp, Artificial
  Synthetic oligonucleotide
tagcatgccagctgtttacctcgggttcaaaggtgccgtgcccgctgtcctttccagtgc

SEQ ID NO: 101963 - DNA, 60 bp, Artificial
  Synthetic oligonucleotide
ttccagtgcctggttcaggtgtggaggtccgctggctcggtccagggctatctccatcat

SEQ ID NO: 101964 - DNA, 60 bp, Artificial
  Synthetic oligonucleotide
ctccatcatcggagtccgagtccagggtctcatcacagaaaaggctctgggaatgccgga

SEQ ID NO: 101965 - DNA, 60 bp, Artificial
  Synthetic oligonucleotide
ggaatgccggaattcgtccatgagcctgtttagctctttcatgcgttccgggtcccctcc

SEQ ID NO: 101966 - DNA, 60 bp, Artificial
  Synthetic oligonucleotide
gccgagcggacgtcggcttcagtagccgatggtggaaggccgaggagatcaataagtttc

SEQ ID NO: 101967 - DNA, 60 bp, Artificial
  Synthetic oligonucleotide
ttactaaatacagcttgactaagaaactggtgtagatcagaaggaaagtctttagggtct

SEQ ID NO: 101968 - DNA, 54 bp, Artificial
  Synthetic oligonucleotide
ttttagtgattgggatcacaaagtttccactgtaggcctctatcagcaatcagg

SEQ ID NO: 101969 - DNA, 60 bp, Artificial
  Synthetic oligonucleotide
gaagttctagaagttaaaactggggtagatgctataacagaggtagaatgcttcctaaac

SEQ ID NO: 101970 - DNA, 59 bp, Artificial
  Synthetic oligonucleotide
ctagttaaggcactgtatagtaagtattccttattaacacccttacaaattaaaaaact

SEQ ID NO: 101971 - DNA, 60 bp, Artificial
  Synthetic oligonucleotide
aaggcactatatagtaagtattccttattaacacccttacaaattaaaaaactaaaggta

SEQ ID NO: 101972 - DNA, 51 bp, Artificial
  Synthetic oligonucleotide
ggcactgtatagtaagtattccttattaacacccttacaaattaaaaaact

SEQ ID NO: 101973 - DNA, 60 bp, Artificial
  Synthetic oligonucleotide
tagtagtatacacagcaaagcaggcaagggttctattactaaatacagcttgactaagaa

SEQ ID NO: 101974 - DNA, 60 bp, Artificial
  Synthetic oligonucleotide
caggcaagggttctattactaaatacagcttgactaagaaactggtgtagatcagaagga

SEQ ID NO: 101975 - DNA, 60 bp, Artificial
  Synthetic oligonucleotide
attgctgggtttgctgctttaattcaaactgttactggtgttagttccttggctcaagta

SEQ ID NO: 101976 - DNA, 60 bp, Artificial
  Synthetic oligonucleotide
attgctgggtttgctgctttaattcaaactgttactggtattagttctttggctcaagta

SEQ ID NO: 101977 - DNA, 60 bp, Artificial
  Synthetic oligonucleotide
attgctgggtttgctgctttaattcaaactgttactggtattagttccttggctcaagta

SEQ ID NO: 101978 - DNA, 60 bp, Artificial
  Synthetic oligonucleotide
attgctgggtttgctgctttaattcaaactgttagtggtattagttccttggctcaagta

SEQ ID NO: 101979 - DNA, 60 bp, Artificial
  Synthetic oligonucleotide
cacctcaaacatatgctgtaattgctggtgctccaggggctattgctgggtttgctgctt

SEQ ID NO: 101980 - DNA, 60 bp, Artificial
  Synthetic oligonucleotide
tcctggggctattgctgggtttgctgctttaattcaaactgttactggtgttagttcctt

SEQ ID NO: 101981 - DNA, 60 bp, Artificial
  Synthetic oligonucleotide
ctcctcaaacatatgctgtaattgctggtgctccaggggctattgctgggtttgctgctt

SEQ ID NO: 101982 - DNA, 60 bp, Artificial
  Synthetic oligonucleotide
ctcctcaaacatatgctgtaattgctggtgctcctggggctattgctgggtttgctgctt

SEQ ID NO: 101983 - DNA, 60 bp, Artificial
  Synthetic oligonucleotide
aaatcaggctgatgagctacctttacatcctgctccatttttttatataaagtattcatt

SEQ ID NO: 101984 - DNA, 60 bp, Artificial
  Synthetic oligonucleotide
aatcaggctgatgagctacctttacatcctgctccatttttttatataaagtattcattc

SEQ ID NO: 101985 - DNA, 60 bp, Artificial
  Synthetic oligonucleotide
ggaaaatcagcacaaacctctgagctactccaggttccaaaatcaggctgatgagctacc

SEQ ID NO: 101986 - DNA, 60 bp, Artificial
  Synthetic oligonucleotide
ttccaaaatcaggctgatgagctacctttacatcctgctccatttttttatataaagtat

SEQ ID NO: 101987 - DNA, 56 bp, Artificial
  Synthetic oligonucleotide
ttatataaagtattcattctcttcattttatcctcgtcgccccctttgtcagggtg

SEQ ID NO: 101988 - DNA, 60 bp, Artificial
  Synthetic oligonucleotide
tataaagtattcattctcttcattttatcctcgtcgccccctttgtcagggtgaaattcc

SEQ ID NO: 101989 - DNA, 60 bp, Artificial
  Synthetic oligonucleotide
ctggtgagctacctttacatcctgctccatttttttatataaagtattcattctcttcat

SEQ ID NO: 101990 - DNA, 60 bp, Artificial
  Synthetic oligonucleotide
tttttatataaagtattcattctcttcattttatcctcgtcgccccctttgtcagggtga

SEQ ID NO: 101991 - DNA, 60 bp, Artificial
  Synthetic oligonucleotide
gggagtgtctccaattatttggacccaccattgcagagtttcttcagttaggtctaagcc

SEQ ID NO: 101992 - DNA, 60 bp, Artificial
  Synthetic oligonucleotide
taggcctaacacctcaaacatatgctgtaattgctggtgctccaggggctattgctgggt

SEQ ID NO: 101993 - DNA, 60 bp, Artificial
  Synthetic oligonucleotide
attgctgggtttgctgctttaattcaaactgttactggtgttagttctttggctcaagta

SEQ ID NO: 101994 - DNA, 60 bp, Artificial
  Synthetic oligonucleotide
gctgggtttgctgctttaattcaaactgttactggtattagttctttggctcaagtaggg

SEQ ID NO: 101995 - DNA, 60 bp, Artificial
  Synthetic oligonucleotide
gctcaagtagggtataagttctttgatgattgggatcacaaagtttccactgtaggcctc

SEQ ID NO: 101996 - DNA, 60 bp, Artificial
  Synthetic oligonucleotide
ggctcaagtagggtataggttttttagtgattgggatcacaaagtttccactgtaggcct

SEQ ID NO: 101997 - DNA, 60 bp, Artificial
  Synthetic oligonucleotide
ggctcaagtagggtacaggttttttagtgattgggatcacaaagtttccactgtaggcct

SEQ ID NO: 101998 - DNA, 60 bp, Artificial
  Synthetic oligonucleotide
ggctcaagtagggtataggttctttagtgattgggatcacaaagtttccactgtaggcct

SEQ ID NO: 101999 - DNA, 60 bp, Artificial
  Synthetic oligonucleotide
gctgggtttgctgctttaattcaaactgttagtggtattagttccttagctcaagtaggg

SEQ ID NO: 102000 - DNA, 60 bp, Artificial
  Synthetic oligonucleotide
gctgggtttgctgctttaattcaaactgttactggtgttagttccttggctcaagtaggg

SEQ ID NO: 102001 - DNA, 60 bp, Artificial
  Synthetic oligonucleotide
gctgggtttgctgctttaattcaaactgttactggtattagttccttggctcaagtaggg

SEQ ID NO: 102002 - DNA, 60 bp, Artificial
  Synthetic oligonucleotide
gctgggtttgctgctttaattcaaactgttagtggtattagttccttggctcaagtaggg

SEQ ID NO: 102003 - DNA, 60 bp, Artificial
  Synthetic oligonucleotide
gctgggtttgctgctttaattcaaactgttactggtgttagttctttggctcaagtaggg

SEQ ID NO: 102004 - DNA, 60 bp, Artificial
  Synthetic oligonucleotide
ggcaaatcagcacaaacctctgagctactccaggttccaaaatcaggctgatgagctacc

SEQ ID NO: 102005 - DNA, 60 bp, Artificial
  Synthetic oligonucleotide
gggcaaagaggaaaatcagcacaaacctctgagctactccaggttccaaaatcaggctgg

SEQ ID NO: 102006 - DNA, 60 bp, Artificial
  Synthetic oligonucleotide
taggcctaactcctcaaacatatgctgtaattgctggtgctcctggggctattgctgggt

SEQ ID NO: 102007 - DNA, 60 bp, Artificial
  Synthetic oligonucleotide
ccttgctactgtagagggcataacaagtacctcagaggctatagctgctataggcctaac

SEQ ID NO: 102008 - DNA, 60 bp, Artificial
  Synthetic oligonucleotide
ccttaaagctttagatctctgaagggagtttctccaattatttggacccaccattgcaga

SEQ ID NO: 102009 - DNA, 60 bp, Artificial
  Synthetic oligonucleotide
ttaaagctttagatctctgaagggagtctctccaattatttggacccaccattgcagagt

SEQ ID NO: 102010 - DNA, 60 bp, Artificial
  Synthetic oligonucleotide
cttaaagctttagatctctgaagggagtctctccaattatttggacccaccattgcagag

SEQ ID NO: 102011 - DNA, 60 bp, Artificial
  Synthetic oligonucleotide
cctaactcctcaaacatatgctgtaattgctggtgctcctggggctattgctgggtttgc

SEQ ID NO: 102012 - DNA, 60 bp, Artificial
  Synthetic oligonucleotide
gggagtctctccaattatttggacccaccattgcagagtttcttcagttaggtctaagcc

SEQ ID NO: 102013 - DNA, 60 bp, Artificial
  Synthetic oligonucleotide
tgggcaaagaggaaaatcagcacaaacctctgagctactccaggttccaaaatcaggctg

SEQ ID NO: 102014 - DNA, 60 bp, Artificial
  Synthetic oligonucleotide
ctgggcaaagaggaaaatcagcacaaacctctgagctactccaggttccaaaatcaggct

SEQ ID NO: 102015 - DNA, 60 bp, Artificial
  Synthetic oligonucleotide
aaatcaggctgatgggctacctttacatcctgctccatttttttatataaagtattcatt

SEQ ID NO: 102016 - DNA, 60 bp, Artificial
  Synthetic oligonucleotide
gaacaaagcatatcctgttgaatgttgggttcctgatccaaccagaaatgaaaacacaag

SEQ ID NO: 102017 - DNA, 60 bp, Artificial
  Synthetic oligonucleotide
gaacaaagcatatcctgttgaatgttgggttcctgatcccaccagaaatgaaaatacaag

SEQ ID NO: 102018 - DNA, 60 bp, Artificial
  Synthetic oligonucleotide
gaacaaagcatatcctgttgaatgttgggttcctgatcctaccagaaatgaaaacacaag

SEQ ID NO: 102019 - DNA, 60 bp, Artificial
  Synthetic oligonucleotide
gaacaaagcatatcctgttgaatgttgggttcctgatcccaccagaaatgaaaacacgag

SEQ ID NO: 102020 - DNA, 60 bp, Artificial
  Synthetic oligonucleotide
gttacagtgtggccagaattccactacccaatctaaatgaggatctaacttgtggaaata

SEQ ID NO: 102021 - DNA, 60 bp, Artificial
  Synthetic oligonucleotide
acatttgtgggctttttaccaacacatctggaacccagcagtggaagggacttcccagat

SEQ ID NO: 102022 - DNA, 60 bp, Artificial
  Synthetic oligonucleotide
gttgtcattccccgcctgtttttcctgcacattttcctcctcagcatcatcttcagaatc

SEQ ID NO: 102023 - DNA, 60 bp, Artificial
  Synthetic oligonucleotide
agcctgtctaaaggtaagtttacatttaaagctttacccccacataattctagcaaggca

SEQ ID NO: 102024 - DNA, 60 bp, Artificial
  Synthetic oligonucleotide
acaaatctggcctgcaaggtttttggcatatggtactcattcatggttactattccagga

SEQ ID NO: 102025 - DNA, 60 bp, Artificial
  Synthetic oligonucleotide
ttaaaatcatgctcctttaatccccctggcaaactctcttccacaacagaaaatgggtct

SEQ ID NO: 102026 - DNA, 60 bp, Artificial
  Synthetic oligonucleotide
tctactttatctcctgtgaggcctacaatggttaggcaggttgctagcagggaaggagtg

SEQ ID NO: 102027 - DNA, 60 bp, Artificial
  Synthetic oligonucleotide
gcagtttactgatgactctccagaaaaggaccagctgccctgctacagtgtggccagaat

SEQ ID NO: 102028 - DNA, 60 bp, Artificial
  Synthetic oligonucleotide
gtaccctaaccagttcctcatttcaaaggttatttcaggccatggtgctgcgccggctgt

SEQ ID NO: 102029 - DNA, 60 bp, Artificial
  Synthetic oligonucleotide
gaacttttgctgcaattttgtgaaggggaagatactgtggacgggcgcagaaaaccacaa

SEQ ID NO: 102030 - DNA, 60 bp, Artificial
  Synthetic oligonucleotide
ggggtcaaactttcatttctttgctattggtggggagccactggagctgcaaggggtgct

SEQ ID NO: 102031 - DNA, 60 bp, Artificial
  Synthetic oligonucleotide
agctgtgggcggaacttgggcggagttgggcggagctgggaggagtttgggcggagtttg

SEQ ID NO: 102032 - DNA, 60 bp, Artificial
  Synthetic oligonucleotide
cactccacaagcctatgctgtgatctctggggctcctgctgctattgctggatttgctgc

SEQ ID NO: 102033 - DNA, 60 bp, Artificial
  Synthetic oligonucleotide
ggaatatttccccaggcacttctttctagacctaaaaggtccattaattgcagggattct

SEQ ID NO: 102034 - DNA, 60 bp, Artificial
  Synthetic oligonucleotide
caaatctaaatgaggatctaacttgtggaaatatactgatgtgggaagcagtcactgtaa

SEQ ID NO: 102035 - DNA, 60 bp, Artificial
  Synthetic oligonucleotide
ttgcaaaaagctaggcctccaaaaaagcctcctcactacttctagaatagctcagaggcc

SEQ ID NO: 102036 - DNA, 60 bp, Artificial
  Synthetic oligonucleotide
cctctgagctactccaggttccaaaatcaggctgatgggctacctttacatcctgctcca

SEQ ID NO: 102037 - DNA, 60 bp, Artificial
  Synthetic oligonucleotide
agttgaaattgcatcccttgctactgtagagggcattacaagtacctctgaggctatagc

SEQ ID NO: 102038 - DNA, 60 bp, Artificial
  Synthetic oligonucleotide
gaaggaccccgtgcaagttccaaaacttcttataagaggaggagtagaagttctagaagt

SEQ ID NO: 102039 - DNA, 60 bp, Artificial
  Synthetic oligonucleotide
gaaggaccccgtgcaggttccaaaacttcttataagaggaggagtagaagttctagaagt

SEQ ID NO: 102040 - DNA, 60 bp, Artificial
  Synthetic oligonucleotide
gatgagtagagcgtttcttcacactggagtgtctctgccgagaaatcatactttcttgcc

SEQ ID NO: 102041 - DNA, 60 bp, Artificial
  Synthetic oligonucleotide
gggtggtcaccacaagatggccctcagggcagctctggatagatttagcagccagaagac

SEQ ID NO: 102042 - DNA, 51 bp, Artificial
  Synthetic oligonucleotide
gaagacatatctcacgttggctcttaggtggtgtactgaaggacccactcc

SEQ ID NO: 102043 - DNA, 60 bp, Artificial
  Synthetic oligonucleotide
gcccagcagtgtcaaagtggttcaaaaggcttgattggagttcttgcagcttctgatggg

SEQ ID NO: 102044 - DNA, 60 bp, Artificial
  Synthetic oligonucleotide
cagttagtaggtttaagatagcagcagctacagttgtcttgccagtattaacagtacctc

SEQ ID NO: 102045 - DNA, 60 bp, Artificial
  Synthetic oligonucleotide
tcagtaaagctggctgagaagctctcatagccggtgtcctcaggcctctgggaaggtccg

SEQ ID NO: 102046 - DNA, 60 bp, Artificial
  Synthetic oligonucleotide
cttattttgtaagtgagtgatttttgtgcaggcatgctgaaactggagggcacttacact

SEQ ID NO: 102047 - DNA, 60 bp, Artificial
  Synthetic oligonucleotide
ttgagctattttattttggtgctttctttcaaggttaacaggaactgcaccctccagatg

SEQ ID NO: 102048 - DNA, 60 bp, Artificial
  Synthetic oligonucleotide
gcccattcccctggggagatatggctcgtaatcagcctcaggctcgccctttacatcctc

SEQ ID NO: 102049 - DNA, 60 bp, Artificial
  Synthetic oligonucleotide
ggggtagagccactgcctggtgatccaacactaactaggactgttgaccgttatggacaa

SEQ ID NO: 102050 - DNA, 60 bp, Artificial
  Synthetic oligonucleotide
cagagactcacattggctgtgtaaatgatttattgctgtctaaataaagtaagagcatgc

SEQ ID NO: 102051 - DNA, 60 bp, Artificial
  Synthetic oligonucleotide
ttcaggacgggtcaatagccttttttggacaacaaccggatttgcctggagggccttttt

SEQ ID NO: 102052 - DNA, 60 bp, Artificial
  Synthetic oligonucleotide
ttaacactatccaggcatcctatgacggacgggaccactcctacaggcccaggaatccac

SEQ ID NO: 102053 - DNA, 60 bp, Artificial
  Synthetic oligonucleotide
catcctatgacggacgggaccactcctacaggcccaggaatccacctgagacacctgcaa

SEQ ID NO: 102054 - DNA, 60 bp, Artificial
  Synthetic oligonucleotide
tcaagaacatgggccccaaaagaccccgcgccgcaggaccctcccccgttcccaggctcc

SEQ ID NO: 102055 - DNA, 60 bp, Artificial
  Synthetic oligonucleotide
acacctgcaagaacctccagatctcgtgccacctagatctatctggatagacctgcctgc

SEQ ID NO: 102056 - DNA, 60 bp, Artificial
  Synthetic oligonucleotide
ctctatagaagctatattagcaggagaggcattagcagcactagaagcacaaatatctgc

SEQ ID NO: 102057 - DNA, 60 bp, Artificial
  Synthetic oligonucleotide
atgggccttgcattatcagggtatacaggactatctggagtacccatatctgctgctttc

SEQ ID NO: 102058 - DNA, 60 bp, Artificial
  Synthetic oligonucleotide
cccaccaacggtcatgtcctgattggatgcttcctctaattctaggcctctacgggacag

SEQ ID NO: 102059 - DNA, 60 bp, Artificial
  Synthetic oligonucleotide
tgctgctttctatcattacttccagggtaaccccaagaaaatggctctgcaagtatggac

SEQ ID NO: 102060 - DNA, 60 bp, Artificial
  Synthetic oligonucleotide
gggctactgaaagtgcaacatggtatgtggttgagacacccgttagtacttataggttcc

SEQ ID NO: 102061 - DNA, 60 bp, Artificial
  Synthetic oligonucleotide
ctcccagaattaaatgatgacatgactaaactccagatactgatgtgggaggcagtatct

SEQ ID NO: 102062 - DNA, 60 bp, Artificial
  Synthetic oligonucleotide
tttaaatccctagccggattaagctgcccgccaaaatattgcgcgcgtgcgcctcctggg

SEQ ID NO: 102063 - DNA, 60 bp, Artificial
  Synthetic oligonucleotide
cggaataccatatatgggcaccttgcatttggcagcctgccggccattactcattgggcc

SEQ ID NO: 102064 - DNA, 60 bp, Artificial
  Synthetic oligonucleotide
ctagtaaaacttgccagagtctgctacagaaatgaggaaggcctctgactcagccggaat

SEQ ID NO: 102065 - DNA, 60 bp, Artificial
  Synthetic oligonucleotide
cctggttggaaagctgaggtacaactcctggaaaatcaagaacatgggccccaaaagacc

SEQ ID NO: 102066 - DNA, 60 bp, Artificial
  Synthetic oligonucleotide
cctagaagactattacagacaggcccctatattaagaccagatgctaggcggggtttagc

SEQ ID NO: 102067 - DNA, 60 bp, Artificial
  Synthetic oligonucleotide
attgcgcgcgtgcgcctcctggggcggtagtgacggagcaaatgacacaataacccggaa

SEQ ID NO: 102068 - DNA, 60 bp, Artificial
  Synthetic oligonucleotide
tgattatgggtttagtgaagcaataactgtagcacatacccttaaccctgatgtcccccc

SEQ ID NO: 102069 - DNA, 60 bp, Artificial
  Synthetic oligonucleotide
ttttccctatcctccttacaatccttgcattcatcagggttaacagacatccttttataa

SEQ ID NO: 102070 - DNA, 60 bp, Artificial
  Synthetic oligonucleotide
cctatcccagtcccacaaagactagagaaagtagcggaatttcctaaactagaggaaccc

SEQ ID NO: 102071 - DNA, 60 bp, Artificial
  Synthetic oligonucleotide
agaggaaccctcagggcagaaagtagctccaacacttgcaccagggggtgcccaccaacg

SEQ ID NO: 102072 - DNA, 60 bp, Artificial
  Synthetic oligonucleotide
caagcatttctttcatgcttgccagaacacattcaatcctttcattaaattgttcctccc

SEQ ID NO: 102073 - DNA, 56 bp, Artificial
  Synthetic oligonucleotide
aaaatccttaccctataagctccttgctcacttccctctttggtaatatcctcccc

SEQ ID NO: 102074 - DNA, 60 bp, Artificial
  Synthetic oligonucleotide
gcatcaacagcctcttggcaagctcttttctgttcccgtaattgtaggaacattttggca

SEQ ID NO: 102075 - DNA, 60 bp, Artificial
  Synthetic oligonucleotide
tttataccacgttaaccccctagactggggcccaagcctcttccgggacctcggccagca

SEQ ID NO: 102076 - DNA, 60 bp, Artificial
  Synthetic oligonucleotide
gcccataggtaactctgtaacaactgttctccttgatgaaaatgggattggtcctctctg

SEQ ID NO: 102077 - DNA, 60 bp, Artificial
  Synthetic oligonucleotide
tcggccagcagatttgggactttattatacagaccggaagaagacacttaggagatgcca

SEQ ID NO: 102078 - DNA, 60 bp, Artificial
  Synthetic oligonucleotide
gcgtaatcattgagtaatgcataattaaaaggtcccgccaaagtctctttccctagggca

SEQ ID NO: 102079 - DNA, 60 bp, Artificial
  Synthetic oligonucleotide
gggtcttgtgcaaaactatacagctacctatcctgaaggagttatagctcccaagcttgc

SEQ ID NO: 102080 - DNA, 60 bp, Artificial
  Synthetic oligonucleotide
ctaggcggggtttagctattggaatgagggatgacattctggagcctatcccagtcccac

SEQ ID NO: 102081 - DNA, 54 bp, Artificial
  Synthetic oligonucleotide
acatcccttactaacctgcattcaggcatgaaaaggacagtctcgggctatggt

SEQ ID NO: 102082 - DNA, 60 bp, Artificial
  Synthetic oligonucleotide
ggaacactgaccatggggctacgccaacggctactccaagttcttcggagactacgtcaa

SEQ ID NO: 102083 - DNA, 60 bp, Artificial
  Synthetic oligonucleotide
aatttaaatgtaaacactgactaagctatatttttaggcggcggagggcgggaacactga

SEQ ID NO: 102084 - DNA, 60 bp, Artificial
  Synthetic oligonucleotide
ccagtggaatgctggtctccagatccttccaggaatgagaataccaggtattttggtagc

SEQ ID NO: 102085 - DNA, 60 bp, Artificial
  Synthetic oligonucleotide
ctgacctgcatgatctgcctgctccatcctacgaaggctcctgcacgtgtaccttcagcc

SEQ ID NO: 102086 - DNA, 60 bp, Artificial
  Synthetic oligonucleotide
taccacctctgagaccctaaccccccaatcttctccatctaacattgatagtcccccctc

SEQ ID NO: 102087 - DNA, 60 bp, Artificial
  Synthetic oligonucleotide
taaggcagatgctgtaagcaccagtaccgacgggcgtaccacctctgagaccctaacccc

SEQ ID NO: 102088 - DNA, 60 bp, Artificial
  Synthetic oligonucleotide
caactgtaaagcttggctcacgacaaactaactgaaacaggacccccctgttaacactat

SEQ ID NO: 102089 - DNA, 60 bp, Artificial
  Synthetic oligonucleotide
caccccctttgtcaggatgatacatcaaggccttccttctataggctgctttgattttct

SEQ ID NO: 102090 - DNA, 60 bp, Artificial
  Synthetic oligonucleotide
ggtgaaggcttagctgcccttggtggtataacagagggagctgcacttcttggggaaaca

SEQ ID NO: 102091 - DNA, 60 bp, Artificial
  Synthetic oligonucleotide
tggggaaacaataccaatatctgaagcagctactactgtgttaactaaagttcctgaact

SEQ ID NO: 102092 - DNA, 60 bp, Artificial
  Synthetic oligonucleotide
gaaacaccaatggtgttgtacatggtctggctggaacccagttgtatttttgggctgttg

SEQ ID NO: 102093 - DNA, 60 bp, Artificial
  Synthetic oligonucleotide
ctccagatgctgacacaactgtatgttacagcctggcagaaattgctccccctgatatac

SEQ ID NO: 102094 - DNA, 60 bp, Artificial
  Synthetic oligonucleotide
ctaatgtggttttgccactgttaattgggcctttgaaaagccaatatctgtgttttggct

SEQ ID NO: 102095 - DNA, 60 bp, Artificial
  Synthetic oligonucleotide
caagttagtgagtgtgacatgaaagtatgggagctgtacagaatggaaacagagttgctt

SEQ ID NO: 102096 - DNA, 60 bp, Artificial
  Synthetic oligonucleotide
actgtccttgacacaggtaagactggggaccctttgtaggccaaaggagagtgaagggta

SEQ ID NO: 102097 - DNA, 60 bp, Artificial
  Synthetic oligonucleotide
ttcaaatctcacagcaactgtttctggaatacaatattcattcatggttacaatccctgg

SEQ ID NO: 102098 - DNA, 59 bp, Artificial
  Synthetic oligonucleotide
ttcggggatgttggcgccatcgtctcgaacctggcctgcatacctttggatatagaggg

SEQ ID NO: 102099 - DNA, 60 bp, Artificial
  Synthetic oligonucleotide
tgctgtacctgaaattatagcagcatctatagctggaggagcagaggccttgtcaattgc

SEQ ID NO: 102100 - DNA, 60 bp, Artificial
  Synthetic oligonucleotide
gaaataggcccacttccccccagtatacaaactaccctccccaccagtgtaaatcttact

SEQ ID NO: 102101 - DNA, 60 bp, Artificial
  Synthetic oligonucleotide
ggccttgtcaattgctggttctggagctgccatagctactggtgaaggcttagctgccct

SEQ ID NO: 102102 - DNA, 60 bp, Artificial
  Synthetic oligonucleotide
agacttttaagagaccttgaatatggatttagagcaactttagccagcataggagaatca

SEQ ID NO: 102103 - DNA, 60 bp, Artificial
  Synthetic oligonucleotide
gagttgcctagtttgcaggacgtgttcaatagaattgcctttggaatctggtcatcatat

SEQ ID NO: 102104 - DNA, 60 bp, Artificial
  Synthetic oligonucleotide
gcaggacgtgttcaatagaattgcctttggaatctggtcatcatattacaatgcggggtc

SEQ ID NO: 102105 - DNA, 60 bp, Artificial
  Synthetic oligonucleotide
tagccagcataggagaatcagatcctgtaaatgctatagctactcaagttagaagcttag

SEQ ID NO: 102106 - DNA, 56 bp, Artificial
  Synthetic oligonucleotide
ccccagtatacaaactaccctccccaccagtgtaaatcttactcagcttccacgca

SEQ ID NO: 102107 - DNA, 60 bp, Artificial
  Synthetic oligonucleotide
gctagcacagcaagggaaagggagctgctacaaattactgcaggtcagccacttgacctt

SEQ ID NO: 102108 - DNA, 60 bp, Artificial
  Synthetic oligonucleotide
cttgtgcagatatgcttggaacagctaatagtagaatccatacccctatggctaggtttt

SEQ ID NO: 102109 - DNA, 60 bp, Artificial
  Synthetic oligonucleotide
ctatacagaccataagggttattaactcctttacagaataaaaagctaacagtacaatga

SEQ ID NO: 102110 - DNA, 60 bp, Artificial
  Synthetic oligonucleotide
agtacttcccctttttctctagtagtatgtactacaaagcacgttatacacttattacta

SEQ ID NO: 102111 - DNA, 60 bp, Artificial
  Synthetic oligonucleotide
ctgtagcacttatagcagtagcactctatccacacaggtggttttctataaattttgtac

SEQ ID NO: 102112 - DNA, 66 bp, Artificial
  Synthetic oligonucleotide
gtacttttctttatgatatttgcttaaaatacagtgaatgcattggcattcgtgattgtagccatg

SEQ ID NO: 102113 - DNA, 60 bp, Artificial
  Synthetic oligonucleotide
ggcattcgtgattgtagccatgaatgcatacatcccactgcttcataatatatgcttcat

SEQ ID NO: 102114 - DNA, 60 bp, Artificial
  Synthetic oligonucleotide
acttattgcagcacaaatctttgcagtatacctgagaagattgccatatattatcttctt

SEQ ID NO: 102115 - DNA, 60 bp, Artificial
  Synthetic oligonucleotide
taactgagtcttgcagttttaaatataaagaattaagaagcttcatgctttcctcatttc

SEQ ID NO: 102116 - DNA, 60 bp, Artificial
  Synthetic oligonucleotide
ttactaagtattgtcttctcattagtggtaaattgccccagcaactcatgtccaaacata

SEQ ID NO: 102117 - DNA, 60 bp, Artificial
  Synthetic oligonucleotide
ctcaggaatggcattggtacctatccctgaataccagttggaaactggaattccgggcat

SEQ ID NO: 102118 - DNA, 60 bp, Artificial
  Synthetic oligonucleotide
tatatatgatgcttcaagcctgcccaaagatggctttaatgctttaagtgagggtgtaca

SEQ ID NO: 102119 - DNA, 60 bp, Artificial
  Synthetic oligonucleotide
ggacagccacttgatgtagttggtgtaacacccacagacaaatataaaggcccaactacc

SEQ ID NO: 102120 - DNA, 60 bp, Artificial
  Synthetic oligonucleotide
ggatgaaaatggcattggtatactttgcttgcagggaagattgtacattacttgtgcaga

SEQ ID NO: 102121 - DNA, 60 bp, Artificial
  Synthetic oligonucleotide
agtaatacacccaaagcaaaggttaccagtgagagatattctgttgaatcatgggcccca

SEQ ID NO: 102122 - DNA, 55 bp, Artificial
  Synthetic oligonucleotide
ggtgcaggccttgtaggtggcatttatactgccttagcatcagaccaccctgggg

SEQ ID NO: 102123 - DNA, 60 bp, Artificial
  Synthetic oligonucleotide
aattccagagcaaagttagctatttgattccagcttaatgagggttccttaggttcccca

SEQ ID NO: 102124 - DNA, 59 bp, Artificial
  Synthetic oligonucleotide
agtccagtataccaggctattgaagccatataaagcagtatttttctttctccaacaac

SEQ ID NO: 102125 - DNA, 60 bp, Artificial
  Synthetic oligonucleotide
agcatttttttggcttttactttcttgcaaaagcacagcattttcatgattttgcacatg

SEQ ID NO: 102126 - DNA, 54 bp, Artificial
  Synthetic oligonucleotide
actgcaggtcagccacttgacctttctaggcctaccagcgccttgtcagcagca

SEQ ID NO: 102127 - DNA, 60 bp, Artificial
  Synthetic oligonucleotide
gtacagaatggaaacagagttgcttgttgtacctctagttaatgctctaggaaacaccaa

SEQ ID NO: 102128 - DNA, 60 bp, Artificial
  Synthetic oligonucleotide
ggagcaggactcaatctccagtcagtgcacaaaccaattcacgccccctactcaggaatg

SEQ ID NO: 102129 - DNA, 60 bp, Artificial
  Synthetic oligonucleotide
gtggactccatcccacctcaggatacaatccccagggagcaggactcaatctccagtcag

SEQ ID NO: 102130 - DNA, 60 bp, Artificial
  Synthetic oligonucleotide
agggtgtacacagactaggtcagtggatttccttttcagggcctacaggaggtaccccac

SEQ ID NO: 102131 - DNA, 60 bp, Artificial
  Synthetic oligonucleotide
gttcaagctacccaagctgtaacagcagctgtgcaaggaggtgcaggccttgtaggtggc

SEQ ID NO: 102132 - DNA, 60 bp, Artificial
  Synthetic oligonucleotide
cctctggcctcctgtaatatagaaaaaaagggcacagtgattgacagttgtgtatacaag

SEQ ID NO: 102133 - DNA, 60 bp, Artificial
  Synthetic oligonucleotide
tcagggcctacaggaggtaccccacattatgcaactcctgactggattttgtatgtgcta

SEQ ID NO: 102134 - DNA, 60 bp, Artificial
  Synthetic oligonucleotide
gaggagcagaggccttgtcaattgctggttctggagctgccatagctactggtgaaggct

SEQ ID NO: 102135 - DNA, 60 bp, Artificial
  Synthetic oligonucleotide
ttccgggcatcccagactggctcttcaaccttgtcgcgtcatacttgcccgagttgccta

SEQ ID NO: 102136 - DNA, 60 bp, Artificial
  Synthetic oligonucleotide
agttgctacgtgccacacaatagctttcactcttggcgtgaagccaacttcctgggccgt

SEQ ID NO: 102137 - DNA, 60 bp, Artificial
  Synthetic oligonucleotide
ccaggaatattttcttcacacaaattaaatggttgtctacacatcctactatacagacca

SEQ ID NO: 102138 - DNA, 60 bp, Artificial
  Synthetic oligonucleotide
tgcattagctgctttgcctcttctctagataaagttttatccattttgcctctctaggcc

SEQ ID NO: 102139 - DNA, 58 bp, Artificial
  Synthetic oligonucleotide
aggtagatgcttttcaatacctatttgacctttgacatcttcaaacacaaccatatat

SEQ ID NO: 102140 - DNA, 60 bp, Artificial
  Synthetic oligonucleotide
ggtggtatgtattacaaatgcagttaaagttctattactaaatacagcttgagacacaaa

SEQ ID NO: 102141 - DNA, 60 bp, Artificial
  Synthetic oligonucleotide
ctgacaaagccttccaatttaactgatctttaaactccccatataaatcctcagctttaa

SEQ ID NO: 102142 - DNA, 60 bp, Artificial
  Synthetic oligonucleotide
ttttcttcacataaagtaaatggatctctagtcattctactatataaaccatatgcatta

SEQ ID NO: 102143 - DNA, 60 bp, Artificial
  Synthetic oligonucleotide
catgtcagcaaattcagtaaggcctatatatttgtctaacagttctttccaatacacaac

SEQ ID NO: 102144 - DNA, 60 bp, Artificial
  Synthetic oligonucleotide
ctaggagccaaagtagcagggactaaatattcattcattgttacaatacctggaggaaaa

SEQ ID NO: 102145 - DNA, 60 bp, Artificial
  Synthetic oligonucleotide
ggggtttctccaggagatttaggcatttcctcattacatcttagttcttcttcccagtag

SEQ ID NO: 102146 - DNA, 60 bp, Artificial
  Synthetic oligonucleotide
acatcttagttcttcttcccagtaggaattaaactgagaccaccagtaatcccagtctgg

SEQ ID NO: 102147 - DNA, 60 bp, Artificial
  Synthetic oligonucleotide
gcaattttaagcattgtgtttttcaagtatgttgcatccatttgttacattcatttgcat

SEQ ID NO: 102148 - DNA, 60 bp, Artificial
  Synthetic oligonucleotide
ccccagcaggtcatatcaagacccagcagctgcataagttcttttgcttcatttctggac

SEQ ID NO: 102149 - DNA, 60 bp, Artificial
  Synthetic oligonucleotide
ggcaactgcaggttacagaggttactatgactgaagaaacagggcccttgcctcccacag

SEQ ID NO: 102150 - DNA, 60 bp, Artificial
  Synthetic oligonucleotide
ggcccttgcctcccacagtagagggaaatgttggtgtacccacaaccagtaatttgtctc

SEQ ID NO: 102151 - DNA, 60 bp, Artificial
  Synthetic oligonucleotide
gtctcatttgcctgcaactgtaactttacaagccacaggcccaatactaaacacacaagg

SEQ ID NO: 102152 - DNA, 60 bp, Artificial
  Synthetic oligonucleotide
atgttactcctgatgctgatactactgtgtgctacagcttgtcacaggttgctccccctg

SEQ ID NO: 102153 - DNA, 60 bp, Artificial
  Synthetic oligonucleotide
tatccagtccatccacaagcccctccacgccccctacccaggaatggcactggcacctat

SEQ ID NO: 102154 - DNA, 60 bp, Artificial
  Synthetic oligonucleotide
gtctattagtagcccacttaaaactgctgaagctgctaatgttactcctgatgctgatac

SEQ ID NO: 102155 - DNA, 60 bp, Artificial
  Synthetic oligonucleotide
gcctgcacagcaaagccagcctgcacagcaaaaccaggaaggtcaccaagaagtcaaccc

SEQ ID NO: 102156 - DNA, 60 bp, Artificial
  Synthetic oligonucleotide
aaagttgaattgtttgttaaacctgttattggaaatgcagaggggactaccccacattat

SEQ ID NO: 102157 - DNA, 60 bp, Artificial
  Synthetic oligonucleotide
ctttaatgcacttagtgatggagttcacagactaggccagtggatttcaatgcctggggc

SEQ ID NO: 102158 - DNA, 60 bp, Artificial
  Synthetic oligonucleotide
tagaactgcacttgccaccattggggaatctgacccagtaaatgctatagttgaacaagt

SEQ ID NO: 102159 - DNA, 58 bp, Artificial
  Synthetic oligonucleotide
gctccccctgatattcctaatcaggttagtgaatgtgacatgcttatatgggagctgt

SEQ ID NO: 102160 - DNA, 59 bp, Artificial
  Synthetic oligonucleotide
tactttctagggggaaagttacagcacaattctgtgcattctacctgtgaagagctcca

SEQ ID NO: 102161 - DNA, 60 bp, Artificial
  Synthetic oligonucleotide
ctgtaacacaaggtgtaacagcagctgtacaagggggtgcaggtcttgtaggtggtatat

SEQ ID NO: 102162 - DNA, 60 bp, Artificial
  Synthetic oligonucleotide
atttgctttataagcaggtgtttaataagccagctgatgacattagtgggcaactgcagg

SEQ ID NO: 102163 - DNA, 60 bp, Artificial
  Synthetic oligonucleotide
gcagccacaaggtggagcaaaagtattaagtttcactgttatgtgcaggaatgtgcagct

SEQ ID NO: 102164 - DNA, 60 bp, Artificial
  Synthetic oligonucleotide
cctccacaaaggtcaagtaaagcagcagcaacagttgttttaccactgtttataggcccc

SEQ ID NO: 102165 - DNA, 60 bp, Artificial
  Synthetic oligonucleotide
tagctgcaggtcaacctgtagacatttctgaaggtgtatcaagaggcacagctactattt

SEQ ID NO: 102166 - DNA, 52 bp, Artificial
  Synthetic oligonucleotide
gctaataaaccttctctggacatatttaaactatctacccttctttttgcaa

SEQ ID NO: 102167 - DNA, 60 bp, Artificial
  Synthetic oligonucleotide
gttgcatcttcattactattgcatttttcacactcttctaccttaatagatagttgtaaa

SEQ ID NO: 102168 - DNA, 64 bp, Artificial
  Synthetic oligonucleotide
ctcctacttgaccttttacatcttcaaatactactgtaaattgatctattgcaactcctaactc

SEQ ID NO: 102169 - DNA, 60 bp, Artificial
  Synthetic oligonucleotide
ttcaactataacttttaggtacctgtatacaagctcatctattttaccatttaggcctaa

SEQ ID NO: 102170 - DNA, 60 bp, Artificial
  Synthetic oligonucleotide
tgtgctgaccttttgggagttaacaaaaatagagtacatacagggctttccagatttttt

SEQ ID NO: 102171 - DNA, 60 bp, Artificial
  Synthetic oligonucleotide
gcattggcattctttgcttgcaaggtagattgtacataacttgtgctgaccttttgggag

SEQ ID NO: 102172 - DNA, 60 bp, Artificial
  Synthetic oligonucleotide
ccagtggtgtcatttagtaataatagcacaattccactgttggatgaaaatggcattggc

SEQ ID NO: 102173 - DNA, 60 bp, Artificial
  Synthetic oligonucleotide
gccgcaatgataactgcagatactttggcagaatggttggaggggctgcaactccaccag

SEQ ID NO: 102174 - DNA, 60 bp, Artificial
  Synthetic oligonucleotide
caagggtcactaatgaaaagtacagcatcgaatcatgggtggcagaccctagccgcaatg

SEQ ID NO: 102175 - DNA, 60 bp, Artificial
  Synthetic oligonucleotide
ccaatggtactgtgcctcatgtttattccagttctgaaacacccagggcaagggtcacta

SEQ ID NO: 102176 - DNA, 60 bp, Artificial
  Synthetic oligonucleotide
tgcaactcaaagactatcacaagcaacctacaactttgtttatgatgcttctacccttcc

SEQ ID NO: 102177 - DNA, 60 bp, Artificial
  Synthetic oligonucleotide
cctataggaaaccctagggctctataagcagcatacatatgttgtgacatctccgttgag

SEQ ID NO: 102178 - DNA, 60 bp, Artificial
  Synthetic oligonucleotide
cttaacagagacgtccttgggttcaaacctaagggtgccataagcaacattacattaatg

SEQ ID NO: 102179 - DNA, 60 bp, Artificial
  Synthetic oligonucleotide
cctgggcctggtgccataccaacacagctgctgagcttccggaatacaatactggtgccc

SEQ ID NO: 102180 - DNA, 60 bp, Artificial
  Synthetic oligonucleotide
gtgaaggtttagctgctcttggtgggcttacagagtcagcagcactattaggggaaactg

SEQ ID NO: 102181 - DNA, 60 bp, Artificial
  Synthetic oligonucleotide
gttggatataaagggtcaccatttttatttcagatgggcatattgcttgctgtgcctgaa

SEQ ID NO: 102182 - DNA, 55 bp, Artificial
  Synthetic oligonucleotide
ggtggtatatatacagctttagcagcagatcgccctggggacctgcctgcgagta

SEQ ID NO: 102183 - DNA, 60 bp, Artificial
  Synthetic oligonucleotide
gttttggtgcttcctgtgcttaatgctggcatacttactacagggggtgtaggaggtatt

SEQ ID NO: 102184 - DNA, 60 bp, Artificial
  Synthetic oligonucleotide
agtggactacatccccccgcaggatacaatccccaaggaggtggacttaatatccagtcc

SEQ ID NO: 102185 - DNA, 60 bp, Artificial
  Synthetic oligonucleotide
caagaggcacagctactatttcaaatgctgtagaagctgtaagacatgcaactcaaagac

SEQ ID NO: 102186 - DNA, 60 bp, Artificial
  Synthetic oligonucleotide
tcttttgcttcatttctggacaaagttttatccattttgccttctttagcctcaaggcgc

SEQ ID NO: 102187 - DNA, 57 bp, Artificial
  Synthetic oligonucleotide
ctcaaggcgcctcagcaaggccctctgcttttagttcagaaagttgaggctttttag

SEQ ID NO: 102188 - DNA, 61 bp, Artificial
  Synthetic oligonucleotide
gagcagttagtgaagaattacaaagactactaggagatttagaatatggatttagaactgc

SEQ ID NO: 102189 - DNA, 60 bp, Artificial
  Synthetic oligonucleotide
gcctatggaatctggacatcatattacaatacggggagaacagtagttaatagagcagtt

SEQ ID NO: 102190 - DNA, 60 bp, Artificial
  Synthetic oligonucleotide
tttgagctttttctttagtagtatacacagcaaagcaggcaagggttctattactaaaca

SEQ ID NO: 102191 - DNA, 60 bp, Artificial
  Synthetic oligonucleotide
tttgagctttttctttagtagtatacacagcaaagcaggcgagggttctattactaaata

SEQ ID NO: 102192 - DNA, 60 bp, Artificial
  Synthetic oligonucleotide
gcttccacctccaccagcagacccggagagttctacaatcctgacacaggaggatactgg

SEQ ID NO: 102193 - DNA, 60 bp, Artificial
  Synthetic oligonucleotide
tgctccaatacctgtggattggcttgatctgaatgttcatgaggtctacaatccggcctc

SEQ ID NO: 102194 - DNA, 60 bp, Artificial
  Synthetic oligonucleotide
gtaccagcccataacatctgctgcactgagataaagcccatctcctttgcaaagaggccc

SEQ ID NO: 102195 - DNA, 60 bp, Artificial
  Synthetic oligonucleotide
taaagcatttattagaagctctgtgtacagtcatttttcaagcattagtttgctggtttt

SEQ ID NO: 102196 - DNA, 60 bp, Artificial
  Synthetic oligonucleotide
gaaatgtgtctcaatattcagaggggtgctgatccccttgaggcattgtaattgaggagg

SEQ ID NO: 102197 - DNA, 60 bp, Artificial
  Synthetic oligonucleotide
gggtcaccaggaacagcctctgtaccctcataaatcctgacttcttctacctgagcagct

SEQ ID NO: 102198 - DNA, 60 bp, Artificial
  Synthetic oligonucleotide
tctgccaagtaggactaatgtctccgtacaatcctagaattaaaggaagcatccaatcag

SEQ ID NO: 102199 - DNA, 60 bp, Artificial
  Synthetic oligonucleotide
gaagcgccgctttttctttttggggccatactcaacctcatcaatgtatgtctgccaagt

SEQ ID NO: 102200 - DNA, 60 bp, Artificial
  Synthetic oligonucleotide
agtcctggagagtaccttgcctggtgttaggagaatgctactgcatagactgctttgcct

SEQ ID NO: 102201 - DNA, 60 bp, Artificial
  Synthetic oligonucleotide
acattagcaggctttggacagggtttccacaggggtttgcacatctactggaagcgccgc

SEQ ID NO: 102202 - DNA, 60 bp, Artificial
  Synthetic oligonucleotide
tggtttgtggaagtcattgctttgccagtaacagttttgatactaacaatagctgcctca

SEQ ID NO: 102203 - DNA, 60 bp, Artificial
  Synthetic oligonucleotide
ggtacctaccatccttgtccaattttgcttttgcagtagggtccagcacctggtttgtgg

SEQ ID NO: 102204 - DNA, 60 bp, Artificial
  Synthetic oligonucleotide
aaggtaggcctcaatttgtgtgatactgtcttctcctgttacaagatcaagcacacccac

SEQ ID NO: 102205 - DNA, 60 bp, Artificial
  Synthetic oligonucleotide
ggtttggcctgccagttaccaatatgctggttccattatatgcacaatttcttgctccaa

SEQ ID NO: 102206 - DNA, 60 bp, Artificial
  Synthetic oligonucleotide
aaagtgtgcagaagctttaccaaggatgaaagtccactgggctaaccacagtcagcactt

SEQ ID NO: 102207 - DNA, 60 bp, Artificial
  Synthetic oligonucleotide
ctatgcaaagctgttacaaaaccgttagagttgtataactgtgtggctaaatgtgatgac

SEQ ID NO: 102208 - DNA, 60 bp, Artificial
  Synthetic oligonucleotide
cttacactgcaaacaacagaaaagtatctgtcagcaagcagcagataatgttctggcaag

SEQ ID NO: 102209 - DNA, 60 bp, Artificial
  Synthetic oligonucleotide
gcacacccacaccaccccgcataataagcttgggaacattagcaggctttggacagggtt

SEQ ID NO: 102210 - DNA, 60 bp, Artificial
  Synthetic oligonucleotide
ggcagagagactgaacaaactgttagaccaattaaaagatttatctcctgtagataagca

SEQ ID NO: 102211 - DNA, 60 bp, Artificial
  Synthetic oligonucleotide
ctgacttcttctacctgagcagcttctccttccatgggctggccttcaattgttggaagc

SEQ ID NO: 102212 - DNA, 60 bp, Artificial
  Synthetic oligonucleotide
ttttaggccgaattctaaagaaacagaaagcaaacactcagcgccgaagagcaggaaatg

SEQ ID NO: 102213 - DNA, 60 bp, Artificial
  Synthetic oligonucleotide
cgaagagcaggaaatggctgaccactgcacttgggcgacacgacacgcctagcgataagg

SEQ ID NO: 102214 - DNA, 60 bp, Artificial
  Synthetic oligonucleotide
cacagttgcctagcaaatgacagactcagcaaccacaggagaggaaatgatagggctagc

SEQ ID NO: 102215 - DNA, 60 bp, Artificial
  Synthetic oligonucleotide
gggtttagtatgctgttggccatacttgtcaatgaacctattcacatctgggtcaccagg

SEQ ID NO: 102216 - DNA, 61 bp, Artificial
  Synthetic oligonucleotide
ctgctattggcatcttcaatagaaggtctattactgtattctaaagctctttctatttgtc

SEQ ID NO: 102217 - DNA, 60 bp, Artificial
  Synthetic oligonucleotide
ggcgttttgaggcttccaggcagagaatactcacagaccccacacagtctagacgctcag

SEQ ID NO: 102218 - DNA, 60 bp, Artificial
  Synthetic oligonucleotide
agggaaaactagccttgctgcagctatcatgaatcttgtaggaggagttgccctcaatgt

SEQ ID NO: 102219 - DNA, 60 bp, Artificial
  Synthetic oligonucleotide
ggctctgcagactccccattacctgcctaagaaacaagggaattagtacctgcaattgca

SEQ ID NO: 102220 - DNA, 60 bp, Artificial
  Synthetic oligonucleotide
atcagcagtaagggagctatttactttaatactctgggagaacccataatactggccatc

SEQ ID NO: 102221 - DNA, 60 bp, Artificial
  Synthetic oligonucleotide
gccaagagccttgaggaaaacagttacatggggagacatagagtctgtcaaagtccactt

SEQ ID NO: 102222 - DNA, 60 bp, Artificial
  Synthetic oligonucleotide
aaccggagataagagacacctacagtctggacttggaattaataaccttgataacctgag

SEQ ID NO: 102223 - DNA, 60 bp, Artificial
  Synthetic oligonucleotide
atatcctttgtctcacttctggagccatatccatgcacatttagaagggatcccactcca

SEQ ID NO: 102224 - DNA, 60 bp, Artificial
  Synthetic oligonucleotide
cacatttagaagggatcccactccaacaacttcagtttttacagatacagcctcccacat

SEQ ID NO: 102225 - DNA, 60 bp, Artificial
  Synthetic oligonucleotide
tgcattatagttctgcactaggccttgcaaatctaatggttctcctcccactgcaaacat

SEQ ID NO: 102226 - DNA, 60 bp, Artificial
  Synthetic oligonucleotide
ctgttacaagatcaagcacacccacaccaccccgcataataagcttgggaacattagcag

SEQ ID NO: 102227 - DNA, 60 bp, Artificial
  Synthetic oligonucleotide
agccttaataagtttactagatttggagccacaatattggggagactatggacgaatgca

SEQ ID NO: 102228 - DNA, 60 bp, Artificial
  Synthetic oligonucleotide
ctggcatcccaatccccccccctcccctgtttctatttccagtgacagctccagttcctc

SEQ ID NO: 102229 - DNA, 60 bp, Artificial
  Synthetic oligonucleotide
accgatatacctagaactcctgccagagaatcccaatcaacatttggctcttacttcaac

SEQ ID NO: 102230 - DNA, 60 bp, Artificial
  Synthetic oligonucleotide
cctcattttatgagcaggaggagcttgttgcaacttgagaggcgttttgaggcttccagg

SEQ ID NO: 102231 - DNA, 60 bp, Artificial
  Synthetic oligonucleotide
cacaacagtcacatcataacacaacgccaaagaaaccgcctccgacggttagtcctgatg

SEQ ID NO: 102232 - DNA, 60 bp, Artificial
  Synthetic oligonucleotide
cagagttaggctgttacttgggcctagtcaggtaagaagacttggaaaagatcagtggaa

SEQ ID NO: 102233 - DNA, 60 bp, Artificial
  Synthetic oligonucleotide
tattcacaatcggtacttcgtgagcaagatagccgtgtagacttcccaaagagaaggctg

SEQ ID NO: 102234 - DNA, 60 bp, Artificial
  Synthetic oligonucleotide
aaacccctccatagttattaatgaagtaacttgggcatctatcgcggcaaaggcttctcc

SEQ ID NO: 102235 - DNA, 60 bp, Artificial
  Synthetic oligonucleotide
tcatagtagtcagctggtctcctgggaataagtgccatgtttctattcacaatcggtact

SEQ ID NO: 102236 - DNA, 60 bp, Artificial
  Synthetic oligonucleotide
ccttctcaaagtatcccagatatactctcctacagattgaaataatgagtggccccagcc

SEQ ID NO: 102237 - DNA, 60 bp, Artificial
  Synthetic oligonucleotide
agtggccccagccatgaataacatccaaggcatgggtaaatgactgtacaccagggaata

SEQ ID NO: 102238 - DNA, 60 bp, Artificial
  Synthetic oligonucleotide
ggtgttgctatagataaatttgcagtagtctttgaagatgtcaaaggacaaaccggagat

SEQ ID NO: 102239 - DNA, 60 bp, Artificial
  Synthetic oligonucleotide
gtggtctgcaaacttaagtccctcacagcagattctacagctccttgagtttcccttctc

SEQ ID NO: 102240 - DNA, 60 bp, Artificial
  Synthetic oligonucleotide
caaaccaactagaagagtcttcctgctgttgacttcttctctggacatcaggtctcccta

SEQ ID NO: 102241 - DNA, 55 bp, Artificial
  Synthetic oligonucleotide
ccccttgcctccttagctctcaagtagaaaaggaagagaggcttttggggctttt

SEQ ID NO: 102242 - DNA, 60 bp, Artificial
  Synthetic oligonucleotide
tgctcaaactgtaaccccaaaaaatgctacagttgacagtcagcagatgaacactgacca

SEQ ID NO: 102243 - DNA, 60 bp, Artificial
  Synthetic oligonucleotide
agtgacctaattaacaggaggacacagagggtggatgggcagcctatgattggaatgtcc

SEQ ID NO: 102244 - DNA, 60 bp, Artificial
  Synthetic oligonucleotide
acactcaggccattgtttgcagtacattgcatcaacaccaggatttaaggaagaagcaaa

SEQ ID NO: 102245 - DNA, 60 bp, Artificial
  Synthetic oligonucleotide
ctcagaaggtacctaaccaagttcctctttcagaggttatttcaggccatggtgctgcgc

SEQ ID NO: 102246 - DNA, 60 bp, Artificial
  Synthetic oligonucleotide
attttggaacctacacaggtggggaaaatgtgcctcctgttttgcacatcactaacacag

SEQ ID NO: 102247 - DNA, 60 bp, Artificial
  Synthetic oligonucleotide
tgttggtggggaacctttggagctgcagggtgtgttagcaaactacaggaccaaatatcc

SEQ ID NO: 102248 - DNA, 59 bp, Artificial
  Synthetic oligonucleotide
aacatttaaagctttccccccacataattcaagcaaagcagctgctaatgtagttttac

SEQ ID NO: 102249 - DNA, 60 bp, Artificial
  Synthetic oligonucleotide
caccactgaatccattttgggcaacaaacagtgtagccaagcaactccagccatccattc

SEQ ID NO: 102250 - DNA, 60 bp, Artificial
  Synthetic oligonucleotide
ttttatttcctggagtacaaacctttgttcacagtgttcagtatcttgaccccagacatt

SEQ ID NO: 102251 - DNA, 60 bp, Artificial
  Synthetic oligonucleotide
taattccctgacctgaaggcaaatctctggactcccctccagtgccctttacatcctcaa

SEQ ID NO: 102252 - DNA, 60 bp, Artificial
  Synthetic oligonucleotide
caactccagccatccattcttctatgtcagcagagcctgtagaaccaaacattatatcca

SEQ ID NO: 102253 - DNA, 60 bp, Artificial
  Synthetic oligonucleotide
tgtcttttatttcaggtccatgggtgctgctttaacactgttgggggacctaattgctac

SEQ ID NO: 102254 - DNA, 60 bp, Artificial
  Synthetic oligonucleotide
ggtgctgcgccggctgtcacgccaggcctccgttaaggttcgtaggtcatggactgaaag

SEQ ID NO: 102255 - DNA, 60 bp, Artificial
  Synthetic oligonucleotide
cgctgctgcaattgaagtgcaacttgcatctgttgctactgtagaaggcctaacaacctc

SEQ ID NO: 102256 - DNA, 60 bp, Artificial
  Synthetic oligonucleotide
aaggtccattagctgcaaagattcctctctgtttaaaactttatccatatttgcaaagct

SEQ ID NO: 102257 - DNA, 60 bp, Artificial
  Synthetic oligonucleotide
cggagttaggggcgggatgggcggagttaggggcgggactatggttgctgactaattgag

SEQ ID NO: 102258 - DNA, 60 bp, Artificial
  Synthetic oligonucleotide
atgactctccagacaaagaccaactgccttgctacagtgtggctagaattcctttgccta

SEQ ID NO: 102259 - DNA, 60 bp, Artificial
  Synthetic oligonucleotide
ctgttggcatatggttttttggtttttgctgtcagcaaatatagcagcatttgcataatg

SEQ ID NO: 102260 - DNA, 60 bp, Artificial
  Synthetic oligonucleotide
ggagcctggggactttccacaccctaactgacacacattccacagctggttctttccgcc

SEQ ID NO: 102261 - DNA, 60 bp, Artificial
  Synthetic oligonucleotide
ggcgtgtaatacaaaatgacattcctaggctcacctcacaggagcttgaaagaagaaccc

SEQ ID NO: 102262 - DNA, 60 bp, Artificial
  Synthetic oligonucleotide
gctgttactgttaaaactgaggttattggggtaactgctatgttaaacttgcattcaggg

SEQ ID NO: 102263 - DNA, 60 bp, Artificial
  Synthetic oligonucleotide
ctcaggaaagtcaggtgatgttctaggtttcttgggtggggtggcttgacttcccggggc

SEQ ID NO: 102264 - DNA, 60 bp, Artificial
  Synthetic oligonucleotide
acagtacattttttactacacagattttccattgcatttacccgatgttttccaacagtg

SEQ ID NO: 102265 - DNA, 60 bp, Artificial
  Synthetic oligonucleotide
ccaggtgctagatcctaccctcaagggaattctagacaaagatggtgtgtatcctgttga

SEQ ID NO: 102266 - DNA, 60 bp, Artificial
  Synthetic oligonucleotide
tgatgttttgcttatgtgggaagctgtaagttgcaaaactgaggtcgttggtgttaacac

SEQ ID NO: 102267 - DNA, 60 bp, Artificial
  Synthetic oligonucleotide
gtgttaacactttaacaacctgtcatggatataagaaaaggtattcgccctctgctggtc

SEQ ID NO: 102268 - DNA, 60 bp, Artificial
  Synthetic oligonucleotide
tctttgctgtaggtggcgaaccacttgaaatccagttcatatgtgaggatttcaaagccc

SEQ ID NO: 102269 - DNA, 60 bp, Artificial
  Synthetic oligonucleotide
gggacaaagcactgagtctgaatattatggcttcagtgacaaccagaggggatcaacctc

SEQ ID NO: 102270 - DNA, 60 bp, Artificial
  Synthetic oligonucleotide
atgtacatttgtaggctgcctggatacaaggatataattcttttcctttctcagcagtag

SEQ ID NO: 102271 - DNA, 60 bp, Artificial
  Synthetic oligonucleotide
caaccagaggggatcaacctcaagaacagatgaagacctaattagtgcagaactgcccag

SEQ ID NO: 102272 - DNA, 56 bp, Artificial
  Synthetic oligonucleotide
gcagaactgcccagatatagcttgggagtggtacaattgcctttgcttaatgaaaa

SEQ ID NO: 102273 - DNA, 60 bp, Artificial
  Synthetic oligonucleotide
ctacacagattttccattgcatttacccgatgttttccaacagtgataatatacagaaca

SEQ ID NO: 102274 - DNA, 60 bp, Artificial
  Synthetic oligonucleotide
tgggtttcctgagctgcttgcggcacactttgccaactgtttggcagtttgtttgaaagc

SEQ ID NO: 102275 - DNA, 60 bp, Artificial
  Synthetic oligonucleotide
ccccacacaggcctatgaggcctgcagcaactgtagttttcccacagtttacaggcccct

SEQ ID NO: 102276 - DNA, 60 bp, Artificial
  Synthetic oligonucleotide
taagatgctggaggcaggagatgacgacatagataagtatgggtttcctgagctgcttgc

SEQ ID NO: 102277 - DNA, 60 bp, Artificial
  Synthetic oligonucleotide
gtgaacagagcattgcttacatattctttcaaaacctcaggaaagtcaggtgatgttcta

SEQ ID NO: 102278 - DNA, 60 bp, Artificial
  Synthetic oligonucleotide
tgttagatgttctggacagtggggactatgctgatgggccctcagataaccctggtacag

SEQ ID NO: 102279 - DNA, 60 bp, Artificial
  Synthetic oligonucleotide
agtcaggtgatgttctaggtttcttgggtggggtggcttgacttcccggggcctggcttc

SEQ ID NO: 102280 - DNA, 60 bp, Artificial
  Synthetic oligonucleotide
caccttgcatgccttcaggaatgcctttttcaaagtatctgcattgccaatatcaggggt

SEQ ID NO: 102281 - DNA, 60 bp, Artificial
  Synthetic oligonucleotide
agtagatgagtaataagagccaggtgattccactctgtaaatatctttttttgcccactt

SEQ ID NO: 102282 - DNA, 60 bp, Artificial
  Synthetic oligonucleotide
gttataattatgcagtagttctactttttgatacatacggattttgactgttaagggtat

SEQ ID NO: 102283 - DNA, 60 bp, Artificial
  Synthetic oligonucleotide
ccaaggagttgagggcctaccaggagatcctgacatggtcaggtacatcaataagtttgg

SEQ ID NO: 102284 - DNA, 60 bp, Artificial
  Synthetic oligonucleotide
cttgactacacattcctgcagtttttctgtgaaatcatctacagacctaaagtagatgag

SEQ ID NO: 102285 - DNA, 60 bp, Artificial
  Synthetic oligonucleotide
cttcaaacacaactgtaaattgatcaattgccattcctaattcaaatgccagtctttcag

SEQ ID NO: 102286 - DNA, 60 bp, Artificial
  Synthetic oligonucleotide
ttaagggtatgtcatattcattacaggtaacaattccaggtgggaagatctgagtcacct

SEQ ID NO: 102287 - DNA, 60 bp, Artificial
  Synthetic oligonucleotide
aggccactaatgggtttattttctaggatgggacaccatgggagcccttctcacaatcct

SEQ ID NO: 102288 - DNA, 60 bp, Artificial
  Synthetic oligonucleotide
ccgcctaagggaaaccagtcccatccgcaggagtccctcaggacaagaaacaataggaac

SEQ ID NO: 102289 - DNA, 60 bp, Artificial
  Synthetic oligonucleotide
agggtggctccgcccagactccgcccatctctccgccccatctctccgcccagtctccgc

SEQ ID NO: 102290 - DNA, 60 bp, Artificial
  Synthetic oligonucleotide
agactccgcccatctctccgccccatctctccgcccagtctccgcctaagggaaaccagt

SEQ ID NO: 102291 - DNA, 60 bp, Artificial
  Synthetic oligonucleotide
atgcattgactttcttaagatgctggaggcaggagatgacgacatagataagtatgggtt

SEQ ID NO: 102292 - DNA, 60 bp, Artificial
  Synthetic oligonucleotide
tttcctcttttagggcgcgcctcggaggcctgtccactacttctgtagaacaggttggag

SEQ ID NO: 102293 - DNA, 58 bp, Artificial
  Synthetic oligonucleotide
tatcaggggttcctaagagccccctaagctcctcatattcctcagatgttaattccat

SEQ ID NO: 102294 - DNA, 60 bp, Artificial
  Synthetic oligonucleotide
gaaatggataaacaggttgaggaggtcagaatttaccaaggagttgagggcctaccagga

SEQ ID NO: 102295 - DNA, 60 bp, Artificial
  Synthetic oligonucleotide
ccccattgccagcatactcacatctttgtttaccaattccctgccacctgttactagcca

SEQ ID NO: 102296 - DNA, 60 bp, Artificial
  Synthetic oligonucleotide
ggcgtaggcccgctttgtaaagctgacaagctatatatcacagcagcagacatttgtggc

SEQ ID NO: 102297 - DNA, 60 bp, Artificial
  Synthetic oligonucleotide
ggaacatatacaggaggtgttagcactccacctgtgctgcagttcacaaataccgtgaca

SEQ ID NO: 102298 - DNA, 60 bp, Artificial
  Synthetic oligonucleotide
cccaggtacatgtctgtgactctcaggaagagactggtgaagaacccataccccattgcc

SEQ ID NO: 102299 - DNA, 60 bp, Artificial
  Synthetic oligonucleotide
ctgactcagccaaatgaccaacagcaatttagaggccttcccaggtacatgtctgtgact

SEQ ID NO: 102300 - DNA, 60 bp, Artificial
  Synthetic oligonucleotide
cctggggcagaaactatttctagatttgtgtacagtattgatccttttcgctgggcctca

SEQ ID NO: 102301 - DNA, 60 bp, Artificial
  Synthetic oligonucleotide
cattataggcctcctgaggttttagaactcccttggcttgtaggaagctcacagtacatt

SEQ ID NO: 102302 - DNA, 60 bp, Artificial
  Synthetic oligonucleotide
gtgctaggtctccgtacaggaccagacagcacaaccacaattgagctgtttttgaaccca

SEQ ID NO: 102303 - DNA, 60 bp, Artificial
  Synthetic oligonucleotide
gacaaacctgtactctggtttacataattactatagacagctcccccctctaaatccccc

SEQ ID NO: 102304 - DNA, 60 bp, Artificial
  Synthetic oligonucleotide
gaagctatcctcactggagaggccttcactactgccgaactacttcaagcccatattgca

SEQ ID NO: 102305 - DNA, 60 bp, Artificial
  Synthetic oligonucleotide
gctgttctttggaagcaaacagctcagattttaactaaaggtaggccactaatgggttta

SEQ ID NO: 102306 - DNA, 60 bp, Artificial
  Synthetic oligonucleotide
ttcctcagccctttatcccagtacttggaagcacagcactcctagtgcgaaccttaatca

SEQ ID NO: 102307 - DNA, 60 bp, Artificial
  Synthetic oligonucleotide
gcaaagcatatcttctgttcttcctacagcttttattggtgttgctgctacagagggagc

SEQ ID NO: 102308 - DNA, 60 bp, Artificial
  Synthetic oligonucleotide
tcatatctaatctcctttttgctaacacagtatcacaggcctgattacatatggttttct

SEQ ID NO: 102309 - DNA, 60 bp, Artificial
  Synthetic oligonucleotide
ggccctgccacctttgcactaataattcatttctagttaaggttttcatatctaatctcc

SEQ ID NO: 102310 - DNA, 60 bp, Artificial
  Synthetic oligonucleotide
atggttttctgagttttgctgtcctgaaacagtaaagcatttaaggtgtggtctttggta

SEQ ID NO: 102311 - DNA, 60 bp, Artificial
  Synthetic oligonucleotide
gcgtctgggattgtcacatactttacatgcttcaggtgcagttgtaaattctaaatataa

SEQ ID NO: 102312 - DNA, 60 bp, Artificial
  Synthetic oligonucleotide
ctaaatataatgccattaataaaagggggtctgtacatttaatgctgcaagcaaattcag

SEQ ID NO: 102313 - DNA, 60 bp, Artificial
  Synthetic oligonucleotide
ctgcttcttctggattaaaatcatgctcctttaacccaccaggcaaactttcctcaataa

SEQ ID NO: 102314 - DNA, 60 bp, Artificial
  Synthetic oligonucleotide
ctgcttcttctggattaaaatcatgctcctttaacccacctggcaaactttcctcaataa

SEQ ID NO: 102315 - DNA, 60 bp, Artificial
  Synthetic oligonucleotide
ttcatgcttcatcctcagtaagcacagcaagcatatgcagttagtagacattttctttgc

SEQ ID NO: 102316 - DNA, 60 bp, Artificial
  Synthetic oligonucleotide
ttcgtgcttcatcctcagtaagcacagcaagcaaatgcagttagtagacatactttttgc

SEQ ID NO: 102317 - DNA, 60 bp, Artificial
  Synthetic oligonucleotide
ttcatgcttcatcctcagtaagcacagcaagcatatgcaattagtagacattttctttgc

SEQ ID NO: 102318 - DNA, 60 bp, Artificial
  Synthetic oligonucleotide
ttcatgcttcatcctcagtaagcacagcaagcatatgcagttagtagacattttctttac

SEQ ID NO: 102319 - DNA, 60 bp, Artificial
  Synthetic oligonucleotide
gcttgactaagaaactggtgtagatcagaaggaaagtctttagggtcttctacctttctc

SEQ ID NO: 102320 - DNA, 60 bp, Artificial
  Synthetic oligonucleotide
cctcagaaaaagcctccacacccttactacttctaagcaagggtggaggctgaggcggcc

SEQ ID NO: 102321 - DNA, 60 bp, Artificial
  Synthetic oligonucleotide
aggcctcagaaaaagcctccacacccttactacttgagagaaagggtggaggcagaggcg

SEQ ID NO: 102322 - DNA, 60 bp, Artificial
  Synthetic oligonucleotide
acaaaggccatggttctgcgccagctgtcacgacaggcttctgtgaaacttggtaaaacc

SEQ ID NO: 102323 - DNA, 60 bp, Artificial
  Synthetic oligonucleotide
ggtgccaatcaaagaattgctcctcaatggatgttgcctttgcttctaggcctgtacggg

SEQ ID NO: 102324 - DNA, 60 bp, Artificial
  Synthetic oligonucleotide
ggtgctaatcaaagaactgctcctcaatggatgttgcctttgcttctaggcctgtacggg

SEQ ID NO: 102325 - DNA, 60 bp, Artificial
  Synthetic oligonucleotide
caggaggtgctaatcaaagaactgctcctcaatggatgttgcctttgcttctaggcctgt

SEQ ID NO: 102326 - DNA, 60 bp, Artificial
  Synthetic oligonucleotide
tttgcttctaggcctgtacgggactgtaacacctgctcttgaagcatatgaagatgcccc

SEQ ID NO: 102327 - DNA, 60 bp, Artificial
  Synthetic oligonucleotide
gaaccaacctcagagctatgccatgctccaaaatcaggctgatgggctacctttacatcc

SEQ ID NO: 102328 - DNA, 60 bp, Artificial
  Synthetic oligonucleotide
ggctgatgggctacctttacatcctgctccatctttttatacagagtattcattctcttc

SEQ ID NO: 102329 - DNA, 60 bp, Artificial
  Synthetic oligonucleotide
gcttgactaaggaatgcatgcaaatcaggaggaaagtctttagggtcttctacctttctc

SEQ ID NO: 102330 - DNA, 60 bp, Artificial
  Synthetic oligonucleotide
gcttgactaagaaactggtgtagatcagagggaaagtctttagggtcttctacctttctc

SEQ ID NO: 102331 - DNA, 60 bp, Artificial
  Synthetic oligonucleotide
tcagaggttatttcaggccatggtgctgcgccggctgtcacgccaggcctccgttaaggt

SEQ ID NO: 102332 - DNA, 60 bp, Artificial
  Synthetic oligonucleotide
tatttcaggccatggtgctgcgccggctgtcacgccaggcctccgttaaggttcgtaggt

SEQ ID NO: 102333 - DNA, 60 bp, Artificial
  Synthetic oligonucleotide
accaagttcctctttcagaggttatttcaggccatggtgctgcgccggctgtcacgccag

SEQ ID NO: 102334 - DNA, 60 bp, Artificial
  Synthetic oligonucleotide
agttcctctttcagaggttatttcaggccatggtgctgcgccggctgtcacgccaggcct

SEQ ID NO: 102335 - DNA, 60 bp, Artificial
  Synthetic oligonucleotide
ctaaccaagttcctctttcagaggttatttcaggccatggtgctgcgccggctgtcacgc

SEQ ID NO: 102336 - DNA, 60 bp, Artificial
  Synthetic oligonucleotide
aaccaagttcctctttcagaggttatttcaggccatggtgctgcgccggctgtcacgcca

SEQ ID NO: 102337 - DNA, 60 bp, Artificial
  Synthetic oligonucleotide
tttcagaggttatttcaggccatggtgctgcgccggctgtcacgccaggcctccgttaag

SEQ ID NO: 102338 - DNA, 50 bp, Artificial
  Synthetic oligonucleotide
caggtccatgggtgctgctttaacactgttgggggacctaattgctactg

SEQ ID NO: 102339 - DNA, 60 bp, Artificial
  Synthetic oligonucleotide
gttcctctttcagaggttatttcaggccatggtgctgcgccggctgtcacgccaggcctc

SEQ ID NO: 102340 - DNA, 60 bp, Artificial
  Synthetic oligonucleotide
ctttcagaggttatttcaggccatggtgctgcgccggctgtcacgccaggcctccgttaa

SEQ ID NO: 102341 - DNA, 60 bp, Artificial
  Synthetic oligonucleotide
tggtgctgcgccggctgtcacgccaggcctccgttaaggttcgtaggtcatggactgaaa

SEQ ID NO: 102342 - DNA, 60 bp, Artificial
  Synthetic oligonucleotide
cctcatttcaaaggttatttcaggccatggtgctgcgccggctgtcacgccaggcctctg

SEQ ID NO: 102343 - DNA, 60 bp, Artificial
  Synthetic oligonucleotide
tagacagtgcaaccaagcaactccagccatccattcttctatatcagcagagcctgcaga

SEQ ID NO: 102344 - DNA, 60 bp, Artificial
  Synthetic oligonucleotide
tgtgaaaaacccctacccaatttcctttttgttaagtgaccttattaacagaaggaccca

SEQ ID NO: 102345 - DNA, 60 bp, Artificial
  Synthetic oligonucleotide
catggtgctgcgccggctgtcacgccaggcctccgttaaggttcgtaggtcatggactga

SEQ ID NO: 102346 - DNA, 60 bp, Artificial
  Synthetic oligonucleotide
ttcaggccatggtgctgcgccggctgtcacgccaggcctccgttaaggttcgtaggtcat

SEQ ID NO: 102347 - DNA, 60 bp, Artificial
  Synthetic oligonucleotide
aaggtacctaaccaagttcctctttcagaggttatttcaggccatggtgctgcgccggct

SEQ ID NO: 102348 - DNA, 60 bp, Artificial
  Synthetic oligonucleotide
gaaggtacctaaccaagttcctctttcagaggttatttcaggccatggtgctgcgccggc

SEQ ID NO: 102349 - DNA, 60 bp, Artificial
  Synthetic oligonucleotide
gctggatttgcagctttactgcaaactgtgactggtgtgagcgctgttgctcaagtaggg

SEQ ID NO: 102350 - DNA, 60 bp, Artificial
  Synthetic oligonucleotide
gctatagctggatttgcagctttactgcaaactgtgactggtgtgagcgctgttgctcaa

SEQ ID NO: 102351 - DNA, 60 bp, Artificial
  Synthetic oligonucleotide
gctggatttgcagctttactgcaaactgtgactggtgtgagcgctgttgctcaagtgggg

SEQ ID NO: 102352 - DNA, 60 bp, Artificial
  Synthetic oligonucleotide
gctggatttgctgctttactacaaactgtgactggtgtgagcgctgttgctcaagtggga

SEQ ID NO: 102353 - DNA, 60 bp, Artificial
  Synthetic oligonucleotide
cagtgcaaccaagcaactccagccatccattcttctatatcagcagagcctgcagagcca

SEQ ID NO: 102354 - DNA, 60 bp, Artificial
  Synthetic oligonucleotide
ggatttaaggaagaagcaaatacctcagttgcatcccagaagcctccaaagtcaggttga

SEQ ID NO: 102355 - DNA, 60 bp, Artificial
  Synthetic oligonucleotide
ggaagaagcaaatacctcagttgcatcccagaagcctccaaagtcaggttgatgagcata

SEQ ID NO: 102356 - DNA, 60 bp, Artificial
  Synthetic oligonucleotide
aagaagcaaatacctcagttgcatcccagaagcctccaaagtcaggttgatgagcatatt

SEQ ID NO: 102357 - DNA, 60 bp, Artificial
  Synthetic oligonucleotide
agcaaatacctcagttgcatcccagaagcctccaaagtcaggttgatgagcatattttac

SEQ ID NO: 102358 - DNA, 60 bp, Artificial
  Synthetic oligonucleotide
agcaaatacctcagttgcatcccagaagcctccaaaatcaggttgatgagcatatttcac

SEQ ID NO: 102359 - DNA, 58 bp, Artificial
  Synthetic oligonucleotide
caaatacctcagttgcatcccagaagcctccaaagtcaggttgatgagcatattttac

SEQ ID NO: 102360 - DNA, 60 bp, Artificial
  Synthetic oligonucleotide
aatttttttaggcctcagaaaaagcctccacacccttactacttctaagcaagggtggag

SEQ ID NO: 102361 - DNA, 53 bp, Artificial
  Synthetic oligonucleotide
gttgtacgggactgtaacacctgctcttgaagcatatgaagatggccccaacc

SEQ ID NO: 102362 - DNA, 60 bp, Artificial
  Synthetic oligonucleotide
atgcttatgtacctttacagggacatcggcgccgtccctatgaccgtcagaaccgcttcg

SEQ ID NO: 102363 - DNA, 59 bp, Artificial
  Synthetic oligonucleotide
acggggacctgactccagagtggcggtaccagcttaaggaaaggctcaatgtcccaaaa

SEQ ID NO: 102364 - DNA, 57 bp, Artificial
  Synthetic oligonucleotide
gtcccaaaaaggaaaaggaagctgcccacgacctcagcaggtacctcgcctcctagt

SEQ ID NO: 102365 - DNA, 60 bp, Artificial
  Synthetic oligonucleotide
gagaggctcattcgccttttacacctactgctgcacctgggtcgcagcctgctggatctc

SEQ ID NO: 102366 - DNA, 60 bp, Artificial
  Synthetic oligonucleotide
caggagatgacaggccaaaccatagaacagcaaacccccccaggaggtgcaatgcaacga

SEQ ID NO: 102367 - DNA, 60 bp, Artificial
  Synthetic oligonucleotide
gactccgcctatcgtcccatattacgtgccgctccataaaagggaggcgtacgtgacctt

SEQ ID NO: 102368 - DNA, 60 bp, Artificial
  Synthetic oligonucleotide
aggatattacgccctagcaacaggatgtctactccagcgcgagatccaaacacggcgggc

SEQ ID NO: 102369 - DNA, 60 bp, Artificial
  Synthetic oligonucleotide
cgtaaagtcaggtccagatagtataacaaccatagaggcataccttcaaccgcggcctgg

SEQ ID NO: 102370 - DNA, 60 bp, Artificial
  Synthetic oligonucleotide
ttagcccgtttagcactccgaatcacgagctgcgcgcaccagggcctggagaggctcatt

SEQ ID NO: 102371 - DNA, 60 bp, Artificial
  Synthetic oligonucleotide
attggacaggcgctaagtgccccatccctgatagcggcgtcagtcaaggcctttgcagga

SEQ ID NO: 102372 - DNA, 60 bp, Artificial
  Synthetic oligonucleotide
tagaagcattcataggggaattggtactgcaggactttagcgttgctgaaatattcgacg

SEQ ID NO: 102373 - DNA, 60 bp, Artificial
  Synthetic oligonucleotide
gctgtacataatatcaatccattagcatgggcccaatcgttgtatgaacaagtaggccaa

SEQ ID NO: 102374 - DNA, 60 bp, Artificial
  Synthetic oligonucleotide
tgcaggagaccccgtcgcagccggcaacaatatggccctacaggtctggagagaccaaat

SEQ ID NO: 102375 - DNA, 60 bp, Artificial
  Synthetic oligonucleotide
gctgtaatacatcaaatcgaggagcgtacaacagccctgattgtgtaccaaagtaggggt

SEQ ID NO: 102376 - DNA, 60 bp, Artificial
  Synthetic oligonucleotide
cggtgggctgtgctaatcgtttatatattgcaagtaacaatagggcatcggtacagtcaa

SEQ ID NO: 102377 - DNA, 60 bp, Artificial
  Synthetic oligonucleotide
ccacttcgaacttaaggttttcaattaccgttagaaattcggccctgagatcggcgctga

SEQ ID NO: 102378 - DNA, 60 bp, Artificial
  Synthetic oligonucleotide
taatcaataggtatgccaagagggtttccggcttcgttattaggcgctgctccagcacac

SEQ ID NO: 102379 - DNA, 60 bp, Artificial
  Synthetic oligonucleotide
tggtaatgattcctggaggaaatatttgtgacaccttattttggtgtttccgttcgaggt

SEQ ID NO: 102380 - DNA, 60 bp, Artificial
  Synthetic oligonucleotide
aacgtcctcgaacagaaccatgaactgatcgatagcgcatcctagttcgaattgcagtcg

SEQ ID NO: 102381 - DNA, 60 bp, Artificial
  Synthetic oligonucleotide
cgtcgatatacgcgtcggtttttctagctgaagcacgagcaacgcgatcccagtccaatg

SEQ ID NO: 102382 - DNA, 60 bp, Artificial
  Synthetic oligonucleotide
ccacaacattcatatcaatactgcattcctccgggtccaggcctggcacatctagcaggg

SEQ ID NO: 102383 - DNA, 60 bp, Artificial
  Synthetic oligonucleotide
gaaggtagcatagccgctctcttcaggttcgggatcggagtcctctagggtctcatctgc

SEQ ID NO: 102384 - DNA, 60 bp, Artificial
  Synthetic oligonucleotide
tttcctcatcccctcctttgtcgggatggtacttcagtgccgtgcgacgataggcagtct

SEQ ID NO: 102385 - DNA, 60 bp, Artificial
  Synthetic oligonucleotide
tgtgctggtgtcgtgggtggtcgtcgatatgtgtcgacctcttgcgcttcaccgtgtcct

SEQ ID NO: 102386 - DNA, 60 bp, Artificial
  Synthetic oligonucleotide
atctgcagccgttgcggttacaggtaggcacaggagctcggtcaatctgcgcagagaagc

SEQ ID NO: 102387 - DNA, 60 bp, Artificial
  Synthetic oligonucleotide
ggatggcctctaccccattgagtgctggtgcccagaccctgctaagaatgagaacactag

SEQ ID NO: 102388 - DNA, 60 bp, Artificial
  Synthetic oligonucleotide
aaaatggggttgggcccctatgcaagggcgatggcttgttcctctcagctgcggatgtgg

SEQ ID NO: 102389 - DNA, 60 bp, Artificial
  Synthetic oligonucleotide
gtgcccgaccctgcttatgtgggaggctgtcagtgttaaaactgaggttgttggagtgtc

SEQ ID NO: 102390 - DNA, 60 bp, Artificial
  Synthetic oligonucleotide
ccccaaagctccccgctaaatagactagacgcacgatgttttatatgccactctgtttat

SEQ ID NO: 102391 - DNA, 60 bp, Artificial
  Synthetic oligonucleotide
actgtgtaccctgcacccctaattgggcctggggaaggagaacgacgtgaaacagcacag

SEQ ID NO: 102392 - DNA, 60 bp, Artificial
  Synthetic oligonucleotide
cccctatcctgtatctggtttgctaaactccttgttcaatgacctgatgccccgtatgac

SEQ ID NO: 102393 - DNA, 60 bp, Artificial
  Synthetic oligonucleotide
ccccgtatgactggtcaaagcatgcagggctctgatgcacaggtggaggaggttcgtgtg

SEQ ID NO: 102394 - DNA, 60 bp, Artificial
  Synthetic oligonucleotide
tggaggaggttcgtgtgtatgagggtatggaagggctggctcccgagattgacatgcccc

SEQ ID NO: 102395 - DNA, 60 bp, Artificial
  Synthetic oligonucleotide
tacccctactgctaccacccctgaggcttctcctgctgctcctactaccgagtccaccga

SEQ ID NO: 102396 - DNA, 60 bp, Artificial
  Synthetic oligonucleotide
cgaaccgtccgaatcgcggccggctcgctaagtagctgcactaaggtatgggagctatca

SEQ ID NO: 102397 - DNA, 60 bp, Artificial
  Synthetic oligonucleotide
cacggcaagcacttctgtccctccttcacagcctaactcgcctacccctactgctaccac

SEQ ID NO: 102398 - DNA, 60 bp, Artificial
  Synthetic oligonucleotide
caggcagacgtagatgatctgaaggagacagtgtatgcggcaggcactagcacggcaagc

SEQ ID NO: 102399 - DNA, 60 bp, Artificial
  Synthetic oligonucleotide
tgcggcaggcactagcacggcaagcacttctgtccctccttcacagcctaactcgcctac

SEQ ID NO: 102400 - DNA, 60 bp, Artificial
  Synthetic oligonucleotide
gcgcgcgaaacgtaacaatgcctaacggaacgcctaccctaaacaggcccttagcccgtt

SEQ ID NO: 102401 - DNA, 60 bp, Artificial
  Synthetic oligonucleotide
ctaccggctgtgtcgggcagagttgaggcctttcgtaggtatcacgaggtcgcacaagga

SEQ ID NO: 102402 - DNA, 60 bp, Artificial
  Synthetic oligonucleotide
gtatgggagctatcatttcggctatagctggtctgttcgaactaggagcattgggtggcc

SEQ ID NO: 102403 - DNA, 60 bp, Artificial
  Synthetic oligonucleotide
atgcgcaacgatatgtccctttatcccgaagtgctcataaaggtgggccttaagttgcgg

SEQ ID NO: 102404 - DNA, 60 bp, Artificial
  Synthetic oligonucleotide
ggcaatcagggcagctctgcacggagcgtggggttagtaaataagcatctacctctgggg

SEQ ID NO: 102405 - DNA, 60 bp, Artificial
  Synthetic oligonucleotide
cacgttggacattaacaacagcggccgtagaaacatatcagacactaaaaagctactatg

SEQ ID NO: 102406 - DNA, 60 bp, Artificial
  Synthetic oligonucleotide
agacgctcatcccttgtcatggtcgctgaccggaaacgtttttctgcaagctcagcatcc

SEQ ID NO: 102407 - DNA, 60 bp, Artificial
  Synthetic oligonucleotide
cacagcatccacagcacattggcataggcgtttttgatccttgatgtgcagaaatagtga

SEQ ID NO: 102408 - DNA, 60 bp, Artificial
  Synthetic oligonucleotide
agctgttacaaaatcatcaattgcctcagtttcaccatctaagagttcctgaatgttacg

SEQ ID NO: 102409 - DNA, 60 bp, Artificial
  Synthetic oligonucleotide
ccctgtacacagtgccagtatggcagcagccacggtggtcttacccgtattcactggacc

SEQ ID NO: 102410 - DNA, 60 bp, Artificial
  Synthetic oligonucleotide
ataaaaacaagggaagtgctgagcaatcgttacataacatgcattccaaataagggaatg

SEQ ID NO: 102411 - DNA, 60 bp, Artificial
  Synthetic oligonucleotide
aggccttatatcctgtttgcgtctctcgttaacgctaaaataggtttgcatgcacttttt

SEQ ID NO: 102412 - DNA, 60 bp, Artificial
  Synthetic oligonucleotide
accttgtgttctcattttttgctggatctggatgccagatttcaactggatacattccgt

SEQ ID NO: 102413 - DNA, 60 bp, Artificial
  Synthetic oligonucleotide
ggagaggtataggccctctcctttacagaggggcccaactccattttcatctaggagcac

SEQ ID NO: 102414 - DNA, 60 bp, Artificial
  Synthetic oligonucleotide
ctgcaggacgggtggagctgttgtgcctccagtgtaattgccaaagtaccttgtgttctc

SEQ ID NO: 102415 - DNA, 60 bp, Artificial
  Synthetic oligonucleotide
ggcacctctgttgattgcatctatggctgactgaggagcattagaaaccacccaccgggt

SEQ ID NO: 102416 - DNA, 60 bp, Artificial
  Synthetic oligonucleotide
ccccagctcatccccccccctatcattcccagggcgggtctgagtccatgggagggtctg

SEQ ID NO: 102417 - DNA, 60 bp, Artificial
  Synthetic oligonucleotide
ccaatggaggatctgtatttggacatcctaccggaggaacaagtaccccagctcatcccc

SEQ ID NO: 102418 - DNA, 59 bp, Artificial
  Synthetic oligonucleotide
aggaccagttaattcaggaaagacaggcctagcagccgcgcttattagcctgttagggg

SEQ ID NO: 102419 - DNA, 60 bp, Artificial
  Synthetic oligonucleotide
ccctgctcctagtgactttcctagcagccttactgggtatttgtctcatgctatttattc

SEQ ID NO: 102420 - DNA, 60 bp, Artificial
  Synthetic oligonucleotide
gctcccttctatgcgattaaagagtgctctcctctgtggtggattcagacctagttgcct

SEQ ID NO: 102421 - DNA, 60 bp, Artificial
  Synthetic oligonucleotide
cagacgagccagaagaacagaaagcagtagactggattatggtagcagactttgcactag

SEQ ID NO: 102422 - DNA, 60 bp, Artificial
  Synthetic oligonucleotide
gccttgaacaaacaactgcagccagggatgggagtggctaatctagataatctcagggac

SEQ ID NO: 102423 - DNA, 60 bp, Artificial
  Synthetic oligonucleotide
tttgagcttggtgtggcacaggaccagtttgtggtctgttttgaagatgtaaagggtcaa

SEQ ID NO: 102424 - DNA, 60 bp, Artificial
  Synthetic oligonucleotide
ctctcaacataaattgccctgcagataaacttgcttttgagcttggtgtggcacaggacc

SEQ ID NO: 102425 - DNA, 60 bp, Artificial
  Synthetic oligonucleotide
taccacaaacagtatgggcccggtttcacatggtgttggatttcacctgcaaaccccatc

SEQ ID NO: 102426 - DNA, 60 bp, Artificial
  Synthetic oligonucleotide
ccacccaccgggtgttttcaagtagccttgctaggccatccaggaatgtatgtgtctgtc

SEQ ID NO: 102427 - DNA, 60 bp, Artificial
  Synthetic oligonucleotide
ggtcacaactctttccaccctgtgtgtgtacaatgaatgaatacctcctaccacaaacag

SEQ ID NO: 102428 - DNA, 60 bp, Artificial
  Synthetic oligonucleotide
gggcccggtttcacatggtgttggatttcacctgcaaaccacatctggcccaagcacttg

SEQ ID NO: 102429 - DNA, 60 bp, Artificial
  Synthetic oligonucleotide
ccatggtatcaacgccatatttctatttacagtagggacctcttcgttgtgtaggtaccg

SEQ ID NO: 102430 - DNA, 60 bp, Artificial
  Synthetic oligonucleotide
caggtgtctagtgcttggagagtgtttttgtcttgaatgttacatgcaatggtttggaac

SEQ ID NO: 102431 - DNA, 60 bp, Artificial
  Synthetic oligonucleotide
cccgagatgtgctgaacctgtatgcagacttcattgcaagcatgcctatagactggctgg

SEQ ID NO: 102432 - DNA, 60 bp, Artificial
  Synthetic oligonucleotide
gtaggtaccgctgtattcctagagaaatagtagaggcaccttgaactgtctgcatcagcc

SEQ ID NO: 102433 - DNA, 60 bp, Artificial
  Synthetic oligonucleotide
ggggaacatttaaaactgaagtatacaatctgagaatgaatctaggaggaaccggcttcc

SEQ ID NO: 102434 - DNA, 60 bp, Artificial
  Synthetic oligonucleotide
ccggcttccaggtaagaaggctacatgcggatgggtggaatctaagtaccaaagacacct

SEQ ID NO: 102435 - DNA, 60 bp, Artificial
  Synthetic oligonucleotide
actgacaaacccatacacctcctctgaaatacccatagttgctagggctgtctccgaact

SEQ ID NO: 102436 - DNA, 60 bp, Artificial
  Synthetic oligonucleotide
gactggctggacctggatgtgcacagcgtgtataatccaagtaagtatcaagagggcggg

SEQ ID NO: 102437 - DNA, 60 bp, Artificial
  Synthetic oligonucleotide
cagctaatccctcgatgaggtctactagaatagtcagtgcggctcccattttgaaaattc

SEQ ID NO: 102438 - DNA, 60 bp, Artificial
  Synthetic oligonucleotide
agttgcctataatagtcacttagtgatgagtaccctgagctcgctgatgaggcacctctg

SEQ ID NO: 102439 - DNA, 60 bp, Artificial
  Synthetic oligonucleotide
tatcaccgtacagccctagaattaaaggaagcatccagtcaggagtgactctttggtggg

SEQ ID NO: 102440 - DNA, 59 bp, Artificial
  Synthetic oligonucleotide
ccccggtacaggttcagtcccatcatacactctaacctcctctacctgggtgttctccc

SEQ ID NO: 102441 - DNA, 60 bp, Artificial
  Synthetic oligonucleotide
attaatttccaggaaatacagtctttgtttttccaaagcggtcaacatagcgcgtcatat

SEQ ID NO: 102442 - DNA, 60 bp, Artificial
  Synthetic oligonucleotide
aacctcctctacctgggtgttctccccttccatgggttggccctgcacttgggggagcat

SEQ ID NO: 102443 - DNA, 60 bp, Artificial
  Synthetic oligonucleotide
ctcctgggaagtatatatcgagaagggctggatcccgccatggtatcaacgccatatttc

SEQ ID NO: 102444 - DNA, 60 bp, Artificial
  Synthetic oligonucleotide
tgcctcccacatttgtagggtgtcacaggtgaggtcctcattgagcatgggaagctggag

SEQ ID NO: 102445 - DNA, 54 bp, Artificial
  Synthetic oligonucleotide
ggggagcatgttgttgaaaagggaacttatgagggaggccatgggatagggatt

SEQ ID NO: 102446 - DNA, 60 bp, Artificial
  Synthetic oligonucleotide
ctgatgtagccaaattaatccctctgctccaaccatagtattgccctccctctgttaggc

SEQ ID NO: 102447 - DNA, 60 bp, Artificial
  Synthetic oligonucleotide
tacattccgtccttatccagcttggccttgctaattggattcaggacttggtctttgttg

SEQ ID NO: 102448 - DNA, 60 bp, Artificial
  Synthetic oligonucleotide
cttctgagcaacccgacctattctgttatgaggagccactcctttcccccaacccgagtc

SEQ ID NO: 102449 - DNA, 60 bp, Artificial
  Synthetic oligonucleotide
accccagctaccagtcgccgcctaagactgccgagtcttctgagcaacccgacctattct

SEQ ID NO: 102450 - DNA, 60 bp, Artificial
  Synthetic oligonucleotide
gctaaaagaacttggctcctccgatgctctactctacctagcaggtgtcgcttggtacca

SEQ ID NO: 102451 - DNA, 60 bp, Artificial
  Synthetic oligonucleotide
gaactgaggagagcggccacagtccactacacgatgactactggtcattcagctatggaa

SEQ ID NO: 102452 - DNA, 60 bp, Artificial
  Synthetic oligonucleotide
ggaagtgactaactgaccgcagctggccgtgcgacatcctcttttaattagttgctaggc

SEQ ID NO: 102453 - DNA, 55 bp, Artificial
  Synthetic oligonucleotide
ggctgtctccgaactcattacaccctccaaagtcagagctgtaatttcgccatca

SEQ ID NO: 102454 - DNA, 60 bp, Artificial
  Synthetic oligonucleotide
cacctcctctgaaatacccatggttgctagagctgtctccgaactcattacaccctccaa

SEQ ID NO: 102455 - DNA, 60 bp, Artificial
  Synthetic oligonucleotide
aaacccttgtgttgctgagcccgatgacagcatatccccggacccccccagaactcctgt

SEQ ID NO: 102456 - DNA, 60 bp, Artificial
  Synthetic oligonucleotide
gagcagagctgacaaagaaaggctgctagaacttctaaaacttcccagacagctatgggg

SEQ ID NO: 102457 - DNA, 60 bp, Artificial
  Synthetic oligonucleotide
gaggcaacttgtcaaaacaggactggcgccttggaggcgctgtggggccacccaaattga

SEQ ID NO: 102458 - DNA, 60 bp, Artificial
  Synthetic oligonucleotide
ggccatggccccaatcatgtactacatttagagcatgagcaaactgattaactcctggga

SEQ ID NO: 102459 - DNA, 60 bp, Artificial
  Synthetic oligonucleotide
ttcctgcacaaccatttgccacacatatcttcccacggaatgaagtaggccatggcccca

SEQ ID NO: 102460 - DNA, 60 bp, Artificial
  Synthetic oligonucleotide
tccaggaatgtatgtgtctgtcttacagttagttctcttacagctccttccagtctgtgt

SEQ ID NO: 102461 - DNA, 60 bp, Artificial
  Synthetic oligonucleotide
gcacccagacaaaggtggaagccatgccttaatgcaggaattgaacagtctctggggaac

SEQ ID NO: 102462 - DNA, 60 bp, Artificial
  Synthetic oligonucleotide
cctgaaacagcccagcgagcattttcaaagtactgtgataatgtctcactaagagaagta

SEQ ID NO: 102463 - DNA, 60 bp, Artificial
  Synthetic oligonucleotide
aggtctgcggcccagttggctgggtcaatgtagttcacaaatcttgcgaatggtagggct

SEQ ID NO: 102464 - DNA, 60 bp, Artificial
  Synthetic oligonucleotide
gtggatggcctaaatttcttgctaattgtctctgttgaattggagacaggcctaactggg

SEQ ID NO: 102465 - DNA, 60 bp, Artificial
  Synthetic oligonucleotide
tctgttgaattggagacaggcctaactgggaataataactttctagtccatgatacaaag

SEQ ID NO: 102466 - DNA, 60 bp, Artificial
  Synthetic oligonucleotide
ggaccagttctgacatcaagcacttggattcctccaacaactactgagttttgggacttc

SEQ ID NO: 102467 - DNA, 60 bp, Artificial
  Synthetic oligonucleotide
cacaaatcttgcgaatggtagggctcctgggaacagtatgtcaagatctgggtaccagat

SEQ ID NO: 102468 - DNA, 60 bp, Artificial
  Synthetic oligonucleotide
gtaatcccaataataagggtaaagggcagcggaaacggctgctcctacagttaaggcccc

SEQ ID NO: 102469 - DNA, 60 bp, Artificial
  Synthetic oligonucleotide
tcaagcacttggattcctccaacaactactgagttttgggacttctgagggcttaggcct

SEQ ID NO: 102470 - DNA, 60 bp, Artificial
  Synthetic oligonucleotide
ccaactgggagtgagatctccgtagagccctaaaagtaaagggagcatccagtcaggggc

SEQ ID NO: 102471 - DNA, 60 bp, Artificial
  Synthetic oligonucleotide
tgggacttctgagggcttaggccttggttttgcgacgcttcgctttttgactgtgggagc

SEQ ID NO: 102472 - DNA, 54 bp, Artificial
  Synthetic oligonucleotide
caaagacgggtagatatggcacaaatgacaagaaatgaacagttagccgctagg

SEQ ID NO: 102473 - DNA, 60 bp, Artificial
  Synthetic oligonucleotide
atccattatattgtcatttatgtgtagaaccctattctgtcctgcaagagagtattgaag

SEQ ID NO: 102474 - DNA, 60 bp, Artificial
  Synthetic oligonucleotide
ttctttgatgccccagaggatgccgcaaaaaatgtgaattgggtagcaatatctgaatat

SEQ ID NO: 102475 - DNA, 60 bp, Artificial
  Synthetic oligonucleotide
atagcaataaattcttgagcagcagccaacacagtttaagcagactcatttttttccaag

SEQ ID NO: 102476 - DNA, 59 bp, Artificial
  Synthetic oligonucleotide
atgcggggcatgtcctgcgtgtagtcagctgaaacagtgatattgtcactaaagccata

SEQ ID NO: 102477 - DNA, 60 bp, Artificial
  Synthetic oligonucleotide
aagaggctggaggcctttgcccctaccttcactgcagaaatagagaggcttttgagaggc

SEQ ID NO: 102478 - DNA, 60 bp, Artificial
  Synthetic oligonucleotide
ttttccaagggtataagaggctggaggcctttgcccctaccttcactgcagaaagagaga

SEQ ID NO: 102479 - DNA, 60 bp, Artificial
  Synthetic oligonucleotide
gctgccccatgcgaggattgaggaaggcctcaatttgggttatactatcaggaccagttc

SEQ ID NO: 102480 - DNA, 60 bp, Artificial
  Synthetic oligonucleotide
tggaagtaatattgagtgcgcaatcctcctatacaattagcatgtttatggcaggcattg

SEQ ID NO: 102481 - DNA, 60 bp, Artificial
  Synthetic oligonucleotide
ccttcctcctcttaatagcaataaattcttgagcagcagccaacacagtttaagcagact

SEQ ID NO: 102482 - DNA, 60 bp, Artificial
  Synthetic oligonucleotide
cttcctgccattgccgtgtccgggcaatcagccatatccgggcaatctgcccggtcttgg

SEQ ID NO: 102483 - DNA, 60 bp, Artificial
  Synthetic oligonucleotide
gggcatcatctcactggaaaaggtattcagcaatgagctcacagggtagggatttgcaca

SEQ ID NO: 102484 - DNA, 60 bp, Artificial
  Synthetic oligonucleotide
cggtatctgatcatgtcaggatctccaggtagacgttccactccatcataaatcctgacc

SEQ ID NO: 102485 - DNA, 60 bp, Artificial
  Synthetic oligonucleotide
gccaacaatgtcagcagaagcaaggtacaagccatctcccttacaaagcggccccactcc

SEQ ID NO: 102486 - DNA, 60 bp, Artificial
  Synthetic oligonucleotide
cgaaggtgcattttgttattctgctgtgttctgaagccaacaatgtcagcagaagcaagg

SEQ ID NO: 102487 - DNA, 60 bp, Artificial
  Synthetic oligonucleotide
gctgaaatatctaggcaagccacgaaagtgcattttgttattctgctgtgttctgaagcc

SEQ ID NO: 102488 - DNA, 60 bp, Artificial
  Synthetic oligonucleotide
ggatgtacccttctgcttctcctcatttatcattgtgatcttgatgactttgctgaaagc

SEQ ID NO: 102489 - DNA, 60 bp, Artificial
  Synthetic oligonucleotide
ctcccttacaaagcggccccactccattttcattcaaaaggattgtggtagtagtgttag

SEQ ID NO: 102490 - DNA, 60 bp, Artificial
  Synthetic oligonucleotide
gaagcaaggtacaagccatctcccttacaaagcggccccactccattttcattcaaaagg

SEQ ID NO: 102491 - DNA, 60 bp, Artificial
  Synthetic oligonucleotide
agaatagaatgcttacaaatcactttaaattccacaaggaacatcatgaaaatgcccttt

SEQ ID NO: 102492 - DNA, 60 bp, Artificial
  Synthetic oligonucleotide
aagcttggaagccgattcaatttctgagttcaaatctgagcacgctttgccaaaaagtga

SEQ ID NO: 102493 - DNA, 60 bp, Artificial
  Synthetic oligonucleotide
gaggcaaggtcgaatacttcagcaagtacagcaagaaaagcgcccattacctagaaagca

SEQ ID NO: 102494 - DNA, 60 bp, Artificial
  Synthetic oligonucleotide
ggtaatagaggcaaggtcgaatacttcagcaagtacagcaagaaaagcgcccattaccta

SEQ ID NO: 102495 - DNA, 60 bp, Artificial
  Synthetic oligonucleotide
gcctgtgggaaattaggaaacagtgaggttaaagccgcaaaagcttgaggagttacttct

SEQ ID NO: 102496 - DNA, 60 bp, Artificial
  Synthetic oligonucleotide
tacagattggataaactgcaattttgagaattgcaataaatgcctttattgccgcctatg

SEQ ID NO: 102497 - DNA, 60 bp, Artificial
  Synthetic oligonucleotide
cagataagggaggaagcgatgaattgtctcaagaattgatcagtctctatagaagacttg

SEQ ID NO: 102498 - DNA, 60 bp, Artificial
  Synthetic oligonucleotide
ggcctggaaccatgtcattttgcgtttcaaagttggatgcagataattgctttaacacct

SEQ ID NO: 102499 - DNA, 60 bp, Artificial
  Synthetic oligonucleotide
gagaaaggcttttctaagagcctgcaaaattgtgcatccagataagggaggaagcgatga

SEQ ID NO: 102500 - DNA, 60 bp, Artificial
  Synthetic oligonucleotide
tgttacttcaaatgaatatttcattccctttactttaagagtcagattttgcaagaaact

SEQ ID NO: 102501 - DNA, 60 bp, Artificial
  Synthetic oligonucleotide
cctttgacagatcggatgatgagcaagaaccacagcccgacgactcagcacccatcatcc

SEQ ID NO: 102502 - DNA, 50 bp, Artificial
  Synthetic oligonucleotide
aggatcacaggctaccccacctaaaaaaaaggcaaaaatggattctccaa

SEQ ID NO: 102503 - DNA, 60 bp, Artificial
  Synthetic oligonucleotide
cagctttaggagctgcttgaagggcagccacaccagcagggtatttgcacctgtagtttt

SEQ ID NO: 102504 - DNA, 60 bp, Artificial
  Synthetic oligonucleotide
gccaaaggcttatgcaccttttaaaactccctatggagcaatatgggaatttccctttaa

SEQ ID NO: 102505 - DNA, 60 bp, Artificial
  Synthetic oligonucleotide
ttggcagggtcggggctccatgcttcaattgggaactttccatcagcggttagcttagct

SEQ ID NO: 102506 - DNA, 60 bp, Artificial
  Synthetic oligonucleotide
ctttccatcagcggttagcttagcttttaatttagggtcaaggacctgagcagctttagg

SEQ ID NO: 102507 - DNA, 60 bp, Artificial
  Synthetic oligonucleotide
ctctgaaatttctgtttcaacatatttggaaatgagacaatgttgtctagagggaaggta

SEQ ID NO: 102508 - DNA, 60 bp, Artificial
  Synthetic oligonucleotide
aaaggattgtggtagtagtgttagtaatttgcaggacaggtggggtttgaaggccaccag

SEQ ID NO: 102509 - DNA, 60 bp, Artificial
  Synthetic oligonucleotide
gcctcattgctgggaatatcagggacagtaaccttcctggccaaattatccggtatctga

SEQ ID NO: 102510 - DNA, 60 bp, Artificial
  Synthetic oligonucleotide
gacaatttgttagagaggaaaccccgacaacctctgtcttacaacttatagcttcccaca

SEQ ID NO: 102511 - DNA, 60 bp, Artificial
  Synthetic oligonucleotide
ccacataagtattgtatcacatgtcatgtcctcattcaacattgggagggaaattttggc

SEQ ID NO: 102512 - DNA, 60 bp, Artificial
  Synthetic oligonucleotide
gggtgtcagaattaggaggaaaatcacaaccaacctctgaactattccatgtaccaaaat

SEQ ID NO: 102513 - DNA, 60 bp, Artificial
  Synthetic oligonucleotide
cacctcccttgtcaggatgaaacatcagagcggccctgcggtaagccgctttaatatctt

SEQ ID NO: 102514 - DNA, 60 bp, Artificial
  Synthetic oligonucleotide
atcctcagctgtagcattagtggacggccccggcacatcctcctcctctgatgagctgag

SEQ ID NO: 102515 - DNA, 60 bp, Artificial
  Synthetic oligonucleotide
gagctgagctcctcatcacagaaaagatcctcctctggcttatattctcttgcccgttcc

SEQ ID NO: 102516 - DNA, 60 bp, Artificial
  Synthetic oligonucleotide
ctcacagaaagccctctttagagcaaggtactcaggcattaggcactgcttccggccagc

SEQ ID NO: 102517 - DNA, 60 bp, Artificial
  Synthetic oligonucleotide
gcatagttaaattgcctgtctgaacaactgtcagcactcagctgactcacagtaatttca

SEQ ID NO: 102518 - DNA, 60 bp, Artificial
  Synthetic oligonucleotide
gtacagtgtttacaacagaagttaattaatgtagacacccgggtagagttagcaagtatg

SEQ ID NO: 102519 - DNA, 60 bp, Artificial
  Synthetic oligonucleotide
ggaggcatgtggaggcagggacagcatttcccgtaattctgcaatttctctaaagctcat

SEQ ID NO: 102520 - DNA, 60 bp, Artificial
  Synthetic oligonucleotide
caggcagctctccacagcatctggaagagggatgtcacggggtcccttgggtggggtgct

SEQ ID NO: 102521 - DNA, 57 bp, Artificial
  Synthetic oligonucleotide
ccaggttgtcccccagcatccgtagatgtatacccctataattagagtttgtcaggg

SEQ ID NO: 102522 - DNA, 60 bp, Artificial
  Synthetic oligonucleotide
tggggtgctgaaggtcttgccctggccctcctgtgtgtgtggtggtgatccaggttgtcc

SEQ ID NO: 102523 - DNA, 60 bp, Artificial
  Synthetic oligonucleotide
aaacagcattttaggggacttccacggtatttttctgtttcccttaggaaaaggctagtt

SEQ ID NO: 102524 - DNA, 60 bp, Artificial
  Synthetic oligonucleotide
gctggatgagaatggggttggccctctctgtaagggagatggcttatatttatcctgtgt

SEQ ID NO: 102525 - DNA, 60 bp, Artificial
  Synthetic oligonucleotide
ttctggtctttcagctgcaaaaacaatttagcattgttatgatgtatcccatggtcatcc

SEQ ID NO: 102526 - DNA, 60 bp, Artificial
  Synthetic oligonucleotide
cccggggctaaaagcccggcttgataaagatggtgcttatcccgtggaatgctggtgccc

SEQ ID NO: 102527 - DNA, 60 bp, Artificial
  Synthetic oligonucleotide
agcattatcccaaaaatgcagggccagcctatggtgggggataactctcaggttgaggaa

SEQ ID NO: 102528 - DNA, 60 bp, Artificial
  Synthetic oligonucleotide
cagacataagccgttttgttgacaggtttggggagcagcatactcacatgcctagcaact

SEQ ID NO: 102529 - DNA, 60 bp, Artificial
  Synthetic oligonucleotide
gccagattcaggggaaactgtttaccaacagcccgttccgggaggagcaaaccaacgggc

SEQ ID NO: 102530 - DNA, 60 bp, Artificial
  Synthetic oligonucleotide
caacgggcagcccctgactggatgctgcctctaattctaggcctctacggcactgtgtac

SEQ ID NO: 102531 - DNA, 60 bp, Artificial
  Synthetic oligonucleotide
agcgggccagatggactgttgtagaagggccaggagaggcttatagaggcttaatagagt

SEQ ID NO: 102532 - DNA, 50 bp, Artificial
  Synthetic oligonucleotide
ccccggttccagagaaagcaggcccggacggagcggccgcaccccatgcc

SEQ ID NO: 102533 - DNA, 58 bp, Artificial
  Synthetic oligonucleotide
ccccaaagaacctctaacacaacctagtaccgggtcttcctctactgacctcagcccc

SEQ ID NO: 102534 - DNA, 60 bp, Artificial
  Synthetic oligonucleotide
gtagaacctaacacttgcatgcttcccaggactcagaagggcctccttctgcagcagggg

SEQ ID NO: 102535 - DNA, 60 bp, Artificial
  Synthetic oligonucleotide
cgtgcgggcggaaggtaatccctaacaacctctgaacttaaacaaaggacagccgggatg

SEQ ID NO: 102536 - DNA, 60 bp, Artificial
  Synthetic oligonucleotide
ggatgggcactgataatggctttagccaggcagtgactgttgcaacaagcctgaacccgg

SEQ ID NO: 102537 - DNA, 60 bp, Artificial
  Synthetic oligonucleotide
ggcctgtttaaaataaaccgcgcgcgggctgtataaggagagacgtgcgggcggaaggta

SEQ ID NO: 102538 - DNA, 60 bp, Artificial
  Synthetic oligonucleotide
tcctgccagagcaagcacagaaaaaagaggaaggtgcctctgtcagcattccattgccct

SEQ ID NO: 102539 - DNA, 57 bp, Artificial
  Synthetic oligonucleotide
ttttgtaagctgattaactgcgcgcgctgcataataaaatttgccttccacccacac

SEQ ID NO: 102540 - DNA, 60 bp, Artificial
  Synthetic oligonucleotide
tgagctgccattggaacatttaaactgggctcggggccaggaaatgagtgacttaccgtg

SEQ ID NO: 102541 - DNA, 60 bp, Artificial
  Synthetic oligonucleotide
ccctggaatacacagggtctctgtgaaagtctattatttccctgcatctgaccttcacag

SEQ ID NO: 102542 - DNA, 60 bp, Artificial
  Synthetic oligonucleotide
atcctgctgtcaaactcaatttttagaatatccaggacattagcacatttgccagtgatc

SEQ ID NO: 102543 - DNA, 60 bp, Artificial
  Synthetic oligonucleotide
ggtcaacaaaccccacccgtgcttccattcacaaacactgtaaccacagtgttgctggat

SEQ ID NO: 102544 - DNA, 60 bp, Artificial
  Synthetic oligonucleotide
ggcagctggttaatatactcatcctcaggctgcccttttacatcctcaaacagcaccatc

SEQ ID NO: 102545 - DNA, 60 bp, Artificial
  Synthetic oligonucleotide
ggaaaaatttgagaaaccttgttctggtgttttctttccagatttactggcactgccccc

SEQ ID NO: 102546 - DNA, 60 bp, Artificial
  Synthetic oligonucleotide
tcctttacaagcatatggagcagagcaatagcacagcaaaattcatctgtagcccgtttg

SEQ ID NO: 102547 - DNA, 60 bp, Artificial
  Synthetic oligonucleotide
gggtggggaacccttggaattgcagggttgtgtacaaaactggagcacaacttacccaag

SEQ ID NO: 102548 - DNA, 60 bp, Artificial
  Synthetic oligonucleotide
taggattaccaatgcttaatgaggacatgactacccctgaaatactcatgtgggaggcag

SEQ ID NO: 102549 - DNA, 60 bp, Artificial
  Synthetic oligonucleotide
gttatggggtgggaagaccaattgagggtttaaattgccatatgtttgcagtgggtgggg

SEQ ID NO: 102550 - DNA, 60 bp, Artificial
  Synthetic oligonucleotide
cctggaactgttcattcctactcatagtctggctcttgaacctcttctctgcaaggacac

SEQ ID NO: 102551 - DNA, 60 bp, Artificial
  Synthetic oligonucleotide
caccaccacgggatggccattgtagagtggaggccttatgttgactatttgttcccagga

SEQ ID NO: 102552 - DNA, 60 bp, Artificial
  Synthetic oligonucleotide
cttgcctctgcaggatacctactttcaaaagagaagaaccatcaccaccacgggatggcc

SEQ ID NO: 102553 - DNA, 60 bp, Artificial
  Synthetic oligonucleotide
ctgcaattggggaggctgctgcagctaccgggtttactatagaggctgtgcttgctggtg

SEQ ID NO: 102554 - DNA, 60 bp, Artificial
  Synthetic oligonucleotide
cagagggcttccctgggaacaaaaaaccacagaaactggagggaacgggcaaccgaggca

SEQ ID NO: 102555 - DNA, 60 bp, Artificial
  Synthetic oligonucleotide
ccccaaaagtgccccggaaacaccacctggataaacaaccctaccacagcacccgtctct

SEQ ID NO: 102556 - DNA, 60 bp, Artificial
  Synthetic oligonucleotide
ccctgacagcccgcatgcttcagatgatgatatggacactagcccctactatgaaggatc

SEQ ID NO: 102557 - DNA, 60 bp, Artificial
  Synthetic oligonucleotide
gatgattgaggttaattccctgactcacagataagaaaattgtggttagagagggaaatt

SEQ ID NO: 102558 - DNA, 60 bp, Artificial
  Synthetic oligonucleotide
cttccacccacactgttatatgtctcctgtattttctggctcataaaagcatgattcacc

SEQ ID NO: 102559 - DNA, 60 bp, Artificial
  Synthetic oligonucleotide
gcccagacttcagcacaatatgtgtatgatcttattgccagaactgcagagcgggccaga

SEQ ID NO: 102560 - DNA, 60 bp, Artificial
  Synthetic oligonucleotide
ctccttataacagaaggcagaagaaggcttggagaagccactagtgctgcagcccagact

SEQ ID NO: 102561 - DNA, 59 bp, Artificial
  Synthetic oligonucleotide
gtgaagatttgaggttttctaattttgccctggcatgcaggaattccaattcacttaca

SEQ ID NO: 102562 - DNA, 60 bp, Artificial
  Synthetic oligonucleotide
ctgaaatgttgcaggatcaatggctgaagctcttgcagcttggagttgctggttataagg

SEQ ID NO: 102563 - DNA, 60 bp, Artificial
  Synthetic oligonucleotide
ctaggtggccttaatacttaattatatcggaaaatatctcagggcagcttacctaatgag

SEQ ID NO: 102564 - DNA, 60 bp, Artificial
  Synthetic oligonucleotide
gactccttatctccatcaaggtaacctggaccctttgaaataattcattgagccgctgca

SEQ ID NO: 102565 - DNA, 60 bp, Artificial
  Synthetic oligonucleotide
cctgctagaaatcccatccagctaagacaagaatatagaaacagaggagagcctcctcca

SEQ ID NO: 102566 - DNA, 60 bp, Artificial
  Synthetic oligonucleotide
ggaagatcctcccgaactgcatctcgatccatagggctatattgaaaggtggtaggccca

SEQ ID NO: 102567 - DNA, 60 bp, Artificial
  Synthetic oligonucleotide
tgggggggtgtcttcatcacttgaactactcattgtttctgagcaaaacaaatcatcaca

SEQ ID NO: 102568 - DNA, 60 bp, Artificial
  Synthetic oligonucleotide
ggggtgcaggtgtaggagctttgagaacaagatccatcacaggaacttggggtctcttct

SEQ ID NO: 102569 - DNA, 60 bp, Artificial
  Synthetic oligonucleotide
ggttctaaaattctcatcccaaaaaaaccaagctacctgggaagaagaggatccacattg

SEQ ID NO: 102570 - DNA, 60 bp, Artificial
  Synthetic oligonucleotide
tttttgtacctgcatgctgcttttttagcagacatactatacaattacaattagctctta

SEQ ID NO: 102571 - DNA, 60 bp, Artificial
  Synthetic oligonucleotide
ccataagaacggtccagtagcgaaaagaggtgaaatcctcaggaaagccaaaccatacta

SEQ ID NO: 102572 - DNA, 60 bp, Artificial
  Synthetic oligonucleotide
attggtcaagctacaagggctgtggctgtcagaagtaccaatgaactgagtcacaccttg

SEQ ID NO: 102573 - DNA, 60 bp, Artificial
  Synthetic oligonucleotide
gccaagcaacaataagacatcagaaatgttggcctcatttgcaaagttacatatttcttg

SEQ ID NO: 102574 - DNA, 60 bp, Artificial
  Synthetic oligonucleotide
cattggcatgatgtgctttgtgataattatagtggaatttgtgctgctttttttcacact

SEQ ID NO: 102575 - DNA, 60 bp, Artificial
  Synthetic oligonucleotide
ttttcacacttgccacatttgccaggttccactgcaaaatctatgtagatgccaagcaac

SEQ ID NO: 102576 - DNA, 60 bp, Artificial
  Synthetic oligonucleotide
cgtggtttacttaaggtcttatataactctagacgtttaacaacagctttacaatgaata

SEQ ID NO: 102577 - DNA, 60 bp, Artificial
  Synthetic oligonucleotide
gctaccacgtcacttttttccaggctttgtttaagataagccttaggttttaaatgcaga

SEQ ID NO: 102578 - DNA, 60 bp, Artificial
  Synthetic oligonucleotide
ggaactcaaacatggatacacccggtttgttctcttccaacaacttaaaacgtggtttac

SEQ ID NO: 102579 - DNA, 60 bp, Artificial
  Synthetic oligonucleotide
cagaatatttcagggaacagaaggactcccaggggaccctgaccttaatagatatgttga

SEQ ID NO: 102580 - DNA, 60 bp, Artificial
  Synthetic oligonucleotide
taaattttgtcagcaccagactgttctccctgtatcaaatgatatgtgaggctgaatgca

SEQ ID NO: 102581 - DNA, 60 bp, Artificial
  Synthetic oligonucleotide
tccattgcaccactttttcttgcacttttggagtaaaagaatccacaggattgtaccata

SEQ ID NO: 102582 - DNA, 56 bp, Artificial
  Synthetic oligonucleotide
ggagttgggcctctttgtaaaggggacaaactgtttctgtcttgtgctgatattgc

SEQ ID NO: 102583 - DNA, 60 bp, Artificial
  Synthetic oligonucleotide
tgccccaaattcagcgacaaccaatcgaacgggtctcaggacaagtggaagaagtcagaa

SEQ ID NO: 102584 - DNA, 60 bp, Artificial
  Synthetic oligonucleotide
catttcctgataagtgacaaacaactgttctgcggtctagttgctaggtggcgcttagca

SEQ ID NO: 102585 - DNA, 60 bp, Artificial
  Synthetic oligonucleotide
agggaaggtcaaaccgcaagaagagaactgggttatgatgaacctaggtctggtcagtat

SEQ ID NO: 102586 - DNA, 60 bp, Artificial
  Synthetic oligonucleotide
gcaacctacttagcaacctcaggtagaggaagttactcatttacatcagcgccgccgaga

SEQ ID NO: 102587 - DNA, 60 bp, Artificial
  Synthetic oligonucleotide
ctcatttacatcagcgccgccgagaagcccgccttttttaaattagcccgccatttggta

SEQ ID NO: 102588 - DNA, 60 bp, Artificial
  Synthetic oligonucleotide
gggctttgaccagtgggcctgtccatatttattccactgtccaagattattacaggtatc

SEQ ID NO: 102589 - DNA, 60 bp, Artificial
  Synthetic oligonucleotide
aagtactggatttacacttgatgctatccttactggggaggcttttgctgctgtaagtac

SEQ ID NO: 102590 - DNA, 60 bp, Artificial
  Synthetic oligonucleotide
gggaggcttttgctgctgtaagtactgaggcagcctggctcattgaaatagaagcagtgg

SEQ ID NO: 102591 - DNA, 60 bp, Artificial
  Synthetic oligonucleotide
gtcacaccttggctcaaattgctgaaaatgctaggtgggctttgaccagtgggcctgtcc

SEQ ID NO: 102592 - DNA, 60 bp, Artificial
  Synthetic oligonucleotide
gaagcagtggatcttgctggacttagtactctagaggccttgtctcttactggacttaca

SEQ ID NO: 102593 - DNA, 51 bp, Artificial
  Synthetic oligonucleotide
ggggagccaccaccccaccagttatgcagttcactaattctgtcacaactg

SEQ ID NO: 102594 - DNA, 60 bp, Artificial
  Synthetic oligonucleotide
actcattcatagtcataataaccgggggaaaaatttgactccttttgtttacatgtttct

SEQ ID NO: 102595 - DNA, 60 bp, Artificial
  Synthetic oligonucleotide
acattatactgctccaggaggggcacaccaaagagtaactcaagactggatgcttcctct

SEQ ID NO: 102596 - DNA, 60 bp, Artificial
  Synthetic oligonucleotide
gtcatcctcagggtgtgtccccgtgcagggcactacctatcacatgtttgctgttggagg

SEQ ID NO: 102597 - DNA, 60 bp, Artificial
  Synthetic oligonucleotide
gagccgctgcattttagctgaatctcctcctttatcaggatggtagagcttggagacatt

SEQ ID NO: 102598 - DNA, 60 bp, Artificial
  Synthetic oligonucleotide
aaaaactagccttaaaatcaactacaattttagatttttccacagttttatacagttgcc

SEQ ID NO: 102599 - DNA, 60 bp, Artificial
  Synthetic oligonucleotide
tggttgctgcaggactgacaacttttggatactccaaacaagtaccagttgttaatatgg

SEQ ID NO: 102600 - DNA, 53 bp, Artificial
  Synthetic oligonucleotide
gctgctaggacctggtcaactgcttgttggcaaatgtttttttgggctctact

SEQ ID NO: 102601 - DNA, 60 bp, Artificial
  Synthetic oligonucleotide
ggtgtaccaggccacacccgccatccatcttagaatttctatctcaccatgcaggaagtc

SEQ ID NO: 102602 - DNA, 60 bp, Artificial
  Synthetic oligonucleotide
agcacagccaagttcaaaggacagtttatctgcaggacaatttatatttagagctttgcc

SEQ ID NO: 102603 - DNA, 60 bp, Artificial
  Synthetic oligonucleotide
ctgtgggcacagaactatggaggcatttgatgagacaggccactttgcaaattggtcaag

SEQ ID NO: 102604 - DNA, 60 bp, Artificial
  Synthetic oligonucleotide
taaatgcagatgaagagcaaatctaactcctatggtacgaggcaacaagtactcattcat

SEQ ID NO: 102605 - DNA, 60 bp, Artificial
  Synthetic oligonucleotide
aagattatttaccccttgacctggttgcaagtgcttatttaaggttatttggcccttcac

SEQ ID NO: 102606 - DNA, 60 bp, Artificial
  Synthetic oligonucleotide
cctatcacatgtttgctgttggaggacaccccctggaactccaaggcctagttgctagct

SEQ ID NO: 102607 - DNA, 60 bp, Artificial
  Synthetic oligonucleotide
ggacttacaacagagcagttttccctcctaagtgctatcccaacagctctcaacaatgcc

SEQ ID NO: 102608 - DNA, 60 bp, Artificial
  Synthetic oligonucleotide
acacccttccttgttattcagtagctgttattaaactccccctcctaaatgaagacatga

SEQ ID NO: 102609 - DNA, 60 bp, Artificial
  Synthetic oligonucleotide
gctcttgtgccttggtttcctcaagttgattatttgttcccgggatttacctcttttagc

SEQ ID NO: 102610 - DNA, 60 bp, Artificial
  Synthetic oligonucleotide
aacatgccctattcccgctcccgtccccaggctcctagtaaaaggaggagtagaggtgct

SEQ ID NO: 102611 - DNA, 60 bp, Artificial
  Synthetic oligonucleotide
ggatgcttcctctaattctaggtttatatggtgatataactcccacctcggaagtggagc

SEQ ID NO: 102612 - DNA, 60 bp, Artificial
  Synthetic oligonucleotide
tagctactacctgaatgctgtacttgactggggtgaatcattgtttcatgctgtgggcac

SEQ ID NO: 102613 - DNA, 60 bp, Artificial
  Synthetic oligonucleotide
caacatcttcggcaacaacacgggcgagctgatgacggtgatcaagaacaagaacaaggt

SEQ ID NO: 102614 - DNA, 60 bp, Artificial
  Synthetic oligonucleotide
tgaacgtcatcccgggcatctggaacacgtacgagatcttcggcatcgaggcggccaaga

SEQ ID NO: 102615 - DNA, 60 bp, Artificial
  Synthetic oligonucleotide
gccgtgggatgatgtcaaagattgtgcagaaatcatccgttgttatataccggatgagca

SEQ ID NO: 102616 - DNA, 60 bp, Artificial
  Synthetic oligonucleotide
gccgtgggatgatgtcaaggattgtgtagaaatcatccgttgttatataccggatgagca

SEQ ID NO: 102617 - DNA, 60 bp, Artificial
  Synthetic oligonucleotide
accgacggagcaaatagttgcggatcacattttaatcctaacaatagacatcacggatca

SEQ ID NO: 102618 - DNA, 60 bp, Artificial
  Synthetic oligonucleotide
ccggtggagatgaaagtgattaaaagttctctgtttgaagttatataccaagcctcattt

SEQ ID NO: 102619 - DNA, 60 bp, Artificial
  Synthetic oligonucleotide
caggatctcagagcagtataaacagcgattggacagattctagcggtgaaatatatgcta

SEQ ID NO: 102620 - DNA, 60 bp, Artificial
  Synthetic oligonucleotide
gcgtctgatctcttacaaggttcataccaacaatagtacggcaatctggtctcctcccct

SEQ ID NO: 102621 - DNA, 60 bp, Artificial
  Synthetic oligonucleotide
gagcgtaatctaattcttctggtgtagtaactctgttaacgtgatcgggccatacataac

SEQ ID NO: 102622 - DNA, 58 bp, Artificial
  Synthetic oligonucleotide
ttttgtagggctttagatacataaatctcttccttcgtcatagttgtaaaatccgcca

SEQ ID NO: 102623 - DNA, 60 bp, Artificial
  Synthetic oligonucleotide
ccagttccatccaaaggaaatcttgttttacagagcgctgatgaactcggcacaagacct

SEQ ID NO: 102624 - DNA, 60 bp, Artificial
  Synthetic oligonucleotide
ggtggaacattagcaattggcggtgccgggtctccaaaagctgcagttgctggattggct

SEQ ID NO: 102625 - DNA, 60 bp, Artificial
  Synthetic oligonucleotide
tgatccacctgtaagagatgcattcccaatataacacctagcattatcagatacccaaaa

SEQ ID NO: 102626 - DNA, 60 bp, Artificial
  Synthetic oligonucleotide
cggtttaacgtacacagaaagtgacgtaatggcatgaacttcagatacgacaacagtgga

SEQ ID NO: 102627 - DNA, 60 bp, Artificial
  Synthetic oligonucleotide
cataaaacatggagcagatgttgacggattagatgcggagatgtctactccattatgtac

SEQ ID NO: 102628 - DNA, 66 bp, Artificial
  Synthetic oligonucleotide
ccgtagcaaccataatagcgctatcttttaaccaactatcatttgtacacttaaacattttaactg

SEQ ID NO: 102629 - DNA, 60 bp, Artificial
  Synthetic oligonucleotide
gttacgttcacggtgtaaaatccatgtattgcgacaaaccagacgatataagcaatggtt

SEQ ID NO: 102630 - DNA, 60 bp, Artificial
  Synthetic oligonucleotide
ttagtacttccaattgccgatctaaacttaacaccgctaatacacaacgtagccgtaaaa

SEQ ID NO: 102631 - DNA, 60 bp, Artificial
  Synthetic oligonucleotide
aacgtcgttaatcataattgtgtctccatcgctcgaaaatgctaaattttcttccgcatc

SEQ ID NO: 102632 - DNA, 60 bp, Artificial
  Synthetic oligonucleotide
gggttcacctccccaatattctgcggcttttgctaatagaccgacgattgcacaggcttc

SEQ ID NO: 102633 - DNA, 60 bp, Artificial
  Synthetic oligonucleotide
gccggtatatctttgctccgttttgtcatcaaatatgccattatcatcgctccgcttctg

SEQ ID NO: 102634 - DNA, 61 bp, Artificial
  Synthetic oligonucleotide
ctgccactgatatccaatttatccgatgaaacaatgaaacaaaagattttacatatcgtgg

SEQ ID NO: 102635 - DNA, 60 bp, Artificial
  Synthetic oligonucleotide
aaatacttctatggagaaatatcattattagtagcctctgatcccgaccaagacgcgata

SEQ ID NO: 102636 - DNA, 60 bp, Artificial
  Synthetic oligonucleotide
gcgctggaagtatattagactattctgacattaatcttattatcgcgggtgcaaaagtta

SEQ ID NO: 102637 - DNA, 60 bp, Artificial
  Synthetic oligonucleotide
ttcttcttcctctttggtaaataattccatatcacttactccagctcccgcattaaagtc

SEQ ID NO: 102638 - DNA, 60 bp, Artificial
  Synthetic oligonucleotide
cttgctttggaaacgcatatatttattgtaaaggtaacatgatggaattagggtccggcg

SEQ ID NO: 102639 - DNA, 60 bp, Artificial
  Synthetic oligonucleotide
cagataataccggaagacgatggaaacttggaaatataataggtaaaggagggttcggtt

SEQ ID NO: 102640 - DNA, 60 bp, Artificial
  Synthetic oligonucleotide
gccctcgtgcaattttgggatgtgctcaagcaaaacaagctatatcatgtttgagttccg

SEQ ID NO: 102641 - DNA, 59 bp, Artificial
  Synthetic oligonucleotide
aaaatctctctgaaatgagtggaaaatggccattgttgataagtacggatcaggatatt

SEQ ID NO: 102642 - DNA, 60 bp, Artificial
  Synthetic oligonucleotide
ggtgggtctgtaaatatatgggcaattgttccgctaagtgcttctgtattttatgatgga

SEQ ID NO: 102643 - DNA, 60 bp, Artificial
  Synthetic oligonucleotide
gttcggctaaggcagatgcgcaattggatgccgttttgaaggctgctacagaaacttatg

SEQ ID NO: 102644 - DNA, 60 bp, Artificial
  Synthetic oligonucleotide
ccttgctcggagacaattccgttatgacaacacccgctacacagttttaaattcatgtta

SEQ ID NO: 102645 - DNA, 60 bp, Artificial
  Synthetic oligonucleotide
ggatggatacctgaaacgtccatatggagtagcagatttgctaacttagacgttaccgac

SEQ ID NO: 102646 - DNA, 60 bp, Artificial
  Synthetic oligonucleotide
ggggaccccatcctcttttcccgattatatttgggttgaccattccatgaatagcgtacc

SEQ ID NO: 102647 - DNA, 60 bp, Artificial
  Synthetic oligonucleotide
gtggttgtcaaaacacccatggtaagactcacgactagttactcaggcccacttaacgag

SEQ ID NO: 102648 - DNA, 60 bp, Artificial
  Synthetic oligonucleotide
ctatgtggcgccaatgatttaaacgctaaagctcctccagaaattatcattaataacgct

SEQ ID NO: 102649 - DNA, 60 bp, Artificial
  Synthetic oligonucleotide
gttgctgaagcagactatgactatctccgtatacaaacgtattttctagagcggccaatt

SEQ ID NO: 102650 - DNA, 60 bp, Artificial
  Synthetic oligonucleotide
ccataacagtctgctaataagtcagcggttgcgttttccagcgttaacgaattaatattt

SEQ ID NO: 102651 - DNA, 60 bp, Artificial
  Synthetic oligonucleotide
gaagaatcccattgtagcgcacctagttctcttattttatatcctccaatcattcttgct

SEQ ID NO: 102652 - DNA, 60 bp, Artificial
  Synthetic oligonucleotide
ctctagattactcgacgaacaacgatttgctattattcaaggaaaccaagatgcgctggt

SEQ ID NO: 102653 - DNA, 59 bp, Artificial
  Synthetic oligonucleotide
tacaatctttccaccatttgttaccgcttgcattatctgtgtttgttcattattcccga

SEQ ID NO: 102654 - DNA, 60 bp, Artificial
  Synthetic oligonucleotide
tcgtctacctctattgatccagccactacccattgatttacatcgtcgctaaatacctct

SEQ ID NO: 102655 - DNA, 60 bp, Artificial
  Synthetic oligonucleotide
gctatgagagaacaacgaaaaggaagagtgggtcgcgtaagtcccggaacctacatatac

SEQ ID NO: 102656 - DNA, 60 bp, Artificial
  Synthetic oligonucleotide
ttgtataagtgtttcctcattattttctagcacagaagttgcgtcggtcgctcccgcgtt

SEQ ID NO: 102657 - DNA, 60 bp, Artificial
  Synthetic oligonucleotide
gtcccaaatccacaagttaatttcccaatattgcttgaaaagatgtatttagaggcgacg

SEQ ID NO: 102658 - DNA, 60 bp, Artificial
  Synthetic oligonucleotide
tcctatgactcccgttaaacctatgttggctgatgtatgcgaatctctagaaaaggcaat

SEQ ID NO: 102659 - DNA, 60 bp, Artificial
  Synthetic oligonucleotide
acgaaagaacattggctagttgtttatgtgggtctacaaaacagtgtctcactttctttt

SEQ ID NO: 102660 - DNA, 60 bp, Artificial
  Synthetic oligonucleotide
tgcaaaccttcatccctacttattaattcattagaaaatgttaagccgggcattagtcct

SEQ ID NO: 102661 - DNA, 60 bp, Artificial
  Synthetic oligonucleotide
tttatttgatgttcacacggtatagattcaatctggacctcttcgcgccatgatttcggt

SEQ ID NO: 102662 - DNA, 60 bp, Artificial
  Synthetic oligonucleotide
gaagacgattccaattgcatatcaggtatcacatcgaatccggatcttccaactataggt

SEQ ID NO: 102663 - DNA, 60 bp, Artificial
  Synthetic oligonucleotide
ttccagattgatttacgaacggttcgaacacgaggcattttccaggagatgaaagtatcc

SEQ ID NO: 102664 - DNA, 60 bp, Artificial
  Synthetic oligonucleotide
ttactgaataccaaagttacagctgtatccaccgtattagaggatgcgcaagcggcatcc

SEQ ID NO: 102665 - DNA, 54 bp, Artificial
  Synthetic oligonucleotide
aaacgagccagtaatcttaccatgtcctcaaataaacacgatatcatccggata

SEQ ID NO: 102666 - DNA, 60 bp, Artificial
  Synthetic oligonucleotide
ggtaccgtcaaagatggtagactaggtgctatggatggagcactttgtaagacttgtggt

SEQ ID NO: 102667 - DNA, 60 bp, Artificial
  Synthetic oligonucleotide
acaaatcacgctgtcgcccgaatcctgacgctcccaacaatgcgcctcgacggcagcccc

SEQ ID NO: 102668 - DNA, 60 bp, Artificial
  Synthetic oligonucleotide
tggtgccctggcggatgttgaaactgtcgatgatgtggcggccctcttcgtcctgcatga

SEQ ID NO: 102669 - DNA, 60 bp, Artificial
  Synthetic oligonucleotide
tctcgcctctgctcaacccttacacgctcgccgttgccaatgcctgcttcgtcatacgca

SEQ ID NO: 102670 - DNA, 60 bp, Artificial
  Synthetic oligonucleotide
tgcgtgctctcctgcttgagccagtcgtagaagagcgcctcgtcctcgcccgcgttctcg

SEQ ID NO: 102671 - DNA, 60 bp, Artificial
  Synthetic oligonucleotide
ctgcgtagacctggtggaccggctcttcggcacctaccgagcactcttcgcgctgctgca

SEQ ID NO: 102672 - DNA, 60 bp, Artificial
  Synthetic oligonucleotide
gggaactcggcttctgctgcacacaccgcgagcaccactactgggaggacacgcgcacgc

SEQ ID NO: 102673 - DNA, 60 bp, Artificial
  Synthetic oligonucleotide
aaagaccgcattgacaccagggcgccggacgattcctccgcttgctcgctccgtgtttcg

SEQ ID NO: 102674 - DNA, 60 bp, Artificial
  Synthetic oligonucleotide
acagatctagggcgggacgacagtggcgtgtacgtagccttggcgcggaaagcaagcacg

SEQ ID NO: 102675 - DNA, 60 bp, Artificial
  Synthetic oligonucleotide
ccaggaggctgcccgccgcagcaccgaaaacatccaccaggtagcgcacgtcgtcgtcga

SEQ ID NO: 102676 - DNA, 60 bp, Artificial
  Synthetic oligonucleotide
cgttgcaggcgctcggacctagcaagcacgggtcggaaaagttcatcatgcgaggtgaga

SEQ ID NO: 102677 - DNA, 60 bp, Artificial
  Synthetic oligonucleotide
acatcgtgccgaagagcgtgtcagcagcgcgagcttgcccctcgtgtgagtcgccctgcc

SEQ ID NO: 102678 - DNA, 60 bp, Artificial
  Synthetic oligonucleotide
ttggcaaggacaacgaacggcggcagtggcacgagcggacgaacctccagcaatcgcgct

SEQ ID NO: 102679 - DNA, 60 bp, Artificial
  Synthetic oligonucleotide
tcgagatcatgctcacagccgcgtacgccgccaagccctacaacaaccaggaccagaacc

SEQ ID NO: 102680 - DNA, 60 bp, Artificial
  Synthetic oligonucleotide
gcgcgatcagtttcagcaggtagttctcgtccgacaggaccttgttggccgtcttcacca

SEQ ID NO: 102681 - DNA, 60 bp, Artificial
  Synthetic oligonucleotide
tagcgtgcggaagagcgacagcaggtacagtgtctttcccgagccgctgccgcccaccag

SEQ ID NO: 102682 - DNA, 60 bp, Artificial
  Synthetic oligonucleotide
ttacgctacagcagccgcagcccacgtgccagctcatagcccatgcgcagtgccttgtac

SEQ ID NO: 102683 - DNA, 60 bp, Artificial
  Synthetic oligonucleotide
tgctgggacgcatttgccgcgaaaccgagcagccgcgccgcactgtctacgttttcccta

SEQ ID NO: 102684 - DNA, 60 bp, Artificial
  Synthetic oligonucleotide
acctgcacacgcacttcaactgctacggctccatgggcaagcgcaggctcgacccgctac

SEQ ID NO: 102685 - DNA, 60 bp, Artificial
  Synthetic oligonucleotide
ggcgtccgttccgtcgtgtgtacgtgttctctcgtaagatggtcccttctcctagtgccg

SEQ ID NO: 102686 - DNA, 60 bp, Artificial
  Synthetic oligonucleotide
tgatccgaagctgagcgtcctggcccgcggcagtgcatacgaggcgcaacatgcatgagt

SEQ ID NO: 102687 - DNA, 60 bp, Artificial
  Synthetic oligonucleotide
gtggttgctgcagacgaagaccgggctaaagcggatcagctcgtcattgagagtgcggta

SEQ ID NO: 102688 - DNA, 60 bp, Artificial
  Synthetic oligonucleotide
ttccgagtaccaggcctatgacgacttccacagcacgcggcgcatgttccgcatgaccgt

SEQ ID NO: 102689 - DNA, 60 bp, Artificial
  Synthetic oligonucleotide
tgcccgcgccgcaaattccgtcccctctccggtcgccctccgccgtaaaagtgagagata

SEQ ID NO: 102690 - DNA, 60 bp, Artificial
  Synthetic oligonucleotide
agaagacaactgccaggagcaagccggggtcaaaagggtaaaaggcaagcacggcgaccg

SEQ ID NO: 102691 - DNA, 60 bp, Artificial
  Synthetic oligonucleotide
ttccaggaccccgcgaacctcttctacaagggctacttccccatcccgccgctgatcatc

SEQ ID NO: 102692 - DNA, 60 bp, Artificial
  Synthetic oligonucleotide
atggtgttcatccacggctcctccaccagcgccttcttgaccagcaccagcaccgtccag

SEQ ID NO: 102693 - DNA, 60 bp, Artificial
  Synthetic oligonucleotide
tgtgtccgcgtctgagcctgagattgcatctcccgcgcctttgctgcccgcaccctggtc

SEQ ID NO: 102694 - DNA, 60 bp, Artificial
  Synthetic oligonucleotide
aagtcccgcgacgaaatgtctcgaatgggaaacgcggccggaaacagcgccgggcaggat

SEQ ID NO: 102695 - DNA, 60 bp, Artificial
  Synthetic oligonucleotide
gctcacgctgtttggaattgtgctgctgttggccttcctcgcgtacctactcgccgtgtc

SEQ ID NO: 102696 - DNA, 60 bp, Artificial
  Synthetic oligonucleotide
ctcctgctccgtgaagaccgagagtagccaatgcaagaagtccgcgatcacgcctgtgcc

SEQ ID NO: 102697 - DNA, 60 bp, Artificial
  Synthetic oligonucleotide
tgttgctcaacggctgcgacttcttcccggggctggcggggctagctgtcactcgcgaca

SEQ ID NO: 102698 - DNA, 59 bp, Artificial
  Synthetic oligonucleotide
tacgcctgtgcccgcaccgctgccgacttcctctcccatgcccgtgcagttgcctgggg

SEQ ID NO: 102699 - DNA, 60 bp, Artificial
  Synthetic oligonucleotide
agagcagttcggccaggcggctgcccacgcccagcaccaccgcgcacaggttctctagca

SEQ ID NO: 102700 - DNA, 60 bp, Artificial
  Synthetic oligonucleotide
gcgcgcggctctgcctgatgccagactcggatcttcgcctcacgcttgcataccgacata

SEQ ID NO: 102701 - DNA, 60 bp, Artificial
  Synthetic oligonucleotide
tcttgccgtcgcgcatagtgccgtagacgattttgccgcagttggtcaccgcctgtacct

SEQ ID NO: 102702 - DNA, 60 bp, Artificial
  Synthetic oligonucleotide
tcgagctcttctcgcagcgggaggtagtagtacggcacggacccgggcgcggcaccagaa

SEQ ID NO: 102703 - DNA, 60 bp, Artificial
  Synthetic oligonucleotide
tcattccgatgccctggccgctacaacacgagcactttcgacgcggttggccgttttgtc

SEQ ID NO: 102704 - DNA, 60 bp, Artificial
  Synthetic oligonucleotide
acgagttcacggaggacaactttaccaccacgccgctgctgctggactacgtcacgccct

SEQ ID NO: 102705 - DNA, 60 bp, Artificial
  Synthetic oligonucleotide
agctggtccaggttcttcgccacgtacggcagcaggtcgcgcatgttgaaggggatctcg

SEQ ID NO: 102706 - DNA, 60 bp, Artificial
  Synthetic oligonucleotide
acacattgcgaggcaccgcccgcccgcgctcgacaacgacaggaacgcaccacggccgac

SEQ ID NO: 102707 - DNA, 60 bp, Artificial
  Synthetic oligonucleotide
acgtcgtccttgccaaaggccagctcgcacaggctcccgggcgcgtaactctctgcgcag

SEQ ID NO: 102708 - DNA, 60 bp, Artificial
  Synthetic oligonucleotide
cgctcctctttccaataacttgggtactagtctacttaacgaaggtgtttgagacgcgtg

SEQ ID NO: 102709 - DNA, 60 bp, Artificial
  Synthetic oligonucleotide
gcattacgcggtacaagcaccttcgttaagtagactagtacccaagttattggaaagagg

SEQ ID NO: 102710 - DNA, 60 bp, Artificial
  Synthetic oligonucleotide
tgagccagctgtcgctcacgcacttgaagaggcgcacggtgccgaagaggctgcagtaca

SEQ ID NO: 102711 - DNA, 60 bp, Artificial
  Synthetic oligonucleotide
tcgaagttgtgcccgttgaaggtgaccacgaagtccagcggcatctcgagcaggcgcttg

SEQ ID NO: 102712 - DNA, 60 bp, Artificial
  Synthetic oligonucleotide
ttcaacgtcccggtgctcaaggtgaagtcgtgtctgtgcagcttccaccccgactcggtg

SEQ ID NO: 102713 - DNA, 60 bp, Artificial
  Synthetic oligonucleotide
gaggacatcaacgcgctgcccttcgacgtgaagaagctcttctacctcaagttcaaggcc

SEQ ID NO: 102714 - DNA, 60 bp, Artificial
  Synthetic oligonucleotide
acctgcgccgcacgggcgactacaagccgctgttcagccgtctggggaacgacgagacct

SEQ ID NO: 102715 - DNA, 60 bp, Artificial
  Synthetic oligonucleotide
cttcgtgcgcctgatctcgtacttctacccctcggccgtgcagagcaacgtgaacctgat

SEQ ID NO: 102716 - DNA, 60 bp, Artificial
  Synthetic oligonucleotide
tcgatgagccggacgtcgtcctccgtgatgttcatgtagggaatgcagcggcagagcagc

SEQ ID NO: 102717 - DNA, 60 bp, Artificial
  Synthetic oligonucleotide
accatcgagaaccgcaagatctcgggcagcgtccgcgtgccgcagaactggtactacgac

SEQ ID NO: 102718 - DNA, 60 bp, Artificial
  Synthetic oligonucleotide
aagttcgtcttcgagcaccgcaacggcatgtccgagatcgacgcctccacagagtacacg

SEQ ID NO: 102719 - DNA, 60 bp, Artificial
  Synthetic oligonucleotide
cctgtgatggcggagaacttcttggacatgttgtacacgacggagttcttcctggtggcg

SEQ ID NO: 102720 - DNA, 60 bp, Artificial
  Synthetic oligonucleotide
tgccccttcccggactcctgggagaaggacttctacgtgccctgcggcaaggagatgctg

SEQ ID NO: 102721 - DNA, 60 bp, Artificial
  Synthetic oligonucleotide
tgtgcttccgcgacaagaagatggtgctgcacacgcccgggaaggtggacaactacttcc

SEQ ID NO: 102722 - DNA, 60 bp, Artificial
  Synthetic oligonucleotide
gagaccaacgagctcacctacctgctgggcatgatcgtgaagtactgctccatgaacgcc

SEQ ID NO: 102723 - DNA, 60 bp, Artificial
  Synthetic oligonucleotide
tcaaccgcatggtcatggagcagatgatcgggcgcgtgtgtcgcgagtcgcactcggacg

SEQ ID NO: 102724 - DNA, 60 bp, Artificial
  Synthetic oligonucleotide
tcgacgtggccaagctggactggagcaaggactgggagaagcgcgtgcaccgcgacgtga

SEQ ID NO: 102725 - DNA, 60 bp, Artificial
  Synthetic oligonucleotide
tctctccggctcgcagttctacttcgcgatgctggtggcgcgctcgcagtccacggacat

SEQ ID NO: 102726 - DNA, 60 bp, Artificial
  Synthetic oligonucleotide
gcgctgaacaccgagaagatagagcagatcaaggatgcgtacgcgcgctacctgcaggac

SEQ ID NO: 102727 - DNA, 60 bp, Artificial
  Synthetic oligonucleotide
acatcctcgccaaccacaagaaccgcggcacctgcaccgtgagcatccacgtgctgacca

SEQ ID NO: 102728 - DNA, 60 bp, Artificial
  Synthetic oligonucleotide
cagcactccggagtagtaagagctcaaggtctcgaatatgtccatttatctgaggagaaa

SEQ ID NO: 102729 - DNA, 60 bp, Artificial
  Synthetic oligonucleotide
ccaggatgaagatgtcgttgatggagaggaagctcagcccctccgtgccgcttagcgaga

SEQ ID NO: 102730 - DNA, 60 bp, Artificial
  Synthetic oligonucleotide
tacatgtgcaccaccgtgcgcaccgaccccagcaagccctggatcaagtccatctccaag

SEQ ID NO: 102731 - DNA, 56 bp, Artificial
  Synthetic oligonucleotide
acgcccaaccagcagaccttcttcaccaaggggctcagcccgcggatgcgacacac

SEQ ID NO: 102732 - DNA, 60 bp, Artificial
  Synthetic oligonucleotide
acgggatgcagatgcgctgcagacggtggaagatggagaggaagcccacgctgttgtagc

SEQ ID NO: 102733 - DNA, 60 bp, Artificial
  Synthetic oligonucleotide
tgatgtgcgtgcccagcgagaccttgtaggtgatgtcgcccttgacgcggtccatcttca

SEQ ID NO: 102734 - DNA, 60 bp, Artificial
  Synthetic oligonucleotide
gctcacgctaacgcggtaccccatggcgccgaagagcagcttcacgaagtccaggtagct

SEQ ID NO: 102735 - DNA, 60 bp, Artificial
  Synthetic oligonucleotide
cctgaacatgtattccgcgccctccacatggtgcatcgccatttggacgtttgaggccgt

SEQ ID NO: 102736 - DNA, 60 bp, Artificial
  Synthetic oligonucleotide
catccgccgctacgacacggtcgtagtagacgagatccacgagcacgaccagatgggcga

SEQ ID NO: 102737 - DNA, 60 bp, Artificial
  Synthetic oligonucleotide
cgctgaagcgcatcgactccgagttcctgcacccgtacgtgctgtacgcgcgcatcttcg

SEQ ID NO: 102738 - DNA, 60 bp, Artificial
  Synthetic oligonucleotide
tgcgcgaacttcctgcacgtggacctcaagcccgacaacgtgctcatcttcgacagctcg

SEQ ID NO: 102739 - DNA, 60 bp, Artificial
  Synthetic oligonucleotide
agcgctccatcttcatgtactccttcatgccgtcgctcatgatctccgcggtctccagcc

SEQ ID NO: 102740 - DNA, 60 bp, Artificial
  Synthetic oligonucleotide
gaggaaccggctgtcattgccgcggttctcgaaccagttcaaacatttcagctccatttc

SEQ ID NO: 102741 - DNA, 51 bp, Artificial
  Synthetic oligonucleotide
ctccgggtggatggtgggctggtagttgtacagcaggcgcggggaccagct

SEQ ID NO: 102742 - DNA, 60 bp, Artificial
  Synthetic oligonucleotide
tcacgttgatgttggagcagctcgggtactgcgacggcgtgagcgtgacggattcgatgg

SEQ ID NO: 102743 - DNA, 60 bp, Artificial
  Synthetic oligonucleotide
tgacgcggtccacggccgagcacaagaccagcttccacctcatcttcacggacgcgtaca

SEQ ID NO: 102744 - DNA, 60 bp, Artificial
  Synthetic oligonucleotide
aacaccggcgagctcatgatggtgatcaagaacaagacgcgcgtgcccttcctgctgctc

SEQ ID NO: 102745 - DNA, 60 bp, Artificial
  Synthetic oligonucleotide
tggacatggaccggagcacgttctccacgtcggagtcggacacgttgcagcagcagaggt

SEQ ID NO: 102746 - DNA, 60 bp, Artificial
  Synthetic oligonucleotide
gttgaagctgtccaggatgtgcccgccctcctcgtcctgcagcaccacgtagttcttcag

SEQ ID NO: 102747 - DNA, 60 bp, Artificial
  Synthetic oligonucleotide
acaaccgcaccgacgcggtcgcggacaacagcagctgccacttcttcagcaagacgccct

SEQ ID NO: 102748 - DNA, 60 bp, Artificial
  Synthetic oligonucleotide
ggacccctgcttctacgggactccgaaacggttcagcctcgcgcccgacgagtcgctgtt

SEQ ID NO: 102749 - DNA, 60 bp, Artificial
  Synthetic oligonucleotide
ggttcccgtaaatgcagacgttggggtacaggctgttgtagtcgaagatgagcacgtgct

SEQ ID NO: 102750 - DNA, 60 bp, Artificial
  Synthetic oligonucleotide
aagaagtacctctcggccatccgcgtggagctggtgaacctggtgcgcgtgcgctcgaaa

SEQ ID NO: 102751 - DNA, 55 bp, Artificial
  Synthetic oligonucleotide
tgagcgagggccactgcaggtggaaggcgaactcgtgcttgatgagcgaggccac

SEQ ID NO: 102752 - DNA, 60 bp, Artificial
  Synthetic oligonucleotide
ggctccacgatcatggagtagaaggtgttgtagcggttcatgaggtcccaggccaggtgc

SEQ ID NO: 102753 - DNA, 53 bp, Artificial
  Synthetic oligonucleotide
cttccagaacgtgcgcgcgcgcctggacgtgccggtgacgctggtggtgggct

SEQ ID NO: 102754 - DNA, 60 bp, Artificial
  Synthetic oligonucleotide
ctaaaggagcaaatgttaatgcgcgtaatagattcggaactactccattttattgtggaa

SEQ ID NO: 102755 - DNA, 60 bp, Artificial
  Synthetic oligonucleotide
gcgtttaaaccctgtgggtcgctcgatttagttactgtacaatatttacagaccatccta

SEQ ID NO: 102756 - DNA, 60 bp, Artificial
  Synthetic oligonucleotide
cgtcggagtcccataccgtgaggttgagtcgttcgtcggttaaaataaacttattccccg

SEQ ID NO: 102757 - DNA, 60 bp, Artificial
  Synthetic oligonucleotide
acgagtatgcctggttttacggagttaattcactcagttggttcgactggaatctcttcc

SEQ ID NO: 102758 - DNA, 60 bp, Artificial
  Synthetic oligonucleotide
aaaacaggacgggatgtccggaaagaagcgacatagttgctacgtgtacggaatcgcccg

SEQ ID NO: 102759 - DNA, 59 bp, Artificial
  Synthetic oligonucleotide
aacgccgtgttaataaggtccgtaatatcgttcgtcgagtcacaatcgtccgcctcgtt

SEQ ID NO: 102760 - DNA, 60 bp, Artificial
  Synthetic oligonucleotide
ccagagtgtatggcgactggagactggatataaaacccaagtttatgcaagccgtacgcg

SEQ ID NO: 102761 - DNA, 60 bp, Artificial
  Synthetic oligonucleotide
ccctgctcttcagaacggatacgtccacggagttcccttcattaaacgattctgttataa

SEQ ID NO: 102762 - DNA, 60 bp, Artificial
  Synthetic oligonucleotide
gtcgccctccggttccagacacgtaatggttaggtatatatccgaatacttcgtcaacgg

SEQ ID NO: 102763 - DNA, 60 bp, Artificial
  Synthetic oligonucleotide
cggactccatggttcctaccctcgataatcgcgtgtacattttcattaattaacccatcc

SEQ ID NO: 102764 - DNA, 60 bp, Artificial
  Synthetic oligonucleotide
gtacgtgcttgtgtagaaatacgtccgctttctcgtacacggggatcgtgttcagaaacc

SEQ ID NO: 102765 - DNA, 60 bp, Artificial
  Synthetic oligonucleotide
ggggatcaatcataattccggacctcgtgccatattgggatgcgctcaggcaaaacaggc

SEQ ID NO: 102766 - DNA, 60 bp, Artificial
  Synthetic oligonucleotide
cgtcgagatatccggaccgtgattccatgatctgtcatagagtgttaacgtacggcaaat

SEQ ID NO: 102767 - DNA, 60 bp, Artificial
  Synthetic oligonucleotide
cgacaacgccatttacacggcgccttttcccatcaaccagagtagaatcatccatcgacg

SEQ ID NO: 102768 - DNA, 60 bp, Artificial
  Synthetic oligonucleotide
ctgtacgatgttgtgcacttgactggtaatcagttctattttatcgttgagtcctcccgc

SEQ ID NO: 102769 - DNA, 60 bp, Artificial
  Synthetic oligonucleotide
atttcccctagcgcctttctagcacgacgcgggtacatataagacgccatgatggtaaaa

SEQ ID NO: 102770 - DNA, 60 bp, Artificial
  Synthetic oligonucleotide
ccagaggtatttacacagacacgcgtcgtgaagacagtaattacccatttctacggctac

SEQ ID NO: 102771 - DNA, 60 bp, Artificial
  Synthetic oligonucleotide
aggaacaccttacggattcggatcaaaccacttgtattgttttaaactggtagccgattg

SEQ ID NO: 102772 - DNA, 60 bp, Artificial
  Synthetic oligonucleotide
agtatatccgattcgtacacacaacctcctcatccgcatatagtggagattgtattgggg

SEQ ID NO: 102773 - DNA, 60 bp, Artificial
  Synthetic oligonucleotide
gaactggttcctatacggacggatacctcaattctgttaaagatcaatcagtcgaagtcg

SEQ ID NO: 102774 - DNA, 60 bp, Artificial
  Synthetic oligonucleotide
cacgcattaacgatgttggaagatgtaacgatattatactgtgacggtatggacgcagaa

SEQ ID NO: 102775 - DNA, 60 bp, Artificial
  Synthetic oligonucleotide
gacataagatacgccataattatagccccgcttcgatttacaccggccatacagtggacc

SEQ ID NO: 102776 - DNA, 60 bp, Artificial
  Synthetic oligonucleotide
ggtcatcgtcgaaaggaaacgggtcaccgaatcgaaacacgtataaagacgagatggaat

SEQ ID NO: 102777 - DNA, 60 bp, Artificial
  Synthetic oligonucleotide
ctccgcagaacaaggtactcaaatgcatgagatcaaacttttctattacacgaacgaccg

SEQ ID NO: 102778 - DNA, 60 bp, Artificial
  Synthetic oligonucleotide
acaccagaaaacgtacccgacttcgctttccagttaaaggtggagtctctcatcgtatct

SEQ ID NO: 102779 - DNA, 60 bp, Artificial
  Synthetic oligonucleotide
ggcaaaggcgggatataaagtaaaccccacggaactgatgtatattctgggaacgtacgg

SEQ ID NO: 102780 - DNA, 60 bp, Artificial
  Synthetic oligonucleotide
cagttccggctcggacacgcccgctcccgcgctaaaatccgtaaacatattgtaataact

SEQ ID NO: 102781 - DNA, 60 bp, Artificial
  Synthetic oligonucleotide
ggcgaagattgtgaggcgatcgctgtgaaaattggaatagtaaacagtcctctgttgaat

SEQ ID NO: 102782 - DNA, 60 bp, Artificial
  Synthetic oligonucleotide
gacacctaacaaattgacaaagtctcgatagaacataatcccgttagacaccctggccct

SEQ ID NO: 102783 - DNA, 60 bp, Artificial
  Synthetic oligonucleotide
caatcgtcctcgacctctgccttgggcttgcgtttctttctacgtttgactcccgcgtcg

SEQ ID NO: 102784 - DNA, 60 bp, Artificial
  Synthetic oligonucleotide
cctatttctttagccaacgcgtctcgttctttatccggtaatatctccgatatttcccta

SEQ ID NO: 102785 - DNA, 60 bp, Artificial
  Synthetic oligonucleotide
gcaaacaagacacgggaatagagttctcggacaacgattcgcaggatatctacacgttat

SEQ ID NO: 102786 - DNA, 60 bp, Artificial
  Synthetic oligonucleotide
gcgaatgaacatccgcgaccaacacgccttccaagaaatccaacacgtctttcacgtggg

SEQ ID NO: 102787 - DNA, 60 bp, Artificial
  Synthetic oligonucleotide
ggacgtcgtcagtacttttacgggaagatgcacgtacaaagacgaaactccgcccgcgat

SEQ ID NO: 102788 - DNA, 60 bp, Artificial
  Synthetic oligonucleotide
cgcacgggtaatttgacggacgacgcccttgacgcgattaagtcgttaaacatgagagca

SEQ ID NO: 102789 - DNA, 60 bp, Artificial
  Synthetic oligonucleotide
gcctctaacccgttacaatacaaccagtaatttatttcggataccgtgtaatcccgttcc

SEQ ID NO: 102790 - DNA, 60 bp, Artificial
  Synthetic oligonucleotide
ccaatctatctatttgcgagaacattttaaacatggacatgagttgtagcgcggggtcga

SEQ ID NO: 102791 - DNA, 60 bp, Artificial
  Synthetic oligonucleotide
cctgagcacctactggcctcccgattacgacccgtgtatatccgccatggttctggcaca

SEQ ID NO: 102792 - DNA, 60 bp, Artificial
  Synthetic oligonucleotide
ggtgccgaagttactgttatggttcaattacttgttcggagggtttgttaacttatcgac

SEQ ID NO: 102793 - DNA, 60 bp, Artificial
  Synthetic oligonucleotide
cctgatatttccgtacacacattctagcaactgatacatcatggggctcgcggctgtggg

SEQ ID NO: 102794 - DNA, 60 bp, Artificial
  Synthetic oligonucleotide
gagaacatccgctacataacttcagattcatgttaacactcgacgcacttcctcgtccag

SEQ ID NO: 102795 - DNA, 60 bp, Artificial
  Synthetic oligonucleotide
cgggttcgcacacgggattgagttccccgaacatgaaagacacgagtcggttgatgggat

SEQ ID NO: 102796 - DNA, 60 bp, Artificial
  Synthetic oligonucleotide
cgaattagagtatgaacccgaaagcgttaacgagacgcctaagaaattgcctcaccaagg

SEQ ID NO: 102797 - DNA, 60 bp, Artificial
  Synthetic oligonucleotide
ccgacgtgggacaacattacgcaaacgacaaataccgattgaacccggacgtgtcgtact

SEQ ID NO: 102798 - DNA, 60 bp, Artificial
  Synthetic oligonucleotide
gtccacgagaactgcgcggctcttttacaatcaataaatggatcacggaaagtatctctt

SEQ ID NO: 102799 - DNA, 60 bp, Artificial
  Synthetic oligonucleotide
cgccatagccgtttcgttgtttacacacgagttgtatatatcttccccggacgactccca

SEQ ID NO: 102800 - DNA, 60 bp, Artificial
  Synthetic oligonucleotide
atacagaatctctccgacgcaatgtcgaataaaggtctaaatacctcgaaggttaacatt

SEQ ID NO: 102801 - DNA, 60 bp, Artificial
  Synthetic oligonucleotide
ggaacaaaaccccaaggccgtcatagaacagagtatcctgatgtatcccacgacgttgct

SEQ ID NO: 102802 - DNA, 56 bp, Artificial
  Synthetic oligonucleotide
gtatcgcgtggcgactttaaatatttgtccggtggcgttcgatgatgtacatcaac

SEQ ID NO: 102803 - DNA, 59 bp, Artificial
  Synthetic oligonucleotide
tttaagtagatacagacgcttaacgcactttcaggagtctcgctccattccagtatttt

SEQ ID NO: 102804 - DNA, 60 bp, Artificial
  Synthetic oligonucleotide
cgcgggtggttctgatagaacaacaaaacgatctatttacaaacatcaccgttattacgg

SEQ ID NO: 102805 - DNA, 60 bp, Artificial
  Synthetic oligonucleotide
cggcagtaatcaacaatatgcaaatagagcaattactggggagggtatgtcgagaaacag

SEQ ID NO: 102806 - DNA, 60 bp, Artificial
  Synthetic oligonucleotide
ggtggctaacgttatcggactctctggagatagtgaacgcgtatcaatgactgaaaatgt

SEQ ID NO: 102807 - DNA, 60 bp, Artificial
  Synthetic oligonucleotide
gggcagtgactttgtagctctcccagatttcttttccctcgttcatctagcaaaactatt

SEQ ID NO: 102808 - DNA, 60 bp, Artificial
  Synthetic oligonucleotide
gactacctttgtcacccaactttatacccacataagccataacaacctctttaatagccg

SEQ ID NO: 102809 - DNA, 60 bp, Artificial
  Synthetic oligonucleotide
gcattagtgcctccatgtacagttttctttatttcgccgtaattgacctttctcttctta

SEQ ID NO: 102810 - DNA, 60 bp, Artificial
  Synthetic oligonucleotide
ctgctttccgtcaacgcaaagagactattactaggcatgtgtataataccacgagctagt

SEQ ID NO: 102811 - DNA, 60 bp, Artificial
  Synthetic oligonucleotide
gacgccgttctacataaaacatcattgctccattaacgataacaggggaatgagcagcac

SEQ ID NO: 102812 - DNA, 60 bp, Artificial
  Synthetic oligonucleotide
gtgtacgaagcggttttacgacacgcatttgatgcacccacgttgtacgttaaagcattg

SEQ ID NO: 102813 - DNA, 60 bp, Artificial
  Synthetic oligonucleotide
cagtatggcgacattgatctattatttaatgagaaacttaaagtggactccgattcggga

SEQ ID NO: 102814 - DNA, 60 bp, Artificial
  Synthetic oligonucleotide
gattattctcctgtttgatttctctatcgatgcggcacctctcttaagaagtgtaaccga

SEQ ID NO: 102815 - DNA, 60 bp, Artificial
  Synthetic oligonucleotide
ccacacatctccacttttgctttacatcagaaattgtgtcgttgacatcttgaactctcc

SEQ ID NO: 102816 - DNA, 60 bp, Artificial
  Synthetic oligonucleotide
ccccgcttctatttactcccgcagcacaatgaaccaacacgggctcgtttcgttgatcac

SEQ ID NO: 102817 - DNA, 60 bp, Artificial
  Synthetic oligonucleotide
ggaacgcatcaagggagatataacgtataaggtacatttggcgactcctatcaattctag

SEQ ID NO: 102818 - DNA, 60 bp, Artificial
  Synthetic oligonucleotide
cattggtggatgtgaacagcatacgcttgggcatagtacataaacaacgctgccaatatt

SEQ ID NO: 102819 - DNA, 60 bp, Artificial
  Synthetic oligonucleotide
gcagcatccccgtggaaccaacgctcaacagatgtgggatttggtagacctcctactacg

SEQ ID NO: 102820 - DNA, 60 bp, Artificial
  Synthetic oligonucleotide
gattccttttctactattgtctggatctcccattactaacacacctaatacgctgggtca

SEQ ID NO: 102821 - DNA, 60 bp, Artificial
  Synthetic oligonucleotide
atttgggtactgtgaactccgccgtagtttccatgggactatataattttgtggcctcga

SEQ ID NO: 102822 - DNA, 60 bp, Artificial
  Synthetic oligonucleotide
catgaacggcggacatattcagttgataatcggccccatgttttcaggtaaaagtacaga

SEQ ID NO: 102823 - DNA, 60 bp, Artificial
  Synthetic oligonucleotide
ccagctaacttattttatacagactactttcccatccctccgctgattattagaccggct

SEQ ID NO: 102824 - DNA, 60 bp, Artificial
  Synthetic oligonucleotide
acggcgttagtgaatggatgtgatttctttcctggactctatggggcatctataacaccc

SEQ ID NO: 102825 - DNA, 60 bp, Artificial
  Synthetic oligonucleotide
cgctgcagtatcgacggttctagaggatgttcaagcagctggtatctctagacaatttac

SEQ ID NO: 102826 - DNA, 60 bp, Artificial
  Synthetic oligonucleotide
ggcgccgtttaatttcctagtatttgtcaaacccaccactgaggataatgctattaaggt

SEQ ID NO: 102827 - DNA, 60 bp, Artificial
  Synthetic oligonucleotide
ccgttagaaaagaaccacgaaactaatgttctgattgcgtccgattccgttgctgaatta

SEQ ID NO: 102828 - DNA, 60 bp, Artificial
  Synthetic oligonucleotide
gcataacgcacacgttgtaaaacataaaggaatatacaaagttagttcagaagcgcgtgg

SEQ ID NO: 102829 - DNA, 60 bp, Artificial
  Synthetic oligonucleotide
cgtgattgatctctccgaccattccacgaacttctaattggccgtctctaacggtaccat

SEQ ID NO: 102830 - DNA, 60 bp, Artificial
  Synthetic oligonucleotide
cggctgccagagtgtccaattctaccgttgttactccattatatattccttggataacct

SEQ ID NO: 102831 - DNA, 60 bp, Artificial
  Synthetic oligonucleotide
acgcttcggctaagagttgcacatccataggacgtagaatgatcttgtatctagaatcgg

SEQ ID NO: 102832 - DNA, 60 bp, Artificial
  Synthetic oligonucleotide
agtttgcgaatcaacaaaccctgttcccgttacatctcttcctatacattctacgttagt

SEQ ID NO: 102833 - DNA, 60 bp, Artificial
  Synthetic oligonucleotide
tctaactccggacacacatccatcatgagctctccgttatccacaaccaagaatggtctg

SEQ ID NO: 102834 - DNA, 60 bp, Artificial
  Synthetic oligonucleotide
ccatgccgcgtctgcagagtggttgatagttgttcctagatatgtaaaataatccaactt

SEQ ID NO: 102835 - DNA, 60 bp, Artificial
  Synthetic oligonucleotide
tactccaacggttacacctcttcaacctcctattgtggccactgtatgtactcccacacc

SEQ ID NO: 102836 - DNA, 60 bp, Artificial
  Synthetic oligonucleotide
gacgtccttatcagcggtatcggtacatatacgtaattcaccttcacaaaatacggagtc

SEQ ID NO: 102837 - DNA, 60 bp, Artificial
  Synthetic oligonucleotide
tatcttagtccatggcaagatacctcccaaccatctaatcatacaatatccaagtgtttc

SEQ ID NO: 102838 - DNA, 60 bp, Artificial
  Synthetic oligonucleotide
cagcagctacaatacacacaatagacattcccacagtgttgccattacctccacgataca

SEQ ID NO: 102839 - DNA, 60 bp, Artificial
  Synthetic oligonucleotide
ctgttttaaccagttttccagacttgtatatataacacgcctcagaatccgttgtgctgt

SEQ ID NO: 102840 - DNA, 60 bp, Artificial
  Synthetic oligonucleotide
ggccccactgattcaatacgaaaagaccaatctctcctagttatttggcagtactcatta

SEQ ID NO: 102841 - DNA, 60 bp, Artificial
  Synthetic oligonucleotide
gcattctccgttagtgtttgattcttggttaaactcagccaccgccttgattctagtatc

SEQ ID NO: 102842 - DNA, 60 bp, Artificial
  Synthetic oligonucleotide
cggtccagttcttatccttaactgcctcaccaaagactactacttcggaatctattgttc

SEQ ID NO: 102843 - DNA, 60 bp, Artificial
  Synthetic oligonucleotide
cggccattcaagattttattatcgaggtgtcaaactgtgtagctagattcgcgtttacag

SEQ ID NO: 102844 - DNA, 60 bp, Artificial
  Synthetic oligonucleotide
gtctctctccataaccggcgctgtcatgtatccacttttgagcccaatcggccttctttt

SEQ ID NO: 102845 - DNA, 60 bp, Artificial
  Synthetic oligonucleotide
gacaagttaagttctggcaatgtttcataaaatggaagaaggacatgcgttccctcccgg

SEQ ID NO: 102846 - DNA, 60 bp, Artificial
  Synthetic oligonucleotide
ggagccatcatttcggctatcgacttaatatccctcttgttttcgatagaaaatctaggg

SEQ ID NO: 102847 - DNA, 60 bp, Artificial
  Synthetic oligonucleotide
ggacccggtggtctttcggcattattaagacaatcgtataatggaaccgcacccaattgc

SEQ ID NO: 102848 - DNA, 60 bp, Artificial
  Synthetic oligonucleotide
gcgtcaactttcatagcttccttcaatctaatttgatgctcacacggtgcgaattctact

SEQ ID NO: 102849 - DNA, 60 bp, Artificial
  Synthetic oligonucleotide
agcatcgcgccggaggatgcgctcgcgctggtgaggtggctgaacccctcgatcacgctg

SEQ ID NO: 102850 - DNA, 60 bp, Artificial
  Synthetic oligonucleotide
agcacgtcgctagacagctggggtttgggtagggcgcagcgtcgtcagcacggagttgca

SEQ ID NO: 102851 - DNA, 60 bp, Artificial
  Synthetic oligonucleotide
cacgcgcgcaggtcctcatcgcccagcagcatcatcgcgtcgagcaggaagtcgtggggc

SEQ ID NO: 102852 - DNA, 60 bp, Artificial
  Synthetic oligonucleotide
tgatgggccccatctactacctgcggctgcgccacctgaccctcgacaaggccaccgtgc

SEQ ID NO: 102853 - DNA, 60 bp, Artificial
  Synthetic oligonucleotide
tcctgctgctctcggggtcgcccatcaccaacacgcccatcacgctgacgaacatcatca

SEQ ID NO: 102854 - DNA, 60 bp, Artificial
  Synthetic oligonucleotide
gtcgacgttgcagcacaccaccagcccctccaggtcgtacggcgggagacgagcgcgcac

SEQ ID NO: 102855 - DNA, 60 bp, Artificial
  Synthetic oligonucleotide
gccgtgcacttctcgttccacccgctccactacagcaccgtcatgcgcaacctcgcggaa

SEQ ID NO: 102856 - DNA, 60 bp, Artificial
  Synthetic oligonucleotide
cgccttagccgtccagtgatcgcagcccttgtccccgcaatacgcgcgttcggcttcctc

SEQ ID NO: 102857 - DNA, 60 bp, Artificial
  Synthetic oligonucleotide
aagacgctgggctacgagctgctcaacgactcggtgttcctcgccttcctgccgctgcgc

SEQ ID NO: 102858 - DNA, 60 bp, Artificial
  Synthetic oligonucleotide
gcacttcaggtaccgcaggcgcccgacacccaccagccgcgagtccacgtcggccgagct

SEQ ID NO: 102859 - DNA, 60 bp, Artificial
  Synthetic oligonucleotide
aacgtcgagcttcgagggaactgcgtctccgtcgccaacacgtccctggtgccgatccac

SEQ ID NO: 102860 - DNA, 60 bp, Artificial
  Synthetic oligonucleotide
agaggaactgcgtcgtcgggtagggcggaggcgtgaaatgctcggactcgatttccagat

SEQ ID NO: 102861 - DNA, 60 bp, Artificial
  Synthetic oligonucleotide
tgacgtgcagcttgtcttttccgcggctgtggtcggcctgcaggatggtgggcttgaaga

SEQ ID NO: 102862 - DNA, 60 bp, Artificial
  Synthetic oligonucleotide
gctcgaggtcggtggtccgcgagcgaaaggtgtcgaagtccacgcccaggctccggccga

SEQ ID NO: 102863 - DNA, 60 bp, Artificial
  Synthetic oligonucleotide
cggcgtgcccggctccgacctctcgctcgtgaagatggaaggcaaggccctggaaaagta

SEQ ID NO: 102864 - DNA, 60 bp, Artificial
  Synthetic oligonucleotide
ccgctcaccatgcagacgccgcggtagttgacgcccagaaaatcctccaggccgaaatcc

SEQ ID NO: 102865 - DNA, 60 bp, Artificial
  Synthetic oligonucleotide
tgccgtccgctcgcagccgcacgttccaatcctgcgccatcgagatctcgtccaggctca

SEQ ID NO: 102866 - DNA, 60 bp, Artificial
  Synthetic oligonucleotide
cagcagaccggcgtcgcgaagcaaagcgagcgagggcgaccgcaatacgtagcgatcgta

SEQ ID NO: 102867 - DNA, 60 bp, Artificial
  Synthetic oligonucleotide
ccgcgccgccgcacgcgaacagcaacctgaagaacttcacgtccgtcctgttcaaccgcg

SEQ ID NO: 102868 - DNA, 60 bp, Artificial
  Synthetic oligonucleotide
gcgcaaatccgacgggttctgctccacgacggtctcgtgccaacgcgacaagccctggat

SEQ ID NO: 102869 - DNA, 60 bp, Artificial
  Synthetic oligonucleotide
agaaagctgcgtcttgccgctaccgctgccgaacaccgaaggaccgtttgacgcgagcga

SEQ ID NO: 102870 - DNA, 60 bp, Artificial
  Synthetic oligonucleotide
gatcgcgtccgtcgtggccagtttcccgccgctcgaaaattgccctcggtactgttcttt

SEQ ID NO: 102871 - DNA, 60 bp, Artificial
  Synthetic oligonucleotide
agcgaggtaacgagggctccggcttacgcatcaaatgcttctcggcgcgcgttctctccc

SEQ ID NO: 102872 - DNA, 60 bp, Artificial
  Synthetic oligonucleotide
tacgggaacaccaagcccatcgtaaagaaccggcccaggtcgtggcacgcgcgcaggagc

SEQ ID NO: 102873 - DNA, 60 bp, Artificial
  Synthetic oligonucleotide
cgctgccgtcgccctcctccttgaagagcatcacgccgctcttgtaccggggatcgttgt

SEQ ID NO: 102874 - DNA, 60 bp, Artificial
  Synthetic oligonucleotide
acaacgtcgtccgcgaagccgtcgccctcgccaagttgcgcttccggtccccgacctgga

SEQ ID NO: 102875 - DNA, 60 bp, Artificial
  Synthetic oligonucleotide
acgtggaataggtcgtaccgctccgccgccagcacccgccgcccgatcgcctccaggtcg

SEQ ID NO: 102876 - DNA, 60 bp, Artificial
  Synthetic oligonucleotide
cgtcccagatcgagaggttcaggcgttcgttgttcagcacgaagttgttccccgagagct

SEQ ID NO: 102877 - DNA, 60 bp, Artificial
  Synthetic oligonucleotide
ttttctccccggtcaccaggtgctccgccaactcgctgacggtcgcctcctcctcgacga

SEQ ID NO: 102878 - DNA, 60 bp, Artificial
  Synthetic oligonucleotide
atctggctgtcgcgcaccgtgcagtaatcgtcgtgtcccggggtttcgttgggtttcagt

SEQ ID NO: 102879 - DNA, 60 bp, Artificial
  Synthetic oligonucleotide
acgaatcgcacgctctcgccgaagccctcgaagaaggccgccaccagcgaggacaggaac

SEQ ID NO: 102880 - DNA, 60 bp, Artificial
  Synthetic oligonucleotide
cactggctgacgctcttggacacttacctcctgggccgccgcgacacgcctcacttgctg

SEQ ID NO: 102881 - DNA, 60 bp, Artificial
  Synthetic oligonucleotide
aacaacgagacggtcggcctgctcacgctccagaacaagcacatcgccgtggacccgcgc

SEQ ID NO: 102882 - DNA, 60 bp, Artificial
  Synthetic oligonucleotide
tgaagttggccagcagcttggggatcaggccctcccggcggcgcgagtagaccgagacct

SEQ ID NO: 102883 - DNA, 60 bp, Artificial
  Synthetic oligonucleotide
cgcacgaggaagttgtagcagtcgatcttgcggttgaggtggtgcacgttgaccagcgtc

SEQ ID NO: 102884 - DNA, 60 bp, Artificial
  Synthetic oligonucleotide
acgctgacggaccagacgctgaccgagatcctgatgtaccggaagccgctgcgctacgcg

SEQ ID NO: 102885 - DNA, 60 bp, Artificial
  Synthetic oligonucleotide
agatcagccgaaccagcccgtgccggcgcctcgcgccagagatcagccgaaccagcccgt

SEQ ID NO: 102886 - DNA, 60 bp, Artificial
  Synthetic oligonucleotide
ccgtctcacggactccagccggcgcgagcgcatgccgttgcccatcgacctctgctttta

SEQ ID NO: 102887 - DNA, 60 bp, Artificial
  Synthetic oligonucleotide
tcgagccgatgatgttgcagatggagggagcgtcggggtacgggcacggcgcgggaggtt

SEQ ID NO: 102888 - DNA, 60 bp, Artificial
  Synthetic oligonucleotide
cggcaacggttttctttgagcgccacctcgtcttcccggacctcctgattgaatgtcggc

SEQ ID NO: 102889 - DNA, 60 bp, Artificial
  Synthetic oligonucleotide
catctcggaggactaccgcaagctggaggccgtcaagatcaacttcgagttcgtgtgcct

SEQ ID NO: 102890 - DNA, 60 bp, Artificial
  Synthetic oligonucleotide
aatcgcgcgccatcgctccgagcacgttcttcgccgtcgcttcgttcggacagatgaaga

SEQ ID NO: 102891 - DNA, 60 bp, Artificial
  Synthetic oligonucleotide
agccttcattatcggggtcagcttgcgcggtgtcggaattgccttgcgcggtgtcggaat

SEQ ID NO: 102892 - DNA, 60 bp, Artificial
  Synthetic oligonucleotide
tcatgtcgctgaaggcttcccgctcctccaggccggtcacgttgcagaacgcgccgatca

SEQ ID NO: 102893 - DNA, 58 bp, Artificial
  Synthetic oligonucleotide
tgttactagtgggatggtcttcacctccccagtaagtagcagcatatgcacaaagtcc

SEQ ID NO: 102894 - DNA, 60 bp, Artificial
  Synthetic oligonucleotide
ggccatcatcggactttgtgcatatgctgctacttactggggaggtgaagaccatcccac

SEQ ID NO: 102895 - DNA, 60 bp, Artificial
  Synthetic oligonucleotide
ggccatcattggactttgtgcatatgctgctacttactggggaggtgaagaccatcccac

SEQ ID NO: 102896 - DNA, 60 bp, Artificial
  Synthetic oligonucleotide
tcggactttgtgcatatgctgctacttactggggaggtgaagaccatcccactagtaaca

SEQ ID NO: 102897 - DNA, 60 bp, Artificial
  Synthetic oligonucleotide
gacgtggcaaacaatgtatacaaatgtaccagaaggaacatacgacatatccggatttcc

SEQ ID NO: 102898 - DNA, 60 bp, Artificial
  Synthetic oligonucleotide
ccacactcctctcttttagagatgatgcggaatcagtgttcatcgacgttcgcgagctgg

SEQ ID NO: 102899 - DNA, 54 bp, Artificial
  Synthetic oligonucleotide
aaacgagccagtaatcttaccatgtcctcaaataaatacgctatcatccggata

SEQ ID NO: 102900 - DNA, 51 bp, Artificial
  Synthetic oligonucleotide
cgagccagtaatcttaccatgtcctcaaataaatactctatcatccggata

SEQ ID NO: 102901 - DNA, 54 bp, Artificial
  Synthetic oligonucleotide
aaacgagccagtaatcttaccatgtcctcaaataaacacgatatcgtccggata

SEQ ID NO: 102902 - DNA, 54 bp, Artificial
  Synthetic oligonucleotide
tatccggatgatagcgtatttatttgaggacatggtaagattactggctcgttt

SEQ ID NO: 102903 - DNA, 60 bp, Artificial
  Synthetic oligonucleotide
ctctactcataacgcattcatcacacgttttcccatacagttcacagaaggctacaggta

SEQ ID NO: 102904 - DNA, 60 bp, Artificial
  Synthetic oligonucleotide
ggagatctcgaatcgctgggttactgtatgttaaaatgggcaaaacgtaaattaccttgg

SEQ ID NO: 102905 - DNA, 60 bp, Artificial
  Synthetic oligonucleotide
cgtcgttcttatcaggatgttgagaattcgtgttgattttgtacgcgcctacccagtgtt

SEQ ID NO: 102906 - DNA, 60 bp, Artificial
  Synthetic oligonucleotide
ggcaaccatcgttaggcgggtacactctgttccagtctgttatgtttacaggcgccatcc

SEQ ID NO: 102907 - DNA, 60 bp, Artificial
  Synthetic oligonucleotide
tgcttaagttgtcctaaatctccccgtgctttatcctctcgacggttcatatcgtctcct

SEQ ID NO: 102908 - DNA, 60 bp, Artificial
  Synthetic oligonucleotide
gattctaatgagacacgtatgttacccagaaaaccaacatcttcctttacattgcgctgt

SEQ ID NO: 102909 - DNA, 60 bp, Artificial
  Synthetic oligonucleotide
caagcgttgtcaagtttccacacaactgaaaagagtggcgggataaaacgtaaactcgga

SEQ ID NO: 102910 - DNA, 60 bp, Artificial
  Synthetic oligonucleotide
ccagtagggtatcagccttaaagacagtagttcaggatctatcgcttaccgatcttccaa

SEQ ID NO: 102911 - DNA, 60 bp, Artificial
  Synthetic oligonucleotide
ctcttctaatccctctttaaacgcacgcatcactatagcttcttccacttcagactttgt

SEQ ID NO: 102912 - DNA, 60 bp, Artificial
  Synthetic oligonucleotide
cgtcttctgcgttaactttagctccgtgtgccagtacttctaaaacaacgtcgtaatttc

SEQ ID NO: 102913 - DNA, 60 bp, Artificial
  Synthetic oligonucleotide
ctcgtttcacgtcgcggagcgagtccttgaaaagagtcctgacgtccttcacttattttc

SEQ ID NO: 102914 - DNA, 60 bp, Artificial
  Synthetic oligonucleotide
cttctcccgttacgtatcctgagccatcttctcccgttacgtgtcctgagccacctaccg

SEQ ID NO: 102915 - DNA, 60 bp, Artificial
  Synthetic oligonucleotide
ggttacgtggtagagagatttgataactcagaaacagctggcaaagtgtcctgcgtgcct

SEQ ID NO: 102916 - DNA, 60 bp, Artificial
  Synthetic oligonucleotide
ccgttgcttctgttgcccgtgcgaagtcttcttgaggtgcttgtgtttcccctgtagaac

SEQ ID NO: 102917 - DNA, 60 bp, Artificial
  Synthetic oligonucleotide
gaaagtattacccttgccttcaggaaccgtattaacagacttagcaaaacgaaggtgggt

SEQ ID NO: 102918 - DNA, 60 bp, Artificial
  Synthetic oligonucleotide
cacaatgacgccgtagtatccattactgctgaccatgaacataacaccgtaacgctaacg

SEQ ID NO: 102919 - DNA, 60 bp, Artificial
  Synthetic oligonucleotide
gcgcatcctttcgctcccaactgtttagaggcgttactctgaggaaaacacatctcttct

SEQ ID NO: 102920 - DNA, 60 bp, Artificial
  Synthetic oligonucleotide
gctgtatgactaggtgatgttgtaaattccgctccggctatttcccaaacaggagcagtc

SEQ ID NO: 102921 - DNA, 60 bp, Artificial
  Synthetic oligonucleotide
cagcagcgtgatgtaaaggtgttctccattgtttgtctttaatgtttacgtctaatcctg

SEQ ID NO: 102922 - DNA, 60 bp, Artificial
  Synthetic oligonucleotide
caccgccacctcattcacctatcattgctagtatcaaaggtaaaagttatgacgcactcg

SEQ ID NO: 102923 - DNA, 60 bp, Artificial
  Synthetic oligonucleotide
ggactctttacaaggacatcaggactctttccaaggactcgctccgcgacgtgaaacgag

SEQ ID NO: 102924 - DNA, 60 bp, Artificial
  Synthetic oligonucleotide
gcacaatgaaggggtgagcagccataatcgttgaatacgtccaggttaatgccggtttcc

SEQ ID NO: 102925 - DNA, 60 bp, Artificial
  Synthetic oligonucleotide
cagttgtgggatctgtaatgtttaaccatccttttccaccccatccgtttgaccaccaac

SEQ ID NO: 102926 - DNA, 60 bp, Artificial
  Synthetic oligonucleotide
ttccaattgcatcagaggaacattccgcacgagtagagatggtagggcactgcaacgatg

SEQ ID NO: 102927 - DNA, 60 bp, Artificial
  Synthetic oligonucleotide
gttaaccgatccgtgtttgaaatatctacatccgccgaatgagccaatagaagtttaacc

SEQ ID NO: 102928 - DNA, 60 bp, Artificial
  Synthetic oligonucleotide
ggatctttccacggctgaaagttatccctactagcacccaaccagatgtctccgctataa

SEQ ID NO: 102929 - DNA, 60 bp, Artificial
  Synthetic oligonucleotide
ctcgctaccatcgtcccaagcagccttataactcaatcctatccataatttaacaccttg

SEQ ID NO: 102930 - DNA, 60 bp, Artificial
  Synthetic oligonucleotide
cgcccgtaataaatggccacctcctcctatgtacgaagttgtaagaactgaggatgggga

SEQ ID NO: 102931 - DNA, 60 bp, Artificial
  Synthetic oligonucleotide
ggatttgtatatccgcctgtatccccgttccatgtagacaatatttctccattttgcagt

SEQ ID NO: 102932 - DNA, 60 bp, Artificial
  Synthetic oligonucleotide
taatgctattctgccacctactgatacacctctagacttccagtacaacgaaaacggctg

SEQ ID NO: 102933 - DNA, 60 bp, Artificial
  Synthetic oligonucleotide
gaatacggagcgcaaacgaatccctgtaacttttatgttcctcctcctctatactacgct

SEQ ID NO: 102934 - DNA, 60 bp, Artificial
  Synthetic oligonucleotide
caggctagctgcatacgaatcggatcataacaatcctacatgtgaagcgttgagtaacct

SEQ ID NO: 102935 - DNA, 60 bp, Artificial
  Synthetic oligonucleotide
cacgggtgatggcagtttcatagcgaaggttatcaggaacgtgggattctgcagacctag

SEQ ID NO: 102936 - DNA, 60 bp, Artificial
  Synthetic oligonucleotide
gcgaacctttaccgttagacgcgcctttagagttacagagcataataacagcatgcagac

SEQ ID NO: 102937 - DNA, 60 bp, Artificial
  Synthetic oligonucleotide
gcagatctatggttatggtaaaacactgtaacgggaagcagcattctatggtaactggcc

SEQ ID NO: 102938 - DNA, 60 bp, Artificial
  Synthetic oligonucleotide
gtccaggatcagtttcgtctggtaaggtatgcccgccacaatatctaactctatccgctt

SEQ ID NO: 102939 - DNA, 60 bp, Artificial
  Synthetic oligonucleotide
ccgccatatctaaaagcagagatcccttcaacgcgtataacaacctcacacaatgtgccg

SEQ ID NO: 102940 - DNA, 60 bp, Artificial
  Synthetic oligonucleotide
gtacggagctgacattaattctatgggtggtggatctacggctttacactatgcttcgga

SEQ ID NO: 102941 - DNA, 60 bp, Artificial
  Synthetic oligonucleotide
gcatttcctacatcttcactatccggccccttttctaatccagtagctcctggttcttca

SEQ ID NO: 102942 - DNA, 60 bp, Artificial
  Synthetic oligonucleotide
taatacgctttgtctagattgttgatgtatagcttgttgtcccgccagtaacatcgcacc

SEQ ID NO: 102943 - DNA, 60 bp, Artificial
  Synthetic oligonucleotide
gcgtagtagtacctatttgatctgccgggattaaagtagaggtttgtggagtcggaagct

SEQ ID NO: 102944 - DNA, 60 bp, Artificial
  Synthetic oligonucleotide
cggagaagaggattatagcgttgaaagattatcttatcccgcacctgttaaccttacgat

SEQ ID NO: 102945 - DNA, 60 bp, Artificial
  Synthetic oligonucleotide
ccatccttttccgccccatccgtttgcctgccaattaactccagtaacttgtttgctcca

SEQ ID NO: 102946 - DNA, 60 bp, Artificial
  Synthetic oligonucleotide
tcgtctaaagaaccagtgaaacaacgcaaagcgagtccgcttcacgagctcttaaccgag

SEQ ID NO: 102947 - DNA, 60 bp, Artificial
  Synthetic oligonucleotide
aacttcgattgacacacttgacacgttgtacacgcgtcttcgggtattgctgtttcttct

SEQ ID NO: 102948 - DNA, 60 bp, Artificial
  Synthetic oligonucleotide
ctaggtgcctgtgctggtggattcgggtgtcgcatagcatttgaagccgtacgagggtct

SEQ ID NO: 102949 - DNA, 60 bp, Artificial
  Synthetic oligonucleotide
cttcagcctcaaaatggcaaattccaacatcctctacaatacccacactagctccatggt

SEQ ID NO: 102950 - DNA, 60 bp, Artificial
  Synthetic oligonucleotide
cggctctccaggagtcgccatcttaagtaactgcatgctggataacggtacctcgaatgg

SEQ ID NO: 102951 - DNA, 60 bp, Artificial
  Synthetic oligonucleotide
gtcctagagcaattttaggatgcgcacaagcaaaacaagcaatttcttgcttaagttctg

SEQ ID NO: 102952 - DNA, 60 bp, Artificial
  Synthetic oligonucleotide
gcatctaccgtaaaatacactgaaggagacactattaaaataccaccaggtattgcgaat

SEQ ID NO: 102953 - DNA, 60 bp, Artificial
  Synthetic oligonucleotide
ccgctatccattaatactcgtatgacagttgttagcgccgtccattttaaagcaatgtgg

SEQ ID NO: 102954 - DNA, 60 bp, Artificial
  Synthetic oligonucleotide
cgctatccattaatactcgtatgacagttgttagcgccgtccattttaaagcaatgtgga

SEQ ID NO: 102955 - DNA, 60 bp, Artificial
  Synthetic oligonucleotide
gaaaatggatatttccacattgctttaaaatggacggcgctaacaactgtcatacgagta

SEQ ID NO: 102956 - DNA, 60 bp, Artificial
  Synthetic oligonucleotide
gaaaatggatatttccacattgctttaaaatggacggcgctaataactgtcatacgagta

SEQ ID NO: 102957 - DNA, 60 bp, Artificial
  Synthetic oligonucleotide
ctcgcatgacagttgttagcgccgtccattttaaagcaatgtggaaatatccattttcta

SEQ ID NO: 102958 - DNA, 60 bp, Artificial
  Synthetic oligonucleotide
ctcgtatgacagttgttagcgccgtccattttaaagcaatgtggaaatatccattttcta

SEQ ID NO: 102959 - DNA, 60 bp, Artificial
  Synthetic oligonucleotide
gcgccgtccattttaaagcaatgtggaaatatccattttctaaacatcttacatatacag

SEQ ID NO: 102960 - DNA, 52 bp, Artificial
  Synthetic oligonucleotide
cttcccattgcaattggtaagatgacggccaactttagtacccacgtctttt

SEQ ID NO: 102961 - DNA, 51 bp, Artificial
  Synthetic oligonucleotide
cttcccattgcaattggtaagatgacggccaactttagtacccacgtcttt

SEQ ID NO: 102962 - DNA, 60 bp, Artificial
  Synthetic oligonucleotide
gcaagagctccatcctgcagaccatcgagatcgtgctcacgaaccgcacctgcgtgaaga

SEQ ID NO: 102963 - DNA, 59 bp, Artificial
  Synthetic oligonucleotide
aaaacgagccgaagacgcccgcgtacagtttgtccatttactactagatattaaacggg

SEQ ID NO: 102964 - DNA, 60 bp, Artificial
  Synthetic oligonucleotide
cgggcgtggggaccgggtactacaagtacttcgtgaacgtggagatgttcatgcggatgg

SEQ ID NO: 102965 - DNA, 60 bp, Artificial
  Synthetic oligonucleotide
ctgtttcagctaagcaactaagaacacgtatacggcagcagcttcctttatactctcatc

SEQ ID NO: 102966 - DNA, 60 bp, Artificial
  Synthetic oligonucleotide
tgtttcagctaagcaactaagaacacgtatacggcagcagcttccttttatactctcatc

SEQ ID NO: 102967 - DNA, 60 bp, Artificial
  Synthetic oligonucleotide
gtttcagctaagcaactaagaacacgtatacggcagcagcttccttctatactctcatct

SEQ ID NO: 102968 - DNA, 60 bp, Artificial
  Synthetic oligonucleotide
gaaggaagctgctgccgtatacgtgttcttagttgcttagctgaaacagatgtatgttta

SEQ ID NO: 102969 - DNA, 60 bp, Artificial
  Synthetic oligonucleotide
catatacatctgtttcagctaagcaactaagaacacgtatacggcagcagcttccttcta

SEQ ID NO: 102970 - DNA, 60 bp, Artificial
  Synthetic oligonucleotide
tctgtttcagctaagcaactaagaacacgtatacggcagcagcttccttctatactctca

SEQ ID NO: 102971 - DNA, 60 bp, Artificial
  Synthetic oligonucleotide
gtttcagctaagcaactaagaacacgtatacggcagcagcttccttttatactctcatct

SEQ ID NO: 102972 - DNA, 58 bp, Artificial
  Synthetic oligonucleotide
agattatctgataaagactatttctataatttaaaaggtcatagtggttcaaaaaata

SEQ ID NO: 102973 - DNA, 61 bp, Artificial
  Synthetic oligonucleotide
ggtattggtacagatgcaatagttgaaatagaatatagaggtggtgctattccaaaattag

SEQ ID NO: 102974 - DNA, 60 bp, Artificial
  Synthetic oligonucleotide
ttgaacccctcataacagcatttgatacaataattggttcttgccaatttgatttagtac

SEQ ID NO: 102975 - DNA, 60 bp, Artificial
  Synthetic oligonucleotide
gtggaccagtaattatatgtttatattgtgctgcaccaaatgttcctctaacaccagcca

SEQ ID NO: 102976 - DNA, 60 bp, Artificial
  Synthetic oligonucleotide
tggtattggtacagatgcaatagttgaaatagaatatagaggtggtgctattccaaaatt

SEQ ID NO: 102977 - DNA, 60 bp, Artificial
  Synthetic oligonucleotide
gcagcagtagaaattcttctagttgctagattatctttatctggatatatatcaggctga

SEQ ID NO: 102978 - DNA, 56 bp, Artificial
  Synthetic oligonucleotide
tgtggttcaatactgtctgtattttcgttattgcatggttcaggacatttctttgg

SEQ ID NO: 102979 - DNA, 59 bp, Artificial
  Synthetic oligonucleotide
taaatctaataaactatgtgtattttttacagcatttgccataggaaaatcatatataa

SEQ ID NO: 102980 - DNA, 60 bp, Artificial
  Synthetic oligonucleotide
atatctataaacaattacaaatcatttatatcaatgttacctacatattattatacatta

SEQ ID NO: 102981 - DNA, 60 bp, Artificial
  Synthetic oligonucleotide
tagaccaattttttagtcgttcatttggaaaaagggattttatatcagaacgttctaatg

SEQ ID NO: 102982 - DNA, 60 bp, Artificial
  Synthetic oligonucleotide
gcacaaatataatcaccacgcccattaacaacagcaaaccatccaggataaagccaattc

SEQ ID NO: 102983 - DNA, 59 bp, Artificial
  Synthetic oligonucleotide
atcttttattaatcattttgataaattggaatacttaagtattaatagtggatgcatat

SEQ ID NO: 102984 - DNA, 60 bp, Artificial
  Synthetic oligonucleotide
atgtaccaaaaaatgctaattatgtagaaaaaaattatgatgtaattacacaagatgaat

SEQ ID NO: 102985 - DNA, 61 bp, Artificial
  Synthetic oligonucleotide
gggataattcaattgagatttatagaatgatgaatgctggatttacatgcaaaggtccatc

SEQ ID NO: 102986 - DNA, 60 bp, Artificial
  Synthetic oligonucleotide
ttgcttaaaaaaatttttgttaatatgcaaataatagatataattaatctttatgaatct

SEQ ID NO: 102987 - DNA, 60 bp, Artificial
  Synthetic oligonucleotide
gcatgcacatggattagatgtagtttcacctaaatcagccaaatttgaagttggtacacc

SEQ ID NO: 102988 - DNA, 60 bp, Artificial
  Synthetic oligonucleotide
aagttgttcctgaaccatttgttgttcctgaaccatttgttgttccattgcatgcacatg

SEQ ID NO: 102989 - DNA, 60 bp, Artificial
  Synthetic oligonucleotide
taactatttcaactcattcaccttggttatatgaaaatagatatcattacattttactat

SEQ ID NO: 102990 - DNA, 59 bp, Artificial
  Synthetic oligonucleotide
ttttgcaataattggaccagcaacacctcttccagtattatcagaccttctagctaaaa

SEQ ID NO: 102991 - DNA, 56 bp, Artificial
  Synthetic oligonucleotide
gcttcagataatgcagaaatatctggatcagttcctaacattcctgaaatgccaat

SEQ ID NO: 102992 - DNA, 60 bp, Artificial
  Synthetic oligonucleotide
atatattgatagtaatggtttaaaatatcaatgttctagtatatattattcaaacatggg

SEQ ID NO: 102993 - DNA, 60 bp, Artificial
  Synthetic oligonucleotide
aactggtaaaattaatataatgacatcacaatctcatatttcttatagatcatataatat

SEQ ID NO: 102994 - DNA, 60 bp, Artificial
  Synthetic oligonucleotide
gccaaatttgaagttggtacaccaactgctgctgaaactcgtgttcttaacggaacacta

SEQ ID NO: 102995 - DNA, 53 bp, Artificial
  Synthetic oligonucleotide
tatgatgatattaaaattgtagaaaaagatccatcattatatagaccgtcaca

SEQ ID NO: 102996 - DNA, 60 bp, Artificial
  Synthetic oligonucleotide
ctatcgataaaacatgtctatttgggatttccgcacataatttagatgccgctattgata

SEQ ID NO: 102997 - DNA, 60 bp, Artificial
  Synthetic oligonucleotide
tgatacaacaaatagtagaaattctaattttttaagattgatatcaaaacctaatgatat

SEQ ID NO: 102998 - DNA, 60 bp, Artificial
  Synthetic oligonucleotide
gttcctttaacacttccgagttcgacgttgaacttgattttgcggttaatacaattaaac

SEQ ID NO: 102999 - DNA, 60 bp, Artificial
  Synthetic oligonucleotide
tagaatcaattgtaatacttgctttaaataatgtttgtctaaatttttcaagaaatacat

SEQ ID NO: 103000 - DNA, 60 bp, Artificial
  Synthetic oligonucleotide
atattcttcttctaatatacatttttttttgtctaataattttacttttaatcctttttg

SEQ ID NO: 103001 - DNA, 60 bp, Artificial
  Synthetic oligonucleotide
gccatttaatgaaggacaaacagttttgagtggtagagagttagtaaactggtcacaaac

SEQ ID NO: 103002 - DNA, 60 bp, Artificial
  Synthetic oligonucleotide
gcaaaacataccaattttccatttaattttcccaaccatgcatttggactatgtggattg

SEQ ID NO: 103003 - DNA, 60 bp, Artificial
  Synthetic oligonucleotide
ccaatcaggaagtggtaaatcttgaatattaactgggtcaactgacaatgcaagtaatcc

SEQ ID NO: 103004 - DNA, 60 bp, Artificial
  Synthetic oligonucleotide
gtgatccaaatcgtacattccatgtactatcattaacttgtgtcacttctactactttca

SEQ ID NO: 103005 - DNA, 60 bp, Artificial
  Synthetic oligonucleotide
ccatggccatggataaggataaggcaaaattgtttgatgtgtatcttcatctacaactgg

SEQ ID NO: 103006 - DNA, 51 bp, Artificial
  Synthetic oligonucleotide
cgtctaattggactattttcactatcatgcaacaataaaccacctggacca

SEQ ID NO: 103007 - DNA, 50 bp, Artificial
  Synthetic oligonucleotide
taagtattctgataaaatttgatgtttagctatatattcccaatgtaatt

SEQ ID NO: 103008 - DNA, 52 bp, Artificial
  Synthetic oligonucleotide
ccaaaattattaatgaaaactgtatgtggatgtatatattttttagatcgta

SEQ ID NO: 103009 - DNA, 61 bp, Artificial
  Synthetic oligonucleotide
gtgcattattagatttacaagttgctggaagtaatacagttagtgcaaaacaaactacagg

SEQ ID NO: 103010 - DNA, 65 bp, Artificial
  Synthetic oligonucleotide
gctgatgctgtattaaatagttcaataacagtaaataatattacagttgcggattgtgttgcacc

SEQ ID NO: 103011 - DNA, 60 bp, Artificial
  Synthetic oligonucleotide
gagttgaaaatagtcttacacaagaagcttcagcttccgcaactgcaaattgcaatgttg

SEQ ID NO: 103012 - DNA, 60 bp, Artificial
  Synthetic oligonucleotide
gggtcattaatcatatcaagtcttttgtaaactgaattagctgtcataactgatccacgt

SEQ ID NO: 103013 - DNA, 60 bp, Artificial
  Synthetic oligonucleotide
catactaggtgggtaatgcatatttccaactctagatgcccatatatttggtggataatt

SEQ ID NO: 103014 - DNA, 60 bp, Artificial
  Synthetic oligonucleotide
taaccaacagcttgcatactaggtgggtaatgcatatttccaactctagatgcccatata

SEQ ID NO: 103015 - DNA, 60 bp, Artificial
  Synthetic oligonucleotide
aacaactggtgaatgtgatagacgtgaacatccttatcgtgaaggaaatcctagaaatat

SEQ ID NO: 103016 - DNA, 60 bp, Artificial
  Synthetic oligonucleotide
gctgatccatgttttggaacacaaattgctatgggaactattgcaattgttagaactcaa

SEQ ID NO: 103017 - DNA, 56 bp, Artificial
  Synthetic oligonucleotide
tccaaaatatatacatccatgtttaaaatttgatggtgctatataatattcataag

SEQ ID NO: 103018 - DNA, 60 bp, Artificial
  Synthetic oligonucleotide
tgtatgaatacacatatgaaaattaatattccaacatattatatgcaatacatctattgg

SEQ ID NO: 103019 - DNA, 60 bp, Artificial
  Synthetic oligonucleotide
tcctttattggacattggatattgatatttttgatacattattaatattttaacatatca

SEQ ID NO: 103020 - DNA, 60 bp, Artificial
  Synthetic oligonucleotide
ttcaggcaatctacattcatttaaatttgaattatgaatatatccaggatctaataattt

SEQ ID NO: 103021 - DNA, 60 bp, Artificial
  Synthetic oligonucleotide
gcattctacacatatatgtgatataggcatatatttaggatcagggaatgaaccagtttg

SEQ ID NO: 103022 - DNA, 50 bp, Artificial
  Synthetic oligonucleotide
caaggtgctcatcaccaccatggacggggactacgtggcctccctcgccg

SEQ ID NO: 103023 - DNA, 58 bp, Artificial
  Synthetic oligonucleotide
gtacactcaccgtctgcgtttatgaaactaaacggagtatacggatttacccacaaaa

SEQ ID NO: 103024 - DNA, 60 bp, Artificial
  Synthetic oligonucleotide
cccagagctattttaggatgcgcacaagcaaaacaagcaatttcatgtttaagctctgac

SEQ ID NO: 103025 - DNA, 60 bp, Artificial
  Synthetic oligonucleotide
cccattgcaattggtaagatgacggccaactttagtacccacgtcttttcaccacagcac

SEQ ID NO: 103026 - DNA, 60 bp, Artificial
  Synthetic oligonucleotide
cgttgttacgttgttatgcgtactacctgcggttgtttattcaacatgtactgtacccac

SEQ ID NO: 103027 - DNA, 60 bp, Artificial
  Synthetic oligonucleotide
tacgaggagcaccagctgttacatcttttggcgttgggctattgttgctagcaggtggcg

SEQ ID NO: 103028 - DNA, 60 bp, Artificial
  Synthetic oligonucleotide
ccggagattcgaaaggcacgccggtagcatccgtggggtaaggatctataccgactatac

SEQ ID NO: 103029 - DNA, 60 bp, Artificial
  Synthetic oligonucleotide
ggagagggttgctcgggtggtttactttcgctaggttggggctgtggctcagaaccagca

SEQ ID NO: 103030 - DNA, 60 bp, Artificial
  Synthetic oligonucleotide
gcgaagtattaatcgtttcttctgtattgggtgttaaagaccattggatgccgtttacca

SEQ ID NO: 103031 - DNA, 60 bp, Artificial
  Synthetic oligonucleotide
tctacttgctgcatggctagaataacagtctcgtcagacattgcgcagttaatatcaccg

SEQ ID NO: 103032 - DNA, 60 bp, Artificial
  Synthetic oligonucleotide
gtactctttcatccagattttcaagtagttctcctaccgatacacctcccgccgatacta

SEQ ID NO: 103033 - DNA, 60 bp, Artificial
  Synthetic oligonucleotide
gcctccagcttcataaccactgctctaccgttcgctcctaattctttagacgcacgactt

SEQ ID NO: 103034 - DNA, 60 bp, Artificial
  Synthetic oligonucleotide
ggatcgtagagtagtctcgtgttctagtacgcctacccctatacccgttatttcagatgt

SEQ ID NO: 103035 - DNA, 60 bp, Artificial
  Synthetic oligonucleotide
gccatccttcttctagatatactcccagtatctccgttctgaaccctgatccgtaatgca

SEQ ID NO: 103036 - DNA, 60 bp, Artificial
  Synthetic oligonucleotide
ccataatacacgattcatatatttcagctaccgtcatttggtgttttgccgccgtggtga

SEQ ID NO: 103037 - DNA, 60 bp, Artificial
  Synthetic oligonucleotide
ttgtattaaccccgagagtactaattgcgttcactcgactaatgatgttaaagcccggac

SEQ ID NO: 103038 - DNA, 60 bp, Artificial
  Synthetic oligonucleotide
ctgatgtacttgtgcgtgaccttgtcttcctgtcgctattcccatagctcttgcggcctc

SEQ ID NO: 103039 - DNA, 60 bp, Artificial
  Synthetic oligonucleotide
agggatccgacgcggctgccaagacctttatacccgactcttgttctactggacgaacgc

SEQ ID NO: 103040 - DNA, 60 bp, Artificial
  Synthetic oligonucleotide
gtaaaggtcgcgcttgtttatattcgctcctagaccgaggatgagtgatacaatttcagg

SEQ ID NO: 103041 - DNA, 60 bp, Artificial
  Synthetic oligonucleotide
ggaccagtacgcggctttctgcctaccgattccatagccgtgataatatcgtctggtgac

SEQ ID NO: 103042 - DNA, 60 bp, Artificial
  Synthetic oligonucleotide
gctatgtaggtagccaattgattcttgacggtattttcagcttcttcaccaacttcttct

SEQ ID NO: 103043 - DNA, 60 bp, Artificial
  Synthetic oligonucleotide
ctagaggagccgacactgatgtgcccaacactgatcgttttacgcctctccatttagctg

SEQ ID NO: 103044 - DNA, 60 bp, Artificial
  Synthetic oligonucleotide
cattccagcaaaagcaacctgcggagacgcgataatacccgatgctgtaacgacgcttcc

SEQ ID NO: 103045 - DNA, 60 bp, Artificial
  Synthetic oligonucleotide
gcgaactacaaaccaggggacaaacctataagagtaaacaaaggaaccagcgaaacacgt

SEQ ID NO: 103046 - DNA, 60 bp, Artificial
  Synthetic oligonucleotide
gcgccggtctgaatcctacaatagatagaatcgaagctagcatttgttcttcgtcggcca

SEQ ID NO: 103047 - DNA, 58 bp, Artificial
  Synthetic oligonucleotide
acgcacgttctggaccgccaaggcatcctcaccgcttttaccaaatcgtcgaatagtt

SEQ ID NO: 103048 - DNA, 60 bp, Artificial
  Synthetic oligonucleotide
cgcacctagccttcttaccgcggcgcttaacattcaaactaacgtgagtacgataacgca

SEQ ID NO: 103049 - DNA, 60 bp, Artificial
  Synthetic oligonucleotide
tagccccatcacccgtaacaccagattcccttttctgttggatgcctacctgaaggtgcg

SEQ ID NO: 103050 - DNA, 60 bp, Artificial
  Synthetic oligonucleotide
ttcctctgtaactcggtaaggcccgccacttgcaaatgcgtccactgtctcttgtatccc

SEQ ID NO: 103051 - DNA, 60 bp, Artificial
  Synthetic oligonucleotide
cggctattctcagaagtggttcacgccctttctttaacaggaccttgcacatttccgggt

SEQ ID NO: 103052 - DNA, 60 bp, Artificial
  Synthetic oligonucleotide
cggccttttctttgcgtcatcatagacttggatataaacagttgatcacctccgaagggt

SEQ ID NO: 103053 - DNA, 60 bp, Artificial
  Synthetic oligonucleotide
gtgaagaaccttacggcgcatcacattccagtgtaattattgaggtcaaagctagtaact

SEQ ID NO: 103054 - DNA, 60 bp, Artificial
  Synthetic oligonucleotide
gacaaacttaacggattcggccccatttgtatatctgtcactaactggaaactgatacac

SEQ ID NO: 103055 - DNA, 60 bp, Artificial
  Synthetic oligonucleotide
cggttctttacgtgtggatgtagcggatgtagatcttttcttcctcttcttagcacctgc

SEQ ID NO: 103056 - DNA, 60 bp, Artificial
  Synthetic oligonucleotide
gtcggcaccgtcaaggacagtaggctaggagcaaccgatggagtattatgtagaacgtgc

SEQ ID NO: 103057 - DNA, 60 bp, Artificial
  Synthetic oligonucleotide
gattgccctaaactagaagatactaagtcatcgctgccaagtacgtgcaataaagccata

SEQ ID NO: 103058 - DNA, 60 bp, Artificial
  Synthetic oligonucleotide
ggatgtggtggatttgggtgtgtatactctactcaatgtgctagtaatacaaggcaagcc

SEQ ID NO: 103059 - DNA, 60 bp, Artificial
  Synthetic oligonucleotide
tttgtccatccgcaatgagggtctctactcaggagacaactatcgcacgtaccgccgtat

SEQ ID NO: 103060 - DNA, 60 bp, Artificial
  Synthetic oligonucleotide
ccgtctacgttcacgctcgtaatttctctaccttctttggtcaatgccgttgctaatctg

SEQ ID NO: 103061 - DNA, 60 bp, Artificial
  Synthetic oligonucleotide
cacacatgtgtcagaactgttaagcagcgtgcctctgtagtttattctgttacggttgac

SEQ ID NO: 103062 - DNA, 60 bp, Artificial
  Synthetic oligonucleotide
cccgaagtctgttgttcccattttcgtgtaataccgtcaatcttccaccattttatgttg

SEQ ID NO: 103063 - DNA, 60 bp, Artificial
  Synthetic oligonucleotide
ccctttccgtaataagcacccaaaactactagatcagctttatccgccataacacatcca

SEQ ID NO: 103064 - DNA, 60 bp, Artificial
  Synthetic oligonucleotide
gggcaaggtgattggggcttatctactttcagtacgcaactcgtttcttgtttcatgcaa

SEQ ID NO: 103065 - DNA, 60 bp, Artificial
  Synthetic oligonucleotide
gcgagtaagagataacaatccacaaacagcgcctattcctcgcttacaccggatagatgg

SEQ ID NO: 103066 - DNA, 60 bp, Artificial
  Synthetic oligonucleotide
tatacggagcggaagtaaattccccagatataggtaataattctcccatgcatgaagctg

SEQ ID NO: 103067 - DNA, 60 bp, Artificial
  Synthetic oligonucleotide
ccatttcatcgtattctatgtcacctaccttatcgtccgcatttggttcttgtttgcttt

SEQ ID NO: 103068 - DNA, 60 bp, Artificial
  Synthetic oligonucleotide
gtgcggttactagatatccccatctctccagaacagcagcatagtgttaggacaatcatc

SEQ ID NO: 103069 - DNA, 60 bp, Artificial
  Synthetic oligonucleotide
ccacaccacccgctctagcatccacttttacttcgctatcttccatagttctagtcctgt

SEQ ID NO: 103070 - DNA, 60 bp, Artificial
  Synthetic oligonucleotide
ccgattccatttcgctaatgggtttaccaccgggaccggcccaaaacattctcgctgacg

SEQ ID NO: 103071 - DNA, 60 bp, Artificial
  Synthetic oligonucleotide
ctacgatgatgattgtgttccttataaagaaacccagcctcgacatatgccagaatcggt

SEQ ID NO: 103072 - DNA, 60 bp, Artificial
  Synthetic oligonucleotide
ttactgacgtctattgtaagagcctgggatacaaacaaaccactcattttctgtcctgca

SEQ ID NO: 103073 - DNA, 60 bp, Artificial
  Synthetic oligonucleotide
aaagatagtctggatatgagctgaccgtcgcctattattccatcattttcactccctcca

SEQ ID NO: 103074 - DNA, 60 bp, Artificial
  Synthetic oligonucleotide
gtgtgctgggatatattggccacctgactatgacccatgcgcttcatcgatggtgttagg

SEQ ID NO: 103075 - DNA, 60 bp, Artificial
  Synthetic oligonucleotide
gctgcaccaaccggaacaacgacaaactttgaatttattaattctggaaccagtcaggga

SEQ ID NO: 103076 - DNA, 60 bp, Artificial
  Synthetic oligonucleotide
caggatcaagggtttgtatgatgccagattcagatattacaataacgttagcatatagac

SEQ ID NO: 103077 - DNA, 60 bp, Artificial
  Synthetic oligonucleotide
aaactatcgttgcatcggaaaatagtgttgttgaaatactagttcgttggttaacttcac

SEQ ID NO: 103078 - DNA, 60 bp, Artificial
  Synthetic oligonucleotide
ccatcagaagataaacacgctgctatatatattggatccgactgtacatctaaccatgtt

SEQ ID NO: 103079 - DNA, 60 bp, Artificial
  Synthetic oligonucleotide
agtgctgatttcactagcgaaatatcgttgtcagaaacgaggtctcgaagcaataccaac

SEQ ID NO: 103080 - DNA, 55 bp, Artificial
  Synthetic oligonucleotide
gaatattccctcaactgcagcaaacgctattaatcgttctccaaacgatgctttt

SEQ ID NO: 103081 - DNA, 60 bp, Artificial
  Synthetic oligonucleotide
actcaacacaacatccgcatctaaagttctagaatatcctaatatatgatcaggagaatc

SEQ ID NO: 103082 - DNA, 65 bp, Artificial
  Synthetic oligonucleotide
ggtatcattgacattaacaacacatggattgtatctaggatatagtaaatttggttcttctctcc

SEQ ID NO: 103083 - DNA, 60 bp, Artificial
  Synthetic oligonucleotide
ctacccatggttttatccgtcatctgtgcaacgttcatgaaatttaaagcatccctagct

SEQ ID NO: 103084 - DNA, 61 bp, Artificial
  Synthetic oligonucleotide
gttagaaatagcatgtctcaatactattctatggttggtgatgatttagtttggaacagag

SEQ ID NO: 103085 - DNA, 58 bp, Artificial
  Synthetic oligonucleotide
aaaatggaggttatcagattaatgatatgggcgtacctaagtaaacaagataccggat

SEQ ID NO: 103086 - DNA, 60 bp, Artificial
  Synthetic oligonucleotide
tgaattttgactccaccgtcatatccaaatccatggaaggaaacacgtcaagtaatctag

SEQ ID NO: 103087 - DNA, 60 bp, Artificial
  Synthetic oligonucleotide
ggaactacatctgaaatttcgcgaccaacgattggtataacatataatggaatatctgcc

SEQ ID NO: 103088 - DNA, 60 bp, Artificial
  Synthetic oligonucleotide
gaaacaagcgatgttccgtctttgaagcaatctaattataaagttggttcgtccatatct

SEQ ID NO: 103089 - DNA, 60 bp, Artificial
  Synthetic oligonucleotide
gaattctccttttcattggtaaagatctttgtctagcccctgctgagataatatcgtctg

SEQ ID NO: 103090 - DNA, 60 bp, Artificial
  Synthetic oligonucleotide
cagaccacgaaaatgatttcagtaatataatatttccaggtggggtaattagaaacgagg

SEQ ID NO: 103091 - DNA, 60 bp, Artificial
  Synthetic oligonucleotide
ggacaacaaaggattgatggcgaacctacagaaacaagggtgatgggaagggtgttaccg

SEQ ID NO: 103092 - DNA, 60 bp, Artificial
  Synthetic oligonucleotide
gtatgaaccgtttgtgtggggagttaattttaggaaagaacataatcttgtatcatcgcc

SEQ ID NO: 103093 - DNA, 60 bp, Artificial
  Synthetic oligonucleotide
ttgtccgtcagatgttcctgaaagaggtccacaagtaggtctagtgtcacaattatctgt

SEQ ID NO: 103094 - DNA, 60 bp, Artificial
  Synthetic oligonucleotide
caaaagctttaattggtgggttggtagattctaagatagagacatctagtgctgcgtatg

SEQ ID NO: 103095 - DNA, 60 bp, Artificial
  Synthetic oligonucleotide
ggatccatggcagattctgcagacttagtagttttaggatcatattacggtaaagggtct

SEQ ID NO: 103096 - DNA, 60 bp, Artificial
  Synthetic oligonucleotide
ggacctagagctattttgggatgcgcacaagcaaagcaggccatatcttgtttaagttca

SEQ ID NO: 103097 - DNA, 60 bp, Artificial
  Synthetic oligonucleotide
gctcatacaaggcatgtgtagaggcattagagttgtcattagatgatgtaacagtcagac

SEQ ID NO: 103098 - DNA, 60 bp, Artificial
  Synthetic oligonucleotide
gtggcgggacccctataggtattattgctgctcaggtattatctgaaaagtttactcaac

SEQ ID NO: 103099 - DNA, 60 bp, Artificial
  Synthetic oligonucleotide
cacgtcaaacgaaaatgttgcagccattcttctataaattctaaacgatgatataccaga

SEQ ID NO: 103100 - DNA, 60 bp, Artificial
  Synthetic oligonucleotide
ttcccacttgttaacagctctaatctgtttgaaatataccgtaaatcaaagttgtttccg

SEQ ID NO: 103101 - DNA, 60 bp, Artificial
  Synthetic oligonucleotide
gttctttgattaagaacatagatttgcttaaatcgcttgcggaatgtggcaaatctcaag

SEQ ID NO: 103102 - DNA, 60 bp, Artificial
  Synthetic oligonucleotide
ttaaatccatttccctctgttagaagtcctccaggtccttgaattttataacagccagtt

SEQ ID NO: 103103 - DNA, 60 bp, Artificial
  Synthetic oligonucleotide
gggttgttatacaattctgatacaaaagtaatatcagtatcgccggtaatggttggttac

SEQ ID NO: 103104 - DNA, 59 bp, Artificial
  Synthetic oligonucleotide
aagagggcgcagaattatccgcagcatcatattgttgtgtagctgattgtggatgcaat

SEQ ID NO: 103105 - DNA, 64 bp, Artificial
  Synthetic oligonucleotide
cctattctgatatctgcaaaggcggataattatgatgcgtttaatcatttactgaaattaggag

SEQ ID NO: 103106 - DNA, 65 bp, Artificial
  Synthetic oligonucleotide
gatgccttctatattcctatcaaatacagcaatttcagaaattaaatcatcgcatctaggttcac

SEQ ID NO: 103107 - DNA, 66 bp, Artificial
  Synthetic oligonucleotide
cagaattgcaatgttttggacattggggaaaagtaagactttatgagacacatataataaaaccag

SEQ ID NO: 103108 - DNA, 60 bp, Artificial
  Synthetic oligonucleotide
aaaaccagcagcatctagtttaaaatggcgatgtccattccctgatcaatgggtaaaaga

SEQ ID NO: 103109 - DNA, 60 bp, Artificial
  Synthetic oligonucleotide
tatcatcgtcagatattgtttctggatgaagctctaaattaaacgaaaacatagccaccg

SEQ ID NO: 103110 - DNA, 65 bp, Artificial
  Synthetic oligonucleotide
ccgccatctaaagaaaacaaaactcttacattgtcactaattgaaacatccgttaatgttattcc

SEQ ID NO: 103111 - DNA, 60 bp, Artificial
  Synthetic oligonucleotide
atcttcaacgctctagcactaatactatttaataccaattgatcgtcattatccgccatt

SEQ ID NO: 103112 - DNA, 61 bp, Artificial
  Synthetic oligonucleotide
cacgatattaacgtttctaccgcatctatagttttagattttccttttatagatcgacacc

SEQ ID NO: 103113 - DNA, 61 bp, Artificial
  Synthetic oligonucleotide
ctagttttatcagtacattcgtgtaacaaacatactctagggcctaaatatctatcaaacg

SEQ ID NO: 103114 - DNA, 60 bp, Artificial
  Synthetic oligonucleotide
catgcctaaagatatcaactgcgccattagctacttgaaataaagctaaccctccaatag

SEQ ID NO: 103115 - DNA, 60 bp, Artificial
  Synthetic oligonucleotide
cgaatccgccttctactggtttaacatatccgcctacaaacctagaattatactcaggat

SEQ ID NO: 103116 - DNA, 60 bp, Artificial
  Synthetic oligonucleotide
gactcaacgctgtgatgtactgatctctaatctcaaacgtcgaaacaacattttgtgtac

SEQ ID NO: 103117 - DNA, 60 bp, Artificial
  Synthetic oligonucleotide
ctagaaccgatgtttctaacttatgcgaatgtacatctgaaactagtgatccctctaaaa

SEQ ID NO: 103118 - DNA, 60 bp, Artificial
  Synthetic oligonucleotide
gggacactgtttcactgttctaaagatgaaagactgagtatcccaataaatggcttgtat

SEQ ID NO: 103119 - DNA, 60 bp, Artificial
  Synthetic oligonucleotide
ctctttgacattaaatatgccattatcatcgcaccacttctattaacgccggcaacacaa

SEQ ID NO: 103120 - DNA, 60 bp, Artificial
  Synthetic oligonucleotide
gcgtgctctgttgtcgctgggaaggtaaacgtaaacatgggagttaaaggttcacacgat

SEQ ID NO: 103121 - DNA, 60 bp, Artificial
  Synthetic oligonucleotide
gcattgttagtagcaactgacccagataaagacgcaataagtagatgtatagaaagatat

SEQ ID NO: 103122 - DNA, 63 bp, Artificial
  Synthetic oligonucleotide
ggtgctctaaacaaaatttatctactatactaaccaaagttgatacaacacacgtagcaaagg

SEQ ID NO: 103123 - DNA, 60 bp, Artificial
  Synthetic oligonucleotide
ctatatccagtgtaacactccccaccaaatgtatttctgtgctgtctacgctcaacgtaa

SEQ ID NO: 103124 - DNA, 60 bp, Artificial
  Synthetic oligonucleotide
gctagaatcaattgagatgtcttcttcagtggatgttgatatctacgatgccgttagagc

SEQ ID NO: 103125 - DNA, 60 bp, Artificial
  Synthetic oligonucleotide
tcagcgtctccggggacaggttggcgtacatgcacacgttcgggtacaggctgttgtagt

SEQ ID NO: 103126 - DNA, 60 bp, Artificial
  Synthetic oligonucleotide
gatagaatacatgatttctttatcgatcctatctttgtgcacatacctggtcctacgcgt

SEQ ID NO: 103127 - DNA, 60 bp, Artificial
  Synthetic oligonucleotide
gacggcggccatacaccaaacggtgctttctctataacatctcttatatgatctacttgt

SEQ ID NO: 103128 - DNA, 60 bp, Artificial
  Synthetic oligonucleotide
ggttttgaagaaagtatgattcgccccgaagatattgaaatggcatctaagcctaaacct

SEQ ID NO: 103129 - DNA, 60 bp, Artificial
  Synthetic oligonucleotide
ccccatacatcgcataatcctggacattcgcatggacacattagagaccattcttcatct

SEQ ID NO: 103130 - DNA, 60 bp, Artificial
  Synthetic oligonucleotide
gatacaaagcgaaggtcttggaaattaggaacattaataggtaagggtggatttggatgc

SEQ ID NO: 103131 - DNA, 60 bp, Artificial
  Synthetic oligonucleotide
gtccttagtcggaataaatcataattctggacctcgtgctatattaggttgtgcgcaagc

SEQ ID NO: 103132 - DNA, 60 bp, Artificial
  Synthetic oligonucleotide
tagtacaaacggttctccattcgtcatgactgtactgcattaattctacatcgtatgata

SEQ ID NO: 103133 - DNA, 60 bp, Artificial
  Synthetic oligonucleotide
tactttacataccacttgacccaaaaccactatttccacgttctgtatcttccaaacatt

SEQ ID NO: 103134 - DNA, 60 bp, Artificial
  Synthetic oligonucleotide
cgtggaggagtacacattatatgtaatggtttaggtgaatttgggtctagttatgttggt

SEQ ID NO: 103135 - DNA, 60 bp, Artificial
  Synthetic oligonucleotide
gggctatgtgtactcgtcgctacatccagagatcattgcgccataacagaagaacgatgg

SEQ ID NO: 103136 - DNA, 60 bp, Artificial
  Synthetic oligonucleotide
gccagatcccgatccacccactaacgctaatctaaatggcgatttgtttagacttcttct

SEQ ID NO: 103137 - DNA, 60 bp, Artificial
  Synthetic oligonucleotide
gaccattggttgaatcgaaaactaaactggaaagtgacagaggtcgtatattgtcagctg

SEQ ID NO: 103138 - DNA, 60 bp, Artificial
  Synthetic oligonucleotide
gtgcctctatctaaacctggcctatgcgatcaccttttcggagactatctcgttagcgcg

SEQ ID NO: 103139 - DNA, 60 bp, Artificial
  Synthetic oligonucleotide
ggccatgacaggatcacctaaagctgcaatcgccggattggcattacagggtatatcggg

SEQ ID NO: 103140 - DNA, 60 bp, Artificial
  Synthetic oligonucleotide
atatctaagtccaaatgtgttgaaagggatcaaggaatcgaggaaaacgaagatggagaa

SEQ ID NO: 103141 - DNA, 60 bp, Artificial
  Synthetic oligonucleotide
cactatttggtacttcaacgagttctgcagtctctggaaaccattttggagatgcatcac

SEQ ID NO: 103142 - DNA, 60 bp, Artificial
  Synthetic oligonucleotide
tctggtaacgagtcaaatgtaaacgttgccgccattctcctataaatacgaaatgctgat

SEQ ID NO: 103143 - DNA, 60 bp, Artificial
  Synthetic oligonucleotide
acgaagttcgaagaggattcttctgaaattttaatcgcagaacagcaacgacaacagcgg

SEQ ID NO: 103144 - DNA, 60 bp, Artificial
  Synthetic oligonucleotide
ggagcaaacatgaacataacaacgaacgatggtaatacatgtggttcgtttgctgtaatg

SEQ ID NO: 103145 - DNA, 60 bp, Artificial
  Synthetic oligonucleotide
cattcctattgtcataacaataccgaggacaaacgctataccactaagagctcgccatac

SEQ ID NO: 103146 - DNA, 60 bp, Artificial
  Synthetic oligonucleotide
ccttgtccgacgtgtagaattcatgccaaagaagaattaactaaacataatatcatgtcc

SEQ ID NO: 103147 - DNA, 60 bp, Artificial
  Synthetic oligonucleotide
tatgggcatatctatcaaaacaagatacaggattggaattttcagatcacgacgctcaag

SEQ ID NO: 103148 - DNA, 60 bp, Artificial
  Synthetic oligonucleotide
aggtaaatattttagacaacgcggggattataagcctctatttagtcgcttgaaagacga

SEQ ID NO: 103149 - DNA, 56 bp, Artificial
  Synthetic oligonucleotide
ataattcccaatcctctagcaacatcctcttcgcatgtttcattcatggacatttt

SEQ ID NO: 103150 - DNA, 60 bp, Artificial
  Synthetic oligonucleotide
cctatgttcctggtttgttgacggctgctttaaatatacaaactagcgtgaataccgttg

SEQ ID NO: 103151 - DNA, 60 bp, Artificial
  Synthetic oligonucleotide
tcagaactataatctgatgaattcgatccagcggaaaataattgcattgattggttaggc

SEQ ID NO: 103152 - DNA, 60 bp, Artificial
  Synthetic oligonucleotide
gcatcggcaatatatttgtagtatcccttatagcgttcaaaagaaacaaatccataacag

SEQ ID NO: 103153 - DNA, 60 bp, Artificial
  Synthetic oligonucleotide
tatacatatcgtcgctgtaaatccgtacgatgaacctacatgaatggcgccctttgaaaa

SEQ ID NO: 103154 - DNA, 60 bp, Artificial
  Synthetic oligonucleotide
ggtttccgaacgacttaaaggtatcaaatcttctctgtaaatccgtagccaatggtttgt

SEQ ID NO: 103155 - DNA, 60 bp, Artificial
  Synthetic oligonucleotide
ccagaaaagaatattccctccacagctgcaaatgctactactctttctccatataccttg

SEQ ID NO: 103156 - DNA, 60 bp, Artificial
  Synthetic oligonucleotide
caaagggtgcaatgctttcgagaaccagtaatagtgtattcgcaccatctgtgttagaaa

SEQ ID NO: 103157 - DNA, 60 bp, Artificial
  Synthetic oligonucleotide
gactttgctccggactatcgttatgatccgtacgtaaatgaattgcttcctgatacggac

SEQ ID NO: 103158 - DNA, 60 bp, Artificial
  Synthetic oligonucleotide
cgctagaaaacgccatactaccatccgtgtcccatacggataaatttagcttctcatcgg

SEQ ID NO: 103159 - DNA, 60 bp, Artificial
  Synthetic oligonucleotide
gtttacatggatccacaaaacagtgcattacattcttctttggtgaaacagcaactggga

SEQ ID NO: 103160 - DNA, 60 bp, Artificial
  Synthetic oligonucleotide
tcattaagagttctgagttccgaaccacatgcagaacacgataatgtattaccttttcct

SEQ ID NO: 103161 - DNA, 60 bp, Artificial
  Synthetic oligonucleotide
tcagtacaatgacggctaaaatattcgatcatgacaaatcatcattggtgtcgtacatta

SEQ ID NO: 103162 - DNA, 60 bp, Artificial
  Synthetic oligonucleotide
cggatagacagtaagcaatcactaacgatggaaatggaagcaatgcagaggcaaccgcga

SEQ ID NO: 103163 - DNA, 60 bp, Artificial
  Synthetic oligonucleotide
cacggtggattcattttgtgaacatgcaaattatggtatgaacgaacgaagagtagattg

SEQ ID NO: 103164 - DNA, 60 bp, Artificial
  Synthetic oligonucleotide
gcgcttgtaggacgttcgtcaccaccccaataggatgcggctcttgctaatagaccaacg

SEQ ID NO: 103165 - DNA, 60 bp, Artificial
  Synthetic oligonucleotide
gttgcgctattagttgctaccgatcctgacaaagacgctattcgaagatgtatggaacga

SEQ ID NO: 103166 - DNA, 60 bp, Artificial
  Synthetic oligonucleotide
catactatggaaaagggtcaaggggcggcattcaatcaatattcttaatgggatgttacg

SEQ ID NO: 103167 - DNA, 60 bp, Artificial
  Synthetic oligonucleotide
gattatgcgaaggatatcatggattacacatacatgaatttggggacgaaacggacgatg

SEQ ID NO: 103168 - DNA, 60 bp, Artificial
  Synthetic oligonucleotide
catatccgtgttccgatactatcccgttatgtgaacaaccgctacacattttaagattca

SEQ ID NO: 103169 - DNA, 60 bp, Artificial
  Synthetic oligonucleotide
cgagcgatgttccctctttaaaaccatcaaattacaaggatatatctacaaacgtggaag

SEQ ID NO: 103170 - DNA, 60 bp, Artificial
  Synthetic oligonucleotide
cggtacagtaaaagatggtagattgggtgccatggatggttcattgtgtagaacgtgtgg

SEQ ID NO: 103171 - DNA, 60 bp, Artificial
  Synthetic oligonucleotide
ccatgtgaaagaaccatgtcaccatgtgaaagagctgcgcggtcttcatcgccaactaga

SEQ ID NO: 103172 - DNA, 60 bp, Artificial
  Synthetic oligonucleotide
gcatttggatgtatgccgcttactatcatacgcattgcatcattgatccgtaatgttccg

SEQ ID NO: 103173 - DNA, 64 bp, Artificial
  Synthetic oligonucleotide
cacaacaagcattatcaagttttcatactacagagaaaagtggtgctataaaacataaactggg

SEQ ID NO: 103174 - DNA, 60 bp, Artificial
  Synthetic oligonucleotide
gtgcacgaacaaagacaaacgtggttataaacaaaagccattacccggattggaaactaa

SEQ ID NO: 103175 - DNA, 52 bp, Artificial
  Synthetic oligonucleotide
tctctacgatcatatcggcgtctcgatttaacttctcgagctctcgataaaa

SEQ ID NO: 103176 - DNA, 60 bp, Artificial
  Synthetic oligonucleotide
ggccatcattggactttgtgcatatgctgctacttactggggaggtaaagaccatcccac

SEQ ID NO: 103177 - DNA, 60 bp, Artificial
  Synthetic oligonucleotide
ggccatcatcggactttgtgcatatgctgctacttactggggaggtaaagaccatcccac

SEQ ID NO: 103178 - DNA, 60 bp, Artificial
  Synthetic oligonucleotide
ggccatcatcggactttgtgcatatgctgctacttactggggaggcgaagaccatcccac

SEQ ID NO: 103179 - DNA, 60 bp, Artificial
  Synthetic oligonucleotide
ggccatcatcggactttgtgcatatgctgctacttactggggaggcaaagaccatcccac

SEQ ID NO: 103180 - DNA, 60 bp, Artificial
  Synthetic oligonucleotide
ccattaatagcggcaaggagaacatcgtttgcgtttcaggaaattatgacccaaagaaaa

SEQ ID NO: 103181 - DNA, 60 bp, Artificial
  Synthetic oligonucleotide
aagttgtcgatcaaggaaacacttacatgtttatacagtcaccgatagatgattgtgata

SEQ ID NO: 103182 - DNA, 60 bp, Artificial
  Synthetic oligonucleotide
caagcctttaatagccgctaggagaacatcgtttgcgtttcaggaaattatgatgcaaag

SEQ ID NO: 103183 - DNA, 60 bp, Artificial
  Synthetic oligonucleotide
cgttgttacgttgttatgcgtactaccggctgttgtttattcaacatgtactgtacccac

SEQ ID NO: 103184 - DNA, 64 bp, Artificial
  Synthetic oligonucleotide
gcaacgaaactagtattgatacgtacttagattttgcaaaacagtgttatgaatgcgtatatcc

SEQ ID NO: 103185 - DNA, 60 bp, Artificial
  Synthetic oligonucleotide
attagccattactgggtcatcaaatgcagctattgcgggtttagccattcaagggatcgc

SEQ ID NO: 103186 - DNA, 60 bp, Artificial
  Synthetic oligonucleotide
cctggcgtgtggggactcctagaaatattaaaccaatcagccctaaaatttacgtttccg

SEQ ID NO: 103187 - DNA, 61 bp, Artificial
  Synthetic oligonucleotide
ggggatattgaactcgtcagataagtaaattaccgtgtctaagtccattaaaatattatcg

SEQ ID NO: 103188 - DNA, 60 bp, Artificial
  Synthetic oligonucleotide
acgcttatgggtggataccagaaacagctatatggagtagcaggtttgcaaatttagatg

SEQ ID NO: 103189 - DNA, 60 bp, Artificial
  Synthetic oligonucleotide
catgcttaactcatgggaggattccgacatattaaggcacaggcaattcattccgtgcga

SEQ ID NO: 103190 - DNA, 60 bp, Artificial
  Synthetic oligonucleotide
caggcagagtttatataccggcaccctttggtggcaaagaaatgtttatatcaaaatcca

SEQ ID NO: 103191 - DNA, 60 bp, Artificial
  Synthetic oligonucleotide
cgttattgttattaacgtgataagttgtgtttgaaaccccaccaacccctttgtggctgg

SEQ ID NO: 103192 - DNA, 60 bp, Artificial
  Synthetic oligonucleotide
gccgcatttgtcagcaaggatcgtacacctaacagattttcgaagtccctataaaagata

SEQ ID NO: 103193 - DNA, 60 bp, Artificial
  Synthetic oligonucleotide
cacttttccagcaggagagcggcttctgtacgaatacattgaccaatatatgtaatcaac

SEQ ID NO: 103194 - DNA, 60 bp, Artificial
  Synthetic oligonucleotide
gcggttcccgattttgcgttccagttaaaggtatcatcaattatagttgctagctctagc

SEQ ID NO: 103195 - DNA, 60 bp, Artificial
  Synthetic oligonucleotide
cgggcagtgacttttaccagacgttgttatatctattgaccaatctctacaagtaaactg

SEQ ID NO: 103196 - DNA, 60 bp, Artificial
  Synthetic oligonucleotide
ctccggaagagccaaagccggaatcccctctacacgtgcaatctaaattagtaatttcct

SEQ ID NO: 103197 - DNA, 60 bp, Artificial
  Synthetic oligonucleotide
cataacgacgatattgtaactgtaccgtttaagctttcacatgagccatttgtgtggggt

SEQ ID NO: 103198 - DNA, 60 bp, Artificial
  Synthetic oligonucleotide
gctataaatgttatctaaaagctgatacaacattggactagcagcagttggctttacttt

SEQ ID NO: 103199 - DNA, 60 bp, Artificial
  Synthetic oligonucleotide
cggaaaaggattagtaacacacgataataattcaatacccgcaattccggttaactcact

SEQ ID NO: 103200 - DNA, 60 bp, Artificial
  Synthetic oligonucleotide
caaggtaaattgtgtagtagttacaaaagtgttacgtttgttgttaaaatacggcgcgga

SEQ ID NO: 103201 - DNA, 60 bp, Artificial
  Synthetic oligonucleotide
ggattggatatgatggacaaggtggggtatagtggatactttatggaatctcactggtgt

SEQ ID NO: 103202 - DNA, 60 bp, Artificial
  Synthetic oligonucleotide
gagtaaaacaattccgtggaagacacgtgtatatcaaacaagttagcagaaaggcgtagg

SEQ ID NO: 103203 - DNA, 60 bp, Artificial
  Synthetic oligonucleotide
tcctatacttggtggagcaaatacaactcttccggagcttccgtcaaatgtaagggagta

SEQ ID NO: 103204 - DNA, 60 bp, Artificial
  Synthetic oligonucleotide
attgttaggatcatctgtgtcaacgtgcgatattaattctatttggtatcccggcatacc

SEQ ID NO: 103205 - DNA, 60 bp, Artificial
  Synthetic oligonucleotide
ggtctaagcgtgatagaactaacgatttgggttacagttacgaagagtcacaaacagatt

SEQ ID NO: 103206 - DNA, 60 bp, Artificial
  Synthetic oligonucleotide
cggcgcagtgtattaccacatttaccccacttgttagttttaccagttcttccaagtttt

SEQ ID NO: 103207 - DNA, 65 bp, Artificial
  Synthetic oligonucleotide
gaaggtgataagttaaactcaaatgaaaacactaacgcttttactggatcaacaatttatggctc

SEQ ID NO: 103208 - DNA, 60 bp, Artificial
  Synthetic oligonucleotide
ccataaactatcaatcctataatagcaacacaaacaacaaccagtataacatcggcaatc

SEQ ID NO: 103209 - DNA, 60 bp, Artificial
  Synthetic oligonucleotide
gagtgttctgcaccttccggcacaacaactaactttgaatttattaactctggaacaagt

SEQ ID NO: 103210 - DNA, 64 bp, Artificial
  Synthetic oligonucleotide
ggataggtaccaggtattgtaatactcttaaacggagaatttatgttcaatgttataccttgac

SEQ ID NO: 103211 - DNA, 60 bp, Artificial
  Synthetic oligonucleotide
ttcttcttcctctctagtaaatagatctctttcggaaactcctgctcctgctgaaaagtc

SEQ ID NO: 103212 - DNA, 64 bp, Artificial
  Synthetic oligonucleotide
gagtattgacgtacggaaaatattttgaaatacttgcacacgacgagttagaaaattacattgg

SEQ ID NO: 103213 - DNA, 60 bp, Artificial
  Synthetic oligonucleotide
catttacaaaggttatttgcgtgtctcctgtaatgagtggaaaatcttataaggatagga

SEQ ID NO: 103214 - DNA, 60 bp, Artificial
  Synthetic oligonucleotide
gccgctgtcaaaggctacggaaatggatgccgtagaaactatgctttcaaaccttacaaa

SEQ ID NO: 103215 - DNA, 60 bp, Artificial
  Synthetic oligonucleotide
ggagagtgatgtaacagcgtacacctcagaaataacagcagttgactgattaagttgacc

SEQ ID NO: 103216 - DNA, 60 bp, Artificial
  Synthetic oligonucleotide
ggaaggaatattaaactggttagggatgaagaagactgaaaccaagtcgtggaagctgtt

SEQ ID NO: 103217 - DNA, 60 bp, Artificial
  Synthetic oligonucleotide
acgtcaacgattcttgatgttaaagctcgccatcctgattcgtcattaaccggataaaag

SEQ ID NO: 103218 - DNA, 60 bp, Artificial
  Synthetic oligonucleotide
aacagttaaagatggacgattaggagctatggacggagctttgtgtaaaacgtgtgaaaa

SEQ ID NO: 103219 - DNA, 60 bp, Artificial
  Synthetic oligonucleotide
ttttcccgcggtcgcgatttgcatcatacacattacagataatacaccgtatggcgaaaa

SEQ ID NO: 103220 - DNA, 60 bp, Artificial
  Synthetic oligonucleotide
ccagtggttgcgtgacttttatattccatacggtaatgaaatgcttcaaccttttgcacc

SEQ ID NO: 103221 - DNA, 60 bp, Artificial
  Synthetic oligonucleotide
catgcgatagaccaatgtcaccatgtgaacgcgccgctagatcgtcgtctccaaatggac

SEQ ID NO: 103222 - DNA, 60 bp, Artificial
  Synthetic oligonucleotide
ccctacatgtactttatttgaaacattacgcgatgaggaggcatactcggtggttagagt

SEQ ID NO: 103223 - DNA, 60 bp, Artificial
  Synthetic oligonucleotide
gtatacgatcccaacacaaaattccggaagagtataaaagagtaggtagcttcgacacgt

SEQ ID NO: 103224 - DNA, 60 bp, Artificial
  Synthetic oligonucleotide
gcaatattttctgggctaaaggcatccacattaagtatttcatctgtcgtgttggcggaa

SEQ ID NO: 103225 - DNA, 60 bp, Artificial
  Synthetic oligonucleotide
ggacccacctgtaagtgaagcatttcctatataacatctgcttgagtcggatacccaaaa

SEQ ID NO: 103226 - DNA, 60 bp, Artificial
  Synthetic oligonucleotide
ggttgggtatctcacactcctattccagaagctagggcatgtttagcagtagcagctgtt

SEQ ID NO: 103227 - DNA, 60 bp, Artificial
  Synthetic oligonucleotide
ggctaaatccggaagtgtcatactttacaaacaaaagaaccagaggtccgttgggtattt

SEQ ID NO: 103228 - DNA, 60 bp, Artificial
  Synthetic oligonucleotide
tcacaatgtaatccttcgtccctacttattaactcgtttgaaaatgtaagacctggcatt

SEQ ID NO: 103229 - DNA, 60 bp, Artificial
  Synthetic oligonucleotide
tccatccagagttatttggccaagaagccttcagcaatggtatatcgaacacgctgctaa

SEQ ID NO: 103230 - DNA, 60 bp, Artificial
  Synthetic oligonucleotide
gtgtggacgattgtttaaagagttgttgcgttttgacttagaagctaaaagaaagtatgg

SEQ ID NO: 103231 - DNA, 60 bp, Artificial
  Synthetic oligonucleotide
tttccatagctatctgaaaaccataaaagcatctagcttccgaccattgtacttccgagt

SEQ ID NO: 103232 - DNA, 60 bp, Artificial
  Synthetic oligonucleotide
tgttcttggacacgtactgcaggaggttgcgcatgttgaaggggatctcgcgcacctcgg

SEQ ID NO: 103233 - DNA, 60 bp, Artificial
  Synthetic oligonucleotide
ggcgcgttcacgttgaagccgtccgagaaggagtagaagaagaagtgcgggtagtggtgg

SEQ ID NO: 103234 - DNA, 54 bp, Artificial
  Synthetic oligonucleotide
tccccaaggagaccaacgagctcacctacctgctgggcatgatcgtgaagtaca

SEQ ID NO: 103235 - DNA, 57 bp, Artificial
  Synthetic oligonucleotide
gcaggatgttgttggtcgccgtctccacgaagataaagctggtctcgatgtccagct

SEQ ID NO: 103236 - DNA, 60 bp, Artificial
  Synthetic oligonucleotide
aagaaccgcggcacctgcaccgtgaacatccacgtgctgaccacgcccggcttcaaccac

SEQ ID NO: 103237 - DNA, 60 bp, Artificial
  Synthetic oligonucleotide
ccgtgaacatccacgtgctgaccacgcccggctttaaccacgccttcgcggcgctgctca

SEQ ID NO: 103238 - DNA, 52 bp, Artificial
  Synthetic oligonucleotide
aaaaccgcggcacttgcaccgtgaacatccacgtgctgaccacgcccggctt

SEQ ID NO: 103239 - DNA, 60 bp, Artificial
  Synthetic oligonucleotide
tcgcgtaatactaaagattcgtcaatgtgtccgtctgggtccattaacacacaagtcaac

SEQ ID NO: 103240 - DNA, 60 bp, Artificial
  Synthetic oligonucleotide
gaacatacggtcaacaaagaatagacggagaacccgccgaacctaaagttttgggaaggg

SEQ ID NO: 103241 - DNA, 60 bp, Artificial
  Synthetic oligonucleotide
tagagttccggagttgctgttataagatgacacgttttgattttcttttaccgatgtttc

SEQ ID NO: 103242 - DNA, 60 bp, Artificial
  Synthetic oligonucleotide
cgtcaacgggttagagttagaatatgtgcgtgaaaaggaggcaaagagtatacgtgctgc

SEQ ID NO: 103243 - DNA, 60 bp, Artificial
  Synthetic oligonucleotide
gggcaacacgttatgatagctctaatgtcatacaaaggaatgaaccaggaagatggaatt

SEQ ID NO: 103244 - DNA, 60 bp, Artificial
  Synthetic oligonucleotide
ttggccggtaattgtccatttgatatgagtagaaaatcagtagcgtatgttacttgcggg

SEQ ID NO: 103245 - DNA, 60 bp, Artificial
  Synthetic oligonucleotide
gttgttcgttcgcatctacgtcaaagccttcgtatgataaactctgatgttatacctgtg

SEQ ID NO: 103246 - DNA, 60 bp, Artificial
  Synthetic oligonucleotide
gtgtaacggagtatttccaaacctgtcaaccgcgtttacgtcacctcctttacttattat

SEQ ID NO: 103247 - DNA, 60 bp, Artificial
  Synthetic oligonucleotide
ccgttgtctatatcgtcagttatgtcgacgctgttgttgggagccagcggagaaaccgcg

SEQ ID NO: 103248 - DNA, 60 bp, Artificial
  Synthetic oligonucleotide
ctgtgggcagctaaatttaacaaccagatggcgttcgattactgtataaaattaggtgaa

SEQ ID NO: 103249 - DNA, 60 bp, Artificial
  Synthetic oligonucleotide
tacaacttacagatgatggtgcgttgagcgtgtgtgatggatacagagcagtgttgccaa

SEQ ID NO: 103250 - DNA, 60 bp, Artificial
  Synthetic oligonucleotide
cgccactataatcgcgctatcctttagccagctgtcattggcacacttaaacagtctgac

SEQ ID NO: 103251 - DNA, 60 bp, Artificial
  Synthetic oligonucleotide
catttctcacaacctactaatgtagaagccgccaaaagcaactccgcgtacgatgatgta

SEQ ID NO: 103252 - DNA, 60 bp, Artificial
  Synthetic oligonucleotide
ctttcgtgctatacctagccaacggtccgccacttgactcaacgtatccgtaactcccaa

SEQ ID NO: 103253 - DNA, 60 bp, Artificial
  Synthetic oligonucleotide
gcaagcgtgcctgactaacggaggctcgtctcctgatcgagtttgaatcatcatgggcgt

SEQ ID NO: 103254 - DNA, 60 bp, Artificial
  Synthetic oligonucleotide
cttcaccgccccagtaatcggccaaagatgcgcacaaatccaccattgcaacagcctccc

SEQ ID NO: 103255 - DNA, 60 bp, Artificial
  Synthetic oligonucleotide
gcggcgttgggtggatctgtaaacatatgggctatggttccgctaagttcatctgtattt

SEQ ID NO: 103256 - DNA, 60 bp, Artificial
  Synthetic oligonucleotide
ccttcattatagaattaagagcatccatggttgtttcgcgagcactagatatgtcatcca

SEQ ID NO: 103257 - DNA, 57 bp, Artificial
  Synthetic oligonucleotide
aaaatgcaaaactcgtatccgttttccgatactattccgttatgtgaacatccgcta

SEQ ID NO: 103258 - DNA, 60 bp, Artificial
  Synthetic oligonucleotide
tgacagactaagcgtgatacggcttcttatttgggcatatcttactaaacaggatacggg

SEQ ID NO: 103259 - DNA, 60 bp, Artificial
  Synthetic oligonucleotide
gccgaaaatgaggaacaggcaaatattgtaagaaaggaaatagaagaaaccattagctcc

SEQ ID NO: 103260 - DNA, 60 bp, Artificial
  Synthetic oligonucleotide
cccgctgagtaacctaagttccgaaccgcaagctgaacaagttaacacgtttccttttcc

SEQ ID NO: 103261 - DNA, 60 bp, Artificial
  Synthetic oligonucleotide
catctcaaagcgacgttagtcttcgaacggttgaaatctttgaaagagacaaatcttcgc

SEQ ID NO: 103262 - DNA, 60 bp, Artificial
  Synthetic oligonucleotide
ccacgatgaaacaaactcgctttcttcaattgatagcttaactcttcctgcatcggattc

SEQ ID NO: 103263 - DNA, 60 bp, Artificial
  Synthetic oligonucleotide
ccgttgcaagactttactacgtgataccccgttgtttctttaagccttttattatcctgt

SEQ ID NO: 103264 - DNA, 60 bp, Artificial
  Synthetic oligonucleotide
catctatgttttgttctatcgtcgcgtaaagtaacctgatatcttcttccgtaatcgttg

SEQ ID NO: 103265 - DNA, 60 bp, Artificial
  Synthetic oligonucleotide
cagtagagtttacaagtatcgacgctcactgcggagcatatccttcgagaaggggcgatc

SEQ ID NO: 103266 - DNA, 60 bp, Artificial
  Synthetic oligonucleotide
ggaacagttaaggacggaaggttaggagctatggacggggcgctgtgcaaaacgtgtgaa

SEQ ID NO: 103267 - DNA, 60 bp, Artificial
  Synthetic oligonucleotide
caccgtctacatcatcggcgcattctttaaataacggtccacctggtaagatttcgtacg

SEQ ID NO: 103268 - DNA, 60 bp, Artificial
  Synthetic oligonucleotide
cacacacgtgtttgcgatctgtattaccagcgataacaagcctttaatagccgctaggag

SEQ ID NO: 103269 - DNA, 60 bp, Artificial
  Synthetic oligonucleotide
cattccaaagtctgaacaacaatcgtcggtaggttcggatttgtgcaaccctccctttat

SEQ ID NO: 103270 - DNA, 60 bp, Artificial
  Synthetic oligonucleotide
cacgttcacccggaaaccaactctcaaccgcatttaagttaacatcgtaaacgcctccta

SEQ ID NO: 103271 - DNA, 60 bp, Artificial
  Synthetic oligonucleotide
cacgtctcgtcgtgtttcgctagttcctttgctaactctttcaggaacggaattactcgt

SEQ ID NO: 103272 - DNA, 60 bp, Artificial
  Synthetic oligonucleotide
ctacgttccaggattaatgactgccgctcttaacatacaaacaagcgttaacaccgttgt

SEQ ID NO: 103273 - DNA, 60 bp, Artificial
  Synthetic oligonucleotide
cggcacccaaatatcttcttcaacggcccctagctccttccacgccacatcttttccgtc

SEQ ID NO: 103274 - DNA, 60 bp, Artificial
  Synthetic oligonucleotide
gtgtgtttgcggtatagatccgtatcctagagacgcaacaggagttccgtttgaatctcc

SEQ ID NO: 103275 - DNA, 60 bp, Artificial
  Synthetic oligonucleotide
gctctcatcagcaagtattcaaacatgcagttgctagatgtacactcaccgtctgcgttt

SEQ ID NO: 103276 - DNA, 60 bp, Artificial
  Synthetic oligonucleotide
cggaagaggactggttactcacgataacgattcagtacccgcaattccagttaactcact

SEQ ID NO: 103277 - DNA, 60 bp, Artificial
  Synthetic oligonucleotide
tctaagatgtttaaaggcatgctctgggttattgagtcgccgttgatattaccgcacgat

SEQ ID NO: 103278 - DNA, 60 bp, Artificial
  Synthetic oligonucleotide
gcgcaggcaaagagctctctactacacgttcttaatcatcctagatcgaaaccatcacca

SEQ ID NO: 103279 - DNA, 60 bp, Artificial
  Synthetic oligonucleotide
cccacgtgcgatagacccatgtcaccgtgcgaacgtagatcctcttctccaaacggaaga

SEQ ID NO: 103280 - DNA, 60 bp, Artificial
  Synthetic oligonucleotide
aatcgttcgttgttatggatgacggtgtacttaagctaaacttggaatcatctgttaacg

SEQ ID NO: 103281 - DNA, 60 bp, Artificial
  Synthetic oligonucleotide
tatctgcgatggttgaagatataaacgaaccacagtgatcgattgatgtattttccgtta

SEQ ID NO: 103282 - DNA, 60 bp, Artificial
  Synthetic oligonucleotide
gcgtgagacgcgttgtttgcgtgtacaataactccttttccgtcattgtttctggcaagt

SEQ ID NO: 103283 - DNA, 60 bp, Artificial
  Synthetic oligonucleotide
gctagaatcaattgagatgtcttcttcagtggatgttgatatctacgatgctgtcagagt

SEQ ID NO: 103284 - DNA, 60 bp, Artificial
  Synthetic oligonucleotide
ggtaccgttaaagatggtagactaggtgctatggatggggcattatgtaagacttgtggg

SEQ ID NO: 103285 - DNA, 60 bp, Artificial
  Synthetic oligonucleotide
ccatcagagagatttcggccatcatcggactttgtgcatatgctgctacttactggggag

SEQ ID NO: 103286 - DNA, 60 bp, Artificial
  Synthetic oligonucleotide
catacgacgtttatagatgttaatgaggagtatacagaagcatcggccgttacaggagta

SEQ ID NO: 103287 - DNA, 60 bp, Artificial
  Synthetic oligonucleotide
tacacaagacgtttatagatgttaatgaggagtatacagaagccgctgcggttacaggcg

SEQ ID NO: 103288 - DNA, 60 bp, Artificial
  Synthetic oligonucleotide
tacatacgacgtttatagatgttaatgaggagtatacagaagcatcggccgttacaggag

SEQ ID NO: 103289 - DNA, 60 bp, Artificial
  Synthetic oligonucleotide
tacacaagacgtttatagatgttaatgaggagtatacagaagcatcggccgttacaggag

SEQ ID NO: 103290 - DNA, 60 bp, Artificial
  Synthetic oligonucleotide
tacacaagacgtttatagatgttaatgaggagtatacagaagcatcggctgttacaggag

SEQ ID NO: 103291 - DNA, 60 bp, Artificial
  Synthetic oligonucleotide
tacatacggcgtttatagatgttaatgaggagtatacagaagcatcggccgttacaggag

SEQ ID NO: 103292 - DNA, 60 bp, Artificial
  Synthetic oligonucleotide
cctgtaacggccgatgcttctgtatactcctcattaacatctataaacgccgtatgtaga

SEQ ID NO: 103293 - DNA, 60 bp, Artificial
  Synthetic oligonucleotide
ccgttgtatgtcaaaacataatcgaaatcctgcctaagagtatacaatacaaaatgtagc

SEQ ID NO: 103294 - DNA, 60 bp, Artificial
  Synthetic oligonucleotide
cgcagtacctttagtatcatccattaattgcaaaggatccatgttaattacaacttctcc

SEQ ID NO: 103295 - DNA, 64 bp, Artificial
  Synthetic oligonucleotide
cgtgcgatcctagaactatacaagtaggaactaataatatttgtgataattcgatgtatagagc

SEQ ID NO: 103296 - DNA, 60 bp, Artificial
  Synthetic oligonucleotide
gataagaccattgttctggtgtgaaattagcggatgcatctatcaatgatttaacctgat

SEQ ID NO: 103297 - DNA, 60 bp, Artificial
  Synthetic oligonucleotide
gatcctatgggatatgttaatatattatggtcaataggaggattgcatgacagagcattc

SEQ ID NO: 103298 - DNA, 60 bp, Artificial
  Synthetic oligonucleotide
ctggtttatcgccttcaacccatttatttatttgtactccacaatacacacatttaactg

SEQ ID NO: 103299 - DNA, 60 bp, Artificial
  Synthetic oligonucleotide
ccatcttgcgtgttgtatccaaggatcatcgtctgtttcccatttatttaaaccaccatc

SEQ ID NO: 103300 - DNA, 66 bp, Artificial
  Synthetic oligonucleotide
catctgtggatattcctaatatattttctatttgtgtgcgtctgtcttctggtaatagtaacatag

SEQ ID NO: 103301 - DNA, 60 bp, Artificial
  Synthetic oligonucleotide
cgtcatgttggtgattttggtaatgtgtatgcagacgaaaatggcgttgctaatattgat

SEQ ID NO: 103302 - DNA, 59 bp, Artificial
  Synthetic oligonucleotide
tgccttcaaacaatccttatgttccaactaatgccatgttaaatcctattactgatcct

SEQ ID NO: 103303 - DNA, 60 bp, Artificial
  Synthetic oligonucleotide
catgcgagacatcatcggcaggtagtattggtagaaaattagttaaatttatggaaggtg

SEQ ID NO: 103304 - DNA, 60 bp, Artificial
  Synthetic oligonucleotide
cccgatcaagttaaagtaattattttaggtcaggatccttatcctactgttggaatggct

SEQ ID NO: 103305 - DNA, 65 bp, Artificial
  Synthetic oligonucleotide
gccgtggtagaaagaacaagaaaacaaggtacagatttaataaagattgatatgctattgtcatc

SEQ ID NO: 103306 - DNA, 60 bp, Artificial
  Synthetic oligonucleotide
cgcatacagaaataagaatacctcagtatatagctcacggtggaaatacatcagaaaatg

SEQ ID NO: 103307 - DNA, 60 bp, Artificial
  Synthetic oligonucleotide
gtgatgcgggaacatctctttcagcagcttttctaaatctccaaacatcacctattcctc

SEQ ID NO: 103308 - DNA, 60 bp, Artificial
  Synthetic oligonucleotide
ctccttgcgaacgaagatgtcattacttggaagatagaggtcttttatatggtcctgaat

SEQ ID NO: 103309 - DNA, 60 bp, Artificial
  Synthetic oligonucleotide
ctgtagatagattagatggcggatatataaaacacgaatgtggtatagaatgtgggtgtt

SEQ ID NO: 103310 - DNA, 60 bp, Artificial
  Synthetic oligonucleotide
agcacatttccaccaattcttgatggaactaatgcatattgttgatgttcgacattaaca

SEQ ID NO: 103311 - DNA, 60 bp, Artificial
  Synthetic oligonucleotide
cacgcatatatgacgaaacacaatctccaccatgaccatcatataaaccaacatatatat

SEQ ID NO: 103312 - DNA, 60 bp, Artificial
  Synthetic oligonucleotide
cataggtaattccgtaaatattagtagtttgcctggttgggtaacacctcacgaagctaa

SEQ ID NO: 103313 - DNA, 60 bp, Artificial
  Synthetic oligonucleotide
cgcgtctttcttttatgtgtatcaatccatcgcatattgtattagcatctggtcttatta

SEQ ID NO: 103314 - DNA, 60 bp, Artificial
  Synthetic oligonucleotide
ctcccaaatgtccattccaatttgttgtaaacagcccagatactacgattcacttatatg

SEQ ID NO: 103315 - DNA, 60 bp, Artificial
  Synthetic oligonucleotide
atctgttatagaagctactgcataaccatcttgaaacgtacaaggacttgatacatattg

SEQ ID NO: 103316 - DNA, 61 bp, Artificial
  Synthetic oligonucleotide
caagaggcagaagccatcgatataattagtagatatggaactattataatatacgcacaag

SEQ ID NO: 103317 - DNA, 65 bp, Artificial
  Synthetic oligonucleotide
gatctaattcataacattttctattaccatatgcatttgctgatccttcgatgaaccaaataggg

SEQ ID NO: 103318 - DNA, 60 bp, Artificial
  Synthetic oligonucleotide
ttcttacctattcctggattagttagcgatacgtttaattggaattatgtcatacaagcc

SEQ ID NO: 103319 - DNA, 61 bp, Artificial
  Synthetic oligonucleotide
gctagaggtatatctctaatccctgtaaaagataatcagtctatacgttatatttctgacg

SEQ ID NO: 103320 - DNA, 60 bp, Artificial
  Synthetic oligonucleotide
ccgtgtattgaaggaggtattattggataatgattaggataagaccattcatcatcactg

SEQ ID NO: 103321 - DNA, 60 bp, Artificial
  Synthetic oligonucleotide
gcatacgaaatattagaaccaagaatgacacaactcgaacaatttcacaaacttacagag

SEQ ID NO: 103322 - DNA, 59 bp, Artificial
  Synthetic oligonucleotide
ctgttacgctattaaaatagaaccatcggataatggtccgttgtttgtagaaatgcact

SEQ ID NO: 103323 - DNA, 64 bp, Artificial
  Synthetic oligonucleotide
cagatggatgttgcgacacagatgctagtttagattctgatattgaaaattgttatcaaaatcc

SEQ ID NO: 103324 - DNA, 54 bp, Artificial
  Synthetic oligonucleotide
aatgtgtgttcgacatgcaatttaacaagagaaaatggcgacatgggtcatcca

SEQ ID NO: 103325 - DNA, 60 bp, Artificial
  Synthetic oligonucleotide
ttctggaacggctgctggacaatgtgcaatatctgctctattagatttacaagtagcggg

SEQ ID NO: 103326 - DNA, 60 bp, Artificial
  Synthetic oligonucleotide
tagagttgaaaattcattaattcaaacagcaaatgcctctgcacaagcaatatgtcgagt

SEQ ID NO: 103327 - DNA, 60 bp, Artificial
  Synthetic oligonucleotide
gcacaaacttcactatacactagatcatccatatcttcttcatcgctaggctccaattga

SEQ ID NO: 103328 - DNA, 60 bp, Artificial
  Synthetic oligonucleotide
gcacctcctgcaattagataaaagaatgttgaaatatataatccatatggtccatgagag

SEQ ID NO: 103329 - DNA, 65 bp, Artificial
  Synthetic oligonucleotide
gatccttgtactgtcgaaacatctaacgattgtagattattaagattattgatggccaatacatc

SEQ ID NO: 103330 - DNA, 60 bp, Artificial
  Synthetic oligonucleotide
taggattaaatcccaaaggcggtattcctatttgagcatccaaatcatcataaattgtgg

SEQ ID NO: 103331 - DNA, 60 bp, Artificial
  Synthetic oligonucleotide
caaggacctggctgtactcctaatgtagacggtagtcgagacagaagatgtagagaacct

SEQ ID NO: 103332 - DNA, 60 bp, Artificial
  Synthetic oligonucleotide
gttgtggaactaatggatattcaacaggagtaggatattcaaatacaggagtgcgatcag

SEQ ID NO: 103333 - DNA, 57 bp, Artificial
  Synthetic oligonucleotide
tgactgagataaataagttgggaccagtaactcagttacagcaatctatagatgcag

SEQ ID NO: 103334 - DNA, 60 bp, Artificial
  Synthetic oligonucleotide
agatcccaaagatgaattattaatgtatacgggttattgtaaagattgtgattcggacgc

SEQ ID NO: 103335 - DNA, 60 bp, Artificial
  Synthetic oligonucleotide
gttgccagttaatttgaaagttagagcatatactaaggatgaaaatggtcgcaatctatg

SEQ ID NO: 103336 - DNA, 60 bp, Artificial
  Synthetic oligonucleotide
gttcccgtgtaatgtaaacgaagcccaagtatggaaatatgtaagtcgattattgctaga

SEQ ID NO: 103337 - DNA, 60 bp, Artificial
  Synthetic oligonucleotide
gaattaccatataatatacttcccggcctaaatgttaaactagtacacggcgatccttcg

SEQ ID NO: 103338 - DNA, 60 bp, Artificial
  Synthetic oligonucleotide
ttccacaagcgtgctcacataatcgcggaagtatgacagtgtggcaatatatggaaatag

SEQ ID NO: 103339 - DNA, 61 bp, Artificial
  Synthetic oligonucleotide
gacatacatagtgttctaggtatacctactcgtgcataccaattatttatgtctaaatctg

SEQ ID NO: 103340 - DNA, 60 bp, Artificial
  Synthetic oligonucleotide
ccaacctccattatatatttctacttactttagaactttattggatgctccaccaactga

SEQ ID NO: 103341 - DNA, 60 bp, Artificial
  Synthetic oligonucleotide
ctataactgcaatacgtttgaccaaagcaggatctactgaactaaacataggttttggat

SEQ ID NO: 103342 - DNA, 60 bp, Artificial
  Synthetic oligonucleotide
gacagatactacaactgacgtggttgctatgaaattagccaatgatatcatgaatatgcc

SEQ ID NO: 103343 - DNA, 57 bp, Artificial
  Synthetic oligonucleotide
gttatttctcccattgcaattggtaagatgacggccaactttagtacccacgtcttt

SEQ ID NO: 103344 - DNA, 60 bp, Artificial
  Synthetic oligonucleotide
cgtgttgtccacgtagctgtactcgaggttgttcttgtgcgagtagatgatgatctcctc

SEQ ID NO: 103345 - DNA, 60 bp, Artificial
  Synthetic oligonucleotide
ggtgttgtccacgtagctgtactcgaggttgttcttgtgcgagtacacgatgatgtcctc

SEQ ID NO: 103346 - DNA, 60 bp, Artificial
  Synthetic oligonucleotide
ctcgacgtatacggaagtcgtgtacgtaatatcatagcatctattagatatcgtcagaga

SEQ ID NO: 103347 - DNA, 60 bp, Artificial
  Synthetic oligonucleotide
cgaacacatcctcattattcttggatgcagaatatatcgattccgagaagtgtaggttac

SEQ ID NO: 103348 - DNA, 60 bp, Artificial
  Synthetic oligonucleotide
gacgtggcaaacaatgtatacaaatgtaccagaaggaacatactacatatccggatttcc

SEQ ID NO: 103349 - DNA, 60 bp, Artificial
  Synthetic oligonucleotide
atgtgcaagggtacgttagatcacaggtgcaaacaatggtaacaaaagtgagtagaggtt

SEQ ID NO: 103350 - DNA, 60 bp, Artificial
  Synthetic oligonucleotide
gccgcctttctaattgaactggattcagaagttacccaccagagtttaggggtgaaagtc

SEQ ID NO: 103351 - DNA, 60 bp, Artificial
  Synthetic oligonucleotide
gggagtacacaatttggagtttggggatgagaaaattgatccaatagcactgttgcgcga

SEQ ID NO: 103352 - DNA, 60 bp, Artificial
  Synthetic oligonucleotide
cctatcggaacaatatgtgggagatgatacgctattctattgtaaacttcatactacgga

SEQ ID NO: 103353 - DNA, 60 bp, Artificial
  Synthetic oligonucleotide
tacggtagcaaaatgtggacatgaagcagcgccgagtaaaacgatgataacgccgtactc

SEQ ID NO: 103354 - DNA, 60 bp, Artificial
  Synthetic oligonucleotide
gctattggcggtttaatacagagtgagctgcaaaaagagcccatgcatgatatcactttc

SEQ ID NO: 103355 - DNA, 60 bp, Artificial
  Synthetic oligonucleotide
ctaccgaattgtatcagactaagggttcaagggacgttccaattaaagcaacacggacga

SEQ ID NO: 103356 - DNA, 60 bp, Artificial
  Synthetic oligonucleotide
catcacagaattttataaattttcagaacatatcaggcgcataagagagaaacacggagt

SEQ ID NO: 103357 - DNA, 60 bp, Artificial
  Synthetic oligonucleotide
gcaatggtcgcaattaccgtgcaaggtgcacagctcattaaacgagtggttgaaaggata

SEQ ID NO: 103358 - DNA, 60 bp, Artificial
  Synthetic oligonucleotide
cgagtggttgaaaggatatatcaaggaataacattcgaattggataatggcatcacagaa

SEQ ID NO: 103359 - DNA, 60 bp, Artificial
  Synthetic oligonucleotide
tgaatccggaggaagaattcctgcgaaattataaggtgcaaggcgaacatgctgggttga

SEQ ID NO: 103360 - DNA, 60 bp, Artificial
  Synthetic oligonucleotide
ggctcgaaatacgagttcaggattcgctgcggagatattaatacagaagagatttggtcc

SEQ ID NO: 103361 - DNA, 60 bp, Artificial
  Synthetic oligonucleotide
aacacggagtgacatataagaggaaagcagaggagatagagcacaccattaaaatgagga

SEQ ID NO: 103362 - DNA, 60 bp, Artificial
  Synthetic oligonucleotide
gacgtttattggggcgtggaagatgaaacgcactattaaggaaggtggaacatatcgaga

SEQ ID NO: 103363 - DNA, 60 bp, Artificial
  Synthetic oligonucleotide
cgccgtactcggtagaaaagacacaaacgcacgcgaaacaaggtgtgtatgtaccacaag

SEQ ID NO: 103364 - DNA, 60 bp, Artificial
  Synthetic oligonucleotide
gaaacacttcacccgagtataaaaaattgggcggtaaaataatagtaggagatctcgagg

SEQ ID NO: 103365 - DNA, 59 bp, Artificial
  Synthetic oligonucleotide
attaactcaagaatcaaagcggttgtcatttttacgcgcgggcatatagttttcacacc

SEQ ID NO: 103366 - DNA, 60 bp, Artificial
  Synthetic oligonucleotide
ctcgaggcgacgggatctcgcgtaattgatgcagcagattgcttcagaaatagcggtgac

SEQ ID NO: 103367 - DNA, 60 bp, Artificial
  Synthetic oligonucleotide
gttgataagtatattaagtatccgcatcagctgaccaaaacggagctggacgcagtagtg

SEQ ID NO: 103368 - DNA, 60 bp, Artificial
  Synthetic oligonucleotide
tagcagaggagctttcggagtatatcccaagggggaaaattaggtttgacgccttaaagc

SEQ ID NO: 103369 - DNA, 60 bp, Artificial
  Synthetic oligonucleotide
gaacaatgatgcatagtgcgttgctaaaggaatctaaagctcgatccttgctacccgctg

SEQ ID NO: 103370 - DNA, 60 bp, Artificial
  Synthetic oligonucleotide
gctggacgcagtagtgttatattgttcgcaaatagtgatgttgagagcggcgtgcggact

SEQ ID NO: 103371 - DNA, 60 bp, Artificial
  Synthetic oligonucleotide
gtatgggtgttcgtcgtctagaaaaccaattcgtttagagcgcacccgcattacacttac

SEQ ID NO: 103372 - DNA, 60 bp, Artificial
  Synthetic oligonucleotide
cccacttgctctctatgtgccgatagggtggaacggttatggtgcgcatcccgcagcgat

SEQ ID NO: 103373 - DNA, 60 bp, Artificial
  Synthetic oligonucleotide
atcgagatcgtaaattcgactcgaatgaagaagacgggtttacgttagtaatgttgaaaa

SEQ ID NO: 103374 - DNA, 60 bp, Artificial
  Synthetic oligonucleotide
tgccgtagaacatctacctttaggagatttctcgccaggacgtttgtctagaacaatgat

SEQ ID NO: 103375 - DNA, 56 bp, Artificial
  Synthetic oligonucleotide
caaagatggcattcttctccaaaatggcgcgacccgctgtacaaattgctctgaac

SEQ ID NO: 103376 - DNA, 60 bp, Artificial
  Synthetic oligonucleotide
ggtgcgcatcccgcagcgataaatatcgtcatgacagaggagatgttcttagactcgatg

SEQ ID NO: 103377 - DNA, 60 bp, Artificial
  Synthetic oligonucleotide
gacaaggatatactcgttattgctattgattatagtgaatacgacacgcatttaactcgc

SEQ ID NO: 103378 - DNA, 60 bp, Artificial
  Synthetic oligonucleotide
caaataatcgacttcggatatggcgaaggacgtgtctcgaaaaccctgatggaatggaaa

SEQ ID NO: 103379 - DNA, 60 bp, Artificial
  Synthetic oligonucleotide
gacacgcatttaactcgctataattttcggaagggcatgttagaaggtattcgtgaagcg

SEQ ID NO: 103380 - DNA, 57 bp, Artificial
  Synthetic oligonucleotide
aatccgtacgccaccatttttaggggaaattctatactggaatcgcaaaatccaatt

SEQ ID NO: 103381 - DNA, 60 bp, Artificial
  Synthetic oligonucleotide
gttacattgccattaaacgaatattttgcacgagttggtggaaacacttcacccgagtat

SEQ ID NO: 103382 - DNA, 60 bp, Artificial
  Synthetic oligonucleotide
gaggcgagagaaaagagggaagagatagtgaaacctgaagatttatacacctctatgctg

SEQ ID NO: 103383 - DNA, 52 bp, Artificial
  Synthetic oligonucleotide
ccaacgcctggaaatctaatagcggaagtgtcagaacgaacgcgtgaaaact

SEQ ID NO: 103384 - DNA, 60 bp, Artificial
  Synthetic oligonucleotide
aacttgatgttggcatcttttttgctaagcttacaggtaataaccgggtatgggcgtgcg

SEQ ID NO: 103385 - DNA, 60 bp, Artificial
  Synthetic oligonucleotide
gcgatccctatattcgcaagaactcggaatgcatcattatagcttacccgtgtttcaatc

SEQ ID NO: 103386 - DNA, 60 bp, Artificial
  Synthetic oligonucleotide
ctggattttgcgacggaaggaagtgacttggcgcttaatcgatactccacttatcgggcg

SEQ ID NO: 103387 - DNA, 60 bp, Artificial
  Synthetic oligonucleotide
cgtaattcgaaaagacgttttatgacaaatatcaaacggataccaatccgtacgccacca

SEQ ID NO: 103388 - DNA, 60 bp, Artificial
  Synthetic oligonucleotide
aagatcgccatattcatggttcgttaaattatggggggtgggtgctgaccaagttacagt

SEQ ID NO: 103389 - DNA, 60 bp, Artificial
  Synthetic oligonucleotide
gagccgaagaacgaaatgcaaatatatggagacataccaatcaaaggttggccgcctttc

SEQ ID NO: 103390 - DNA, 60 bp, Artificial
  Synthetic oligonucleotide
gccatgatttggcgcaaatgattttaatgctgaaaacgacgtttattggggcgtggaaga

SEQ ID NO: 103391 - DNA, 60 bp, Artificial
  Synthetic oligonucleotide
gatttggtcccaacaaaagaaaggaattcgttaaaattaactcaagaatcaaagcggttg

SEQ ID NO: 103392 - DNA, 60 bp, Artificial
  Synthetic oligonucleotide
ggaacggtaatagagaagttggggcccgaatcatacttgggagtgatttaacgacggtat

SEQ ID NO: 103393 - DNA, 60 bp, Artificial
  Synthetic oligonucleotide
tgggagtgatttaacgacggtattcacgttgatgaatattgggaataaagtagcagagga

SEQ ID NO: 103394 - DNA, 57 bp, Artificial
  Synthetic oligonucleotide
gaggcgccatacatgtttcccggcccaaatttatcgcctccaattctatatcccgaa

SEQ ID NO: 103395 - DNA, 60 bp, Artificial
  Synthetic oligonucleotide
tgaaggttattttgcgcaaggatgtagtaaatgcggggatttataaccggttaatccaat

SEQ ID NO: 103396 - DNA, 60 bp, Artificial
  Synthetic oligonucleotide
ctacccgctggatatgaattagactaccaaaaatcaattaacgtatggttagaagatcaa

SEQ ID NO: 103397 - DNA, 60 bp, Artificial
  Synthetic oligonucleotide
agaagatcaagttacggtagcaatgcgtgaaaagccgggagttatttcgacgtcctatgg

SEQ ID NO: 103398 - DNA, 60 bp, Artificial
  Synthetic oligonucleotide
cggtagcaatgcgtgaaaagccgggagttatttcgacgtcctatgggaaactattccact

SEQ ID NO: 103399 - DNA, 60 bp, Artificial
  Synthetic oligonucleotide
gtgacttagaggcttggaaatgcttatccactccaaatgatataatgtttgttaaagacg

SEQ ID NO: 103400 - DNA, 60 bp, Artificial
  Synthetic oligonucleotide
cttaaaaggttacaatattatttcgaaacttccggttagttttagatttatttcagcaca

SEQ ID NO: 103401 - DNA, 60 bp, Artificial
  Synthetic oligonucleotide
tgcgagaaacacaaattagaacacaagcagcaggacaagagttagaagcggcgcctccag

SEQ ID NO: 103402 - DNA, 60 bp, Artificial
  Synthetic oligonucleotide
gcgaccgcaaaatttgaaattaaaacacaagagaaagctgagaatactgaaccgaaaggg

SEQ ID NO: 103403 - DNA, 60 bp, Artificial
  Synthetic oligonucleotide
aggaatagacgcgaccgcaaaatttgaaattaaaacacaagagaaagctgagaatactga

SEQ ID NO: 103404 - DNA, 60 bp, Artificial
  Synthetic oligonucleotide
atgccaccgcaaaatatccgagaagcgttaccttttacgtataatgtagatagaacatca

SEQ ID NO: 103405 - DNA, 60 bp, Artificial
  Synthetic oligonucleotide
ggatgtgttcaatggggcatgtgacgacgcgatttataaagtacatacagccttaatgtc

SEQ ID NO: 103406 - DNA, 52 bp, Artificial
  Synthetic oligonucleotide
ggtgaccaaattaagaatgatgatggaccattgttatcgattttcatgttac

SEQ ID NO: 103407 - DNA, 60 bp, Artificial
  Synthetic oligonucleotide
gggatggacgtcactagtatgtcttcatcactaagtccagcgaatagattcatgttacaa

SEQ ID NO: 103408 - DNA, 60 bp, Artificial
  Synthetic oligonucleotide
gcgagaaacacaaattagaacacaagcagcaggacaagagttagaagcggcgcctccaga

SEQ ID NO: 103409 - DNA, 60 bp, Artificial
  Synthetic oligonucleotide
aggtaggtttaaatctagtatacggagtatgatagatgacggagattacatcaaagttgg

SEQ ID NO: 103410 - DNA, 60 bp, Artificial
  Synthetic oligonucleotide
tgaatgcggctttaggctttccaactggagcatatgtctcgccaacagcacgaattgctt

SEQ ID NO: 103411 - DNA, 60 bp, Artificial
  Synthetic oligonucleotide
gagttaagtacgtaagggaacaaggatcttttatattgtatgatgtacctacacactttg

SEQ ID NO: 103412 - DNA, 60 bp, Artificial
  Synthetic oligonucleotide
tatgattcacattatttgaccgatgtgtttagttctgaaaatctctactgtctatcttat

SEQ ID NO: 103413 - DNA, 60 bp, Artificial
  Synthetic oligonucleotide
cctacacactttgtaaatggtaatgaagtactagatcatgatgctttagggatggacgtc

SEQ ID NO: 103414 - DNA, 60 bp, Artificial
  Synthetic oligonucleotide
atggattgaatcagacttaatgcaagaatcaatgttattaacgtgtgacttagaggcttg

SEQ ID NO: 103415 - DNA, 60 bp, Artificial
  Synthetic oligonucleotide
gacgggaagcttattattatacgaacatgcgagattctttaccaccaaatgagagatgtg

SEQ ID NO: 103416 - DNA, 60 bp, Artificial
  Synthetic oligonucleotide
cgaatacaccattcgctcaattacaatcaatggtaccaacggaggctgttatggctgatg

SEQ ID NO: 103417 - DNA, 60 bp, Artificial
  Synthetic oligonucleotide
tttaaacttagatttttaccaacagacagaccggcattaatgatacagcagccgttactt

SEQ ID NO: 103418 - DNA, 60 bp, Artificial
  Synthetic oligonucleotide
gatgggccagtcgtattagacgtatcatatctttcaatatggtttgcttttaaacttaga

SEQ ID NO: 103419 - DNA, 60 bp, Artificial
  Synthetic oligonucleotide
gagggatgtaaattcatggattgaatcagacttaatgcaagaatcaatgttattaacgtg

SEQ ID NO: 103420 - DNA, 59 bp, Artificial
  Synthetic oligonucleotide
ttttaccaacagacagaccggcattaatgatacagcagccgttacttgagagtgtttat

SEQ ID NO: 103421 - DNA, 60 bp, Artificial
  Synthetic oligonucleotide
attttatgattttacaaggtggtagacaatttgattgtagaagattaggaaatgatcctg

SEQ ID NO: 103422 - DNA, 60 bp, Artificial
  Synthetic oligonucleotide
caacgaatacaccattcgctcaattacaatcaatggtaccaacggaggctgttatggctg

SEQ ID NO: 103423 - DNA, 60 bp, Artificial
  Synthetic oligonucleotide
gtattacaaagagttaagtacgtaagggaacaaggatcttttatattgtatgatgtacct

SEQ ID NO: 103424 - DNA, 51 bp, Artificial
  Synthetic oligonucleotide
agattcatgttacaaaatcaattggaggagtttttaatatcaaatcagtgg

SEQ ID NO: 103425 - DNA, 60 bp, Artificial
  Synthetic oligonucleotide
gcgcctccagatgtgaagaatctattaacacgcttattaggactcaaggacttaaaaggt

SEQ ID NO: 103426 - DNA, 60 bp, Artificial
  Synthetic oligonucleotide
ctttagggatggacgtcactagtatgtcttcatcactaagtccagcgaatagattcatgt

SEQ ID NO: 103427 - DNA, 52 bp, Artificial
  Synthetic oligonucleotide
tttcagcacaatcagaaaatcgcttatttcgtgtaaataattttaaagagag

SEQ ID NO: 103428 - DNA, 60 bp, Artificial
  Synthetic oligonucleotide
gagagatgtgtatacttgaataagtcttctatgttatcacgagcgggagaaggtaggttt

SEQ ID NO: 103429 - DNA, 60 bp, Artificial
  Synthetic oligonucleotide
tacaaggtggtagacaatttgattgtagaagattaggaaatgatcctgatacaggaagag

SEQ ID NO: 103430 - DNA, 60 bp, Artificial
  Synthetic oligonucleotide
tatacgtatccgttacatgaacttttgatggaagcattacttcgagcgtgtcatgtcgcg

SEQ ID NO: 103431 - DNA, 60 bp, Artificial
  Synthetic oligonucleotide
catgtcgcggaaaagaattatttacaactagttttacaacatcatgtagttaggtttgcg

SEQ ID NO: 103432 - DNA, 60 bp, Artificial
  Synthetic oligonucleotide
gttttaatcgatattagacaggaacccgggcatcaaattgatccgatcatacaagccgtt

SEQ ID NO: 103433 - DNA, 60 bp, Artificial
  Synthetic oligonucleotide
tgatccgatcatacaagccgtttctgggttatttggaaagatgatgttttcatatgggcc

SEQ ID NO: 103434 - DNA, 60 bp, Artificial
  Synthetic oligonucleotide
ggagcacagcttgcttctctcgcgtctctgactgtgtagattgtattcatgatagtatgg

SEQ ID NO: 103435 - DNA, 56 bp, Artificial
  Synthetic oligonucleotide
gatagtatggaattcagccacccatatgagtcagcgaatacatggtgttaaggtac

SEQ ID NO: 103436 - DNA, 60 bp, Artificial
  Synthetic oligonucleotide
cttttagaaagaaggtaagaattattgatttaacggaatcattagaagttggagcacagc

SEQ ID NO: 103437 - DNA, 60 bp, Artificial
  Synthetic oligonucleotide
gtaagaattattgatttaacggaatcattagaagttggagcacagcttgcttctctcgcg

SEQ ID NO: 103438 - DNA, 60 bp, Artificial
  Synthetic oligonucleotide
aagattatagggtacgtgctgttgtatacggtagataaagattttatgccagatgaatat

SEQ ID NO: 103439 - DNA, 60 bp, Artificial
  Synthetic oligonucleotide
agaatactgaaccgaaagggaaaaagattgaatcaagtccatacttaagtggtgaccaaa

SEQ ID NO: 103440 - DNA, 60 bp, Artificial
  Synthetic oligonucleotide
cgacaaatttactgaacaaggggatgcgattccaagggatatttttacagctgatgggcc

SEQ ID NO: 103441 - DNA, 60 bp, Artificial
  Synthetic oligonucleotide
gccaccgcaaaatatccgagaagcgttaccttttacgtataatgtagatagaacatcagg

SEQ ID NO: 103442 - DNA, 60 bp, Artificial
  Synthetic oligonucleotide
tagtatacggagtatgatagatgacggagattacatcaaagttggaaactctttgagacc

SEQ ID NO: 103443 - DNA, 60 bp, Artificial
  Synthetic oligonucleotide
tcaaagttggaaactctttgagacctttagtattacaattttttgaatcgatgccaccgc

SEQ ID NO: 103444 - DNA, 60 bp, Artificial
  Synthetic oligonucleotide
tattaacgtgtgacttagaggcttggaaatgcttatccactccaaatgatataatgtttg

SEQ ID NO: 103445 - DNA, 60 bp, Artificial
  Synthetic oligonucleotide
tgatgtacctacacactttgtaaatggtaatgaagtactagatcatgatgctttagggat

SEQ ID NO: 103446 - DNA, 60 bp, Artificial
  Synthetic oligonucleotide
tatcaaacatgataatgaatgcggctttaggctttccaactggagcatatgtctcgccaa

SEQ ID NO: 103447 - DNA, 60 bp, Artificial
  Synthetic oligonucleotide
gttatccaaatcaagttttaatcgatattagacaggaacccgggcatcaaattgatccga

SEQ ID NO: 103448 - DNA, 60 bp, Artificial
  Synthetic oligonucleotide
cgtgctgttgtatacggtagataaagattttatgccagatgaatatgtgagttatctacc

SEQ ID NO: 103449 - DNA, 60 bp, Artificial
  Synthetic oligonucleotide
ttagggacaagaagtatgaaggtatcggcccgtcgaagaaagtagcccgtagcgttgccg

SEQ ID NO: 103450 - DNA, 57 bp, Artificial
  Synthetic oligonucleotide
acgagttagacgcatctcgttttcgaacacaactttaaccaaccgcaaaacaaaaca

SEQ ID NO: 103451 - DNA, 60 bp, Artificial
  Synthetic oligonucleotide
aagaaagtagcccgtagcgttgccgccaataagatacttgacgatgtggctgaggaaatt

SEQ ID NO: 103452 - DNA, 60 bp, Artificial
  Synthetic oligonucleotide
gcagtcggattaatgcaggaatacgcaattaaactcagtgaatcggcaccttcatatgaa

SEQ ID NO: 103453 - DNA, 60 bp, Artificial
  Synthetic oligonucleotide
aatgacgtcatcatgatagggtgaagcgaggcttcactcgacccatggctgggtgaaccc

SEQ ID NO: 103454 - DNA, 60 bp, Artificial
  Synthetic oligonucleotide
gtcggctttgagggcccgcctcacaaccgaagcttcacgatctcagctacatttagggac

SEQ ID NO: 103455 - DNA, 60 bp, Artificial
  Synthetic oligonucleotide
cgatctcagctacatttagggacaagaagtatgaaggtatcggcccgtcgaagaaagtag

SEQ ID NO: 103456 - DNA, 51 bp, Artificial
  Synthetic oligonucleotide
ctgacttattactggaactgtgggatatgagaaaatttgacaagaatggag

SEQ ID NO: 103457 - DNA, 60 bp, Artificial
  Synthetic oligonucleotide
tagactttgtcgcaacacaacgtatgatgatagcgctgacttattactggaactgtggga

SEQ ID NO: 103458 - DNA, 60 bp, Artificial
  Synthetic oligonucleotide
cccgtcgcgatttgggagacatttagtctcacaatggacgagggataagcatacagtatc

SEQ ID NO: 103459 - DNA, 60 bp, Artificial
  Synthetic oligonucleotide
aaagatcatccccgtcgcgatttgggagacatttagtctcacaatggacgagggataagc

SEQ ID NO: 103460 - DNA, 60 bp, Artificial
  Synthetic oligonucleotide
caggaatacgcaattaaactcagtgaatcggcaccttcatatgaagacgtcggctttgag

SEQ ID NO: 103461 - DNA, 60 bp, Artificial
  Synthetic oligonucleotide
ttcatatgaagacgtcggctttgagggcccgcctcacaaccgaagcttcacgatctcagc

SEQ ID NO: 103462 - DNA, 60 bp, Artificial
  Synthetic oligonucleotide
atcggttgatctgattagactttgtcgcaacacaacgtatgatgatagcgctgacttatt

SEQ ID NO: 103463 - DNA, 60 bp, Artificial
  Synthetic oligonucleotide
ttcgcgcttgcgtgcgaattagcatcgcataaaatagccagaggtctgctgtctggagtg

SEQ ID NO: 103464 - DNA, 60 bp, Artificial
  Synthetic oligonucleotide
ttttcgcgcttgcgtgcgaattagcatcgcataaaatagccagaggtctgctgtctggag

SEQ ID NO: 103465 - DNA, 60 bp, Artificial
  Synthetic oligonucleotide
tgaggaaattgcgaatattgatctggacgatccgtctacgcgtaaaagtgttttcgcgct

SEQ ID NO: 103466 - DNA, 60 bp, Artificial
  Synthetic oligonucleotide
cagtatcaccacatacgcttatattcgagtatgccctaatgacgtcatcatgatagggtg

SEQ ID NO: 103467 - DNA, 60 bp, Artificial
  Synthetic oligonucleotide
agggataagcatacagtatcaccacatacgcttatattcgagtatgccctaatgacgtca

SEQ ID NO: 103468 - DNA, 60 bp, Artificial
  Synthetic oligonucleotide
gtagcccgtagcgttgccgccaataagatacttgacgatgtggctgaggaaattgcgaat

SEQ ID NO: 103469 - DNA, 60 bp, Artificial
  Synthetic oligonucleotide
gcgaatattgatctggacgatccgtctacgcgtaaaagtgttttcgcgcttgcgtgcgaa

SEQ ID NO: 103470 - DNA, 60 bp, Artificial
  Synthetic oligonucleotide
aaacgaaattgctcgaatgagcggggagacaggaacttgggggccggatcgtcaaccttt

SEQ ID NO: 103471 - DNA, 60 bp, Artificial
  Synthetic oligonucleotide
gaacgaaattgctcgaatgagcggggagacaggaacttgggggccggatcgtcaaccttt

SEQ ID NO: 103472 - DNA, 60 bp, Artificial
  Synthetic oligonucleotide
gaacgaaattgctcgaatgagcggggagacaggaacctgggggccggatcgtcaaccttt

SEQ ID NO: 103473 - DNA, 60 bp, Artificial
  Synthetic oligonucleotide
cggggtgttggcaacgccagaaataccatatacgatggaatccgcgaacgaaattgctcg

SEQ ID NO: 103474 - DNA, 60 bp, Artificial
  Synthetic oligonucleotide
acgatcggggtgttggcaacgccagaaataccatatacgatggaatccgcgaacgaaatt

SEQ ID NO: 103475 - DNA, 60 bp, Artificial
  Synthetic oligonucleotide
ggattgactctaagatcagttacgatgcgaccaacttcgcaagaacaacggaatgaaatg

SEQ ID NO: 103476 - DNA, 60 bp, Artificial
  Synthetic oligonucleotide
aatagatataatggattgactctaagatcagttacgatgcgaccaacttcgcaagaacaa

SEQ ID NO: 103477 - DNA, 57 bp, Artificial
  Synthetic oligonucleotide
ttttggcagcgccagaagttacccaacatgggcggttcagacagcgagttggccaga

SEQ ID NO: 103478 - DNA, 60 bp, Artificial
  Synthetic oligonucleotide
atttcttggcagcgcccgaagtcacccaacatgggcggttcagacagcgagttggccaga

SEQ ID NO: 103479 - DNA, 60 bp, Artificial
  Synthetic oligonucleotide
ccagttaatgtgaataacccaggtcaaggacaaggtatgatcgagattgaagtgatctat

SEQ ID NO: 103480 - DNA, 60 bp, Artificial
  Synthetic oligonucleotide
ggcaagcgccggttaatgtgaataacccaggtcaaggacaaggtatgatcgagattgaag

SEQ ID NO: 103481 - DNA, 60 bp, Artificial
  Synthetic oligonucleotide
ggattacgagctgcgattcttaacagaacaacgctaccaaacaatataccgcccatttat

SEQ ID NO: 103482 - DNA, 60 bp, Artificial
  Synthetic oligonucleotide
tgtttactcatataagaatcctttgtggcatggactacgagctgcgattcttaacagaac

SEQ ID NO: 103483 - DNA, 60 bp, Artificial
  Synthetic oligonucleotide
tgcagcgggtaatgcacaagatacacctcagggcgtgactctgaacgtggggggcgtaaa

SEQ ID NO: 103484 - DNA, 52 bp, Artificial
  Synthetic oligonucleotide
tgcagcgggtaatgcacaagatacacctcagggcgtgactctgaacgtgggg

SEQ ID NO: 103485 - DNA, 60 bp, Artificial
  Synthetic oligonucleotide
tagcttatgatgggcaagcgccggttaatgtgaataacccaggtcaaggacaaggtatga

SEQ ID NO: 103486 - DNA, 60 bp, Artificial
  Synthetic oligonucleotide
gggcgtgactctgaacgtggggggcgtaaacatgagggctggtgtgataatagcttatga

SEQ ID NO: 103487 - DNA, 60 bp, Artificial
  Synthetic oligonucleotide
tacgagctgcgattcttaacagaacaacgctaccaaataatataccgcccatttatccgc

SEQ ID NO: 103488 - DNA, 60 bp, Artificial
  Synthetic oligonucleotide
tacgagctgcgattcttaacagaacaacgctaccaaacaatataccgcccatttatccgc

SEQ ID NO: 103489 - DNA, 60 bp, Artificial
  Synthetic oligonucleotide
cgaattgggactttttcgaatgcagcgggtaatgcacaagatacacctcagggcgtgact

SEQ ID NO: 103490 - DNA, 60 bp, Artificial
  Synthetic oligonucleotide
ttttcgaatgcagcgggtaatgcacaagatacacctcagggcgtgactctgaacgtgggg

SEQ ID NO: 103491 - DNA, 60 bp, Artificial
  Synthetic oligonucleotide
cggttcagacagcgagttggccagaatattactacatcaatcgtatcctcgactttagct

SEQ ID NO: 103492 - DNA, 60 bp, Artificial
  Synthetic oligonucleotide
cggttcagacagcgagttggccagaatgttactacatcaatcgtatcctcgactttagct

SEQ ID NO: 103493 - DNA, 60 bp, Artificial
  Synthetic oligonucleotide
cagacagcgagttggccagaatgttactacatcaatcgtatcctcgactttagctcaggt

SEQ ID NO: 103494 - DNA, 60 bp, Artificial
  Synthetic oligonucleotide
cagacagcgagttggccagaatattactacatcaatcgtatcctcgactttagctcaggt

SEQ ID NO: 103495 - DNA, 60 bp, Artificial
  Synthetic oligonucleotide
gactttagctcaggtttcaatgaatgctggggcacgaggtgatatccaggcgctatttca

SEQ ID NO: 103496 - DNA, 60 bp, Artificial
  Synthetic oligonucleotide
gactttagctcaggtttcaatgaatgctggggcacggggtgatatccaggcgctatttca

SEQ ID NO: 103497 - DNA, 52 bp, Artificial
  Synthetic oligonucleotide
gactttagctcaggtttcaatgaatgctggggcacgaggtgatatccaggcg

SEQ ID NO: 103498 - DNA, 60 bp, Artificial
  Synthetic oligonucleotide
gatcctgtaatgatttactttgtgtggagacgaattgggactttttcgaatgcagcgggt

SEQ ID NO: 103499 - DNA, 60 bp, Artificial
  Synthetic oligonucleotide
cttaacagaacaacgctaccaaataatataccgcccatttatccgcctcatgatcgcgag

SEQ ID NO: 103500 - DNA, 60 bp, Artificial
  Synthetic oligonucleotide
gcccatttatccgcctcatgatcgcgagaacgtcttgttgataatattgctgtcatcttt

SEQ ID NO: 103501 - DNA, 60 bp, Artificial
  Synthetic oligonucleotide
gagctgcgattcttaacagaacaacgctaccaaacaatataccgcccatttatccgcctc

SEQ ID NO: 103502 - DNA, 60 bp, Artificial
  Synthetic oligonucleotide
cttaacagaacaacgctaccaaacaatataccgcccatttatccgcctcatgatcgcgag

SEQ ID NO: 103503 - DNA, 60 bp, Artificial
  Synthetic oligonucleotide
ccaagatcatacgccatttactgagggtgctaacttacgctcgcttccaggccctgacgc

SEQ ID NO: 103504 - DNA, 60 bp, Artificial
  Synthetic oligonucleotide
gcgaggcgccaatccgttgatgttccgagcgaatgtactacatatgctattagaatttgt

SEQ ID NO: 103505 - DNA, 60 bp, Artificial
  Synthetic oligonucleotide
agaaattgagtgggcgttaaccgagtgtgctcaaggatatgtaactgtcacaagtcctta

SEQ ID NO: 103506 - DNA, 60 bp, Artificial
  Synthetic oligonucleotide
gccgaacgtgtcaaagatatgcaatttcgtcgcatcttgtgtgagaaatagggttgggcg

SEQ ID NO: 103507 - DNA, 60 bp, Artificial
  Synthetic oligonucleotide
cgcctagcgtaaatagattgatgccgtatcggatctccaacgccgagcgacagatctccc

SEQ ID NO: 103508 - DNA, 60 bp, Artificial
  Synthetic oligonucleotide
gtttcatgaacattcaattgatttctccaatcgatgccccaatcttgcggcagtgggctg

SEQ ID NO: 103509 - DNA, 60 bp, Artificial
  Synthetic oligonucleotide
cgcatatcaccactccagatagatccaaccatcatttccaacacgatgtcaacagtatct

SEQ ID NO: 103510 - DNA, 60 bp, Artificial
  Synthetic oligonucleotide
cagggaagtatccaccggatctggtgacaaatgtgtggtacgctgatgctatctatccaa

SEQ ID NO: 103511 - DNA, 60 bp, Artificial
  Synthetic oligonucleotide
gtctactaggatagctgaggcgacatctgctatagtatcaaaacatcctgcacgtgtggg

SEQ ID NO: 103512 - DNA, 60 bp, Artificial
  Synthetic oligonucleotide
cctcttcgtacgctattcagtctccgtttcctgaggctgcagtgtctaggattgtggtgc

SEQ ID NO: 103513 - DNA, 60 bp, Artificial
  Synthetic oligonucleotide
ctaggattgtggtgcatacgagatgggcatctaacgttgatttcgaccgagactcctccg

SEQ ID NO: 103514 - DNA, 60 bp, Artificial
  Synthetic oligonucleotide
ataacgttgtcacgcgctacgcctatgaaactcctcccattaccgctgttgttatgggtg

SEQ ID NO: 103515 - DNA, 60 bp, Artificial
  Synthetic oligonucleotide
tgttacttgggatgcaggcttgtgcacctcattcaagattgtaccgatcgtgccggcaca

SEQ ID NO: 103516 - DNA, 60 bp, Artificial
  Synthetic oligonucleotide
cgtgccggcacaggtgccccaagatgtactggcgtatacattcttcacctcttcgtacgc

SEQ ID NO: 103517 - DNA, 60 bp, Artificial
  Synthetic oligonucleotide
tctcctcagactatcgctggaccagataaacatattcccgtcgaaaggtataacattctg

SEQ ID NO: 103518 - DNA, 60 bp, Artificial
  Synthetic oligonucleotide
ctttcatggtgcctatctccagtgatcatgacatctcttccgctcccgctattcagtata

SEQ ID NO: 103519 - DNA, 60 bp, Artificial
  Synthetic oligonucleotide
taacattctgaccaatcctgacgctccgcctacgcaaacacagctgcctgaggttgttga

SEQ ID NO: 103520 - DNA, 60 bp, Artificial
  Synthetic oligonucleotide
ggattaagacgggagaactgcgaatacgtattgagatgggcgcttacccatacatgctgc

SEQ ID NO: 103521 - DNA, 60 bp, Artificial
  Synthetic oligonucleotide
gacgtccgcctggcttgaggaaatcacgccgacgagcgtaccgtctgtgcctttcatggt

SEQ ID NO: 103522 - DNA, 60 bp, Artificial
  Synthetic oligonucleotide
cctagtggcacaaatttcagagactcagtaccccgtggatagatatcttgattggatccc

SEQ ID NO: 103523 - DNA, 60 bp, Artificial
  Synthetic oligonucleotide
tatccaatgtatgctgataccgaagtgttttcaaaccttcaacgagacatgattacctgc

SEQ ID NO: 103524 - DNA, 58 bp, Artificial
  Synthetic oligonucleotide
tgggtaaattgcggccaagtaactcggatttctctagcttcagggtcgcattggccgg

SEQ ID NO: 103525 - DNA, 60 bp, Artificial
  Synthetic oligonucleotide
cgtcttgatcgtgatagagtacccacaatggttggagtcacccgtcagtcccgagatacc

SEQ ID NO: 103526 - DNA, 60 bp, Artificial
  Synthetic oligonucleotide
cgtgactacggtgattgatgatagttcataccccaaggatggtggcagcgtgacttcgct

SEQ ID NO: 103527 - DNA, 60 bp, Artificial
  Synthetic oligonucleotide
aatctgtgggatttcttcattcttgcacttgccctgccattgacgactgatccgtgcgct

SEQ ID NO: 103528 - DNA, 60 bp, Artificial
  Synthetic oligonucleotide
acttttgctgagtgggtcaatactttaatgaaaacagcttttgacttgtctgatatgctg

SEQ ID NO: 103529 - DNA, 60 bp, Artificial
  Synthetic oligonucleotide
gaggccaaagatgaggcggatgatgcaacgaagaaacaagcgaaggatacggacaaagcc

SEQ ID NO: 103530 - DNA, 60 bp, Artificial
  Synthetic oligonucleotide
gcagagcaataaggctagtccgtccactatggagcctggtacatccagtcgcgagcaata

SEQ ID NO: 103531 - DNA, 60 bp, Artificial
  Synthetic oligonucleotide
ccagcggaaaaggtaatgattcaacatcgaggtccgacgatggctcaagtcaattgcgag

SEQ ID NO: 103532 - DNA, 60 bp, Artificial
  Synthetic oligonucleotide
cacagaaagctaccgagagcgcagaactacctatgaaaaacaatgatgaagggacgcctg

SEQ ID NO: 103533 - DNA, 60 bp, Artificial
  Synthetic oligonucleotide
gggacgcctgacaagaagggaaataccaaaggtgagttagttaatgagcatgttgaggcc

SEQ ID NO: 103534 - DNA, 60 bp, Artificial
  Synthetic oligonucleotide
gcgagcaatataaagctcgaccaggaattgcgtccgcacagaaagctaccgagagcgcag

SEQ ID NO: 103535 - DNA, 60 bp, Artificial
  Synthetic oligonucleotide
gggctgaaatcattcatcgatactggcctaatccctctcagattcgttatggcgccccga

SEQ ID NO: 103536 - DNA, 60 bp, Artificial
  Synthetic oligonucleotide
cctggatggacgcagagcttggtttcgtcaatgcgcggaacgctagataaattgaagctg

SEQ ID NO: 103537 - DNA, 60 bp, Artificial
  Synthetic oligonucleotide
cgaactgtcaagatcaggaaacgtggataacgagggtggtagtaatcagaagccaatgtc

SEQ ID NO: 103538 - DNA, 60 bp, Artificial
  Synthetic oligonucleotide
cgttgcttcacatggcttgcacgggaacatgacactgacatcgagcgagattcagcggca

SEQ ID NO: 103539 - DNA, 60 bp, Artificial
  Synthetic oligonucleotide
cgctgttgttatgggtgttccttgatcctcatcctcccaacgggtgctagagcatcgcgc

SEQ ID NO: 103540 - DNA, 60 bp, Artificial
  Synthetic oligonucleotide
gtcatgtgtgttcagcagttctattcagtcctttagatttagatgctcacgttgcttcac

SEQ ID NO: 103541 - DNA, 60 bp, Artificial
  Synthetic oligonucleotide
gctctggcagatgaatacgcgatacttcaaccaacagttcgatgcatggattaagacggg

SEQ ID NO: 103542 - DNA, 60 bp, Artificial
  Synthetic oligonucleotide
ttatactcagtcgcgacgtgcaagcgctttctcgacgcctcatacttggccgagatgttt

SEQ ID NO: 103543 - DNA, 60 bp, Artificial
  Synthetic oligonucleotide
atcgtttggaatgaacggcgccgccccaatgattagagatgagactggcatgatggtgcc

SEQ ID NO: 103544 - DNA, 60 bp, Artificial
  Synthetic oligonucleotide
ggtctcagctgacgttgaaaacaagaaaaccgctcaattgctgcacgctgatactcctcg

SEQ ID NO: 103545 - DNA, 60 bp, Artificial
  Synthetic oligonucleotide
catcatcatcggacgtgttcaatcgacgcatttgtggtcaccgctggctccaccacctga

SEQ ID NO: 103546 - DNA, 60 bp, Artificial
  Synthetic oligonucleotide
gccatccagtaccaacaatacaatggccggacgtttaatgttatacctgaaatgcctgga

SEQ ID NO: 103547 - DNA, 60 bp, Artificial
  Synthetic oligonucleotide
gccccgaatgtcttcggctcggctaatctgttcacgccacctgaggtgttgctgctacct

SEQ ID NO: 103548 - DNA, 60 bp, Artificial
  Synthetic oligonucleotide
ctgaggtgttgctgctacctattgaccatcagccagccaatgtaaccacaccgactctgg

SEQ ID NO: 103549 - DNA, 60 bp, Artificial
  Synthetic oligonucleotide
cttaactgactaactaatgcaaatggatatcctgtcacccaattgtggttcggttcagaa

SEQ ID NO: 103550 - DNA, 60 bp, Artificial
  Synthetic oligonucleotide
gttataaaattcttaactgactaactaatgcaaatggatatcctgtcacccaattgtggt

SEQ ID NO: 103551 - DNA, 51 bp, Artificial
  Synthetic oligonucleotide
ttgcctggtgttagtacccgtcgggatattattggcactgtcaagtatttt

SEQ ID NO: 103552 - DNA, 60 bp, Artificial
  Synthetic oligonucleotide
gattctgtgtggaaggaaaggttcacgacatacccttgcctggtgttagtacccgtcggg

SEQ ID NO: 103553 - DNA, 60 bp, Artificial
  Synthetic oligonucleotide
atgtgtacagagtgcgattctgtgtggaaggaaaggttcacgacatacccttgcctggtg

SEQ ID NO: 103554 - DNA, 60 bp, Artificial
  Synthetic oligonucleotide
caattgtggttcggttcagaaaaattgttttcaagtctacaaatctcaagatgtgtacag

SEQ ID NO: 103555 - DNA, 60 bp, Artificial
  Synthetic oligonucleotide
gggccttaacatcgtagataattcattgagattgaactggcttaacttgtcggaaatgga

SEQ ID NO: 103556 - DNA, 60 bp, Artificial
  Synthetic oligonucleotide
ttgtgagcttatgggccttaacatcgtagataattcattgagattgaactggcttaactt

SEQ ID NO: 103557 - DNA, 60 bp, Artificial
  Synthetic oligonucleotide
gttcgtccttacaacataaacgacattttagcgactttgaaaaccgaggtcactggagag

SEQ ID NO: 103558 - DNA, 60 bp, Artificial
  Synthetic oligonucleotide
gctcttgctaacatggttcgtccttacaacataaacgacattttagcgactttgaaaacc

SEQ ID NO: 103559 - DNA, 60 bp, Artificial
  Synthetic oligonucleotide
aatacggttgatgatgaagtgtgttctttcgtcatggcctgtcttcagacaacagctaac

SEQ ID NO: 103560 - DNA, 60 bp, Artificial
  Synthetic oligonucleotide
atggtatgttaaaactcgttgatccgggtaatcttatgtctcagacggtcgtatggaaaa

SEQ ID NO: 103561 - DNA, 52 bp, Artificial
  Synthetic oligonucleotide
aacagctaacctacgtaatatagaaaagagtaaattgacaataccattcatt

SEQ ID NO: 103562 - DNA, 60 bp, Artificial
  Synthetic oligonucleotide
ggttgatgatgaagtgtgttctttcgtcatggcctgtcttcagacaacagctaacctacg

SEQ ID NO: 103563 - DNA, 60 bp, Artificial
  Synthetic oligonucleotide
cgttctttcggatcctaatgtgatacatggaactagagaaagcggatggctcgaggtagg

SEQ ID NO: 103564 - DNA, 60 bp, Artificial
  Synthetic oligonucleotide
tgacaccgttctttcggatcctaatgtgatacatggaactagagaaagcggatggctcga

SEQ ID NO: 103565 - DNA, 60 bp, Artificial
  Synthetic oligonucleotide
ggctcgaggtaggaagtgattttgttagtatagtacagatgttcgtggctcttgctaaca

SEQ ID NO: 103566 - DNA, 60 bp, Artificial
  Synthetic oligonucleotide
gatggctcgaggtaggaagtgattttgttagtatagtacagatgttcgtggctcttgcta

SEQ ID NO: 103567 - DNA, 60 bp, Artificial
  Synthetic oligonucleotide
tcggaattatacttgagaagtgtaatgaaatcagagttatgacggttaacatcatagtca

SEQ ID NO: 103568 - DNA, 60 bp, Artificial
  Synthetic oligonucleotide
gagaagtgtaatgaaatcagagttatgacggttaacatcatagtcatgggacttaaatca

SEQ ID NO: 103569 - DNA, 60 bp, Artificial
  Synthetic oligonucleotide
atcatagtcatgggacttaaatcattgatggactcacatcgtgaaagcggaggtacatta

SEQ ID NO: 103570 - DNA, 60 bp, Artificial
  Synthetic oligonucleotide
gggacttaaatcattgatggactcacatcgtgaaagcggaggtacattacatggtgactg

SEQ ID NO: 103571 - DNA, 60 bp, Artificial
  Synthetic oligonucleotide
ggcttaacttgtcggaaatggaaaaccatggcaacaacgtaactttagcgaaagtcaaaa

SEQ ID NO: 103572 - DNA, 60 bp, Artificial
  Synthetic oligonucleotide
cggaaatggaaaaccatggcaacaacgtaactttagcgaaagtcaaaagtgagtatggtg

SEQ ID NO: 103573 - DNA, 60 bp, Artificial
  Synthetic oligonucleotide
accaatcaatgtccattctaccaattacgtatttggaaagtattcagtcttcgctcgtgt

SEQ ID NO: 103574 - DNA, 60 bp, Artificial
  Synthetic oligonucleotide
tgtccattctaccaattacgtatttggaaagtattcagtcttcgctcgtgttttcggtgt

SEQ ID NO: 103575 - DNA, 60 bp, Artificial
  Synthetic oligonucleotide
aggtacattacatggtgactgtacagtgcaaaatcttatgtgtgataaatatggtatgtt

SEQ ID NO: 103576 - DNA, 61 bp, Artificial
  Synthetic oligonucleotide
gtgactgtacagtgcaaaatcttatgtgtgataaatatggtatgttaaaactcgttgatcc

SEQ ID NO: 103577 - DNA, 60 bp, Artificial
  Synthetic oligonucleotide
acaagtacgaagacgaagagcatcctgactctgactttgactaacttgtagacagaaagc

SEQ ID NO: 103578 - DNA, 60 bp, Artificial
  Synthetic oligonucleotide
gaagacgaagagcatcctgactctgactttgactaacttgtagacagaaagcccaaatcg

SEQ ID NO: 103579 - DNA, 60 bp, Artificial
  Synthetic oligonucleotide
tttgaaaaccgaggtcactggagagaatgaaactttcagtaacgtcataaacaagtacga

SEQ ID NO: 103580 - DNA, 60 bp, Artificial
  Synthetic oligonucleotide
ccgaggtcactggagagaatgaaactttcagtaacgtcataaacaagtacgaagacgaag

SEQ ID NO: 103581 - DNA, 60 bp, Artificial
  Synthetic oligonucleotide
gacagaaagcccaaatcgtaagttacacacttataattggatgatgggtaccaacttgtc

SEQ ID NO: 103582 - DNA, 60 bp, Artificial
  Synthetic oligonucleotide
tgacggtcaggctccggttaatgtgaataatcctggcgcgggacccggaatgatagaaat

SEQ ID NO: 103583 - DNA, 60 bp, Artificial
  Synthetic oligonucleotide
ttacgccgcaccatgggattcagatgatgtgttcatattacattgcgttgcaccacatca

SEQ ID NO: 103584 - DNA, 60 bp, Artificial
  Synthetic oligonucleotide
catcagcgcagattagcgcgttcgcgaggtgcgcacccgatttatttaggagcaacgcat

SEQ ID NO: 103585 - DNA, 60 bp, Artificial
  Synthetic oligonucleotide
ttgcgaggcccaaagcactttcaaagacgtgcaataatgggtgcgattaaagtgggccta

SEQ ID NO: 103586 - DNA, 60 bp, Artificial
  Synthetic oligonucleotide
ttgccgtgatgcgggattggcaggtctcgacatggtaactcctactgttgtatagcgggg

SEQ ID NO: 103587 - DNA, 60 bp, Artificial
  Synthetic oligonucleotide
ccccaggttgccgtgatgcgggattggcaggtctcgacatggtaactcctactgttgtat

SEQ ID NO: 103588 - DNA, 60 bp, Artificial
  Synthetic oligonucleotide
gaatcattctaaagaatactaccgcaacagaaataatacaaaaacagatcaaaccattct

SEQ ID NO: 103589 - DNA, 60 bp, Artificial
  Synthetic oligonucleotide
atcaagagaatgcgaggccaccgagttacgcaccaacagcgcctacgccgacatcgatgc

SEQ ID NO: 103590 - DNA, 60 bp, Artificial
  Synthetic oligonucleotide
agggttaaaaagtaatgacgcgccctcatgtacgaattgtggattggcgtatgaatcgag

SEQ ID NO: 103591 - DNA, 59 bp, Artificial
  Synthetic oligonucleotide
aaaagtaatgacgcgccctcatgtacgaattgtggattggcgtatgaatcaagagtgtc

SEQ ID NO: 103592 - DNA, 60 bp, Artificial
  Synthetic oligonucleotide
tctttttttagggttaaaaagtaatgacgcgccctcatgtacgaattgtggattggcgta

SEQ ID NO: 103593 - DNA, 60 bp, Artificial
  Synthetic oligonucleotide
agggttaaaaagtaatgacgcgccctcatgtacgaattgtggattggcgtatgaatcaag

SEQ ID NO: 103594 - DNA, 60 bp, Artificial
  Synthetic oligonucleotide
acgcctagtgaaggatacacacagcatgtcgacgcagagagcattatgacagcgccaaga

SEQ ID NO: 103595 - DNA, 60 bp, Artificial
  Synthetic oligonucleotide
gctatttcatttgcaattcatggatggcctactccgaccagagccaagcgcgttcgaccc

SEQ ID NO: 103596 - DNA, 60 bp, Artificial
  Synthetic oligonucleotide
ccagagccaagcgcgttcgacccaccggcttcaggagaggatatcaggttaatatatccg

SEQ ID NO: 103597 - DNA, 60 bp, Artificial
  Synthetic oligonucleotide
cgtctaccattgaaaatgttgacgatgtgggcattatgcaacagaagaaaccaccaactg

SEQ ID NO: 103598 - DNA, 60 bp, Artificial
  Synthetic oligonucleotide
gtgaatactgaagttcaacctttaagcgacgactttaaacaaataagtgaccccaaaggc

SEQ ID NO: 103599 - DNA, 60 bp, Artificial
  Synthetic oligonucleotide
gcagccaatatccgtcgcacgttccatgcgggcaatagtaaatcacaacgaagttgatcg

SEQ ID NO: 103600 - DNA, 60 bp, Artificial
  Synthetic oligonucleotide
gtacgagatggatacaggcacactaacgagaaatggcgatctcatttacagcccagtggc

SEQ ID NO: 103601 - DNA, 51 bp, Artificial
  Synthetic oligonucleotide
agtaaagtgtatgtctataccagaaaatagagcccaacgatgcacagtact

SEQ ID NO: 103602 - DNA, 60 bp, Artificial
  Synthetic oligonucleotide
tcgctagacgttttaacggagtgagaataatgtatctaacggacgatgacccagatcccg

SEQ ID NO: 103603 - DNA, 60 bp, Artificial
  Synthetic oligonucleotide
cagcaggcaggaacaaactacggtctaggtctcactgaaacacgcttggattacgtacgt

SEQ ID NO: 103604 - DNA, 60 bp, Artificial
  Synthetic oligonucleotide
gtacgtacccattggttcgacagagtggtaagggagttgatgccgttagtgtaatggaag

SEQ ID NO: 103605 - DNA, 60 bp, Artificial
  Synthetic oligonucleotide
ccatcgcctactggtcgacctcatgtgcatatgacaattagtgaacgagctggcatgagt

SEQ ID NO: 103606 - DNA, 60 bp, Artificial
  Synthetic oligonucleotide
gataagttgcgtgcaagtgaggcggacgatcgcattgttggtccaactgttaatctgtta

SEQ ID NO: 103607 - DNA, 60 bp, Artificial
  Synthetic oligonucleotide
cccgagagcatccaggaatccacaaacatacatcccatacactaatcagagagggacggt

SEQ ID NO: 103608 - DNA, 60 bp, Artificial
  Synthetic oligonucleotide
gcgcgaacactataattgcgatcatgcgtttattcacaccacaaggtttcttgcgtacgg

SEQ ID NO: 103609 - DNA, 60 bp, Artificial
  Synthetic oligonucleotide
ccaggacttctttgacgcgacaaccggtataaatttgactaaaggtattccactcgtgca

SEQ ID NO: 103610 - DNA, 60 bp, Artificial
  Synthetic oligonucleotide
cacgattaatgctgcaggcgaatttgagttcagcggacgaaacgagaaatgggatcagtc

SEQ ID NO: 103611 - DNA, 60 bp, Artificial
  Synthetic oligonucleotide
ggagcagtcgtcagaatacgtcagtggattgctaatggtacttttcaaggtgatgacgga

SEQ ID NO: 103612 - DNA, 60 bp, Artificial
  Synthetic oligonucleotide
ggctagtgatcgtgggtgaaactacaacaccaataagtagcacgttgtcaacagtggtga

SEQ ID NO: 103613 - DNA, 60 bp, Artificial
  Synthetic oligonucleotide
atttaagcgagcactttccatcgctgttctccgatgtgccattagctggcgcgaacacta

SEQ ID NO: 103614 - DNA, 60 bp, Artificial
  Synthetic oligonucleotide
cagaatcagtcagcagcacgtcttgtctcagctgtaaaggcaagggcttcagaagcagac

SEQ ID NO: 103615 - DNA, 60 bp, Artificial
  Synthetic oligonucleotide
ccatcttccatagtagtagtgcttgagttcatacttttctctttgttctttccaactgag

SEQ ID NO: 103616 - DNA, 60 bp, Artificial
  Synthetic oligonucleotide
gacgatcagattgacattgaggcgtttagatggagcagatatttcttggatgaattacag

SEQ ID NO: 103617 - DNA, 60 bp, Artificial
  Synthetic oligonucleotide
cggtcgcttagcgtcgcacaaatcttatcgaaactaacgttgcccgatgcattcatcaac

SEQ ID NO: 103618 - DNA, 60 bp, Artificial
  Synthetic oligonucleotide
taatggaagagattgtataccctgatcctggcacaacattatctcggtcgcttagcgtcg

SEQ ID NO: 103619 - DNA, 60 bp, Artificial
  Synthetic oligonucleotide
gttcaatacgcgcatcgtctattttcctcatcattagccaacaagcgtaatagagtgacg

SEQ ID NO: 103620 - DNA, 60 bp, Artificial
  Synthetic oligonucleotide
cggacgatgacccagatcccgattttatacctgacatcccagagggctacgttgcagttc

SEQ ID NO: 103621 - DNA, 60 bp, Artificial
  Synthetic oligonucleotide
agaattcattgaaggtacaggatgttcccgggaggttctatggtagttcctcattcatac

SEQ ID NO: 103622 - DNA, 60 bp, Artificial
  Synthetic oligonucleotide
acaagcgtaatagagtgacgtatactcatcccccaactggaatgccatacccatcgccta

SEQ ID NO: 103623 - DNA, 60 bp, Artificial
  Synthetic oligonucleotide
cgggtgcgtcaacgccagatcaaatagcagcttcggtgcaggcgactcatgttgcggttg

SEQ ID NO: 103624 - DNA, 60 bp, Artificial
  Synthetic oligonucleotide
aggtggtatcctgtcgagtatggaattttcatccaacgaggagcaacatacacgattaat

SEQ ID NO: 103625 - DNA, 60 bp, Artificial
  Synthetic oligonucleotide
ggcagacttcattcaaaccaacaatgcagtgcgtcagctaagaacgttaatgccaacact

SEQ ID NO: 103626 - DNA, 60 bp, Artificial
  Synthetic oligonucleotide
ttacgttttcttggaactttaacacggtcgctaaagatgcagaatgcgcaaatacgtaga

SEQ ID NO: 103627 - DNA, 60 bp, Artificial
  Synthetic oligonucleotide
cactttgcagctagtgtgttaaacattaacctgcgcgcacttatggaggcgaatgttact

SEQ ID NO: 103628 - DNA, 60 bp, Artificial
  Synthetic oligonucleotide
ccacacaatttcatggacctaatcaaggtgcacttcgccccgagttagcattcgatcatg

SEQ ID NO: 103629 - DNA, 60 bp, Artificial
  Synthetic oligonucleotide
cgattttacgcaggtgaattggttgaatgaggatattactaatatgttacagcaggcagg

SEQ ID NO: 103630 - DNA, 60 bp, Artificial
  Synthetic oligonucleotide
tgcggttgtattgtatcagaacggagtgatcaacggacctgcgtctacatacttgcgcga

SEQ ID NO: 103631 - DNA, 60 bp, Artificial
  Synthetic oligonucleotide
catgcctgattactctaacgtcgcggctcgttttgttaacatcaacgctcaaatgaataa

SEQ ID NO: 103632 - DNA, 60 bp, Artificial
  Synthetic oligonucleotide
tttcaggtaatcacgctacgtttaaaccagagcagtatgtcataacgtcacctgaaggta

SEQ ID NO: 103633 - DNA, 60 bp, Artificial
  Synthetic oligonucleotide
gacatgcagaaggcgactcgttcatgtactaagcagtggctgagacatctcgaaacgcag

SEQ ID NO: 103634 - DNA, 60 bp, Artificial
  Synthetic oligonucleotide
ccaaggcttgaggggatcatagtgcagataaatacgggttatgtcgcatccactaacgtg

SEQ ID NO: 103635 - DNA, 60 bp, Artificial
  Synthetic oligonucleotide
gccaacactatcaacgagtcaaattcgacacgctatcgagcggattgctcaaattactga

SEQ ID NO: 103636 - DNA, 60 bp, Artificial
  Synthetic oligonucleotide
cggtgcggggtgcagctgctcgaagattaccgcaaaagtgggatgatggatgaagccgtg

SEQ ID NO: 103637 - DNA, 60 bp, Artificial
  Synthetic oligonucleotide
gcgatgtcaatacaacgggtgctacgcaacacaaaaagcggagaaggctgcattcgcatc

SEQ ID NO: 103638 - DNA, 60 bp, Artificial
  Synthetic oligonucleotide
gcgtcggagttatcagtgatgaaggtagatatgcgacatctttcgttgatgcagaggaga

SEQ ID NO: 103639 - DNA, 60 bp, Artificial
  Synthetic oligonucleotide
ccgagcagattttgcaacgggaacaggatataatggttgggcgacgattgatgtcgagta

SEQ ID NO: 103640 - DNA, 60 bp, Artificial
  Synthetic oligonucleotide
tttgaaatggttcgatgcattatcactctatgctatgcagaaaaggttcacttcgctggg

SEQ ID NO: 103641 - DNA, 60 bp, Artificial
  Synthetic oligonucleotide
gtacgagaaagtactttgctcagacactattcatggcaaagacggtgtcgggtctcgacg

SEQ ID NO: 103642 - DNA, 60 bp, Artificial
  Synthetic oligonucleotide
gctgcaagatgtgaatactgtgcaattagccagagtggtcaacttagctgtgccggacac

SEQ ID NO: 103643 - DNA, 60 bp, Artificial
  Synthetic oligonucleotide
cacaaacgttaggaattggttgtcaaacaacgaatggagactcatttgaaacagttgctg

SEQ ID NO: 103644 - DNA, 60 bp, Artificial
  Synthetic oligonucleotide
actgaatacacaaacgttaggaattggttgtcaaacaacgaatggagactcatttgaaac

SEQ ID NO: 103645 - DNA, 55 bp, Artificial
  Synthetic oligonucleotide
ctcattatcacaaatgtttcttataagaggttggccaacaggatcagtctatttt

SEQ ID NO: 103646 - DNA, 60 bp, Artificial
  Synthetic oligonucleotide
tcagaccttctcgcattcgtgtcagctgatacagtagaacctataaatgcggttgcgttt

SEQ ID NO: 103647 - DNA, 60 bp, Artificial
  Synthetic oligonucleotide
ggctattaaagctatacaatggggaagtataatctaatcttgtcagaatatttgtcattt

SEQ ID NO: 103648 - DNA, 60 bp, Artificial
  Synthetic oligonucleotide
ttatacaacaaattgttacactggagcggaggccctgattacaactgcgattcacattca

SEQ ID NO: 103649 - DNA, 60 bp, Artificial
  Synthetic oligonucleotide
ttatacaacaaattgttacactggagcggaggctttgattacaaccgcaattcacattca

SEQ ID NO: 103650 - DNA, 60 bp, Artificial
  Synthetic oligonucleotide
gtgagaggttgagttaccgtcgtctgtcttcggaagcggcggaactcttcaccgcaagac

SEQ ID NO: 103651 - DNA, 60 bp, Artificial
  Synthetic oligonucleotide
gtgagaggttgagttaccgtcgtctgtcttcggaagcggcggaactcttcaccgcaagcc

SEQ ID NO: 103652 - DNA, 60 bp, Artificial
  Synthetic oligonucleotide
tgtgagaggttgagttgccgtcgtctgtcttcggaagcggcggaactcttcaccgcaagc

SEQ ID NO: 103653 - DNA, 60 bp, Artificial
  Synthetic oligonucleotide
gaaaatacaacatcagtggggattacgcaaacgccacgagaacttttttggctatttcac

SEQ ID NO: 103654 - DNA, 60 bp, Artificial
  Synthetic oligonucleotide
cagtcccgctagatggtttcgaattaccattaacctaagatcagtaggtagagtggcgcc

SEQ ID NO: 103655 - DNA, 60 bp, Artificial
  Synthetic oligonucleotide
gtcccgctagatggtttcgaattaccattaacctaagatcagtaggtagagtggcgcccc

SEQ ID NO: 103656 - DNA, 60 bp, Artificial
  Synthetic oligonucleotide
ttcaaaccttcagctgaaacttcatctaccgctgtaccatcattaagcttatcacctgga

SEQ ID NO: 103657 - DNA, 60 bp, Artificial
  Synthetic oligonucleotide
ccttcagctgaaacttcatctaccgctgtaccatcattaagcttatcacctggaatgctg

SEQ ID NO: 103658 - DNA, 60 bp, Artificial
  Synthetic oligonucleotide
ctgaaacttcatctaccgctgtaccatcgttaagcttatcacctggaatgctgaatcccg

SEQ ID NO: 103659 - DNA, 60 bp, Artificial
  Synthetic oligonucleotide
tgaaacttcatctaccgctgtaccatcgttaagcttatcacctggaatgctgaatcccgg

SEQ ID NO: 103660 - DNA, 60 bp, Artificial
  Synthetic oligonucleotide
gaggggggggactcgtgtagtgaatctggaccaaatcgctccgatgcggtttgtattaga

SEQ ID NO: 103661 - DNA, 60 bp, Artificial
  Synthetic oligonucleotide
ggggagggactcgtgtagtgaatctggaccaaatcgctccgatgaggtttgtattagatc

SEQ ID NO: 103662 - DNA, 60 bp, Artificial
  Synthetic oligonucleotide
tagtgtatctactacggtaagtacagcactaataggaggtaacacaatacgtatcaactg

SEQ ID NO: 103663 - DNA, 60 bp, Artificial
  Synthetic oligonucleotide
cggtaagtacagcactaataggaggtaacacaatacgtatcaactgtccgataaggccac

SEQ ID NO: 103664 - DNA, 60 bp, Artificial
  Synthetic oligonucleotide
acggtatatttgcaacaagcgttaccatcaatgcgaatcgtatcaccatctagtgtatct

SEQ ID NO: 103665 - DNA, 60 bp, Artificial
  Synthetic oligonucleotide
gcaacaagcgttaccatcaatgcgaatcgtatcaccatctagtgtatctactacggtaag

SEQ ID NO: 103666 - DNA, 56 bp, Artificial
  Synthetic oligonucleotide
aatatattcaaaccaattggagatcaaacgataaacgaagcccattttgcaaatgt

SEQ ID NO: 103667 - DNA, 60 bp, Artificial
  Synthetic oligonucleotide
acgctatatatctgagattctcatataggcaggcccccgttcaaagcgagacggtatatt

SEQ ID NO: 103668 - DNA, 60 bp, Artificial
  Synthetic oligonucleotide
ctagcgcatccatagtgacgtcctcaaataatggagtgggcgaggtgcgaaatatattca

SEQ ID NO: 103669 - DNA, 60 bp, Artificial
  Synthetic oligonucleotide
cgcatccatagtgacgtcctcaaataatggagtgggcgaggtgcgaaatatattcaaacc

SEQ ID NO: 103670 - DNA, 60 bp, Artificial
  Synthetic oligonucleotide
ggatgacgagagactaagacagtaggaaaagatggaaataaatagagcggaaattcgacg

SEQ ID NO: 103671 - DNA, 60 bp, Artificial
  Synthetic oligonucleotide
gacgagagactaagacagtaggaaaagatggaaataaatagagcggaaattcgacgagaa

SEQ ID NO: 103672 - DNA, 60 bp, Artificial
  Synthetic oligonucleotide
cacatcatttattccagctgatctggatctagagcagactattcaacaagtgttcttccg

SEQ ID NO: 103673 - DNA, 60 bp, Artificial
  Synthetic oligonucleotide
ttacgtcatttattccagctgatctggatctagagcagactattcaacacgtgttcttcc

SEQ ID NO: 103674 - DNA, 60 bp, Artificial
  Synthetic oligonucleotide
gtatcaactgtccgataaggccacatcgtgaggataatctcgtagcaggtggagtacaaa

SEQ ID NO: 103675 - DNA, 60 bp, Artificial
  Synthetic oligonucleotide
gtatcaactgtccgataaggccacatcgtgaggataatttcgtagcaggtggagtacaaa

SEQ ID NO: 103676 - DNA, 60 bp, Artificial
  Synthetic oligonucleotide
agtaaagacagatgacgagagactaagacagtaggaaaagatggaaataaatagagcgga

SEQ ID NO: 103677 - DNA, 60 bp, Artificial
  Synthetic oligonucleotide
ttggcccagaacatacaattcatcaatgggcgcatttaacatatttaccggtggagatat

SEQ ID NO: 103678 - DNA, 60 bp, Artificial
  Synthetic oligonucleotide
ggcccagaacatacaattcatcaatgggcgcatttaacatatttaccggtggagatataa

SEQ ID NO: 103679 - DNA, 60 bp, Artificial
  Synthetic oligonucleotide
agtaaagggggatgacgagagactaagacagtaggaaaagatggaaataaatagagcgga

SEQ ID NO: 103680 - DNA, 60 bp, Artificial
  Synthetic oligonucleotide
ccagctgatctggatctagagcagactattcaacacgtgttcttccgtactacagcgacg

SEQ ID NO: 103681 - DNA, 60 bp, Artificial
  Synthetic oligonucleotide
ggcgcgacagcgaggtgactataccacatctacacttgtacagacgatggctcaggtatc

SEQ ID NO: 103682 - DNA, 60 bp, Artificial
  Synthetic oligonucleotide
gtgttcttccgtactacagcgacgacaccatactttcgatcatttaatctagttattgcg

SEQ ID NO: 103683 - DNA, 60 bp, Artificial
  Synthetic oligonucleotide
gcgacagcgaggtgactataccacatctacacttgtacagacaatggctcaggtatccga

SEQ ID NO: 103684 - DNA, 60 bp, Artificial
  Synthetic oligonucleotide
cgcgacagcgaggtgactataccacatctacacttgtacagacgatggctcaggtatccg

SEQ ID NO: 103685 - DNA, 60 bp, Artificial
  Synthetic oligonucleotide
gggagccttcgaattacttagacctgttatgtcgataccgaccgaatatatacatgacgg

SEQ ID NO: 103686 - DNA, 60 bp, Artificial
  Synthetic oligonucleotide
gataatactgtgggagcgttcgaattacttagacctgttatgtcgataccgaccgaatat

SEQ ID NO: 103687 - DNA, 60 bp, Artificial
  Synthetic oligonucleotide
gaccgaatatatacatgacggaaggataggacccataaccaacatatccgctagcgcatc

SEQ ID NO: 103688 - DNA, 60 bp, Artificial
  Synthetic oligonucleotide
gggagcgttcgaattacttagacctgttatgtcgataccgaccgaatatatacacgacgg

SEQ ID NO: 103689 - DNA, 60 bp, Artificial
  Synthetic oligonucleotide
tgacggaaggataggacccataaccaacatatccgctagcgcatccatagtgacgtcctc

SEQ ID NO: 103690 - DNA, 60 bp, Artificial
  Synthetic oligonucleotide
cgacggaaggataggacccataaccaacatatccgctagcgcatccatagtgacgtcctc

SEQ ID NO: 103691 - DNA, 60 bp, Artificial
  Synthetic oligonucleotide
gtgttcttccgtactacagcgacgacaccatattttcgatcattcaatctagtcattgag

SEQ ID NO: 103692 - DNA, 60 bp, Artificial
  Synthetic oligonucleotide
gaggacttacgcggatatgcatggctagcaacattgggaggtgattggcccagaacatac

SEQ ID NO: 103693 - DNA, 60 bp, Artificial
  Synthetic oligonucleotide
attcgaggacttacgcggatatgcatggctagcaacattgggaggtgattggcccagaac

SEQ ID NO: 103694 - DNA, 60 bp, Artificial
  Synthetic oligonucleotide
cagagggcagactatcacttgagctaatgtatggcttggaaagtagatcggcggtaggta

SEQ ID NO: 103695 - DNA, 60 bp, Artificial
  Synthetic oligonucleotide
gagacagtctactgctgtggagatacatgtacaggagatattaattgggtacagacaagc

SEQ ID NO: 103696 - DNA, 60 bp, Artificial
  Synthetic oligonucleotide
ccgataaggccacatcgtgaggataatctcgtagcaggtggagtacaaataccgagacag

SEQ ID NO: 103697 - DNA, 60 bp, Artificial
  Synthetic oligonucleotide
ccgataaggccacatcgtgaggataatttcgtagcaggtggagtacaaataccgagacag

SEQ ID NO: 103698 - DNA, 60 bp, Artificial
  Synthetic oligonucleotide
gcattcgaggacttacgcggatatgcatggctagcaacattgggaggtgattggcccaga

SEQ ID NO: 103699 - DNA, 60 bp, Artificial
  Synthetic oligonucleotide
cgaattctttggcttgacatgtcctatagatctgactttgtccacgatagtggatcctgc

SEQ ID NO: 103700 - DNA, 60 bp, Artificial
  Synthetic oligonucleotide
gcgaattctttggcttgacatgtcctatagatctgactttgtccacgatagtggatcctg

SEQ ID NO: 103701 - DNA, 60 bp, Artificial
  Synthetic oligonucleotide
aatgtccccagttagatttgtgaccgtgaatgatggcgaattctttggcttgacatgtcc

SEQ ID NO: 103702 - DNA, 60 bp, Artificial
  Synthetic oligonucleotide
ttcagaccgacgccatgcccgttccgatactgtaccgccccgccatggagatgatcgaac

SEQ ID NO: 103703 - DNA, 60 bp, Artificial
  Synthetic oligonucleotide
tgacgtcatcgttcagaccgacgccatgcccgttccgatactgtaccgccccgccatgga

SEQ ID NO: 103704 - DNA, 60 bp, Artificial
  Synthetic oligonucleotide
ctttctatggccgggacctcgccagtcatccattggtaaccggggcgacttccttccgta

SEQ ID NO: 103705 - DNA, 60 bp, Artificial
  Synthetic oligonucleotide
gtgatcgcgctctcactttctatggccgggacctcgccagtcatccattggtaaccgggg

SEQ ID NO: 103706 - DNA, 60 bp, Artificial
  Synthetic oligonucleotide
ttggcacgtgtccagcgtactattaccggtggccctcctgacgtcatcgttcagaccgac

SEQ ID NO: 103707 - DNA, 60 bp, Artificial
  Synthetic oligonucleotide
accggtgagaagttggcacgtgtccagcgtactattaccggtggccctcctgacgtcatc

SEQ ID NO: 103708 - DNA, 59 bp, Artificial
  Synthetic oligonucleotide
ccctgtcaggcgccggaaatcagatgactgaggaagcatttgctgacatcaaggcgact

SEQ ID NO: 103709 - DNA, 60 bp, Artificial
  Synthetic oligonucleotide
ggttcctcgcactacgcagtcgagattccctctctaagaccctgtcaggcgccggaaatc

SEQ ID NO: 103710 - DNA, 60 bp, Artificial
  Synthetic oligonucleotide
caacaaggttatgagtcttgaccgcatttgcggtgccgtcaattgtgatcgcgctctcac

SEQ ID NO: 103711 - DNA, 60 bp, Artificial
  Synthetic oligonucleotide
taaggtcaacaaggttatgagtcttgaccgcatttgcggtgccgtcaattgtgatcgcgc

SEQ ID NO: 103712 - DNA, 60 bp, Artificial
  Synthetic oligonucleotide
tcgacagcgcgcgtatgggcgtggtggtcttaacattgcgaatctatctttgtcctgtgc

SEQ ID NO: 103713 - DNA, 60 bp, Artificial
  Synthetic oligonucleotide
cgacagcgcgcgtatgggcgtggtggtcttaacattgcgaatctatctttgtcctgtgca

SEQ ID NO: 103714 - DNA, 60 bp, Artificial
  Synthetic oligonucleotide
tgtcctgtgcaaatcgcagcagtgctacccgttgtttgaagggctgtactccagaactgt

SEQ ID NO: 103715 - DNA, 60 bp, Artificial
  Synthetic oligonucleotide
gcagcagtgctacccgttgtttgaagggctgtactccagaactgttggtgctggaggatg

SEQ ID NO: 103716 - DNA, 60 bp, Artificial
  Synthetic oligonucleotide
ccgccatggagatgatcgaacccgtcgtgtctaagggagcccgagccatctgggcgcatg

SEQ ID NO: 103717 - DNA, 60 bp, Artificial
  Synthetic oligonucleotide
atgatcgaacccgtcgtgtctaagggagcccgagccatctgggcgcatgccatgatgaac

SEQ ID NO: 103718 - DNA, 60 bp, Artificial
  Synthetic oligonucleotide
tgggcgcatgccatgatgaaccagagttgtgacaagctgagcaccgcgtgtcgacagcgc

SEQ ID NO: 103719 - DNA, 60 bp, Artificial
  Synthetic oligonucleotide
atgatgaaccagagttgtgacaagctgagcaccgcgtgtcgacagcgcgcgtatgggcgt

SEQ ID NO: 103720 - DNA, 60 bp, Artificial
  Synthetic oligonucleotide
cgtatatcactcatcagtgccatgagtcccacgcatctcggcaaatgggtcgctccctgg

SEQ ID NO: 103721 - DNA, 60 bp, Artificial
  Synthetic oligonucleotide
tcagtgccatgagtcccacgcatctcggcaaatgggtcgctccctggcatctaacctgct

SEQ ID NO: 103722 - DNA, 51 bp, Artificial
  Synthetic oligonucleotide
gtgcccgcattgacggacaatggtccaatgacgcacgcgaccccgagctct

SEQ ID NO: 103723 - DNA, 60 bp, Artificial
  Synthetic oligonucleotide
ggtctgtgctagttgctttaagattcttcttaaccatcacgcccccccaacgtatatcac

SEQ ID NO: 103724 - DNA, 60 bp, Artificial
  Synthetic oligonucleotide
gactatcgctactcagttctgtgactctctcgttcatggtcatttatctggtgcccgcat

SEQ ID NO: 103725 - DNA, 60 bp, Artificial
  Synthetic oligonucleotide
cgctactcagttctgtgactctctcgttcatggtcatttatctggtgcccgcattgacgg

SEQ ID NO: 103726 - DNA, 60 bp, Artificial
  Synthetic oligonucleotide
agcaatggctggacggagtactacgcctgcgtgtggaaggcgggggatcaatcacacact

SEQ ID NO: 103727 - DNA, 60 bp, Artificial
  Synthetic oligonucleotide
gctttcggctggtggggctccacaatacgtctgcaaaaacctatggattgagcaatggct

SEQ ID NO: 103728 - DNA, 60 bp, Artificial
  Synthetic oligonucleotide
gccgatatatttatcgtggatgattacatacatatctgcttgcccgcgtttaatggtttt

SEQ ID NO: 103729 - DNA, 60 bp, Artificial
  Synthetic oligonucleotide
caagtaaatgccgatatatttatcgtggatgattacatacatatctgcttgcccgcgttt

SEQ ID NO: 103730 - DNA, 60 bp, Artificial
  Synthetic oligonucleotide
ttttacaattgcagatggtggtgatctttccttgagttttgtaacggggttgcttccacc

SEQ ID NO: 103731 - DNA, 60 bp, Artificial
  Synthetic oligonucleotide
gcccgcgtttaatggttttacaattgcagatggtggtgatctttccttgagttttgtaac

SEQ ID NO: 103732 - DNA, 60 bp, Artificial
  Synthetic oligonucleotide
cggggttgcttccaccgctgctcactggggatactgagcccgcatttcacactgatgttg

SEQ ID NO: 103733 - DNA, 60 bp, Artificial
  Synthetic oligonucleotide
gttttgtaacggggttgcttccaccgctgctcactggggatactgagcccgcatttcaca

SEQ ID NO: 103734 - DNA, 60 bp, Artificial
  Synthetic oligonucleotide
gttgtcacctatggagctcggactgttgcgattgggctttcggctggtggggctccacaa

SEQ ID NO: 103735 - DNA, 60 bp, Artificial
  Synthetic oligonucleotide
gcatttcacactgatgttgtcacctatggagctcggactgttgcgattgggctttcggct

SEQ ID NO: 103736 - DNA, 60 bp, Artificial
  Synthetic oligonucleotide
ccgctaatatcgcgtttggatgctattgagcatagttatgttgcgtcagtagccgcacca

SEQ ID NO: 103737 - DNA, 60 bp, Artificial
  Synthetic oligonucleotide
agtactgtgctcgatccgctaatatcgcgtttggatgctattgagcatagttatgttgcg

SEQ ID NO: 103738 - DNA, 60 bp, Artificial
  Synthetic oligonucleotide
gctcgaacaaacgtcaaaaatacactctactagcctccttaggctcacccagcagcttga

SEQ ID NO: 103739 - DNA, 57 bp, Artificial
  Synthetic oligonucleotide
atacgcatagtactaactcttaccggtgataatggaaccacgaaatcaaaagacttt

SEQ ID NO: 103740 - DNA, 60 bp, Artificial
  Synthetic oligonucleotide
cggcagtaacgagcacgtcggcgccactatcgattcgcaataatagaatcaccattggtt

SEQ ID NO: 103741 - DNA, 60 bp, Artificial
  Synthetic oligonucleotide
actggcattgaatcacggctgtcaactcttgagcggacggcagtaacgagcacgtcggcg

SEQ ID NO: 103742 - DNA, 60 bp, Artificial
  Synthetic oligonucleotide
caccacaatggaaactggcattgaatcacggctgtcaactcttgagcggacggcagtaac

SEQ ID NO: 103743 - DNA, 60 bp, Artificial
  Synthetic oligonucleotide
gcaaggtcgatgccttaactacggaattagctaccttgacgttgcgggtcaccacaatgg

SEQ ID NO: 103744 - DNA, 60 bp, Artificial
  Synthetic oligonucleotide
caacccaatttcaaatagtgaataacaatttaaccttgaaaagtactgtgctcgatccgc

SEQ ID NO: 103745 - DNA, 60 bp, Artificial
  Synthetic oligonucleotide
ggattgacacaacccaatttcaaatagtgaataacaatttaaccttgaaaagtactgtgc

SEQ ID NO: 103746 - DNA, 60 bp, Artificial
  Synthetic oligonucleotide
gatggcctgaatgtgcaggggaataatttggccatccggctacccggtagtacaggttta

SEQ ID NO: 103747 - DNA, 60 bp, Artificial
  Synthetic oligonucleotide
accattggtttaaatgatggcctgaatgtgcaggggaataatttggccatccggctaccc

SEQ ID NO: 103748 - DNA, 60 bp, Artificial
  Synthetic oligonucleotide
cgcaaggtcgatgccttaactacggaattagctaccttgacgttgcgggtcaccacaatg

SEQ ID NO: 103749 - DNA, 60 bp, Artificial
  Synthetic oligonucleotide
atcacacactccaatagcgcatggcctgcgatgactctttcatatccgcgaagtttcacg

SEQ ID NO: 103750 - DNA, 60 bp, Artificial
  Synthetic oligonucleotide
agcgcatggcctgcgatgactctttcatatccgcgaagtttcacgtgaggaccggctacc

SEQ ID NO: 103751 - DNA, 60 bp, Artificial
  Synthetic oligonucleotide
ccaacaggcgtatcatcgctcttgaacagagtcgggattctttggtcgcatcggtcagcg

SEQ ID NO: 103752 - DNA, 60 bp, Artificial
  Synthetic oligonucleotide
gattctttggtcgcatcggtcagcgacgcacagcttgcaatctcaagactggaagatgct

SEQ ID NO: 103753 - DNA, 56 bp, Artificial
  Synthetic oligonucleotide
aaaatacactctactagcctccttaggctcacccagcagcttgatgatgccaacag

SEQ ID NO: 103754 - DNA, 60 bp, Artificial
  Synthetic oligonucleotide
agcagcttgatgatgccaacaggcgtatcatcgctcttgaacagagtcgggattctttgg

SEQ ID NO: 103755 - DNA, 60 bp, Artificial
  Synthetic oligonucleotide
gggtgaacgagttggaggagttgagaccggatttgaaggacttcgccatgactatgacgc

SEQ ID NO: 103756 - DNA, 60 bp, Artificial
  Synthetic oligonucleotide
gacttcgccatgactatgacgctctcattacgcgagtggatgcagcagaacgcaaggtcg

SEQ ID NO: 103757 - DNA, 60 bp, Artificial
  Synthetic oligonucleotide
ctttggtcgcatcggtcagcgacgcacagcttgcaatctcaagactggaagatgctgtcg

SEQ ID NO: 103758 - DNA, 60 bp, Artificial
  Synthetic oligonucleotide
tgttacccagttgggtgaacgagttggaggagttgagaccggatttgaaggacttcgcca

SEQ ID NO: 103759 - DNA, 60 bp, Artificial
  Synthetic oligonucleotide
ttatgttgcgtcagtagccgcaccattgcgattaaatccaaccactagggtactcgatct

SEQ ID NO: 103760 - DNA, 60 bp, Artificial
  Synthetic oligonucleotide
cgtcagtagccgcaccattgcgattaaatccaaccactagggtactcgatctgctaactg

SEQ ID NO: 103761 - DNA, 60 bp, Artificial
  Synthetic oligonucleotide
tactcgatctgctaactgatagtgcagcactggaagttaactccagcggtcagttgactg

SEQ ID NO: 103762 - DNA, 60 bp, Artificial
  Synthetic oligonucleotide
ctgatagtgcagcactggaagttaactccagcggtcagttgactgtcaagtcattaaccc

SEQ ID NO: 103763 - DNA, 60 bp, Artificial
  Synthetic oligonucleotide
cagttgactgtcaagtcattaacccctgctttaaaatacccgatagccgatattagtgga

SEQ ID NO: 103764 - DNA, 60 bp, Artificial
  Synthetic oligonucleotide
gtcattaacccctgctttaaaatacccgatagccgatattagtggaagtatagggatgag

SEQ ID NO: 103765 - DNA, 60 bp, Artificial
  Synthetic oligonucleotide
tattagtggaagtatagggatgagtccaagttatagattcagacaggctatgtgggttgg

SEQ ID NO: 103766 - DNA, 60 bp, Artificial
  Synthetic oligonucleotide
agggatgagtccaagttatagattcagacaggctatgtgggttggattagtgtcttactc

SEQ ID NO: 103767 - DNA, 60 bp, Artificial
  Synthetic oligonucleotide
tgtgggttggattagtgtcttactcgggaagcggtctaaattggcggatacaagtaaatg

SEQ ID NO: 103768 - DNA, 60 bp, Artificial
  Synthetic oligonucleotide
gggttggattagtgtcttactcgggaagcggtctaaattggcggatacaagtaaatgccg

SEQ ID NO: 103769 - DNA, 60 bp, Artificial
  Synthetic oligonucleotide
cgccatgactatgacgctctcattacgcgagtggatgcagcagaacgcaaggtcgatgcc

SEQ ID NO: 103770 - DNA, 60 bp, Artificial
  Synthetic oligonucleotide
acgaattggcccaagagctagatgatttgaaacgggagattacgaccctgagatccgcga

SEQ ID NO: 103771 - DNA, 60 bp, Artificial
  Synthetic oligonucleotide
caggtggtcaactcatggagcactaccgatgtgatgcggccaatcgttacggctcgccga

SEQ ID NO: 103772 - DNA, 60 bp, Artificial
  Synthetic oligonucleotide
atggagcactaccgatgtgatgcggccaatcgttacggctcgccgacggtgccatcttct

SEQ ID NO: 103773 - DNA, 60 bp, Artificial
  Synthetic oligonucleotide
ggctcgccgacggtgccatcttctcaccctccaccctgcaccaagtgcccagagcttagg

SEQ ID NO: 103774 - DNA, 60 bp, Artificial
  Synthetic oligonucleotide
atggtgtacaagacgctgctattctgatggacgacaagctcccatccgtcggccgcgctc

SEQ ID NO: 103775 - DNA, 60 bp, Artificial
  Synthetic oligonucleotide
aagctcccatccgtcggccgcgctcgtatggctctcagaacattgactcttgctcgtcga

SEQ ID NO: 103776 - DNA, 60 bp, Artificial
  Synthetic oligonucleotide
cggccgcgctcgtatggctctcagaacattgactcttgctcgtcgatcaccgttgacctc

SEQ ID NO: 103777 - DNA, 60 bp, Artificial
  Synthetic oligonucleotide
ccgcgaacgtaaggttgaacgctgagaattaccgcatgagtcgagcgacgagagtgggtg

SEQ ID NO: 103778 - DNA, 60 bp, Artificial
  Synthetic oligonucleotide
tgacctgcgactcggtttctctctgactccatgaccccacggcggactcggttactcatc

SEQ ID NO: 103779 - DNA, 60 bp, Artificial
  Synthetic oligonucleotide
acgttcctcgagattccgtgccctctatggatgacttggtggatgacctgtgagctttga

SEQ ID NO: 103780 - DNA, 60 bp, Artificial
  Synthetic oligonucleotide
ccgtgccctctatggatgacttggtggatgacctgtgagctttgacctgcgactcggttt

SEQ ID NO: 103781 - DNA, 60 bp, Artificial
  Synthetic oligonucleotide
gccatcttctcaccctccaccctgcaccaagtgcccagagcttagggagcaaatcacgag

SEQ ID NO: 103782 - DNA, 60 bp, Artificial
  Synthetic oligonucleotide
agagcttagggagcaaatcacgagactgtccgctcagcccgcccttacgccgcaacctct

SEQ ID NO: 103783 - DNA, 60 bp, Artificial
  Synthetic oligonucleotide
ttcacgacgtaaagggttgctggttcacgcccctggcgaacgtttcgaggatctaaccat

SEQ ID NO: 103784 - DNA, 60 bp, Artificial
  Synthetic oligonucleotide
ctacgatcccacgtgctgatgctgctggttggtgcgcttcacgacgtaaagggttgctgg

SEQ ID NO: 103785 - DNA, 60 bp, Artificial
  Synthetic oligonucleotide
atctaaccattttcgctactaacaccgctctcccaaatgagctgattttaacggcgggtg

SEQ ID NO: 103786 - DNA, 60 bp, Artificial
  Synthetic oligonucleotide
gcagcaggagatgatgacgcagtcgctgcaatacctctctgagcgtgacgaattggccca

SEQ ID NO: 103787 - DNA, 60 bp, Artificial
  Synthetic oligonucleotide
ggatgaggaagagtacaatgtgatccgttcgcgtttcttgactcacgaagtgtttgacct

SEQ ID NO: 103788 - DNA, 60 bp, Artificial
  Synthetic oligonucleotide
gacatgtactatgctacgatcccacgtgctgatgctgctggttggtgcgcttcacgacgt

SEQ ID NO: 103789 - DNA, 60 bp, Artificial
  Synthetic oligonucleotide
cctatcatccgaccttccaggtgtccaacccttcttggacatgtactatgctacgatccc

SEQ ID NO: 103790 - DNA, 60 bp, Artificial
  Synthetic oligonucleotide
acggcgggtgatgtcaccgtggcgcgcttcgacctccttgatgtgtccgggatcgctcct

SEQ ID NO: 103791 - DNA, 60 bp, Artificial
  Synthetic oligonucleotide
ctcatttgtcagtgacgtcctttcgacaccttccgacgttcctcgagattccgtgccctc

SEQ ID NO: 103792 - DNA, 60 bp, Artificial
  Synthetic oligonucleotide
tgctcgtcgatcaccgttgacctctttcatgatcggggcgttgaagcactcaggtggtca

SEQ ID NO: 103793 - DNA, 60 bp, Artificial
  Synthetic oligonucleotide
ggaaccccgcgttacggcattaaatcaagaactcacacaatgcgcgcgctgagcagcagg

SEQ ID NO: 103794 - DNA, 60 bp, Artificial
  Synthetic oligonucleotide
cggacgttcaaccggcacgtgaagaccatctcttagcctacttgaacgagcacgtgtgcg

SEQ ID NO: 103795 - DNA, 57 bp, Artificial
  Synthetic oligonucleotide
cgcaacctctggccggtccggttgctctgctatcgaagatctccgagttgcagcgcc

SEQ ID NO: 103796 - DNA, 60 bp, Artificial
  Synthetic oligonucleotide
gatttgaggcccgtttacgccaggaagctaatgcagagtgggaaccccgcgttacggcat

SEQ ID NO: 103797 - DNA, 60 bp, Artificial
  Synthetic oligonucleotide
tgtaacgtgtcgagtgattcaatcagcgctgtcatctcccagagagctaagaatcgtgat

SEQ ID NO: 103798 - DNA, 60 bp, Artificial
  Synthetic oligonucleotide
caacctaccgtcacttgcccaatacttgatggctggaactatggatgccgtctccactgg

SEQ ID NO: 103799 - DNA, 60 bp, Artificial
  Synthetic oligonucleotide
tgagctttgacctgcgactcggtttctctctgactccatgaccccacggcggactcggtt

SEQ ID NO: 103800 - DNA, 60 bp, Artificial
  Synthetic oligonucleotide
tctccactggtcaccttcctggtgcctccgtaccggatgtctctaaagtggtggcgaagc

SEQ ID NO: 103801 - DNA, 60 bp, Artificial
  Synthetic oligonucleotide
gatgtctctaaagtggtggcgaagcagcagacgatctctaaatcgcccggtcgcttggat

SEQ ID NO: 103802 - DNA, 60 bp, Artificial
  Synthetic oligonucleotide
ctcttgctccattcgatgactattggttcgacaaccaacctttgctctctcaggctgtgg

SEQ ID NO: 103803 - DNA, 60 bp, Artificial
  Synthetic oligonucleotide
ctttgctctctcaggctgtggaactgttggcctctgaggatcgtttgcgtggctttgaac

SEQ ID NO: 103804 - DNA, 60 bp, Artificial
  Synthetic oligonucleotide
ccggagatcatgaatagactgcgtttgtttttctccgacgtgttgaaggtgaaaatggaa

SEQ ID NO: 103805 - DNA, 60 bp, Artificial
  Synthetic oligonucleotide
gaaaatggaagctgacaacctaccgtcacttgcccaatacttgatggctggaactatgga

SEQ ID NO: 103806 - DNA, 60 bp, Artificial
  Synthetic oligonucleotide
gtggtggcgaagcagcagacgatctctaaatcgcccggtcgcttggatgaggaagagtac

SEQ ID NO: 103807 - DNA, 60 bp, Artificial
  Synthetic oligonucleotide
cctcagccattcgttgggcgatcgaccactcatgcactgattcgctcgtttctccccgga

SEQ ID NO: 103808 - DNA, 60 bp, Artificial
  Synthetic oligonucleotide
acattactgcgaatgatcatcccttagtgttctttactccctcagccattcgttgggcga

SEQ ID NO: 103809 - DNA, 60 bp, Artificial
  Synthetic oligonucleotide
tgatgtcaccgtggcgcgcttcgacctccttgatgtgtccgggatcgctcctcaacatca

SEQ ID NO: 103810 - DNA, 60 bp, Artificial
  Synthetic oligonucleotide
gatcgctcctcaacatcacgcttcagtccaggaggatcgtaccgtcggaacaagtcggta

SEQ ID NO: 103811 - DNA, 60 bp, Artificial
  Synthetic oligonucleotide
ctccccggaatattagggtatgtgttggcattgatccgctggttactagatggacacgtg

SEQ ID NO: 103812 - DNA, 60 bp, Artificial
  Synthetic oligonucleotide
ctagatggacacgtgatggtgtacaagacgctgctattctgatggacgacaagctcccat

SEQ ID NO: 103813 - DNA, 60 bp, Artificial
  Synthetic oligonucleotide
gaactatggatgccgtctccactggtcaccttcctggtgcctccgtaccggatgtctcta

SEQ ID NO: 103814 - DNA, 60 bp, Artificial
  Synthetic oligonucleotide
gtgcttctgaagtttatgctgggtgaagacctggtcactgttcaaggcactcttgctcca

SEQ ID NO: 103815 - DNA, 60 bp, Artificial
  Synthetic oligonucleotide
accgatgtcgctctcaatgtctcacgatgggtcatccattcgttctgctgcgtctcagtt

SEQ ID NO: 103816 - DNA, 60 bp, Artificial
  Synthetic oligonucleotide
gcgtggatcatgtcgtcaaccaagtggggagacaaaccgatgtcgctctcaatgtctcac

SEQ ID NO: 103817 - DNA, 60 bp, Artificial
  Synthetic oligonucleotide
gctttttgagtcctagcgtggatcatgtcgtcaaccaagtggggagacaaaccgatgtcg

SEQ ID NO: 103818 - DNA, 60 bp, Artificial
  Synthetic oligonucleotide
ctgtcggttccattgtcccactccactcccattccacctcaacggaagactgtgcttctg

SEQ ID NO: 103819 - DNA, 60 bp, Artificial
  Synthetic oligonucleotide
cgtctcagttcctgtcggttccattgtcccactccactcccattccacctcaacggaaga

SEQ ID NO: 103820 - DNA, 60 bp, Artificial
  Synthetic oligonucleotide
gaaccttcattttccatatcacgaactagattaagtggtatctatggattaccagcagcg

SEQ ID NO: 103821 - DNA, 60 bp, Artificial
  Synthetic oligonucleotide
ccagcagcgaatccaaataataacgtagagtattatgaaattgccggacgattctcgtta

SEQ ID NO: 103822 - DNA, 60 bp, Artificial
  Synthetic oligonucleotide
gattaccagcagcgaatccaaataataacgtagagtattatgaaattgccggacgattct

SEQ ID NO: 103823 - DNA, 57 bp, Artificial
  Synthetic oligonucleotide
tctttggtaccaacgaatgacgattatcaaacaccaatagctaattctgtaacggtt

SEQ ID NO: 103824 - DNA, 60 bp, Artificial
  Synthetic oligonucleotide
ggacgattctcgttaatttctttggtaccaacgaatgacgattatcaaacaccaatagct

SEQ ID NO: 103825 - DNA, 59 bp, Artificial
  Synthetic oligonucleotide
gcactctcgcaagaaattgcattgtcgcaactgatcgatctagcgacgctaccgcttga

SEQ ID NO: 103826 - DNA, 55 bp, Artificial
  Synthetic oligonucleotide
accaatagctaattctgtaacggttagacaagatttggaaagacagttgggtgag

SEQ ID NO: 103827 - DNA, 60 bp, Artificial
  Synthetic oligonucleotide
gcgatatcagatctaacaaatagtatgtcagacgcagcatcttcagtcagtagatcagct

SEQ ID NO: 103828 - DNA, 60 bp, Artificial
  Synthetic oligonucleotide
tgcgatatcagatctaacaaatagtatgtcagacgcagcatcttcagtcagtagatcagc

SEQ ID NO: 103829 - DNA, 51 bp, Artificial
  Synthetic oligonucleotide
tggaataacgaagacgcaagcaatggaattattgcagtcaaatccaaaaac

SEQ ID NO: 103830 - DNA, 60 bp, Artificial
  Synthetic oligonucleotide
tgccatttgatgtggaaaggttcaataagttaatcacagattcgccagtattgtcagcta

SEQ ID NO: 103831 - DNA, 60 bp, Artificial
  Synthetic oligonucleotide
gagtgaaccttcattttccatatcacgaactagattaagtggtatctatggattaccagc

SEQ ID NO: 103832 - DNA, 60 bp, Artificial
  Synthetic oligonucleotide
gctagtgatgatctgagaacagtagcggacgcttcaacgcaaatatctagcgttagcaga

SEQ ID NO: 103833 - DNA, 60 bp, Artificial
  Synthetic oligonucleotide
cagttagatcaattagcagtaatgcagcatcgcggattagtacagccattcaagctagtg

SEQ ID NO: 103834 - DNA, 60 bp, Artificial
  Synthetic oligonucleotide
ctctgctgcagtactaaagacaaaactagataaatcaacacaaatttcacaaagtaccat

SEQ ID NO: 103835 - DNA, 60 bp, Artificial
  Synthetic oligonucleotide
ttagttataatggcgggacgctacctaccgatttttcaatatctagatttgaagtgatta

SEQ ID NO: 103836 - DNA, 60 bp, Artificial
  Synthetic oligonucleotide
cgcaaatatctagcgttagcagaagtttgcggttacgtgagttcactacacagactgaca

SEQ ID NO: 103837 - DNA, 60 bp, Artificial
  Synthetic oligonucleotide
cattagatggtccgtatcagccaactacatttaacttacctattaactattggatgctga

SEQ ID NO: 103838 - DNA, 60 bp, Artificial
  Synthetic oligonucleotide
ggtccgtatcagccaactacatttaacttacctattaactattggatgctgattgcacca

SEQ ID NO: 103839 - DNA, 60 bp, Artificial
  Synthetic oligonucleotide
caaacgttacggttaatcccggaccatttgcgcaaacgggatatgcaccagtcgattggg

SEQ ID NO: 103840 - DNA, 60 bp, Artificial
  Synthetic oligonucleotide
cggttaatcccggaccatttgcgcaaacgggatatgcaccagtcgattggggacatggtg

SEQ ID NO: 103841 - DNA, 60 bp, Artificial
  Synthetic oligonucleotide
cgtaacaaacatctctgatgaagttagtgagattggagctagaaagacgacaaacgttac

SEQ ID NO: 103842 - DNA, 60 bp, Artificial
  Synthetic oligonucleotide
tgatgaagttagtgagattggagctagaaagacgacaaacgttacggttaatcccggacc

SEQ ID NO: 103843 - DNA, 60 bp, Artificial
  Synthetic oligonucleotide
ggcttctttgatttataggcagttactgtcaaactcatacgtaacaaacatctctgatga

SEQ ID NO: 103844 - DNA, 60 bp, Artificial
  Synthetic oligonucleotide
agtacagccattcaagctagtgatgatctgagaacagtagcggacgcttcaacgcaaata

SEQ ID NO: 103845 - DNA, 60 bp, Artificial
  Synthetic oligonucleotide
gatgtggtctgcagtggtggtgattacagtttcgcattgccagtaggcgcatggccagta

SEQ ID NO: 103846 - DNA, 60 bp, Artificial
  Synthetic oligonucleotide
gtagatcagcttcagttagatcaattagcagtaatgcagcatcgcggattagtacagcca

SEQ ID NO: 103847 - DNA, 60 bp, Artificial
  Synthetic oligonucleotide
cagtaggcgcatggccagtaatgagcggtggtgcagtaacgctgtcgtcggcaggggtta

SEQ ID NO: 103848 - DNA, 59 bp, Artificial
  Synthetic oligonucleotide
gagcattacatccagagaaatacggtatacgaaagcacaagtgaatgaagatatagtgg

SEQ ID NO: 103849 - DNA, 61 bp, Artificial
  Synthetic oligonucleotide
gctgcagtactaaagacaaaactagataaatcaacacaaatttcacaaagtaccataccag

SEQ ID NO: 103850 - DNA, 60 bp, Artificial
  Synthetic oligonucleotide
ttgggacgactctcaagcattcagaaacatggtgtatgttagatcgctgtcagccaactt

SEQ ID NO: 103851 - DNA, 60 bp, Artificial
  Synthetic oligonucleotide
gggacgactctcaagcattcagaaacatggtgtatgttagatcgctgtcagccaacttga

SEQ ID NO: 103852 - DNA, 60 bp, Artificial
  Synthetic oligonucleotide
aaagtaccataccagacataatatctgaatcatctgaaaagtttataccaatgcgtacat

SEQ ID NO: 103853 - DNA, 60 bp, Artificial
  Synthetic oligonucleotide
ccataccagacataatatctgaatcatctgaaaagtttataccaatgcgtacatacaggg

SEQ ID NO: 103854 - DNA, 60 bp, Artificial
  Synthetic oligonucleotide
accgattatgtgtcacttaattcattaagattcaggtttaggttaactgtgagtgaacct

SEQ ID NO: 103855 - DNA, 60 bp, Artificial
  Synthetic oligonucleotide
gtgtcacttaattcattaagattcaggtttaggttaactgtgagtgaaccttcattttcc

SEQ ID NO: 103856 - DNA, 60 bp, Artificial
  Synthetic oligonucleotide
ttgccagtaggcgcatggccagtaatgagcggtggtgcagtaacgctgtcgtcggcaggg

SEQ ID NO: 103857 - DNA, 60 bp, Artificial
  Synthetic oligonucleotide
cggacttcctccagtacaaaatactagaaatgtagtaccagtgagcattacatccagaga

SEQ ID NO: 103858 - DNA, 60 bp, Artificial
  Synthetic oligonucleotide
ataaataacggacttcctccagtacaaaatactagaaatgtagtaccagtgagcattaca

SEQ ID NO: 103859 - DNA, 60 bp, Artificial
  Synthetic oligonucleotide
ggttcgcctgcgtactcgttgaaccaagcgtacaaagcacacgccgggaatacgtccttg

SEQ ID NO: 103860 - DNA, 60 bp, Artificial
  Synthetic oligonucleotide
cacaacgaatagatggttcgcctgcgtactcgttgaaccaagcgtacaaagcacacgccg

SEQ ID NO: 103861 - DNA, 60 bp, Artificial
  Synthetic oligonucleotide
ccaactcaagcgggtagggttgcagagggaacaaacacaacgaatagatggttcgcctgc

SEQ ID NO: 103862 - DNA, 60 bp, Artificial
  Synthetic oligonucleotide
tggatgctgattgcaccaactcaagcgggtagggttgcagagggaacaaacacaacgaat

SEQ ID NO: 103863 - DNA, 60 bp, Artificial
  Synthetic oligonucleotide
taccaagatcgcaaactgatttatgcgaccagtacataaataacggacttcctccagtac

SEQ ID NO: 103864 - DNA, 60 bp, Artificial
  Synthetic oligonucleotide
cagagttttatttattaccaagatcgcaaactgatttatgcgaccagtacataaataacg

SEQ ID NO: 103865 - DNA, 60 bp, Artificial
  Synthetic oligonucleotide
gagctactatttgactataaataatgacaatagtcatgtatcatgcgacgcagagtttta

SEQ ID NO: 103866 - DNA, 59 bp, Artificial
  Synthetic oligonucleotide
caaataaattatgtgcgtggatgaagagagaaggaagagtgtattggtatacaggtacc

SEQ ID NO: 103867 - DNA, 60 bp, Artificial
  Synthetic oligonucleotide
ggagtatcatcaaatgagtctgagattcatatcaaagctagtgatatgaagaagagtgtg

SEQ ID NO: 103868 - DNA, 59 bp, Artificial
  Synthetic oligonucleotide
gaagagtgtgggagtaactttgacggtcaagcctaatagtctttgggtatgcaacaaaa

SEQ ID NO: 103869 - DNA, 60 bp, Artificial
  Synthetic oligonucleotide
gaagagtgtgggagtaactttgacggtcaagcctaatagtctttgggtatgcaacaaaaa

SEQ ID NO: 103870 - DNA, 60 bp, Artificial
  Synthetic oligonucleotide
gcaacaaaaatgattttgccaggttgatatgtatttttacattgccggatgatattatag

SEQ ID NO: 103871 - DNA, 60 bp, Artificial
  Synthetic oligonucleotide
agattgttatggaggatcaaatatttatgttggtttggacatttccaagccaccatatat

SEQ ID NO: 103872 - DNA, 60 bp, Artificial
  Synthetic oligonucleotide
atgcgttagtcgtattggacgctgggattgcaactttatcctggcatttggatcattaat

SEQ ID NO: 103873 - DNA, 60 bp, Artificial
  Synthetic oligonucleotide
gcgttagtcgtattggacgctgggattgcaactttatcctggcatttggatcattaattg

SEQ ID NO: 103874 - DNA, 60 bp, Artificial
  Synthetic oligonucleotide
tgtatgaatttatgatggcagtcttaaacgtcactaaagagctgaacgacccgaacgttc

SEQ ID NO: 103875 - DNA, 60 bp, Artificial
  Synthetic oligonucleotide
gttcttcgtcgactgccatcgagatggagcgcttcttgagaaaatataacatgaacagtt

SEQ ID NO: 103876 - DNA, 54 bp, Artificial
  Synthetic oligonucleotide
aaatttaaaattctatgaaactcaattggctatccatctgaactttaaacttac

SEQ ID NO: 103877 - DNA, 54 bp, Artificial
  Synthetic oligonucleotide
aaattcaaaattctctgaaactcaattggctatccatctgaactttaaacttac

SEQ ID NO: 103878 - DNA, 60 bp, Artificial
  Synthetic oligonucleotide
actcatccaaattcgaaattctctgaaacttaattggctatccatctgaactttaaactt

SEQ ID NO: 103879 - DNA, 60 bp, Artificial
  Synthetic oligonucleotide
caaagcgatgtcaaacacaactggtgcaacgcaaacacaaaaagcggagaaggctgcatt

SEQ ID NO: 103880 - DNA, 50 bp, Artificial
  Synthetic oligonucleotide
actaggaccgagagaaaatgtggctataatacaggttggcgggtctaata

SEQ ID NO: 103881 - DNA, 60 bp, Artificial
  Synthetic oligonucleotide
catataagtctgaagaagaattcactgaagatgaaacggctcctttgactaagaaagaca

SEQ ID NO: 103882 - DNA, 60 bp, Artificial
  Synthetic oligonucleotide
ttctgaagataactcatataagtctgaagaagaattcactgaagatgaaacggctccttt

SEQ ID NO: 103883 - DNA, 60 bp, Artificial
  Synthetic oligonucleotide
cagaacgtgtgtctgtccctcggctttgcattttgcagaggaatgtccatcaaacgacgt

SEQ ID NO: 103884 - DNA, 60 bp, Artificial
  Synthetic oligonucleotide
aaacagtccaaatacagaacgtgtgtctgtccctcggctttgcattttgcagaggaatgt

SEQ ID NO: 103885 - DNA, 60 bp, Artificial
  Synthetic oligonucleotide
cgtaatggaagggacaggcgtgaaactgactctcaagatgagtattctgaagataactca

SEQ ID NO: 103886 - DNA, 60 bp, Artificial
  Synthetic oligonucleotide
ttttcacgtaatggaagggacaggcgtgaaactgactctcaagatgagtattctgaagat

SEQ ID NO: 103887 - DNA, 60 bp, Artificial
  Synthetic oligonucleotide
ggaatgtccatcaaacgacgttttattttcagttggtgcacacagaaacatgttgtgtgt

SEQ ID NO: 103888 - DNA, 60 bp, Artificial
  Synthetic oligonucleotide
agaggaatgtccatcaaacgacgttttattttcagttggtgcacacagaaacatgttgtg

SEQ ID NO: 103889 - DNA, 60 bp, Artificial
  Synthetic oligonucleotide
catataagtctgaagaagaattcactgaagatgaaacggctcctttgactgagaaagaca

SEQ ID NO: 103890 - DNA, 60 bp, Artificial
  Synthetic oligonucleotide
gacgttgttgatggggtgaaccataaacttgatgtgactacaaatacctgtacaattagg

SEQ ID NO: 103891 - DNA, 60 bp, Artificial
  Synthetic oligonucleotide
gacgttgttgatggtgtgaaccataaacttgatgtgactacaaatacctgtacaattagg

SEQ ID NO: 103892 - DNA, 60 bp, Artificial
  Synthetic oligonucleotide
aagcttgaacaattattatgcttctcttgtcccgcgtgaaaatggaataattagaatgat

SEQ ID NO: 103893 - DNA, 51 bp, Artificial
  Synthetic oligonucleotide
taaggaaaaacgccaattctcatttctaaaagttatgagcgtatcagatga

SEQ ID NO: 103894 - DNA, 60 bp, Artificial
  Synthetic oligonucleotide
tttgtgtatgagtttcaatatcaatataccattgatgcttcaattatgggtaaggaaaaa

SEQ ID NO: 103895 - DNA, 60 bp, Artificial
  Synthetic oligonucleotide
gaagaaaaatataacatcagttggtgaatcgggtggatgtttaacgttccgcgataccac

SEQ ID NO: 103896 - DNA, 60 bp, Artificial
  Synthetic oligonucleotide
agtagattaggtttatcagcgatgttaaatgcatccgctatagctgatagtactataacc

SEQ ID NO: 103897 - DNA, 60 bp, Artificial
  Synthetic oligonucleotide
cagtaacacttttaacattttaagtagtgtcacagataagtttgtattaaatactcttgt

SEQ ID NO: 103898 - DNA, 60 bp, Artificial
  Synthetic oligonucleotide
gtagtgctggaagtgttgctggactgcgtgaacgtatgtgggcattatcacgtgctcata

SEQ ID NO: 103899 - DNA, 60 bp, Artificial
  Synthetic oligonucleotide
gggttgcatattgaattgtcatctcgtcccattagtgctgaagtcgagtccgtatcaaga

SEQ ID NO: 103900 - DNA, 60 bp, Artificial
  Synthetic oligonucleotide
ttgtcatctcgtcccattagtgctgaagtcgagtccgtatcaagagtgaaacgttgcgct

SEQ ID NO: 103901 - DNA, 60 bp, Artificial
  Synthetic oligonucleotide
atgctaaatgatgctaccaaagctttaaacgaaacccatacgatagtcttaaccttcttt

SEQ ID NO: 103902 - DNA, 60 bp, Artificial
  Synthetic oligonucleotide
atgctttaaaatttattacgtaaatattagaaaagacaaaacagttatggaacgcgtaca

SEQ ID NO: 103903 - DNA, 58 bp, Artificial
  Synthetic oligonucleotide
acgaataacgtctggtgcagtgaacaaaatgacatatggcgagttacgtttagttgga

SEQ ID NO: 103904 - DNA, 60 bp, Artificial
  Synthetic oligonucleotide
ctgaggttagtatggatgcgtttgttgacatgtactctaaattattagatataaatgcgc

SEQ ID NO: 103905 - DNA, 60 bp, Artificial
  Synthetic oligonucleotide
agtatgtggtccaggaaactcagatggtctgttttgtatgggtagatcttatgcagaagg

SEQ ID NO: 103906 - DNA, 60 bp, Artificial
  Synthetic oligonucleotide
tatgggaaattaacctcagatattatgggagaattacgaatttactgcagtgacatagca

SEQ ID NO: 103907 - DNA, 60 bp, Artificial
  Synthetic oligonucleotide
atactataaattgggagaacagaaaaaactgagtgttaaatatcatgcaaaaggacttaa

SEQ ID NO: 103908 - DNA, 60 bp, Artificial
  Synthetic oligonucleotide
catctgatgctaccgttagcgtaaatgtaaatggatatggggacacacctattacaagat

SEQ ID NO: 103909 - DNA, 60 bp, Artificial
  Synthetic oligonucleotide
attacaagatttaacattcttggcagtgaaggaagacgtacattcccaatacgaataacg

SEQ ID NO: 103910 - DNA, 61 bp, Artificial
  Synthetic oligonucleotide
cctttggcgttagttgaggatacaatagaagacatcacaaaagtttattattctactgaac

SEQ ID NO: 103911 - DNA, 60 bp, Artificial
  Synthetic oligonucleotide
atcgcattttatgattgaatctattatgtatatgaatgagtggttgagtcaagtaacgac

SEQ ID NO: 103912 - DNA, 55 bp, Artificial
  Synthetic oligonucleotide
tagaaaatcacgcatcaataatgctaggaaaacagttactacaacttataatcta

SEQ ID NO: 103913 - DNA, 60 bp, Artificial
  Synthetic oligonucleotide
cataggacctaatgagtactaccaaggatggacttcatctgatgctaccgttagcgtaaa

SEQ ID NO: 103914 - DNA, 60 bp, Artificial
  Synthetic oligonucleotide
cttatctctggtgaatcgcctcaatcaacatgaaaaatggatgcaacaatttggatttac

SEQ ID NO: 103915 - DNA, 60 bp, Artificial
  Synthetic oligonucleotide
gcgcatggcgtagctgaatcagttcattttgcatatatgttaataagcttgaacaattat

SEQ ID NO: 103916 - DNA, 60 bp, Artificial
  Synthetic oligonucleotide
atacctcagcttatcctcatactgaaaaattagacggtcttagtattataccgaaaatta

SEQ ID NO: 103917 - DNA, 60 bp, Artificial
  Synthetic oligonucleotide
attcttggcagtgaaggaagacgtacattcccaatacgaataacgtctggtgcagtgaac

SEQ ID NO: 103918 - DNA, 52 bp, Artificial
  Synthetic oligonucleotide
atactcttgttacatctccgattgttgagttagtattacctgaaggatttag

SEQ ID NO: 103919 - DNA, 63 bp, Artificial
  Synthetic oligonucleotide
ggtaccgttacattctctattcaagttaatggaacatcttttacatatactaaacctttggcg

SEQ ID NO: 103920 - DNA, 60 bp, Artificial
  Synthetic oligonucleotide
tggggctcgtaaaatatcgccgctcttagcagctgatgccgtcaggagatttccgaaact

SEQ ID NO: 103921 - DNA, 60 bp, Artificial
  Synthetic oligonucleotide
gaaaatttctcaaaatttattaagtacgagaagctgaaacagataatagatagaaaatca

SEQ ID NO: 103922 - DNA, 60 bp, Artificial
  Synthetic oligonucleotide
attatgaaggggctgccaatgatttcgcaacaatagttatgatggtcatgtttcaaaaac

SEQ ID NO: 103923 - DNA, 58 bp, Artificial
  Synthetic oligonucleotide
atcgaggctttgtgtcactttaggtgaatggttatcaacagggtcacctttattggga

SEQ ID NO: 103924 - DNA, 60 bp, Artificial
  Synthetic oligonucleotide
ccgaaaattaaatcattcaaacaagatatgccagtattaattagttatgtacttaaagaa

SEQ ID NO: 103925 - DNA, 60 bp, Artificial
  Synthetic oligonucleotide
agttatgttcctgatgattggatggatccttacggataagttaagtcattctcacctaac

SEQ ID NO: 103926 - DNA, 60 bp, Artificial
  Synthetic oligonucleotide
ccgaaacttaaaactgaaggaaccgcagtagaagtagcttctcgtgttttgcatttaagt

SEQ ID NO: 103927 - DNA, 60 bp, Artificial
  Synthetic oligonucleotide
agcagttatctttattcgatgtagataatgctaatttcgtatcagcttatagtagattag

SEQ ID NO: 103928 - DNA, 60 bp, Artificial
  Synthetic oligonucleotide
ggaacttttgtgggataaaccatatcctaatccttgttctaaatggtttgatcacgatgt

SEQ ID NO: 103929 - DNA, 60 bp, Artificial
  Synthetic oligonucleotide
tctaatttgatctcgtgttacggaattatcaacaatgtgacaaacttagatggaataacg

SEQ ID NO: 103930 - DNA, 60 bp, Artificial
  Synthetic oligonucleotide
ttatgcttctcttgtcccgcgtgaaaatggaataattagaatgatttcatcaggtgtctc

SEQ ID NO: 103931 - DNA, 63 bp, Artificial
  Synthetic oligonucleotide
cgactagagtttcagttgtagagaaagctttaaatggtttaatcttaacgttacagaaacagc

SEQ ID NO: 103932 - DNA, 60 bp, Artificial
  Synthetic oligonucleotide
ccaaacaaactagagtatatcagattaactccaaacatgaatatacctcagcttatcctc

SEQ ID NO: 103933 - DNA, 60 bp, Artificial
  Synthetic oligonucleotide
cagcatgagaaagaacacaatccgctaccattattatcgaggctttgtgtcactttaggt

SEQ ID NO: 103934 - DNA, 60 bp, Artificial
  Synthetic oligonucleotide
ttaacgttacagaaacagcatgagaaagaacacaatccgctaccattattatcgaggctt

SEQ ID NO: 103935 - DNA, 60 bp, Artificial
  Synthetic oligonucleotide
acatgagtactcatagtagtgctggaagtgttgctggactgcgtgaacgtatgtgggcat

SEQ ID NO: 103936 - DNA, 60 bp, Artificial
  Synthetic oligonucleotide
atggacggaaaaactagtatgtggtccaggaaactcagatggtctgttttgtatgggtag

SEQ ID NO: 103937 - DNA, 60 bp, Artificial
  Synthetic oligonucleotide
acatcagttggtgaatcgggtggatgtttaacgttccgcgataccacaaattttggaatc

SEQ ID NO: 103938 - DNA, 60 bp, Artificial
  Synthetic oligonucleotide
cagtaataacaaaatcaaggaagagaaaaatgacatgagtgattttggtatttatgggaa

SEQ ID NO: 103939 - DNA, 60 bp, Artificial
  Synthetic oligonucleotide
gggtagatcttatgcagaaggattcaaagaaccaatgactcatacttacttatccggaat

SEQ ID NO: 103940 - DNA, 60 bp, Artificial
  Synthetic oligonucleotide
agttcgtgaaccaaggattaaatgtcgctcgaaacgaaagttaattatctcttatctctg

SEQ ID NO: 103941 - DNA, 60 bp, Artificial
  Synthetic oligonucleotide
ccaaggattaaatgtcgctcgaaacgaaagttaattatctcttatctctggtgaatcgcc

SEQ ID NO: 103942 - DNA, 56 bp, Artificial
  Synthetic oligonucleotide
tactgtatgcagcaccttgcaacgcgtggaacaactccatattagtcaaacttctc

SEQ ID NO: 103943 - DNA, 60 bp, Artificial
  Synthetic oligonucleotide
tcatctatggcccatttcatccatctagcgttcgtcatgaactctatccctcgagcactt

SEQ ID NO: 103944 - DNA, 60 bp, Artificial
  Synthetic oligonucleotide
accgattaaaaatagcgcgactttcctaaacgtatatagcgctccgcctgaatgtgggca

SEQ ID NO: 103945 - DNA, 60 bp, Artificial
  Synthetic oligonucleotide
gcgcgactttcctaaacgtatatagcgctccgcctgaatgtgggcatacggcatctcctg

SEQ ID NO: 103946 - DNA, 60 bp, Artificial
  Synthetic oligonucleotide
gttcctctagtcaagtgtatccactttggctgtcccaccgcataagtctcctccaagctt

SEQ ID NO: 103947 - DNA, 60 bp, Artificial
  Synthetic oligonucleotide
gtgtatccactttggctgtcccaccgcataagtctcctccaagctttctctttcggagtt

SEQ ID NO: 103948 - DNA, 60 bp, Artificial
  Synthetic oligonucleotide
ggtgaactgatccatttgtcgaaataatccggcaaaactaactcggaccgtaaattcaga

SEQ ID NO: 103949 - DNA, 60 bp, Artificial
  Synthetic oligonucleotide
gaacgtcgatttcagaacatccagccgttgtgtcccagtgagactttgaattagatacac

SEQ ID NO: 103950 - DNA, 60 bp, Artificial
  Synthetic oligonucleotide
aacatccagccgttgtgtcccagtgagactttgaattagatacacgatgtacctcgcctc

SEQ ID NO: 103951 - DNA, 60 bp, Artificial
  Synthetic oligonucleotide
catcagagggaggaaattgatcacattcagatcacgcacaaatttgatctctttcagcat

SEQ ID NO: 103952 - DNA, 60 bp, Artificial
  Synthetic oligonucleotide
gcacataagttgacaagggtccttcatctctagcacgcatttttgatacgtcccaccagt

SEQ ID NO: 103953 - DNA, 59 bp, Artificial
  Synthetic oligonucleotide
tcccaccagtcgacggatgcacatatgtttgatgttccataccttcatgtagatccgga

SEQ ID NO: 103954 - DNA, 60 bp, Artificial
  Synthetic oligonucleotide
tcgagcactttttgtcgattttctatcatcataagcacgtaatgttatatcaagtaatct

SEQ ID NO: 103955 - DNA, 60 bp, Artificial
  Synthetic oligonucleotide
ttcggagtttgccactaattcgtagcttgatttgatactgtatgcagcaccttgcaacgc

SEQ ID NO: 103956 - DNA, 60 bp, Artificial
  Synthetic oligonucleotide
gccaaagggtatctgctcagtaacgcgtatggaatctcatcttctgaatagactggaatg

SEQ ID NO: 103957 - DNA, 60 bp, Artificial
  Synthetic oligonucleotide
atcgcctctacaattgttaatcttggtatatctatcatatcggattcaggaatctttaca

SEQ ID NO: 103958 - DNA, 60 bp, Artificial
  Synthetic oligonucleotide
ctcaactgactattctgcccgacggtgacggatacaattccacaaatgtgcttacgtgag

SEQ ID NO: 103959 - DNA, 60 bp, Artificial
  Synthetic oligonucleotide
accgttcataaggtaatccactattgcctattcgcgttcctctagtcaagtgtatccact

SEQ ID NO: 103960 - DNA, 60 bp, Artificial
  Synthetic oligonucleotide
gacctcgttcgctatctcgcttggaatctttccatttacgatcacctggaccatacttga

SEQ ID NO: 103961 - DNA, 60 bp, Artificial
  Synthetic oligonucleotide
tgtaaagttcataaaacttttgaatccaaatctatttgcgtacgcgccaacctctacggg

SEQ ID NO: 103962 - DNA, 60 bp, Artificial
  Synthetic oligonucleotide
gtgcttacgtgagtaattataccgactaactatttgttctgaacgcgtatgcggttccaa

SEQ ID NO: 103963 - DNA, 60 bp, Artificial
  Synthetic oligonucleotide
cgtcaagtttgaactgaaatcttgttgatagatccatttcatctttcggctcttcatgcg

SEQ ID NO: 103964 - DNA, 53 bp, Artificial
  Synthetic oligonucleotide
attgcaatcagagcgtaaaatcttccttcatctgtcgctggggctcttacacc

SEQ ID NO: 103965 - DNA, 60 bp, Artificial
  Synthetic oligonucleotide
cggatttgttctccacactctacccttttgtgtatccgtcgctgcgattgcaatcagagc

SEQ ID NO: 103966 - DNA, 60 bp, Artificial
  Synthetic oligonucleotide
gcatagctctagcgctctaatcctgcctctatcgtatgtagccgctatccactctgccct

SEQ ID NO: 103967 - DNA, 60 bp, Artificial
  Synthetic oligonucleotide
tgcatatcctcggcaatctgttttttctttgactcaccagggtgaaaccgtgtaaagttc

SEQ ID NO: 103968 - DNA, 60 bp, Artificial
  Synthetic oligonucleotide
tcatctttcggctcttcatgcgtgttcagtatcttacgcccaatcgtggaaaggatcttg

SEQ ID NO: 103969 - DNA, 60 bp, Artificial
  Synthetic oligonucleotide
cgtcaataagttagggtccgtcagtatgttatgaagtttaaatctttcctgatcccaccc

SEQ ID NO: 103970 - DNA, 60 bp, Artificial
  Synthetic oligonucleotide
acatttgtctgtatcgccaaagggtatctgctcagtaacgcgtatggaatctcatcttct

SEQ ID NO: 103971 - DNA, 60 bp, Artificial
  Synthetic oligonucleotide
tcgagctgactcaaatattgaaaaaccgcggattgttcctgttttaagctcaacgcctcg

SEQ ID NO: 103972 - DNA, 60 bp, Artificial
  Synthetic oligonucleotide
ctaggtacaacgattccatcgtttctcgctggtttataattcatcgcctctacaattgtt

SEQ ID NO: 103973 - DNA, 60 bp, Artificial
  Synthetic oligonucleotide
agcaccattggaattgaccactgtctatgcgaatacgagatgttatcatgaacaaggaac

SEQ ID NO: 103974 - DNA, 60 bp, Artificial
  Synthetic oligonucleotide
gtgggcatacggcatctcctgttagctgcgtaagcgcgggaaaatcatcgagctgactca

SEQ ID NO: 103975 - DNA, 60 bp, Artificial
  Synthetic oligonucleotide
ggatgcgcaactggtaatgtatatacgatagaatccgccagacccacacataaagaagac

SEQ ID NO: 103976 - DNA, 60 bp, Artificial
  Synthetic oligonucleotide
caacgcctcgccaaaaaatagtagccgcagatcgtagtaaggcccgagaacaaaatccaa

SEQ ID NO: 103977 - DNA, 60 bp, Artificial
  Synthetic oligonucleotide
ttttcgtagtcattactggtgtatggacactcccctgggaaatttttgtattggtgtaat

SEQ ID NO: 103978 - DNA, 60 bp, Artificial
  Synthetic oligonucleotide
tcctttttcgatgttccgatctcccctttagtaattcttaagcgcgcgttaaacattggt

SEQ ID NO: 103979 - DNA, 60 bp, Artificial
  Synthetic oligonucleotide
aaatagtagccgcagatcgtagtaaggcccgagaacaaaatccaacgactccgcagggga

SEQ ID NO: 103980 - DNA, 60 bp, Artificial
  Synthetic oligonucleotide
cggttccaatttgtcatctcccacaattattagaacgatgcatttcttaggatgcgcaac

SEQ ID NO: 103981 - DNA, 60 bp, Artificial
  Synthetic oligonucleotide
ccgatctcccctttagtaattcttaagcgcgcgttaaacattggtgaactgatccatttg

SEQ ID NO: 103982 - DNA, 59 bp, Artificial
  Synthetic oligonucleotide
ttagatacacgatgtacctcgcctctttggtatcacgtagctgttcacgtttttcaaag

SEQ ID NO: 103983 - DNA, 60 bp, Artificial
  Synthetic oligonucleotide
aaggatcttgcatagctctagcgctctaatcctgcctctatcgtatgtagccgctatcca

SEQ ID NO: 103984 - DNA, 60 bp, Artificial
  Synthetic oligonucleotide
cacactcagctgcaactaaagcacctcgcaagcatggatacggatttgttctccacactc

SEQ ID NO: 103985 - DNA, 60 bp, Artificial
  Synthetic oligonucleotide
agtagttcatcctcctcagcctcatgccgacacatgtatccgctgtcataagtcgtctcc

SEQ ID NO: 103986 - DNA, 58 bp, Artificial
  Synthetic oligonucleotide
gtatccgctgtcataagtcgtctccgccgatgctttaacctcataacgccaatgaatt

SEQ ID NO: 103987 - DNA, 60 bp, Artificial
  Synthetic oligonucleotide
ccatactccggccttagactccatctatacacacgtcggagtgtactgtaaacgtcaccc

SEQ ID NO: 103988 - DNA, 60 bp, Artificial
  Synthetic oligonucleotide
aacgtcacccaattcacactcagctgcaactaaagcacctcgcaagcatggatacggatt

SEQ ID NO: 103989 - DNA, 60 bp, Artificial
  Synthetic oligonucleotide
ggtccgtcagtatgttatgaagtttaaatctttcctgatcccacccaccctgaatcattc

SEQ ID NO: 103990 - DNA, 60 bp, Artificial
  Synthetic oligonucleotide
gatcccacccaccctgaatcattctgtccagcatgtctttatatttgtcctcattgattt

SEQ ID NO: 103991 - DNA, 60 bp, Artificial
  Synthetic oligonucleotide
tcattgattttacatagtagttcatcctcctcagcctcatgccgacacatgtatccgctg

SEQ ID NO: 103992 - DNA, 60 bp, Artificial
  Synthetic oligonucleotide
acgccttcttactgctgcaaaaggctgtggttgatggaggcattttgcaaaagatcttgt

SEQ ID NO: 103993 - DNA, 60 bp, Artificial
  Synthetic oligonucleotide
gcggagactcacgattcaacttcaccatttccaatccccgtgacgccttcttactgctgc

SEQ ID NO: 103994 - DNA, 60 bp, Artificial
  Synthetic oligonucleotide
gcagggctatgcttaaggctattgctagcctagctctgcgagctgacagggaggtacagg

SEQ ID NO: 103995 - DNA, 60 bp, Artificial
  Synthetic oligonucleotide
cctcgacgacccagctgagccgctctcagacattgagtcgattcctgatcctccacctag

SEQ ID NO: 103996 - DNA, 60 bp, Artificial
  Synthetic oligonucleotide
ctgacagggaggtacaggatgtttccttcagcttcgtattgaagatgagtctcaatccgg

SEQ ID NO: 103997 - DNA, 60 bp, Artificial
  Synthetic oligonucleotide
gtctcaatccggttaataagagcgacccgaagtcgtcagaattggcgcacgcggctcaga

SEQ ID NO: 103998 - DNA, 60 bp, Artificial
  Synthetic oligonucleotide
ataagagcgacccgaagtcgtcagaattggcgcacgcggctcagatgaattccctacccg

SEQ ID NO: 103999 - DNA, 60 bp, Artificial
  Synthetic oligonucleotide
gcggctcagatgaattccctacccgagttcctcgcatcgacgccctttaccatgcagctg

SEQ ID NO: 104000 - DNA, 60 bp, Artificial
  Synthetic oligonucleotide
tccctacccgagttcctcgcatcgacgccctttaccatgcagctgggtactctccgagat

SEQ ID NO: 104001 - DNA, 60 bp, Artificial
  Synthetic oligonucleotide
catgcagctgggtactctccgagatgccttgctgaaaaagactggaaatgtcacggtcat

SEQ ID NO: 104002 - DNA, 52 bp, Artificial
  Synthetic oligonucleotide
tcacggtcatcaacatggcccgaacaactgaagaggtgtcgaatgatgccct

SEQ ID NO: 104003 - DNA, 60 bp, Artificial
  Synthetic oligonucleotide
gggaattctatgaccctcgacgacccagctgagccgctctcagacattgagtcgattcct

SEQ ID NO: 104004 - DNA, 60 bp, Artificial
  Synthetic oligonucleotide
cactccacccaatttgactgatgtgaagccaacgaccattgtgctgactgagtgtgccgc

SEQ ID NO: 104005 - DNA, 60 bp, Artificial
  Synthetic oligonucleotide
tcgccgtatttgatacgcttaagatgccatggtcctgtcgcctaggagaaaagagctgtt

SEQ ID NO: 104006 - DNA, 60 bp, Artificial
  Synthetic oligonucleotide
ccggaatagatactttaggccacctcgctgatgttcacatgcatgtgttggatccagctg

SEQ ID NO: 104007 - DNA, 60 bp, Artificial
  Synthetic oligonucleotide
agttcaccatctgaagggaagacgaatgcttgggtcaactcggcgtacgtcagcaacttt

SEQ ID NO: 104008 - DNA, 60 bp, Artificial
  Synthetic oligonucleotide
gggaagacgaatgcttgggtcaactcggcgtacgtcagcaactttcctgcgttgggccaa

SEQ ID NO: 104009 - DNA, 60 bp, Artificial
  Synthetic oligonucleotide
tctggctactgttgcctcatacgcaaaagacctcgatggaaagaactccttcgccgtatt

SEQ ID NO: 104010 - DNA, 60 bp, Artificial
  Synthetic oligonucleotide
agactactttggagctctcaatggttgggggttctacttctgctcactgacgtctctcta

SEQ ID NO: 104011 - DNA, 60 bp, Artificial
  Synthetic oligonucleotide
cgcatgtgaacgttgcgagcgtgattgctaagaattgggacacgcagtcaggcatcgaca

SEQ ID NO: 104012 - DNA, 60 bp, Artificial
  Synthetic oligonucleotide
tcaactgatcacgccgccctcgtcaacatgatgtgcggcattattcaaaacacacccgcg

SEQ ID NO: 104013 - DNA, 60 bp, Artificial
  Synthetic oligonucleotide
gccctcgtcaacatgatgtgcggcattattcaaaacacacccgcgatgcgacacgtcggc

SEQ ID NO: 104014 - DNA, 60 bp, Artificial
  Synthetic oligonucleotide
tagttatcagagtaagcatggattccgtgctcgccccctctgacgcatcatcaactgatc

SEQ ID NO: 104015 - DNA, 60 bp, Artificial
  Synthetic oligonucleotide
gtcaggcatcgacaacatccttgaatttaagactatcactattcccgtccacaacgagga

SEQ ID NO: 104016 - DNA, 60 bp, Artificial
  Synthetic oligonucleotide
acaacgaggatatagtgtgcatggttgagcgcactttggctgaatcattcgaagtcgtaa

SEQ ID NO: 104017 - DNA, 60 bp, Artificial
  Synthetic oligonucleotide
acttaagttagcgatcagcgaagctaggtattacgctcttgatggtcatcaccgctgtcg

SEQ ID NO: 104018 - DNA, 60 bp, Artificial
  Synthetic oligonucleotide
caatcgtccaaatggaatggtggctacgaacctgattctctcagatttgcccgatgatga

SEQ ID NO: 104019 - DNA, 60 bp, Artificial
  Synthetic oligonucleotide
ctgtgccacttccatgtcgcaggacggatccaacgcgttctgtcccaagcatcccaaggt

SEQ ID NO: 104020 - DNA, 60 bp, Artificial
  Synthetic oligonucleotide
cgtcacccaattaaggaagatgccatcccttccatttgggtgcactacttatgctccagg

SEQ ID NO: 104021 - DNA, 60 bp, Artificial
  Synthetic oligonucleotide
gactgagtgtgccgctaacgctaagtcagcgaatgatctgaggcagtacatcgtcaccca

SEQ ID NO: 104022 - DNA, 60 bp, Artificial
  Synthetic oligonucleotide
cccaaggtgaagattgtgcacgaatcgaatgccacatcttacattctgttcaatcgtcca

SEQ ID NO: 104023 - DNA, 60 bp, Artificial
  Synthetic oligonucleotide
caggagattgcaagtatgagtgctgacatattagaggcagcgtcagaagaagttcccttt

SEQ ID NO: 104024 - DNA, 60 bp, Artificial
  Synthetic oligonucleotide
gcaggaagaagcgatacaggagattgcaagtatgagtgctgacatattagaagcagcgtc

SEQ ID NO: 104025 - DNA, 60 bp, Artificial
  Synthetic oligonucleotide
ggtatgcaggaagaagcgatacaggagattgcaagtatgagtgctgacatattagaagca

SEQ ID NO: 104026 - DNA, 60 bp, Artificial
  Synthetic oligonucleotide
ggtacggttcatacgcggaaaaggatcctttatattgcacgatattccgaccagagatca

SEQ ID NO: 104027 - DNA, 60 bp, Artificial
  Synthetic oligonucleotide
ctgtggtttgctttcaacagatcgtttgaacctacgcatagaaatgagatgctcgagatt

SEQ ID NO: 104028 - DNA, 60 bp, Artificial
  Synthetic oligonucleotide
aactctttcacgacgatgggaatatatttctgatggatttcgaaaaagatgcgaagttga

SEQ ID NO: 104029 - DNA, 60 bp, Artificial
  Synthetic oligonucleotide
cgcgggtgattgatggtggatgggaccaggagaatttcaaaatccataaactctttcacg

SEQ ID NO: 104030 - DNA, 60 bp, Artificial
  Synthetic oligonucleotide
gctcgatgatgcggaaaaagttgtagcggttgaaatgctgaattactatatgcgtaccga

SEQ ID NO: 104031 - DNA, 60 bp, Artificial
  Synthetic oligonucleotide
gttgaccgcgcagtcggaggtgcaataccctgactactatgataagtggatttatgcccc

SEQ ID NO: 104032 - DNA, 60 bp, Artificial
  Synthetic oligonucleotide
ctagacccggcaatcaagcgcacgatagatcctatgatggatgaccctgtcatgttgcaa

SEQ ID NO: 104033 - DNA, 60 bp, Artificial
  Synthetic oligonucleotide
tataaaactttgcgacggaaatttaattggagtgtacgccatgcggcagacaaagcgcta

SEQ ID NO: 104034 - DNA, 60 bp, Artificial
  Synthetic oligonucleotide
cggggcacgttgattgcagcggaatgtgtcttaggtgacccgtataaaactttgcgacgg

SEQ ID NO: 104035 - DNA, 60 bp, Artificial
  Synthetic oligonucleotide
gtcggttcccgtgctaatatattcagatggcctcatgatatggcctgcgcaggttggagc

SEQ ID NO: 104036 - DNA, 60 bp, Artificial
  Synthetic oligonucleotide
cgacggaaatttaattggagtgtacgccatgcggcagacaaagtgctagagaataacgcg

SEQ ID NO: 104037 - DNA, 60 bp, Artificial
  Synthetic oligonucleotide
atacagaaagaacaccaggcatgcgggttgtacattggacgcaggagctaactatggagt

SEQ ID NO: 104038 - DNA, 60 bp, Artificial
  Synthetic oligonucleotide
taacgcgtatatctttacaagaataaacctgtttgatacagaaagaacaccaggcatgcg

SEQ ID NO: 104039 - DNA, 60 bp, Artificial
  Synthetic oligonucleotide
gaattatatgagatttcatcccgggactagattgagatctaaagtgctcgatgatgcgga

SEQ ID NO: 104040 - DNA, 53 bp, Artificial
  Synthetic oligonucleotide
gtggatttatgccccaatctttgacactaagtacaaaatcacggagacggaga

SEQ ID NO: 104041 - DNA, 60 bp, Artificial
  Synthetic oligonucleotide
catgttgcaattgagtactatagggaatctgtatgataccaggccagcggtgatgggatc

SEQ ID NO: 104042 - DNA, 60 bp, Artificial
  Synthetic oligonucleotide
tcagccactaaaaattgatttgagtgcgcgaaatggatttgttaagtgcgacattttcaa

SEQ ID NO: 104043 - DNA, 60 bp, Artificial
  Synthetic oligonucleotide
cgccgatgcgatcgcgtatcgatatacgtcattggaagatgaatcaaagggttgcaacca

SEQ ID NO: 104044 - DNA, 60 bp, Artificial
  Synthetic oligonucleotide
gcttggactttcttaccgatgataaatggatggagtggatgctatctgacgctatggatg

SEQ ID NO: 104045 - DNA, 60 bp, Artificial
  Synthetic oligonucleotide
cacagatgaggaaaggttttatgccttgttgctgatatgtgcaacggatgcgtactcacg

SEQ ID NO: 104046 - DNA, 60 bp, Artificial
  Synthetic oligonucleotide
atgtgcaacggatgcgtactcacgtcgtatatggaggtccaatccatatccctgtctacg

SEQ ID NO: 104047 - DNA, 60 bp, Artificial
  Synthetic oligonucleotide
tctccgagaatacagagaaaaccaatatcatgcaaaacacgagtggtcgcacagatgagg

SEQ ID NO: 104048 - DNA, 60 bp, Artificial
  Synthetic oligonucleotide
gcgctagatatcgcattaagtgcgcgtcttacgagaaagagcgtgcgaaataatgatggc

SEQ ID NO: 104049 - DNA, 60 bp, Artificial
  Synthetic oligonucleotide
ggaagaacccaaggatgaaggtgctatgtcattgagatttcagaacaaaatagattcaat

SEQ ID NO: 104050 - DNA, 60 bp, Artificial
  Synthetic oligonucleotide
actatggagtcgcagacgacttgggacgaaggatatccattgaaagatgaagcgcccgat

SEQ ID NO: 104051 - DNA, 60 bp, Artificial
  Synthetic oligonucleotide
gtggtgagataccgaatgacatacgcgttgagatggaacggctaaaccaaatccgtgcca

SEQ ID NO: 104052 - DNA, 60 bp, Artificial
  Synthetic oligonucleotide
cgaatgacatacgcgttgagatggaacggctaaaccaaatccgtgccacttggatacgtg

SEQ ID NO: 104053 - DNA, 60 bp, Artificial
  Synthetic oligonucleotide
cgcagacgacttgggacgaaggatatccattgaaagatgaagcgcccgatgatgagatgc

SEQ ID NO: 104054 - DNA, 60 bp, Artificial
  Synthetic oligonucleotide
ctgaacttgtaatgagcttgatgatctaccatgtggaccaggattgggagtcacttaaac

SEQ ID NO: 104055 - DNA, 60 bp, Artificial
  Synthetic oligonucleotide
caaccctatcaatgagacaacgccagacatcgcttcataaaacgctattggatgatcctc

SEQ ID NO: 104056 - DNA, 60 bp, Artificial
  Synthetic oligonucleotide
aggagtcaagatacatcatacacatcattcgctcgtcaaacgatgcgaatagattgaaga

SEQ ID NO: 104057 - DNA, 60 bp, Artificial
  Synthetic oligonucleotide
gacttttcttcgctcgtgtcaaatatccaggatatctcacaattggttgtcctcttagtt

SEQ ID NO: 104058 - DNA, 60 bp, Artificial
  Synthetic oligonucleotide
gatatgtgtttggtaacgacgaaatgttgactaaacttctgaatgtatagtcccagtgac

SEQ ID NO: 104059 - DNA, 60 bp, Artificial
  Synthetic oligonucleotide
ggagtcacttaaacagtataaacatcctagtattctgtccgacttttcttcgctcgtgtc

SEQ ID NO: 104060 - DNA, 60 bp, Artificial
  Synthetic oligonucleotide
ctttaatcattgtcggcgatgatttagctgagcctcaacataggatcagcaaggccttgg

SEQ ID NO: 104061 - DNA, 60 bp, Artificial
  Synthetic oligonucleotide
cctcttagttgatttcttctttgaacgaaggagcgtgttaagatcggttgaggagtcaag

SEQ ID NO: 104062 - DNA, 60 bp, Artificial
  Synthetic oligonucleotide
tctaggaatggagatgtaacgacgcattcgcagggtattgttaaagttgagctgttaaaa

SEQ ID NO: 104063 - DNA, 60 bp, Artificial
  Synthetic oligonucleotide
tgcgtaccgatatattcaaaggaggtattcagaagaacgtacgagttacgaaactgtcgc

SEQ ID NO: 104064 - DNA, 60 bp, Artificial
  Synthetic oligonucleotide
aaactgtcgcaaatggaaatctatcattcatcattatgtggcggtctatcggatgcttta

SEQ ID NO: 104065 - DNA, 60 bp, Artificial
  Synthetic oligonucleotide
tgcgaaataatgatggcttggactttcttaccgatgataaatggatggagtggatgctat

SEQ ID NO: 104066 - DNA, 60 bp, Artificial
  Synthetic oligonucleotide
tatggcctgcgcaggttggagctaactttaatcgatttggcttttttggattcttgaatt

SEQ ID NO: 104067 - DNA, 60 bp, Artificial
  Synthetic oligonucleotide
caggcatgcgggttgtacattggacgcaggagctaactatggagtcgcagacgacttggg

SEQ ID NO: 104068 - DNA, 60 bp, Artificial
  Synthetic oligonucleotide
tggatgctatctgacgctatggatgttcagccactaaaaattgatttgagtgcgcgaaat

SEQ ID NO: 104069 - DNA, 60 bp, Artificial
  Synthetic oligonucleotide
cgacttactcagcgattacgattttatgattgatctgagtgataaagtagtgcacgccgg

SEQ ID NO: 104070 - DNA, 60 bp, Artificial
  Synthetic oligonucleotide
ggatggatgaattcggaatacccatttatctttcgagtagcgtaccacacgacttactca

SEQ ID NO: 104071 - DNA, 60 bp, Artificial
  Synthetic oligonucleotide
cgatccggggtattcgctttttaagggtgggatgttacagattacggtaagtggtgagat

SEQ ID NO: 104072 - DNA, 60 bp, Artificial
  Synthetic oligonucleotide
gtaatcaactaccacgagcgctagatatcgcattaagtgcgcgtcttacgagaaagagcg

SEQ ID NO: 104073 - DNA, 60 bp, Artificial
  Synthetic oligonucleotide
ttctacgagtgcattcacagagggaaaggatcgatgaaccattcgagccaggtaggccga

SEQ ID NO: 104074 - DNA, 60 bp, Artificial
  Synthetic oligonucleotide
ggtaggccgaagataggtagtttggggaggaatgcgagaatagatatgagcgatccgggg

SEQ ID NO: 104075 - DNA, 60 bp, Artificial
  Synthetic oligonucleotide
gtgcgcgtcttacgagaaagagcgtgcgaaataatgatggcttggactttcttaccgatg

SEQ ID NO: 104076 - DNA, 60 bp, Artificial
  Synthetic oligonucleotide
gagagtgtgtatggttaaccatctgataaataatgggttatataacgctgtgcaagagtg

SEQ ID NO: 104077 - DNA, 60 bp, Artificial
  Synthetic oligonucleotide
gcaagagtgtgcttacgctttaaaggatacgtacgttctacgagtgcattcacagaggga

SEQ ID NO: 104078 - DNA, 60 bp, Artificial
  Synthetic oligonucleotide
cggtatgttctaggttatttgacgacttgggaggaagggtgcactgtcacatcaactgag

SEQ ID NO: 104079 - DNA, 60 bp, Artificial
  Synthetic oligonucleotide
cggtatgttctaggttatttgacgacttgggaggaagggtgcactgtcacatcagctgag

SEQ ID NO: 104080 - DNA, 60 bp, Artificial
  Synthetic oligonucleotide
gcggcatgggcatgaacagtatacaactacaaaattgcggtattatgacctcttttttca

SEQ ID NO: 104081 - DNA, 60 bp, Artificial
  Synthetic oligonucleotide
gcggcatgggcatgaacagtatacaactacaaaattgcggtattatgacctcttttttta

SEQ ID NO: 104082 - DNA, 56 bp, Artificial
  Synthetic oligonucleotide
gcggcatgggcatgaacagtatacaactacaaaattgcggtattatgacctctttt

SEQ ID NO: 104083 - DNA, 60 bp, Artificial
  Synthetic oligonucleotide
caattgttctgttagcggtatgttctaggttatttgacgacttgggaggaagggtgcact

SEQ ID NO: 104084 - DNA, 60 bp, Artificial
  Synthetic oligonucleotide
tctacgcatgcagaatactaaagcatttcacgattttcaggaagaattgcgcggcatggg

SEQ ID NO: 104085 - DNA, 60 bp, Artificial
  Synthetic oligonucleotide
cgcatgcagaatactaaagcatttcacgattttcaggaagaattgcgcggcatgggcatg

SEQ ID NO: 104086 - DNA, 60 bp, Artificial
  Synthetic oligonucleotide
ctgcttcctccccttgatggagcagtcccaggtgcattagagatggatcgtactgaagcg

SEQ ID NO: 104087 - DNA, 54 bp, Artificial
  Synthetic oligonucleotide
aacttcattaggcgacagttaaccaaaccagcatatggtcgtatggataggaac

SEQ ID NO: 104088 - DNA, 60 bp, Artificial
  Synthetic oligonucleotide
gctggctaaaagcattccaggtgatcataggtacgtaaaggttccgaccaaggttaccgt

SEQ ID NO: 104089 - DNA, 60 bp, Artificial
  Synthetic oligonucleotide
tcttgtcaatcctgaccctcaacgttcagattaccaagtttacatggaggagatccccgc

SEQ ID NO: 104090 - DNA, 60 bp, Artificial
  Synthetic oligonucleotide
cgttacctaccgccgtgaagatggtggtgaggatttcaacttcacgccgtacttacattc

SEQ ID NO: 104091 - DNA, 60 bp, Artificial
  Synthetic oligonucleotide
ggcggtgaattcggtacgaggtatcgtcttcactggtatctatttgagggtatcagaatt

SEQ ID NO: 104092 - DNA, 60 bp, Artificial
  Synthetic oligonucleotide
tatcagaattcataatcgtacgcttcaaactcctggaattgaagatcttaaggtcgcgcg

SEQ ID NO: 104093 - DNA, 60 bp, Artificial
  Synthetic oligonucleotide
cctgaggatattgctacggccgtgtacatcaaaatctatgagtctgttaacccgattgat

SEQ ID NO: 104094 - DNA, 60 bp, Artificial
  Synthetic oligonucleotide
cacgtgttgtcacatacaataaggctattgactatgtcatgtaccgccttacgcttaacg

SEQ ID NO: 104095 - DNA, 60 bp, Artificial
  Synthetic oligonucleotide
ctatggttatgcgcacaatgattcgtggctgggagtccttagatctgcttcctccccttg

SEQ ID NO: 104096 - DNA, 60 bp, Artificial
  Synthetic oligonucleotide
gatatctgatagtatcgatgtcggcagaggcgttaggtctcgatcgtatcaggcagctac

SEQ ID NO: 104097 - DNA, 60 bp, Artificial
  Synthetic oligonucleotide
ataagaaggaagagaaagtatctgaaccaaaagttgaggaaaagaaagatcctgagcctg

SEQ ID NO: 104098 - DNA, 60 bp, Artificial
  Synthetic oligonucleotide
caggcagctacaaccgtcatgtctgtgatcgcatcatcacatcgcaacttagaacggccc

SEQ ID NO: 104099 - DNA, 60 bp, Artificial
  Synthetic oligonucleotide
gcagggaggaagaggtgctcaaatcgggtatcgaccttctgatcgacccctacggcgtgt

SEQ ID NO: 104100 - DNA, 60 bp, Artificial
  Synthetic oligonucleotide
catcgcaacttagaacggcccatgaccagcgcgcgtgcacctgctaaagttatcactgcg

SEQ ID NO: 104101 - DNA, 60 bp, Artificial
  Synthetic oligonucleotide
ccgcgtcccggaaaagaccaaactcttgaagcgtacatttctgaagaacttagcaagcat

SEQ ID NO: 104102 - DNA, 60 bp, Artificial
  Synthetic oligonucleotide
aaaatcaagcgtatgcgccacaggctaacgagttaaaggtatcacttatggacttcgtaa

SEQ ID NO: 104103 - DNA, 60 bp, Artificial
  Synthetic oligonucleotide
tcgttctaactcctatcccagataggcgtggactacatggtcgtctcgcgaacttcatta

SEQ ID NO: 104104 - DNA, 60 bp, Artificial
  Synthetic oligonucleotide
caatttgatgtcgaaaattgatttcaccatcgcttacgataagctgatgactgttgacag

SEQ ID NO: 104105 - DNA, 60 bp, Artificial
  Synthetic oligonucleotide
atctttcgtcgcaattcagtgctattctaacgaatgagagttcgtacctgtacaactcta

SEQ ID NO: 104106 - DNA, 60 bp, Artificial
  Synthetic oligonucleotide
ttcttttcaagatgagtaatacgatgccagagggttatataccgcgtcccggaaaagacc

SEQ ID NO: 104107 - DNA, 60 bp, Artificial
  Synthetic oligonucleotide
cctgagcctgaaaaggacgctcccgcacttgttgtcgaggaggtagtaatggatgatgac

SEQ ID NO: 104108 - DNA, 60 bp, Artificial
  Synthetic oligonucleotide
cgaggaggtagtaatggatgatgacgacgctgatgaggttgaaaaacccaccatggaagc

SEQ ID NO: 104109 - DNA, 60 bp, Artificial
  Synthetic oligonucleotide
cccaattctgaaggttatactgatatggtgggttttgattgggagaagaaccaatacctc

SEQ ID NO: 104110 - DNA, 60 bp, Artificial
  Synthetic oligonucleotide
tctcgatcgtatcaggcagctacaaccgtcatgtctgtgatcgcatcatcacatcgcaac

SEQ ID NO: 104111 - DNA, 60 bp, Artificial
  Synthetic oligonucleotide
ttatcactgcgtttaccgatctagtggctcctcccgccgctgaagcgatgcaaaagcttg

SEQ ID NO: 104112 - DNA, 60 bp, Artificial
  Synthetic oligonucleotide
atacttccgaaaggtcgtctagcttatatcatggcacagatgcgggcagctcgctgtctt

SEQ ID NO: 104113 - DNA, 60 bp, Artificial
  Synthetic oligonucleotide
catgaagttgaaagctgaattcgagaataaggacaaacctgaggttgttgaagcttcgtc

SEQ ID NO: 104114 - DNA, 60 bp, Artificial
  Synthetic oligonucleotide
aatctcctttttatgccacgaggttggataagcctcgtcacatgcgtatggatgagttct

SEQ ID NO: 104115 - DNA, 60 bp, Artificial
  Synthetic oligonucleotide
tgacatgacggatccaattcttcaaagcacagatagtgtattggctcccattgccgcagc

SEQ ID NO: 104116 - DNA, 60 bp, Artificial
  Synthetic oligonucleotide
gaagatgatggtctcgaatacgtgccttgggagcagaggaaggaaattccgatgccctcg

SEQ ID NO: 104117 - DNA, 60 bp, Artificial
  Synthetic oligonucleotide
tggatcgtactgaagcgtttgttcttccgtttaccggcgctgtttcctttatttgctacg

SEQ ID NO: 104118 - DNA, 57 bp, Artificial
  Synthetic oligonucleotide
cgatttacgcgttcagacatgctaatcaatcaggatgaattcataaacatggcagag

SEQ ID NO: 104119 - DNA, 60 bp, Artificial
  Synthetic oligonucleotide
aaatccgcgttgcaaatgaattgttgcttgaagcagcagatcctgcgggacgatttacgc

SEQ ID NO: 104120 - DNA, 60 bp, Artificial
  Synthetic oligonucleotide
gaaggaaattccgatgccctcgagtttcccgatgttacttgacatggaaatccgcgttgc

SEQ ID NO: 104121 - DNA, 60 bp, Artificial
  Synthetic oligonucleotide
cgcgtgctgaggttgaccgtattaactttaacaacatacctcgcatcgttctaactccta

SEQ ID NO: 104122 - DNA, 60 bp, Artificial
  Synthetic oligonucleotide
gcgtttcgaagcaagtgacatcccgctttattataggtgggacaagttcaacggcagatc

SEQ ID NO: 104123 - DNA, 60 bp, Artificial
  Synthetic oligonucleotide
gcagatctcagttaacgctcgatgttcgtgtattcccagatacaaatgttctccttgacc

SEQ ID NO: 104124 - DNA, 60 bp, Artificial
  Synthetic oligonucleotide
atgttatcgcagaagatttcactgttgcgcttaaattcaagaaaggcgtgaacgagatgc

SEQ ID NO: 104125 - DNA, 60 bp, Artificial
  Synthetic oligonucleotide
ggttccgaccaaggttaccgttaaacccgtcgaacttttagataacgtagatgttatcgc

SEQ ID NO: 104126 - DNA, 60 bp, Artificial
  Synthetic oligonucleotide
cccaacatatacgcgtgctctacgaatccgaacgcctgaaccacgtgttgtcacatacaa

SEQ ID NO: 104127 - DNA, 60 bp, Artificial
  Synthetic oligonucleotide
tcgctgtcttcagtttacacgtgtggcaaacgggcaggaagcaacccctgaggataaact

SEQ ID NO: 104128 - DNA, 60 bp, Artificial
  Synthetic oligonucleotide
gcttggtagctattgcctcggtggtaggcgtgctgagcttactgttgacatgacggatcc

SEQ ID NO: 104129 - DNA, 60 bp, Artificial
  Synthetic oligonucleotide
gaagcgccaaaatcaactgttgccaagttgactgagactcaatttcgtattgattcttcc

SEQ ID NO: 104130 - DNA, 60 bp, Artificial
  Synthetic oligonucleotide
tgatcaagcaggtaaacgctattgtacatgatgccatacttccgaaaggtcgtctagctt

SEQ ID NO: 104131 - DNA, 60 bp, Artificial
  Synthetic oligonucleotide
ttacttctttgtcaatgatcaagcaggtaaacgctattgtacatgatgccatacttccga

SEQ ID NO: 104132 - DNA, 60 bp, Artificial
  Synthetic oligonucleotide
gccgcagcagctaacttgattctacttgataccaatcgtctgggtaatgatattaagcgc

SEQ ID NO: 104133 - DNA, 60 bp, Artificial
  Synthetic oligonucleotide
ccttgaccatgtcatggagagcgatcctcgtatgggatacgcgcctcaggtccttaacga

SEQ ID NO: 104134 - DNA, 60 bp, Artificial
  Synthetic oligonucleotide
gcgcacacttgtgtaccgcatgttgtcaccattctacggtactggaacgcgtgctgaggt

SEQ ID NO: 104135 - DNA, 60 bp, Artificial
  Synthetic oligonucleotide
ctgcaatgaatttatcgaaccagctatcccgtctgcactcggtcatcccaattctgaagg

SEQ ID NO: 104136 - DNA, 60 bp, Artificial
  Synthetic oligonucleotide
gagaagatggtagctagaccggatgaggtgcggggaacatcatttccgatacacactcgg

SEQ ID NO: 104137 - DNA, 60 bp, Artificial
  Synthetic oligonucleotide
ggggagccagtgagagagccggttgtcgagaatcatgtggtgcatgagatggtaaacagg

SEQ ID NO: 104138 - DNA, 60 bp, Artificial
  Synthetic oligonucleotide
acgggttggtcaccatgtcggattggctatcatggagagaggggagccagtgagagagcc

SEQ ID NO: 104139 - DNA, 60 bp, Artificial
  Synthetic oligonucleotide
gacccgacgaataatctcgctgcaggggcgactttctcttgtcaaggattagtgacgggg

SEQ ID NO: 104140 - DNA, 60 bp, Artificial
  Synthetic oligonucleotide
cgattttttgatgtcgttgcgaatctcgaatcgtttacttctggaatgtgctttttaaac

SEQ ID NO: 104141 - DNA, 60 bp, Artificial
  Synthetic oligonucleotide
ggggtatcatgtatctttagttgatgggtgtgacaagcatgcgatgaaggacccgacgaa

SEQ ID NO: 104142 - DNA, 60 bp, Artificial
  Synthetic oligonucleotide
actcgtgcaattaggtgttgagtttggggagtgcattattgtgccgagggggctggatcg

SEQ ID NO: 104143 - DNA, 60 bp, Artificial
  Synthetic oligonucleotide
gtcgggttgatgcaactgtcgctgtttcagaatctcctttagatgtagtgagtgcgtggt

SEQ ID NO: 104144 - DNA, 60 bp, Artificial
  Synthetic oligonucleotide
tcttgcatagactttttgttatgtggttgaagggcgatgtcatgcattcgcgattttttg

SEQ ID NO: 104145 - DNA, 60 bp, Artificial
  Synthetic oligonucleotide
cagcgattgacgacaaggggcagacatattttacgacatcgggagtgtttgtggggagac

SEQ ID NO: 104146 - DNA, 60 bp, Artificial
  Synthetic oligonucleotide
gtagcttgtggatgttcgaattatgggagcagtggttgtacgcatgttgaactcgtgcaa

SEQ ID NO: 104147 - DNA, 60 bp, Artificial
  Synthetic oligonucleotide
ggggagactttctttcaatatttccgcactgctgaggggtggattaacaggtgtgacctc

SEQ ID NO: 104148 - DNA, 60 bp, Artificial
  Synthetic oligonucleotide
agctttaaggacggcagcttcgagtgagggagatgtcccagtggcggaggctttaaaaat

SEQ ID NO: 104149 - DNA, 60 bp, Artificial
  Synthetic oligonucleotide
gatgtagatcgtccgattcaaatcttgtggcaggcagctttaaggacggcagcttcgagt

SEQ ID NO: 104150 - DNA, 60 bp, Artificial
  Synthetic oligonucleotide
tcctggatggtgtcgattgtagggacggagtactcaatggaggctacagcggagaggcca

SEQ ID NO: 104151 - DNA, 60 bp, Artificial
  Synthetic oligonucleotide
caactagagctgaattctcaactgtgaatgacatgcgtgcatttctcggactgcgagatg

SEQ ID NO: 104152 - DNA, 60 bp, Artificial
  Synthetic oligonucleotide
ggagaggccaatgtttccaatgacgcaccttacgtccgctgattatgagctcttgcatag

SEQ ID NO: 104153 - DNA, 53 bp, Artificial
  Synthetic oligonucleotide
agtcgaggcatatcgcagtagggacggatgcgtttcagtgtgttcgcctagga

SEQ ID NO: 104154 - DNA, 60 bp, Artificial
  Synthetic oligonucleotide
tggaacgctttgatcagactaattcggtagacgcagccgttaaattacccgatggaatca

SEQ ID NO: 104155 - DNA, 60 bp, Artificial
  Synthetic oligonucleotide
cccgtcagaatggggaaccgagtgtcaacatacagccctcaattcatcacaatcaatgga

SEQ ID NO: 104156 - DNA, 59 bp, Artificial
  Synthetic oligonucleotide
ggatgaggagacgaagtcgcgtcaagattattggtgtgatatgttaaatcagcttatgg

SEQ ID NO: 104157 - DNA, 60 bp, Artificial
  Synthetic oligonucleotide
ccggtgcagccagagtaggaggggatcatatgctcgtgcgacctgagcagtgggttaatg

SEQ ID NO: 104158 - DNA, 60 bp, Artificial
  Synthetic oligonucleotide
cgaaaagcagcgaattggctcggtggaacgtatagccgaccgtggagagttgaaacaagg

SEQ ID NO: 104159 - DNA, 60 bp, Artificial
  Synthetic oligonucleotide
ggctatgaaaagatccgaaaagcagcgaattggctcggtggaacgtatagccgaccgtgg

SEQ ID NO: 104160 - DNA, 60 bp, Artificial
  Synthetic oligonucleotide
gtgggcggctgatcgtgagattatggggtaggtatgtgacattcattcccagggtgcatt

SEQ ID NO: 104161 - DNA, 60 bp, Artificial
  Synthetic oligonucleotide
cttcctcttagtgcatttcagttggtggatggatccttgtctcgtgctgcagccaaagga

SEQ ID NO: 104162 - DNA, 60 bp, Artificial
  Synthetic oligonucleotide
gtgggttaatgtaaggggtgatttctttctggggcatgatgatggatttgagtcgaggca

SEQ ID NO: 104163 - DNA, 60 bp, Artificial
  Synthetic oligonucleotide
aaaagctcatcataacagagaaacatctccgactacgttgcatgtcatttcagggggttt

SEQ ID NO: 104164 - DNA, 60 bp, Artificial
  Synthetic oligonucleotide
gggaccagatcatgatatgaatattaacgttgtagtgacagcggcagtgaagaagtccac

SEQ ID NO: 104165 - DNA, 60 bp, Artificial
  Synthetic oligonucleotide
ggcagtgaagaagtccacatcggagacggcatgtaaggtgtacgttggtgctattgctaa

SEQ ID NO: 104166 - DNA, 60 bp, Artificial
  Synthetic oligonucleotide
caaggattagtgacggggaaacttaaaacatgtttttcagtgacgttagcaaaagctcat

SEQ ID NO: 104167 - DNA, 60 bp, Artificial
  Synthetic oligonucleotide
ccgaatacgactcatcacacaaccaacaatggggttggatttgttccagcgattgacgac

SEQ ID NO: 104168 - DNA, 60 bp, Artificial
  Synthetic oligonucleotide
cagggggtttcttctcctatgacccggcagctgttcacataggagggcaagatggtgggg

SEQ ID NO: 104169 - DNA, 60 bp, Artificial
  Synthetic oligonucleotide
tttcagttggtggatggatccttgtctcgtgctgcagccaaaggacttaagtgggcggct

SEQ ID NO: 104170 - DNA, 60 bp, Artificial
  Synthetic oligonucleotide
gtggatgcgttacgcaggtggcaatcctttaattattatgactcaagatgatcgaaaggc

SEQ ID NO: 104171 - DNA, 60 bp, Artificial
  Synthetic oligonucleotide
cgaccgtggagagttgaaacaagggaaatgtctgagattcagaagcggattgatactgcg

SEQ ID NO: 104172 - DNA, 60 bp, Artificial
  Synthetic oligonucleotide
ttgatactgcgttacctgccatgacatcaatcattggagggacctttggacccggtgcag

SEQ ID NO: 104173 - DNA, 60 bp, Artificial
  Synthetic oligonucleotide
ctgccatgacatcaatcattggagggacctttggacccggtgcagccagagtaggagggg

SEQ ID NO: 104174 - DNA, 60 bp, Artificial
  Synthetic oligonucleotide
ttggtttgaaaatgggtgaaaacaatccttttagaactgatgaagactgtgatggctggg

SEQ ID NO: 104175 - DNA, 60 bp, Artificial
  Synthetic oligonucleotide
actgatgaagactgtgatggctgggtgtgtgcagcaattttggcgatgcctatgtggatg

SEQ ID NO: 104176 - DNA, 60 bp, Artificial
  Synthetic oligonucleotide
gagcgctaacactttagccctcgtgaagactcggtatcgtgcatggctgaagaaggttgg

SEQ ID NO: 104177 - DNA, 60 bp, Artificial
  Synthetic oligonucleotide
gggtgatttctttctggggcatgatgatggatttgagtcgaggcatatcgcagtagggac

SEQ ID NO: 104178 - DNA, 60 bp, Artificial
  Synthetic oligonucleotide
taggcttgttgaagcgaggtgcagcccagatgaaagggatggtggcgggacatcttcggc

SEQ ID NO: 104179 - DNA, 60 bp, Artificial
  Synthetic oligonucleotide
ggatggtggcgggacatcttcggccagttctgaatgaggcggcgggagcggctgaacgcg

SEQ ID NO: 104180 - DNA, 60 bp, Artificial
  Synthetic oligonucleotide
gacggtgtggtgctggaacgattggaattctccggccgctatttgtggatgtcttggagg

SEQ ID NO: 104181 - DNA, 60 bp, Artificial
  Synthetic oligonucleotide
tggctggggtgttattggacacgaagagggaggcccaggcggaagctaatgtgtacggga

SEQ ID NO: 104182 - DNA, 60 bp, Artificial
  Synthetic oligonucleotide
ttggacacgaagagggaggcccaggcggaagctaatgtgtacgggagcatggttggtggt

SEQ ID NO: 104183 - DNA, 60 bp, Artificial
  Synthetic oligonucleotide
acatcttcggccagttctgaatgaggcggcgggagcggctgaacgcgtgatgaccggttg

SEQ ID NO: 104184 - DNA, 53 bp, Artificial
  Synthetic oligonucleotide
gctgaacgcgtgatgaccggttgggcaaaacagaaggctggtacgttaaagca

SEQ ID NO: 104185 - DNA, 60 bp, Artificial
  Synthetic oligonucleotide
gtgtacgggagcatggttggtggtcggcatgttttggctcttccccctacggatcatttg

SEQ ID NO: 104186 - DNA, 60 bp, Artificial
  Synthetic oligonucleotide
ggattgactctaagatcagttacgatgcgaccaacttcgcaggaacaacggaatgaaatg

SEQ ID NO: 104187 - DNA, 60 bp, Artificial
  Synthetic oligonucleotide
gatataacggattgactctaagatcagttacgatgcgaccaacttcgcaggaacaacgga

SEQ ID NO: 104188 - DNA, 60 bp, Artificial
  Synthetic oligonucleotide
atttgaacaccttcatatcgtacgtaagaatggattgctgcatgaaagtgatgaaccacg

SEQ ID NO: 104189 - DNA, 60 bp, Artificial
  Synthetic oligonucleotide
gataggttgggtgaggagatagcttatgaaatgggcggtgcgttctccagtgcattgata

SEQ ID NO: 104190 - DNA, 60 bp, Artificial
  Synthetic oligonucleotide
cacaaacatgggagaggatcaaagtgcaagcagtataagaaaatcaattcatagatattg

SEQ ID NO: 104191 - DNA, 60 bp, Artificial
  Synthetic oligonucleotide
caaacatgggagaggatcaaagtgcaagcagtataagaaaatcaattcatagatattgct

SEQ ID NO: 104192 - DNA, 60 bp, Artificial
  Synthetic oligonucleotide
atagatattgcttatacggtcagtcatagacgtacgattaagacgcgaggatgacgtaaa

SEQ ID NO: 104193 - DNA, 60 bp, Artificial
  Synthetic oligonucleotide
gcttatacggtcagtcatagacgtacgattaagacgcgaggatgacgtaaaatcacaaaa

SEQ ID NO: 104194 - DNA, 60 bp, Artificial
  Synthetic oligonucleotide
tctcggaacgtgagctattgtgggcttgtcgggctccacattggccgttcaggaaggtgt

SEQ ID NO: 104195 - DNA, 60 bp, Artificial
  Synthetic oligonucleotide
tattgtgggcttgtcgggctccacattggccgttcaggaaggtgtgagcttatggccgcc

SEQ ID NO: 104196 - DNA, 60 bp, Artificial
  Synthetic oligonucleotide
aggaaggtgtgagcttatggccgccttctgagagctgatttgttctccactggatggtgg

SEQ ID NO: 104197 - DNA, 60 bp, Artificial
  Synthetic oligonucleotide
gagcttatggccgccttctgagagctgatttgttctccactggatggtggggtagcaggg

SEQ ID NO: 104198 - DNA, 60 bp, Artificial
  Synthetic oligonucleotide
aggtttgctgagtgttcggttgtatatgttgatggacgtgcttacaagccaattagagtt

SEQ ID NO: 104199 - DNA, 60 bp, Artificial
  Synthetic oligonucleotide
gtaatggaatagcgatgtatcatatcggatcagcgacgaggtttgctgagtgttcggttg

SEQ ID NO: 104200 - DNA, 60 bp, Artificial
  Synthetic oligonucleotide
aattagagttatggctgaatatgctatctttccaaccttgccgcatgagtataaaggtag

SEQ ID NO: 104201 - DNA, 60 bp, Artificial
  Synthetic oligonucleotide
ctgagtgttcggttgtatatgttgatggacgtgcttacaagccaattagagttatggctg

SEQ ID NO: 104202 - DNA, 60 bp, Artificial
  Synthetic oligonucleotide
ataaaggtagagtcgaaggattgttgttgttgcatgggggattagcgccaataacattag

SEQ ID NO: 104203 - DNA, 60 bp, Artificial
  Synthetic oligonucleotide
gctgaatatgctatctttccaaccttgccgcatgagtataaaggtagagtcgaaggattg

SEQ ID NO: 104204 - DNA, 60 bp, Artificial
  Synthetic oligonucleotide
ggtctagtgaccggttcgatcgcagcatccgtttcaactctattgcgtaattgcatgtta

SEQ ID NO: 104205 - DNA, 60 bp, Artificial
  Synthetic oligonucleotide
gagttaatggatgctcagtttgataggattgggaagataatggataagatgcgtgagccg

SEQ ID NO: 104206 - DNA, 60 bp, Artificial
  Synthetic oligonucleotide
tcgttgaaaaggttgagttaatggatgctcagtttgataggattgggaagataatggata

SEQ ID NO: 104207 - DNA, 60 bp, Artificial
  Synthetic oligonucleotide
aggctaagcttcatcgtcttgaaagtgactggactacttcagacatcgttgaaaaggttg

SEQ ID NO: 104208 - DNA, 60 bp, Artificial
  Synthetic oligonucleotide
tctgaaggctaagcttcatcgtcttgaaagtgactggactacttcagacatcgttgaaaa

SEQ ID NO: 104209 - DNA, 56 bp, Artificial
  Synthetic oligonucleotide
tggaaggcgtttcattcgatgaactagttgcattgagagaggagaatgccaaactg

SEQ ID NO: 104210 - DNA, 60 bp, Artificial
  Synthetic oligonucleotide
gcactttgaaagtcgaggaaacaactgaaaatcaagaattggaaggcgtttcattcgatg

SEQ ID NO: 104211 - DNA, 60 bp, Artificial
  Synthetic oligonucleotide
gaatatgaagtgcactttgaaagtcgaggaaacaactgaaaatcaagaattggaaggcgt

SEQ ID NO: 104212 - DNA, 60 bp, Artificial
  Synthetic oligonucleotide
aattatagaaagttctgaacctaggggtctttctgtctctgctgtgtggtgggaatcaca

SEQ ID NO: 104213 - DNA, 60 bp, Artificial
  Synthetic oligonucleotide
gtatttaaaattatagaaagttctgaacctaggggtctttctgtctctgctgtgtggtgg

SEQ ID NO: 104214 - DNA, 60 bp, Artificial
  Synthetic oligonucleotide
attcaggatccaggtttacgctcgatagtgtatgcgatgtgtaaagctgctgttctgaat

SEQ ID NO: 104215 - DNA, 60 bp, Artificial
  Synthetic oligonucleotide
ttatctaaacatcgaggtgcaggagatagttgacgtgacaaggcaaaagtacactcataa

SEQ ID NO: 104216 - DNA, 60 bp, Artificial
  Synthetic oligonucleotide
tttatctccacaatctgctgctttggttcacacactgtcacatcttgatgtgaatgttga

SEQ ID NO: 104217 - DNA, 60 bp, Artificial
  Synthetic oligonucleotide
ggtttacgctcgatagtgtatgcgatgtgtaaagctgctgttctgaatcaaaattatcta

SEQ ID NO: 104218 - DNA, 60 bp, Artificial
  Synthetic oligonucleotide
tgttctgaatcaaaattatctaaacatcgaggtgcaggagatagttgacgtgacaaggca

SEQ ID NO: 104219 - DNA, 59 bp, Artificial
  Synthetic oligonucleotide
ggacattcaatgcatagttggaagatgcttcagtgatgagaataaacaacgtaaccttg

SEQ ID NO: 104220 - DNA, 60 bp, Artificial
  Synthetic oligonucleotide
ataatggataagatgcgtgagccgatgctgtttaagcgtgacgaaatcgaattgcatggt

SEQ ID NO: 104221 - DNA, 60 bp, Artificial
  Synthetic oligonucleotide
gcgtgagccgatgctgtttaagcgtgacgaaatcgaattgcatggtgatttgctagctag

SEQ ID NO: 104222 - DNA, 60 bp, Artificial
  Synthetic oligonucleotide
attgcatggtgatttgctagctagagttgaagggttactacgcattaagaacgagcgcag

SEQ ID NO: 104223 - DNA, 60 bp, Artificial
  Synthetic oligonucleotide
tggtctagtgaccggttcgatcgcagcatccgtttcaactctattgcgtaattgcatgtt

SEQ ID NO: 104224 - DNA, 59 bp, Artificial
  Synthetic oligonucleotide
tttatctccacaatctgctgctttggttcacacactgtcacatcttgatgtgaatgttg

SEQ ID NO: 104225 - DNA, 60 bp, Artificial
  Synthetic oligonucleotide
tgaatgttgatggtaatggaatagcgatgtatcatatcggatcagcgacgaggtttgctg

SEQ ID NO: 104226 - DNA, 60 bp, Artificial
  Synthetic oligonucleotide
catgttatacagttttgatatctatttcactccgaatggtgtttgtatcaatgctgttgg

SEQ ID NO: 104227 - DNA, 60 bp, Artificial
  Synthetic oligonucleotide
attgcatgttatacagttttgatatctatttcactccgaatggtgtttgtatcaatgctg

SEQ ID NO: 104228 - DNA, 60 bp, Artificial
  Synthetic oligonucleotide
ctccgggtgtcattcctccagtgaacgtagatagaccaattccattaggacgtcgagatg

SEQ ID NO: 104229 - DNA, 60 bp, Artificial
  Synthetic oligonucleotide
gccgtagtagaaaaaatgttgtcatatgcaaaacatactagggaatatgcagagttctac

SEQ ID NO: 104230 - DNA, 51 bp, Artificial
  Synthetic oligonucleotide
gattgatgcggctttagatcaactaaagactgaatatactgacgatgtaga

SEQ ID NO: 104231 - DNA, 60 bp, Artificial
  Synthetic oligonucleotide
agtatacaatgttaattagggatgagatagttaagatgttagaaataccggttaaacatg

SEQ ID NO: 104232 - DNA, 60 bp, Artificial
  Synthetic oligonucleotide
gtgacttgggctaactcagctatagaaatgcttatgtcagtattttctcatgaggattat

SEQ ID NO: 104233 - DNA, 60 bp, Artificial
  Synthetic oligonucleotide
taaagcaattgtacctgatcaaactttcaatgaattgcaagaaatgatcgataatatgaa

SEQ ID NO: 104234 - DNA, 60 bp, Artificial
  Synthetic oligonucleotide
atactccgggtgtcattcctccagtgaacgtagatagaccaattccattaggacgtcgag

SEQ ID NO: 104235 - DNA, 60 bp, Artificial
  Synthetic oligonucleotide
gcttcaaatggtgaatctagacagctcaaatttggccgtaagactatattctcgactaag

SEQ ID NO: 104236 - DNA, 60 bp, Artificial
  Synthetic oligonucleotide
ctcgactaagaaaaatatgcatgttatggatgatattgcacacggaaggtatactccggg

SEQ ID NO: 104237 - DNA, 60 bp, Artificial
  Synthetic oligonucleotide
agaatatggaacaactgacgatgaggtatacatacagagagcattcatgtcattatctag

SEQ ID NO: 104238 - DNA, 60 bp, Artificial
  Synthetic oligonucleotide
agagagcattcatgtcattatctagccaaaaatcaggtatagctgatgaaattgcttctt

SEQ ID NO: 104239 - DNA, 60 bp, Artificial
  Synthetic oligonucleotide
attgcttcttcccaaacgtttaaaaactatgtaagtaaattatccgatcaactgttagta

SEQ ID NO: 104240 - DNA, 60 bp, Artificial
  Synthetic oligonucleotide
actgttagtatcgaaaaatacgatcgtgtctaaaggtatagcagtaacagaaaaagcaaa

SEQ ID NO: 104241 - DNA, 60 bp, Artificial
  Synthetic oligonucleotide
aaaaagcaaaattgaattcgtacgcaccagtttacttagagaaacgtcgtgcacaaatat

SEQ ID NO: 104242 - DNA, 60 bp, Artificial
  Synthetic oligonucleotide
gaattcgtacgcaccagtttacttagagaaacgtcgtgcacaaatatcggcgctattaac

SEQ ID NO: 104243 - DNA, 53 bp, Artificial
  Synthetic oligonucleotide
gcacaaatatcggcgctattaactatgttgcagaaaccagtgtcgttcaaatc

SEQ ID NO: 104244 - DNA, 60 bp, Artificial
  Synthetic oligonucleotide
atgatattctacgtgacataaaaccattttttgtaactacggaagctaatttaccaattc

SEQ ID NO: 104245 - DNA, 60 bp, Artificial
  Synthetic oligonucleotide
ttaccaattcaatataggaaatttatgcctacattgccagataatgttcagtatgtaata

SEQ ID NO: 104246 - DNA, 60 bp, Artificial
  Synthetic oligonucleotide
gtatgtaatacaatgtataggatcaagaacataccaaatagaggatagtggatcaaaatc

SEQ ID NO: 104247 - DNA, 60 bp, Artificial
  Synthetic oligonucleotide
gtttacaaaccatcgatcgaggagttatataaagtcatatctttaagagaacgagaaata

SEQ ID NO: 104248 - DNA, 60 bp, Artificial
  Synthetic oligonucleotide
caatgtataggatcaagaacataccaaatagaggatagtggatcaaaatcgtcaatttcg

SEQ ID NO: 104249 - DNA, 60 bp, Artificial
  Synthetic oligonucleotide
acgagaaatacaattgtatctagtctcactaggagttccactaattgacgcaagcacgta

SEQ ID NO: 104250 - DNA, 66 bp, Artificial
  Synthetic oligonucleotide
ccatcgatcgaggagttatataaagtcatatctttaagagaacgagaaatacaattgtatctagtc

SEQ ID NO: 104251 - DNA, 60 bp, Artificial
  Synthetic oligonucleotide
cctactatccattaactatggatgctatcaattgtttgattttaactctccagatttaga

SEQ ID NO: 104252 - DNA, 60 bp, Artificial
  Synthetic oligonucleotide
gtatctagtctcactaggagttccactaattgacgcaagcacgtacgttggatcaagaat

SEQ ID NO: 104253 - DNA, 60 bp, Artificial
  Synthetic oligonucleotide
cagatttagaaaagctcatacggattccatttaaaggtaaaataccagctgtaacattca

SEQ ID NO: 104254 - DNA, 65 bp, Artificial
  Synthetic oligonucleotide
ccattaactatggatgctatcaattgtttgattttaactctccagatttagaaaagctcatacgg

SEQ ID NO: 104255 - DNA, 60 bp, Artificial
  Synthetic oligonucleotide
attacgatcgccctatactagtgcaaatttctttcaagattagagtgcttggatgtgacc

SEQ ID NO: 104256 - DNA, 60 bp, Artificial
  Synthetic oligonucleotide
ctattaaaaatagagcttggatcagtttattttgtaattatccaaagtctgagatgatta

SEQ ID NO: 104257 - DNA, 60 bp, Artificial
  Synthetic oligonucleotide
ggttcttatccagtaattcaatggtattgtatacagatgtctcacaatgggattcatcac

SEQ ID NO: 104258 - DNA, 60 bp, Artificial
  Synthetic oligonucleotide
gttctactcacagtcgaatcagttattatcgtatggtgacgtcacacggttcttatccag

SEQ ID NO: 104259 - DNA, 60 bp, Artificial
  Synthetic oligonucleotide
tgtttcaatcagctgaagagtatactgattcgttaatggatcccgccatactaacctcac

SEQ ID NO: 104260 - DNA, 60 bp, Artificial
  Synthetic oligonucleotide
atgttgtcatatgcaaaacatactagggaatatgcagagttctactcacagtcgaatcag

SEQ ID NO: 104261 - DNA, 60 bp, Artificial
  Synthetic oligonucleotide
tattcagatgacatctgtagctataaccggatcactaagactattcccgtcagaacgagt

SEQ ID NO: 104262 - DNA, 60 bp, Artificial
  Synthetic oligonucleotide
gttaaagcgttagtatctacagttggtattgaaatagcgaagagatacatagctggaggg

SEQ ID NO: 104263 - DNA, 60 bp, Artificial
  Synthetic oligonucleotide
caaaagttaaagcgttagtatctacagttggtattgaaatagcgaagagatacatagctg

SEQ ID NO: 104264 - DNA, 60 bp, Artificial
  Synthetic oligonucleotide
ttagatatgttgactaacatgactaacgatccaaaagtagtacatacgttaaatttatac

SEQ ID NO: 104265 - DNA, 60 bp, Artificial
  Synthetic oligonucleotide
agaggattttatcatagaatatggaacaactgacgatgaggtatacatacagagagcatt

SEQ ID NO: 104266 - DNA, 60 bp, Artificial
  Synthetic oligonucleotide
cagatgacatctgtagctataaccggatcactaagactattcccgtcagaacgagtacta

SEQ ID NO: 104267 - DNA, 60 bp, Artificial
  Synthetic oligonucleotide
tttagtgacttgggctaactcagctatagaaatgcttatgtcagtattttctcatgagga

SEQ ID NO: 104268 - DNA, 54 bp, Artificial
  Synthetic oligonucleotide
aacgtcattcaaatgatgttgccgatgcgaataaaatttacaaacgtagattgg

SEQ ID NO: 104269 - DNA, 60 bp, Artificial
  Synthetic oligonucleotide
attcctatgataaatataatgctgtagaacgaaaactgatcaactacgctaaaggtaaac

SEQ ID NO: 104270 - DNA, 51 bp, Artificial
  Synthetic oligonucleotide
gagatgcatcgattttcatgttaagtgtgttgattattcaaaaagaggctt

SEQ ID NO: 104271 - DNA, 60 bp, Artificial
  Synthetic oligonucleotide
agagttctactcacagtcgaatcagttattatcgtatggtgacgtcacacggttcttatc

SEQ ID NO: 104272 - DNA, 60 bp, Artificial
  Synthetic oligonucleotide
agataacttctgagttgtttcaatcagctgaagagtatactgattcgttaatggatcccg

SEQ ID NO: 104273 - DNA, 60 bp, Artificial
  Synthetic oligonucleotide
gctaaagtcacgcctgttgtcgtcactatggcttcctcactcagggctgcgatctctaag

SEQ ID NO: 104274 - DNA, 60 bp, Artificial
  Synthetic oligonucleotide
cgcctgttgtcgtcactatggcttcctcactcagggctgcgatctctaagatcaagagag

SEQ ID NO: 104275 - DNA, 60 bp, Artificial
  Synthetic oligonucleotide
ctcgatgtcctgagttcgatgatgaggccttctggtctggggtgccaacaattattaaat

SEQ ID NO: 104276 - DNA, 60 bp, Artificial
  Synthetic oligonucleotide
tatctggacgacatggttagtaaaacatgcatgttctcgatgtcctgagttcgatgatga

SEQ ID NO: 104277 - DNA, 60 bp, Artificial
  Synthetic oligonucleotide
tatgtgtgtgtacaatatctggacgacatggttagtaaaacatgcatgttctcgatgtcc

SEQ ID NO: 104278 - DNA, 60 bp, Artificial
  Synthetic oligonucleotide
ctactccagcaactagctgtatgggtgtggaagtgcttcgactttgatatgtgtgtgtac

SEQ ID NO: 104279 - DNA, 60 bp, Artificial
  Synthetic oligonucleotide
tcactactccagcaactagctgtatgggtgtggaagtgcttcgactttgatatgtgtgtg

SEQ ID NO: 104280 - DNA, 60 bp, Artificial
  Synthetic oligonucleotide
gaaacatgatggtattgctatctcgcaatccagatactcactactccagcaactagctgt

SEQ ID NO: 104281 - DNA, 60 bp, Artificial
  Synthetic oligonucleotide
actggatatatatgaaacatgatggtattgctatctcgcaatccagatactcactactcc

SEQ ID NO: 104282 - DNA, 60 bp, Artificial
  Synthetic oligonucleotide
gttgaagggaaagactgaatggcaagatgacatggaagattggatgccatactggatata

SEQ ID NO: 104283 - DNA, 60 bp, Artificial
  Synthetic oligonucleotide
attaggaagacaatgcataggtacgcttatcttgatgatagtactcttgcggatttgact

SEQ ID NO: 104284 - DNA, 60 bp, Artificial
  Synthetic oligonucleotide
attattaaattagtaattaggaagacaatgcataggtacgcttatcttgatgatagtact

SEQ ID NO: 104285 - DNA, 60 bp, Artificial
  Synthetic oligonucleotide
tgatagtactcttgcggatttgactgagcaggttgggctctgagttcattgaccatgtag

SEQ ID NO: 104286 - DNA, 60 bp, Artificial
  Synthetic oligonucleotide
ggatttgactgagcaggttgggctctgagttcattgaccatgtagagactgcatgcacgc

SEQ ID NO: 104287 - DNA, 60 bp, Artificial
  Synthetic oligonucleotide
gcttggtttattatcatatggtgctggagtagcatcacttcctttgctcaacgttattgc

SEQ ID NO: 104288 - DNA, 60 bp, Artificial
  Synthetic oligonucleotide
cctttgctcaacgttattgcacataatcctggatcagttatctcggctacccctatctat

SEQ ID NO: 104289 - DNA, 60 bp, Artificial
  Synthetic oligonucleotide
gctgttggcatatttgcatttatattctcatttttatataagttgctgcagtggtacaat

SEQ ID NO: 104290 - DNA, 60 bp, Artificial
  Synthetic oligonucleotide
aacaaattgagcttggtttattatcatatggtgctggagtagcatcacttcctttgctca

SEQ ID NO: 104291 - DNA, 60 bp, Artificial
  Synthetic oligonucleotide
cactagaattttgaatcatgatggaagaaacccagatggaagtatcaacgtttgagtggc

SEQ ID NO: 104292 - DNA, 60 bp, Artificial
  Synthetic oligonucleotide
tcatgatggaagaaacccagatggaagtatcaacgtttgagtggccaaagtcattagatg

SEQ ID NO: 104293 - DNA, 60 bp, Artificial
  Synthetic oligonucleotide
attgcacataatcctggatcagttatctcggctacccctatctataaaggtccgtgcact

SEQ ID NO: 104294 - DNA, 60 bp, Artificial
  Synthetic oligonucleotide
ccctatctataaaggtccgtgcactggtgtacctaattcgcgcctacttcaaatcacgag

SEQ ID NO: 104295 - DNA, 60 bp, Artificial
  Synthetic oligonucleotide
tttgagtggccaaagtcattagatgaaagtttgcaagtgttatgtaatgagttgaaggga

SEQ ID NO: 104296 - DNA, 59 bp, Artificial
  Synthetic oligonucleotide
cattagatgaaagtttgcaagtgttatgtaatgagttgaagggaaagactgaatggcaa

SEQ ID NO: 104297 - DNA, 60 bp, Artificial
  Synthetic oligonucleotide
cgccaaatgcttttgttgaaattgtgagcagttctactggcattataatcgctgttggca

SEQ ID NO: 104298 - DNA, 60 bp, Artificial
  Synthetic oligonucleotide
ggcttttaaagcaatactagtagtgcgttttacctctgatggtgtaagcatgaaagtatt

SEQ ID NO: 104299 - DNA, 60 bp, Artificial
  Synthetic oligonucleotide
ggctattaaagcagtactagtagtgcgttttacctctgatggtgtaagcatgaaagtatt

SEQ ID NO: 104300 - DNA, 60 bp, Artificial
  Synthetic oligonucleotide
agtattagctttaagacacagtgtggctcaggtgtatgcagatacgcaaacctacataca

SEQ ID NO: 104301 - DNA, 60 bp, Artificial
  Synthetic oligonucleotide
tgaaagtattagctttaagacacagtgtggctcaggtgtatgcagatactcaaacctatt

SEQ ID NO: 104302 - DNA, 60 bp, Artificial
  Synthetic oligonucleotide
actagtagtgcgttttacctctgatggtgtaagcatgaaagtattagctttaagacacag

SEQ ID NO: 104303 - DNA, 60 bp, Artificial
  Synthetic oligonucleotide
gtgtaattttacgtacgattatgagaataacatagtttatttacatgattattcatatta

SEQ ID NO: 104304 - DNA, 60 bp, Artificial
  Synthetic oligonucleotide
ataagatgtaattttacgtacgattatgagaataacatagtttatttacatgattattcg

SEQ ID NO: 104305 - DNA, 60 bp, Artificial
  Synthetic oligonucleotide
gggaaagtcgctgtagaaggtggaagatattatgaacatgcaccaatcgaattgatatac

SEQ ID NO: 104306 - DNA, 60 bp, Artificial
  Synthetic oligonucleotide
aattaaagagagaatgaccacatctcttccaattgctagattatcaaatcgtgtatttag

SEQ ID NO: 104307 - DNA, 60 bp, Artificial
  Synthetic oligonucleotide
tatctacattcaattgggaaagtcgctgtagaaggtggaagatattatgaacatgcacca

SEQ ID NO: 104308 - DNA, 60 bp, Artificial
  Synthetic oligonucleotide
cattcaattggaaaagtcgctgtagaaggtggaagatattatgaacatgcaccaatcgaa

SEQ ID NO: 104309 - DNA, 60 bp, Artificial
  Synthetic oligonucleotide
cgaaagattaaagagagaatgaccacatctcttccaattgctagattatcaaatcgtgtg

SEQ ID NO: 104310 - DNA, 60 bp, Artificial
  Synthetic oligonucleotide
ggagaagtggttaggtaaaaggatatcacaatttgacatcggacaatataaaaacatgtt

SEQ ID NO: 104311 - DNA, 59 bp, Artificial
  Synthetic oligonucleotide
cgacatcatattcgggatatatttttagagatctttcaaataataatttcaatttaata

SEQ ID NO: 104312 - DNA, 60 bp, Artificial
  Synthetic oligonucleotide
ttgggtaaaagagtatcacaatttgacatcggacaatataaaaacatgttaaatgtggtt

SEQ ID NO: 104313 - DNA, 60 bp, Artificial
  Synthetic oligonucleotide
tcagttttatatatagacataagaactgatagaggaaatatggattggaaagagtggaga

SEQ ID NO: 104314 - DNA, 60 bp, Artificial
  Synthetic oligonucleotide
tcagttttatatatagacataagaactgatagaggtaatatggattggaaagaatggaga

SEQ ID NO: 104315 - DNA, 60 bp, Artificial
  Synthetic oligonucleotide
tatctacattcaattggaaaagtcgctgtagaaggtggaagatattatgaacatgcacca

SEQ ID NO: 104316 - DNA, 59 bp, Artificial
  Synthetic oligonucleotide
cgacatcatattcgggatatatttttagagatctttcaaataataatttcaatctaata

SEQ ID NO: 104317 - DNA, 51 bp, Artificial
  Synthetic oligonucleotide
aatcactcattactgttcgtataaataacacttttaaagacgaaccgaaag

SEQ ID NO: 104318 - DNA, 60 bp, Artificial
  Synthetic oligonucleotide
caatgtatgcatggatgagatggttagagaatcacaaaggaacggaattgcacctcaatc

SEQ ID NO: 104319 - DNA, 60 bp, Artificial
  Synthetic oligonucleotide
ttttgttgattttgtagataacgtatgtatggatgagatggttagagaatcacaaagaaa

SEQ ID NO: 104320 - DNA, 60 bp, Artificial
  Synthetic oligonucleotide
atgtctatattatccatcagaagctccaactcaaatcagtgacactgaatggaaagatac

SEQ ID NO: 104321 - DNA, 51 bp, Artificial
  Synthetic oligonucleotide
tgtctatattatccatcagaagctccaactcaaatcagtgacactgaatgg

SEQ ID NO: 104322 - DNA, 60 bp, Artificial
  Synthetic oligonucleotide
aattagtgacactgagtggaaagatacactatctcagctgtttttaaccaagggatgccg

SEQ ID NO: 104323 - DNA, 60 bp, Artificial
  Synthetic oligonucleotide
gccggagctcagcgaggatgaagacgagagggcttatgctacaatgtttgaaatggttcg

SEQ ID NO: 104324 - DNA, 60 bp, Artificial
  Synthetic oligonucleotide
cacatggcttgcatggtaatatgacattaacgtctagtgaaattcagcgtcacataacgg

SEQ ID NO: 104325 - DNA, 60 bp, Artificial
  Synthetic oligonucleotide
cgtcacatggcttgcatggtaatatgacattaacgtctagtgaaattcagcgtcacataa

SEQ ID NO: 104326 - DNA, 60 bp, Artificial
  Synthetic oligonucleotide
gttgcctcacatggcttgcatggtaatatgacattaacatccagtgagattcagcgacac

SEQ ID NO: 104327 - DNA, 60 bp, Artificial
  Synthetic oligonucleotide
gggaacaggatataatggttgggcgacgattgatgtcgagtatagagaacctgcgcccta

SEQ ID NO: 104328 - DNA, 60 bp, Artificial
  Synthetic oligonucleotide
tttcgagcagatttcgccacgggaacaggatataatggttgggcgacgattgatgttgag

SEQ ID NO: 104329 - DNA, 60 bp, Artificial
  Synthetic oligonucleotide
cgaccccttatttagaaggagatgtactgtcgagtgattcaggaccgttgttatcagtgt

SEQ ID NO: 104330 - DNA, 60 bp, Artificial
  Synthetic oligonucleotide
cgccttatttagagggagatgtactgtcgagtgattcaggaccgttgttatcagtgttcg

SEQ ID NO: 104331 - DNA, 60 bp, Artificial
  Synthetic oligonucleotide
aacatgaatttttcacttaatactatattgtatccgttacaaagcatattaaatcgtaag

SEQ ID NO: 104332 - DNA, 60 bp, Artificial
  Synthetic oligonucleotide
aaagtagatatacttaaggatattggacgtaaatttaaggaaatgtatttagcagatttt

SEQ ID NO: 104333 - DNA, 53 bp, Artificial
  Synthetic oligonucleotide
ggcggaatatctttgaggaagaatttgatccgtgatatcgcatgtggccataa

SEQ ID NO: 104334 - DNA, 60 bp, Artificial
  Synthetic oligonucleotide
tacgtgatataatcgctcagttatcccgtcgttcaggcggaatatctttgaggaagaatt

SEQ ID NO: 104335 - DNA, 60 bp, Artificial
  Synthetic oligonucleotide
aatcagcagaaaaattacgtgatataatcgctcagttatcccgtcgttcaggcggaatat

SEQ ID NO: 104336 - DNA, 60 bp, Artificial
  Synthetic oligonucleotide
cctacagcctatcgaaaagttagatccacttaccaaagttcaatacgaatcagcagaaaa

SEQ ID NO: 104337 - DNA, 60 bp, Artificial
  Synthetic oligonucleotide
ggttgattctaatggcagtgattactacgatgggattttcgatgatatggttcttatact

SEQ ID NO: 104338 - DNA, 60 bp, Artificial
  Synthetic oligonucleotide
tattttggttgattctaatggcagtgattactacgatgggattttcgatgatatggttct

SEQ ID NO: 104339 - DNA, 60 bp, Artificial
  Synthetic oligonucleotide
cgacataatcgtgaatttaagcatggacgatcgcagtttattttggttgattctaatggc

SEQ ID NO: 104340 - DNA, 60 bp, Artificial
  Synthetic oligonucleotide
acacatcaagttcgacataatcgtgaatttaagcatggacgatcgcagtttattttggtt

SEQ ID NO: 104341 - DNA, 60 bp, Artificial
  Synthetic oligonucleotide
ggaattccaggtataagtaggagaataatttgtattgattctgacgcatatggaaaatgg

SEQ ID NO: 104342 - DNA, 60 bp, Artificial
  Synthetic oligonucleotide
ggaaaatcgatgcttatgaaattgatcaatgaacgtggaattccaggtataagtaggaga

SEQ ID NO: 104343 - DNA, 55 bp, Artificial
  Synthetic oligonucleotide
tggaaaatggaggacacaaacgcaatatatagacaacaaattcgaggcattgaaa

SEQ ID NO: 104344 - DNA, 60 bp, Artificial
  Synthetic oligonucleotide
agtaggagaataatttgtattgattctgacgcatatggaaaatggaggacacaaacgcaa

SEQ ID NO: 104345 - DNA, 60 bp, Artificial
  Synthetic oligonucleotide
gatagcgcgagacgatagtgtggtttcattttacgagcagtttattatagatcaactatt

SEQ ID NO: 104346 - DNA, 51 bp, Artificial
  Synthetic oligonucleotide
ggaaaatggaggacacaaacgcaatatatagacaacaaattcgaggcattg

SEQ ID NO: 104347 - DNA, 51 bp, Artificial
  Synthetic oligonucleotide
atcaactattatcacataatattgagatatcagaacatactaatagtcttc

SEQ ID NO: 104348 - DNA, 60 bp, Artificial
  Synthetic oligonucleotide
cgcgagacgatagtgtggtttcattttacgagcagtttattatagatcaactattatcac

SEQ ID NO: 104349 - DNA, 60 bp, Artificial
  Synthetic oligonucleotide
acgtgaacagtgtttaacagaatcttcacttataagagttaatattataggacaaaaagg

SEQ ID NO: 104350 - DNA, 60 bp, Artificial
  Synthetic oligonucleotide
ttacctacagcctatcgaaaagttagatccacttaccaaagttcaatacgaatcagcaga

SEQ ID NO: 104351 - DNA, 60 bp, Artificial
  Synthetic oligonucleotide
ctacaatcaaattttgtactacctaacgtcccaggaataatctcagaacagctcagacta

SEQ ID NO: 104352 - DNA, 55 bp, Artificial
  Synthetic oligonucleotide
agtttaaacccatttgattagcaatgtttgcaataccttttacagccagtcaagt

SEQ ID NO: 104353 - DNA, 60 bp, Artificial
  Synthetic oligonucleotide
atatggttcttatactacaatcaaattttgtactacctaacgtcccaggaataatctcag

SEQ ID NO: 104354 - DNA, 56 bp, Artificial
  Synthetic oligonucleotide
ataatctcagaacagctcagactaatcgtgattgacaatgatttttatttgaagca

SEQ ID NO: 104355 - DNA, 60 bp, Artificial
  Synthetic oligonucleotide
tatactacgcgatgttttaagtgaacatatggttaaattttctatcgacggtgtatcatt

SEQ ID NO: 104356 - DNA, 60 bp, Artificial
  Synthetic oligonucleotide
cgatgttttaagtgaacatatggttaaattttctatcgacggtgtatcattagaagaccc

SEQ ID NO: 104357 - DNA, 60 bp, Artificial
  Synthetic oligonucleotide
cacaaaattcaagaaaattgatctaacaaaagtcgtgttgattaataagacaggtaaatc

SEQ ID NO: 104358 - DNA, 52 bp, Artificial
  Synthetic oligonucleotide
ttaactatgaagtatttgatgttatgctacaaccaacaaaacgtagagatgg

SEQ ID NO: 104359 - DNA, 60 bp, Artificial
  Synthetic oligonucleotide
tcgtgcatggcgtaccagtaatgaatagtacgtctcagttgcagttggattttcaaattt

SEQ ID NO: 104360 - DNA, 60 bp, Artificial
  Synthetic oligonucleotide
cgtgcatggcgtaccagtaatgaatagtacgtctcagttgcagttggattttcaaatttc

SEQ ID NO: 104361 - DNA, 57 bp, Artificial
  Synthetic oligonucleotide
tttcaaatttctgatattcgcgttgccagtgtatttgatgaccaaattgtttgtgca

SEQ ID NO: 104362 - DNA, 60 bp, Artificial
  Synthetic oligonucleotide
cagcggaagcatcgggtgcgacataaattccagacgtttatgccggtgtggaagcactcc

SEQ ID NO: 104363 - DNA, 60 bp, Artificial
  Synthetic oligonucleotide
gacaaaaaggaagtggaaaatcgatgcttatgaaattgatcaatgaacgtggaattccag

SEQ ID NO: 104364 - DNA, 60 bp, Artificial
  Synthetic oligonucleotide
aaatagatcagagtgaattaattgacacctgtagtggtcttgtaaaaaagcggtcagcgg

SEQ ID NO: 104365 - DNA, 60 bp, Artificial
  Synthetic oligonucleotide
cggtcagcggaagcatcgggtgcgacataaattccagacgtttatgccggtgtggaagca

SEQ ID NO: 104366 - DNA, 60 bp, Artificial
  Synthetic oligonucleotide
atgagatgggtacggaagcgttcactagactacggccttgtgatgtatggaaatagatca

SEQ ID NO: 104367 - DNA, 60 bp, Artificial
  Synthetic oligonucleotide
gggtacggaagcgttcactagactacggccttgtgatgtatggaaatagatcagagtgaa

SEQ ID NO: 104368 - DNA, 60 bp, Artificial
  Synthetic oligonucleotide
aaatcgtaagcgtggaaccttagttaacttcattctcaatcggatctacgatgagatggg

SEQ ID NO: 104369 - DNA, 60 bp, Artificial
  Synthetic oligonucleotide
cgtggaaccttagttaacttcattctcaatcggatctacgatgagatgggtacggaagcg

SEQ ID NO: 104370 - DNA, 60 bp, Artificial
  Synthetic oligonucleotide
attgcgttcaccgtataccaacgcgaacttctttcaagattagagcgcttagatgtgacc

SEQ ID NO: 104371 - DNA, 60 bp, Artificial
  Synthetic oligonucleotide
tgtgagaggttgagttgccgtcgtctgtcttcggaagcggcggaactctttaccgcaagc

SEQ ID NO: 104372 - DNA, 60 bp, Artificial
  Synthetic oligonucleotide
cgcaaaacattttaataggtatgcctcgatggctatacaacaatatctgagagttggatt

SEQ ID NO: 104373 - DNA, 60 bp, Artificial
  Synthetic oligonucleotide
tacaaaaggttggccaacaggatcagtctattttaaaaagtactcaaatatcgttgattt

SEQ ID NO: 104374 - DNA, 56 bp, Artificial
  Synthetic oligonucleotide
aaacaacgaatgtagactcatttgaaacagttgctgagaatgaaaaattagctata

SEQ ID NO: 104375 - DNA, 60 bp, Artificial
  Synthetic oligonucleotide
ccacattttgtttgtattatccaactgaagcaagggctcaaatcaatgacggggaatgga

SEQ ID NO: 104376 - DNA, 60 bp, Artificial
  Synthetic oligonucleotide
tgtttgtattatccaactgaagcaagggctcaaatcaatgacggggaatggaaagactca

SEQ ID NO: 104377 - DNA, 60 bp, Artificial
  Synthetic oligonucleotide
gggctgttatacaagttggtggcgctaatatattaaacataacagcgggatcccacccac

SEQ ID NO: 104378 - DNA, 60 bp, Artificial
  Synthetic oligonucleotide
tgtgggctgttatacaagttggtggcgctaatatattaaacataacagcgggatcccacc

SEQ ID NO: 104379 - DNA, 56 bp, Artificial
  Synthetic oligonucleotide
ggatcccacccactaatccccaaattgagagaatgatgagagtggaattgggaaaa

SEQ ID NO: 104380 - DNA, 60 bp, Artificial
  Synthetic oligonucleotide
ggatcccacccactaatccccaaattgagagaatgatgagagtggaattgggaaaaatgg

SEQ ID NO: 104381 - DNA, 60 bp, Artificial
  Synthetic oligonucleotide
taatttcccgctccgctctctttatagaaatataaaaatatcttaaataaaaattgtatg

SEQ ID NO: 104382 - DNA, 60 bp, Artificial
  Synthetic oligonucleotide
attcgaaattgtaagaagttaggtccaagagagaatgtgggctgttatacaagttggtgg

SEQ ID NO: 104383 - DNA, 60 bp, Artificial
  Synthetic oligonucleotide
actaccacatgtactattcgaaattgtaagaagttaggtccaagagagaatgtgggctgt

SEQ ID NO: 104384 - DNA, 60 bp, Artificial
  Synthetic oligonucleotide
gtattcctaacttccactttttgtttgtattacccaactgaagcagcaacagaaataaat

SEQ ID NO: 104385 - DNA, 60 bp, Artificial
  Synthetic oligonucleotide
attgtgcaagcatgtccaaaagatcgagatcattaaattcttgctgccttttaccaccga

SEQ ID NO: 104386 - DNA, 60 bp, Artificial
  Synthetic oligonucleotide
actacgtggaatcaaattgtgcaagcatgtccaaaagatcgagatcattaaattcttgct

SEQ ID NO: 104387 - DNA, 60 bp, Artificial
  Synthetic oligonucleotide
gctgccttttaccaccgaagatagatatagctttaaattagaattgtatgaatgtgaccc

SEQ ID NO: 104388 - DNA, 60 bp, Artificial
  Synthetic oligonucleotide
aattcttgctgccttttaccaccgaagatagatatagctttaaattagaattgtatgaat

SEQ ID NO: 104389 - DNA, 60 bp, Artificial
  Synthetic oligonucleotide
taggaccaagggaaaacgtagcagttatacaggttggtgggccaaaatgtgcttgacata

SEQ ID NO: 104390 - DNA, 60 bp, Artificial
  Synthetic oligonucleotide
agaaataaatgataattcatggaaggatacactttctcagctatttttaatcaaaggatg

SEQ ID NO: 104391 - DNA, 60 bp, Artificial
  Synthetic oligonucleotide
tgcgagtggattgggaagaaatggtggcaagtgtttttatacaatagttgactacgtgga

SEQ ID NO: 104392 - DNA, 60 bp, Artificial
  Synthetic oligonucleotide
acgtagcagttatacaggttggtgggccaaaatgtgcttgacataacagctgatccaacg

SEQ ID NO: 104393 - DNA, 60 bp, Artificial
  Synthetic oligonucleotide
gatcattattatacaacaaattgttacactggagcggaggcattgattacgactgcgatt

SEQ ID NO: 104394 - DNA, 60 bp, Artificial
  Synthetic oligonucleotide
tcattattatacaacaaattgttacactggagcggaagctttgattacaactgcaatcca

SEQ ID NO: 104395 - DNA, 60 bp, Artificial
  Synthetic oligonucleotide
tatacaacaaattgttacactggagcggaggctttgattacaactgcaatccacattcat

SEQ ID NO: 104396 - DNA, 60 bp, Artificial
  Synthetic oligonucleotide
gatcattattatacaacaaattgttacactggagcggaggccttgattacaactgcgatt

SEQ ID NO: 104397 - DNA, 60 bp, Artificial
  Synthetic oligonucleotide
gatcattattatacaacaaattgttacactggagcggaggccttgattacaaccgcgatt

SEQ ID NO: 104398 - DNA, 60 bp, Artificial
  Synthetic oligonucleotide
caacatttatatcaagatatcgccaaattgcatactatttctacaatccggatgcggctg

SEQ ID NO: 104399 - DNA, 60 bp, Artificial
  Synthetic oligonucleotide
ccaacatttatatcaagatatcgccaaattgcatactatttctacaatccggatgcagct

SEQ ID NO: 104400 - DNA, 60 bp, Artificial
  Synthetic oligonucleotide
gtgaatccaacatttatatcaagatatcgccaaattgcatactatttctacaacccggat

SEQ ID NO: 104401 - DNA, 60 bp, Artificial
  Synthetic oligonucleotide
tgaatccaacatttatatcaagatatcgccaaattgcatactatttctacaatccggatg

SEQ ID NO: 104402 - DNA, 60 bp, Artificial
  Synthetic oligonucleotide
aaggactgcagctcaaggactgagacgtggagtggaagaggcgttgcgttccggcaatga

SEQ ID NO: 104403 - DNA, 60 bp, Artificial
  Synthetic oligonucleotide
atcgacaccaacaatccaggacaagctaacctcaatctgagtatgtcatattggcgtgga

SEQ ID NO: 104404 - DNA, 60 bp, Artificial
  Synthetic oligonucleotide
cacaagtcaatcagaatcgacaccaacaatccaggacaagctaacctcaatctgagtatg

SEQ ID NO: 104405 - DNA, 60 bp, Artificial
  Synthetic oligonucleotide
ccgtgcgggtggagctaatcaaaacgcagtttattcagtaatgctgaattctaatgacgc

SEQ ID NO: 104406 - DNA, 60 bp, Artificial
  Synthetic oligonucleotide
cagccgtgcgggtggagctaatcaaaacgcagtttattcagtaatgctgaattctaatga

SEQ ID NO: 104407 - DNA, 60 bp, Artificial
  Synthetic oligonucleotide
cgctggtgcctacaacttcatcatcccagctggtacacgaatggtattcgaagtttcagg

SEQ ID NO: 104408 - DNA, 60 bp, Artificial
  Synthetic oligonucleotide
attctaatgacgctggtgcctacaacttcatcatcccagctggtacacgaatggtattcg

SEQ ID NO: 104409 - DNA, 60 bp, Artificial
  Synthetic oligonucleotide
tcaggaacgtcgaccgttagcattgattcgggctctgatttcacaaaggcggaacgtgga

SEQ ID NO: 104410 - DNA, 60 bp, Artificial
  Synthetic oligonucleotide
atggtattcgaagtttcaggaacgtcgaccgttagcattgattcgggctctgatttcaca

SEQ ID NO: 104411 - DNA, 60 bp, Artificial
  Synthetic oligonucleotide
tcttgtaccctagcttggatatgtggatggcgactatgcgttatgttttcccgaatactg

SEQ ID NO: 104412 - DNA, 60 bp, Artificial
  Synthetic oligonucleotide
tgatcgtcaatactatcttgtaccctagcttggatatgtggatggcgactatgcgttatg

SEQ ID NO: 104413 - DNA, 60 bp, Artificial
  Synthetic oligonucleotide
caatcatgagagtcgacgctccggctggactaaccgttgtcatgtcaggtcacaagtcaa

SEQ ID NO: 104414 - DNA, 60 bp, Artificial
  Synthetic oligonucleotide
gacgctccggctggactaaccgttgtcatgtcaggtcacaagtcaatcagaatcgacacc

SEQ ID NO: 104415 - DNA, 60 bp, Artificial
  Synthetic oligonucleotide
gctttgagtctacgaatgaacagataaactagtcacgttctctcgtctcaagtcctaagt

SEQ ID NO: 104416 - DNA, 60 bp, Artificial
  Synthetic oligonucleotide
cgaatgaacagataaactagtcacgttctctcgtctcaagtcctaagttacattcccgct

SEQ ID NO: 104417 - DNA, 60 bp, Artificial
  Synthetic oligonucleotide
gtaccgtcatgttaatagtgatgcttacaacaacttaatcttaaatacactgtgaagaaa

SEQ ID NO: 104418 - DNA, 60 bp, Artificial
  Synthetic oligonucleotide
tgtgaagaaattagtcatctaagcgtttccggagttgcaggtgggggcaggcctctgatc

SEQ ID NO: 104419 - DNA, 60 bp, Artificial
  Synthetic oligonucleotide
gctcaaggactgagacgtggagtggaagaggcgttgcgttccggcaatgagtcggagttc

SEQ ID NO: 104420 - DNA, 60 bp, Artificial
  Synthetic oligonucleotide
ccggcaatgagtcggagttcaacaatgcttacctcatattctcaggtcagctaccttcta

SEQ ID NO: 104421 - DNA, 60 bp, Artificial
  Synthetic oligonucleotide
gcgaacgttctgatgtacttcgacgactgatcacggcatccagcgcagtagttaatccag

SEQ ID NO: 104422 - DNA, 60 bp, Artificial
  Synthetic oligonucleotide
gtacttcgacgactgatcacggcatccagcgcagtagttaatccagccacagtggcgcag

SEQ ID NO: 104423 - DNA, 60 bp, Artificial
  Synthetic oligonucleotide
gttaatccagccacagtggcgcagaatgagctaatcagactgggccaacgtctcaactca

SEQ ID NO: 104424 - DNA, 60 bp, Artificial
  Synthetic oligonucleotide
ccagccacagtggcgcagaatgagctaatcagactgggccaacgtctcaactcaagtgat

SEQ ID NO: 104425 - DNA, 60 bp, Artificial
  Synthetic oligonucleotide
tctcaactcaagtgattcagctgctcgcgcagattacgtagtttacaccccaatcatgag

SEQ ID NO: 104426 - DNA, 60 bp, Artificial
  Synthetic oligonucleotide
ttcagctgctcgcgcagattacgtagtttacaccccaatcatgagagtcgacgctccggc

SEQ ID NO: 104427 - DNA, 60 bp, Artificial
  Synthetic oligonucleotide
agtcctaagttacattcccgctttaatagttactactagcatctagtcccgtaccgtcat

SEQ ID NO: 104428 - DNA, 60 bp, Artificial
  Synthetic oligonucleotide
gtcctaagttacattcccgctttaatagttactactagcatctagtcccgtaccgtcatg

SEQ ID NO: 104429 - DNA, 60 bp, Artificial
  Synthetic oligonucleotide
gcgatcattaggtgttttgagttaccatctcgacttcatcaacgagctgaggataccgcc

SEQ ID NO: 104430 - DNA, 60 bp, Artificial
  Synthetic oligonucleotide
tccattcattaccttgtttatcaaggaagggctaggattaccatttctggcgacgaattt

SEQ ID NO: 104431 - DNA, 60 bp, Artificial
  Synthetic oligonucleotide
cttgctcaatccaacagtattttcagtatatagcgcatggcgtaaagcagttgagacacc

SEQ ID NO: 104432 - DNA, 60 bp, Artificial
  Synthetic oligonucleotide
gtcacatctgaacatggtgacgctcaacgagtcgagtttcgtgaagcgatggctgaggtt

SEQ ID NO: 104433 - DNA, 60 bp, Artificial
  Synthetic oligonucleotide
cggttaatgtcagacatttcagctttcgaggacgcagagagaagaatcattgctgaggtt

SEQ ID NO: 104434 - DNA, 60 bp, Artificial
  Synthetic oligonucleotide
attcttatcctttgacattactttggaaaagctcagtgacgcaatcaattcgtgatgagc

SEQ ID NO: 104435 - DNA, 58 bp, Artificial
  Synthetic oligonucleotide
atgggagtcagaggatttatgacttctacgcacactatgctcaggagcttcacgaaaa

SEQ ID NO: 104436 - DNA, 60 bp, Artificial
  Synthetic oligonucleotide
caattcgtgatgagctcttagggatgattagaccgtatggcgatcggattcgtagcatgg

SEQ ID NO: 104437 - DNA, 60 bp, Artificial
  Synthetic oligonucleotide
atagggacgttgttctagatagaaagtgtaagtacatgccatcttcaacttccgactttg

SEQ ID NO: 104438 - DNA, 60 bp, Artificial
  Synthetic oligonucleotide
gctgaggtttatggaacgccaagtgactggtatgatggtgcgttggctgacaaacttgat

SEQ ID NO: 104439 - DNA, 60 bp, Artificial
  Synthetic oligonucleotide
ggtgtttagtgggtactatggttatcgaccaggaccatttaaggagtataatcatgaggc

SEQ ID NO: 104440 - DNA, 60 bp, Artificial
  Synthetic oligonucleotide
ccaacacatcttccatatgtatggcatctcgcgaacattcaagggaggcatcgtcaaacg

SEQ ID NO: 104441 - DNA, 60 bp, Artificial
  Synthetic oligonucleotide
attgcagataccattggaagtcaagaaccagagttttcttcgaaaaagaattcaggcacc

SEQ ID NO: 104442 - DNA, 60 bp, Artificial
  Synthetic oligonucleotide
gatcgacagtacatacacgtcagttgtttgaaatcggtaaggatccgcgagcgatcatta

SEQ ID NO: 104443 - DNA, 60 bp, Artificial
  Synthetic oligonucleotide
aatattggattgtcgcttgaaagtgtattgtcaaagtattcagcaacctttctacagatg

SEQ ID NO: 104444 - DNA, 60 bp, Artificial
  Synthetic oligonucleotide
aattcaggtggtattccttatgaaccaactccagaagaaacgaagacgattccagctggt

SEQ ID NO: 104445 - DNA, 60 bp, Artificial
  Synthetic oligonucleotide
ggaaaattttcaacgaatgcgcaacatagctttatcaacgctggtgctgttagaagctgg

SEQ ID NO: 104446 - DNA, 50 bp, Artificial
  Synthetic oligonucleotide
aaataaaacccctccacaatagaaccagacccatggactcaacgcgtcaa

SEQ ID NO: 104447 - DNA, 60 bp, Artificial
  Synthetic oligonucleotide
ttgcatttaaagcatggtatgatacactacaacgaaggacagacatattattcaacaaga

SEQ ID NO: 104448 - DNA, 58 bp, Artificial
  Synthetic oligonucleotide
tacacttacttatttccacgcaacataatctgacctcctcaaagcaagatacactaac

SEQ ID NO: 104449 - DNA, 60 bp, Artificial
  Synthetic oligonucleotide
acggtttgaaccaagtaatgattcaactgcatccactttttattcgacaaacggatggta

SEQ ID NO: 104450 - DNA, 60 bp, Artificial
  Synthetic oligonucleotide
aattttccagaacgcggctttgaacttcacgagaatccggtattatacataatttcacgt

SEQ ID NO: 104451 - DNA, 60 bp, Artificial
  Synthetic oligonucleotide
cattcacggaaaagtcgggtgagatggtttatcatcattcggttagtatgacaacgccac

SEQ ID NO: 104452 - DNA, 60 bp, Artificial
  Synthetic oligonucleotide
gcaagcattcattccaatttatggatctgtcgcgccagcgggcattatgctgaaagagga

SEQ ID NO: 104453 - DNA, 60 bp, Artificial
  Synthetic oligonucleotide
ggaacggatttccttcaattatgtccaatgccacttcagaagtatcttacggatcggcgc

SEQ ID NO: 104454 - DNA, 60 bp, Artificial
  Synthetic oligonucleotide
ggcgagacgcacacatcttattattaccctttcgactcaacatggattatttatcaagaa

SEQ ID NO: 104455 - DNA, 60 bp, Artificial
  Synthetic oligonucleotide
ccatcccttggcgttggatatgatattaaagagtatatggtcaacccgtcagatcagact

SEQ ID NO: 104456 - DNA, 60 bp, Artificial
  Synthetic oligonucleotide
ggattcgaatgaacgattgactcaacctgtacgagtcacttcattaattagtggggatga

SEQ ID NO: 104457 - DNA, 60 bp, Artificial
  Synthetic oligonucleotide
ggataccgccgctctcgttgctcgtgatttacatttagcttacggaagttacggtttgaa

SEQ ID NO: 104458 - DNA, 60 bp, Artificial
  Synthetic oligonucleotide
acggatggtactagggagcgtaacacattactacgtatgcttaccaagaaggtcatcgaa

SEQ ID NO: 104459 - DNA, 60 bp, Artificial
  Synthetic oligonucleotide
caacgctggtgctgttagaagctgggggaaatcatttaaccgtcaaatgcttcagtctaa

SEQ ID NO: 104460 - DNA, 60 bp, Artificial
  Synthetic oligonucleotide
cgtcgtcgattcaaatggaacaagtcgtcgtgagcggattgcagccccaattgaggtttt

SEQ ID NO: 104461 - DNA, 60 bp, Artificial
  Synthetic oligonucleotide
gagataggtggacgcgtaatttagcgagtcaactgaattttcaggcaattaccaagtcgg

SEQ ID NO: 104462 - DNA, 60 bp, Artificial
  Synthetic oligonucleotide
taaaggagttgcgttataatgtaccagaagagattgcctttcatcattcacctgctgaga

SEQ ID NO: 104463 - DNA, 60 bp, Artificial
  Synthetic oligonucleotide
gagtcgttgttgtatcgactgcgttataagccgggagtacgttggattggcccggattcg

SEQ ID NO: 104464 - DNA, 60 bp, Artificial
  Synthetic oligonucleotide
cccggattcgattgagtcgttgttattgttcaacccagttatccttgactcggaatatga

SEQ ID NO: 104465 - DNA, 60 bp, Artificial
  Synthetic oligonucleotide
ggctgacaaacttgatttggatctcgctgtatatattgcaaagtttgatccaagtacgcg

SEQ ID NO: 104466 - DNA, 60 bp, Artificial
  Synthetic oligonucleotide
agtttgcttggagaacgatctcgttgactaccggtgtgttctatggggcccgatgaggtt

SEQ ID NO: 104467 - DNA, 60 bp, Artificial
  Synthetic oligonucleotide
ctgcggtactgggaaagccttggcctaaagcagatcggatctcgattgtcacatctgaac

SEQ ID NO: 104468 - DNA, 60 bp, Artificial
  Synthetic oligonucleotide
catgaggctttagttaagtttgcggctcaagtttatcatacaaatccaacacatcttcca

SEQ ID NO: 104469 - DNA, 60 bp, Artificial
  Synthetic oligonucleotide
gcgtgttaaacaggcaaggcgtcgtgccattccagcatctgagagagataggtggacgcg

SEQ ID NO: 104470 - DNA, 60 bp, Artificial
  Synthetic oligonucleotide
tagtaatgggtaatatgttgcgccgattacgcgtagttatctccgatactttcaacccag

SEQ ID NO: 104471 - DNA, 60 bp, Artificial
  Synthetic oligonucleotide
tttgagttaccatctcgacttcatcaacgagctgaggataccgccgctctcgttgctcgt

SEQ ID NO: 104472 - DNA, 60 bp, Artificial
  Synthetic oligonucleotide
ttccaaagttaattcaaatgatcattgaaacttccaattttccagaacgcggctttgaac

SEQ ID NO: 104473 - DNA, 60 bp, Artificial
  Synthetic oligonucleotide
tcgtgaggcggacgttatgcatggtttagtcattaagtatgtttcccagccacgtctatt

SEQ ID NO: 104474 - DNA, 60 bp, Artificial
  Synthetic oligonucleotide
agaaacgaagacgattccagctggtgtacttagagcccttgggagaaaacggttaatgtt

SEQ ID NO: 104475 - DNA, 60 bp, Artificial
  Synthetic oligonucleotide
ttaatgaattggatcagcatattgaagcagcatccgtgagatatgtcttaaattacgatg

SEQ ID NO: 104476 - DNA, 60 bp, Artificial
  Synthetic oligonucleotide
gagttacattatcatcgtcagctgaaagtgatctggaacggattgtatcaccaccacatt

SEQ ID NO: 104477 - DNA, 61 bp, Artificial
  Synthetic oligonucleotide
caggttggcatctatcacacgagcttgattttattactactgcaagaaattaaatttagag

SEQ ID NO: 104478 - DNA, 60 bp, Artificial
  Synthetic oligonucleotide
ctaacacttgaggatattactggatttgacacatcaagtcaggttggcatctatcacacg

SEQ ID NO: 104479 - DNA, 60 bp, Artificial
  Synthetic oligonucleotide
gaagaagaggcgtgggcggtggctaatgatttcgaagaattgatgttaacggatcaagtg

SEQ ID NO: 104480 - DNA, 60 bp, Artificial
  Synthetic oligonucleotide
tccgaggagttaaaacagagacagattcaaattaatttaattgattggatagagagcgag

SEQ ID NO: 104481 - DNA, 60 bp, Artificial
  Synthetic oligonucleotide
ggatggtcaggggacgcaatcggagagcagccagaagaaagagagcagcaaagaggctaa

SEQ ID NO: 104482 - DNA, 60 bp, Artificial
  Synthetic oligonucleotide
ggtactgaggaagagaagacgtctgaagaaccagcgagtgtcgggatcaccatagagggg

SEQ ID NO: 104483 - DNA, 60 bp, Artificial
  Synthetic oligonucleotide
agagggtactgaggaagagaagacgtctgaagaaccagcgagtgtcgggatcaccataga

SEQ ID NO: 104484 - DNA, 60 bp, Artificial
  Synthetic oligonucleotide
tgtttccacatgaattaacgcagactgaacgagatgcagtaaatttatatgcatcacaat

SEQ ID NO: 104485 - DNA, 60 bp, Artificial
  Synthetic oligonucleotide
ttcgatgtctctagatgtgtgtacccaacagatgattgatgattttctcgtgtttccaca

SEQ ID NO: 104486 - DNA, 60 bp, Artificial
  Synthetic oligonucleotide
actacaataagaattgtttcgagacaaaaagcgctagtgttgatgcaagagggagataaa

SEQ ID NO: 104487 - DNA, 60 bp, Artificial
  Synthetic oligonucleotide
aaattcgatgctcagaaacttaataaaggaggtgcatgtggggacgaattttcgatgtct

SEQ ID NO: 104488 - DNA, 60 bp, Artificial
  Synthetic oligonucleotide
ggtgtgtgagaagctcgggaattatattgcacgagataaaatcaaattcgatgctcagaa

SEQ ID NO: 104489 - DNA, 58 bp, Artificial
  Synthetic oligonucleotide
tcttcgaagttgtttttgagagcggaagaggctccggtataacgcggcaatacttccc

SEQ ID NO: 104490 - DNA, 60 bp, Artificial
  Synthetic oligonucleotide
ccaataaaagctactagaattatatattcaatccacatctcggtattggctccacaactc

SEQ ID NO: 104491 - DNA, 60 bp, Artificial
  Synthetic oligonucleotide
atgttacgtgcgtcaaaaggtatatcgacagctaagatccactttagggctacagaggaa

SEQ ID NO: 104492 - DNA, 60 bp, Artificial
  Synthetic oligonucleotide
aactattttcgtaggctaccggaaattcaagagaactattatggagagtggaaagttacg

SEQ ID NO: 104493 - DNA, 60 bp, Artificial
  Synthetic oligonucleotide
ccgctattaagagatcgaaattcttcgctgaaagtaaaagagaaaatatccaaaaggtac

SEQ ID NO: 104494 - DNA, 60 bp, Artificial
  Synthetic oligonucleotide
gaaaagctacatgcgggcgaatgtaaatgtgttcgtgacaaaatgcagccgtggtttcag

SEQ ID NO: 104495 - DNA, 59 bp, Artificial
  Synthetic oligonucleotide
ccaagcaaggagtgtatattggtcaagatcgtatgatgttcatctcgtcggaaagaaag

SEQ ID NO: 104496 - DNA, 60 bp, Artificial
  Synthetic oligonucleotide
gcgagcttttgattttgtcatgtcacgtgctcgggatgaatgtcaggtatatggcgatgt

SEQ ID NO: 104497 - DNA, 60 bp, Artificial
  Synthetic oligonucleotide
ggtacaagatatgctggatctagtaaaggagagatcgagccagaacgtacaagctccact

SEQ ID NO: 104498 - DNA, 60 bp, Artificial
  Synthetic oligonucleotide
acaaaagtgcgaaaatgttgtattcattgcccgtattaagagaaatgagttggacacaat

SEQ ID NO: 104499 - DNA, 60 bp, Artificial
  Synthetic oligonucleotide
gaacatggttatacgatcgtaccgcctgaatcaatgtatagtgccctgctacgtatggca

SEQ ID NO: 104500 - DNA, 60 bp, Artificial
  Synthetic oligonucleotide
aaaattttgttatgcaagcttatcgtgaagcagaggaacatggttatacgatcgtaccgc

SEQ ID NO: 104501 - DNA, 60 bp, Artificial
  Synthetic oligonucleotide
ggctatggacgtgcttggataaagaacaaaggcgacgatcctgagaaaatgttgaaaccg

SEQ ID NO: 104502 - DNA, 60 bp, Artificial
  Synthetic oligonucleotide
gcaggtacaatcatacaagaggaattggctttgaaagccccgagattattaactgtcgaa

SEQ ID NO: 104503 - DNA, 60 bp, Artificial
  Synthetic oligonucleotide
gggatggcagtgacctagctaaagtatcgacccatttatcgggtgaaaacactacgctcg

SEQ ID NO: 104504 - DNA, 60 bp, Artificial
  Synthetic oligonucleotide
ggcgatgtagcgttaaagcactgggtggcacttttaatagaactctcaagcactgaaaac

SEQ ID NO: 104505 - DNA, 60 bp, Artificial
  Synthetic oligonucleotide
gaatgtcaggtatatggcgatgtagcgttaaagcactgggtggcacttttaatagaactc

SEQ ID NO: 104506 - DNA, 60 bp, Artificial
  Synthetic oligonucleotide
ggctaagacaacctttttgccattctccgctgaaaaaacgcagacacacgccaagcaagg

SEQ ID NO: 104507 - DNA, 60 bp, Artificial
  Synthetic oligonucleotide
cgaacaaacgtcgaaagaaaagaagtggatgataatgaattcaaccctcacaaaagtgcg

SEQ ID NO: 104508 - DNA, 60 bp, Artificial
  Synthetic oligonucleotide
gggctacagaggaacacaagcgacaagtacagcgtgtaaggatgggatcgaaagcgttga

SEQ ID NO: 104509 - DNA, 60 bp, Artificial
  Synthetic oligonucleotide
ggatgggatcgaaagcgttgaaaagacggcagtatcggagtttatgtgccaatttgcgat

SEQ ID NO: 104510 - DNA, 60 bp, Artificial
  Synthetic oligonucleotide
gcgttgaaaagacggcagtatcggagtttatgtgccaatttgcgatcgttatcaggaacg

SEQ ID NO: 104511 - DNA, 60 bp, Artificial
  Synthetic oligonucleotide
cgttatcaggaacgattatcgagcagcagtttctgtgaattcactgtcgtcaaagcggag

SEQ ID NO: 104512 - DNA, 60 bp, Artificial
  Synthetic oligonucleotide
tatcacacgtcatcctggcttcttacatgctatcaatacagacattaactggctatggac

SEQ ID NO: 104513 - DNA, 60 bp, Artificial
  Synthetic oligonucleotide
ttaatcctacggaaatatcacacgtcatcctggcttcttacatgctatcaatacagacat

SEQ ID NO: 104514 - DNA, 60 bp, Artificial
  Synthetic oligonucleotide
ctcactcaaaatgctgctgctcgaattctacctggaatacatttcaaccagaatgaaggg

SEQ ID NO: 104515 - DNA, 60 bp, Artificial
  Synthetic oligonucleotide
atggaaaccatttttgaaactattgctttattcgggcatgaagcttccccggctaagaca

SEQ ID NO: 104516 - DNA, 60 bp, Artificial
  Synthetic oligonucleotide
acgtatggcaaaaaatacatcatcaggaatgtcaacaagtgttgaagtcccaaaaactta

SEQ ID NO: 104517 - DNA, 60 bp, Artificial
  Synthetic oligonucleotide
aaagattcggcgagccgtttcatcagaatactagggatttatcacaggttaaagacgaag

SEQ ID NO: 104518 - DNA, 54 bp, Artificial
  Synthetic oligonucleotide
tgttggggcgtggcatcggatgaaattatcgtattaaagtcgcatggaggagat

SEQ ID NO: 104519 - DNA, 60 bp, Artificial
  Synthetic oligonucleotide
gcgagcgaaggttcaaatgctgccactacaaggttttggtccaaccgagatatctgggac

SEQ ID NO: 104520 - DNA, 60 bp, Artificial
  Synthetic oligonucleotide
tgcgttatttaggactaaagaagaaaggattactcattatgtatttgcaaagaaaacttt

SEQ ID NO: 104521 - DNA, 50 bp, Artificial
  Synthetic oligonucleotide
gggtacggaaaaggacgattagtcggttctttctggaatggacgaagaca

SEQ ID NO: 104522 - DNA, 60 bp, Artificial
  Synthetic oligonucleotide
atttagatgagcaggacagagtaccaacggaagattcacctttcagattttcgccacctg

SEQ ID NO: 104523 - DNA, 60 bp, Artificial
  Synthetic oligonucleotide
cactgaaaactttacgcctttgggattgcaggttatagctagattcattcaaagattcgg

SEQ ID NO: 104524 - DNA, 60 bp, Artificial
  Synthetic oligonucleotide
ggatggatatacattgtgtgctttacgacaccccctaacactatatttgccagtggaatg

SEQ ID NO: 104525 - DNA, 57 bp, Artificial
  Synthetic oligonucleotide
cagtggaatggaacggttatggggcacatccaagcgctttaaacgtagttatgacgc

SEQ ID NO: 104526 - DNA, 60 bp, Artificial
  Synthetic oligonucleotide
gatcaacatatgaccccagataattttcgattaggtatgatgaatggaatgcgtagagct

SEQ ID NO: 104527 - DNA, 60 bp, Artificial
  Synthetic oligonucleotide
tcgaagttggcgcgacgtccggtctctactgtattgcaacatccagaggcgcgagcgaag

SEQ ID NO: 104528 - DNA, 60 bp, Artificial
  Synthetic oligonucleotide
tatttttcacagacgggaggatcaacaagaccgaatgcgagagaaattggtggcaaggta

SEQ ID NO: 104529 - DNA, 60 bp, Artificial
  Synthetic oligonucleotide
gacgggaggatcaacaagaccgaatgcgagagaaattggtggcaaggtaatcattgggga

SEQ ID NO: 104530 - DNA, 60 bp, Artificial
  Synthetic oligonucleotide
gattcattcagggacgagctgttgccaatcatgaagatatgcacaagtgcaatgcccagc

SEQ ID NO: 104531 - DNA, 60 bp, Artificial
  Synthetic oligonucleotide
agaaatacggctgaccaaagtatatttacgttagctttagactattcggaatatgatcaa

SEQ ID NO: 104532 - DNA, 60 bp, Artificial
  Synthetic oligonucleotide
acagaactataaaataaacagctttctacaaccagatgggacatatgtgcgagcttttga

SEQ ID NO: 104533 - DNA, 60 bp, Artificial
  Synthetic oligonucleotide
atacagacattaactggctatggacgtgcttggataaagaacaaaggcgacgatcctgag

SEQ ID NO: 104534 - DNA, 60 bp, Artificial
  Synthetic oligonucleotide
gacgggcgaggagaggttgttgttcacggaaggagacgagacgcatatgttacattccca

SEQ ID NO: 104535 - DNA, 60 bp, Artificial
  Synthetic oligonucleotide
ccgatttcgcgagttacttcccagacgtgttagagggtgacgacgggcgaggagaggttg

SEQ ID NO: 104536 - DNA, 53 bp, Artificial
  Synthetic oligonucleotide
tgagatgcgtggtttccgtctttcccctgacgcctatcgtgatctgcttggtg

SEQ ID NO: 104537 - DNA, 60 bp, Artificial
  Synthetic oligonucleotide
tacattcccattcggtttcgttgctccataccgtgtgtacactcagtcgccggttcggat

SEQ ID NO: 104538 - DNA, 60 bp, Artificial
  Synthetic oligonucleotide
ggcgattgacacgaacgttttgcgtggccggatggaagaccccaacttgcgaaagccaat

SEQ ID NO: 104539 - DNA, 60 bp, Artificial
  Synthetic oligonucleotide
ccgtctctcatgcgatttcactctgctgtactctgctcagtttcgacaagattttcggtc

SEQ ID NO: 104540 - DNA, 60 bp, Artificial
  Synthetic oligonucleotide
ggtcgggaggctgagtcgttcgctattttcatgtacaaccaacagatccgtctctcatgc

SEQ ID NO: 104541 - DNA, 60 bp, Artificial
  Synthetic oligonucleotide
aggatatcggtgggcgacgtgagatgttacgctttcgaaaatatgatgtcgttttagata

SEQ ID NO: 104542 - DNA, 60 bp, Artificial
  Synthetic oligonucleotide
gattcacgttgctagaaccgataccaccacgaaatgccatcgatcccgcaggttggaacc

SEQ ID NO: 104543 - DNA, 60 bp, Artificial
  Synthetic oligonucleotide
ttcacacgatatattgtttcgctgcgtactgcgcctcattgttggttggtgtcacactac

SEQ ID NO: 104544 - DNA, 60 bp, Artificial
  Synthetic oligonucleotide
ttcggtctatcgttgaaggattagccgcatccgtactgcgagcaacagtcgtgggaacac

SEQ ID NO: 104545 - DNA, 60 bp, Artificial
  Synthetic oligonucleotide
cggttcggattccgaggtttgaaatgacggagattagcgactagtgggatggagacgcgt

SEQ ID NO: 104546 - DNA, 60 bp, Artificial
  Synthetic oligonucleotide
tgcgtatacccggacaagcatccactccgttggccgagaattcgcaagagtatctcgttg

SEQ ID NO: 104547 - DNA, 60 bp, Artificial
  Synthetic oligonucleotide
cctcatggctgattctacacctctcgatccactcaccagcacccctcccaatgacgaaca

SEQ ID NO: 104548 - DNA, 60 bp, Artificial
  Synthetic oligonucleotide
aagccaatattgagcgctgacgccacgggtccacgcattctggtcgacgggtggaacact

SEQ ID NO: 104549 - DNA, 60 bp, Artificial
  Synthetic oligonucleotide
cgagaccactatgagcctcgaaaacttggtacagtgtctgaaggggtgaatctccacgcg

SEQ ID NO: 104550 - DNA, 60 bp, Artificial
  Synthetic oligonucleotide
tacactcgttcggacactctcacaaagcgcgctaactttgagtttctgagtgagatgcgt

SEQ ID NO: 104551 - DNA, 60 bp, Artificial
  Synthetic oligonucleotide
ggaggttatcgctagaaatcatgatcttgactgggttcgagcagaggtacgagaccacta

SEQ ID NO: 104552 - DNA, 60 bp, Artificial
  Synthetic oligonucleotide
ccactgcttgacagggcgccttaatatggcacgacccgatgagtacgcgcgtatcagtgg

SEQ ID NO: 104553 - DNA, 60 bp, Artificial
  Synthetic oligonucleotide
gggaaattcggcctctcgtggtttcttggaaaattatttgatatcatcggtgtgtcgttt

SEQ ID NO: 104554 - DNA, 60 bp, Artificial
  Synthetic oligonucleotide
actcatgtctcgtcacactgaaattggctgctggcgtgttatggcgattgacacgaacgt

SEQ ID NO: 104555 - DNA, 60 bp, Artificial
  Synthetic oligonucleotide
ccctttcttagtcaccatcaagccccagaccgctactcagctcaatacgtctcgcgtttc

SEQ ID NO: 104556 - DNA, 60 bp, Artificial
  Synthetic oligonucleotide
cgcgtttctgggataagactcttttcggctgacgtttcgtggatggacgatgacggtacg

SEQ ID NO: 104557 - DNA, 60 bp, Artificial
  Synthetic oligonucleotide
tgctgcgcgagatttcaaggatatcaggtcgagagtgcaatggcaccactgttcagattg

SEQ ID NO: 104558 - DNA, 60 bp, Artificial
  Synthetic oligonucleotide
gggaatcattcggtcgcatcctcaaagacgacatcttgacagcaaattccatctcggcgg

SEQ ID NO: 104559 - DNA, 60 bp, Artificial
  Synthetic oligonucleotide
cccatcctaccgagcgaaggcctgtacgttgcgcttttctttcatggtgtgtacagtcgg

SEQ ID NO: 104560 - DNA, 60 bp, Artificial
  Synthetic oligonucleotide
cggtacttttgcggagcgttgaacccctcggccacaggtgttgattgggataacgtcagg

SEQ ID NO: 104561 - DNA, 60 bp, Artificial
  Synthetic oligonucleotide
gggatgccatggggatatcgttcgaatggcacaccagtcatgctcgaagaacgcgtcgga

SEQ ID NO: 104562 - DNA, 60 bp, Artificial
  Synthetic oligonucleotide
cgtgaaagttgtcgaacacgtcgccatcgctaccccagagcacattccccatttttatgc

SEQ ID NO: 104563 - DNA, 60 bp, Artificial
  Synthetic oligonucleotide
gacgaacaaacaacctctcaccctgagaagtcagctgaagcgtgggaatcattcggtcgc

SEQ ID NO: 104564 - DNA, 60 bp, Artificial
  Synthetic oligonucleotide
gtcacactaccatatgataacttgccccgcccaggtgccgactggcgatcgtacccctct

SEQ ID NO: 104565 - DNA, 60 bp, Artificial
  Synthetic oligonucleotide
cgcatggcgaactgctctcgacaacttcattcacagtttcggcgaatggtttcacacgat

SEQ ID NO: 104566 - DNA, 60 bp, Artificial
  Synthetic oligonucleotide
ctcgcattcacgccaactcctctttgccgctcaccaccccggcattttctgttcgtcagg

SEQ ID NO: 104567 - DNA, 60 bp, Artificial
  Synthetic oligonucleotide
tgaagaccctgatgcgttagcggctctcaacgttcatggtgcccctcgcgtttacccgac

SEQ ID NO: 104568 - DNA, 60 bp, Artificial
  Synthetic oligonucleotide
cctgattggtacgacatctctacgccacggtcagctgattatggcacgattgacagtcgg

SEQ ID NO: 104569 - DNA, 60 bp, Artificial
  Synthetic oligonucleotide
ttggcattcacctcatggctgattctacacctctcgatccactcaccagcacccctccca

SEQ ID NO: 104570 - DNA, 60 bp, Artificial
  Synthetic oligonucleotide
gacagtcggaagtttgcccacgttctcctcgctacaaagatcgcatttctcatgaacccc

SEQ ID NO: 104571 - DNA, 60 bp, Artificial
  Synthetic oligonucleotide
cgcatttctcatgaaccccctagcttatgagcgcaacagacacgttaaggctgctgtgtt

SEQ ID NO: 104572 - DNA, 60 bp, Artificial
  Synthetic oligonucleotide
gtcctttgatgtgcaacgtgatgcaactcgatattcacgtcagtttaccatgcgtatacc

SEQ ID NO: 104573 - DNA, 60 bp, Artificial
  Synthetic oligonucleotide
catctattgagcgagttgcgcgttgcattgctttggaactcatgcctgattggtacgaca

SEQ ID NO: 104574 - DNA, 60 bp, Artificial
  Synthetic oligonucleotide
gcgagtgaatccatacgatttgtcggacactgtcattcgcgcagacggtatcgaagagat

SEQ ID NO: 104575 - DNA, 60 bp, Artificial
  Synthetic oligonucleotide
gttgcgtcccgacttagatatgccttctggagatgtcttcggcctgtcattcttaaaccc

SEQ ID NO: 104576 - DNA, 60 bp, Artificial
  Synthetic oligonucleotide
ttccgtttgagcagcccaccattaagaaaacatgtcatggactaaacctcatcggtgtgg

SEQ ID NO: 104577 - DNA, 60 bp, Artificial
  Synthetic oligonucleotide
tatctcgttgttcgtcatttaacccccgccttcgcactcatgtcgatgttcgacaagtat

SEQ ID NO: 104578 - DNA, 60 bp, Artificial
  Synthetic oligonucleotide
ctctgtttcataccgccgagcgcgttccttgcaatatgactcccaccatgctgaagaccc

SEQ ID NO: 104579 - DNA, 60 bp, Artificial
  Synthetic oligonucleotide
gtcgtccggccattctcacggtgtatcgtttgttagttgacgcggtcttttctcccgaga

SEQ ID NO: 104580 - DNA, 60 bp, Artificial
  Synthetic oligonucleotide
cccacgctgacaaatccgacccgaataggacagatgtgtcgtccggccattctcacggtg

SEQ ID NO: 104581 - DNA, 60 bp, Artificial
  Synthetic oligonucleotide
gacgatttgcacgaggatcccagagtgtacgccccgatgataggtttcaccacgatgggc

SEQ ID NO: 104582 - DNA, 60 bp, Artificial
  Synthetic oligonucleotide
taggtttcctcggtgtcgatcgcggtttgggtaggacctccaacatgttggacgatttgc

SEQ ID NO: 104583 - DNA, 60 bp, Artificial
  Synthetic oligonucleotide
ctcgtcgacacgtatcgctctgtactgcaggtcggacatgtatgcggcgagacaatcgac

SEQ ID NO: 104584 - DNA, 60 bp, Artificial
  Synthetic oligonucleotide
cgatttgcatgtttcacattgacggcgaagtatgagatgaggctttcgtgcggccatagc

SEQ ID NO: 104585 - DNA, 60 bp, Artificial
  Synthetic oligonucleotide
gcatacgtgcgccaagactggttatggaggagttgatggagaagaactggggccaatatc

SEQ ID NO: 104586 - DNA, 60 bp, Artificial
  Synthetic oligonucleotide
gtccatcccaaatgaattcatcaagttgttttaccagcgcgtcaagagtgttcacgccaa

SEQ ID NO: 104587 - DNA, 60 bp, Artificial
  Synthetic oligonucleotide
ggatgtggccgatgggttgcgcaacgtatctaggaaactaactatgcataccgttcctgt

SEQ ID NO: 104588 - DNA, 60 bp, Artificial
  Synthetic oligonucleotide
gcgcgtgctttcaagatatcggatgtctacgcacctctcatctcatccacgacgtcaccg

SEQ ID NO: 104589 - DNA, 60 bp, Artificial
  Synthetic oligonucleotide
gctgacgcgaatgacgtttcatatcaagatcatgactatgtgttggatcagttacagtac

SEQ ID NO: 104590 - DNA, 60 bp, Artificial
  Synthetic oligonucleotide
gaggtgggcgagcaaatggagcctacgtttgagcaggcggttatggagatatacaaaggg

SEQ ID NO: 104591 - DNA, 60 bp, Artificial
  Synthetic oligonucleotide
tgttgaaccggttgtcaacatcgtgaatttcattagtgcacgcttcatagctgacagctc

SEQ ID NO: 104592 - DNA, 60 bp, Artificial
  Synthetic oligonucleotide
ctacagggaaagatgggtacaggaactggttggataagctagttggtcataattacccgg

SEQ ID NO: 104593 - DNA, 60 bp, Artificial
  Synthetic oligonucleotide
ctgagactatgttaaagatattgactattgatggaactacagggaaagatgggtacagga

SEQ ID NO: 104594 - DNA, 60 bp, Artificial
  Synthetic oligonucleotide
ggacgagtacgccacattagctcgagagatctcaaactctctgaccttggtgaaagcagc

SEQ ID NO: 104595 - DNA, 60 bp, Artificial
  Synthetic oligonucleotide
cctcaatcatgccaataacctaaacaaggtaatcaaccgcgtttttgctgacaagccatt

SEQ ID NO: 104596 - DNA, 60 bp, Artificial
  Synthetic oligonucleotide
cagctgaatacttggacgagtacgccacattagctcgagagatctcaaactctctgacct

SEQ ID NO: 104597 - DNA, 60 bp, Artificial
  Synthetic oligonucleotide
caggtcggaaggttcaggaatgtatcaaacaatgcagttggtgcagcattggccgctttc

SEQ ID NO: 104598 - DNA, 60 bp, Artificial
  Synthetic oligonucleotide
ctatcttacgcttcataggtgtggttgccgacgttgcgtagtggacaaatagaacccgac

SEQ ID NO: 104599 - DNA, 60 bp, Artificial
  Synthetic oligonucleotide
tggtggaatactatcttacgcttcataggtgtggttgccgacgttgcgtagtggacaaat

SEQ ID NO: 104600 - DNA, 60 bp, Artificial
  Synthetic oligonucleotide
cgagtctaaaatgaatgtgaactatagactgtacatcaagactccagcttgcttgttacc

SEQ ID NO: 104601 - DNA, 60 bp, Artificial
  Synthetic oligonucleotide
gcactgaatagacaacgtgcatactatgataggccagagttgaccattgctgaaaacaga

SEQ ID NO: 104602 - DNA, 60 bp, Artificial
  Synthetic oligonucleotide
gagttgaccattgctgaaaacagaacgctactctcacagtctatagtatatccggacgtc

SEQ ID NO: 104603 - DNA, 60 bp, Artificial
  Synthetic oligonucleotide
gggttggccactcgttgaaaggtataatgccattgaagtcgatatgtctgtagagccatt

SEQ ID NO: 104604 - DNA, 60 bp, Artificial
  Synthetic oligonucleotide
cgttgaaaggtataatgccattgaagtcgatatgtctgtagagccattgaggtcaccagg

SEQ ID NO: 104605 - DNA, 60 bp, Artificial
  Synthetic oligonucleotide
gatactgccttcagaccatggccgtctttctgaccaacacaacatatgatattgtaaaca

SEQ ID NO: 104606 - DNA, 60 bp, Artificial
  Synthetic oligonucleotide
tatgaagtgaagcgtggcacacacgaattgatcaaagtacctaccatcccgcacaactta

SEQ ID NO: 104607 - DNA, 50 bp, Artificial
  Synthetic oligonucleotide
gttgtgccgacgaagacttttgccacagaacttcagttcggtgtcacctc

SEQ ID NO: 104608 - DNA, 60 bp, Artificial
  Synthetic oligonucleotide
tttatggagctgttgtcgcagtgtcaaagaatgtgaactcaagcgtaacgtatgaagtga

SEQ ID NO: 104609 - DNA, 60 bp, Artificial
  Synthetic oligonucleotide
caccagtttcatcgatactagaaagtactgtactgatggtctgtcgccacgtgaaattca

SEQ ID NO: 104610 - DNA, 60 bp, Artificial
  Synthetic oligonucleotide
gctgacgaatagactaacgacagcaaatgcttcatcagttcgagccattacagttctgac

SEQ ID NO: 104611 - DNA, 60 bp, Artificial
  Synthetic oligonucleotide
tcgagccattacagttctgacatgtatgtttaaacaattcaggattggtatgacatattc

SEQ ID NO: 104612 - DNA, 60 bp, Artificial
  Synthetic oligonucleotide
ggcattgacaaaccttttgttttagatgccggatccaactatttcactgacaccagtttc

SEQ ID NO: 104613 - DNA, 60 bp, Artificial
  Synthetic oligonucleotide
tcgcagtgtcaaagaatgtgaactcaagcgtaacgtatgaagtgaagcgtggcacacacg

SEQ ID NO: 104614 - DNA, 60 bp, Artificial
  Synthetic oligonucleotide
gattagcgagggatttatcttgtatgacgcatacttcaatttcacttatgacattatgac

SEQ ID NO: 104615 - DNA, 60 bp, Artificial
  Synthetic oligonucleotide
gatactgttgacgttcttaaaacgaaactgaggaatcagggttggccactcgttgaaagg

SEQ ID NO: 104616 - DNA, 60 bp, Artificial
  Synthetic oligonucleotide
cgagacagtcctttctgcatgtctctacctaggactatcatgggtaatgaagttagaagg

SEQ ID NO: 104617 - DNA, 60 bp, Artificial
  Synthetic oligonucleotide
ggatttcatatagtgtattcagtatgatggaggatattgatgaagtgattagcgagggat

SEQ ID NO: 104618 - DNA, 60 bp, Artificial
  Synthetic oligonucleotide
gcacgcttcatagctgacagctcttactttggttacaccaacgagatcatgataatgccg

SEQ ID NO: 104619 - DNA, 60 bp, Artificial
  Synthetic oligonucleotide
agcacagataaatgctgatgaagaattcacaggtgtaattgataaggagtcagctgaata

SEQ ID NO: 104620 - DNA, 60 bp, Artificial
  Synthetic oligonucleotide
ccacatcactgtcccagttgatgatagattcggtttccgagacagtcctttctgcatgtc

SEQ ID NO: 104621 - DNA, 60 bp, Artificial
  Synthetic oligonucleotide
cacatgccatcttcacctacgcacaaagtcaatggagtaaaaacatcatcaggctggacg

SEQ ID NO: 104622 - DNA, 57 bp, Artificial
  Synthetic oligonucleotide
tcgaccctttgacagtgaagaataatcaagatgttgtggacaagttgtacgctactc

SEQ ID NO: 104623 - DNA, 60 bp, Artificial
  Synthetic oligonucleotide
aattgtttacgatggagggcagagctctaagcttgccgaggttgttgatcagaccactga

SEQ ID NO: 104624 - DNA, 60 bp, Artificial
  Synthetic oligonucleotide
tattcaaacccaaaacagcgtggagataagggagaaattgtttacgatggagggcagagc

SEQ ID NO: 104625 - DNA, 60 bp, Artificial
  Synthetic oligonucleotide
caactgatcaaaacatattcaaacccaaaacagcgtggagataagggagaaattgtttac

SEQ ID NO: 104626 - DNA, 60 bp, Artificial
  Synthetic oligonucleotide
agtgaaaatgaaaagcaaacaagtaacgttcaagctcaagatttcaaaactgcgattcaa

SEQ ID NO: 104627 - DNA, 60 bp, Artificial
  Synthetic oligonucleotide
tacagcaaattttatatcaaatgcctaggaaaaaggagcaggccagcaagagtgaaaatg

SEQ ID NO: 104628 - DNA, 51 bp, Artificial
  Synthetic oligonucleotide
gtataaattttgtatccgatagtagcacatagaatcacaatcacatccccg

SEQ ID NO: 104629 - DNA, 60 bp, Artificial
  Synthetic oligonucleotide
gtgaaattcaaaaagcactgaatagacaacgtgcatactatgataggccagagttgacca

SEQ ID NO: 104630 - DNA, 59 bp, Artificial
  Synthetic oligonucleotide
aatgttccagttgacgctcgtactttgcaatcagctacatctgccttggccgctgatac

SEQ ID NO: 104631 - DNA, 60 bp, Artificial
  Synthetic oligonucleotide
cagggttcattgttgccattagtcgacgcgaatttgaaggaggcatcctcatattacttc

SEQ ID NO: 104632 - DNA, 60 bp, Artificial
  Synthetic oligonucleotide
ccattgaggtcaccaggtcaggttggtaggtattacaatccatttaatatcgatccgctg

SEQ ID NO: 104633 - DNA, 60 bp, Artificial
  Synthetic oligonucleotide
ctggaaagggtatagcatattagtatcacggtacagaagcctaattcctaatgaactatt

SEQ ID NO: 104634 - DNA, 60 bp, Artificial
  Synthetic oligonucleotide
gcagcattggccgctttcttgagagcatgtcgtgataagacgagtgctaactggaaaggg

SEQ ID NO: 104635 - DNA, 60 bp, Artificial
  Synthetic oligonucleotide
ccggacgtcgatggcaatgatgtctctgtaatattcagtggagctatgtcacatgccatc

SEQ ID NO: 104636 - DNA, 60 bp, Artificial
  Synthetic oligonucleotide
ccattgctgaaaacagaacgctactctcacagtctatagtatatccggacgtcgatggca

SEQ ID NO: 104637 - DNA, 60 bp, Artificial
  Synthetic oligonucleotide
aggctggacgactacatccgcgaaataacacttacagttccaaaacactatagaccaaga

SEQ ID NO: 104638 - DNA, 60 bp, Artificial
  Synthetic oligonucleotide
ctatttgagtcccttagaaacattagcggtgaatacaacattaatccgcaagatgagcac

SEQ ID NO: 104639 - DNA, 60 bp, Artificial
  Synthetic oligonucleotide
tagaccaagacgtttcaaggaaatagagcatacacatggttacgtttatcgtgaattgaa

SEQ ID NO: 104640 - DNA, 60 bp, Artificial
  Synthetic oligonucleotide
gtgaattgaatcagggttcattgttgccattagtcgacgcgaatttgaaggaggcatcct

SEQ ID NO: 104641 - DNA, 60 bp, Artificial
  Synthetic oligonucleotide
tacatgttaatatcttcgaccttgtacctacgggggtagtttgcactgttctgcggaccg

SEQ ID NO: 104642 - DNA, 60 bp, Artificial
  Synthetic oligonucleotide
ctgcggaccggattggcacggcttgttccaaaggcgtagtctcggtgtcttacaccactg

SEQ ID NO: 104643 - DNA, 60 bp, Artificial
  Synthetic oligonucleotide
gtcgcgttctactcatagcagaagatcagggtgtgccgcttaatgaggctgttcatcggc

SEQ ID NO: 104644 - DNA, 60 bp, Artificial
  Synthetic oligonucleotide
gccgagttcttccaacgacgatctcgctaaattttacctccaaccatcgagctcgcccaa

SEQ ID NO: 104645 - DNA, 60 bp, Artificial
  Synthetic oligonucleotide
tcgaaattggacggaaggcttttcgctaagcaagattctggtcggtcgtacgtacatggt

SEQ ID NO: 104646 - DNA, 60 bp, Artificial
  Synthetic oligonucleotide
aattggacggaaggcttttcgctaagcaagattctggtcggtcgtacgtacatggtagga

SEQ ID NO: 104647 - DNA, 60 bp, Artificial
  Synthetic oligonucleotide
cagaacgttgatgaaacaatggctcggttgctcactgcgattccgtacatgtctgttatg

SEQ ID NO: 104648 - DNA, 60 bp, Artificial
  Synthetic oligonucleotide
acaatggctcggttgctcactgcgattccgtacatgtctgttatggttgcggtgtcccgc

SEQ ID NO: 104649 - DNA, 56 bp, Artificial
  Synthetic oligonucleotide
ttaatccaactgtccaagaaacccctgacagtcctacacatgctctcctgggatgg

SEQ ID NO: 104650 - DNA, 60 bp, Artificial
  Synthetic oligonucleotide
cggacgacgatatatggtctcagttcaccgagtggttgtttggtgttgttcagaacgttg

SEQ ID NO: 104651 - DNA, 60 bp, Artificial
  Synthetic oligonucleotide
ccggttggagtgttcaatgacgcaattgtattttcaagtataacggtccccgattgcacg

SEQ ID NO: 104652 - DNA, 60 bp, Artificial
  Synthetic oligonucleotide
atatctacgtagaactttccatgcgctattacgcagactgtcttttgggcactcatgtta

SEQ ID NO: 104653 - DNA, 60 bp, Artificial
  Synthetic oligonucleotide
ccccgattgcacgaaatatctacgtagaactttccatgcgctattacgcagactgtcttt

SEQ ID NO: 104654 - DNA, 60 bp, Artificial
  Synthetic oligonucleotide
gactgtcttttgggcactcatgttattcatgttctaatgtattgcaactgtccctccccc

SEQ ID NO: 104655 - DNA, 60 bp, Artificial
  Synthetic oligonucleotide
ggtattcgaaaaagcaatggacgatattgtcagggaccttgctgtagtgcgttatgccat

SEQ ID NO: 104656 - DNA, 60 bp, Artificial
  Synthetic oligonucleotide
tccctccccccctggctctctgtcctcgcgtctggatggaaaagatatgtgccgagttct

SEQ ID NO: 104657 - DNA, 60 bp, Artificial
  Synthetic oligonucleotide
tcaagaatacgtgtcttcggatataacggtcattacatctcccactgctcaggatatcgc

SEQ ID NO: 104658 - DNA, 60 bp, Artificial
  Synthetic oligonucleotide
gttcgacatcaccgtcacaataaaatcctggagttcggctatgccgatgtcgcaacaacg

SEQ ID NO: 104659 - DNA, 60 bp, Artificial
  Synthetic oligonucleotide
cctggctctctgtcctcgcgtctggatggaaaagatatgtgccgagttcttccaacgacg

SEQ ID NO: 104660 - DNA, 60 bp, Artificial
  Synthetic oligonucleotide
caatggacgatattgtcagggaccttgctgtagtgcgttatgccattccagaggttgacc

SEQ ID NO: 104661 - DNA, 60 bp, Artificial
  Synthetic oligonucleotide
tagcgagttgatgttggctgtgtactacgatcgaatacatgttaatatcttcgaccttgt

SEQ ID NO: 104662 - DNA, 60 bp, Artificial
  Synthetic oligonucleotide
acacagtaacgcaattagcgagttgatgttggctgtgtactacgatcgaatacatgttaa

SEQ ID NO: 104663 - DNA, 60 bp, Artificial
  Synthetic oligonucleotide
cggcgatagactcatacattggcgtattgcttcggggtcaacacagtaacgcaattagcg

SEQ ID NO: 104664 - DNA, 60 bp, Artificial
  Synthetic oligonucleotide
cagttgtctacggcgatagactcatacattggcgtattgcttcggggtcaacacagtaac

SEQ ID NO: 104665 - DNA, 60 bp, Artificial
  Synthetic oligonucleotide
gctcagaggaagccacgcaggtgttaggcgctaactatatgtttcagttgtctacggcga

SEQ ID NO: 104666 - DNA, 60 bp, Artificial
  Synthetic oligonucleotide
cacactgctcagaggaagccacgcaggtgttaggcgctaactatatgtttcagttgtcta

SEQ ID NO: 104667 - DNA, 60 bp, Artificial
  Synthetic oligonucleotide
gaattaacgtcgaaatataagtacgccgatttcgaacgtgttgtccgatcgcacatcgcg

SEQ ID NO: 104668 - DNA, 60 bp, Artificial
  Synthetic oligonucleotide
ccagaggttgaccaccccgctctgatcgcctttggtcgtgtatatgatgaattaacgtcg

SEQ ID NO: 104669 - DNA, 60 bp, Artificial
  Synthetic oligonucleotide
gttatgccattccagaggttgaccaccccgctctgatcgcctttggtcgtgtatatgatg

SEQ ID NO: 104670 - DNA, 60 bp, Artificial
  Synthetic oligonucleotide
aaagatcttcacgctagcaagaggaagcagaccattactgcacgcgtatttccaccggta

SEQ ID NO: 104671 - DNA, 60 bp, Artificial
  Synthetic oligonucleotide
gagcagacatccattcgcacgcgtcgccagcacaagaaagatcttcacgctagcaagagg

SEQ ID NO: 104672 - DNA, 60 bp, Artificial
  Synthetic oligonucleotide
tccaccggtatatctgttcgacatcaccgtcacaataaaatcctggagttcggctatgcc

SEQ ID NO: 104673 - DNA, 60 bp, Artificial
  Synthetic oligonucleotide
gctaggtctattcgtgcaaacaaacacgtcgtgtgcgctactttaccggttggagtgttc

SEQ ID NO: 104674 - DNA, 60 bp, Artificial
  Synthetic oligonucleotide
gggcgctcagtttaatgtcgcgagggacttgactcacttcaacatcataaagcaacgata

SEQ ID NO: 104675 - DNA, 60 bp, Artificial
  Synthetic oligonucleotide
gctcgcccaaccaaatcgtcactaatgtccaagacttacaagatttcgttaccaaccagc

SEQ ID NO: 104676 - DNA, 60 bp, Artificial
  Synthetic oligonucleotide
agcaacgatacgttgagcagacatccattcgcacgcgtcgccagcacaagaaagatcttc

SEQ ID NO: 104677 - DNA, 60 bp, Artificial
  Synthetic oligonucleotide
tgtcgcgagggacttgactcacttcaacatcataaagcaacgatacgttgagcagacatc

SEQ ID NO: 104678 - DNA, 60 bp, Artificial
  Synthetic oligonucleotide
caccgccgatgttacacggtacgttgatgtcgtctcaaactaccggaaaaccgcagtatc

SEQ ID NO: 104679 - DNA, 60 bp, Artificial
  Synthetic oligonucleotide
ccggaaaaccgcagtatcttcgcgctgttcctcacatattcatgattgattcaatggata

SEQ ID NO: 104680 - DNA, 52 bp, Artificial
  Synthetic oligonucleotide
acatatgtcacactaccacttccgactgatctgtaccgggccttatgctgtg

SEQ ID NO: 104681 - DNA, 60 bp, Artificial
  Synthetic oligonucleotide
cgattgtacaccgccgatgttacacggtacgttgatgtcgtctcaaactaccggaaaacc

SEQ ID NO: 104682 - DNA, 60 bp, Artificial
  Synthetic oligonucleotide
cggctatgccgatgtcgcaacaacgccgtctatctcgcgtgtattctgacttaatccaac

SEQ ID NO: 104683 - DNA, 60 bp, Artificial
  Synthetic oligonucleotide
ttcggatataacggtcattacatctcccactgctcaggatatcgctaggtctattcgtgc

SEQ ID NO: 104684 - DNA, 60 bp, Artificial
  Synthetic oligonucleotide
tcaatggataagttttctacctcgcatgcaacgctgctatcgaagtgtcctcaagaatac

SEQ ID NO: 104685 - DNA, 60 bp, Artificial
  Synthetic oligonucleotide
gttttctacctcgcatgcaacgctgctatcgaagtgtcctcaagaatacgtgtcttcgga

SEQ ID NO: 104686 - DNA, 60 bp, Artificial
  Synthetic oligonucleotide
gttcatcggcatttctcgttaacgtatcaacaacgcgacaccgctccgacggtattcgaa

SEQ ID NO: 104687 - DNA, 60 bp, Artificial
  Synthetic oligonucleotide
aggatatcgctaggtctattcgtgcaaacaaacacgtcgtgtgcgctactttaccggttg

SEQ ID NO: 104688 - DNA, 60 bp, Artificial
  Synthetic oligonucleotide
gctagcaagaggaagcagaccattactgcacgcgtatttccaccggtatatctgttcgac

SEQ ID NO: 104689 - DNA, 60 bp, Artificial
  Synthetic oligonucleotide
cgacgtgatctttccttcagttcgacgtacattcactcatgcaacatatgtcacactacc

SEQ ID NO: 104690 - DNA, 60 bp, Artificial
  Synthetic oligonucleotide
ttctatccgacgtgatctttccttcagttcgacgtacattcactcatgcaacatatgtca

SEQ ID NO: 104691 - DNA, 60 bp, Artificial
  Synthetic oligonucleotide
tactgtgtactaaggacgaggtattggctgagcaaactatatttaaactggacgcccctg

SEQ ID NO: 104692 - DNA, 60 bp, Artificial
  Synthetic oligonucleotide
ctgccaaatgtcaaactgttattgatgacctgactttgatgaatggaaagcaagcacaag

SEQ ID NO: 104693 - DNA, 60 bp, Artificial
  Synthetic oligonucleotide
tggtgcgaacgtatttctaaggaagcagctgccaaatgtcaaactgttattgatgacctg

SEQ ID NO: 104694 - DNA, 60 bp, Artificial
  Synthetic oligonucleotide
gaggagtgaagtgagacaaggttggtgcgaacgtatttctaaggaagcagctgccaaatg

SEQ ID NO: 104695 - DNA, 60 bp, Artificial
  Synthetic oligonucleotide
cggatgtgaggagagaaatcatggaaaagaggagtgaagtgagacaaggttggtgcgaac

SEQ ID NO: 104696 - DNA, 55 bp, Artificial
  Synthetic oligonucleotide
gctcaatcatgtagcttggatatgtatctgagacaccacacttgcattaatggtc

SEQ ID NO: 104697 - DNA, 60 bp, Artificial
  Synthetic oligonucleotide
gtctcagttgcgtgagttgtctagtgaagttactaggctacagatggagttgagtcgagc

SEQ ID NO: 104698 - DNA, 60 bp, Artificial
  Synthetic oligonucleotide
tgtgtgttggttttgaccccctgtacaccttgtctacacataacggggtgtccttatgtg

SEQ ID NO: 104699 - DNA, 60 bp, Artificial
  Synthetic oligonucleotide
gcgtgacatatcatctcttgccgctactcctggacttcgttcacaatccttcactccgtc

SEQ ID NO: 104700 - DNA, 60 bp, Artificial
  Synthetic oligonucleotide
atacgatgaacatgatggcaggatggctgaccaaaagcagtcgggattgatactgtgtac

SEQ ID NO: 104701 - DNA, 60 bp, Artificial
  Synthetic oligonucleotide
cagcgagtcctctctcaaggatacacatcgctaatgtgctactatcatccttcacggaag

SEQ ID NO: 104702 - DNA, 60 bp, Artificial
  Synthetic oligonucleotide
ttgatgcacacagagcttttcagcgagtcctctctcaaggatacacatcgctaatgtgct

SEQ ID NO: 104703 - DNA, 60 bp, Artificial
  Synthetic oligonucleotide
tccttatgtgccctgctgatggacgaaaaactctctgtgctgaacagtgcgtgtcgtatg

SEQ ID NO: 104704 - DNA, 60 bp, Artificial
  Synthetic oligonucleotide
aaagggataatgaaggctgctgatattcagacaactcatgatgtccatttggcaccaggc

SEQ ID NO: 104705 - DNA, 60 bp, Artificial
  Synthetic oligonucleotide
ccttggagactgcggattatttcaagatttatccaacatacgatgaacatgatggcagga

SEQ ID NO: 104706 - DNA, 60 bp, Artificial
  Synthetic oligonucleotide
atcatgctgctcaaagatcgggacaacgctctgtgcttgatgacctatatgcgaatacgc

SEQ ID NO: 104707 - DNA, 58 bp, Artificial
  Synthetic oligonucleotide
cccctgtacaccttgtctacacataacggggtgtccttatgtgccctgctgatggacg

SEQ ID NO: 104708 - DNA, 60 bp, Artificial
  Synthetic oligonucleotide
gaggggcggttcatgttcatgcagcacaagccacttgcggcggatcaatcgtatttcacc

SEQ ID NO: 104709 - DNA, 60 bp, Artificial
  Synthetic oligonucleotide
cttcacggaagttggcatatggtgaggtgctctttctagaacgatccaatgacgtgacag

SEQ ID NO: 104710 - DNA, 60 bp, Artificial
  Synthetic oligonucleotide
cgcgttgaatcagcgtcaggctaagtctttgcgtattactccctctcttctatcagccac

SEQ ID NO: 104711 - DNA, 60 bp, Artificial
  Synthetic oligonucleotide
tgatttctctgttccaactgatgagttgtaaataatccgtgatgcagtgttgccctaatc

SEQ ID NO: 104712 - DNA, 60 bp, Artificial
  Synthetic oligonucleotide
gacctgactttgatgaatggaaagcaagcacaagagataacagaattacgtgattcggct

SEQ ID NO: 104713 - DNA, 55 bp, Artificial
  Synthetic oligonucleotide
tgagtaccatcacccaaaaccagataacgtatcagcaagagctacaagccttggt

SEQ ID NO: 104714 - DNA, 60 bp, Artificial
  Synthetic oligonucleotide
ggagctaatgctattcgggttagatcatagagggccacagcagctggatgtttctgacgc

SEQ ID NO: 104715 - DNA, 60 bp, Artificial
  Synthetic oligonucleotide
gatgtttctgacgctaaagggataatgaaggctgctgatattcagacaactcatgatgtc

SEQ ID NO: 104716 - DNA, 60 bp, Artificial
  Synthetic oligonucleotide
gcttgcttcaaccagcgtgtccgtcaggactaaagaagcgaaggttgctgatgaggagct

SEQ ID NO: 104717 - DNA, 55 bp, Artificial
  Synthetic oligonucleotide
ctctatctctggagtgatttcgccagcccatgcctatctactagagtgtctaccc

SEQ ID NO: 104718 - DNA, 60 bp, Artificial
  Synthetic oligonucleotide
tgttgcttcacctgagtctttccaggcttccgacgtcgcgaagtttgccataaagccagg

SEQ ID NO: 104719 - DNA, 60 bp, Artificial
  Synthetic oligonucleotide
ccgtctgtggatatgtctcaatcgcgtgaattcctcacaaaggcaattgagcaagggtcc

SEQ ID NO: 104720 - DNA, 60 bp, Artificial
  Synthetic oligonucleotide
cgttgttgccagatttactaaggtatttatagaggacgtggctcccgggcatcatgctgc

SEQ ID NO: 104721 - DNA, 60 bp, Artificial
  Synthetic oligonucleotide
tactaaggtatttatagaggacgtggctcccgggcatcatgctgctcaaagatcgggaca

SEQ ID NO: 104722 - DNA, 60 bp, Artificial
  Synthetic oligonucleotide
tgctactatcatccttcacggaagttggcatatggtgaggtgctctttctagaacgatcc

SEQ ID NO: 104723 - DNA, 60 bp, Artificial
  Synthetic oligonucleotide
cgtgacagatgggatcaagcttcagttggacgcatctagacagtgtcatgaatgtcctgt

SEQ ID NO: 104724 - DNA, 55 bp, Artificial
  Synthetic oligonucleotide
acgcatctagacagtgtcatgaatgtcctgtgttgcagcagaaagtggttgagtt

SEQ ID NO: 104725 - DNA, 60 bp, Artificial
  Synthetic oligonucleotide
agaacgatccaatgacgtgacagatgggatcaagcttcagttggacgcatctagacagtg

SEQ ID NO: 104726 - DNA, 60 bp, Artificial
  Synthetic oligonucleotide
catggcaggatggctgaccaaaagcagtcgggattgatactgtgtactaaggacgaggta

SEQ ID NO: 104727 - DNA, 60 bp, Artificial
  Synthetic oligonucleotide
cagaagtcaatccagtcagaccctaccccagtggcgctgcaaccattgttgtctcagttg

SEQ ID NO: 104728 - DNA, 60 bp, Artificial
  Synthetic oligonucleotide
ccagtcagaccctaccccagtggcgctgcaaccattgttgtctcagttgcgtgagttgtc

SEQ ID NO: 104729 - DNA, 60 bp, Artificial
  Synthetic oligonucleotide
ggacgaggtattggctgagcaaactatatttaaactggacgcccctgatgacaagactgt

SEQ ID NO: 104730 - DNA, 60 bp, Artificial
  Synthetic oligonucleotide
gacgcccctgatgacaagactgttcatctgttggatcgcgatgacgaccacgttgttgcc

SEQ ID NO: 104731 - DNA, 60 bp, Artificial
  Synthetic oligonucleotide
gtccatttggcaccaggcgttggtaatattgatcctgaaatctataacgaggggcggttc

SEQ ID NO: 104732 - DNA, 60 bp, Artificial
  Synthetic oligonucleotide
cccataatggctgacataagactcgacatagcgcccgatcttatccataatggtgtaccc

SEQ ID NO: 104733 - DNA, 60 bp, Artificial
  Synthetic oligonucleotide
tcagacgcgatatttggaaaacgttcttcaaatatagttcttcagactattgagggtatt

SEQ ID NO: 104734 - DNA, 60 bp, Artificial
  Synthetic oligonucleotide
gtaggatcggttgatacacttcagttccaaacaactttttctacgtataaagcatcaggt

SEQ ID NO: 104735 - DNA, 60 bp, Artificial
  Synthetic oligonucleotide
ctatacccccagaagaatatgatatattcatagatttagatgagacaatagagccgaagg

SEQ ID NO: 104736 - DNA, 60 bp, Artificial
  Synthetic oligonucleotide
ttattggagtttaaaccatataaattgaccgtgcagcctttaaccgctgatacttcgaag

SEQ ID NO: 104737 - DNA, 60 bp, Artificial
  Synthetic oligonucleotide
cgcttgtgatacttatttacacaatcatttattctttgatgactgggatgaacaactgct

SEQ ID NO: 104738 - DNA, 60 bp, Artificial
  Synthetic oligonucleotide
cggatttcaatgtgcacacaacgaccacatttagacggaattgatcgtttgtactcacaa

SEQ ID NO: 104739 - DNA, 60 bp, Artificial
  Synthetic oligonucleotide
ccgatacagatggcagtggcgcgggcgaaaatggatccacggaaatgtaatattggatat

SEQ ID NO: 104740 - DNA, 60 bp, Artificial
  Synthetic oligonucleotide
agcatcaggtttaacaaaaagagaaacgagtgaaatcgtgatgccaacatttattgataa

SEQ ID NO: 104741 - DNA, 60 bp, Artificial
  Synthetic oligonucleotide
tattggatatgagtatgtaagtaatggtttttattcgttacaagtgactcatagtaaaat

SEQ ID NO: 104742 - DNA, 60 bp, Artificial
  Synthetic oligonucleotide
taaagaagaatgccctgcagacagtttccgttgaccggatttcaatgtgcacacaacgac

SEQ ID NO: 104743 - DNA, 60 bp, Artificial
  Synthetic oligonucleotide
tttccatataagacgtttgtcttcgcttcccgcagcatttctagtgatactgcgtgctgc

SEQ ID NO: 104744 - DNA, 60 bp, Artificial
  Synthetic oligonucleotide
ccggcatcgaaatgcgcatgaacttgtaccccagtatattcaaaaggacattaggtggca

SEQ ID NO: 104745 - DNA, 60 bp, Artificial
  Synthetic oligonucleotide
agttggtaggtattccggcatcgaaatgcgcatgaacttgtaccccagtatattcaaaag

SEQ ID NO: 104746 - DNA, 60 bp, Artificial
  Synthetic oligonucleotide
ctcacaaatgctggctcttaagttgtttgatgtgaaaatgggcaaaatttcaaaggctag

SEQ ID NO: 104747 - DNA, 60 bp, Artificial
  Synthetic oligonucleotide
gcttatatatggaaaacgtgagccgggatgtatgatggagaaaatcgtgttagtgaacta

SEQ ID NO: 104748 - DNA, 60 bp, Artificial
  Synthetic oligonucleotide
aaagaatgaagcttatatatggaaaacgtgagccgggatgtatgatggagaaaatcgtgt

SEQ ID NO: 104749 - DNA, 60 bp, Artificial
  Synthetic oligonucleotide
ggtcgaccaaccagtgacttcgcataatgcatactggcttaaatggtggaatgagcatac

SEQ ID NO: 104750 - DNA, 60 bp, Artificial
  Synthetic oligonucleotide
gttttcgagaccacagatacaccagacacctttaagatggtcgaccaaccagtgacttcg

SEQ ID NO: 104751 - DNA, 60 bp, Artificial
  Synthetic oligonucleotide
catcctataaatgatgttttcgagaccacagatacaccagacacctttaagatggtcgac

SEQ ID NO: 104752 - DNA, 60 bp, Artificial
  Synthetic oligonucleotide
ctcgtttgccaattcgtgttcgtggaattatgtcagcccttgttcatcctataaatgatg

SEQ ID NO: 104753 - DNA, 60 bp, Artificial
  Synthetic oligonucleotide
tagtcgaatacgtcgatccgtatgatggtttggatcaagaagcttggacggctgcatggg

SEQ ID NO: 104754 - DNA, 60 bp, Artificial
  Synthetic oligonucleotide
gattgatgaagaggcgacgcaacaaatcgaagacgataaaattaagtatggtgagaaggc

SEQ ID NO: 104755 - DNA, 60 bp, Artificial
  Synthetic oligonucleotide
gctggcgcggagtagtatgctaactgctgcattaaagcgaatgcgtgatggagattagga

SEQ ID NO: 104756 - DNA, 60 bp, Artificial
  Synthetic oligonucleotide
ttaaacgtcagatggccgggaagtatttgcttccgcacattgtaccggcgaaagatagaa

SEQ ID NO: 104757 - DNA, 60 bp, Artificial
  Synthetic oligonucleotide
agttcagattggtcctgatgagacgtcttatactactaagataactaatatgtcaacgtc

SEQ ID NO: 104758 - DNA, 60 bp, Artificial
  Synthetic oligonucleotide
gcatgatatgttactacatttattaggaaccataccgtgtgatgagtttttagtcgaata

SEQ ID NO: 104759 - DNA, 60 bp, Artificial
  Synthetic oligonucleotide
cacattgtaccggcgaaagatagaactaatcatcctcaaggattatgcttgcatgatatg

SEQ ID NO: 104760 - DNA, 60 bp, Artificial
  Synthetic oligonucleotide
gctgcatgggataagattgatgaagaggcgacgcaacaaatcgaagacgataaaattaag

SEQ ID NO: 104761 - DNA, 60 bp, Artificial
  Synthetic oligonucleotide
ggtgagaaggcagaaacctgggcagtagagcagaaagctaaagtcgcgacgcggcggaag

SEQ ID NO: 104762 - DNA, 60 bp, Artificial
  Synthetic oligonucleotide
taaaattaagtatggtgagaaggcagaaacctgggcagtagagcagaaagctaaagtcgc

SEQ ID NO: 104763 - DNA, 60 bp, Artificial
  Synthetic oligonucleotide
aaactatatccatatacgttattaggggtagacgcgcatgctttaattattaaacatgct

SEQ ID NO: 104764 - DNA, 60 bp, Artificial
  Synthetic oligonucleotide
taagttattatctcccaccgctgaccaatctggcgcaaaaggcgaataatttgaatggaa

SEQ ID NO: 104765 - DNA, 52 bp, Artificial
  Synthetic oligonucleotide
tgcaattataaccttctgattgtgtttctcagtttgtttggggacgttagcc

SEQ ID NO: 104766 - DNA, 60 bp, Artificial
  Synthetic oligonucleotide
ctcccagaggttcgaatcgtgatgtggaaagttaataatatctcgggaacaaaggcaacg

SEQ ID NO: 104767 - DNA, 60 bp, Artificial
  Synthetic oligonucleotide
taatatctcgggaacaaaggcaacgttagcaaatgtgtcacagtggaaggatttaactcg

SEQ ID NO: 104768 - DNA, 56 bp, Artificial
  Synthetic oligonucleotide
tgctactcgacgcgctattcacgtgatggagaagagtgatccaactgatataaaag

SEQ ID NO: 104769 - DNA, 60 bp, Artificial
  Synthetic oligonucleotide
aaagtttcaaaatatctcccagaggttcgaatcgtgatgtggaaagttaataatatctcg

SEQ ID NO: 104770 - DNA, 60 bp, Artificial
  Synthetic oligonucleotide
ccatgcgtattattcttattggagtttaaaccatataaattgaccgtgcagcctttaacc

SEQ ID NO: 104771 - DNA, 59 bp, Artificial
  Synthetic oligonucleotide
cacaacgaccacatttagacggaattgatcgtttgtactcacaaatgctggctcttaag

SEQ ID NO: 104772 - DNA, 60 bp, Artificial
  Synthetic oligonucleotide
tttcaaaggctagaagtttaacaaatttatcatctgaagcatcatcagacccatgcgtat

SEQ ID NO: 104773 - DNA, 60 bp, Artificial
  Synthetic oligonucleotide
tctccgcatagatccattattgttatcacgatatattctttcgccttgactattgaagat

SEQ ID NO: 104774 - DNA, 60 bp, Artificial
  Synthetic oligonucleotide
atttctagtgatactgcgtgctgcgtttggtgaaacactgttagtatttgattcagagga

SEQ ID NO: 104775 - DNA, 60 bp, Artificial
  Synthetic oligonucleotide
gcgtgctgcgtttggtgaaacactgttagtatttgattcagaggattttgagagtgatct

SEQ ID NO: 104776 - DNA, 60 bp, Artificial
  Synthetic oligonucleotide
atttggattcctttttaagttattatctcccaccgctgaccaatctggcgcaaaaggcga

SEQ ID NO: 104777 - DNA, 60 bp, Artificial
  Synthetic oligonucleotide
tgtcaacgtctgataggttacgggttaaagggttaggtccaatgtctacgaaactatatc

SEQ ID NO: 104778 - DNA, 60 bp, Artificial
  Synthetic oligonucleotide
ctcgggaacaaaggcaacgttagcaaatgtgtcacagtggaaggatttaactcgtttgcc

SEQ ID NO: 104779 - DNA, 60 bp, Artificial
  Synthetic oligonucleotide
gatgaacaactgcttttccatataagacgtttgtcttcgcttcccgcagcatttctagtg

SEQ ID NO: 104780 - DNA, 60 bp, Artificial
  Synthetic oligonucleotide
aaaatcgtgttagtgaactatttagaaacattaggatttctatataatctagttggtagg

SEQ ID NO: 104781 - DNA, 60 bp, Artificial
  Synthetic oligonucleotide
ccattattgttatcacgatatattctttcgccttgactattgaagatgctctctcttctg

SEQ ID NO: 104782 - DNA, 52 bp, Artificial
  Synthetic oligonucleotide
ctaaagtcgcgacgcggcggaagaatgctttatatagatggaatgtcagacg

SEQ ID NO: 104783 - DNA, 60 bp, Artificial
  Synthetic oligonucleotide
tccatcgaaccaaagttatactgtgattataatgttgtgctaattgagttcgcttctggt

SEQ ID NO: 104784 - DNA, 60 bp, Artificial
  Synthetic oligonucleotide
gttatactgtgattataatgttgtgctaattgagttcgcttctggtgaggagttggacat

SEQ ID NO: 104785 - DNA, 58 bp, Artificial
  Synthetic oligonucleotide
tgggatcatcttgtactgtcaaagtgtgcccattaaatacgcaaactttaggaattgg

SEQ ID NO: 104786 - DNA, 60 bp, Artificial
  Synthetic oligonucleotide
tgattaagaaggaagtgatgaagaagcaatcgtataatgatgcggtgaggatgagtttta

SEQ ID NO: 104787 - DNA, 60 bp, Artificial
  Synthetic oligonucleotide
atatggttaagaaagaggtcatgaagaaacaatcgtataatgatgcggtgaggatgagtt

SEQ ID NO: 104788 - DNA, 60 bp, Artificial
  Synthetic oligonucleotide
ggcgcgagaatcagtttatatgctcctcgcaaatattattcggctaccctgtcgttcacc

SEQ ID NO: 104789 - DNA, 60 bp, Artificial
  Synthetic oligonucleotide
ctgtcgttcaccttgaataggtgtattataccatatgggaagaatgtagctcctatagga

SEQ ID NO: 104790 - DNA, 60 bp, Artificial
  Synthetic oligonucleotide
ggggtggcatatcccaaaagaacatttgatgcaagatgggtggtgcgggtgtgaggacgg

SEQ ID NO: 104791 - DNA, 60 bp, Artificial
  Synthetic oligonucleotide
ccaatgtggtttggttcactgttaagactgatgatatgcccgtggttacacatggagaag

SEQ ID NO: 104792 - DNA, 60 bp, Artificial
  Synthetic oligonucleotide
cgaatcgattcctaatgagttcattaaacttttctatcaacgtgtccggagcgtgcacgc

SEQ ID NO: 104793 - DNA, 60 bp, Artificial
  Synthetic oligonucleotide
cgtgtccggagcgtgcacgcaaatattctcaatgatatatcgcctcaacttttgtcggat

SEQ ID NO: 104794 - DNA, 60 bp, Artificial
  Synthetic oligonucleotide
taagggaatagcaggggtggattcgttagaagagttaataaactgggttctgggtcccga

SEQ ID NO: 104795 - DNA, 60 bp, Artificial
  Synthetic oligonucleotide
gcgtattatgccacgctgccacgtggtcgattctgatgaggtcggtgaacggatgcagcc

SEQ ID NO: 104796 - DNA, 60 bp, Artificial
  Synthetic oligonucleotide
agcgcaagattgcccagattatgcatttgccttatcacgtgaaacggggtgctacccatg

SEQ ID NO: 104797 - DNA, 60 bp, Artificial
  Synthetic oligonucleotide
cgtcaagccgataggtgcagtgcttccaaaaggatctttcaaatcgacgattatgcgcgt

SEQ ID NO: 104798 - DNA, 60 bp, Artificial
  Synthetic oligonucleotide
tgcttggtgtgcgtattatgccacgctgccacgtggtcgattctgatgaggtcggtgaac

SEQ ID NO: 104799 - DNA, 60 bp, Artificial
  Synthetic oligonucleotide
ggatttactaatcggcgggtaatagacgtgatgcctgagatgtatgacttcgtcaagccg

SEQ ID NO: 104800 - DNA, 60 bp, Artificial
  Synthetic oligonucleotide
ggacggatttatcacgtacgttgttatccgagcgccgaagctggtcttagaggagttgcg

SEQ ID NO: 104801 - DNA, 60 bp, Artificial
  Synthetic oligonucleotide
cgatgctgtcggatgggttaattgacagacggactcactcacagtatctcatcaatccat

SEQ ID NO: 104802 - DNA, 60 bp, Artificial
  Synthetic oligonucleotide
ttggcgtgagtcgggtcatgcaacgtcgaacacctgccccatggtcaatgggggtagggg

SEQ ID NO: 104803 - DNA, 60 bp, Artificial
  Synthetic oligonucleotide
gggaatcacatgccttcgaagttgatttcccgttatgcgtgcttctctctgactatgaga

SEQ ID NO: 104804 - DNA, 53 bp, Artificial
  Synthetic oligonucleotide
tcctataggacacgctagatttaacatcgggacctttccttcgttggcatccc

SEQ ID NO: 104805 - DNA, 60 bp, Artificial
  Synthetic oligonucleotide
catggagaagctcattggagatgccgatgccgcgataacttcagccgaggtggggtggca

SEQ ID NO: 104806 - DNA, 60 bp, Artificial
  Synthetic oligonucleotide
tttgtcggatatgttacagcgcaagcggttgcgcgtatcctccccaaatgagcgcaagat

SEQ ID NO: 104807 - DNA, 60 bp, Artificial
  Synthetic oligonucleotide
gctacccatgtagatgtatacagagtcgatgtggtggacgtcttgtttgaagtggttgac

SEQ ID NO: 104808 - DNA, 60 bp, Artificial
  Synthetic oligonucleotide
ctgaggtaaacctgatgattaggaagaaccgagagggtggagagctatttcaacttgtgc

SEQ ID NO: 104809 - DNA, 60 bp, Artificial
  Synthetic oligonucleotide
ttcaacttgtgctatcatatctgtataagatgtatgccactagcgcgcagccaatgtggt

SEQ ID NO: 104810 - DNA, 60 bp, Artificial
  Synthetic oligonucleotide
gggtcccgatttgatacctcacgatgagcgactcgggaagttgtatcaatctttcctgcc

SEQ ID NO: 104811 - DNA, 60 bp, Artificial
  Synthetic oligonucleotide
acagcgcaagcggttgcgcgtatcctccccaaatgagcgcaagattgcccagattatgca

SEQ ID NO: 104812 - DNA, 60 bp, Artificial
  Synthetic oligonucleotide
gagtgagggccgcttgctgactttcgctcacgccgatagcgagttgctaaacgctaacta

SEQ ID NO: 104813 - DNA, 60 bp, Artificial
  Synthetic oligonucleotide
tctttcctgccacttgcgaaggatttactggccccagttgctcggcatttttatgaggaa

SEQ ID NO: 104814 - DNA, 60 bp, Artificial
  Synthetic oligonucleotide
ttatgaggaatctttgagtgagggccgcttgctgactttcgctcacgccgatagcgagtt

SEQ ID NO: 104815 - DNA, 60 bp, Artificial
  Synthetic oligonucleotide
ctggaagagtaatccggcagtcatcccagagtcagttgaccgtcgtttgagaaagcgttt

SEQ ID NO: 104816 - DNA, 60 bp, Artificial
  Synthetic oligonucleotide
cggaaggagaatggtatgttcaccgattggtttctgctcttaacgatgctgtcggatggg

SEQ ID NO: 104817 - DNA, 60 bp, Artificial
  Synthetic oligonucleotide
ctgacagactagaggttggggagccacggcgtgtgcatgcgagagtggtaatcaaaggga

SEQ ID NO: 104818 - DNA, 60 bp, Artificial
  Synthetic oligonucleotide
gtatacagagtcgatgtggtggacgtcttgtttgaagtggttgacatcaaggacggattg

SEQ ID NO: 104819 - DNA, 60 bp, Artificial
  Synthetic oligonucleotide
caattagtccgggcctttaaactctccgatgtgtatactccactggtatcatcatccaca

SEQ ID NO: 104820 - DNA, 60 bp, Artificial
  Synthetic oligonucleotide
ctgactatgagatatatgatgcacttgacatgcgggcattccattggtagaagttcagcc

SEQ ID NO: 104821 - DNA, 60 bp, Artificial
  Synthetic oligonucleotide
ccattggtagaagttcagcctatggagcgagactggtattccgatcttccttggcgtgag

SEQ ID NO: 104822 - DNA, 60 bp, Artificial
  Synthetic oligonucleotide
cagcctatggagcgagactggtattccgatcttccttggcgtgagtcgggtcatgcaacg

SEQ ID NO: 104823 - DNA, 60 bp, Artificial
  Synthetic oligonucleotide
cttagaggagttgcgtgagaaaaactggggtcaataccatgcacaagtaattgtaactga

SEQ ID NO: 104824 - DNA, 60 bp, Artificial
  Synthetic oligonucleotide
agtggttgacatcaaggacggattgcgaagcgtatctcgtaaattgacgttgcagacagt

SEQ ID NO: 104825 - DNA, 60 bp, Artificial
  Synthetic oligonucleotide
ccagagtatcaatcagaaccagattgtctattcaacaactgacagagtgattggcgcgag

SEQ ID NO: 104826 - DNA, 60 bp, Artificial
  Synthetic oligonucleotide
tgcagacagttccggtttccgtgattgaacttattggccttgagactgctgattattgca

SEQ ID NO: 104827 - DNA, 60 bp, Artificial
  Synthetic oligonucleotide
ggacggattgcgaagcgtatctcgtaaattgacgttgcagacagttccggtttccgtgat

SEQ ID NO: 104828 - DNA, 60 bp, Artificial
  Synthetic oligonucleotide
ccggtttccgtgattgaacttattggccttgagactgctgattattgcatacggaaggag

SEQ ID NO: 104829 - DNA, 60 bp, Artificial
  Synthetic oligonucleotide
ggatgcagcctacattcgagcatgctgtgatggagatctataagggaatagcaggggtgg

SEQ ID NO: 104830 - DNA, 60 bp, Artificial
  Synthetic oligonucleotide
gggtggattcgttagaagagttaataaactgggttctgggtcccgatttgatacctcacg

SEQ ID NO: 104831 - DNA, 60 bp, Artificial
  Synthetic oligonucleotide
cgtttaatgatgaagaaagatctgaggaaggatgacgaatacaatcaattagtccgggcc

SEQ ID NO: 104832 - DNA, 60 bp, Artificial
  Synthetic oligonucleotide
gtggtaatcaaagggaatcacatgccttcgaagttgatttcccgttatgcgtgcttctct

SEQ ID NO: 104833 - DNA, 60 bp, Artificial
  Synthetic oligonucleotide
gctcgaccaattgcaatatatgttggatggatatgaagctggagatgtaatagacgctct

SEQ ID NO: 104834 - DNA, 60 bp, Artificial
  Synthetic oligonucleotide
atagacgctctagtgtatagaaattggttacatgaatcagtatattgcctgctaccgcca

SEQ ID NO: 104835 - DNA, 60 bp, Artificial
  Synthetic oligonucleotide
tcactgttaagactgatgatatgcccgtggttacacatggagaagctcattggagatgcc

SEQ ID NO: 104836 - DNA, 60 bp, Artificial
  Synthetic oligonucleotide
ttggtgttactgccacgaaggaggagagtgatgttcaatatcaagatcatgattatgtgc

SEQ ID NO: 104837 - DNA, 60 bp, Artificial
  Synthetic oligonucleotide
gctattcgcggtcatggcttacgtcgcagttcctgcggtcgtggactcgcgctcgagtga

SEQ ID NO: 104838 - DNA, 53 bp, Artificial
  Synthetic oligonucleotide
gtagattcccactgctgtataacgggggagggtgcgcggcactacacacttac

SEQ ID NO: 104839 - DNA, 51 bp, Artificial
  Synthetic oligonucleotide
aaattcccactgctgtataacgggggagggtgcgcggcactacacacttac

SEQ ID NO: 104840 - DNA, 60 bp, Artificial
  Synthetic oligonucleotide
atcatataatgacgcggtgaggatgagttttacagagttctcgtcaatcccgctggatgg

SEQ ID NO: 104841 - DNA, 60 bp, Artificial
  Synthetic oligonucleotide
atcttataatgacgcggtgaggatgagttttacagagttctcgtcaatcccgctggatgg

SEQ ID NO: 104842 - DNA, 60 bp, Artificial
  Synthetic oligonucleotide
aatcttataatgacgcggtgaggatgagttttacagagttctcgtcaatcccgctggatg

SEQ ID NO: 104843 - DNA, 60 bp, Artificial
  Synthetic oligonucleotide
aagtttttttcctcacccataatggctgacataagacttgatatagcgcccgatcctatc

SEQ ID NO: 104844 - DNA, 60 bp, Artificial
  Synthetic oligonucleotide
aagtttttttcctcacccataatggctgacataagactcgatatagcgcccgatcttatc

SEQ ID NO: 104845 - DNA, 60 bp, Artificial
  Synthetic oligonucleotide
ttttcctcacccataatggctgacataagactcgatatagcgcccgatcttatccataat

SEQ ID NO: 104846 - DNA, 60 bp, Artificial
  Synthetic oligonucleotide
cagatctgagctacgtgaaaatctcgttatgcatccacgatgaggagcctatatgctggc

SEQ ID NO: 104847 - DNA, 60 bp, Artificial
  Synthetic oligonucleotide
ccgagctgtgtgaaaatctcgttatgcatccacgatgaggagcctatatgctggcatgcg

SEQ ID NO: 104848 - DNA, 60 bp, Artificial
  Synthetic oligonucleotide
ccgagctgtgtgaaaatttcgttatgcatccacgatgaggagcctatatgctggcatgcg

SEQ ID NO: 104849 - DNA, 60 bp, Artificial
  Synthetic oligonucleotide
agctacgtgaaaatctcgttatgcatccacgatgaggagcctatatgctggcatgcgtgg

SEQ ID NO: 104850 - DNA, 60 bp, Artificial
  Synthetic oligonucleotide
gattatgtccaaaagatcacggccattaaattcagcagctttttactatacgggtttgat

SEQ ID NO: 104851 - DNA, 51 bp, Artificial
  Synthetic oligonucleotide
tatactcgacaaagcaatgtcaaatcaaacgggcgcgactatggctcaaaa

SEQ ID NO: 104852 - DNA, 60 bp, Artificial
  Synthetic oligonucleotide
tatactcgacaaagcaatgtcaaatcaaacgggcgcgactatggctcaaaaagtagaaaa

SEQ ID NO: 104853 - DNA, 55 bp, Artificial
  Synthetic oligonucleotide
ttaaagtggtacctaacgcgggaacaaatgagcatttaactgctgaaatattagg

SEQ ID NO: 104854 - DNA, 60 bp, Artificial
  Synthetic oligonucleotide
ttgttggtgtttccaattcgcgtgtaatgggtgagtgagctgatgtggtcgccaggacat

SEQ ID NO: 104855 - DNA, 60 bp, Artificial
  Synthetic oligonucleotide
ttagaggggggtttagtagacactttaggtaacgatagttcgttgcgtaaatttgctcgc

SEQ ID NO: 104856 - DNA, 51 bp, Artificial
  Synthetic oligonucleotide
ttaggtaacgatagttcgttgcgtaaatttgctcgcacaacgaagtaccta

SEQ ID NO: 104857 - DNA, 60 bp, Artificial
  Synthetic oligonucleotide
gtagaaaattctgaatcgtaaacatgaatgtaattattccagctcatttgttagaggggg

SEQ ID NO: 104858 - DNA, 60 bp, Artificial
  Synthetic oligonucleotide
acggtagattgggtgatgcagcacaacaagctgttcaaagattgttcttgcacagctcaa

SEQ ID NO: 104859 - DNA, 60 bp, Artificial
  Synthetic oligonucleotide
gggtgatgcagcacaacaagctgttcaaagattgttcttgcacagctcaaacgctggcac

SEQ ID NO: 104860 - DNA, 60 bp, Artificial
  Synthetic oligonucleotide
aaagatacttcactcaattatcacatcgtcgaagcaggattcaagcgcgctaaagcaact

SEQ ID NO: 104861 - DNA, 60 bp, Artificial
  Synthetic oligonucleotide
caattatcacatcgtcgaagcaggattcaagcgcgctaaagcaactggtttgttagatgg

SEQ ID NO: 104862 - DNA, 60 bp, Artificial
  Synthetic oligonucleotide
gccactttggccattttatttgaagcatatgaattggtgaacttagcagcggacgttaag

SEQ ID NO: 104863 - DNA, 60 bp, Artificial
  Synthetic oligonucleotide
ggacgttaagattgtgaatatgttatattaaaacgttaccctgggtaattcattcgtgta

SEQ ID NO: 104864 - DNA, 60 bp, Artificial
  Synthetic oligonucleotide
cttcgcaggtgagaggttaactcatgcaccaggtggtaacagaggtggtttgagaactga

SEQ ID NO: 104865 - DNA, 60 bp, Artificial
  Synthetic oligonucleotide
cattcgtgtagttatcgatttatcgggatggtgcccaaggttgttcctaccaaccttggt

SEQ ID NO: 104866 - DNA, 61 bp, Artificial
  Synthetic oligonucleotide
ggacgttaagattgtgaatatgttatattaaaacgttaccctgggtaattcattcgtgtag

SEQ ID NO: 104867 - DNA, 60 bp, Artificial
  Synthetic oligonucleotide
gaggttaactcatgcaccaggtggtaacagaggtggtttgagaactgacttactggtgcg

SEQ ID NO: 104868 - DNA, 60 bp, Artificial
  Synthetic oligonucleotide
tggtgcgttgtattcaatcaacagtaactcagaatgttggtatcaacgttcctcaagctg

SEQ ID NO: 104869 - DNA, 60 bp, Artificial
  Synthetic oligonucleotide
tgagaactgacttactggtgcgttgtattcaatcaacagtaactcagaatgttggtatca

SEQ ID NO: 104870 - DNA, 60 bp, Artificial
  Synthetic oligonucleotide
cgttcctcaagctgagaagatagcactaggtaatagtttagcttcaagtgacacaccagc

SEQ ID NO: 104871 - DNA, 60 bp, Artificial
  Synthetic oligonucleotide
gttggtatcaacgttcctcaagctgagaagatagcactaggtaatagtttagcttcaagt

SEQ ID NO: 104872 - DNA, 60 bp, Artificial
  Synthetic oligonucleotide
caaacaatgtatctcattcagtaacaggtagaaaagagatggtagcaacgttttcaaatg

SEQ ID NO: 104873 - DNA, 60 bp, Artificial
  Synthetic oligonucleotide
tgcaaaaaccaaacaatgtatctcattcagtaacaggtagaaaagagatggtagcaacgt

SEQ ID NO: 104874 - DNA, 60 bp, Artificial
  Synthetic oligonucleotide
caaatgaaaatggcgaagcgatcaacatcaatatgtcatttagatcaccaacttcgattg

SEQ ID NO: 104875 - DNA, 60 bp, Artificial
  Synthetic oligonucleotide
gtagcaacgttttcaaatgaaaatggcgaagcgatcaacatcaatatgtcatttagatca

SEQ ID NO: 104876 - DNA, 60 bp, Artificial
  Synthetic oligonucleotide
cttcgattgaaatcatgagcgatacgccttttatttacggtagattgggtgatgcagcac

SEQ ID NO: 104877 - DNA, 60 bp, Artificial
  Synthetic oligonucleotide
atttagatcaccaacttcgattgaaatcatgagcgatacgccttttatttacggtagatt

SEQ ID NO: 104878 - DNA, 57 bp, Artificial
  Synthetic oligonucleotide
cattcgtgtagttatcgatttatcgggatggtgcccaaggttgttcctaccaacctt

SEQ ID NO: 104879 - DNA, 50 bp, Artificial
  Synthetic oligonucleotide
caaccttggtgcccgattaattgatacttactttgcagtttaaaaccgac

SEQ ID NO: 104880 - DNA, 60 bp, Artificial
  Synthetic oligonucleotide
tggtggcgccgtcgtttgcatgcattgtctaggtgttgttggatccctgcaacgcaagct

SEQ ID NO: 104881 - DNA, 60 bp, Artificial
  Synthetic oligonucleotide
ggtggcgccgtcgtttgcatgcattgtctaggtgttgttggatccctgcaacgcaagctg

SEQ ID NO: 104882 - DNA, 60 bp, Artificial
  Synthetic oligonucleotide
cggtacatatacacctgatcagtcagcattaattcttcgaaatcattagccaccgcccaa

SEQ ID NO: 104883 - DNA, 60 bp, Artificial
  Synthetic oligonucleotide
gttggtgctagaagaagaagcttgggcggtggctaatgatttcgaagaattgatgctgac

SEQ ID NO: 104884 - DNA, 60 bp, Artificial
  Synthetic oligonucleotide
gtcgacgtctcgtgtagctacgtttccgttctcgattatcgatccatccaatgcgttctg

SEQ ID NO: 104885 - DNA, 59 bp, Artificial
  Synthetic oligonucleotide
caatccaacaacatatggcattgggatgacttatcattgctacaacgagatgttacgaa

SEQ ID NO: 104886 - DNA, 60 bp, Artificial
  Synthetic oligonucleotide
ttcgtaacatctcattgtagcaatgataagtcatcccaatgccatatgttgtcggattaa

SEQ ID NO: 104887 - DNA, 60 bp, Artificial
  Synthetic oligonucleotide
cattgtagcaatgataagtcatcccaatgccatatgttgtcggattaattaactcacgcg

SEQ ID NO: 104888 - DNA, 60 bp, Artificial
  Synthetic oligonucleotide
cccgacctaattgctggggcgcatcagaacgccgacccagttgtgctagatgtgagttgg

SEQ ID NO: 104889 - DNA, 60 bp, Artificial
  Synthetic oligonucleotide
caacgcattattacccgacctaattgctggggcgcatcagaacgccgacccagttgtgct

SEQ ID NO: 104890 - DNA, 60 bp, Artificial
  Synthetic oligonucleotide
cagttgtgctagatgtgagttggatatcattgtggtttgctttcaacagatcgtttgaac

SEQ ID NO: 104891 - DNA, 60 bp, Artificial
  Synthetic oligonucleotide
tggagtggttgatccagcgatgcaaattcctactgctgtataacgggggagggtgtgcgg

SEQ ID NO: 104892 - DNA, 60 bp, Artificial
  Synthetic oligonucleotide
atcacttggacagagattcatgacttggatgcggcaggagggacggtcagcgtgagtcta

SEQ ID NO: 104893 - DNA, 60 bp, Artificial
  Synthetic oligonucleotide
gaggaccaagctaaccacttggtatccgactttgatgagtatgtagctacgtcaagctgc

SEQ ID NO: 104894 - DNA, 60 bp, Artificial
  Synthetic oligonucleotide
gaattggactgatttgatcactaactattcaccatctagagaggataatttgcaacgtgt

SEQ ID NO: 104895 - DNA, 60 bp, Artificial
  Synthetic oligonucleotide
gctagagacaaaattgtcgaaggcacattatactccaacgtgagtgatctaattcagcaa

SEQ ID NO: 104896 - DNA, 60 bp, Artificial
  Synthetic oligonucleotide
agaagcatgcttgtcaaatgaggaccaagctaaccacttggtatccgactttggtgagta

SEQ ID NO: 104897 - DNA, 60 bp, Artificial
  Synthetic oligonucleotide
taatttgcaacgtgtatttacagtggcttccattagaagcatgctcgtcaaatgaggacc

SEQ ID NO: 104898 - DNA, 60 bp, Artificial
  Synthetic oligonucleotide
aatgaggaccaagctaaccacttggtatccgactttgatgagtatgtagctacgtcaagc

SEQ ID NO: 104899 - DNA, 60 bp, Artificial
  Synthetic oligonucleotide
gtcaaatgaggaccaagctaaccacttggtatccgactttggtgagtatgtagctacgtc

SEQ ID NO: 104900 - DNA, 60 bp, Artificial
  Synthetic oligonucleotide
agctctagttgttggaacggcgtagtgaagcgatccccgattggttatcgggagcgagaa

SEQ ID NO: 104901 - DNA, 60 bp, Artificial
  Synthetic oligonucleotide
gctctagttgttggaacggcgtagtgaagcgatccccgattggttatcgggagcgagaaa

SEQ ID NO: 104902 - DNA, 51 bp, Artificial
  Synthetic oligonucleotide
aagatagaaaggtggagaagtcatccagaggacgagcatcttcttcacgat

SEQ ID NO: 104903 - DNA, 60 bp, Artificial
  Synthetic oligonucleotide
tataaatctgaagaagaatccactgaagacgaaactgctcctttgactaagaaagacatg

SEQ ID NO: 104904 - DNA, 60 bp, Artificial
  Synthetic oligonucleotide
actaatgcccaaagacgattcaaatgatcgtaaaaaggcaaaaactagcaaagatagaaa

SEQ ID NO: 104905 - DNA, 60 bp, Artificial
  Synthetic oligonucleotide
cagcgaggtaacagacgtaataatgtagctaaagtcatgacgttgaatgaactaatgccc

SEQ ID NO: 104906 - DNA, 60 bp, Artificial
  Synthetic oligonucleotide
gtccctcaaacgacgtcttattttcagttggtgcacacagaaatatgttatgtgtagcca

SEQ ID NO: 104907 - DNA, 60 bp, Artificial
  Synthetic oligonucleotide
agaggagtgtccctcaaacgacgtcttattttcagttggtgcacacagaaatatgttatg

SEQ ID NO: 104908 - DNA, 58 bp, Artificial
  Synthetic oligonucleotide
atatgttatgtgtagccaaagcatttgatcagactaaaccacgcggcatgcagcgagg

SEQ ID NO: 104909 - DNA, 60 bp, Artificial
  Synthetic oligonucleotide
atatgttatgtgtagccaaagcatttgatcagactaaaccacgcggcatgcagcgaggta

SEQ ID NO: 104910 - DNA, 60 bp, Artificial
  Synthetic oligonucleotide
agaacgtgcgtttgtccctccgctttacattttgcagaggagtgtccctcaaacgacgtc

SEQ ID NO: 104911 - DNA, 60 bp, Artificial
  Synthetic oligonucleotide
aaacagtccaagtacagaacgtgcgtttgtccctccgctttacattttgcagaggagtgt

SEQ ID NO: 104912 - DNA, 60 bp, Artificial
  Synthetic oligonucleotide
gggtggttgacctcgcggcgtagattcccactgctgtataacgggggagggtgcgcggcc

SEQ ID NO: 104913 - DNA, 60 bp, Artificial
  Synthetic oligonucleotide
gagttctcgtcaatcccgctggatggtttcgaaatgccattaacctgaggacagtaggta

SEQ ID NO: 104914 - DNA, 60 bp, Artificial
  Synthetic oligonucleotide
caatcccgctggatggtttcgaaatgccattaacctgaggacagtaggtagagtggcgcc

SEQ ID NO: 104915 - DNA, 60 bp, Artificial
  Synthetic oligonucleotide
cgcggtgaggatgagttttacagagttctcgtcaatcccgctggatggtttcgaaatgcc

SEQ ID NO: 104916 - DNA, 60 bp, Artificial
  Synthetic oligonucleotide
gcggtgaggatgagttttacagagttctcgtcaatcccgctggatggtttcgaaatgcca

SEQ ID NO: 104917 - DNA, 60 bp, Artificial
  Synthetic oligonucleotide
cgctggatggtttcgaaatgccattaacctgaggacagtaggtagagtggcgccccgagg

SEQ ID NO: 104918 - DNA, 51 bp, Artificial
  Synthetic oligonucleotide
cgctggatggtttcgaaatgccattaacctgaggacagtaggtagagtggc

SEQ ID NO: 104919 - DNA, 60 bp, Artificial
  Synthetic oligonucleotide
cccgctggatggtttcgaaatgccattaacctgaggacagtaggtagagtggcgccccga

SEQ ID NO: 104920 - DNA, 60 bp, Artificial
  Synthetic oligonucleotide
ccgctggatggtttcgaaatgccattaacctgaggacagtaggtagagtggcgccccgag

SEQ ID NO: 104921 - DNA, 60 bp, Artificial
  Synthetic oligonucleotide
aaaaaacaatcttataatgacgcggtgaggatgagttttacagagttctcgtcaatcccg

SEQ ID NO: 104922 - DNA, 60 bp, Artificial
  Synthetic oligonucleotide
cgcagtgaggatgagttttacagagttctcgtcaatcccgctggatggtttcgaaatgcc

SEQ ID NO: 104923 - DNA, 60 bp, Artificial
  Synthetic oligonucleotide
caatgatgcggtgaggatgagttttacagagttctcgtcaatcccgctggatggtttcga

SEQ ID NO: 104924 - DNA, 59 bp, Artificial
  Synthetic oligonucleotide
tggatagaattgtaaaagagatgagacgtcagctggaaatgattgataaactaactact

SEQ ID NO: 104925 - DNA, 60 bp, Artificial
  Synthetic oligonucleotide
tagaatttgttatagcacgtcctactttggttctgtaatgtaagcgtgacggttgctgat

SEQ ID NO: 104926 - DNA, 60 bp, Artificial
  Synthetic oligonucleotide
aacatacatatgatatagaatttgttatagcacgtcctactttggttctgtaatgtaagc

SEQ ID NO: 104927 - DNA, 60 bp, Artificial
  Synthetic oligonucleotide
gtgacttatgaccctcaaattgaaaacataacatcaaggaagacacgtaacatacatatg

SEQ ID NO: 104928 - DNA, 60 bp, Artificial
  Synthetic oligonucleotide
tcgtgacttatgaccctcaaattgaaaacataacatcaaggaagacacgtaacatacata

SEQ ID NO: 104929 - DNA, 60 bp, Artificial
  Synthetic oligonucleotide
gctgataatactctaactcgtaagtatactttagaccgagtcgtgacttatgaccctcaa

SEQ ID NO: 104930 - DNA, 60 bp, Artificial
  Synthetic oligonucleotide
aggtactcaagctgataatactctaactcgtaagtatactttagaccgagtcgtgactta

SEQ ID NO: 104931 - DNA, 60 bp, Artificial
  Synthetic oligonucleotide
cacgataaatacgaacgattcttgtctaagtgtaaaaatcaattacgcacaggtactcaa

SEQ ID NO: 104932 - DNA, 60 bp, Artificial
  Synthetic oligonucleotide
aaattgcctactgaattcgggttttccccaccacatgataataatcgttttatgtccaca

SEQ ID NO: 104933 - DNA, 60 bp, Artificial
  Synthetic oligonucleotide
ggaatatcaaatgcgtcagccgacatactcaacgaagattggacagcattagcacaatgg

SEQ ID NO: 104934 - DNA, 52 bp, Artificial
  Synthetic oligonucleotide
caagttaaaggtattatggatacccttaagaaggtctggacgcgtgtctctg

SEQ ID NO: 104935 - DNA, 60 bp, Artificial
  Synthetic oligonucleotide
ggaagatgatcttattactactaaagttgaagccgatatgttattaaaaccagcttgtgc

SEQ ID NO: 104936 - DNA, 60 bp, Artificial
  Synthetic oligonucleotide
ccactcttagattgggaatatcaaatgcgtcagccgacatactcaacgaagattggacag

SEQ ID NO: 104937 - DNA, 54 bp, Artificial
  Synthetic oligonucleotide
aaatctagcacatgtattaaatgatgatcaaactgcaaaatatacagcgttaac

SEQ ID NO: 104938 - DNA, 60 bp, Artificial
  Synthetic oligonucleotide
ggaccgactgggttggtagggcgtaatgattggcctttgttagctcaacaattgtcagtc

SEQ ID NO: 104939 - DNA, 60 bp, Artificial
  Synthetic oligonucleotide
atatttgaaggaccgactgggttggtagggcgtaatgattggcctttgttagctcaacaa

SEQ ID NO: 104940 - DNA, 60 bp, Artificial
  Synthetic oligonucleotide
aggagttagtgccgcttattctaaattcggaggtaaattaaagagtaaatatggcgtaga

SEQ ID NO: 104941 - DNA, 60 bp, Artificial
  Synthetic oligonucleotide
agaaatagtcaaattaggagttagtgccgcttattctaaattcggaggtaaattaaagag

SEQ ID NO: 104942 - DNA, 60 bp, Artificial
  Synthetic oligonucleotide
agtttgatgaccatggatcagaaacttaaaatatcagtgaaccctgctcttttaacaagt

SEQ ID NO: 104943 - DNA, 51 bp, Artificial
  Synthetic oligonucleotide
caagtggacctatagtacgaccaggagacaatgtaatttcaacacagaaaa

SEQ ID NO: 104944 - DNA, 60 bp, Artificial
  Synthetic oligonucleotide
tttaacaagtggacctatagtacgaccaggagacaatgtaatttcaacacagaaaaattt

SEQ ID NO: 104945 - DNA, 60 bp, Artificial
  Synthetic oligonucleotide
catgtttgaaagaatatatgactaggataagcggcacatcagtaaggaacatcaatcccg

SEQ ID NO: 104946 - DNA, 60 bp, Artificial
  Synthetic oligonucleotide
tgtagcatgtttgaaagaatatatgactaggataagcggcacatcagtaaggaacatcaa

SEQ ID NO: 104947 - DNA, 60 bp, Artificial
  Synthetic oligonucleotide
tggaagatgatcttattactactaaagttgaagccgatatgttattaaaaccagcttgtg

SEQ ID NO: 104948 - DNA, 50 bp, Artificial
  Synthetic oligonucleotide
tcatttgtagctcttactcgtaaaatagttggcatggttgatgaagcgta

SEQ ID NO: 104949 - DNA, 60 bp, Artificial
  Synthetic oligonucleotide
gctcaacaattgtcagtcagcgtacttccgggtttaggggaatatatctccaagggacct

SEQ ID NO: 104950 - DNA, 60 bp, Artificial
  Synthetic oligonucleotide
agctcaacaattgtcagtcagcgtacttccgggtttaggggaatatatctccaagggacc

SEQ ID NO: 104951 - DNA, 60 bp, Artificial
  Synthetic oligonucleotide
gcctactgaattcgggttttccccaccacatgataataatcgttttatgtccacaaccgg

SEQ ID NO: 104952 - DNA, 60 bp, Artificial
  Synthetic oligonucleotide
tatgtccacaaccggaaaggtgttggttggtggatcaatatcgcaacgatcaattcttga

SEQ ID NO: 104953 - DNA, 60 bp, Artificial
  Synthetic oligonucleotide
ccggaaaggtgttggttggtggatcaatatcgcaacgatcaattcttgaattaggaaagc

SEQ ID NO: 104954 - DNA, 59 bp, Artificial
  Synthetic oligonucleotide
caattcttgaattaggaaagctaggtgaaatgtattctgacaccatgataaattcttta

SEQ ID NO: 104955 - DNA, 60 bp, Artificial
  Synthetic oligonucleotide
ttcccgtttcggctatgcgtgacatatttatatccgctgatgagcttgaacagctatacc

SEQ ID NO: 104956 - DNA, 60 bp, Artificial
  Synthetic oligonucleotide
ccgtttcggctatgcgtgacatatttatatccgctgatgagcttgaacagctataccccg

SEQ ID NO: 104957 - DNA, 60 bp, Artificial
  Synthetic oligonucleotide
cagctataccccgataaatcactcattgaacaaggatggacggcaggaacgactctctct

SEQ ID NO: 104958 - DNA, 54 bp, Artificial
  Synthetic oligonucleotide
gactctctctaaatctactattactaacgctacggttcaagcttccttaaaggc

SEQ ID NO: 104959 - DNA, 60 bp, Artificial
  Synthetic oligonucleotide
agaaggttaaaaagttagtaatgcacaatttaaatgaacatagtgcccatttgattttcg

SEQ ID NO: 104960 - DNA, 59 bp, Artificial
  Synthetic oligonucleotide
aaaagttagtaatgcacaatttaaatgaacatagtgcccatttgattttcggcgcttcg

SEQ ID NO: 104961 - DNA, 60 bp, Artificial
  Synthetic oligonucleotide
ctcagtccctgaatgctcagttggaggcggatgtcaaatcggctcagtcgtgtagcttgg

SEQ ID NO: 104962 - DNA, 60 bp, Artificial
  Synthetic oligonucleotide
tgctcagtccctgaatgctcagttggaggcggatgtcaaatcggctcagtcgtgtagctt

SEQ ID NO: 104963 - DNA, 60 bp, Artificial
  Synthetic oligonucleotide
cgagctcagtccctgaatgctcagttggaggcggatgtcaagtcagctcaatcatgtagc

SEQ ID NO: 104964 - DNA, 60 bp, Artificial
  Synthetic oligonucleotide
tgagtcgagctcagtccctgaatgctcagttggaggcggatgtcaagtcagctcaatcat

SEQ ID NO: 104965 - DNA, 60 bp, Artificial
  Synthetic oligonucleotide
tcagacgactcatgatgtccatttggcaccaggcgtcggtaatattgaccctgaaattta

SEQ ID NO: 104966 - DNA, 60 bp, Artificial
  Synthetic oligonucleotide
gtaatcatcattttgatttgaaatctaaattcagaaaattaaattggatcatttcatctt

SEQ ID NO: 104967 - DNA, 60 bp, Artificial
  Synthetic oligonucleotide
gcccaaatggctgtgcagcaatatctgcgagttggctatctcgaggaaagacgttatgtc

SEQ ID NO: 104968 - DNA, 60 bp, Artificial
  Synthetic oligonucleotide
agttactatgcaaaccatgtcaaaatgtttcaagcattgtcgccacagtggacgtgctcg

SEQ ID NO: 104969 - DNA, 60 bp, Artificial
  Synthetic oligonucleotide
gatataggcagattggatattgtttttaccaaccagatgcggtggatgattgggttgctc

SEQ ID NO: 104970 - DNA, 60 bp, Artificial
  Synthetic oligonucleotide
gccaatgattctagtgagaattgcagtaaaggagccagcaaacttcgagtatgtgagggg

SEQ ID NO: 104971 - DNA, 60 bp, Artificial
  Synthetic oligonucleotide
ggttgtgaccgggagacattttaccacattgatgtccgaacctcggagatggtaggatgc

SEQ ID NO: 104972 - DNA, 60 bp, Artificial
  Synthetic oligonucleotide
ggactggcatctgggaaaatgatgaatggcaggaaggaatctatctgctggcgagagtgc

SEQ ID NO: 104973 - DNA, 60 bp, Artificial
  Synthetic oligonucleotide
aagtcgcgtacgcttcatatgcggaggcgtttagggatgatttgcgattgaggcagatca

SEQ ID NO: 104974 - DNA, 60 bp, Artificial
  Synthetic oligonucleotide
taaggcgatgtcaaatcaaactggtgccacgatggctcaaaaagtggagaaagtcgcgta

SEQ ID NO: 104975 - DNA, 60 bp, Artificial
  Synthetic oligonucleotide
aggcagatcaagaagcgggtaaatgaacaggtgttgccaaaattgcgtgttgaattaact

SEQ ID NO: 104976 - DNA, 60 bp, Artificial
  Synthetic oligonucleotide
cgcttcatatgcggaggcgtttagggatgatttgcgattgaggcagatcaagaagcgggt

SEQ ID NO: 104977 - DNA, 60 bp, Artificial
  Synthetic oligonucleotide
accaggagatgactagaccgccaagttatgtaccaacggctccaccgcagacagcaatgc

SEQ ID NO: 104978 - DNA, 60 bp, Artificial
  Synthetic oligonucleotide
tgagtttagtaccataccaggagatgactagaccgccaagttatgtaccaacggctccac

SEQ ID NO: 104979 - DNA, 60 bp, Artificial
  Synthetic oligonucleotide
ggctccaccgcagacagcaatgccgaaagtagccctcgacattctggataaggcgatgtc

SEQ ID NO: 104980 - DNA, 60 bp, Artificial
  Synthetic oligonucleotide
acggctccaccgcagacagcaatgccgaaagtagccctcgacattctggataaggcgatg

SEQ ID NO: 104981 - DNA, 60 bp, Artificial
  Synthetic oligonucleotide
tgaattaactgctatgaagaggaaacgtgcggtagcacacatgatattaataattgcagc

SEQ ID NO: 104982 - DNA, 60 bp, Artificial
  Synthetic oligonucleotide
gcagatcaagaagcgggtaaatgaacaggtgttgccaaaattgcgtgttgaattaactgc

SEQ ID NO: 104983 - DNA, 60 bp, Artificial
  Synthetic oligonucleotide
gttagtatcgggtgcagagacaagaattaacatgaaagaaagcgatgagatgagtttagt

SEQ ID NO: 104984 - DNA, 60 bp, Artificial
  Synthetic oligonucleotide
cgggtgcagagacaagaattaacatgaaagaaagcgatgagatgagtttagtaccatacc

SEQ ID NO: 104985 - DNA, 60 bp, Artificial
  Synthetic oligonucleotide
gttttgatataccatctgaactaaccagatagagtggcgctccaaggtcaccatgatacg

SEQ ID NO: 104986 - DNA, 60 bp, Artificial
  Synthetic oligonucleotide
ggcgctccaaggtcaccatgatacgagattggcaggtctcgatgtggtgattcctactgt

SEQ ID NO: 104987 - DNA, 60 bp, Artificial
  Synthetic oligonucleotide
cagcagtagtggcattgataacgtcggcgagcaccttaacgagcgatttgggaataatac

SEQ ID NO: 104988 - DNA, 60 bp, Artificial
  Synthetic oligonucleotide
gatttgggaataatacttaagaacacgacagcaacggaaattattcagaaacagataaag

SEQ ID NO: 104989 - DNA, 60 bp, Artificial
  Synthetic oligonucleotide
gctatgaagaggaaacgtgcggtagcacacatgatattaataattgcagcagtagtggca

SEQ ID NO: 104990 - DNA, 60 bp, Artificial
  Synthetic oligonucleotide
taattgcagcagtagtggcattgataacgtcggcgagcaccttaacgagcgatttgggaa

SEQ ID NO: 104991 - DNA, 60 bp, Artificial
  Synthetic oligonucleotide
cgcgtacaacgaggcagtgaggatgagtatatcagagtttagcgagatacctctagatgg

SEQ ID NO: 104992 - DNA, 60 bp, Artificial
  Synthetic oligonucleotide
agatacctctagatggttttgatataccatctgaactaaccagatagagtggcgctccaa

SEQ ID NO: 104993 - DNA, 60 bp, Artificial
  Synthetic oligonucleotide
cttaagaacacgacagcaacggaaattattcagaaacagataaagccgttttgtgctgct

SEQ ID NO: 104994 - DNA, 60 bp, Artificial
  Synthetic oligonucleotide
gaaggacgcgtacaacgaggcagtgaggatgagtatatcagagtttagcgagatacctct

SEQ ID NO: 104995 - DNA, 59 bp, Artificial
  Synthetic oligonucleotide
caccatgatacgagattggcaggtctcgatgtggtgattcctactgttgtatagcgggg

SEQ ID NO: 104996 - DNA, 50 bp, Artificial
  Synthetic oligonucleotide
ttcctactgttgtatagcgggggagagtatgccatcctcgacacacttac

SEQ ID NO: 104997 - DNA, 60 bp, Artificial
  Synthetic oligonucleotide
caggcagtgtcgcctcggcattgacctgttgttagtagctggtgtcaattagtcctcggg

SEQ ID NO: 104998 - DNA, 60 bp, Artificial
  Synthetic oligonucleotide
atgttagggcgaggcgcggcttcgttcgacgcatggctgggtgaacccaccaggcagtgt

SEQ ID NO: 104999 - DNA, 60 bp, Artificial
  Synthetic oligonucleotide
gggtgaacccaccaggcagtgtcgcctcggcattgacctgttgttagtagctggtgtcaa

SEQ ID NO: 105000 - DNA, 60 bp, Artificial
  Synthetic oligonucleotide
ggctttaaaagagagaatttccgtttggctaacggttagctccttttgatgtatggtatt

SEQ ID NO: 105001 - DNA, 60 bp, Artificial
  Synthetic oligonucleotide
ggctttaaaagagagaatttccgtttggctagcggatagctccttttaatgtgtggtatt

SEQ ID NO: 105002 - DNA, 60 bp, Artificial
  Synthetic oligonucleotide
ggctttaaaagagagaatttccgtttggctaggggaaagctccttttaatgtatggtatg

SEQ ID NO: 105003 - DNA, 60 bp, Artificial
  Synthetic oligonucleotide
gaaccacgagcagatctgttttatttgaccaatcggtgcaacatgggactggaaccaagc

SEQ ID NO: 105004 - DNA, 60 bp, Artificial
  Synthetic oligonucleotide
atgaaccacgagcagatctgttttatttgaccaatcggtgcaacatgggactggaaccaa

SEQ ID NO: 105005 - DNA, 60 bp, Artificial
  Synthetic oligonucleotide
gagggtccgaaacccaacattacatgaaacggctgatgaactaaaacggatgggattgga

SEQ ID NO: 105006 - DNA, 60 bp, Artificial
  Synthetic oligonucleotide
gcaacagatggatagaattgtaaaagagatgagacgtcagctggagatgattgataaatt

SEQ ID NO: 105007 - DNA, 60 bp, Artificial
  Synthetic oligonucleotide
atggatagaattgtaaaagagatgagacgtcagctggagatgattgataaattaactact

SEQ ID NO: 105008 - DNA, 60 bp, Artificial
  Synthetic oligonucleotide
acagatggatagaattgtaaaagagatgagacgtcagctggagatgattgataaattaac

SEQ ID NO: 105009 - DNA, 60 bp, Artificial
  Synthetic oligonucleotide
ggatagaattgtaaaagagatgagacgtcagctggagatgattgataaattaactactcg

SEQ ID NO: 105010 - DNA, 60 bp, Artificial
  Synthetic oligonucleotide
cgagaacttttttggctatttcaccacaatggacttgcagtcacttaaaaaggaattgtc

SEQ ID NO: 105011 - DNA, 60 bp, Artificial
  Synthetic oligonucleotide
ctcctctcagtgggagatttatgttatcaagcagcgcgttcaatccatgttgcagcagct

SEQ ID NO: 105012 - DNA, 57 bp, Artificial
  Synthetic oligonucleotide
ttgcagcagctaattatataaggatatttgaccgcatgcctcctggctttcagccgt

SEQ ID NO: 105013 - DNA, 60 bp, Artificial
  Synthetic oligonucleotide
acatcgctcgtgagccaggcatgtttagtcatgataatgttaaagatgtgttgcaccgta

SEQ ID NO: 105014 - DNA, 60 bp, Artificial
  Synthetic oligonucleotide
cgctcgtgagccaggcatgtttagtcatgataatgttaaagatgtgttgcaccgtacagg

SEQ ID NO: 105015 - DNA, 60 bp, Artificial
  Synthetic oligonucleotide
acgaccattgacagtagctttgataaaatacatggctaaatctttgaattgcgatttagt

SEQ ID NO: 105016 - DNA, 60 bp, Artificial
  Synthetic oligonucleotide
gacagtagctttgataaaatacatggctaaatctttgaattgcgatttagttggtgactc

SEQ ID NO: 105017 - DNA, 60 bp, Artificial
  Synthetic oligonucleotide
aagaatctgatttcggtatcagagaatgatttttctaatccccaaagggctctcctctca

SEQ ID NO: 105018 - DNA, 60 bp, Artificial
  Synthetic oligonucleotide
tctcctctcagtgggagatttatgttatcaagcagcgcgttcaatccatgttgcagcagc

SEQ ID NO: 105019 - DNA, 60 bp, Artificial
  Synthetic oligonucleotide
ttgcaccgtacaggtgttttttctccaaaccaccacttttccgcagtcattttgtggagg

SEQ ID NO: 105020 - DNA, 60 bp, Artificial
  Synthetic oligonucleotide
tttgtggagggggtgggcttccacgtacgcatatatgtttaaccaagaacaattgaatat

SEQ ID NO: 105021 - DNA, 53 bp, Artificial
  Synthetic oligonucleotide
attgcggtgggatcatcaccatcgtgtaatatattgacggattgggtgaattc

SEQ ID NO: 105022 - DNA, 60 bp, Artificial
  Synthetic oligonucleotide
gcggcagttcttaatcgcactgatgatagtgcttttcagctatcaaaatattgcggtggg

SEQ ID NO: 105023 - DNA, 60 bp, Artificial
  Synthetic oligonucleotide
cagaagtcgtccgcaagcgaaatatatacccggatctgtctgccctcaaaggcggcagtt

SEQ ID NO: 105024 - DNA, 60 bp, Artificial
  Synthetic oligonucleotide
ggggtgggcttccacgtacgcatatatgtttaaccaagaacaattgaatatgctgtcagg

SEQ ID NO: 105025 - DNA, 60 bp, Artificial
  Synthetic oligonucleotide
ggcggcagttcttaatcgcactgatgatagtgcttttcagctatcaaaatattgcggtgg

SEQ ID NO: 105026 - DNA, 60 bp, Artificial
  Synthetic oligonucleotide
gaagtcgtccgcaagcgaaatatatacccggatctgtctgccctcaaaggcggcagttct

SEQ ID NO: 105027 - DNA, 60 bp, Artificial
  Synthetic oligonucleotide
aagacttgctaccttatggagtgatagtatgtgcttttatttttattcccgaaactgctt

SEQ ID NO: 105028 - DNA, 60 bp, Artificial
  Synthetic oligonucleotide
ggcatcggatctagctgaacgcgaattgactagggatacgcacaaggccattgtgtttgt

SEQ ID NO: 105029 - DNA, 60 bp, Artificial
  Synthetic oligonucleotide
tttggcatcggatctagctgaacgcgaattgactagggatacgcacaaggccattgtgtt

SEQ ID NO: 105030 - DNA, 60 bp, Artificial
  Synthetic oligonucleotide
aagcttcgaaactttgaaagaaagtctgaagcctatttggcatcggatctagctgaacgc

SEQ ID NO: 105031 - DNA, 60 bp, Artificial
  Synthetic oligonucleotide
gaagctttcttcgataagcttcgaaactttgaaagaaagtctgaagcctatttggcatcg

SEQ ID NO: 105032 - DNA, 60 bp, Artificial
  Synthetic oligonucleotide
gcttggtacacttgctaatcaatctggtggtgctaataacatcaccgaagctttcttcga

SEQ ID NO: 105033 - DNA, 60 bp, Artificial
  Synthetic oligonucleotide
tcaagcttggtacacttgctaatcaatctggtggtgctaataacatcaccgaagctttct

SEQ ID NO: 105034 - DNA, 50 bp, Artificial
  Synthetic oligonucleotide
gaaactgcttctgttttggacaatgtccgtgtcatgatcgggaaccaaaa

SEQ ID NO: 105035 - DNA, 60 bp, Artificial
  Synthetic oligonucleotide
gaaactgcttctgttttggacaatgtccgtgtcatgatcgggaaccaaaaacgaccattg

SEQ ID NO: 105036 - DNA, 57 bp, Artificial
  Synthetic oligonucleotide
cgaaatctacgcaaaaggcgtacgacagaaaggataagtccccttctaaaggcaaaa

SEQ ID NO: 105037 - DNA, 56 bp, Artificial
  Synthetic oligonucleotide
ttttgtatagtgacggaaacgtcatacacaagagcggtactttgaaacctaaatcc

SEQ ID NO: 105038 - DNA, 60 bp, Artificial
  Synthetic oligonucleotide
cccaggggaaagctcaaaagctgaagtcggcacctcgaaatctacgcaaaaggcgtacga

SEQ ID NO: 105039 - DNA, 60 bp, Artificial
  Synthetic oligonucleotide
tttaaccagtgctaacccaggggaaagctcaaaagctgaagtcggcacctcgaaatctac

SEQ ID NO: 105040 - DNA, 60 bp, Artificial
  Synthetic oligonucleotide
ttgatgagaacaggcgattatgcacaaataactaacatgctcttgaataatcaaccagta

SEQ ID NO: 105041 - DNA, 60 bp, Artificial
  Synthetic oligonucleotide
ttggttgcatgtcaactggctatagtgaatacaataatatatccagcgttcggaatgcaa

SEQ ID NO: 105042 - DNA, 60 bp, Artificial
  Synthetic oligonucleotide
attggaaagagacgaaatgtatggctacgtgaatatagctagaaatttagatgggttcca

SEQ ID NO: 105043 - DNA, 60 bp, Artificial
  Synthetic oligonucleotide
tggaaagagacgaaatgtatggctacgtgaatatagctagaaatttagatgggttccagc

SEQ ID NO: 105044 - DNA, 57 bp, Artificial
  Synthetic oligonucleotide
taaaggaattagtttcaaccgaagcgcaaattcaaaaaatgtcacaagacttgcaac

SEQ ID NO: 105045 - DNA, 60 bp, Artificial
  Synthetic oligonucleotide
gattcgaatgacttttatctagttgccaactatgattgggtgcctacttcaaccacaaaa

SEQ ID NO: 105046 - DNA, 60 bp, Artificial
  Synthetic oligonucleotide
tcaaccagtagcgctagttggagctcttccatttgttacagactcgtcagtcatatcgtt

SEQ ID NO: 105047 - DNA, 60 bp, Artificial
  Synthetic oligonucleotide
gcatgtggttactaactgtagtgccaaatgacatgttcataagggaatcattggttgcat

SEQ ID NO: 105048 - DNA, 58 bp, Artificial
  Synthetic oligonucleotide
tctagttgccaactatgattgggtgcctacttcaaccacaaaagtatataagcaagtt

SEQ ID NO: 105049 - DNA, 60 bp, Artificial
  Synthetic oligonucleotide
cgatgcatatgttaacatcaaatcttactttcactgtttactcagatctgcttgcattcg

SEQ ID NO: 105050 - DNA, 60 bp, Artificial
  Synthetic oligonucleotide
ttccaacaatgcctgttgattataagaggtcaatccagcgtggaatattattgctatcaa

SEQ ID NO: 105051 - DNA, 60 bp, Artificial
  Synthetic oligonucleotide
gcctgttgattataagaggtcaatccagcgtggaatattattgctatcaaataggcttgg

SEQ ID NO: 105052 - DNA, 60 bp, Artificial
  Synthetic oligonucleotide
cggaatgcaacgaatgcattatagaaacggagacccacaaacaccatttcagatagcaga

SEQ ID NO: 105053 - DNA, 60 bp, Artificial
  Synthetic oligonucleotide
tcatatcgttgatagcgaagcttgacgctacagtttttgcccaaatagttaaattacgga

SEQ ID NO: 105054 - DNA, 60 bp, Artificial
  Synthetic oligonucleotide
caaaactctgattgcagcaatgttaagtcaacgaaccatgtcgcttgatttcgtgactac

SEQ ID NO: 105055 - DNA, 60 bp, Artificial
  Synthetic oligonucleotide
cgctagttggagctcttccatttgttacagactcgtcagtcatatcgttgatagcgaagc

SEQ ID NO: 105056 - DNA, 60 bp, Artificial
  Synthetic oligonucleotide
cgattatgcacaaataactaacatgctcttgaataatcaaccagtagcgctagttggagc

SEQ ID NO: 105057 - DNA, 60 bp, Artificial
  Synthetic oligonucleotide
ctgtagtgccaaatgacatgttcataagggaatcattggttgcatgtcaactggctatag

SEQ ID NO: 105058 - DNA, 60 bp, Artificial
  Synthetic oligonucleotide
aattacccatcaatattgcatccaatagattacgctttcaatgagtattttttacaacac

SEQ ID NO: 105059 - DNA, 60 bp, Artificial
  Synthetic oligonucleotide
atatttcaagatgaggaaacagaaggtgcagtgagacgattcattgcggagatgagacag

SEQ ID NO: 105060 - DNA, 56 bp, Artificial
  Synthetic oligonucleotide
actattaaaagatatggcagttgaaaataaaaattcgagagatgccggtaaagttg

SEQ ID NO: 105061 - DNA, 60 bp, Artificial
  Synthetic oligonucleotide
gatgtagctagagttccagatgatcaaatgtatagattaagggatagactacgactattg

SEQ ID NO: 105062 - DNA, 60 bp, Artificial
  Synthetic oligonucleotide
agacagctaccaatttatagagcgaatggtgaaaaagagttgcgtaacagatggtattgg

SEQ ID NO: 105063 - DNA, 60 bp, Artificial
  Synthetic oligonucleotide
ccggaacaagcgaagaagcagactaagctatttagaatatttgaaccgagacagctacca

SEQ ID NO: 105064 - DNA, 60 bp, Artificial
  Synthetic oligonucleotide
aaccggaacaagcgaagaagcagactaagctatttagaatatttgaaccgagacagctac

SEQ ID NO: 105065 - DNA, 60 bp, Artificial
  Synthetic oligonucleotide
ccgaatgcaagagaaagatgacgagaaacaagatcaaaacaatagaatacaattgtctga

SEQ ID NO: 105066 - DNA, 53 bp, Artificial
  Synthetic oligonucleotide
ccgttatacccagaccgcagacattgtttcactattataatgttaatgttaat

SEQ ID NO: 105067 - DNA, 60 bp, Artificial
  Synthetic oligonucleotide
cagtcacgtcgttgtgtatgcttattggaaatgcaaccgttatacccagaccgcagacat

SEQ ID NO: 105068 - DNA, 60 bp, Artificial
  Synthetic oligonucleotide
gagttccagatgatcaaatgtatagattaagggatagactacgactattgccagtagaag

SEQ ID NO: 105069 - DNA, 60 bp, Artificial
  Synthetic oligonucleotide
gttaacatcaaatcttactttcactgtttactcagatctgcttgcattcgtatcggccga

SEQ ID NO: 105070 - DNA, 60 bp, Artificial
  Synthetic oligonucleotide
gcttggtcaattagttgatttaactaggttattagcttacaactacgaaacactaatggc

SEQ ID NO: 105071 - DNA, 60 bp, Artificial
  Synthetic oligonucleotide
ttgctatcaaataggcttggtcaattagttgatttaactaggttattagcttacaactac

SEQ ID NO: 105072 - DNA, 60 bp, Artificial
  Synthetic oligonucleotide
attacagttaacttcagtcacgtcgttgtgtatgcttattggaaatgcaaccgttatacc

SEQ ID NO: 105073 - DNA, 60 bp, Artificial
  Synthetic oligonucleotide
tcaattacattcctgaaaggataaggaatgacgttaactatatacttaatatggacagaa

SEQ ID NO: 105074 - DNA, 60 bp, Artificial
  Synthetic oligonucleotide
atgactgtttcaaaactctgattgcagcaatgttaagtcaacgaaccatgtcgcttgatt

SEQ ID NO: 105075 - DNA, 57 bp, Artificial
  Synthetic oligonucleotide
ctatattctggcaagatcggtagtaccagatttaaaggaattagtttcaaccgaagc

SEQ ID NO: 105076 - DNA, 55 bp, Artificial
  Synthetic oligonucleotide
ttacaactacgaaacactaatggcatgtgttacgatgaatatgcaacatgttcag

SEQ ID NO: 105077 - DNA, 60 bp, Artificial
  Synthetic oligonucleotide
tactttctaaatttgtatgatcaggttcttactgaaatgccagattatttactattaaaa

SEQ ID NO: 105078 - DNA, 60 bp, Artificial
  Synthetic oligonucleotide
tacagataagaaattcattgactggtatattaagactttttctaagactgaaaaaggatc

SEQ ID NO: 105079 - DNA, 60 bp, Artificial
  Synthetic oligonucleotide
gatcgtctttacgtcgaaatgaattagaagagaaaagtgccactaatacttcaaccacag

SEQ ID NO: 105080 - DNA, 60 bp, Artificial
  Synthetic oligonucleotide
ctagttcagtgttgtgcggtcttcagttcattatcgatgccgagtgacgacggctagggg

SEQ ID NO: 105081 - DNA, 60 bp, Artificial
  Synthetic oligonucleotide
cagataaatctttactcgaacagacttggagcgcagtagcgtcatttgttgaaacttggc

SEQ ID NO: 105082 - DNA, 57 bp, Artificial
  Synthetic oligonucleotide
cgaacgtttgaatctcttttataatattagtcttagcataattcccgtttcagcttt

SEQ ID NO: 105083 - DNA, 60 bp, Artificial
  Synthetic oligonucleotide
cattcgcaaacatttgttgacccgacttcatgatagactacaaaccgtagaaactagcac

SEQ ID NO: 105084 - DNA, 60 bp, Artificial
  Synthetic oligonucleotide
ttgtccactttgcgtactaattacgatggtacttctacttctagtccttttacagataag

SEQ ID NO: 105085 - DNA, 60 bp, Artificial
  Synthetic oligonucleotide
cgttaatttgtacattcgcaaacatttgttgacccgacttcatgatagactacaaaccgt

SEQ ID NO: 105086 - DNA, 60 bp, Artificial
  Synthetic oligonucleotide
catttgttgacccgacttcatgatagactacagaccgtagaaactagcactttacccaac

SEQ ID NO: 105087 - DNA, 60 bp, Artificial
  Synthetic oligonucleotide
cccaacatcacgcaacttaaagatcatattcgcagtttctttcaaaatgaacaccaacct

SEQ ID NO: 105088 - DNA, 60 bp, Artificial
  Synthetic oligonucleotide
tgaaatgacactagattattaccgtaaaattggcgaagtattaagtgcgatttggaaacg

SEQ ID NO: 105089 - DNA, 60 bp, Artificial
  Synthetic oligonucleotide
atgattaagaaggaaattatgaagaaacaatcatataatgacgcggtgaggatgagtttc

SEQ ID NO: 105090 - DNA, 60 bp, Artificial
  Synthetic oligonucleotide
atgattaagaaggaagttatgaagaaacaatcatataatgacgcggtgaggatgagtttc

SEQ ID NO: 105091 - DNA, 60 bp, Artificial
  Synthetic oligonucleotide
attatgaagaaacaatcatataatgacgcggtgaggatgagtttcacagagttttcgtca

SEQ ID NO: 105092 - DNA, 60 bp, Artificial
  Synthetic oligonucleotide
cctttagatggttttgacataccatctgagctaaccagatagagtggcgctccaaggtca

SEQ ID NO: 105093 - DNA, 60 bp, Artificial
  Synthetic oligonucleotide
ggtatgcaggaagaagcaatacaggagattgcaagtatgagtgctgatatactggaggca

SEQ ID NO: 105094 - DNA, 60 bp, Artificial
  Synthetic oligonucleotide
cgggagaatcaaataagtggatatcaatgggatcatcatgtactgtgaaagtgtgtccac

SEQ ID NO: 105095 - DNA, 60 bp, Artificial
  Synthetic oligonucleotide
tcaaataagtggatatcaatgggatcatcatgtactgtgaaagtgtgtccactgaataca

SEQ ID NO: 105096 - DNA, 60 bp, Artificial
  Synthetic oligonucleotide
gatatcaatgggatcatcatgtactgtgaaagtgtgtccactgaatacacaaacgttagg

SEQ ID NO: 105097 - DNA, 60 bp, Artificial
  Synthetic oligonucleotide
gcaatgaaacgacgacgagcgatggctcatatgatcttaataattgcggctgtagtagcg

SEQ ID NO: 105098 - DNA, 60 bp, Artificial
  Synthetic oligonucleotide
gcgatgaagcgacgacgagcgatggctcatatgatcttgataattgcggctgtggtagcg

SEQ ID NO: 105099 - DNA, 60 bp, Artificial
  Synthetic oligonucleotide
cgtgtagaattgacagcaatgaaacgacgacgagcgatggctcatatgatcttaataata

SEQ ID NO: 105100 - DNA, 60 bp, Artificial
  Synthetic oligonucleotide
gcgatgaaacgacgacgagcgatggctcatatgatcttgataattgcagctgtagtagcg

SEQ ID NO: 105101 - DNA, 60 bp, Artificial
  Synthetic oligonucleotide
cagcgatgaaacgacgacgagcgatggctcatatgatcttgataattgcggctgtggtag

SEQ ID NO: 105102 - DNA, 60 bp, Artificial
  Synthetic oligonucleotide
cagcgatgaagcgacgacgagcgatggctcatatgatcttgataattgcggctgtggtag

SEQ ID NO: 105103 - DNA, 60 bp, Artificial
  Synthetic oligonucleotide
gcgatgaaacgacgacgagcgatggctcatatgatcttgataattgcggctgtggtagcg

SEQ ID NO: 105104 - DNA, 60 bp, Artificial
  Synthetic oligonucleotide
gcaatgaaacgacgacgagcgatggctcatatgatcttaataatagcggctgtagtagcg

SEQ ID NO: 105105 - DNA, 60 bp, Artificial
  Synthetic oligonucleotide
cgtgtagaattgacagcaatgaaacgacgacgagcgatggctcatatgatcttaataatt

SEQ ID NO: 105106 - DNA, 60 bp, Artificial
  Synthetic oligonucleotide
cagcgatgaaacgacgacgagcgatggctcatatgatcttgataattgcagctgtagtag

SEQ ID NO: 105107 - DNA, 60 bp, Artificial
  Synthetic oligonucleotide
tagattgagattgttagatttgtcgggtcctctttttagagtatagagatatcctaaaat

SEQ ID NO: 105108 - DNA, 60 bp, Artificial
  Synthetic oligonucleotide
gtgactgcatctatgtgagaggttgagttgccgttgtctgtcttcggaagcggcggaact

SEQ ID NO: 105109 - DNA, 60 bp, Artificial
  Synthetic oligonucleotide
atgcggtgaggatgagttttacggaattttcatcagtcccgctagatggtttcgaattac

SEQ ID NO: 105110 - DNA, 60 bp, Artificial
  Synthetic oligonucleotide
tgatgcggtgaggatgagttttacggaattttcatcagtcccgctagatggtttcgaatt

SEQ ID NO: 105111 - DNA, 60 bp, Artificial
  Synthetic oligonucleotide
tgacaatgagtaacgtgacagagattcgtgctttgaagagattcgctagacagataaacc

SEQ ID NO: 105112 - DNA, 60 bp, Artificial
  Synthetic oligonucleotide
aagagattcgctagacagataaaccgtccggcagataaacagacagtaaatgacctacct

SEQ ID NO: 105113 - DNA, 60 bp, Artificial
  Synthetic oligonucleotide
actgtttggtcagctatgtcgtcaaattacttaacgtaattccatttaattggatagtct

SEQ ID NO: 105114 - DNA, 60 bp, Artificial
  Synthetic oligonucleotide
gccgttaaagaccgatacgatgttggagttctgagtactgtttggtcagctatgtcgtca

SEQ ID NO: 105115 - DNA, 60 bp, Artificial
  Synthetic oligonucleotide
gccagcggagcaccacgttcagctacagtaaatcttggagccatacctaattctggagca

SEQ ID NO: 105116 - DNA, 60 bp, Artificial
  Synthetic oligonucleotide
gccgtaatagccagcggagcaccacgttcagctacagtaaatcttggagccatacctaat

SEQ ID NO: 105117 - DNA, 60 bp, Artificial
  Synthetic oligonucleotide
gagctcaaacgacgctgtttaacccggttaatgttatgttcgattctttgagcttggctg

SEQ ID NO: 105118 - DNA, 60 bp, Artificial
  Synthetic oligonucleotide
ttcaacatattcgagctcaaacgacgctgtttaacccggttaatgttatgttcgattctt

SEQ ID NO: 105119 - DNA, 60 bp, Artificial
  Synthetic oligonucleotide
agtcgaccctgttcatactggacccttcacctataatgataaccttaaagtgcattgtta

SEQ ID NO: 105120 - DNA, 60 bp, Artificial
  Synthetic oligonucleotide
ttcgattctttgagcttggctgttacccccgaatctggatacactattgaagtcgaccct

SEQ ID NO: 105121 - DNA, 60 bp, Artificial
  Synthetic oligonucleotide
tgcattgttatgtagccgttaaagaccgatacgatgttggagttctgagtactgtttggt

SEQ ID NO: 105122 - DNA, 60 bp, Artificial
  Synthetic oligonucleotide
ctgttcatactggacccttcacctataatgataaccttaaagtgcattgttatgtagccg

SEQ ID NO: 105123 - DNA, 60 bp, Artificial
  Synthetic oligonucleotide
tgacctacctggtaattcgacagtaagtaaagatgaggtactcacgctcgcctattctga

SEQ ID NO: 105124 - DNA, 60 bp, Artificial
  Synthetic oligonucleotide
gagattcgctagacagataaaccgtccggcagataaacagacagtaaatgacctacctgg

SEQ ID NO: 105125 - DNA, 60 bp, Artificial
  Synthetic oligonucleotide
cctattctgacggtagtgttaaacggctactcggtcgtggcgcagacggttcaattcttg

SEQ ID NO: 105126 - DNA, 60 bp, Artificial
  Synthetic oligonucleotide
cctacctggtaattcgacagtaagtaaagatgaggtactcacgctcgcctattctgacgg

SEQ ID NO: 105127 - DNA, 60 bp, Artificial
  Synthetic oligonucleotide
tcaattcttggcaatgttaatgtttttcatatgaacggagatttctttagatccatgtat

SEQ ID NO: 105128 - DNA, 60 bp, Artificial
  Synthetic oligonucleotide
ctgacggtagtgttaaacggctactcggtcgtggcgcagacggttcaattcttggcaatg

SEQ ID NO: 105129 - DNA, 60 bp, Artificial
  Synthetic oligonucleotide
agcattcatatctcatcctggactacataaccgcccattcatgtgtcgtgctaacttggg

SEQ ID NO: 105130 - DNA, 60 bp, Artificial
  Synthetic oligonucleotide
atccatgtatctagcagcattcatatctcatcctggactacataaccgcccattcatgtg

SEQ ID NO: 105131 - DNA, 60 bp, Artificial
  Synthetic oligonucleotide
ctaacttgggatacgttgttaaccatctgaactcagccgtaatagccagcggagcaccac

SEQ ID NO: 105132 - DNA, 60 bp, Artificial
  Synthetic oligonucleotide
cattcatgtgtcgtgctaacttgggatacgttgttaaccatctgaactcagccgtaatag

SEQ ID NO: 105133 - DNA, 64 bp, Artificial
  Synthetic oligonucleotide
ggtcagctatgtcgtcaaattacttaacgtaattccatttaattggatagtctatacaaaaccg

SEQ ID NO: 105134 - DNA, 60 bp, Artificial
  Synthetic oligonucleotide
cggtatgctccaaggaatcagagaagccatggctccctatagggatttgcgatatgaagg

SEQ ID NO: 105135 - DNA, 60 bp, Artificial
  Synthetic oligonucleotide
tgaatgagtatttttctagggttggcgggataactagtccggattataagaagatcggag

SEQ ID NO: 105136 - DNA, 51 bp, Artificial
  Synthetic oligonucleotide
acaatcttataatgacgcggtgaggatgagttttacagagttctcgtcaat

SEQ ID NO: 105137 - DNA, 60 bp, Artificial
  Synthetic oligonucleotide
acaaactgaacgtatgatgcgagtaaattggaagaaatggtggcaagttttcttatacag

SEQ ID NO: 105138 - DNA, 60 bp, Artificial
  Synthetic oligonucleotide
actactacaccacaaactgaacgtatgatgcgagtaaattggaaaaaatggtggcaagtt

SEQ ID NO: 105139 - DNA, 60 bp, Artificial
  Synthetic oligonucleotide
cgtcgccgatgacaatgatccagaacttgaatcagggcgagatcgtgtacaccacgacgg

SEQ ID NO: 105140 - DNA, 60 bp, Artificial
  Synthetic oligonucleotide
tggacagaattataaaagaaatgagacgtcagctggagatgattgataaattaactactc

SEQ ID NO: 105141 - DNA, 60 bp, Artificial
  Synthetic oligonucleotide
ctctattcggacgttgcgtttttatgtggttgtggcgaccttggtctactggttatgagt

SEQ ID NO: 105142 - DNA, 56 bp, Artificial
  Synthetic oligonucleotide
ttttatgtggttgtggcgaccttggtctactggttatgagtagatatcaagaagtc

SEQ ID NO: 105143 - DNA, 60 bp, Artificial
  Synthetic oligonucleotide
ctgatcagaacgctgatggcgatcgattggttgaaaatcttctgcttaaggaatcgtcca

SEQ ID NO: 105144 - DNA, 60 bp, Artificial
  Synthetic oligonucleotide
tcaagaagtcatgaccttacgggtacgaagtgccatttatggcatattctgctacctaca

SEQ ID NO: 105145 - DNA, 60 bp, Artificial
  Synthetic oligonucleotide
tttatggcatattctgctacctacaagctctgaccgcctacttaacctatttgggtgcta

SEQ ID NO: 105146 - DNA, 60 bp, Artificial
  Synthetic oligonucleotide
atcaaaacgctagatgaatgggagagtggaaaaaatccatatgaaccattagaagtgact

SEQ ID NO: 105147 - DNA, 60 bp, Artificial
  Synthetic oligonucleotide
atcaaaacgctagatgaatgggagagtggaaaaaatccatatgaacccttagaagtgact

SEQ ID NO: 105148 - DNA, 60 bp, Artificial
  Synthetic oligonucleotide
aaaacgctagatgaatgggagagtggaaaaaatccatatgaaccgtcagaagtgactgca

SEQ ID NO: 105149 - DNA, 60 bp, Artificial
  Synthetic oligonucleotide
tgtatgaatttatgatggcagtcttgaatgtcactaaagagctgaacgatccgaatgttc

SEQ ID NO: 105150 - DNA, 60 bp, Artificial
  Synthetic oligonucleotide
ctccacaggaccagacagtgatcagaataacaagaagaagctggcaaatccattcgcccc

SEQ ID NO: 105151 - DNA, 60 bp, Artificial
  Synthetic oligonucleotide
atgcgttagtcgtgttggacgctgggattgcaactctatcctggtatttggatcattaat

SEQ ID NO: 105152 - DNA, 60 bp, Artificial
  Synthetic oligonucleotide
agattgctatgggggatcaaatatttatgttggtttggatatttccaagccaccatatat

SEQ ID NO: 105153 - DNA, 60 bp, Artificial
  Synthetic oligonucleotide
gcgttagtcgtgttggacgctgggattgcaactctatcctggtatttggatcattaattg

SEQ ID NO: 105154 - DNA, 60 bp, Artificial
  Synthetic oligonucleotide
cacgaatgcacaatggggcagaggaaacactggagccactagtgccgcaattgcagccct

SEQ ID NO: 105155 - DNA, 60 bp, Artificial
  Synthetic oligonucleotide
gacgaaaccgttcacgaatgcacaatggggcagaggaaacactggagccactagtgccgc

SEQ ID NO: 105156 - DNA, 51 bp, Artificial
  Synthetic oligonucleotide
cttcacatctgcttcgggccggtaattctccatggcaactgactcagtttt

SEQ ID NO: 105157 - DNA, 60 bp, Artificial
  Synthetic oligonucleotide
cttcacatctgcttcgggccggtaattctccatggcaactgactcagtttttagattggg

SEQ ID NO: 105158 - DNA, 60 bp, Artificial
  Synthetic oligonucleotide
ccgcttattgataacaattcggtacccgcagcatcgcgtaacattcatggatggactggc

SEQ ID NO: 105159 - DNA, 60 bp, Artificial
  Synthetic oligonucleotide
aattcggtacccgcagcatcgcgtaacattcatggatggactggcagggctggtgatcag

SEQ ID NO: 105160 - DNA, 60 bp, Artificial
  Synthetic oligonucleotide
agtgtggactctttcctgttcattgaatcattctgcacagattagaccgggtaatcgtag

SEQ ID NO: 105161 - DNA, 60 bp, Artificial
  Synthetic oligonucleotide
gtgtggactctttcctgttcattgaatcattctgcacagattagaccgggtaatcgtagc

SEQ ID NO: 105162 - DNA, 60 bp, Artificial
  Synthetic oligonucleotide
gtaatcgtagcttatttgttatgccaacaagtccggattggaatatggatgtcaacttga

SEQ ID NO: 105163 - DNA, 60 bp, Artificial
  Synthetic oligonucleotide
ttgttatgccaacaagtccggattggaatatggatgtcaacttgattctgagctcgactt

SEQ ID NO: 105164 - DNA, 60 bp, Artificial
  Synthetic oligonucleotide
cctgggaacataacggtacatatgcgcggatgacccagattatactgtcattattctggc

SEQ ID NO: 105165 - DNA, 60 bp, Artificial
  Synthetic oligonucleotide
tactgtcattattctggctatcatatgttggtgtgattcaccaacagaatacataccgga

SEQ ID NO: 105166 - DNA, 60 bp, Artificial
  Synthetic oligonucleotide
ggctatcatatgttggtgtgattcaccaacagaatacataccggacattttacttccagt

SEQ ID NO: 105167 - DNA, 60 bp, Artificial
  Synthetic oligonucleotide
cggacattttacttccagtgcaatcggcgaggtgacgctgctgaagtgtggactctttcc

SEQ ID NO: 105168 - DNA, 60 bp, Artificial
  Synthetic oligonucleotide
ggactggcagggctggtgatcagctacatggtttccaaattagacggatggtgactgaat

SEQ ID NO: 105169 - DNA, 60 bp, Artificial
  Synthetic oligonucleotide
atggactggcagggctggtgatcagctacatggtttccaaattagacggatggtgactga

SEQ ID NO: 105170 - DNA, 60 bp, Artificial
  Synthetic oligonucleotide
ctcaagctcagcagaaccaagtcgaagtgttagcggatcaaactcaacagtttaagcgag

SEQ ID NO: 105171 - DNA, 60 bp, Artificial
  Synthetic oligonucleotide
atgactcaagctcagcagaaccaagtcgaagtgttagcggatcaaactcaacagtttaag

SEQ ID NO: 105172 - DNA, 60 bp, Artificial
  Synthetic oligonucleotide
gacgatcaatataaccaggctcatccgaactctacgatgtttcggacgaaaccgttcacg

SEQ ID NO: 105173 - DNA, 60 bp, Artificial
  Synthetic oligonucleotide
agggaagacgatcaatataaccaggctcatccgaactctacgatgtttcggacgaaaccg

SEQ ID NO: 105174 - DNA, 60 bp, Artificial
  Synthetic oligonucleotide
taataggccctgggaacataacggtacatatgcgcggatgacccagattatactgtcatt

SEQ ID NO: 105175 - DNA, 54 bp, Artificial
  Synthetic oligonucleotide
aaatcagcttctcatgaactactttgggcatacgtttgcggagattgcatatac

SEQ ID NO: 105176 - DNA, 60 bp, Artificial
  Synthetic oligonucleotide
cacgtgacccaagatttaagcatcgggtatatcagcaattgagcgccgtcactctgctta

SEQ ID NO: 105177 - DNA, 60 bp, Artificial
  Synthetic oligonucleotide
ttagtcatagctccaccgcgagtgttggcgcagccagctttgcaggcgcaagcagatcgg

SEQ ID NO: 105178 - DNA, 60 bp, Artificial
  Synthetic oligonucleotide
cctactctcgacgggttagtcatagctccaccgcgagtgttggcgcagccagctttgcag

SEQ ID NO: 105179 - DNA, 60 bp, Artificial
  Synthetic oligonucleotide
catcgatggggagacatcagattcctgcggctagtgtggtcagctcctactctcgacggg

SEQ ID NO: 105180 - DNA, 60 bp, Artificial
  Synthetic oligonucleotide
ccaaccatcgatggggagacatcagattcctgcggctagtgtggtcagctcctactctcg

SEQ ID NO: 105181 - DNA, 50 bp, Artificial
  Synthetic oligonucleotide
aacagctggttcaagatactatcagatgagttgtcttttaagtggtactc

SEQ ID NO: 105182 - DNA, 60 bp, Artificial
  Synthetic oligonucleotide
gggtaagtcttgggagaggactagccacgtcggctctggtgccaacagctggttcaagat

SEQ ID NO: 105183 - DNA, 60 bp, Artificial
  Synthetic oligonucleotide
ttagattgggtaagtcttgggagaggactagccacgtcggctctggtgccaacagctggt

SEQ ID NO: 105184 - DNA, 60 bp, Artificial
  Synthetic oligonucleotide
gataagatgataaaatatgatccaacacgcattgtattagatgacaacttctcagctttt

SEQ ID NO: 105185 - DNA, 60 bp, Artificial
  Synthetic oligonucleotide
gaggagaacatagctgagaaaatccagatgtgcggccgagagcttttggataaatacaaa

SEQ ID NO: 105186 - DNA, 60 bp, Artificial
  Synthetic oligonucleotide
ctcagcttttccatacctatacattccagttaattatggtcagatgattcaaccgattag

SEQ ID NO: 105187 - DNA, 60 bp, Artificial
  Synthetic oligonucleotide
tatgatccaacacgcattgtattagatgacaacttctcagcttttccatacctatacatt

SEQ ID NO: 105188 - DNA, 60 bp, Artificial
  Synthetic oligonucleotide
cattttgaagaagtgatggatcgcattacagagaggaacgacccacatgcggcttacaga

SEQ ID NO: 105189 - DNA, 60 bp, Artificial
  Synthetic oligonucleotide
gtatgtgccaaacaacattttgaagaagtgatggatcgcattacagagaggaacgaccca

SEQ ID NO: 105190 - DNA, 60 bp, Artificial
  Synthetic oligonucleotide
tatgaggagaacatagctgagaaaatccagatgtgcggccgagagcttttggataaatac

SEQ ID NO: 105191 - DNA, 60 bp, Artificial
  Synthetic oligonucleotide
tggatagagaaaaagtttggctgcaatgctataaaagtttttcagaaccatatgaggaga

SEQ ID NO: 105192 - DNA, 60 bp, Artificial
  Synthetic oligonucleotide
ccagacatataccccatgcgaagaccaagaatggagatgtgccgtcgagtgatggaggcg

SEQ ID NO: 105193 - DNA, 60 bp, Artificial
  Synthetic oligonucleotide
gatgattgggtggctccagacatataccccatgcgaagaccaagaatggagatgtgccgt

SEQ ID NO: 105194 - DNA, 60 bp, Artificial
  Synthetic oligonucleotide
taagggggactggagtgtgggaaggtgatgaatggcaggaaggtgtttatctattggcca

SEQ ID NO: 105195 - DNA, 60 bp, Artificial
  Synthetic oligonucleotide
aacagggatggaggctttgatccgtaccgcgatacagatccacagatgggtaagggggac

SEQ ID NO: 105196 - DNA, 55 bp, Artificial
  Synthetic oligonucleotide
tgtagcacagtgatggaggtgatgatcgatgaacatgttgatgcatcactcccag

SEQ ID NO: 105197 - DNA, 60 bp, Artificial
  Synthetic oligonucleotide
cgtgcaaggcaggcacaaatgtcaactgtgcttcctaaggaatgggtgcgaccggcagac

SEQ ID NO: 105198 - DNA, 60 bp, Artificial
  Synthetic oligonucleotide
aggattcgtgcaaggcaggcacaaatgtcaactgtgcttcctaaggaatgggtgcgaccg

SEQ ID NO: 105199 - DNA, 60 bp, Artificial
  Synthetic oligonucleotide
ggattgctgtgagagagccggcaaactttgagtatgtgagaggattcgtgcaaggcaggc

SEQ ID NO: 105200 - DNA, 60 bp, Artificial
  Synthetic oligonucleotide
atactggtgaggattgctgtgagagagccggcaaactttgagtatgtgagaggattcgtg

SEQ ID NO: 105201 - DNA, 60 bp, Artificial
  Synthetic oligonucleotide
gcaggaaacaaggaatggcagacgtggttgctgccaatgatactggtgaggattgctgtg

SEQ ID NO: 105202 - DNA, 60 bp, Artificial
  Synthetic oligonucleotide
ctattggccagagtgttgctgcgatgggagttgtcatcgcaagcgcgatctatcatgttt

SEQ ID NO: 105203 - DNA, 60 bp, Artificial
  Synthetic oligonucleotide
gggactggagtgtgggaaggtgatgaatggcaggaaggtgtttatctattggccagagtg

SEQ ID NO: 105204 - DNA, 60 bp, Artificial
  Synthetic oligonucleotide
gatgtgttatgacgctcgcatatgctgagagagcgaaggttgtgaccttcaacgtgccgg

SEQ ID NO: 105205 - DNA, 60 bp, Artificial
  Synthetic oligonucleotide
ttggatatgcgccacgaaaggatggaacaataccggattggaaagatttaggcacgtttc

SEQ ID NO: 105206 - DNA, 60 bp, Artificial
  Synthetic oligonucleotide
ggccagagtgttgctgcgatgggagttgtcatcgcaagcgcgatctatcatgtttagact

SEQ ID NO: 105207 - DNA, 60 bp, Artificial
  Synthetic oligonucleotide
gagccgatgtgttatgacgctcgcatatgctgagagagcgaaggttgtgaccttcaacgt

SEQ ID NO: 105208 - DNA, 60 bp, Artificial
  Synthetic oligonucleotide
gcgccacgaaaggatggaacaataccggattggaaagatttaggcacgtttctggataca

SEQ ID NO: 105209 - DNA, 60 bp, Artificial
  Synthetic oligonucleotide
gcgagttgggtacgtcgaagaacgccggtatgtgactcaactatttggagattgcccagc

SEQ ID NO: 105210 - DNA, 60 bp, Artificial
  Synthetic oligonucleotide
caactatttggagattgcccagcaggggagttcccaatgcatagcatgatgctcagaaga

SEQ ID NO: 105211 - DNA, 60 bp, Artificial
  Synthetic oligonucleotide
atttggagattgcccagcaggggagttcccaatgcatagcatgatgctcagaagatggga

SEQ ID NO: 105212 - DNA, 60 bp, Artificial
  Synthetic oligonucleotide
gctcagaagatgggaaagaaacggcagatcgcaaacatttgttcagatgagacataccat

SEQ ID NO: 105213 - DNA, 60 bp, Artificial
  Synthetic oligonucleotide
gatgtgccgtcgagtgatggaggcggtcgggacatgtggtttcacagggttcagtgggcc

SEQ ID NO: 105214 - DNA, 60 bp, Artificial
  Synthetic oligonucleotide
gtcgagtgatggaggcggtcgggacatgtggtttcacagggttcagtgggccagtgtttc

SEQ ID NO: 105215 - DNA, 60 bp, Artificial
  Synthetic oligonucleotide
ggaaaatgaagggtttgccaggataataaatcggtatgctcaaatggcagttcagcaata

SEQ ID NO: 105216 - DNA, 60 bp, Artificial
  Synthetic oligonucleotide
ttcagcaatacctgcgagttgggtacgtcgaagaacgccggtatgtgactcaactatttg

SEQ ID NO: 105217 - DNA, 60 bp, Artificial
  Synthetic oligonucleotide
gggaaagaaacggcagatcgcaaacatttgttcagatgagacataccattgcaggaaaca

SEQ ID NO: 105218 - DNA, 60 bp, Artificial
  Synthetic oligonucleotide
gacataccattgcaggaaacaaggaatggcagacgtggttgctgccaatgatactggtga

SEQ ID NO: 105219 - DNA, 60 bp, Artificial
  Synthetic oligonucleotide
catacaattcccaacatgcagtactactccgagtaacttatatgccacatcatgaaagat

SEQ ID NO: 105220 - DNA, 60 bp, Artificial
  Synthetic oligonucleotide
cgcggctatacggctaaaaatcttgatttaatgtggtatcgtcttttcacgggcacgcaa

SEQ ID NO: 105221 - DNA, 60 bp, Artificial
  Synthetic oligonucleotide
tcaaatggttccctattttgagagtggagcagaatatactatgcgtattggtagacctat

SEQ ID NO: 105222 - DNA, 60 bp, Artificial
  Synthetic oligonucleotide
ccctattttgagagtggagcagaatatactatgcgtattggtagacctattgcaacctca

SEQ ID NO: 105223 - DNA, 60 bp, Artificial
  Synthetic oligonucleotide
atgcccactgagattgcaatctctacatgtggaattgtcaacgttcgttttaatggatgg

SEQ ID NO: 105224 - DNA, 60 bp, Artificial
  Synthetic oligonucleotide
taatggatgggtttttactaatcttgcgccacgatctaagtttagattgtacgggacgga

SEQ ID NO: 105225 - DNA, 60 bp, Artificial
  Synthetic oligonucleotide
gaaaatttcaaagatgctgttcgagaaagaatgcctatatgggtagtagctaataaagga

SEQ ID NO: 105226 - DNA, 60 bp, Artificial
  Synthetic oligonucleotide
gctttaatgttatcgacagtgatgcatatggatggtttgtttctaaagttgcttatattc

SEQ ID NO: 105227 - DNA, 60 bp, Artificial
  Synthetic oligonucleotide
gtagacctattgcaacctcattttcgaccttttctagagaaaggatggctgaaaatttca

SEQ ID NO: 105228 - DNA, 60 bp, Artificial
  Synthetic oligonucleotide
cctcattttcgaccttttctagagaaaggatggctgaaaatttcaaagatgctgttcgag

SEQ ID NO: 105229 - DNA, 60 bp, Artificial
  Synthetic oligonucleotide
ctgtttagacaatggcttggtatgagtaataaagttgtggacgaatcggtagtagctcag

SEQ ID NO: 105230 - DNA, 61 bp, Artificial
  Synthetic oligonucleotide
gttatcgacagtgatgcatatggatggtttgtttctaaagttgcttatattcataaagagg

SEQ ID NO: 105231 - DNA, 60 bp, Artificial
  Synthetic oligonucleotide
ataatgtattcactaactaaacagaagcgagatataaataaagtgttaacttttccatac

SEQ ID NO: 105232 - DNA, 52 bp, Artificial
  Synthetic oligonucleotide
agtcaataccagacagaaagcagatcttacgtatttaacaatggaacatctc

SEQ ID NO: 105233 - DNA, 60 bp, Artificial
  Synthetic oligonucleotide
aatatttccgatttttatcaatagatttagacagaacaaatacaataatcgatcaaatac

SEQ ID NO: 105234 - DNA, 60 bp, Artificial
  Synthetic oligonucleotide
tattcagactgaatgtgctaaaggtaacgtcgttaagcttcaaaaaagagaagacatttc

SEQ ID NO: 105235 - DNA, 60 bp, Artificial
  Synthetic oligonucleotide
atactcgatgaatcaaagagagtagatcctctcgcgttattgaatgaaagtattcagact

SEQ ID NO: 105236 - DNA, 60 bp, Artificial
  Synthetic oligonucleotide
aagacatttcatttgcgtttgagtgttacgaatatacaggtaattatgttaaagggaata

SEQ ID NO: 105237 - DNA, 60 bp, Artificial
  Synthetic oligonucleotide
tcctttttctctgtttagacaatggcttggtatgagtaataaagttgtggacgaatcggt

SEQ ID NO: 105238 - DNA, 60 bp, Artificial
  Synthetic oligonucleotide
gtcgttctatattatctaagcgtgcggaccctgttgtagaattaatgttgcatgcgtatt

SEQ ID NO: 105239 - DNA, 60 bp, Artificial
  Synthetic oligonucleotide
actaaacagaagcgagatataaataaagtgttaacttttccatacgtaacacaccgatgg

SEQ ID NO: 105240 - DNA, 60 bp, Artificial
  Synthetic oligonucleotide
ctagtactaacaaacaattcttaaataatattattaaactcgaacgaaaaatactcgatg

SEQ ID NO: 105241 - DNA, 60 bp, Artificial
  Synthetic oligonucleotide
aggtactatcatacaattttcaggtaatggaattccgatgaaatataaatctagtactaa

SEQ ID NO: 105242 - DNA, 60 bp, Artificial
  Synthetic oligonucleotide
aagagagtagatcctctcgcgttattgaatgaaagtattcagactgaatgtgctaaaggt

SEQ ID NO: 105243 - DNA, 60 bp, Artificial
  Synthetic oligonucleotide
cgttactatagttcatacaattcccaacatgcagtactactccgagtaacttatatgcca

SEQ ID NO: 105244 - DNA, 60 bp, Artificial
  Synthetic oligonucleotide
cggttttgggttaatcatgaatgacattcaaactaaagttgatctggaaactaagaatac

SEQ ID NO: 105245 - DNA, 59 bp, Artificial
  Synthetic oligonucleotide
aaaatcttgatttaatgtggtatcgtcttttcacgggcacgcaacgtggtatttactat

SEQ ID NO: 105246 - DNA, 50 bp, Artificial
  Synthetic oligonucleotide
ctaagaatactcattacgtcgttgttgattttgatgaagctgaagagtct

SEQ ID NO: 105247 - DNA, 64 bp, Artificial
  Synthetic oligonucleotide
gggttaatcatgaatgacattcaaactaaagttgatctggaaactaagaatactcattacgtcg

SEQ ID NO: 105248 - DNA, 60 bp, Artificial
  Synthetic oligonucleotide
gcatcgcgcgatgattcagaacgcattggatggatcgataatcgaaaatggaaatgtagc

SEQ ID NO: 105249 - DNA, 60 bp, Artificial
  Synthetic oligonucleotide
cgcgatgattcagaacgcattggatggatcgataatcgaaaatggaaatgtagccacacg

SEQ ID NO: 105250 - DNA, 60 bp, Artificial
  Synthetic oligonucleotide
caagcaatgactcccagacatcgggcaatttatccagaagggtggatgttgaggtatgcg

SEQ ID NO: 105251 - DNA, 60 bp, Artificial
  Synthetic oligonucleotide
aggtttgcgtcgtgcagggtggttgacctcgcggcgtagactcccactgctgtataacgg

SEQ ID NO: 105252 - DNA, 60 bp, Artificial
  Synthetic oligonucleotide
cgctagatggtttcgaaatgccattaacctgaggacagtaggtagagtggcgccccgagg

SEQ ID NO: 105253 - DNA, 60 bp, Artificial
  Synthetic oligonucleotide
gaaagttattccaacgcctgaaactcatttacctagtgctcgaaacgtgcctggaaatgt

SEQ ID NO: 105254 - DNA, 60 bp, Artificial
  Synthetic oligonucleotide
gaaagctattccgacgcctgaaactcacttacctagtgctcgaaacgtgcctggaaatgt

SEQ ID NO: 105255 - DNA, 60 bp, Artificial
  Synthetic oligonucleotide
ggaccgtgtgatagagtacattgggagtaactcaatgcgcacagcaggtagaaccgccac

SEQ ID NO: 105256 - DNA, 60 bp, Artificial
  Synthetic oligonucleotide
ggggcgttccgagcgttggggggagtgacgagatctgcgctgcccgggtacgggagttcg

SEQ ID NO: 105257 - DNA, 60 bp, Artificial
  Synthetic oligonucleotide
ggggagtgacgagatctgcgctgcccgggtacgggagttcggagtgaccaaacgttagcc

SEQ ID NO: 105258 - DNA, 56 bp, Artificial
  Synthetic oligonucleotide
ggggagtgacgagatctgcgctgcccgggtacgggagttcggagtgaccaaacgtt

SEQ ID NO: 105259 - DNA, 60 bp, Artificial
  Synthetic oligonucleotide
ctgagattgggtggcacgttcctcgtgaacagctgatgcaagatggatggtgtggatgcg

SEQ ID NO: 105260 - DNA, 60 bp, Artificial
  Synthetic oligonucleotide
atctacgtctgctgagattgggtggcacgttcctcgtgaacagctgatgcaagatggatg

SEQ ID NO: 105261 - DNA, 60 bp, Artificial
  Synthetic oligonucleotide
ctgacatgataaacagaaagcgtctgcgcgttcaaactccatcagaccgtcgagctgcgc

SEQ ID NO: 105262 - DNA, 60 bp, Artificial
  Synthetic oligonucleotide
cacctcagatcgtttctgacatgataaacagaaagcgtctgcgcgttcaaactccatcag

SEQ ID NO: 105263 - DNA, 60 bp, Artificial
  Synthetic oligonucleotide
cggtgaggatgagctttacggaattttcatcagtcccgctagatggtttcgaattaccat

SEQ ID NO: 105264 - DNA, 60 bp, Artificial
  Synthetic oligonucleotide
gcggtgaggatgagctttacggaattttcatcagtcccgctagatggtttcgaattacca

SEQ ID NO: 105265 - DNA, 60 bp, Artificial
  Synthetic oligonucleotide
gaccgaagaggattcttcctaaaactgctatgcgatttaaagtgccattaagccagcagc

SEQ ID NO: 105266 - DNA, 60 bp, Artificial
  Synthetic oligonucleotide
agagaccgaagaggattcttcctaaaactgctatgcgatttaaagtgccattaagccagc

SEQ ID NO: 105267 - DNA, 60 bp, Artificial
  Synthetic oligonucleotide
agaccaagaggattcttcctaaaactgctatgcgatttaaagtgccattaagccagcagc

SEQ ID NO: 105268 - DNA, 60 bp, Artificial
  Synthetic oligonucleotide
ccaagaggattcttcctaaaactgctatgcgatttaaagtaccattaagccagcagcccc

SEQ ID NO: 105269 - DNA, 60 bp, Artificial
  Synthetic oligonucleotide
tgaaattttagagaaagctgtgaagtcttatggcaaagtgattggagaggaggaacgaag

SEQ ID NO: 105270 - DNA, 60 bp, Artificial
  Synthetic oligonucleotide
ggagaccaagaggattcttcctaaaactgctatgcgatttaaagtaccattaagccagca

SEQ ID NO: 105271 - DNA, 60 bp, Artificial
  Synthetic oligonucleotide
aaatgggcactaagctggctgcgccgactgtgtagagatgcgacctatctatgcactcgg

SEQ ID NO: 105272 - DNA, 60 bp, Artificial
  Synthetic oligonucleotide
ttccgagcggatttcgcgacgggaacaggatataatggttgggcgacgattgatgtcgag

SEQ ID NO: 105273 - DNA, 60 bp, Artificial
  Synthetic oligonucleotide
acggggttttttaaccagtgttaacccaggggaaagctcaaaagctgaagccggcacctc

SEQ ID NO: 105274 - DNA, 60 bp, Artificial
  Synthetic oligonucleotide
ccggcacctcgaaatccacgcaaaaagcgtacgacaggaaggataagtccccttctaaag

SEQ ID NO: 105275 - DNA, 60 bp, Artificial
  Synthetic oligonucleotide
ttcctcaaattctgaaacggatttgagttctgacagtgatgccaatactcgcaaatcaaa

SEQ ID NO: 105276 - DNA, 51 bp, Artificial
  Synthetic oligonucleotide
tacgatgctgatccctttgtggactcgtatcttgctgcttgatcacgtagc

SEQ ID NO: 105277 - DNA, 60 bp, Artificial
  Synthetic oligonucleotide
ggaggaggaagcttgggctgcggcgaatgattttgaggatttgatgctgactgatcaagt

SEQ ID NO: 105278 - DNA, 60 bp, Artificial
  Synthetic oligonucleotide
ggtgaaaggatggatccagcagtaagaatggttgcaggcgttgtaggccatctgcttttc

SEQ ID NO: 105279 - DNA, 60 bp, Artificial
  Synthetic oligonucleotide
tttgaggatttgatgctgactgatcaagtatatatgcatagagatatgctcccagagcct

SEQ ID NO: 105280 - DNA, 60 bp, Artificial
  Synthetic oligonucleotide
ccctggtgaaaggatggatccagcagtaagaatggttgcaggcgttgtaggtcatctgct

SEQ ID NO: 105281 - DNA, 60 bp, Artificial
  Synthetic oligonucleotide
tgaggatttgatgctgactgatcaagtatatatgcacagagatatgctcccagaacctcg

SEQ ID NO: 105282 - DNA, 58 bp, Artificial
  Synthetic oligonucleotide
tcgcatcgtacgcggaagcgtttcgtgatgatgtaagattgagacaaattaaacgcca

SEQ ID NO: 105283 - DNA, 60 bp, Artificial
  Synthetic oligonucleotide
attcgcatcgtacgcggaagcgtttcgtgatgatgtaagattgagacagattaaacgcca

SEQ ID NO: 105284 - DNA, 60 bp, Artificial
  Synthetic oligonucleotide
tgcattcgcatcgtacgcggaagcgtttcgtgatgatgtgaggttaagacaaattaagcg

SEQ ID NO: 105285 - DNA, 60 bp, Artificial
  Synthetic oligonucleotide
ttcgcatcgtacgcggaagcgtttcgtgatgatgtaagattgagacagattaaacgccat

SEQ ID NO: 105286 - DNA, 60 bp, Artificial
  Synthetic oligonucleotide
ttcgcatcgtacgcggaagcgtttcgtgatgatgtaagattgagacaaatcaaacgccat

SEQ ID NO: 105287 - DNA, 60 bp, Artificial
  Synthetic oligonucleotide
gcatcgtacgcggaagcgtttcgtgatgatgtgaggttaagacaaattaagcgacatgtg

SEQ ID NO: 105288 - DNA, 60 bp, Artificial
  Synthetic oligonucleotide
gcatcgtacgcggaagcgtttcgtgatgatgtaagattgagacagattaaacgccatgtg

SEQ ID NO: 105289 - DNA, 60 bp, Artificial
  Synthetic oligonucleotide
gcatcgtacgcggaagcgtttcgtgatgatgtgagactgagacaaattaagcgacatgtg

SEQ ID NO: 105290 - DNA, 60 bp, Artificial
  Synthetic oligonucleotide
ttcgcatcgtacgcggaagcgtttcgtgatgatgtaagattgagacaaattaaacgccat

SEQ ID NO: 105291 - DNA, 60 bp, Artificial
  Synthetic oligonucleotide
tgcattcgcatcgtacgcggaagcgtttcgtgatgatgtgagactgagacaaattaagcg

SEQ ID NO: 105292 - DNA, 60 bp, Artificial
  Synthetic oligonucleotide
cgcatcgtacgcggaagcgtttcgtgatgatgtaagattgagacaaatcaaacgccatgt

SEQ ID NO: 105293 - DNA, 60 bp, Artificial
  Synthetic oligonucleotide
cgcatcgtacgcggaagcgtttcgtgatgatgtaagattgagacaaattaaacgccatgt

SEQ ID NO: 105294 - DNA, 60 bp, Artificial
  Synthetic oligonucleotide
gacctgagcagactttcaacagcattattgcaattatcagatacgtattaccaacatgcg

SEQ ID NO: 105295 - DNA, 60 bp, Artificial
  Synthetic oligonucleotide
gacctgagcagactttcaacagcattattgcaattatcagatacgtactatcaacatgcg

SEQ ID NO: 105296 - DNA, 60 bp, Artificial
  Synthetic oligonucleotide
caagcaatgactcccagacatcgtgcgatttatccagaagggtggatgttgagatatgcg

SEQ ID NO: 105297 - DNA, 64 bp, Artificial
  Synthetic oligonucleotide
gctcttacaatatagttatcattcctgatagcccaaatgattcagaatctattgaacagatagc

SEQ ID NO: 105298 - DNA, 60 bp, Artificial
  Synthetic oligonucleotide
acaaggaccaggtaaatcagatggacatttgaatgatggtaattatgcacagactatcgc

SEQ ID NO: 105299 - DNA, 60 bp, Artificial
  Synthetic oligonucleotide
tgcagttgtaggatcacaaggaccaggtaaatcagatggacatttgaatgatggtaatta

SEQ ID NO: 105300 - DNA, 60 bp, Artificial
  Synthetic oligonucleotide
gacatgctcttacaatatagttatcattcctgatagcccaaatgattcagaatctattga

SEQ ID NO: 105301 - DNA, 51 bp, Artificial
  Synthetic oligonucleotide
tttccaaaaggttcaataatacttaaaacatatacacagacatcagacttt

SEQ ID NO: 105302 - DNA, 60 bp, Artificial
  Synthetic oligonucleotide
aacgggtgctacgcaaacacaaaaagcggagaaggctgcattcgcatcgtacgcggaagc

SEQ ID NO: 105303 - DNA, 60 bp, Artificial
  Synthetic oligonucleotide
tttggtgtagtacctatacaaggtccgattaatagggctgttgcacaaaacgcctatgtg

SEQ ID NO: 105304 - DNA, 60 bp, Artificial
  Synthetic oligonucleotide
ggctggatataaagagcaggttactacaaaagacgaaattgagcaacagatggatagaat

SEQ ID NO: 105305 - DNA, 60 bp, Artificial
  Synthetic oligonucleotide
cgcaattaatagatacaatgggttaacacttagatcagtcacaatgcgaccaacttcgca

SEQ ID NO: 105306 - DNA, 60 bp, Artificial
  Synthetic oligonucleotide
gaatgatccgatcatgatatattttgtttggcggaggatcggaactttttcgaatgcggc

SEQ ID NO: 105307 - DNA, 60 bp, Artificial
  Synthetic oligonucleotide
gaatgatccaattatgatatattttgtttggcggaggatcggaactttttcgaatgcggc

SEQ ID NO: 105308 - DNA, 60 bp, Artificial
  Synthetic oligonucleotide
gaatgatccaatcatgatatattttgtttggcggaggatcggaactttttcgaatgcggc

SEQ ID NO: 105309 - DNA, 60 bp, Artificial
  Synthetic oligonucleotide
caacctgataactagaccagttgacgttatagatatgacgaaggaatttaatcagaaaaa

SEQ ID NO: 105310 - DNA, 60 bp, Artificial
  Synthetic oligonucleotide
aacatggagcgctttttgagaaaatacaatatcagtggggattacgcaaatgccacgaga

SEQ ID NO: 105311 - DNA, 60 bp, Artificial
  Synthetic oligonucleotide
ggagcgctttttgagaaaatacaatatcagtggggattacgcaaatgccacgagaacttt

SEQ ID NO: 105312 - DNA, 60 bp, Artificial
  Synthetic oligonucleotide
ccactcaagcattcaaagttatacgaagaatatggcctatatctacgtcctcaccagatc

SEQ ID NO: 105313 - DNA, 60 bp, Artificial
  Synthetic oligonucleotide
cgcaatcgatccactcaagcattcaaagttatacgaagaatatggcctatatctacgtcc

SEQ ID NO: 105314 - DNA, 60 bp, Artificial
  Synthetic oligonucleotide
tttcaagcgcggcggggaacgcacaagagacaccacaaggagtaacattaaatgtgggag

SEQ ID NO: 105315 - DNA, 60 bp, Artificial
  Synthetic oligonucleotide
tttcaagcgcggcgggaaacgcacaggagacaccacaaggagtaacattaaatgtgggag

SEQ ID NO: 105316 - DNA, 60 bp, Artificial
  Synthetic oligonucleotide
tgtggcttatgaccaagctcccgtgaatgtaaacaatccgggagcgggaccgggtatgat

SEQ ID NO: 105317 - DNA, 60 bp, Artificial
  Synthetic oligonucleotide
aatgtgggaggtgtgaatatgagggcaggagtgattgtggcttatgaccaagctcccgtg

SEQ ID NO: 105318 - DNA, 60 bp, Artificial
  Synthetic oligonucleotide
tggtcaaacgtgggtacacacgttaggccgctcgccctggtgacgcggggttaagggatg

SEQ ID NO: 105319 - DNA, 60 bp, Artificial
  Synthetic oligonucleotide
tgggtacacacgttaaaccgctcgccctggtgacgcggggttaagggatgcaggcaaatc

SEQ ID NO: 105320 - DNA, 60 bp, Artificial
  Synthetic oligonucleotide
gggtacacacgttaaaccgctcgccctggtgacgcggggttaagggatgcaggcaaatca

SEQ ID NO: 105321 - DNA, 60 bp, Artificial
  Synthetic oligonucleotide
gggtacacacgttaagccgctcgccctggtgacgcggggttaagggatgcagacaaatca

SEQ ID NO: 105322 - DNA, 60 bp, Artificial
  Synthetic oligonucleotide
gtacacacgttaggccgctcgccctggtgacgcggggttaagggatgcaggcaaatcatc

SEQ ID NO: 105323 - DNA, 60 bp, Artificial
  Synthetic oligonucleotide
gtatacacgttaagccgctcgccctggtgacgcggggttaagggatgcaggcacatcatc

SEQ ID NO: 105324 - DNA, 60 bp, Artificial
  Synthetic oligonucleotide
gagtggctaaacgtgggtacacacgttaagccgctcgccctggtgacgcggggttaaggg

SEQ ID NO: 105325 - DNA, 60 bp, Artificial
  Synthetic oligonucleotide
tggtcaaacgtgggtatacacgttaagccgctcgccctggtgacgcggggttaagggatg

SEQ ID NO: 105326 - DNA, 51 bp, Artificial
  Synthetic oligonucleotide
tctgaaaaccataataaagataatggactatattatttatagaataacatt

SEQ ID NO: 105327 - DNA, 60 bp, Artificial
  Synthetic oligonucleotide
tataccacagttctattttatttgatatcgttcgttcttgtgagttatattctgaaaacc

SEQ ID NO: 105328 - DNA, 60 bp, Artificial
  Synthetic oligonucleotide
tataccacagttctattttatttgatatcgttcgttcttgtgagttatattctggagact

SEQ ID NO: 105329 - DNA, 66 bp, Artificial
  Synthetic oligonucleotide
cgtaacaatgctttcattttcaaagattcaggtaactattttcttggtctagagaatatctttcgc

SEQ ID NO: 105330 - DNA, 60 bp, Artificial
  Synthetic oligonucleotide
agcgtaacaatgctttcattttcaaagattcaggtaactattttcttggtctagagaata

SEQ ID NO: 105331 - DNA, 60 bp, Artificial
  Synthetic oligonucleotide
cggcctatacaaagagaagaagtacatatatattaatgggaaaacagtgacatatgtgtg

SEQ ID NO: 105332 - DNA, 60 bp, Artificial
  Synthetic oligonucleotide
gagctacggcctatacaaagagaagaagtacatatatattaatgggaaaacagtgacata

SEQ ID NO: 105333 - DNA, 66 bp, Artificial
  Synthetic oligonucleotide
gtgacatatgtgtgtaagaatgttgatgctttaacaataaaagagttggccaattcaaaatcacac

SEQ ID NO: 105334 - DNA, 60 bp, Artificial
  Synthetic oligonucleotide
cagtgacatatgtgtgtaagaatgttgatgctttaacaataaaagagttggccaattcaa

SEQ ID NO: 105335 - DNA, 60 bp, Artificial
  Synthetic oligonucleotide
cttcgatctttggcaagacgtataacataggtcagttgtactatcgacagttgaacgttg

SEQ ID NO: 105336 - DNA, 60 bp, Artificial
  Synthetic oligonucleotide
tatggatgctgtgaccttcttgactataaagatggacgctatgcatacagcttcgatctt

SEQ ID NO: 105337 - DNA, 60 bp, Artificial
  Synthetic oligonucleotide
ttgaacgttgaagtcaatacgctgaagaaagtgttgacaaacatcaatgatcactcacga

SEQ ID NO: 105338 - DNA, 60 bp, Artificial
  Synthetic oligonucleotide
gcaagacgtataacataggtcagttgtactatcgacagttgaacgttgaagtcaatacgc

SEQ ID NO: 105339 - DNA, 60 bp, Artificial
  Synthetic oligonucleotide
tcactcacgagtcaaaatgcatggtaactctcgcgacgggtttgttaaaaggcttgatga

SEQ ID NO: 105340 - DNA, 60 bp, Artificial
  Synthetic oligonucleotide
caatacgctgaagaaagtgttgacaaacatcaatgatcactcacgagtcaaaatgcatgg

SEQ ID NO: 105341 - DNA, 53 bp, Artificial
  Synthetic oligonucleotide
gttcgacgctgccgactcgattgttgcagacacaagctcaggtttatcctcat

SEQ ID NO: 105342 - DNA, 60 bp, Artificial
  Synthetic oligonucleotide
tttggctggtggttcaacatcaaagagtaagattacccaagctggactgtctcacatgat

SEQ ID NO: 105343 - DNA, 60 bp, Artificial
  Synthetic oligonucleotide
caaaattagatgataggattgtgcagaataagggatcacgctatatgtcagcgagtgttt

SEQ ID NO: 105344 - DNA, 60 bp, Artificial
  Synthetic oligonucleotide
gtcagggtaataatagtgtggtcagcactgtagatgcaaaattagatgataggattgtgc

SEQ ID NO: 105345 - DNA, 60 bp, Artificial
  Synthetic oligonucleotide
gtgtgatgagattggtcagggtaataatagtgtggtcagcactgtagatgcaaaattaga

SEQ ID NO: 105346 - DNA, 60 bp, Artificial
  Synthetic oligonucleotide
ggctggtggttcaacatcaaagagtaagattacccaagctggactgtctcacatgataac

SEQ ID NO: 105347 - DNA, 60 bp, Artificial
  Synthetic oligonucleotide
gataatcctacatttaaaatcaatactgatgtagtgttcgacgctgccgactcgattgtt

SEQ ID NO: 105348 - DNA, 60 bp, Artificial
  Synthetic oligonucleotide
gatacagtagtaaatgataatcctacatttaaaatcaatactgatgtagtgttcgacgct

SEQ ID NO: 105349 - DNA, 60 bp, Artificial
  Synthetic oligonucleotide
gcgagtgtttacagatcacgtcagaatactgagtatcaggagccagccatcgtgaattca

SEQ ID NO: 105350 - DNA, 60 bp, Artificial
  Synthetic oligonucleotide
ggattgtgcagaataagggatcacgctatatgtcagcgagtgtttacagatcacgtcaga

SEQ ID NO: 105351 - DNA, 60 bp, Artificial
  Synthetic oligonucleotide
actagttcatgattgtgggattggacgttcatgcagttgtggtgcaaaagcatgtgatga

SEQ ID NO: 105352 - DNA, 60 bp, Artificial
  Synthetic oligonucleotide
gttgtggtgcaaaagcatgtgatgatgagtcattacttaaccagttagaggaacgtggtc

SEQ ID NO: 105353 - DNA, 60 bp, Artificial
  Synthetic oligonucleotide
tatgtagtcgacagttgcttcatcaagaaaatgcagaatggaagaggattatgtgtcacc

SEQ ID NO: 105354 - DNA, 60 bp, Artificial
  Synthetic oligonucleotide
actgattgagcataaactagttcatgattgtgggattggacgttcatgcagttgtggtgc

SEQ ID NO: 105355 - DNA, 60 bp, Artificial
  Synthetic oligonucleotide
ctgtacaattatctcgtgcaacgtgatcttaatcaagaaagtggctttctgagctacggc

SEQ ID NO: 105356 - DNA, 60 bp, Artificial
  Synthetic oligonucleotide
ctcgtgcaacgtgatcttaatcaagaaagtggctttctgagctacggcctatacaaagag

SEQ ID NO: 105357 - DNA, 60 bp, Artificial
  Synthetic oligonucleotide
aatgcatggtaactctcgcgacgggtttgttaaaaggcttgatgatgcaggtaagagtcg

SEQ ID NO: 105358 - DNA, 60 bp, Artificial
  Synthetic oligonucleotide
caattctatacgtttcaagtcacttgggactggtagagacgagaagctatcgtatgtagt

SEQ ID NO: 105359 - DNA, 60 bp, Artificial
  Synthetic oligonucleotide
ctcacatgataacatttcttgaaaagttgtgccttagtgacgatgttggtgtgaataaag

SEQ ID NO: 105360 - DNA, 60 bp, Artificial
  Synthetic oligonucleotide
gataacatttcttgaaaagttgtgccttagtgacgatgttggtgtgaataaagctttgag

SEQ ID NO: 105361 - DNA, 60 bp, Artificial
  Synthetic oligonucleotide
gtgaataaagctttgagttttatagtctttcagatccatgatagttcacaacgtaaaggt

SEQ ID NO: 105362 - DNA, 60 bp, Artificial
  Synthetic oligonucleotide
taaagctttgagttttatagtctttcagatccatgatagttcacaacgtaaaggtggtgt

SEQ ID NO: 105363 - DNA, 60 bp, Artificial
  Synthetic oligonucleotide
ctagagaatatctttcgcaattcattagacgaactgaaggatatactagttttggctggt

SEQ ID NO: 105364 - DNA, 60 bp, Artificial
  Synthetic oligonucleotide
cgcaattcattagacgaactgaaggatatactagttttggctggtggttcaacatcaaag

SEQ ID NO: 105365 - DNA, 60 bp, Artificial
  Synthetic oligonucleotide
gtggtgcaaaagcatgtgatgatgagtcattacttaaccagttagaggaacgtggtcatg

SEQ ID NO: 105366 - DNA, 60 bp, Artificial
  Synthetic oligonucleotide
gaacgtggtcatgatattgttgcaaatgctaaagaagctatgtcagctatgtgtgatgag

SEQ ID NO: 105367 - DNA, 60 bp, Artificial
  Synthetic oligonucleotide
gatattgttgcaaatgctaaagaagctatgtcagctatgtgtgatgagattggtcagggt

SEQ ID NO: 105368 - DNA, 60 bp, Artificial
  Synthetic oligonucleotide
cgtttcaagtcacttgggactggtagagacgagaagctatcgtatgtagtcgacagttgc

SEQ ID NO: 105369 - DNA, 60 bp, Artificial
  Synthetic oligonucleotide
cttcgatgaaaaggaaaaccgtgatgtcattgtgactgcttcggatttcaagcgtaacaa

SEQ ID NO: 105370 - DNA, 60 bp, Artificial
  Synthetic oligonucleotide
cgtatgtagtcgacagttgcttcatcaagaaaatgcagaatggaagaggattatgtgtca

SEQ ID NO: 105371 - DNA, 60 bp, Artificial
  Synthetic oligonucleotide
ctccattgacagagagtaatgatattgtatatcaggattcatattttacgattacaaaat

SEQ ID NO: 105372 - DNA, 54 bp, Artificial
  Synthetic oligonucleotide
tctgttagcagatacattgaatatggtgtctatgccaactgaaaaatttcaatt

SEQ ID NO: 105373 - DNA, 54 bp, Artificial
  Synthetic oligonucleotide
atgtagtgagtgaaggttacaagcaataggaattgcagctgtgcatatgtggct

SEQ ID NO: 105374 - DNA, 60 bp, Artificial
  Synthetic oligonucleotide
gatggagatatggctttcgtacatccaggatggaaaacgtgtattggtcaattatgtggt

SEQ ID NO: 105375 - DNA, 60 bp, Artificial
  Synthetic oligonucleotide
gcgacaaataaaattgaaagtgacttaatttctatggttggaaattaataatgtagtgag

SEQ ID NO: 105376 - DNA, 60 bp, Artificial
  Synthetic oligonucleotide
atgcagaaagattagatagaaaaattaagtcggataaaaaacatggtagacaattctctt

SEQ ID NO: 105377 - DNA, 60 bp, Artificial
  Synthetic oligonucleotide
caattctcttatgatgatggagatatggctttcgtacatccaggatggaaaacgtgtatt

SEQ ID NO: 105378 - DNA, 59 bp, Artificial
  Synthetic oligonucleotide
aaaagcagtacaaaccatgttgtgtgctaaagtggaaaaagatcagaggagtaattatt

SEQ ID NO: 105379 - DNA, 60 bp, Artificial
  Synthetic oligonucleotide
cgtcggtcccagctgatcactggtgccatggccgagctagcctgtttcgtttccttctca

SEQ ID NO: 105380 - DNA, 60 bp, Artificial
  Synthetic oligonucleotide
ggcttttaaattgcacgtcggtcccagctgatcactggtgccatggccgagctagcctgt

SEQ ID NO: 105381 - DNA, 60 bp, Artificial
  Synthetic oligonucleotide
acaatttgacacaatcaaaggacttcaagtaccagctgtggctaaattagtagctaaggt

SEQ ID NO: 105382 - DNA, 51 bp, Artificial
  Synthetic oligonucleotide
gaaacgttaatcaaattctgagtgaatcgtatgtatcgattaagaagcagt

SEQ ID NO: 105383 - DNA, 66 bp, Artificial
  Synthetic oligonucleotide
cgcggagatatattatatcgtgagaatgatgaaaatgaaagaaagaaacaagagtatggaagaatg

SEQ ID NO: 105384 - DNA, 60 bp, Artificial
  Synthetic oligonucleotide
caagagtatggaagaatgatgtccgaagctgtaactggcgaagaagatgctcccgcttca

SEQ ID NO: 105385 - DNA, 60 bp, Artificial
  Synthetic oligonucleotide
atgatgtccgaagctgtaactggcgaagaagatgctcccgcttcaagacttggaatggct

SEQ ID NO: 105386 - DNA, 60 bp, Artificial
  Synthetic oligonucleotide
tcccgcttcaagacttggaatggcttgtttgttacgtattaaatgggaggaaggtgcgaa

SEQ ID NO: 105387 - DNA, 60 bp, Artificial
  Synthetic oligonucleotide
caaaggacttcaagtaccagctgtggctaaattagtagctaaggtaaacgagagacaagg

SEQ ID NO: 105388 - DNA, 60 bp, Artificial
  Synthetic oligonucleotide
acagcgtaaattgatctggtgtgattcaggattaatgttgtgtgctattaatcgcggaga

SEQ ID NO: 105389 - DNA, 60 bp, Artificial
  Synthetic oligonucleotide
cagcgtaaattgatctggtgtgattcaggattaatgttgtgtgctattaatcgcggagat

SEQ ID NO: 105390 - DNA, 60 bp, Artificial
  Synthetic oligonucleotide
atcgcggagatatattatatcgtgagaatgatgaaaatgaaagaaagaaacaagagtatg

SEQ ID NO: 105391 - DNA, 60 bp, Artificial
  Synthetic oligonucleotide
ccgcttcaagacttggaatggcttgtttgttacgtattaaatgggaggaaggtgcgaatg

SEQ ID NO: 105392 - DNA, 60 bp, Artificial
  Synthetic oligonucleotide
gagtccataaaattggcaaagaatgatatctcagaattggagaagtacattaagtttgaa

SEQ ID NO: 105393 - DNA, 60 bp, Artificial
  Synthetic oligonucleotide
gtcgaaatccgtagacccaaacttaccgaaaataatgaaagaattccaggacaatttgac

SEQ ID NO: 105394 - DNA, 51 bp, Artificial
  Synthetic oligonucleotide
ttttcaagatgctttccgcgtgtatggtcgaaatccgtagacccaaactta

SEQ ID NO: 105395 - DNA, 60 bp, Artificial
  Synthetic oligonucleotide
tctttccgacaacctaatacaaatttttcaagatgctttccgcgtgtatggtcgaaatcc

SEQ ID NO: 105396 - DNA, 60 bp, Artificial
  Synthetic oligonucleotide
gaaatgtctaggatcggaagtattacgacggaatgttgcttgatgtgtaggttggtgatg

SEQ ID NO: 105397 - DNA, 60 bp, Artificial
  Synthetic oligonucleotide
cgcaaacagttctgaattatgatgaagcgtattaattatggaaatgtctaggatcggaag

SEQ ID NO: 105398 - DNA, 60 bp, Artificial
  Synthetic oligonucleotide
ggaagtattacgacggaatgttgcttgatgtgtaggttggtgatgagggtttaaccccag

SEQ ID NO: 105399 - DNA, 60 bp, Artificial
  Synthetic oligonucleotide
tgaagactgctcattaaagcagatattaatggagggaaacgttaatcaaattctgagtga

SEQ ID NO: 105400 - DNA, 60 bp, Artificial
  Synthetic oligonucleotide
gttaagatatttatatgaagactgctcattaaagcagatattaatggagggaaacgttaa

SEQ ID NO: 105401 - DNA, 60 bp, Artificial
  Synthetic oligonucleotide
gtattaggatcgcaaacagttctgaattatgatgaagcgtattaattatggaaatgtcta

SEQ ID NO: 105402 - DNA, 60 bp, Artificial
  Synthetic oligonucleotide
cgaaatccgtagacccaaacttaccgaaaataatgaaagaattccaggacaatttgacac

SEQ ID NO: 105403 - DNA, 56 bp, Artificial
  Synthetic oligonucleotide
agagcttcgaacataaatctcagaatgaagggaggaagaatcaatgccgttgccac

SEQ ID NO: 105404 - DNA, 60 bp, Artificial
  Synthetic oligonucleotide
ccgtgacgatcgggttagtcgatcaattgtcagaaaagttagtatcaccggaccaaaagc

SEQ ID NO: 105405 - DNA, 60 bp, Artificial
  Synthetic oligonucleotide
gttatcataaccgtgacgatcgggttagtcgatcaattgtcagaaaagttagtatcaccg

SEQ ID NO: 105406 - DNA, 60 bp, Artificial
  Synthetic oligonucleotide
gcagtaatagacatcctttttgtttgcatagaattgtagcaataacagtagttatcataa

SEQ ID NO: 105407 - DNA, 58 bp, Artificial
  Synthetic oligonucleotide
ttttgtttgcatagaattgtagcaataacagtagttatcataaccgtgacgatcgggt

SEQ ID NO: 105408 - DNA, 60 bp, Artificial
  Synthetic oligonucleotide
cggtatgactaatccaggtaagaaaacatattcgcacgaacctcatgaagctacagctcc

SEQ ID NO: 105409 - DNA, 60 bp, Artificial
  Synthetic oligonucleotide
ggccataatcggtatgactaatccaggtaagaaaacatattcgcacgaacctcatgaagc

SEQ ID NO: 105410 - DNA, 55 bp, Artificial
  Synthetic oligonucleotide
agtatcaccggaccaaaagcacagcatatcattgatatgtgacggactaaacagc

SEQ ID NO: 105411 - DNA, 60 bp, Artificial
  Synthetic oligonucleotide
gagggtggacggatagtacccgtcgcaaccaccgccggcccaatcgtcagatgaaatatt

SEQ ID NO: 105412 - DNA, 60 bp, Artificial
  Synthetic oligonucleotide
ggtggacggatagtacccgtcgcaaccaccgccggcccaatcgtcagatgaaatattcag

SEQ ID NO: 105413 - DNA, 60 bp, Artificial
  Synthetic oligonucleotide
taactcagaaactgacaccaccataaccacgaataaacatgtatattaatcacatttaat

SEQ ID NO: 105414 - DNA, 61 bp, Artificial
  Synthetic oligonucleotide
gacaccaccataaccacgaataaacatgtatattaatcacatttaatcaagcaacactcac

SEQ ID NO: 105415 - DNA, 60 bp, Artificial
  Synthetic oligonucleotide
gattattaacataaacactggttcagagaagattgtctctaaagagtaagtaactcagaa

SEQ ID NO: 105416 - DNA, 60 bp, Artificial
  Synthetic oligonucleotide
cactggttcagagaagattgtctctaaagagtaagtaactcagaaactgacaccaccata

SEQ ID NO: 105417 - DNA, 60 bp, Artificial
  Synthetic oligonucleotide
agcggagagtacataattacgcaaattccagacgatccgaacagaattaagattattaac

SEQ ID NO: 105418 - DNA, 60 bp, Artificial
  Synthetic oligonucleotide
gcggagagtacataattacgcaaattccagacgatccgaacagaattaagattattaaca

SEQ ID NO: 105419 - DNA, 60 bp, Artificial
  Synthetic oligonucleotide
caacaattccgaccttttaaatactggtgacatcgctaagcctaatcaacttagcgctga

SEQ ID NO: 105420 - DNA, 60 bp, Artificial
  Synthetic oligonucleotide
ccttttaaatactggtgacatcgctaagcctaatcaacttagcgctgaagccaaattcgg

SEQ ID NO: 105421 - DNA, 51 bp, Artificial
  Synthetic oligonucleotide
cgccaactggagatccgcattggaaagaagtggctcgcgaggcttcgaaaa

SEQ ID NO: 105422 - DNA, 60 bp, Artificial
  Synthetic oligonucleotide
cgccaactggagatccgcattggaaagaagtggctcgcgaggcttcgaaaaagaagaaca

SEQ ID NO: 105423 - DNA, 60 bp, Artificial
  Synthetic oligonucleotide
cgccaaccggagatccgcattggaaagaagtggctcgcgaagcttcgaaaaagaagaaca

SEQ ID NO: 105424 - DNA, 60 bp, Artificial
  Synthetic oligonucleotide
gattggtggtgtagagaggaagatggctccgataggagcgcgggagagcgcggttatgtt

SEQ ID NO: 105425 - DNA, 60 bp, Artificial
  Synthetic oligonucleotide
cgccaactggagatccgcattggaaagaagtggctcgcgaagcttcgaaaaagaagaaca

SEQ ID NO: 105426 - DNA, 60 bp, Artificial
  Synthetic oligonucleotide
acagatggatagaattgtgaaagagatgagacgtcagctggagatgattgataaattaac

SEQ ID NO: 105427 - DNA, 60 bp, Artificial
  Synthetic oligonucleotide
ggatagaattgtgaaagagatgagacgtcagctggagatgattgataaattaactactcg

SEQ ID NO: 105428 - DNA, 60 bp, Artificial
  Synthetic oligonucleotide
atggaaagatacactatctcaactgtttttaaccaaaggatggccgacaagttcagttta

SEQ ID NO: 105429 - DNA, 60 bp, Artificial
  Synthetic oligonucleotide
gctacaggatgtgaatactgtgcaattagccagagtggttaacttagctgtgccagatac

SEQ ID NO: 105430 - DNA, 60 bp, Artificial
  Synthetic oligonucleotide
gctaaagtgactgtggtcatggcttcattcaagggattctccgccaacactgttccagtt

SEQ ID NO: 105431 - DNA, 60 bp, Artificial
  Synthetic oligonucleotide
attacattctataattcaggatcctggaatggcgtattttccatatattgcatctgttct

SEQ ID NO: 105432 - DNA, 56 bp, Artificial
  Synthetic oligonucleotide
attacattctataattcaggatcctggaatggcgtattttccatatattgcatctg

SEQ ID NO: 105433 - DNA, 60 bp, Artificial
  Synthetic oligonucleotide
attctataattcaggatcctggaatggcgtattttccatatattgcatctgttctaacag

SEQ ID NO: 105434 - DNA, 60 bp, Artificial
  Synthetic oligonucleotide
accattaacctaagatcagtaggtagagtggcgccccaaggtttgcatcatgtggagtgg

SEQ ID NO: 105435 - DNA, 59 bp, Artificial
  Synthetic oligonucleotide
atgagtggttatgtaatccaatggatataacattatatgattatcaacaaactggagag

SEQ ID NO: 105436 - DNA, 53 bp, Artificial
  Synthetic oligonucleotide
ctttcaattatagagtgtagggccatcccaaactagaattgtatgatgtgacc

SEQ ID NO: 105437 - DNA, 60 bp, Artificial
  Synthetic oligonucleotide
tagattcatcatctttcaattatagagtgtagggccatcccaaactagaattgtatgatg

SEQ ID NO: 105438 - DNA, 60 bp, Artificial
  Synthetic oligonucleotide
cccacaatggaggagtttgtcattcctgtgttttctgagagggagatcccttacgctctg

SEQ ID NO: 105439 - DNA, 60 bp, Artificial
  Synthetic oligonucleotide
cagatgtggatagacgcatacatactgcagtgggatctggatcaagcgcaaaaggacctg

SEQ ID NO: 105440 - DNA, 60 bp, Artificial
  Synthetic oligonucleotide
atggaaagatacactatctcagctgtttttaaccaaaggatggccgacaggttcagttta

SEQ ID NO: 105441 - DNA, 60 bp, Artificial
  Synthetic oligonucleotide
ggaaagatacactatctcagctgtttttaaccaaaggatggccgacaggttcagtttatt

SEQ ID NO: 105442 - DNA, 60 bp, Artificial
  Synthetic oligonucleotide
tatgtttgacacgcgtaatgtggttgacgatatagatggtagcaatgtggaagtagtttg

SEQ ID NO: 105443 - DNA, 60 bp, Artificial
  Synthetic oligonucleotide
gatgacgttaattggcaataaagggtttggaaaaacatcattcttacgcgatgtgatagc

SEQ ID NO: 105444 - DNA, 60 bp, Artificial
  Synthetic oligonucleotide
gatatataatgtcgaattctccaacacgccagattcccttgttttaattaatccgacgta

SEQ ID NO: 105445 - DNA, 60 bp, Artificial
  Synthetic oligonucleotide
ctcgattggatggttagagcggttgggtcataggaagagaattacttattcgcaagaggt

SEQ ID NO: 105446 - DNA, 60 bp, Artificial
  Synthetic oligonucleotide
ggggatgtattgtcgagtgattcaggaccgttgttatcagtgttcgcgttacaagagatc

SEQ ID NO: 105447 - DNA, 60 bp, Artificial
  Synthetic oligonucleotide
atatgatgagatgggttatgttaccttcgttacaaccgtcactgaaattggcattggaag

SEQ ID NO: 105448 - DNA, 60 bp, Artificial
  Synthetic oligonucleotide
ggatgagtatactgacgcgatggatgtcaatcagaagaggcaattgcgtttgaacaacgc

SEQ ID NO: 105449 - DNA, 60 bp, Artificial
  Synthetic oligonucleotide
gaatataagacgaagagagttgatgacatgtgcaccttcacccaaattaagttaacagac

SEQ ID NO: 105450 - DNA, 60 bp, Artificial
  Synthetic oligonucleotide
attatggatgagtatactgacgcgatggatgtcaatcagaagaggcaattgcgtttgaac

SEQ ID NO: 105451 - DNA, 60 bp, Artificial
  Synthetic oligonucleotide
gacggcagttttgagtcttttctaacacatgtgaagcggtttgattttatgagtgaatca

SEQ ID NO: 105452 - DNA, 60 bp, Artificial
  Synthetic oligonucleotide
gtcctttatttaggggcttacccagctgagcatcttcgtgagatgaaactcaaaggctgg

SEQ ID NO: 105453 - DNA, 56 bp, Artificial
  Synthetic oligonucleotide
tgggagacgattactgtattccgaatttctctcagtccataacaaaaaggacaatc

SEQ ID NO: 105454 - DNA, 60 bp, Artificial
  Synthetic oligonucleotide
gcctcttattcactatctaacgcaattaacgataaggataaggttttggaatttctagac

SEQ ID NO: 105455 - DNA, 60 bp, Artificial
  Synthetic oligonucleotide
tgctaaagtgcttgaatccaaggttaagtacgttttgcataatccacaggttaaattgct

SEQ ID NO: 105456 - DNA, 60 bp, Artificial
  Synthetic oligonucleotide
gctaagttagaggagtattataaattgtctcctttaataagcgttccgaagatgggtcaa

SEQ ID NO: 105457 - DNA, 60 bp, Artificial
  Synthetic oligonucleotide
gggctggacttagacattctatgatgatacgatatattgaatcatctgtacccgatccgt

SEQ ID NO: 105458 - DNA, 60 bp, Artificial
  Synthetic oligonucleotide
gtcttgaacgtcataggatacaatccaccttatgtttgggctggacttagacattctatg

SEQ ID NO: 105459 - DNA, 60 bp, Artificial
  Synthetic oligonucleotide
cccgatccgtctggatcaggtccgatgaaattaattttacctaagttggatgctaaagtg

SEQ ID NO: 105460 - DNA, 60 bp, Artificial
  Synthetic oligonucleotide
gatgggtcaattttactacggacctactgtttttagtgaattactaagtatttcaaataa

SEQ ID NO: 105461 - DNA, 60 bp, Artificial
  Synthetic oligonucleotide
gtattataaattgtctcctttaataagcgttccgaagatgggtcaattttactacggacc

SEQ ID NO: 105462 - DNA, 60 bp, Artificial
  Synthetic oligonucleotide
ttataaatctaaggtcttgaacgtcataggatacaatccaccttatgtttgggctggact

SEQ ID NO: 105463 - DNA, 60 bp, Artificial
  Synthetic oligonucleotide
ggacatttactgtcgttaaccattgccgcgcactttgtggcatctccaatagttatgtgg

SEQ ID NO: 105464 - DNA, 60 bp, Artificial
  Synthetic oligonucleotide
tggcatctccaatagttatgtggtctatccacatgaaaaagatgacagctagttcaaatc

SEQ ID NO: 105465 - DNA, 60 bp, Artificial
  Synthetic oligonucleotide
gcctatttccattctaagggatgtgagacgatggttaaaagatctgaggttgatgagtat

SEQ ID NO: 105466 - DNA, 57 bp, Artificial
  Synthetic oligonucleotide
tgagcagatggtctcatatgctggaggtgattataatggagttggatatttcgctaa

SEQ ID NO: 105467 - DNA, 60 bp, Artificial
  Synthetic oligonucleotide
ggtcaatcagattcaacgtttcaagtcttaagtaacttcaacatggactctgaagcaggg

SEQ ID NO: 105468 - DNA, 60 bp, Artificial
  Synthetic oligonucleotide
agattcaacgtttcaagtcttaagtaacttcaacatggactctgaagcagggacgttaac

SEQ ID NO: 105469 - DNA, 60 bp, Artificial
  Synthetic oligonucleotide
gtgttatgtgcctcacgctacttactacgctttacgcggggtattcgttgagcgactgct

SEQ ID NO: 105470 - DNA, 60 bp, Artificial
  Synthetic oligonucleotide
cctcacgctacttactacgctttacgcggggtattcgttgagcgactgctgattagggcg

SEQ ID NO: 105471 - DNA, 60 bp, Artificial
  Synthetic oligonucleotide
gcgactgctgattagggcgaacgtgctgaattccagctataagattgatggtcaatcaga

SEQ ID NO: 105472 - DNA, 60 bp, Artificial
  Synthetic oligonucleotide
cacgtttaagaatgcatccggtaggacttggaaagattacggatacacccaatccgaact

SEQ ID NO: 105473 - DNA, 60 bp, Artificial
  Synthetic oligonucleotide
cccagtatggcgatgcattggcttgttggaattttcatagatcaggggatgagcttggcg

SEQ ID NO: 105474 - DNA, 60 bp, Artificial
  Synthetic oligonucleotide
ccggccttcgctttcggtgctgtggacggtatctatgaacggtacggcagaaacccagta

SEQ ID NO: 105475 - DNA, 60 bp, Artificial
  Synthetic oligonucleotide
ggatacacccaatccgaactattgaaagtcggaatggtagaaatgaccattgagcagatg

SEQ ID NO: 105476 - DNA, 60 bp, Artificial
  Synthetic oligonucleotide
agtaaatatctcaggacatttactgtcgttaaccattgccgcgcactttgtggcatctcc

SEQ ID NO: 105477 - DNA, 60 bp, Artificial
  Synthetic oligonucleotide
gcgtcgaggtctttgatatgcaatgatacagctaagtcgataacatgggcttttcgtggc

SEQ ID NO: 105478 - DNA, 60 bp, Artificial
  Synthetic oligonucleotide
gctgatggtttgtcgaaaaatacgggagctaagattattccttactctcaaaagttcacc

SEQ ID NO: 105479 - DNA, 60 bp, Artificial
  Synthetic oligonucleotide
gctaccccagccatatggtgggagtttaatggagatgcgagcctatttccattctaaggg

SEQ ID NO: 105480 - DNA, 60 bp, Artificial
  Synthetic oligonucleotide
ccaagagttccaagatgtgaaacagtcatattttgagcaactcgtttcatctaaagacga

SEQ ID NO: 105481 - DNA, 59 bp, Artificial
  Synthetic oligonucleotide
aaaatacgggagctaagattattccttactctcaaaagttcaccttcgatgcagtgtca

SEQ ID NO: 105482 - DNA, 60 bp, Artificial
  Synthetic oligonucleotide
gtgtcatttgcggtcatagatgacacttgggttgaaggtgattcagaataccaagagttc

SEQ ID NO: 105483 - DNA, 60 bp, Artificial
  Synthetic oligonucleotide
caaatataggtctcaactcgtagtatgctttctgcatgatgaagaagtcgcaaccaagta

SEQ ID NO: 105484 - DNA, 60 bp, Artificial
  Synthetic oligonucleotide
actcgtagtatgctttctgcatgatgaagaagtcgcaaccaagtatggaaattggatggg

SEQ ID NO: 105485 - DNA, 60 bp, Artificial
  Synthetic oligonucleotide
taataggtttgctaccccagccatatggtgggagtttaatggagatgcgagcctatttcc

SEQ ID NO: 105486 - DNA, 60 bp, Artificial
  Synthetic oligonucleotide
caaccaagtatggaaattggatgggacaaggaagtggaacgatcactaaggtgatcgtcg

SEQ ID NO: 105487 - DNA, 60 bp, Artificial
  Synthetic oligonucleotide
cgctgatgaatctaacatcatggttcaattgcatgatgtgtttcgtaacgttggcacgct

SEQ ID NO: 105488 - DNA, 60 bp, Artificial
  Synthetic oligonucleotide
tcgtaacgttggcacgcttttgctgtctggcgtacagatgtttatttttatcattgcgtc

SEQ ID NO: 105489 - DNA, 60 bp, Artificial
  Synthetic oligonucleotide
actagatcaggattagttggatttatgtctaaggtagcttctagtttagattataaatct

SEQ ID NO: 105490 - DNA, 60 bp, Artificial
  Synthetic oligonucleotide
agttgatgatatatgtaaaacgatatacgagcaattcaagtagggtgattcgaacccatt

SEQ ID NO: 105491 - DNA, 60 bp, Artificial
  Synthetic oligonucleotide
aagatgtgatcacgtttaagaatgcatccggtaggacttggaaagattacggatacaccc

SEQ ID NO: 105492 - DNA, 52 bp, Artificial
  Synthetic oligonucleotide
cgaatttaccaagggttaaattcatgctcgcgaatggcgtcgtaactggaag

SEQ ID NO: 105493 - DNA, 60 bp, Artificial
  Synthetic oligonucleotide
gatcaaaaatggaaagctggaaccatggcactctaaggaggaagtggttttggctgccat

SEQ ID NO: 105494 - DNA, 60 bp, Artificial
  Synthetic oligonucleotide
gaaagctggaaccatggcactctaaggaggaagtggttttggctgccatgatcgctggcg

SEQ ID NO: 105495 - DNA, 60 bp, Artificial
  Synthetic oligonucleotide
tctaacgcaattaacgataaggataaggttttggaatttctagaccgcgctgttaaatcc

SEQ ID NO: 105496 - DNA, 60 bp, Artificial
  Synthetic oligonucleotide
ggctgccatgatcgctggcgattatgtatcccatattttgaatgggcatcattcaactga

SEQ ID NO: 105497 - DNA, 60 bp, Artificial
  Synthetic oligonucleotide
tgaatatgaagttaggtaggggcgagagcatattagcctcttattcactatctaacgcaa

SEQ ID NO: 105498 - DNA, 60 bp, Artificial
  Synthetic oligonucleotide
aaagtatgaatgctatgaatatgaagttaggtaggggcgagagcatattagcctcttatt

SEQ ID NO: 105499 - DNA, 60 bp, Artificial
  Synthetic oligonucleotide
ttcatccgatcagataagtacacaaaaattcatgcatatattcattactaaaagtatgaa

SEQ ID NO: 105500 - DNA, 60 bp, Artificial
  Synthetic oligonucleotide
agttcaaatcttccttccggagttgacaagttgctctttttcgataacaagatcaaaaat

SEQ ID NO: 105501 - DNA, 60 bp, Artificial
  Synthetic oligonucleotide
atttctagaccgcgctgttaaatccgaaaccttcataatattcggagccccgaatttacc

SEQ ID NO: 105502 - DNA, 60 bp, Artificial
  Synthetic oligonucleotide
gctgctcaaggtaagcaagcgggtaatgctttcgatattggtgagatgttatattggaca

SEQ ID NO: 105503 - DNA, 60 bp, Artificial
  Synthetic oligonucleotide
tggacatcacagcgcaacgtactcttatcctcgattgatgtagctggtatggacgcctcc

SEQ ID NO: 105504 - DNA, 60 bp, Artificial
  Synthetic oligonucleotide
cagttaaggtgaatgagctggctacatcattagagcagttagggaagctgggcgaacgtg

SEQ ID NO: 105505 - DNA, 60 bp, Artificial
  Synthetic oligonucleotide
gtttgcacgtgaatatcgcacgccagaaagaatattcaagtcacttaaagcgccgattaa

SEQ ID NO: 105506 - DNA, 60 bp, Artificial
  Synthetic oligonucleotide
cgccgattaagcttgttgagcgtcagcagtcagatcgaagacaaagagccatctctggat

SEQ ID NO: 105507 - DNA, 60 bp, Artificial
  Synthetic oligonucleotide
caggagaagattcaaaagtcagcgatggcaaccaaagagacgacagtacagtcaaaaaga

SEQ ID NO: 105508 - DNA, 60 bp, Artificial
  Synthetic oligonucleotide
atcacgtttacatgaagttatagtggcaaagactcgtgattacaaaatacctacgatgcc

SEQ ID NO: 105509 - DNA, 60 bp, Artificial
  Synthetic oligonucleotide
cgtgacgaagtgtaaagttgattaggaggcccccgagtggccgccagatgtacgctgttc

SEQ ID NO: 105510 - DNA, 60 bp, Artificial
  Synthetic oligonucleotide
cgctctaatcgatgatttattattccgagtacgccggccagagggtctaaagatgcttgg

SEQ ID NO: 105511 - DNA, 60 bp, Artificial
  Synthetic oligonucleotide
agggaagctgggcgaacgtgaaaaatctcggcgcgctgcaagtgatctgaaaattcgcgg

SEQ ID NO: 105512 - DNA, 60 bp, Artificial
  Synthetic oligonucleotide
tctcgtatttgcatattctacggagtataacaagtaaccagggcaaacgtctcggaatgg

SEQ ID NO: 105513 - DNA, 60 bp, Artificial
  Synthetic oligonucleotide
cagcaaaactcaatggtcttagatgatgatctattgcatgagtacgggtttacaggagcg

SEQ ID NO: 105514 - DNA, 60 bp, Artificial
  Synthetic oligonucleotide
accagggcaaacgtctcggaatggttttacacccaggattaatagcgtacgtcagaggca

SEQ ID NO: 105515 - DNA, 60 bp, Artificial
  Synthetic oligonucleotide
ttcttcgttgccatttcggcgggaccgaaagagcaaggtattttattacgggcgtttgca

SEQ ID NO: 105516 - DNA, 60 bp, Artificial
  Synthetic oligonucleotide
aaattcgcggtcacgcactaagtaatgatatagtttatgggtacgggttacaggagaaga

SEQ ID NO: 105517 - DNA, 60 bp, Artificial
  Synthetic oligonucleotide
acgattagtgcgcatacctccaagttactacgtatctacgcaatgtcgagccttatacaa

SEQ ID NO: 105518 - DNA, 60 bp, Artificial
  Synthetic oligonucleotide
caccttcgtattagatgttgccagtaaatgcacagtaccacgtttcgggccatattacgc

SEQ ID NO: 105519 - DNA, 60 bp, Artificial
  Synthetic oligonucleotide
ccttagataagttaatgcacgttaagcaacgtaaatcacgtttcgctgatctgtggcgcg

SEQ ID NO: 105520 - DNA, 60 bp, Artificial
  Synthetic oligonucleotide
tggcaggcatgcgcattagaagcggcaaattcccaaacgtcgacctcatatgagagtgag

SEQ ID NO: 105521 - DNA, 60 bp, Artificial
  Synthetic oligonucleotide
atcaaactacgaattacccactgcgcacatatgtaaagctgttatttcataagggtgacg

SEQ ID NO: 105522 - DNA, 60 bp, Artificial
  Synthetic oligonucleotide
tgagagtgagatcttcggacaggtaaagaatgcggagggtacatacccgtcaggccgtgc

SEQ ID NO: 105523 - DNA, 60 bp, Artificial
  Synthetic oligonucleotide
cggacaggtaaagaatgcggagggtacatacccgtcaggccgtgcagacacttcaactca

SEQ ID NO: 105524 - DNA, 60 bp, Artificial
  Synthetic oligonucleotide
caggccgtgcagacacttcaactcaccatactgtgttgcttcaaggtttagtgcggggaa

SEQ ID NO: 105525 - DNA, 60 bp, Artificial
  Synthetic oligonucleotide
gcaggctcattgaccaatacatatgaaccgaaaactaagatgtacaaactacatgctgcc

SEQ ID NO: 105526 - DNA, 60 bp, Artificial
  Synthetic oligonucleotide
ggagattttccagggcaacgagaacgacacgcatgaccatgctgtctcaaatgcgagtat

SEQ ID NO: 105527 - DNA, 60 bp, Artificial
  Synthetic oligonucleotide
ctacgatgccagcagatgcactacatttatacgaatttgaagtcgaagatgtaaccgtgg

SEQ ID NO: 105528 - DNA, 60 bp, Artificial
  Synthetic oligonucleotide
ccacatcgtcgccaggtagaaagttaacagaaattgagaaattggaagtcggaggtgatg

SEQ ID NO: 105529 - DNA, 60 bp, Artificial
  Synthetic oligonucleotide
gttggctcaatagcccagtcatacttgtccagctttacagatgaaatcgctaaacgtgtc

SEQ ID NO: 105530 - DNA, 60 bp, Artificial
  Synthetic oligonucleotide
tctggatgcagctgtattccctagaatagagcaacgactagtaacaagaccagcagtttt

SEQ ID NO: 105531 - DNA, 60 bp, Artificial
  Synthetic oligonucleotide
cctcttgcgtggttgtttatgccaagaggaggagaatatcccgcatatccgtttgagcgt

SEQ ID NO: 105532 - DNA, 60 bp, Artificial
  Synthetic oligonucleotide
agggcgatgaccaacgatggaactttcctagcgacgttaactgagttgtctctggatgca

SEQ ID NO: 105533 - DNA, 60 bp, Artificial
  Synthetic oligonucleotide
gaagatgtaaccgtggatctcttaccacacgccaagcacacatcatattccaatctcgcg

SEQ ID NO: 105534 - DNA, 60 bp, Artificial
  Synthetic oligonucleotide
ggaggtgatgtagcggcgtggtcaaactcaaggatcgtcatgcaggcagtgtttgcacgt

SEQ ID NO: 105535 - DNA, 56 bp, Artificial
  Synthetic oligonucleotide
ttgtgttattacagcagctagtggtgaatgggacattctggggtttcgcagacaga

SEQ ID NO: 105536 - DNA, 60 bp, Artificial
  Synthetic oligonucleotide
gcgagcggaactattatatcctgagtttaacgaatacataaacagagcgttacgactgag

SEQ ID NO: 105537 - DNA, 60 bp, Artificial
  Synthetic oligonucleotide
aggaagaagttggtatcaagaagcgttacataacgtgggtcgggcgacagtacctgtgtg

SEQ ID NO: 105538 - DNA, 60 bp, Artificial
  Synthetic oligonucleotide
caggtattttgacgcatgttgagagcatcgttgcgatgaatcacttcctacactgcgcga

SEQ ID NO: 105539 - DNA, 60 bp, Artificial
  Synthetic oligonucleotide
acatctgaaccacactttgtgtcgtctacattcatatcgttacgcgcgaagcgagcggaa

SEQ ID NO: 105540 - DNA, 60 bp, Artificial
  Synthetic oligonucleotide
tcgcattcgcattattagggggtctggatagatcagctaacttattgcgtctagatgtgg

SEQ ID NO: 105541 - DNA, 60 bp, Artificial
  Synthetic oligonucleotide
atctcgcgtataatatgtcgtttggtagtgatggctggttcgcattcgcattattagggg

SEQ ID NO: 105542 - DNA, 60 bp, Artificial
  Synthetic oligonucleotide
ctagatgtggcttccatacgtggaaattatcacaagttcagttacgatgacccagttttc

SEQ ID NO: 105543 - DNA, 60 bp, Artificial
  Synthetic oligonucleotide
ggacacgaaggatattgggcggcttaatctcgctatgatggaactgaacgctctaatcga

SEQ ID NO: 105544 - DNA, 60 bp, Artificial
  Synthetic oligonucleotide
aacacaatattctctgaaacccgcaaatttacacgtgagtcgtttaaagaaatcgagcat

SEQ ID NO: 105545 - DNA, 60 bp, Artificial
  Synthetic oligonucleotide
cgtttgagcgtagagatgggacgttcactgaagatgaatcaatgttcactgctagaggag

SEQ ID NO: 105546 - DNA, 60 bp, Artificial
  Synthetic oligonucleotide
taactctattgcgctcatatcggactacagtggcgaggactcaaatggtaatcaacttca

SEQ ID NO: 105547 - DNA, 60 bp, Artificial
  Synthetic oligonucleotide
ccccgattttgactccacactaatgagtctaatcctacctcttgcgtggttgtttatgcc

SEQ ID NO: 105548 - DNA, 60 bp, Artificial
  Synthetic oligonucleotide
gagtatgatccttcagattatccgttagctgaagatgaatctttctttaagcaaggtcac

SEQ ID NO: 105549 - DNA, 60 bp, Artificial
  Synthetic oligonucleotide
aagatcatatttaacgacaagagtgtcgcatcgatattacctacatttgtgtatacctgc

SEQ ID NO: 105550 - DNA, 60 bp, Artificial
  Synthetic oligonucleotide
ggattctgtcatcgcaagaaagatagttccttcatctacagttattctcgatggttatgg

SEQ ID NO: 105551 - DNA, 52 bp, Artificial
  Synthetic oligonucleotide
atggttatggcgaatcgtttattcgtgaaaatccaaacgccacgttgatgga

SEQ ID NO: 105552 - DNA, 60 bp, Artificial
  Synthetic oligonucleotide
gtcatcgcaagaaagatagttccttcatctacagttattctcgatggttatggcgaatcg

SEQ ID NO: 105553 - DNA, 60 bp, Artificial
  Synthetic oligonucleotide
ggcaccaaagacgacgtaccaaagtataatgccagcaatgtcagcccttttgggtgttcc

SEQ ID NO: 105554 - DNA, 60 bp, Artificial
  Synthetic oligonucleotide
acaacacggcaccaaagacgacgtaccaaagtataatgccagcaatgtcagcccttttgg

SEQ ID NO: 105555 - DNA, 60 bp, Artificial
  Synthetic oligonucleotide
atctagtaggatccgaacacgaaggctgtctaaacctaagtaggattgacgccgatcatg

SEQ ID NO: 105556 - DNA, 60 bp, Artificial
  Synthetic oligonucleotide
gggtgttccttacgttcagggagcttttagacatggcataatttcaaagcatggagggaa

SEQ ID NO: 105557 - DNA, 60 bp, Artificial
  Synthetic oligonucleotide
ccgctatgattaagaatacaaaattagtctccgcagctggtttgaccgctatgggaatcg

SEQ ID NO: 105558 - DNA, 60 bp, Artificial
  Synthetic oligonucleotide
ttggaattaattccgctatgattaagaatacaaaattagtctccgcagctggtttgaccg

SEQ ID NO: 105559 - DNA, 60 bp, Artificial
  Synthetic oligonucleotide
gataactatccctcgatgttgtccagagcagagaaggctaataggaaatcatctagggcg

SEQ ID NO: 105560 - DNA, 60 bp, Artificial
  Synthetic oligonucleotide
agaatggagtaaaaattgtgggtatgggcgattcacctatgctagttctggataactatc

SEQ ID NO: 105561 - DNA, 60 bp, Artificial
  Synthetic oligonucleotide
atgcttcaaaaatggatttcctaaaaaattcgccatggtggaaatggagaagaatggagt

SEQ ID NO: 105562 - DNA, 60 bp, Artificial
  Synthetic oligonucleotide
ctgatgaacagtaaaccaattgaacgaacaggcaaggaagcgattgcagtatgcttcaaa

SEQ ID NO: 105563 - DNA, 60 bp, Artificial
  Synthetic oligonucleotide
caccacatagtgatgttaggggattaggggtaaagtattcgtttcaggttaataagccgg

SEQ ID NO: 105564 - DNA, 60 bp, Artificial
  Synthetic oligonucleotide
ttatagaaaatccaccacatagtgatgttaggggattaggggtaaagtattcgtttcagg

SEQ ID NO: 105565 - DNA, 60 bp, Artificial
  Synthetic oligonucleotide
ccatttaaagatctttttgtagagaatggagcaggtagaatgttgccgaacgattcattc

SEQ ID NO: 105566 - DNA, 60 bp, Artificial
  Synthetic oligonucleotide
actcatggtgatgtattcatagattctgaagcggtgtttacatccgatgagcaagaaaag

SEQ ID NO: 105567 - DNA, 60 bp, Artificial
  Synthetic oligonucleotide
ttcatagattctgaagcggtgtttacatccgatgagcaagaaaagtatcgtaaagataag

SEQ ID NO: 105568 - DNA, 60 bp, Artificial
  Synthetic oligonucleotide
tttgtagagaatggagcaggtagaatgttgccgaacgattcattcagagttagtgagtct

SEQ ID NO: 105569 - DNA, 60 bp, Artificial
  Synthetic oligonucleotide
cgattcattcagagttagtgagtctacgattaaaaatcaagtaattgagatgggggaagg

SEQ ID NO: 105570 - DNA, 60 bp, Artificial
  Synthetic oligonucleotide
agggtggtcaatgaagtacttcaaagggtatgtggatggatacaagtctggtgtacgtga

SEQ ID NO: 105571 - DNA, 60 bp, Artificial
  Synthetic oligonucleotide
cgccgagtggttttattcgggcagcttcagtggggtcatcatcttcagttgttgaagtcg

SEQ ID NO: 105572 - DNA, 60 bp, Artificial
  Synthetic oligonucleotide
ggtttgaccgctatgggaatcgaggaaataccaattaaatgtaattcattggattcgcta

SEQ ID NO: 105573 - DNA, 60 bp, Artificial
  Synthetic oligonucleotide
ggattcgctaattatagggtggtcaatgaagtacttcaaagggtatgtggatggatacaa

SEQ ID NO: 105574 - DNA, 60 bp, Artificial
  Synthetic oligonucleotide
atatctaatatctagtaggatccgaacacgaaggctgtctaaacctaagtaggattgacg

SEQ ID NO: 105575 - DNA, 60 bp, Artificial
  Synthetic oligonucleotide
gtgtgtctgtaaccatatcattgcaggtgactatggtaacaatgtaatcattatagaaaa

SEQ ID NO: 105576 - DNA, 60 bp, Artificial
  Synthetic oligonucleotide
ccatatcattgcaggtgactatggtaacaatgtaatcattatagaaaatccaccacatag

SEQ ID NO: 105577 - DNA, 60 bp, Artificial
  Synthetic oligonucleotide
gagcggatgtattataccttcttgtactaccggactttggaatatctaatatctagtagg

SEQ ID NO: 105578 - DNA, 60 bp, Artificial
  Synthetic oligonucleotide
tgactagaagagcggatgtattataccttcttgtactaccggactttggaatatctaata

SEQ ID NO: 105579 - DNA, 60 bp, Artificial
  Synthetic oligonucleotide
gaactaccattaacctaagatcagtaggtagagtggcgccccgaggtttgcaccgcgtgg

SEQ ID NO: 105580 - DNA, 60 bp, Artificial
  Synthetic oligonucleotide
gaatggaggaagatgggtagttctaacagaagagattcgtcgcgcgatcgaatctaaata

SEQ ID NO: 105581 - DNA, 54 bp, Artificial
  Synthetic oligonucleotide
gaatggaggaagatgggtagttctaacagaagagatcgctcgcgcgatcgaatc

SEQ ID NO: 105582 - DNA, 50 bp, Artificial
  Synthetic oligonucleotide
gggaggcgtaaacaagggaagaagcctcatggtgatgcgcagagagaggg

SEQ ID NO: 105583 - DNA, 60 bp, Artificial
  Synthetic oligonucleotide
gggcgcatgcaaaggctgctgagagaggaaggcgtaaacaagggaagaagcctcatggcg

SEQ ID NO: 105584 - DNA, 52 bp, Artificial
  Synthetic oligonucleotide
gaatggaggaagatgggtagttctaacagaagagattcgtcgcgcgatcgaa

SEQ ID NO: 105585 - DNA, 60 bp, Artificial
  Synthetic oligonucleotide
gaatggaggaagatgggtagttctaacagaagagatcgctcgcgcgatcgaatctaaata

SEQ ID NO: 105586 - DNA, 60 bp, Artificial
  Synthetic oligonucleotide
caatgatggaactttccttgcgacattaaccgaattatccttagatgctgcggtattccc

SEQ ID NO: 105587 - DNA, 60 bp, Artificial
  Synthetic oligonucleotide
actcttaaagatgctagggataaaattgttgaaggtacactatactccaatgttagcgat

SEQ ID NO: 105588 - DNA, 60 bp, Artificial
  Synthetic oligonucleotide
gctagggataaaattgttgaaggtacactatactccaatgttagcgatctcattcaacaa

SEQ ID NO: 105589 - DNA, 60 bp, Artificial
  Synthetic oligonucleotide
tggaaatgactttcaaactggaggaattggtaatttacctgttagaaactggacttttga

SEQ ID NO: 105590 - DNA, 60 bp, Artificial
  Synthetic oligonucleotide
aactggaggaattggtaatttacctgttagaaactggacttttgatttcggtctattagg

SEQ ID NO: 105591 - DNA, 60 bp, Artificial
  Synthetic oligonucleotide
ctttaatccagttattctaagaccaaataatgtagaagtagagtttttattgaatggaca

SEQ ID NO: 105592 - DNA, 60 bp, Artificial
  Synthetic oligonucleotide
cagctttccaagagttattaattcggctgacggcgcaactacatggttctttaatccagt

SEQ ID NO: 105593 - DNA, 60 bp, Artificial
  Synthetic oligonucleotide
ttcagctttccaagagttattaattcggctgacggcgcaactacatggttctttaatcca

SEQ ID NO: 105594 - DNA, 60 bp, Artificial
  Synthetic oligonucleotide
ccagcaaatatacagcagttcgaacatattgtgcagcttagacgtgcactgactacagct

SEQ ID NO: 105595 - DNA, 60 bp, Artificial
  Synthetic oligonucleotide
tataaatgcaccagcaaatatacagcagttcgaacatattgtgcagcttagacgtgcact

SEQ ID NO: 105596 - DNA, 60 bp, Artificial
  Synthetic oligonucleotide
gctggatcggagatacaagtagctggttttgattattcatgtgctataaatgcaccagca

SEQ ID NO: 105597 - DNA, 60 bp, Artificial
  Synthetic oligonucleotide
cttaatgctggatcggagatacaagtagctggttttgattattcatgtgctataaatgca

SEQ ID NO: 105598 - DNA, 50 bp, Artificial
  Synthetic oligonucleotide
tggaatctacaaaatagaagacagcgtactggatttgtcttccataaacc

SEQ ID NO: 105599 - DNA, 55 bp, Artificial
  Synthetic oligonucleotide
agcaagagagtctcaaagaaatggagtagctccacaatctgaagcgctgaggaag

SEQ ID NO: 105600 - DNA, 60 bp, Artificial
  Synthetic oligonucleotide
ggacttttgatttcggtctattaggtacaacacttttaaatttggatgctaattatgttg

SEQ ID NO: 105601 - DNA, 60 bp, Artificial
  Synthetic oligonucleotide
cagactcttcaagtaagaacatgatttcatgttcgctacgtagagtaactgtctgaatga

SEQ ID NO: 105602 - DNA, 58 bp, Artificial
  Synthetic oligonucleotide
aacatgatttcatgttcgctacgtagagtaactgtctgaatgatgtagtgagaggatg

SEQ ID NO: 105603 - DNA, 60 bp, Artificial
  Synthetic oligonucleotide
taaacatctggtatccaatcttagttgatatgtagctacatcaagtcattcagactcttc

SEQ ID NO: 105604 - DNA, 60 bp, Artificial
  Synthetic oligonucleotide
ctggtatccaatcttagttgatatgtagctacatcaagtcattcagactcttcaagtaag

SEQ ID NO: 105605 - DNA, 60 bp, Artificial
  Synthetic oligonucleotide
tgagctaattactaactattcaccatctagagaagataacctgcaacgcgtctttacagt

SEQ ID NO: 105606 - DNA, 60 bp, Artificial
  Synthetic oligonucleotide
ctattcaccatctagagaagataacctgcaacgcgtctttacagtagcttccattagaag

SEQ ID NO: 105607 - DNA, 60 bp, Artificial
  Synthetic oligonucleotide
cagttggactcacattacgtattgaatctgctgtctgtgaatcagtgcttgcggacgcga

SEQ ID NO: 105608 - DNA, 60 bp, Artificial
  Synthetic oligonucleotide
ttgcggacgcgaatgaaactctgttagcgaatgtgaccgcggtgcgtcaagagtatgcta

SEQ ID NO: 105609 - DNA, 60 bp, Artificial
  Synthetic oligonucleotide
gagtatgctataccagttggaccggtatttccaccaggcatgaattggactgagctaatt

SEQ ID NO: 105610 - DNA, 60 bp, Artificial
  Synthetic oligonucleotide
gctataccagttggaccggtatttccaccaggcatgaattggactgagctaattactaac

SEQ ID NO: 105611 - DNA, 60 bp, Artificial
  Synthetic oligonucleotide
tgaatggacaaatcattaacacatatcaggctagatttggtactattatcgcaagaaatt

SEQ ID NO: 105612 - DNA, 60 bp, Artificial
  Synthetic oligonucleotide
gcaagaaattttgatacaattcggttgtcatttcagttaatgcgtccaccaaatatgaca

SEQ ID NO: 105613 - DNA, 60 bp, Artificial
  Synthetic oligonucleotide
acaattcggttgtcatttcagttaatgcgtccaccaaatatgacaccagctgttaacgca

SEQ ID NO: 105614 - DNA, 60 bp, Artificial
  Synthetic oligonucleotide
aacagttggactcacattacgtattgaatctgctgtctgtgaatcagtgcttgcggacgc

SEQ ID NO: 105615 - DNA, 60 bp, Artificial
  Synthetic oligonucleotide
atctgatagggacagactattaaagaaggcactttccgccaacgtttcttcctccaatac

SEQ ID NO: 105616 - DNA, 60 bp, Artificial
  Synthetic oligonucleotide
gggacagactattaaagaaggcactttccgccaacgtttcttcctccaatacatctagtc

SEQ ID NO: 105617 - DNA, 60 bp, Artificial
  Synthetic oligonucleotide
ggatgcagataaatctttactcgaacagacttggagcgcagtagcgtcatttgttgaaac

SEQ ID NO: 105618 - DNA, 60 bp, Artificial
  Synthetic oligonucleotide
gactagttcagtgctgtgcgatcttcagttcattatcgatgccgagtgacgacggctagg

SEQ ID NO: 105619 - DNA, 60 bp, Artificial
  Synthetic oligonucleotide
cccgacttcatgatagactgcaaaccgtagaaactagcactttacccaacatcacgcaac

SEQ ID NO: 105620 - DNA, 60 bp, Artificial
  Synthetic oligonucleotide
ccacgttgcatcttcccaaactaccgttaatttgtacattcgcaaacatttgttgacccg

SEQ ID NO: 105621 - DNA, 60 bp, Artificial
  Synthetic oligonucleotide
ccacgttgcatcttcccaaactaccgttaatttgtacattcgtaagcattcgttgacccg

SEQ ID NO: 105622 - DNA, 60 bp, Artificial
  Synthetic oligonucleotide
cgccccacgttgcatcttcccaaactaccgttaatttgtacattcgtaagcattcgttga

SEQ ID NO: 105623 - DNA, 60 bp, Artificial
  Synthetic oligonucleotide
ccgtagaaactagcactttacccaacatcacgcaacttaaagatcatattcgcagtttct

SEQ ID NO: 105624 - DNA, 60 bp, Artificial
  Synthetic oligonucleotide
tacaaaccgtagaaactagcactttacccaacatcacgcaacttaaagatcatattcgca

SEQ ID NO: 105625 - DNA, 60 bp, Artificial
  Synthetic oligonucleotide
ctggtaaattaagaattgatggtggttacgattttaattgtcctgcaagcactacggatg

SEQ ID NO: 105626 - DNA, 60 bp, Artificial
  Synthetic oligonucleotide
gcgtactggtaaattaagaattgatggtggttacgatttcaattgtcccgcaagcactac

SEQ ID NO: 105627 - DNA, 60 bp, Artificial
  Synthetic oligonucleotide
gcgtactggtaaattaagaattgatggtggttacgatttcaattgtcctgcaagcactac

SEQ ID NO: 105628 - DNA, 55 bp, Artificial
  Synthetic oligonucleotide
catattcgcagtttctttcaaaatgaacaccaacctatttttcagaccctaacga

SEQ ID NO: 105629 - DNA, 60 bp, Artificial
  Synthetic oligonucleotide
aaagatcatattcgcagtttctttcaaaatgaacaccaacctatttttcagaccctaacg

SEQ ID NO: 105630 - DNA, 60 bp, Artificial
  Synthetic oligonucleotide
ctagttcagtgctgtgcgatcttcagttcattatcgatgccgagtgacgacggctagggg

SEQ ID NO: 105631 - DNA, 60 bp, Artificial
  Synthetic oligonucleotide
gatgcgtactggtaaattaagaattgatggtggttacgatttcaattgtcccgcaagcac

SEQ ID NO: 105632 - DNA, 60 bp, Artificial
  Synthetic oligonucleotide
atagactacaaaccgtagaaactagcactttacccaacatcacgcaacttaaagatcata

SEQ ID NO: 105633 - DNA, 60 bp, Artificial
  Synthetic oligonucleotide
cccgacttcatgatagactacagaccgtagaaactagcactttacccaacatcacgcaac

SEQ ID NO: 105634 - DNA, 54 bp, Artificial
  Synthetic oligonucleotide
taaacaaccgaccaacaatcactctgttatctcatttcaacaatctatttcatg

SEQ ID NO: 105635 - DNA, 60 bp, Artificial
  Synthetic oligonucleotide
taaacaaccgaccaacaatcactctgttatctcatttcaacaatctatttcatgaattga

SEQ ID NO: 105636 - DNA, 60 bp, Artificial
  Synthetic oligonucleotide
tggtgtaccccagagactttccgatacaataattttaaacaaccgaccaacaatcactct

SEQ ID NO: 105637 - DNA, 60 bp, Artificial
  Synthetic oligonucleotide
taattttaaacaaccgaccaacaatcactctgttatctcatttcaacaatctatttcatg

SEQ ID NO: 105638 - DNA, 60 bp, Artificial
  Synthetic oligonucleotide
cgatcctatccataatggtgtaccccagagactttccgatacaataattttaaacaaccg

SEQ ID NO: 105639 - DNA, 60 bp, Artificial
  Synthetic oligonucleotide
cgatcttatccataatggtgtaccccagagactttccgatacaataattttaaacaaccg

SEQ ID NO: 105640 - DNA, 60 bp, Artificial
  Synthetic oligonucleotide
agcgcccgatcctatccataatggtgtaccccagagactttccgatacaataattttaaa

SEQ ID NO: 105641 - DNA, 60 bp, Artificial
  Synthetic oligonucleotide
gcgcccgatcctatccataatggtgtaccccagagactttccgatacaataattttaaac

SEQ ID NO: 105642 - DNA, 60 bp, Artificial
  Synthetic oligonucleotide
cgccccacgttgcatcttcccaaactaccgttaatttgtacattcgcaaacatttgttga

SEQ ID NO: 105643 - DNA, 60 bp, Artificial
  Synthetic oligonucleotide
gtcaaagcgccccacgttgcatcttcccaaactaccgttaatttgtacattcgcaaacat

SEQ ID NO: 105644 - DNA, 60 bp, Artificial
  Synthetic oligonucleotide
gcttatttgctacctccaaacttgatgctgaacaaatagaacgtgtgcaaattgagacct

SEQ ID NO: 105645 - DNA, 60 bp, Artificial
  Synthetic oligonucleotide
cctccaaacttgatgctgaacaaatagaacgtgtgcaaattgagaccttaactgaaggaa

SEQ ID NO: 105646 - DNA, 60 bp, Artificial
  Synthetic oligonucleotide
attgagaccttaactgaaggaaacattacgttgaagcccttttccgctgatggtttagaa

SEQ ID NO: 105647 - DNA, 60 bp, Artificial
  Synthetic oligonucleotide
gagaccttaactgaaggaaacattacgttgaagcccttttccgctgatggtttagaagtc

SEQ ID NO: 105648 - DNA, 51 bp, Artificial
  Synthetic oligonucleotide
gaaacattactttgaagcccttttccgctgatggtttagaagtcattctcg

SEQ ID NO: 105649 - DNA, 60 bp, Artificial
  Synthetic oligonucleotide
cgtgaagttcctgctcaaatgggaatacttactgatgaagttaaacttttgatgcgtact

SEQ ID NO: 105650 - DNA, 60 bp, Artificial
  Synthetic oligonucleotide
ttgtcgtgaagttcctgctcaaatgggaatacttactgatgaagttaaacttttgatgcg

SEQ ID NO: 105651 - DNA, 60 bp, Artificial
  Synthetic oligonucleotide
gaagttcctgctcaaatgggaatacttactgatgaagttaaacttttgatgcgtactggt

SEQ ID NO: 105652 - DNA, 60 bp, Artificial
  Synthetic oligonucleotide
ttttgatgcgtactggtaaattaagaattgatggtggttacgattttaattgtcctgcaa

SEQ ID NO: 105653 - DNA, 60 bp, Artificial
  Synthetic oligonucleotide
gatgcgtactggtaaattaagaattgatggtggttacgatttcaattgtcctgcaagcac

SEQ ID NO: 105654 - DNA, 60 bp, Artificial
  Synthetic oligonucleotide
cgatgatagttcgacgccttataatgttcgtatttggcatgctcctactatgacagaggt

SEQ ID NO: 105655 - DNA, 60 bp, Artificial
  Synthetic oligonucleotide
cacgtattcacctggtctgttctgtggatgcgttgatgtacaatcggcaccactcgcact

SEQ ID NO: 105656 - DNA, 60 bp, Artificial
  Synthetic oligonucleotide
gatatgtactcgatacgccgacacgcgacatctggccagcagacgaacagatagagcaaa

SEQ ID NO: 105657 - DNA, 60 bp, Artificial
  Synthetic oligonucleotide
gtccatctactgcacgtacgttcggaagacaacactctacgttacaactggatgctaggt

SEQ ID NO: 105658 - DNA, 60 bp, Artificial
  Synthetic oligonucleotide
gtattggcggccgtaacttagctgatatatctgttgtccctcttaacatgaagtacgtag

SEQ ID NO: 105659 - DNA, 60 bp, Artificial
  Synthetic oligonucleotide
cgagaacgttgtacatgacacaaagacatcaagagctactactagcacaaataactgccg

SEQ ID NO: 105660 - DNA, 60 bp, Artificial
  Synthetic oligonucleotide
ccgcgcacaaaaccatacgtgtcgaggagggtcgactgaaagtggcgaattatgtacccg

SEQ ID NO: 105661 - DNA, 60 bp, Artificial
  Synthetic oligonucleotide
tacatgtgctagcgctgcaacgcgtgcgcttgtgaagattaatcatccatccgaatacat

SEQ ID NO: 105662 - DNA, 60 bp, Artificial
  Synthetic oligonucleotide
ggacatccactatttcgcttaccccttaagtatccgtcaaaagcaataccagcggatgag

SEQ ID NO: 105663 - DNA, 60 bp, Artificial
  Synthetic oligonucleotide
gagccaaacggagcagctactcctgctagaatgcaaatggacaaaatacgcaatgtcgcc

SEQ ID NO: 105664 - DNA, 60 bp, Artificial
  Synthetic oligonucleotide
acagtacctcaactcggcacagactacttgtacactttcaactcacaacgacgatcacac

SEQ ID NO: 105665 - DNA, 60 bp, Artificial
  Synthetic oligonucleotide
cttggtgcagaaagagagcccgctgttaatatattgcgaaggtttaaccgtaatgtttcc

SEQ ID NO: 105666 - DNA, 60 bp, Artificial
  Synthetic oligonucleotide
gcggttgattcagatatcactttcgtaggtaacaggatgatagcgccattgccagaagga

SEQ ID NO: 105667 - DNA, 60 bp, Artificial
  Synthetic oligonucleotide
gcctatcatgagtatcaacgttatgtaccaaatggacttggcttcaaagtgcggaagaca

SEQ ID NO: 105668 - DNA, 60 bp, Artificial
  Synthetic oligonucleotide
cgtgacatcggtataacacatgagataataagaccatcgacgcctgagcttatagacgcc

SEQ ID NO: 105669 - DNA, 65 bp, Artificial
  Synthetic oligonucleotide
gtgtatgattatataaatagtgagttagccgataatgttgacttaactgctggagaaattgatgg

SEQ ID NO: 105670 - DNA, 60 bp, Artificial
  Synthetic oligonucleotide
gctattggtttaagtcatttgatcgagtattgtttaaaatacgaattaccaagtgatgca

SEQ ID NO: 105671 - DNA, 60 bp, Artificial
  Synthetic oligonucleotide
ctcgcatactcaaagtttgtggtggtactgaaacaagatatcaaattacagctattggtt

SEQ ID NO: 105672 - DNA, 60 bp, Artificial
  Synthetic oligonucleotide
ggtttccaatgctgagaaatctcattttcttaaaccggatgaagtcagagctaaactagc

SEQ ID NO: 105673 - DNA, 60 bp, Artificial
  Synthetic oligonucleotide
ctacaaacagttggtggcagaggtacgagctctcagaaagataaaatcagctggcaatcc

SEQ ID NO: 105674 - DNA, 60 bp, Artificial
  Synthetic oligonucleotide
gaccaattcggttactttaagtcgaagataggtgtcaatggaaatgagaagtctgatgca

SEQ ID NO: 105675 - DNA, 60 bp, Artificial
  Synthetic oligonucleotide
agaagtctgatgcaattgcaattatgaatggtaaacaggatgaatcatgtcacgttgatt

SEQ ID NO: 105676 - DNA, 60 bp, Artificial
  Synthetic oligonucleotide
cccagctatacaatccgctttggcgaaacgctacactggcgctttgaaagacatcattct

SEQ ID NO: 105677 - DNA, 60 bp, Artificial
  Synthetic oligonucleotide
ccgctttggcgaaacgctacactggcgctttgaaagacatcattctagatgagactcttg

SEQ ID NO: 105678 - DNA, 60 bp, Artificial
  Synthetic oligonucleotide
cagaatggttaagggtgacaacaactatatgtatatgtcagctaaagataagtcgcgcaa

SEQ ID NO: 105679 - DNA, 60 bp, Artificial
  Synthetic oligonucleotide
gtgacaacaactatatgtatatgtcagctaaagataagtcgcgcaacgcagcttcatcgg

SEQ ID NO: 105680 - DNA, 60 bp, Artificial
  Synthetic oligonucleotide
agtgctattgctaatgaagcttctaaagatgtacctttgtcatccgattccagaatggtt

SEQ ID NO: 105681 - DNA, 60 bp, Artificial
  Synthetic oligonucleotide
gaagcttctaaagatgtacctttgtcatccgattccagaatggttaagggtgacaacaac

SEQ ID NO: 105682 - DNA, 60 bp, Artificial
  Synthetic oligonucleotide
cgcatgttaaagtcattcatcttcatcatatttagtgtatttgacaaggtcgactcacgc

SEQ ID NO: 105683 - DNA, 60 bp, Artificial
  Synthetic oligonucleotide
ttgacaaggtcgactcacgctctcaaggcaatgtgatgaagtttgacgaagtgtatgatt

SEQ ID NO: 105684 - DNA, 60 bp, Artificial
  Synthetic oligonucleotide
gacaaggtcgactcacgctctcaaggcaatgtgatgaagtttgacgaagtgtatgattat

SEQ ID NO: 105685 - DNA, 60 bp, Artificial
  Synthetic oligonucleotide
cgcgcaacgcagcttcatcggatagattagcgaagtacaaaagtgttaggaatacagagg

SEQ ID NO: 105686 - DNA, 60 bp, Artificial
  Synthetic oligonucleotide
gtgtatgattatataaatagtgagttagccgataatgttgacttaactgctggagaaatt

SEQ ID NO: 105687 - DNA, 60 bp, Artificial
  Synthetic oligonucleotide
actaaagtaatcgctgaccaagttctagccaaactgggtcagtatttgatttctgaccaa

SEQ ID NO: 105688 - DNA, 52 bp, Artificial
  Synthetic oligonucleotide
gaccaagttctagccaaactgggtcagtatttgatttctgaccaattcggtt

SEQ ID NO: 105689 - DNA, 60 bp, Artificial
  Synthetic oligonucleotide
ttctgaccaattcggttactttaagtcgaagataggtgtcaatggaaatgagaagtctga

SEQ ID NO: 105690 - DNA, 60 bp, Artificial
  Synthetic oligonucleotide
acatcattctagatgagactcttgatgacgtggacgatggtgttgatactagtgctattg

SEQ ID NO: 105691 - DNA, 60 bp, Artificial
  Synthetic oligonucleotide
cttattcaatggttaaggctgtctgaccaacagctaggtccaaatgaaattaaatccgac

SEQ ID NO: 105692 - DNA, 60 bp, Artificial
  Synthetic oligonucleotide
ggggcggaccgcacatccaagctcccgatgattgaagcttattcaatggttaaggctgtc

SEQ ID NO: 105693 - DNA, 60 bp, Artificial
  Synthetic oligonucleotide
tactttcagagggggggcggaccgcacatccaagctcccgatgattgaagcttattcaat

SEQ ID NO: 105694 - DNA, 60 bp, Artificial
  Synthetic oligonucleotide
ttgcagctagaaacggaaagtctttgctctaacagtcgttgtatgttactttcagagggg

SEQ ID NO: 105695 - DNA, 60 bp, Artificial
  Synthetic oligonucleotide
ccatttgcagctagaaacggaaagtctttgctctaacagtcgttgtatgttactttcaga

SEQ ID NO: 105696 - DNA, 60 bp, Artificial
  Synthetic oligonucleotide
gcttcaagttctaattcagttaatacacacaagtcgaaaccatttgcagctagaaacgga

SEQ ID NO: 105697 - DNA, 60 bp, Artificial
  Synthetic oligonucleotide
acatcagcattgcttcaagttctaattcagttaatacacacaagtcgaaaccatttgcag

SEQ ID NO: 105698 - DNA, 60 bp, Artificial
  Synthetic oligonucleotide
cagaggatgatacaccatcgtctactgttgttgcttctaactcagctgacgttattcatg

SEQ ID NO: 105699 - DNA, 60 bp, Artificial
  Synthetic oligonucleotide
aggaatacagaggatgatacaccatcgtctactgttgttgcttctaactcagctgacgtt

SEQ ID NO: 105700 - DNA, 60 bp, Artificial
  Synthetic oligonucleotide
gagactcttgatgacgtggacgatggtgttgatactagtgctattgctaatgaagcttct

SEQ ID NO: 105701 - DNA, 60 bp, Artificial
  Synthetic oligonucleotide
aagtgatgcacgcatgttaaagtcattcatcttcatcatatttagtgtatttgacaaggt

SEQ ID NO: 105702 - DNA, 60 bp, Artificial
  Synthetic oligonucleotide
ggtttaagtcatttgatcgagtattgtttaaaatacgaattaccaagtgatgcacgcatg

SEQ ID NO: 105703 - DNA, 60 bp, Artificial
  Synthetic oligonucleotide
aagaatgcgaaatgtagtgtcgtaggacatataagcccagctatacaatccgctttggcg

SEQ ID NO: 105704 - DNA, 60 bp, Artificial
  Synthetic oligonucleotide
ttaggaaataagtgtaagaatgcgaaatgtagtgtcgtaggacatataagcccagctata

SEQ ID NO: 105705 - DNA, 60 bp, Artificial
  Synthetic oligonucleotide
caacctcactggtgaacgagacttcagctcaattgaaaactttggtttccaatgctgaga

SEQ ID NO: 105706 - DNA, 60 bp, Artificial
  Synthetic oligonucleotide
actattgaacgtacaacctcactggtgaacgagacttcagctcaattgaaaactttggtt

SEQ ID NO: 105707 - DNA, 60 bp, Artificial
  Synthetic oligonucleotide
ttatgatcaatgtgtattaagttacatggatgatattgaaataagcgcgaatcgcgtttg

SEQ ID NO: 105708 - DNA, 60 bp, Artificial
  Synthetic oligonucleotide
ctaactccaagtacttcacaaccaattcaggtaaattgtactacgcttatgatcaatgtg

SEQ ID NO: 105709 - DNA, 60 bp, Artificial
  Synthetic oligonucleotide
cgtaattcctgcttactacaaacagttggtggcagaggtacgagctctcagaaagataaa

SEQ ID NO: 105710 - DNA, 60 bp, Artificial
  Synthetic oligonucleotide
gaagtctgatgcaattgcaattatgaatggtaaacaggatgaatcatgtcacgttgattt

SEQ ID NO: 105711 - DNA, 60 bp, Artificial
  Synthetic oligonucleotide
gaaagataaaatcagctggcaatccaaatggagtcaagtttagaggtattactaagtttg

SEQ ID NO: 105712 - DNA, 60 bp, Artificial
  Synthetic oligonucleotide
aactttggtttccaatgctgagaaatctcattttcttaaaccggatgaagtcagagctaa

SEQ ID NO: 105713 - DNA, 60 bp, Artificial
  Synthetic oligonucleotide
gactctaactccaagtacttcacaaccaattcaggtaaattgtactacgcttatgatcaa

SEQ ID NO: 105714 - DNA, 60 bp, Artificial
  Synthetic oligonucleotide
gctggcaatccaaatggagtcaagtttagaggtattactaagtttggtttcattaaaccg

SEQ ID NO: 105715 - DNA, 60 bp, Artificial
  Synthetic oligonucleotide
agtcgcgcaacgcagcttcatcggatagattagcgaagtacaaaagtgttaggaatacag

SEQ ID NO: 105716 - DNA, 60 bp, Artificial
  Synthetic oligonucleotide
ggcctaagcttaattggagagattgacttgcccgagtttatgcgttacgcgtgaaggcgg

SEQ ID NO: 105717 - DNA, 60 bp, Artificial
  Synthetic oligonucleotide
accacaaatcaaacaagctatgaaagaggatcacgaagctataggaagtgagagaccgaa

SEQ ID NO: 105718 - DNA, 60 bp, Artificial
  Synthetic oligonucleotide
tacaggagattgcaagtatgagtgctgacatattagaggcagcgtcagaagaagttccct

SEQ ID NO: 105719 - DNA, 60 bp, Artificial
  Synthetic oligonucleotide
gaaagatgatcagtatgaaattttagagaaagctgtgaaatcttatggcaaagtgattgg

SEQ ID NO: 105720 - DNA, 60 bp, Artificial
  Synthetic oligonucleotide
atgagttgaaagatgatcagtatgaaattttagagaaagctgtgaagtcttatggcaaag

SEQ ID NO: 105721 - DNA, 51 bp, Artificial
  Synthetic oligonucleotide
ggggaatcttatggtgagactgtcaaacaagcggtattattaaatgtgttg

SEQ ID NO: 105722 - DNA, 60 bp, Artificial
  Synthetic oligonucleotide
gtgggagaagcagaggtttaaggaggatcgtaatggtgaaaacatcgcggaagcgttgtg

SEQ ID NO: 105723 - DNA, 51 bp, Artificial
  Synthetic oligonucleotide
aaacacttgaacaattcgcgtctagagataggaagcggtttgacagaatta

SEQ ID NO: 105724 - DNA, 60 bp, Artificial
  Synthetic oligonucleotide
gcaggagctcttggctaataccacagcccggggctccaataacgatgtatgagctgcgaa

SEQ ID NO: 105725 - DNA, 60 bp, Artificial
  Synthetic oligonucleotide
gtatgagctgcgaaatctcatgcgtttggacggatattcacacgtcgaaaggaaacacat

SEQ ID NO: 105726 - DNA, 60 bp, Artificial
  Synthetic oligonucleotide
tctcatgcgtttggacggatattcacacgtcgaaaggaaacacataccaagagcgtacgc

SEQ ID NO: 105727 - DNA, 60 bp, Artificial
  Synthetic oligonucleotide
ggaaacacataccaagagcgtacgctcggaaaatcgatgcggaagttgcgagaagattag

SEQ ID NO: 105728 - DNA, 60 bp, Artificial
  Synthetic oligonucleotide
agaagattagttgaagagtatcatggagaggatgtagggcggttgttgaaacgatcttta

SEQ ID NO: 105729 - DNA, 60 bp, Artificial
  Synthetic oligonucleotide
tttattacattacgcttttcgaagaagaatcgacgagtgctcgacgggaatggagcaatc

SEQ ID NO: 105730 - DNA, 60 bp, Artificial
  Synthetic oligonucleotide
acgatctttatatgaagatatacatattgagcgcgctgatgggttaacggatggcgacga

SEQ ID NO: 105731 - DNA, 60 bp, Artificial
  Synthetic oligonucleotide
ccggttaataggaattttattacattacgcttttcgaagaagaatcgacgagtgctcgac

SEQ ID NO: 105732 - DNA, 60 bp, Artificial
  Synthetic oligonucleotide
gataggaagcggtttgacagaattaaatggatatgcatagatccaatcgctccggaaaca

SEQ ID NO: 105733 - DNA, 60 bp, Artificial
  Synthetic oligonucleotide
tcattatgcagatttattggattaaggttgatgtcttcgactttgaggataaattcagat

SEQ ID NO: 105734 - DNA, 60 bp, Artificial
  Synthetic oligonucleotide
gatcatccagacagatggtggcgggatgttgatgatggaccaaccgataagaaattagtt

SEQ ID NO: 105735 - DNA, 60 bp, Artificial
  Synthetic oligonucleotide
aggattttccaaaaactatgaactatgaccccagttgggcggagaactatgctgtcattt

SEQ ID NO: 105736 - DNA, 60 bp, Artificial
  Synthetic oligonucleotide
gttgaagagtatcatggagaggatgtagggcggttgttgaaacgatctttatatgaagat

SEQ ID NO: 105737 - DNA, 60 bp, Artificial
  Synthetic oligonucleotide
atccgaagagacacgtcgtgaaaggccagcctaaagctgctccaatgtatgatcatccag

SEQ ID NO: 105738 - DNA, 54 bp, Artificial
  Synthetic oligonucleotide
tttgcgtaacgcttaaaggtgacacttagcgagggggaatcctaataaccttac

SEQ ID NO: 105739 - DNA, 60 bp, Artificial
  Synthetic oligonucleotide
gcggcgttgtttgagtttatatactttgcgaagcattttgatataaacgagaggtatgtc

SEQ ID NO: 105740 - DNA, 60 bp, Artificial
  Synthetic oligonucleotide
tcgtgaaaggccagcctaaagctgctccaatgtatgatcatccagacagatggtggcggg

SEQ ID NO: 105741 - DNA, 60 bp, Artificial
  Synthetic oligonucleotide
atttgcaggagctcttggctaataccacagcccggggctccaataacgatgtatgagctg

SEQ ID NO: 105742 - DNA, 60 bp, Artificial
  Synthetic oligonucleotide
agtgctcgacgggaatggagcaatcctgtttctgatgtggcagcatccgaaggattttcc

SEQ ID NO: 105743 - DNA, 60 bp, Artificial
  Synthetic oligonucleotide
attatgtcggatgtggtgatttaaaaacacttgaacaattcgcgtctagagataggaagc

SEQ ID NO: 105744 - DNA, 60 bp, Artificial
  Synthetic oligonucleotide
aggaagcggtttgacagaattaaatggatatgcatagatccaatcgctccggaaacatcg

SEQ ID NO: 105745 - DNA, 52 bp, Artificial
  Synthetic oligonucleotide
ttttacttgacaaatatgcggaatgttgcgtttatgcatgatgtatatcgag

SEQ ID NO: 105746 - DNA, 60 bp, Artificial
  Synthetic oligonucleotide
cagacagatggtggcgggatgttgatgatggaccaaccgataagaaattagttagtatgc

SEQ ID NO: 105747 - DNA, 60 bp, Artificial
  Synthetic oligonucleotide
ctatgaactatgaccccagttgggcggagaactatgctgtcattttctatcatgcgttaa

SEQ ID NO: 105748 - DNA, 60 bp, Artificial
  Synthetic oligonucleotide
gtatgcttgattacattatatatagtgcggatgaagtgtattatgtcggatgtggtgatt

SEQ ID NO: 105749 - DNA, 60 bp, Artificial
  Synthetic oligonucleotide
gaaattagttagtatgcttgattacattatatatagtgcggatgaagtgtattatgtcgg

SEQ ID NO: 105750 - DNA, 60 bp, Artificial
  Synthetic oligonucleotide
aaattcagatcgtgcacatcaagtgactgatatcttgaagaaattgggcttggacgtatc

SEQ ID NO: 105751 - DNA, 60 bp, Artificial
  Synthetic oligonucleotide
attggattaaggttgatgtcttcgactttgaggataaattcagatcgtgcacatcaagtg

SEQ ID NO: 105752 - DNA, 60 bp, Artificial
  Synthetic oligonucleotide
gaaggggacaattgagtgggagaagcagaggtttaaggaggatcgtaatggtgaaaacat

SEQ ID NO: 105753 - DNA, 60 bp, Artificial
  Synthetic oligonucleotide
cgcgatgaggtcgagcgattattgatctgggatgtgagtgcagatgggctgaaggggaca

SEQ ID NO: 105754 - DNA, 60 bp, Artificial
  Synthetic oligonucleotide
gtttatttaggatggaaccttacgcaatattgtatgttacgcaggagatcgaatacctac

SEQ ID NO: 105755 - DNA, 60 bp, Artificial
  Synthetic oligonucleotide
gatggaaccttacgcaatattgtatgttacgcaggagatcgaatacctactcaaagatag

SEQ ID NO: 105756 - DNA, 60 bp, Artificial
  Synthetic oligonucleotide
ggagggatgagaaagcggatgagccttggcacataaagaatgatttgctggcggcgttgt

SEQ ID NO: 105757 - DNA, 60 bp, Artificial
  Synthetic oligonucleotide
gctggcggcgttaagtgaagcgaaggcggaacttatcgagtggagggatgagaaagcgga

SEQ ID NO: 105758 - DNA, 60 bp, Artificial
  Synthetic oligonucleotide
agtggagggatgagaaagcggatgagccttggcacataaagaatgatttgctggcggcgt

SEQ ID NO: 105759 - DNA, 60 bp, Artificial
  Synthetic oligonucleotide
ggtggtttcgtatgatcctggagtggtccgtcaaggatagagaagggaagctggcggcgt

SEQ ID NO: 105760 - DNA, 60 bp, Artificial
  Synthetic oligonucleotide
tagagaagggaagctggcggcgttaagtgaagcgaaggcggaacttatcgagtggaggga

SEQ ID NO: 105761 - DNA, 64 bp, Artificial
  Synthetic oligonucleotide
cgggtcatctatttatttgtttaatgtcaaattcatatgttgctgatcttgattggtggtttcg

SEQ ID NO: 105762 - DNA, 60 bp, Artificial
  Synthetic oligonucleotide
gctgatcttgattggtggtttcgtatgatcctggagtggtccgtcaaggatagagaaggg

SEQ ID NO: 105763 - DNA, 60 bp, Artificial
  Synthetic oligonucleotide
cagatcgtgcacatcaagtgactgatatcttgaagaaattgggcttggacgtatcgggtc

SEQ ID NO: 105764 - DNA, 60 bp, Artificial
  Synthetic oligonucleotide
tggacgtatcgggtcatctatttatttgtttaatgtcaaattcatatgttgctgatcttg

SEQ ID NO: 105765 - DNA, 60 bp, Artificial
  Synthetic oligonucleotide
ggatcttaatacattatggttagagaggggcagaatggcgtgtgacacatacgcaattgg

SEQ ID NO: 105766 - DNA, 60 bp, Artificial
  Synthetic oligonucleotide
gaatacctactcaaagatagtttccttccgaagtgggaacttgatggaattaaggatctt

SEQ ID NO: 105767 - DNA, 60 bp, Artificial
  Synthetic oligonucleotide
ctggcggcgttgtttgagtttatatactttgcgaagcattttgatataaacgagaggtat

SEQ ID NO: 105768 - DNA, 60 bp, Artificial
  Synthetic oligonucleotide
gggtaacgttaaggaagagtttcgggaatatgttaagggcttatgctttccaacacgtga

SEQ ID NO: 105769 - DNA, 60 bp, Artificial
  Synthetic oligonucleotide
gaagagtttcgggaatatgttaagggcttatgctttccaacacgtgaccgttctacacgg

SEQ ID NO: 105770 - DNA, 60 bp, Artificial
  Synthetic oligonucleotide
ttttgtttataagcacgaaaagaaagatcaggctgaaggattgcacgatttcgcccgaca

SEQ ID NO: 105771 - DNA, 60 bp, Artificial
  Synthetic oligonucleotide
gcacgaaaagaaagatcaggctgaaggattgcacgatttcgcccgacatattcattttga

SEQ ID NO: 105772 - DNA, 60 bp, Artificial
  Synthetic oligonucleotide
cgttgaaccagcgccaggccaaatcgttgcgtatcactcccacccttctatctgcgactc

SEQ ID NO: 105773 - DNA, 60 bp, Artificial
  Synthetic oligonucleotide
gagctacaagcattggtggcgaagaatgtagagttggacgcgttgaaccagcgccaggcc

SEQ ID NO: 105774 - DNA, 60 bp, Artificial
  Synthetic oligonucleotide
aacggaattgcgtgagtcagctgagaattatgagaagcagatcgcggaactggtgagcac

SEQ ID NO: 105775 - DNA, 60 bp, Artificial
  Synthetic oligonucleotide
ctctgttccaactgatgaattgtaggtgatagatgacgcagtgttgccctaatcccttaa

SEQ ID NO: 105776 - DNA, 60 bp, Artificial
  Synthetic oligonucleotide
tctgcgactcctatcgattcggtcgacggtgctgccaatctgattgatttctctgttcca

SEQ ID NO: 105777 - DNA, 60 bp, Artificial
  Synthetic oligonucleotide
ccagcgccaggccaaatcgttgcgtatcactcccacccttctatctgcgactcctatcga

SEQ ID NO: 105778 - DNA, 60 bp, Artificial
  Synthetic oligonucleotide
agtaaaacgtgatatatcatccctcactgccacccctggacttcgctcacaatccttcac

SEQ ID NO: 105779 - DNA, 60 bp, Artificial
  Synthetic oligonucleotide
gtgcaccaaagatgaagtgttggctgagcagactattttcaagttagacgctccagatga

SEQ ID NO: 105780 - DNA, 60 bp, Artificial
  Synthetic oligonucleotide
ggatgctataactgccttcattaactttgtgtctgctatgctgaagatgacagtgacacg

SEQ ID NO: 105781 - DNA, 60 bp, Artificial
  Synthetic oligonucleotide
gcggcagatcaatcgtacttcactttggagaccgcagattacttcaagatatatccaaca

SEQ ID NO: 105782 - DNA, 54 bp, Artificial
  Synthetic oligonucleotide
ctggacttcgctcacaatccttcaccccgtctgtggatatgtctcaatcacgtg

SEQ ID NO: 105783 - DNA, 60 bp, Artificial
  Synthetic oligonucleotide
agtgcgaccattttcttcaggtgccttctcaatctctggagttatttcaccagctcatgc

SEQ ID NO: 105784 - DNA, 57 bp, Artificial
  Synthetic oligonucleotide
tgcctcagcttgagcaagcgatggcttttgttgcctcacctgagtctttccaagcct

SEQ ID NO: 105785 - DNA, 60 bp, Artificial
  Synthetic oligonucleotide
gtggctcctgggcatcatgccgcccaaaggtctagtcagcgatctatacttgacgacctc

SEQ ID NO: 105786 - DNA, 60 bp, Artificial
  Synthetic oligonucleotide
cgatctatacttgacgacctctatgccaacacacaggtggtttcgatcacttcctccgcc

SEQ ID NO: 105787 - DNA, 60 bp, Artificial
  Synthetic oligonucleotide
actgttaaatgccaaaccgttatcgatgatttgactcaaatgaatggaaaacaggcacaa

SEQ ID NO: 105788 - DNA, 51 bp, Artificial
  Synthetic oligonucleotide
cggattatcatgcagaagtcaattcagtcggatccaaccccggtagcgttg

SEQ ID NO: 105789 - DNA, 60 bp, Artificial
  Synthetic oligonucleotide
cgcgaactgtctagtgaggtaactaggctgcagatggagttgagtcgtgctcagtccctg

SEQ ID NO: 105790 - DNA, 60 bp, Artificial
  Synthetic oligonucleotide
tgtacctaagacatcatacctgcattaatggtcatactaaggaagacgagctgcttgacg

SEQ ID NO: 105791 - DNA, 60 bp, Artificial
  Synthetic oligonucleotide
gaagcgagatgaggaagggctggtgtgaacgtatctctaaggaagcaactgttaaatgcc

SEQ ID NO: 105792 - DNA, 60 bp, Artificial
  Synthetic oligonucleotide
tgagcatgatggtaggatggctgatcagaagcagtcaggattgatcttgtgcaccaaaga

SEQ ID NO: 105793 - DNA, 60 bp, Artificial
  Synthetic oligonucleotide
cgaccctttatacaccctgtccacgcataatggagtgtctttatgtgccttgctgatgga

SEQ ID NO: 105794 - DNA, 60 bp, Artificial
  Synthetic oligonucleotide
cttgctgatggatgagaaactttcagttctgaacagtgcatgtcgcatgacgctacgttc

SEQ ID NO: 105795 - DNA, 60 bp, Artificial
  Synthetic oligonucleotide
cgctacgttcactgatgaagactggacgtgaagctgatgcacatagagccttccagcggg

SEQ ID NO: 105796 - DNA, 60 bp, Artificial
  Synthetic oligonucleotide
tccttcacgaaagctggcatacggtgaggtgctttttctagatcgatctagtgacatggt

SEQ ID NO: 105797 - DNA, 60 bp, Artificial
  Synthetic oligonucleotide
gctcaagactatacatcgctaatgtgctattatcatccttcacgaaagctggcatacggt

SEQ ID NO: 105798 - DNA, 60 bp, Artificial
  Synthetic oligonucleotide
gctgatgctaaggggataatgaaggctgctgagattcagacgactcatgatgtccatttg

SEQ ID NO: 105799 - DNA, 60 bp, Artificial
  Synthetic oligonucleotide
gttgccgatgaggagttgatgctcttcgggctagatcatcgagggccgcagcagttggat

SEQ ID NO: 105800 - DNA, 60 bp, Artificial
  Synthetic oligonucleotide
gatgtccatttggcaccaggcgtcggtaatattgaccctgaaatttataatgagggacga

SEQ ID NO: 105801 - DNA, 60 bp, Artificial
  Synthetic oligonucleotide
ggcttgcttccaccagcgtgtctcttaggactgaagatgcgaaagttgccgatgaggagt

SEQ ID NO: 105802 - DNA, 60 bp, Artificial
  Synthetic oligonucleotide
gtgacacgtcagaactttgacgtcatcgtggctgaaattgaaaggcttgcttccaccagc

SEQ ID NO: 105803 - DNA, 60 bp, Artificial
  Synthetic oligonucleotide
tgacatggtggatgggattaagttacagttagacgcgtctaggcaatgtcatgagtgccc

SEQ ID NO: 105804 - DNA, 60 bp, Artificial
  Synthetic oligonucleotide
ggggtagttccgatacagggtccgataaatagagctgttgcacaaaatgcctacatgtga

SEQ ID NO: 105805 - DNA, 60 bp, Artificial
  Synthetic oligonucleotide
cagagaactgttaaatctcctttttcaccaattagtacaaagaacgagatggaattcgtt

SEQ ID NO: 105806 - DNA, 54 bp, Artificial
  Synthetic oligonucleotide
cgctaatgaatatacataagcctaatgacgttccaattgctacatctccattaa

SEQ ID NO: 105807 - DNA, 60 bp, Artificial
  Synthetic oligonucleotide
atgggatcggtagaaaagatcgcaacgagtttttcttttcacgctaatactatgttacca

SEQ ID NO: 105808 - DNA, 51 bp, Artificial
  Synthetic oligonucleotide
aaaatctggttgtgtctaccttcgtaccatacgtgaagcagttaaatcctg

SEQ ID NO: 105809 - DNA, 55 bp, Artificial
  Synthetic oligonucleotide
gttaaaaatctggttgtgtctaccttcgtaccatacgtgaagcagttaaatcctg

SEQ ID NO: 105810 - DNA, 60 bp, Artificial
  Synthetic oligonucleotide
gggacagaatcaaatgcaaatgcaaaatgctgatcgagcaaaccgagtattgacaaggac

SEQ ID NO: 105811 - DNA, 60 bp, Artificial
  Synthetic oligonucleotide
acgtgaaaattttacgggacagaatcaaatgcaaatgcaaaatgctgatcgagcaaaccg

SEQ ID NO: 105812 - DNA, 60 bp, Artificial
  Synthetic oligonucleotide
gtcaattggaggacagactgttgaagaaacgattagagttggaaaatgtctgggaattgt

SEQ ID NO: 105813 - DNA, 60 bp, Artificial
  Synthetic oligonucleotide
tcaaaacgtaggaccatagtggtaaaagcacctactaggaatgtaagacaccagatttag

SEQ ID NO: 105814 - DNA, 60 bp, Artificial
  Synthetic oligonucleotide
gtgaccaaatgcatgaatgctcagtacttggcggtaaaagtagggattacgactcatttt

SEQ ID NO: 105815 - DNA, 60 bp, Artificial
  Synthetic oligonucleotide
gcatgaatgctcagtacttggcggtaaaagtagggattacgactcattttgaagcagtaa

SEQ ID NO: 105816 - DNA, 53 bp, Artificial
  Synthetic oligonucleotide
gactcattttgaagcagtaaatgttccaccaccgcgctcaactgttatcactg

SEQ ID NO: 105817 - DNA, 60 bp, Artificial
  Synthetic oligonucleotide
ttcaaagttcaagatcgtgaaacgacaactcacttcatgatatcagagtcgggattagaa

SEQ ID NO: 105818 - DNA, 60 bp, Artificial
  Synthetic oligonucleotide
cgtgaaacgacaactcacttcatgatatcagagtcgggattagaagcgtgcctaggaaga

SEQ ID NO: 105819 - DNA, 60 bp, Artificial
  Synthetic oligonucleotide
cgctggatatgacaaggcgagtagagctattcttgctgtttcagcaggatgtttagttat

SEQ ID NO: 105820 - DNA, 60 bp, Artificial
  Synthetic oligonucleotide
aggttttgcaaaatgtcaattggaggacagactgttgaagaaacgattagagttggaaaa

SEQ ID NO: 105821 - DNA, 60 bp, Artificial
  Synthetic oligonucleotide
ataaattcgctggatatgacaaggcgagtagagctattcttgctgtttcagcaggatgtt

SEQ ID NO: 105822 - DNA, 60 bp, Artificial
  Synthetic oligonucleotide
gcaggatgtttagttattttgccagttttgtaaaataacagcgtataaatttcagttaat

SEQ ID NO: 105823 - DNA, 60 bp, Artificial
  Synthetic oligonucleotide
tgaccgtactttcattcaaaacgtaggaccatagtggtaaaagcacctactaggaatgta

SEQ ID NO: 105824 - DNA, 60 bp, Artificial
  Synthetic oligonucleotide
tttcggtactcgtgatcaagcaacaggtcaaattaacgaaattgaaactcaagttgtaaa

SEQ ID NO: 105825 - DNA, 60 bp, Artificial
  Synthetic oligonucleotide
ttctcatctccctaaccttgaacgtgactttaacgttgcacctatttatgtccgcgagaa

SEQ ID NO: 105826 - DNA, 60 bp, Artificial
  Synthetic oligonucleotide
cgacggttcactttttttcggtactcgtgatcaagcaacaggtcaaattaacgaaattga

SEQ ID NO: 105827 - DNA, 60 bp, Artificial
  Synthetic oligonucleotide
caggcgcgagcgtgtccaccatagagcagacttcatcgcacaaccaggtatacaagcgta

SEQ ID NO: 105828 - DNA, 60 bp, Artificial
  Synthetic oligonucleotide
cgaaaaggaaggatcaggcgcgagcgtgtccaccatagagcagacttcatcgcacaacca

SEQ ID NO: 105829 - DNA, 60 bp, Artificial
  Synthetic oligonucleotide
tggtaatcaagttaatcgcgttattgaatacatcggcgtgaattcaatgagaacagcggg

SEQ ID NO: 105830 - DNA, 60 bp, Artificial
  Synthetic oligonucleotide
caacggcggtggccgcaaacgctgtcaatcgtaaagttggtaatcaagttaatcgcgtta

SEQ ID NO: 105831 - DNA, 60 bp, Artificial
  Synthetic oligonucleotide
cttcagctaacgtttaaccgatggaatagtatcccgagcatattcgctgttgacagagat

SEQ ID NO: 105832 - DNA, 51 bp, Artificial
  Synthetic oligonucleotide
tgaatacatcggcgtgaattcaatgagaacagcggggcgcacggccacgat

SEQ ID NO: 105833 - DNA, 60 bp, Artificial
  Synthetic oligonucleotide
tgacagagatatgagcactcccaagccaccaacttctaaagatgctactactatgctaac

SEQ ID NO: 105834 - DNA, 60 bp, Artificial
  Synthetic oligonucleotide
aaccgatggaatagtatcccgagcatattcgctgttgacagagatatgagcactcccaag

SEQ ID NO: 105835 - DNA, 60 bp, Artificial
  Synthetic oligonucleotide
ttacctcctattgcaatagctcagttgaaacatgaaatgatgatgcattctcatgacgtg

SEQ ID NO: 105836 - DNA, 60 bp, Artificial
  Synthetic oligonucleotide
gagatatgagcactcccaagccaccaacttctaaagatgctactactatgctaactagac

SEQ ID NO: 105837 - DNA, 60 bp, Artificial
  Synthetic oligonucleotide
gtagatggagtgctatacaattcagaagtgcccaatgttgaattctattctcaggaagcc

SEQ ID NO: 105838 - DNA, 60 bp, Artificial
  Synthetic oligonucleotide
tacaattcagaagtgcccaatgttgaattctattctcaggaagccgtagctaagtttgct

SEQ ID NO: 105839 - DNA, 60 bp, Artificial
  Synthetic oligonucleotide
ctacacccacagaattcttacaactcatcaccttcgaaccaaccgaaagtgagattgtat

SEQ ID NO: 105840 - DNA, 58 bp, Artificial
  Synthetic oligonucleotide
ctacacccacagaattcttacaactcatcaccttcgaaccaaccgaaagtgagattgt

SEQ ID NO: 105841 - DNA, 60 bp, Artificial
  Synthetic oligonucleotide
gagattgtatcaaaagttattccgcagcctgaagatcatttacctaaccctggaaatata

SEQ ID NO: 105842 - DNA, 60 bp, Artificial
  Synthetic oligonucleotide
gttattccgcagcctgaagatcatttacctaaccctggaaatatacctggaaacgtgtac

SEQ ID NO: 105843 - DNA, 52 bp, Artificial
  Synthetic oligonucleotide
gcaagccctattcagtattaacgcccagaatgttagctctcacagttatttt

SEQ ID NO: 105844 - DNA, 60 bp, Artificial
  Synthetic oligonucleotide
gcaagccctattcagtattaacgcccagaatgttagctctcacagttatttttcaaggat

SEQ ID NO: 105845 - DNA, 60 bp, Artificial
  Synthetic oligonucleotide
tttcaaggatcagtgtcctggctacgccgaatacgtcagcaaggctaggcgtagatggag

SEQ ID NO: 105846 - DNA, 60 bp, Artificial
  Synthetic oligonucleotide
caaggatcagtgtcctggctacgccgaatacgtcagcaaggctaggcgtagatggagtgc

SEQ ID NO: 105847 - DNA, 60 bp, Artificial
  Synthetic oligonucleotide
ccacgctaatagcaaagatgttacaacaacctacaggaggatataccacgctcgaacgct

SEQ ID NO: 105848 - DNA, 60 bp, Artificial
  Synthetic oligonucleotide
agtaaatccacgctaatagcaaagatgttacaacaacctacaggaggatataccacgctc

SEQ ID NO: 105849 - DNA, 60 bp, Artificial
  Synthetic oligonucleotide
ccacgctcgaacgcttcaactatacaattcgtcatgacgacagaaacgctacacccacag

SEQ ID NO: 105850 - DNA, 60 bp, Artificial
  Synthetic oligonucleotide
taccacgctcgaacgcttcaactatacaattcgtcatgacgacagaaacgctacacccac

SEQ ID NO: 105851 - DNA, 60 bp, Artificial
  Synthetic oligonucleotide
gcatgaggataccgagcattttattgtctaatcgtaggccaagtgacaattatctttgac

SEQ ID NO: 105852 - DNA, 60 bp, Artificial
  Synthetic oligonucleotide
gcattttattgtctaatcgtaggccaagtgacaattatctttgactacccggatgcggga

SEQ ID NO: 105853 - DNA, 60 bp, Artificial
  Synthetic oligonucleotide
gtcagatggtaaaatgtgactagcgggtgtcaccacgacggaaagtttatgcatgaggat

SEQ ID NO: 105854 - DNA, 60 bp, Artificial
  Synthetic oligonucleotide
ggtaaaatgtgactagcgggtgtcaccacgacggaaagtttatgcatgaggataccgagc

SEQ ID NO: 105855 - DNA, 60 bp, Artificial
  Synthetic oligonucleotide
attgaggatgacaatgaactagcgagtactggttttggatcaactgtggggtcagatggt

SEQ ID NO: 105856 - DNA, 60 bp, Artificial
  Synthetic oligonucleotide
gaactagcgagtactggttttggatcaactgtggggtcagatggtaaaatgtgactagcg

SEQ ID NO: 105857 - DNA, 54 bp, Artificial
  Synthetic oligonucleotide
cgcacaaccaggtatacaagcgtaatcaagatgagcatgcgcattctgacattg

SEQ ID NO: 105858 - DNA, 60 bp, Artificial
  Synthetic oligonucleotide
cgcacaaccaggtatacaagcgtaatcaagatgagcatgcgcattctgacattgaggatg

SEQ ID NO: 105859 - DNA, 60 bp, Artificial
  Synthetic oligonucleotide
ttatttgttatttcaacggcggtggccgcaaacgctgtcaatcgtaaagttggtaatcaa

SEQ ID NO: 105860 - DNA, 51 bp, Artificial
  Synthetic oligonucleotide
tatgtaccttagaaggaaaccggcttgaagagttcaaaaccaggacgcgcg

SEQ ID NO: 105861 - DNA, 60 bp, Artificial
  Synthetic oligonucleotide
accgatcagatatgatagacatctattcacatgttggcttagaattagcaggtacggcac

SEQ ID NO: 105862 - DNA, 60 bp, Artificial
  Synthetic oligonucleotide
cggcaaccccaagataccgatcagatatgatagacatctattcacatgttggcttagaat

SEQ ID NO: 105863 - DNA, 60 bp, Artificial
  Synthetic oligonucleotide
ggaagccgtagctaagtttgctagtgtatacgcaaagctaggtaacgcggcaaccccaag

SEQ ID NO: 105864 - DNA, 60 bp, Artificial
  Synthetic oligonucleotide
tcaggaagccgtagctaagtttgctagtgtatacgcaaagctaggtaacgcggcaacccc

SEQ ID NO: 105865 - DNA, 60 bp, Artificial
  Synthetic oligonucleotide
ggcaggttggaaattgcttccattccttattgatttatgtaccttagaaggaaaccggct

SEQ ID NO: 105866 - DNA, 60 bp, Artificial
  Synthetic oligonucleotide
tgtgtctcgtgatgtggcaggttggaaattgcttccattccttattgatttatgtacctt

SEQ ID NO: 105867 - DNA, 60 bp, Artificial
  Synthetic oligonucleotide
gcgcgcgagatttgagccatgggaaggttctctgattgctgtgtctcgtgatgtggcagg

SEQ ID NO: 105868 - DNA, 60 bp, Artificial
  Synthetic oligonucleotide
atgcctgttaagcgcgcgagatttgagccatgggaaggttctctgattgctgtgtctcgt

SEQ ID NO: 105869 - DNA, 60 bp, Artificial
  Synthetic oligonucleotide
ctgttgaatggcgtttgatggaatctatctctatcaggccatctcagagaataacccgcc

SEQ ID NO: 105870 - DNA, 60 bp, Artificial
  Synthetic oligonucleotide
cacagaagacattgagcacctgtgtgacgtcgtgggcggtatacgcgcgcgtgtacttcc

SEQ ID NO: 105871 - DNA, 60 bp, Artificial
  Synthetic oligonucleotide
cctgaatcagatcccgagcatgttgttcaggaacttttcagaagaccgagaactgaggac

SEQ ID NO: 105872 - DNA, 60 bp, Artificial
  Synthetic oligonucleotide
cgagacagtcctacgtgctcagcgtacaaaggacatctattctctccgacagctcacgtc

SEQ ID NO: 105873 - DNA, 60 bp, Artificial
  Synthetic oligonucleotide
tgctgcaccttctattgctcggagagcgacccccagctgatgaactagctctgtttagag

SEQ ID NO: 105874 - DNA, 60 bp, Artificial
  Synthetic oligonucleotide
acctctttctatctgggcagagattcccctcttgtttttggacgttcatttgtcgagaca

SEQ ID NO: 105875 - DNA, 60 bp, Artificial
  Synthetic oligonucleotide
ttttctcaaagaatattcagagtcaccacttcttttccagctgttcgtactgctgcacct

SEQ ID NO: 105876 - DNA, 60 bp, Artificial
  Synthetic oligonucleotide
ttcagagtcaccacttcttttccagctgttcgtactgctgcaccttctattgctcggaga

SEQ ID NO: 105877 - DNA, 60 bp, Artificial
  Synthetic oligonucleotide
gcgttgcttaaggcgtttggcgtctctgcaagtgaggattttgtcacactttttctcaaa

SEQ ID NO: 105878 - DNA, 60 bp, Artificial
  Synthetic oligonucleotide
ttcatgtcatcaagcgtattctgatgcacatccatccacaacaggaggcagcgttgctta

SEQ ID NO: 105879 - DNA, 60 bp, Artificial
  Synthetic oligonucleotide
cgtattctgatgcacatccatccacaacaggaggcagcgttgcttaaggcgtttggcgtc

SEQ ID NO: 105880 - DNA, 60 bp, Artificial
  Synthetic oligonucleotide
accaccaatggcctcgtgcgtgagggacctggctttcatctgaaggtcgcttctcgtgta

SEQ ID NO: 105881 - DNA, 60 bp, Artificial
  Synthetic oligonucleotide
aggcatggaatcattagtgggagtcatggttgttcggtttcctctcaaaacgggacgtat

SEQ ID NO: 105882 - DNA, 60 bp, Artificial
  Synthetic oligonucleotide
cgggacgtattgtgttccttttactatctatcatacagctaccactcaactgttccagtt

SEQ ID NO: 105883 - DNA, 60 bp, Artificial
  Synthetic oligonucleotide
cccgagcatgttgttcaggaacttttcagaagaccgagaactgaggactcccttatagga

SEQ ID NO: 105884 - DNA, 60 bp, Artificial
  Synthetic oligonucleotide
gggtatgaggtcataggccttcgatatccacttctctttgatcaggctttctccccgagg

SEQ ID NO: 105885 - DNA, 55 bp, Artificial
  Synthetic oligonucleotide
tgtgtactcatgaaatatgaggaggtgcatgataaggttctcaccgaccacagag

SEQ ID NO: 105886 - DNA, 60 bp, Artificial
  Synthetic oligonucleotide
cttgatttctgacacgcaagtgtctttggacacaatgcgttcggctctatacgcccgttt

SEQ ID NO: 105887 - DNA, 60 bp, Artificial
  Synthetic oligonucleotide
tgcgttcggctctatacgcccgtttcccaaatacctggtcgggatttccaggcgttgcct

SEQ ID NO: 105888 - DNA, 60 bp, Artificial
  Synthetic oligonucleotide
ggcgttgcctttgtcaggattaaagacacttcttctgaccatcagtctgccacagaagac

SEQ ID NO: 105889 - DNA, 60 bp, Artificial
  Synthetic oligonucleotide
tccttttactatctatcatacagctaccactcaactgttccagtttgatggcgtaggtcg

SEQ ID NO: 105890 - DNA, 60 bp, Artificial
  Synthetic oligonucleotide
tgttccagtttgatggcgtaggtcgcatgctcactccctcgcgtctattgcggtatcagg

SEQ ID NO: 105891 - DNA, 60 bp, Artificial
  Synthetic oligonucleotide
gtgtacttcccgtagatgacgacgtcatgaaggggaaactcatccttatcaccaccaatg

SEQ ID NO: 105892 - DNA, 60 bp, Artificial
  Synthetic oligonucleotide
atgacgacgtcatgaaggggaaactcatccttatcaccaccaatggcctcgtgcgtgagg

SEQ ID NO: 105893 - DNA, 60 bp, Artificial
  Synthetic oligonucleotide
ctccccgaggaaattgcctccttctcgagttgagagggatccccttaggcatggaatcat

SEQ ID NO: 105894 - DNA, 60 bp, Artificial
  Synthetic oligonucleotide
gtgcgtgagggacctggctttcatctgaaggtcgcttctcgtgtacgctaggactacggg

SEQ ID NO: 105895 - DNA, 60 bp, Artificial
  Synthetic oligonucleotide
aatggcgattccaatcttgatttctgacacgcaagtgtctttggacacaatgcgttcggc

SEQ ID NO: 105896 - DNA, 60 bp, Artificial
  Synthetic oligonucleotide
cctttgacgtctcttttcgacgctcagtgcaaccgcttttctattcatgtcatcaagcgt

SEQ ID NO: 105897 - DNA, 60 bp, Artificial
  Synthetic oligonucleotide
ctgtgctcctttgacgtctcttttcgacgctcagtgcaaccgcttttctattcatgtcat

SEQ ID NO: 105898 - DNA, 60 bp, Artificial
  Synthetic oligonucleotide
gacataccaggtggaatcttttcttttcccattccgatcgcccgctaaaatggcgattcc

SEQ ID NO: 105899 - DNA, 60 bp, Artificial
  Synthetic oligonucleotide
cggtatcaggaagttgtccttctgggcgggtactctttcggccacaaaatagccatacgt

SEQ ID NO: 105900 - DNA, 60 bp, Artificial
  Synthetic oligonucleotide
gcgtaggtcgcatgctcactccctcgcgtctattgcggtatcaggaagttgtccttctgg

SEQ ID NO: 105901 - DNA, 60 bp, Artificial
  Synthetic oligonucleotide
agccatacgtgagtatctgaactccaggcttctcaccgccgcaggggggaaggaggcgga

SEQ ID NO: 105902 - DNA, 60 bp, Artificial
  Synthetic oligonucleotide
gtccttctgggcgggtactctttcggccacaaaatagccatacgtgagtatctgaactcc

SEQ ID NO: 105903 - DNA, 60 bp, Artificial
  Synthetic oligonucleotide
ggctgtccaacgaatgaatgctatactccaaggcataactgaaatgccggatggagtccc

SEQ ID NO: 105904 - DNA, 60 bp, Artificial
  Synthetic oligonucleotide
cccttctaaagacgatcctcgcgtaagtgatgagattgatctctgtgctcctttgacgtc

SEQ ID NO: 105905 - DNA, 60 bp, Artificial
  Synthetic oligonucleotide
gatggagtcccttctaaagacgatcctcgcgtaagtgatgagattgatctctgtgctcct

SEQ ID NO: 105906 - DNA, 60 bp, Artificial
  Synthetic oligonucleotide
atgtcgacattatcattcttcctagcgagcgaaagccgcttttccttccacctgaatcag

SEQ ID NO: 105907 - DNA, 60 bp, Artificial
  Synthetic oligonucleotide
gcgcaagaccggccctccacacgctgtcgcctttggcgatgtcgacattatcattcttcc

SEQ ID NO: 105908 - DNA, 60 bp, Artificial
  Synthetic oligonucleotide
ggaccggcttcggcgcaagaccggccctccacacgctgtcgcctttggcgatgtcgacat

SEQ ID NO: 105909 - DNA, 60 bp, Artificial
  Synthetic oligonucleotide
aattggcagcatggccaccatctcaatcctagtcgtggacgaggaccggcttcggcgcaa

SEQ ID NO: 105910 - DNA, 60 bp, Artificial
  Synthetic oligonucleotide
gtaatgcgaattggcagcatggccaccatctcaatcctagtcgtggacgaggaccggctt

SEQ ID NO: 105911 - DNA, 60 bp, Artificial
  Synthetic oligonucleotide
cgccatacgctctgttccggggaggcgatgcgggatactttatcccgttctcggatgaga

SEQ ID NO: 105912 - DNA, 60 bp, Artificial
  Synthetic oligonucleotide
gtggaaggacctccgccatacgctctgttccggggaggcgatgcgggatactttatcccg

SEQ ID NO: 105913 - DNA, 60 bp, Artificial
  Synthetic oligonucleotide
cacgtctgttaatttactgctcatgtgcactcctgaaggccaggtggaaggacctccgcc

SEQ ID NO: 105914 - DNA, 60 bp, Artificial
  Synthetic oligonucleotide
gacagctcacgtctgttaatttactgctcatgtgcactcctgaaggccaggtggaaggac

SEQ ID NO: 105915 - DNA, 60 bp, Artificial
  Synthetic oligonucleotide
cgctaggactacggggatacggtactgggtgtctaccctttagtgcgtcaattcctacct

SEQ ID NO: 105916 - DNA, 60 bp, Artificial
  Synthetic oligonucleotide
ttctcgtgtacgctaggactacggggatacggtactgggtgtctaccctttagtgcgtca

SEQ ID NO: 105917 - DNA, 60 bp, Artificial
  Synthetic oligonucleotide
actttggggcctgttgaatggcgtttgatggaatctatctctatcaggccatctcagaga

SEQ ID NO: 105918 - DNA, 60 bp, Artificial
  Synthetic oligonucleotide
ttcttcctagcgagcgaaagccgcttttccttccacctgaatcagatcccgagcatgttg

SEQ ID NO: 105919 - DNA, 60 bp, Artificial
  Synthetic oligonucleotide
cattactgccttcacataaaaagttgattaagtatagttgttggccttcaaatatggtgt

SEQ ID NO: 105920 - DNA, 60 bp, Artificial
  Synthetic oligonucleotide
atcacaagactttgactaaatcaaccatgaattctgctccattaaacgataaactgatat

SEQ ID NO: 105921 - DNA, 60 bp, Artificial
  Synthetic oligonucleotide
aagttttttaagccaaagacgtttttgcgcattgtgaccttgagaaagaaatcacaagac

SEQ ID NO: 105922 - DNA, 60 bp, Artificial
  Synthetic oligonucleotide
ccgttgaaattaagaacaaagtatctgagaatgaaactgacaccgtccccagacgtgaca

SEQ ID NO: 105923 - DNA, 60 bp, Artificial
  Synthetic oligonucleotide
tgcattgcattcaccaagtttgaatatggataaaaagaatgatcaacccaccgttgaaat

SEQ ID NO: 105924 - DNA, 53 bp, Artificial
  Synthetic oligonucleotide
tattggattaactatgcctgaagaaattacacaaatcatgttgtctcagaaca

SEQ ID NO: 105925 - DNA, 60 bp, Artificial
  Synthetic oligonucleotide
cgttgaaattaagaacaaagtatctgagaatgaaactgacaccgtccccagacgtgacag

SEQ ID NO: 105926 - DNA, 60 bp, Artificial
  Synthetic oligonucleotide
gatgagttgaggcaaaatagtgacagtttgattaaagaattagatgatcaaaaacgattg

SEQ ID NO: 105927 - DNA, 60 bp, Artificial
  Synthetic oligonucleotide
gaaactttgaagactcatgctcatagatttttaagcgagcaacgctttgaacgcgaaaat

SEQ ID NO: 105928 - DNA, 60 bp, Artificial
  Synthetic oligonucleotide
ggatgacgagaccgtcatagttgaaagaaatgaagaagttgaaaatggaatttctgatga

SEQ ID NO: 105929 - DNA, 60 bp, Artificial
  Synthetic oligonucleotide
tgaacaacaggatgacgagaccgtcatagttgaaagaaatgaagaagttgaaaatggaat

SEQ ID NO: 105930 - DNA, 60 bp, Artificial
  Synthetic oligonucleotide
aaagaagagtaatgaacatacacgtccgtcaaatgcgaacttggaatgtttccaagaagg

SEQ ID NO: 105931 - DNA, 60 bp, Artificial
  Synthetic oligonucleotide
agttagacgaactaaagaagagtaatgaacatacacgtccgtcaaatgcgaacttggaat

SEQ ID NO: 105932 - DNA, 60 bp, Artificial
  Synthetic oligonucleotide
gtgatgcggttgatgcttatgttgagcaagttgatgtcgtaaagaacaaagagattgagt

SEQ ID NO: 105933 - DNA, 60 bp, Artificial
  Synthetic oligonucleotide
aaaacgattgcatagtgatgcggttgatgcttatgttgagcaagttgatgtcgtaaagaa

SEQ ID NO: 105934 - DNA, 60 bp, Artificial
  Synthetic oligonucleotide
agtaaatgtgatgatattttgacgagcgatttgagaaaattacttaaaccatcaacactt

SEQ ID NO: 105935 - DNA, 60 bp, Artificial
  Synthetic oligonucleotide
atcaacacttggtttagaagttactatacctgaaccttcgtatgcagcaactgaagctga

SEQ ID NO: 105936 - DNA, 60 bp, Artificial
  Synthetic oligonucleotide
tattgccgaattgatacaggttgaattgttacatggcaaagcaattaaaatgttaaagca

SEQ ID NO: 105937 - DNA, 55 bp, Artificial
  Synthetic oligonucleotide
gatggtttggataattattacgtaacagacattgacgaaactgaagaggacgttg

SEQ ID NO: 105938 - DNA, 60 bp, Artificial
  Synthetic oligonucleotide
acgagaatcacgtcatattgcattttttggagttgttacaactgatgaaggaaacggaaa

SEQ ID NO: 105939 - DNA, 60 bp, Artificial
  Synthetic oligonucleotide
gaaacggaaatattcacaacaagtttttaaagaataattgtctaatagtaatgatgaatc

SEQ ID NO: 105940 - DNA, 60 bp, Artificial
  Synthetic oligonucleotide
ttctcagatttgcagtcttccgttttgaatgatttgtgtttggacgaaagtgatggtatt

SEQ ID NO: 105941 - DNA, 60 bp, Artificial
  Synthetic oligonucleotide
ctcagatttgcagtcttccgttttgaatgatttgtgtttggacgaaagtgatggtatttc

SEQ ID NO: 105942 - DNA, 60 bp, Artificial
  Synthetic oligonucleotide
gcaaggtgaaagtatcgagcatagttctggggcaatgtcagttgctaacttcatcaaaca

SEQ ID NO: 105943 - DNA, 60 bp, Artificial
  Synthetic oligonucleotide
cactaccagtcagagttctgcgtgcatttggattatcgggctacgcgatgcttagcaaac

SEQ ID NO: 105944 - DNA, 60 bp, Artificial
  Synthetic oligonucleotide
ccagtcagagttctgcgtgcatttggattatcgggctacgcgatgcttagcaaacgttct

SEQ ID NO: 105945 - DNA, 59 bp, Artificial
  Synthetic oligonucleotide
cttagcaaacgttcttgtgtaccacctagtttgactagaggcttaaatcagcagatgtc

SEQ ID NO: 105946 - DNA, 60 bp, Artificial
  Synthetic oligonucleotide
cacttggtttagaagttactatacctgaaccttcgtatgcagcaactgaagctgaagttg

SEQ ID NO: 105947 - DNA, 53 bp, Artificial
  Synthetic oligonucleotide
ctgaagctgaagttgaagatcaaaatagtgagaggaatgatgacaacgcgctg

SEQ ID NO: 105948 - DNA, 60 bp, Artificial
  Synthetic oligonucleotide
tctatactgggaataaattcttcgttatatataaaagatcgaatgttatgaataatgaac

SEQ ID NO: 105949 - DNA, 60 bp, Artificial
  Synthetic oligonucleotide
acctgctatgttaattggtactgggttaatgttatctaatgaaagtttcaatattaatgg

SEQ ID NO: 105950 - DNA, 60 bp, Artificial
  Synthetic oligonucleotide
tttgagaatagtgaaaattttctgaaatttgcgattgctaaaattcagtacatgaagtta

SEQ ID NO: 105951 - DNA, 60 bp, Artificial
  Synthetic oligonucleotide
tatgccaacggttgcccttgaaatactggacaaagcgatgtcaaacacaactggtgcaac

SEQ ID NO: 105952 - DNA, 60 bp, Artificial
  Synthetic oligonucleotide
tctatgcctacggttgcccttgaaatattggacaaagcgatgtcaaacacaactggtgca

SEQ ID NO: 105953 - DNA, 60 bp, Artificial
  Synthetic oligonucleotide
gccgacggttgcccttgaaatattggacaaagcgatgtcaaacacaactggtgcaacgca

SEQ ID NO: 105954 - DNA, 60 bp, Artificial
  Synthetic oligonucleotide
gcctacggttgcccttgaaatattggacaaagcgatgtcaaacacaactggtgcaacgca

SEQ ID NO: 105955 - DNA, 60 bp, Artificial
  Synthetic oligonucleotide
gccaacggttgcccttgaaatattggacaaagcgatgtcaaacacaactggtgcaacgca

SEQ ID NO: 105956 - DNA, 60 bp, Artificial
  Synthetic oligonucleotide
gcctacggttgcccttgaaatactggacaaagcgatgtcaaacacaactggtgcaacgca

SEQ ID NO: 105957 - DNA, 60 bp, Artificial
  Synthetic oligonucleotide
gccaacggttgcccttgaaatactggacaaagcgatgtcaaacacaactggtgcaacgca

SEQ ID NO: 105958 - DNA, 60 bp, Artificial
  Synthetic oligonucleotide
gccaacagttgcccttgaaatattggacaaagcgatgtcaaacacaactggtgcaacgca

SEQ ID NO: 105959 - DNA, 60 bp, Artificial
  Synthetic oligonucleotide
ggagcctcgatcgattcgtggctagaattactgcgtcacttataatgcgtgactgctagg

SEQ ID NO: 105960 - DNA, 60 bp, Artificial
  Synthetic oligonucleotide
gggagcctcgatcgattcgtggctagaattactgcgtcacttataatgcgtgactgctag

SEQ ID NO: 105961 - DNA, 60 bp, Artificial
  Synthetic oligonucleotide
tactatctcgatcatttggtggaaagattggtggcagcatgtttggcagtgtggttctgt

SEQ ID NO: 105962 - DNA, 60 bp, Artificial
  Synthetic oligonucleotide
ttggtggaaagattggtggcagcatgtttggcagtgtggttctgtttaatatcgccgtcc

SEQ ID NO: 105963 - DNA, 55 bp, Artificial
  Synthetic oligonucleotide
gtggttctgtttaatatcgccgtccttaggccatgccatgtgtgatccctgaagc

SEQ ID NO: 105964 - DNA, 60 bp, Artificial
  Synthetic oligonucleotide
taagtgacacctggatcatatccggaccgcatactactgcagttactgcttgagcggcgc

SEQ ID NO: 105965 - DNA, 60 bp, Artificial
  Synthetic oligonucleotide
gtgctaacgaagtcgggcgcatcgtcacacctcgtagagtcagtccattgtacctattga

SEQ ID NO: 105966 - DNA, 60 bp, Artificial
  Synthetic oligonucleotide
tcatttctttgtgctaacgaagtcgggcgcatcgtcacacctcgtagagtcagtccattg

SEQ ID NO: 105967 - DNA, 60 bp, Artificial
  Synthetic oligonucleotide
tctatgagcgcccggatggcatagctctgcgacgtgcgatgcagcgcaaacgaggactag

SEQ ID NO: 105968 - DNA, 60 bp, Artificial
  Synthetic oligonucleotide
gctaacctctaccatcgatattcggttccgtatcaccaaattgagctggcattgcatgca

SEQ ID NO: 105969 - DNA, 60 bp, Artificial
  Synthetic oligonucleotide
cggatggcatagctctgcgacgtgcgatgcagcgcaaacgaggactaggctaccgagggg

SEQ ID NO: 105970 - DNA, 60 bp, Artificial
  Synthetic oligonucleotide
cccatttgacgtctgggatggcgtcaaggcaacctacatcccgattggtgtgcatggagt

SEQ ID NO: 105971 - DNA, 60 bp, Artificial
  Synthetic oligonucleotide
tgctcaatgactattgtgcaaaaatgatttcggaggtaccctacgaaagtagctttgtag

SEQ ID NO: 105972 - DNA, 60 bp, Artificial
  Synthetic oligonucleotide
cgtgagctatggacagtaccggccgagcatatgacggtgcgtctgaattcaaaagtgtcc

SEQ ID NO: 105973 - DNA, 60 bp, Artificial
  Synthetic oligonucleotide
cggtgcgcaaattttggtaccgattaacgtcgtagacactcgagtctatactgaattcag

SEQ ID NO: 105974 - DNA, 59 bp, Artificial
  Synthetic oligonucleotide
tggtattgttccacaatatcaaattctgaatgaagcggttccggatttcttcgctgggg

SEQ ID NO: 105975 - DNA, 60 bp, Artificial
  Synthetic oligonucleotide
cagttctagcgaatttgttagatccgtcaatggtcgctcagtgtttactgaaggacgcat

SEQ ID NO: 105976 - DNA, 60 bp, Artificial
  Synthetic oligonucleotide
gaattcgttagatccgtcaatggtcgctcagtgtttactgaaggacgcattgatgcaatc

SEQ ID NO: 105977 - DNA, 60 bp, Artificial
  Synthetic oligonucleotide
ctgactctctttctgacatgttcaatgggttacggtctatcagttctagtgaattcgtta

SEQ ID NO: 105978 - DNA, 60 bp, Artificial
  Synthetic oligonucleotide
acatgttcaatgggttacggtctatcagttctagtgaattcgttagatccgtcaatggtc

SEQ ID NO: 105979 - DNA, 60 bp, Artificial
  Synthetic oligonucleotide
ctgagcttcttagatagtcataagagcgattacaggccaccattgcttactgtgccgatc

SEQ ID NO: 105980 - DNA, 60 bp, Artificial
  Synthetic oligonucleotide
gtcacccgactgtagtgtataactatttgagttccagagctccaaactttctaaggttgg

SEQ ID NO: 105981 - DNA, 57 bp, Artificial
  Synthetic oligonucleotide
aatggtcgctcagtgtttactgaaggacgcattgatgcaatcaaagtgaatatgcga

SEQ ID NO: 105982 - DNA, 60 bp, Artificial
  Synthetic oligonucleotide
ctgattcctgcggaccagacttcttatggcgccaatgagactcgcgctctatcggcacca

SEQ ID NO: 105983 - DNA, 60 bp, Artificial
  Synthetic oligonucleotide
ccgagtctaacgatgcatagagtgcgagttatttactcgatgctcaatgactattgtgca

SEQ ID NO: 105984 - DNA, 60 bp, Artificial
  Synthetic oligonucleotide
actcgcgctctatcggcaccatatctgtttggagctccaatcaatatgctcgccccagat

SEQ ID NO: 105985 - DNA, 60 bp, Artificial
  Synthetic oligonucleotide
gtttggagctccaatcaatatgctcgccccagatgctagattgtcaacttataagcgtga

SEQ ID NO: 105986 - DNA, 60 bp, Artificial
  Synthetic oligonucleotide
cctgctgtgccagtcacattcggagatgacttggagccggctgtccgtgaaagagctaac

SEQ ID NO: 105987 - DNA, 60 bp, Artificial
  Synthetic oligonucleotide
ggggagctccctgtcaagtcagtgactctaaataaactgggtgacagaaatatggatgct

SEQ ID NO: 105988 - DNA, 60 bp, Artificial
  Synthetic oligonucleotide
cgtgaaagagctaacctctaccatcgatattcggttccgtatcaccaaattgagctggca

SEQ ID NO: 105989 - DNA, 60 bp, Artificial
  Synthetic oligonucleotide
gtcattcgagatgacccatttgacgtctgggatggcgtcaaggcaacctacatcccgatt

SEQ ID NO: 105990 - DNA, 60 bp, Artificial
  Synthetic oligonucleotide
attgagaatttgaggcataagacgggcttgatacgtgctatgtatctaaatggcttcgtc

SEQ ID NO: 105991 - DNA, 60 bp, Artificial
  Synthetic oligonucleotide
acccagtggatgcaattgatcagtggcagtctaatcgaagagacgttttggttgcaattt

SEQ ID NO: 105992 - DNA, 60 bp, Artificial
  Synthetic oligonucleotide
ttcagtgagctacgaaatttctttactggtgatgtggtcattacagatgacccatttgac

SEQ ID NO: 105993 - DNA, 60 bp, Artificial
  Synthetic oligonucleotide
aggcataagacgggcttgatacgtgctatgtatctgaacggcttcgtcacgcaacctcca

SEQ ID NO: 105994 - DNA, 58 bp, Artificial
  Synthetic oligonucleotide
ggttccggatttcttcgctgggggtgaagacatcctaatactacagctcattcgagct

SEQ ID NO: 105995 - DNA, 60 bp, Artificial
  Synthetic oligonucleotide
gtaccgattaacgtcgtagacactcgagtctatactgaattcagtgagctacgaaatttc

SEQ ID NO: 105996 - DNA, 60 bp, Artificial
  Synthetic oligonucleotide
cggctgaaatactgattcctgcggaccagacttcttatggcgccaatgagactcgcgctc

SEQ ID NO: 105997 - DNA, 60 bp, Artificial
  Synthetic oligonucleotide
gtgtccttgttaccgagggtacttcacactacacaccagtggaagtatataacatcctcg

SEQ ID NO: 105998 - DNA, 60 bp, Artificial
  Synthetic oligonucleotide
aatttctttactggtgatgtggtcattacagatgacccatttgacgtctgggatggcgtc

SEQ ID NO: 105999 - DNA, 60 bp, Artificial
  Synthetic oligonucleotide
gggtacttcacactacacaccagtggaagtatataacatcctcgatgaattgaaaaccat

SEQ ID NO: 106000 - DNA, 60 bp, Artificial
  Synthetic oligonucleotide
gccgagcatatgacggtgcgtctgaattcaaaagtgtccttgttaccgagggtacttcac

SEQ ID NO: 106001 - DNA, 54 bp, Artificial
  Synthetic oligonucleotide
cgtcatcatgacgcaggcagatcatgtgtacaactacatgactcagcttaccca

SEQ ID NO: 106002 - DNA, 60 bp, Artificial
  Synthetic oligonucleotide
aattttgaatgaagcggttccggatttcttcgctgggggtgaagacatcctaatactaca

SEQ ID NO: 106003 - DNA, 60 bp, Artificial
  Synthetic oligonucleotide
cctctaccatcgatattcggttccgtatcaccaaatcgagctggcattgcatgcattagc

SEQ ID NO: 106004 - DNA, 60 bp, Artificial
  Synthetic oligonucleotide
gcaaatgcggtaaacgtttattgcgattccgtctaccgggcagatatacctactgaatgg

SEQ ID NO: 106005 - DNA, 60 bp, Artificial
  Synthetic oligonucleotide
tccgctgggataggtactcttatgcctagacctgtggtacagctgcttgattatgatcta

SEQ ID NO: 106006 - DNA, 60 bp, Artificial
  Synthetic oligonucleotide
gagtctatactgaattcagtgagctacgaaatttctttactggtgatgtggtcattcgag

SEQ ID NO: 106007 - DNA, 60 bp, Artificial
  Synthetic oligonucleotide
cgacagctaggcttgtcgcgaatcaagtcatttacccagtggatgcaattgatcagtggc

SEQ ID NO: 106008 - DNA, 60 bp, Artificial
  Synthetic oligonucleotide
gactaccgaacttagacagcgtcatcatgacgcaggcagatcatgtgtacaactacatga

SEQ ID NO: 106009 - DNA, 60 bp, Artificial
  Synthetic oligonucleotide
gtggctcatctttgcggatagtggacgaacctcaagttacgttcatcgtatcgtatgcaa

SEQ ID NO: 106010 - DNA, 60 bp, Artificial
  Synthetic oligonucleotide
atataacatcctcgatgaattgaaaaccattaaaataacgtctaccatagctgagcaatc

SEQ ID NO: 106011 - DNA, 60 bp, Artificial
  Synthetic oligonucleotide
cgatgaattgaaaaccattaaaataacgtctaccatagctgagcaatctgtggtgtcacg

SEQ ID NO: 106012 - DNA, 60 bp, Artificial
  Synthetic oligonucleotide
cgtcttacactgactctctttctgacatgttcaatgggttacggtctatcagttctagcg

SEQ ID NO: 106013 - DNA, 59 bp, Artificial
  Synthetic oligonucleotide
gaaaacgtgcttaaggtcgttcataccatagctgattttgaagcggctaatgctttacg

SEQ ID NO: 106014 - DNA, 60 bp, Artificial
  Synthetic oligonucleotide
cgcctctatgagcgcccggatggcatagctctgcgacgtgcgatgcagcgcaaacgagga

SEQ ID NO: 106015 - DNA, 60 bp, Artificial
  Synthetic oligonucleotide
ctgggatggcgtcaaggcaacctacatcccgattggtgtgcatggagttcgcttggatcc

SEQ ID NO: 106016 - DNA, 60 bp, Artificial
  Synthetic oligonucleotide
cagtaccggccgagcatatgacggtgcgtctgaattcaaaagtgtccttgttaccgaggg

SEQ ID NO: 106017 - DNA, 60 bp, Artificial
  Synthetic oligonucleotide
gttacactactgggatataacttccgtgaaggtattgaataccggtttgatattagtcgt

SEQ ID NO: 106018 - DNA, 60 bp, Artificial
  Synthetic oligonucleotide
catacaaataactttgttacactactgggatataacttccgtgaaggtattgaataccgg

SEQ ID NO: 106019 - DNA, 60 bp, Artificial
  Synthetic oligonucleotide
gcaccgacaattcggatctaccaccatgcttaaccaactcgcacatacaaataactttgt

SEQ ID NO: 106020 - DNA, 60 bp, Artificial
  Synthetic oligonucleotide
aagtaatgcaccgacaattcggatctaccaccatgcttaaccaactcgcacatacaaata

SEQ ID NO: 106021 - DNA, 60 bp, Artificial
  Synthetic oligonucleotide
cactctacacgcacaccatgtcgctccaacaatcaattactcgtcgctcacttgtcgctg

SEQ ID NO: 106022 - DNA, 60 bp, Artificial
  Synthetic oligonucleotide
cctacctatcactctacacgcacaccatgtcgctccaacaatcaattactcgtcgctcac

SEQ ID NO: 106023 - DNA, 60 bp, Artificial
  Synthetic oligonucleotide
ccgatctaaggctgaaagttgcaattcgctctgatttcctacctatcactctacacgcac

SEQ ID NO: 106024 - DNA, 60 bp, Artificial
  Synthetic oligonucleotide
aaataaaactctcccgatctaaggctgaaagttgcaattcgctctgatttcctacctatc

SEQ ID NO: 106025 - DNA, 60 bp, Artificial
  Synthetic oligonucleotide
gtcaagcggaagaccaacggtcacgtccaacacgagctggactcccgactgagccaattg

SEQ ID NO: 106026 - DNA, 60 bp, Artificial
  Synthetic oligonucleotide
cctaaaccaaaacgtcaagcggaagaccaacggtcacgtccaacacgagctggactcccg

SEQ ID NO: 106027 - DNA, 60 bp, Artificial
  Synthetic oligonucleotide
gccaattgatcgtcttctcgagtgtgaaaagatgctacgcattgctgcacgctccgtcac

SEQ ID NO: 106028 - DNA, 60 bp, Artificial
  Synthetic oligonucleotide
tggactcccgactgagccaattgatcgtcttctcgagtgtgaaaagatgctacgcattgc

SEQ ID NO: 106029 - DNA, 60 bp, Artificial
  Synthetic oligonucleotide
gcctgtgaaaatcacaacgtacggtacttaccgtgtgcgtgccgagcgtgaggttgatga

SEQ ID NO: 106030 - DNA, 60 bp, Artificial
  Synthetic oligonucleotide
acaatgcctgtgaaaatcacaacgtacggtacttaccgtgtgcgtgccgagcgtgaggtt

SEQ ID NO: 106031 - DNA, 60 bp, Artificial
  Synthetic oligonucleotide
cgcagcccgaacaacctaaccaatcacctagccttcaatcacttcctaaaccaaaacgtc

SEQ ID NO: 106032 - DNA, 60 bp, Artificial
  Synthetic oligonucleotide
tacttgcgcagcccgaacaacctaaccaatcacctagccttcaatcacttcctaaaccaa

SEQ ID NO: 106033 - DNA, 60 bp, Artificial
  Synthetic oligonucleotide
cacgctccgtcacctacacaccgattcttgatgacattactgattcgatgggtgttgctg

SEQ ID NO: 106034 - DNA, 60 bp, Artificial
  Synthetic oligonucleotide
tacgcattgctgcacgctccgtcacctacacaccgattcttgatgacattactgattcga

SEQ ID NO: 106035 - DNA, 60 bp, Artificial
  Synthetic oligonucleotide
aagaacaacgccttggaatgaagaacagttatcagctattcagttggtcaacaatgcctg

SEQ ID NO: 106036 - DNA, 60 bp, Artificial
  Synthetic oligonucleotide
gaacaacgccttggaatgaagaacagttatcagctattcagttggtcaacaatgcctgtg

SEQ ID NO: 106037 - DNA, 60 bp, Artificial
  Synthetic oligonucleotide
acgttctatctctacgctcaggtcaggcacgtcctattattcaacaattacatcagacac

SEQ ID NO: 106038 - DNA, 60 bp, Artificial
  Synthetic oligonucleotide
cgctcaggtcaggcacgtcctattattcaacaattacatcagacactcgaacatttcatg

SEQ ID NO: 106039 - DNA, 60 bp, Artificial
  Synthetic oligonucleotide
gacgcgaactaacgccggagatacgtcatcacttcaactgattgagaacaacgttctatc

SEQ ID NO: 106040 - DNA, 60 bp, Artificial
  Synthetic oligonucleotide
cgccggagatacgtcatcacttcaactgattgagaacaacgttctatctctacgctcagg

SEQ ID NO: 106041 - DNA, 60 bp, Artificial
  Synthetic oligonucleotide
atcttcagtttctatcaggtgtttatttgttaactggtgggtcaaagtttattaaggaag

SEQ ID NO: 106042 - DNA, 60 bp, Artificial
  Synthetic oligonucleotide
caggtgtttatttgttaactggtgggtcaaagtttattaaggaagttacagcactgtatg

SEQ ID NO: 106043 - DNA, 60 bp, Artificial
  Synthetic oligonucleotide
acaagcaatgacaactaatcttggtctaactgatggcgccccaatccaacatcttcagtt

SEQ ID NO: 106044 - DNA, 60 bp, Artificial
  Synthetic oligonucleotide
caactaatcttggtctaactgatggcgccccaatccaacatcttcagtttctatcaggtg

SEQ ID NO: 106045 - DNA, 60 bp, Artificial
  Synthetic oligonucleotide
actgattcgatgggtgttgctgatttggcttatgatatgtacgaaggtaatattgaaaaa

SEQ ID NO: 106046 - DNA, 59 bp, Artificial
  Synthetic oligonucleotide
actgattcgatgggtgttgctgatttggcttatgatatgtacgaaggtaatattgaaaa

SEQ ID NO: 106047 - DNA, 60 bp, Artificial
  Synthetic oligonucleotide
tattgaaaaagtttggagtcaggctgagaaggatggtatggtcgttcccgtctcatacac

SEQ ID NO: 106048 - DNA, 60 bp, Artificial
  Synthetic oligonucleotide
ggagtcaggctgagaaggatggtatggtcgttcccgtctcatacacaactgaacatgaca

SEQ ID NO: 106049 - DNA, 60 bp, Artificial
  Synthetic oligonucleotide
tctcatacacaactgaacatgacaaggtcactcagctgttgatcgattcgaaagcatttg

SEQ ID NO: 106050 - DNA, 60 bp, Artificial
  Synthetic oligonucleotide
cacaactgaacatgacaaggtcactcagctgttgatcgattcgaaagcatttggtaccca

SEQ ID NO: 106051 - DNA, 60 bp, Artificial
  Synthetic oligonucleotide
gctgagtcctgtcgttggtttcaaggaggtgcatgaaaaatgggttgctagtctaaactg

SEQ ID NO: 106052 - DNA, 60 bp, Artificial
  Synthetic oligonucleotide
gtttccgacgtggatgccggtggagttcccgtacgtgtcatcggattgcagcaaaggggg

SEQ ID NO: 106053 - DNA, 59 bp, Artificial
  Synthetic oligonucleotide
gtttccgacgtggatgccggtggagttcccgtacgtgtcatcggattgcagcaaagggg

SEQ ID NO: 106054 - DNA, 50 bp, Artificial
  Synthetic oligonucleotide
gctaaagtgaccgtggtcatggcttcattcaagggattctccgccaacac

SEQ ID NO: 106055 - DNA, 60 bp, Artificial
  Synthetic oligonucleotide
gatcggtactcgtgcgcaactgtaattcgcagtacaaggttggaatttctgagtgtttca

SEQ ID NO: 106056 - DNA, 60 bp, Artificial
  Synthetic oligonucleotide
ctcgtgcgcaactgtaattcgcagtacaaggttggaatttctgagtgtttcaagagcttg

SEQ ID NO: 106057 - DNA, 60 bp, Artificial
  Synthetic oligonucleotide
cagcttgaacggtgaagttagtctatgggtatacgcctattactccgacggatcggtact

SEQ ID NO: 106058 - DNA, 60 bp, Artificial
  Synthetic oligonucleotide
ggtgaagttagtctatgggtatacgcctattactccgacggatcggtactcgtgcgcaac

SEQ ID NO: 106059 - DNA, 60 bp, Artificial
  Synthetic oligonucleotide
cgtggacgcgaacagcggctatacaacagcgaacaatacaattataacaacagcttgaac

SEQ ID NO: 106060 - DNA, 60 bp, Artificial
  Synthetic oligonucleotide
gacgcgaacagcggctatacaacagcgaacaatacaattataacaacagcttgaacggtg

SEQ ID NO: 106061 - DNA, 60 bp, Artificial
  Synthetic oligonucleotide
atatcttgatattaacaatcacaagtacggtgtgccactgaatggacgtcagtaagtacc

SEQ ID NO: 106062 - DNA, 60 bp, Artificial
  Synthetic oligonucleotide
caatcacaagtacggtgtgccactgaatggacgtcagtaagtacctatgttatgatgatc

SEQ ID NO: 106063 - DNA, 60 bp, Artificial
  Synthetic oligonucleotide
tatttcgagttgcctcatgagtacaattcaatctccctatctgtcagcggtgtgcataag

SEQ ID NO: 106064 - DNA, 60 bp, Artificial
  Synthetic oligonucleotide
cgagttgcctcatgagtacaattcaatctccctatctgtcagcggtgtgcataagaatcc

SEQ ID NO: 106065 - DNA, 60 bp, Artificial
  Synthetic oligonucleotide
tgtgcataagaatccttcttcctacaatgttgccgcgccgcataacataatggacgtgtt

SEQ ID NO: 106066 - DNA, 60 bp, Artificial
  Synthetic oligonucleotide
ccttcttcctacaatgttgccgcgccgcataacataatggacgtgttccaatcttgtgac

SEQ ID NO: 106067 - DNA, 60 bp, Artificial
  Synthetic oligonucleotide
tggacgtgttccaatcttgtgacttagcattgaagttcagcaaccggtattggtgcgagt

SEQ ID NO: 106068 - DNA, 60 bp, Artificial
  Synthetic oligonucleotide
cttgtgacttagcattgaagttcagcaaccggtattggtgcgagttggagttgatcaacc

SEQ ID NO: 106069 - DNA, 60 bp, Artificial
  Synthetic oligonucleotide
tggtgcgagttggagttgatcaaccattacatctcagcatacgcttacccatatcttgat

SEQ ID NO: 106070 - DNA, 60 bp, Artificial
  Synthetic oligonucleotide
ggtgcgagttggagttgatcaaccattacatctcagcatacgcttacccatatcttgata

SEQ ID NO: 106071 - DNA, 60 bp, Artificial
  Synthetic oligonucleotide
gtctccatccccaaggattaccttcagcggtctcatccatgggaagcgactggtgttaag

SEQ ID NO: 106072 - DNA, 60 bp, Artificial
  Synthetic oligonucleotide
cgtctccatccccaaggattaccttcagcggtctcatccatgggaagcgactggtgttaa

SEQ ID NO: 106073 - DNA, 60 bp, Artificial
  Synthetic oligonucleotide
caagagcttgaaggaagtgcgagttggacagaacaatgacccttacgatgagcaggaagt

SEQ ID NO: 106074 - DNA, 60 bp, Artificial
  Synthetic oligonucleotide
gagtgtttcaagagcttgaaggaagtgcgagttggacagaacaatgacccttacgatgag

SEQ ID NO: 106075 - DNA, 60 bp, Artificial
  Synthetic oligonucleotide
gcaggaagttaacaacggcgtttactaccctaatggtggtgagccgacgaaatttcactc

SEQ ID NO: 106076 - DNA, 60 bp, Artificial
  Synthetic oligonucleotide
ttacgatgagcaggaagttaacaacggcgtttactaccctaatggtggtgagccgacgaa

SEQ ID NO: 106077 - DNA, 58 bp, Artificial
  Synthetic oligonucleotide
agccgacgaaatttcactcaaacgctaaaccccgtgccatccaaatcatcttctcccc

SEQ ID NO: 106078 - DNA, 60 bp, Artificial
  Synthetic oligonucleotide
agccgacgaaatttcactcaaacgctaaaccccgtgccatccaaatcatcttctccccca

SEQ ID NO: 106079 - DNA, 54 bp, Artificial
  Synthetic oligonucleotide
ccccagcgtgaacgtgcataccatcaagatggcgaagggtaactccgtctccat

SEQ ID NO: 106080 - DNA, 60 bp, Artificial
  Synthetic oligonucleotide
ttctcccccagcgtgaacgtgcataccatcaagatggcgaagggtaactccgtctccatc

SEQ ID NO: 106081 - DNA, 60 bp, Artificial
  Synthetic oligonucleotide
cggaaaataatgcataaacccttggttagagaggggagaaagtgacaacgaccgttagct

SEQ ID NO: 106082 - DNA, 60 bp, Artificial
  Synthetic oligonucleotide
tcggaaaataatgcataaacccttggttagagaggggagaaagtgacaacgaccgttagc

SEQ ID NO: 106083 - DNA, 60 bp, Artificial
  Synthetic oligonucleotide
cgcgcctcctaacccgaggtgacgctctacctgcgccaacaggatatcggaaaataatgc

SEQ ID NO: 106084 - DNA, 60 bp, Artificial
  Synthetic oligonucleotide
gtcacgcgcctcctaacccgaggtgacgctctacctgcgccaacaggatatcggaaaata

SEQ ID NO: 106085 - DNA, 60 bp, Artificial
  Synthetic oligonucleotide
tccttatgttgtcgcacgtgcgcgacgtctctttgaaagtgtgttaacgtcgaaccacgg

SEQ ID NO: 106086 - DNA, 60 bp, Artificial
  Synthetic oligonucleotide
ttgctattggctttgtgtgacagtagtgaggtatatccttatgttgtcgcacgtgcgcga

SEQ ID NO: 106087 - DNA, 60 bp, Artificial
  Synthetic oligonucleotide
gctttcctgagatattactcggagttaaagatcgataatcgtttccttcaacataggcgt

SEQ ID NO: 106088 - DNA, 60 bp, Artificial
  Synthetic oligonucleotide
ctcagaacatttctgattggggtatgtatcttgaaggatttatgtctgaggaatctggag

SEQ ID NO: 106089 - DNA, 60 bp, Artificial
  Synthetic oligonucleotide
acataggcgtcagtataaattagagatgttagaaagttggattggtgttaattgtagagg

SEQ ID NO: 106090 - DNA, 60 bp, Artificial
  Synthetic oligonucleotide
attgtagaggatacgttgatgttttattacaaatgattccaattagaaccccgaagagag

SEQ ID NO: 106091 - DNA, 60 bp, Artificial
  Synthetic oligonucleotide
ccgaagagaggttttttgctattggctttgtgtgacagtagtgaggtatatccttatgtt

SEQ ID NO: 106092 - DNA, 60 bp, Artificial
  Synthetic oligonucleotide
cggagtaaacgaaagatggaaatggattgaaaatgaactgcagatgcgtgggaccattga

SEQ ID NO: 106093 - DNA, 60 bp, Artificial
  Synthetic oligonucleotide
caagagacgctaatgattgggaacgtaagagaaccatatgacggagtaaacgaaagatgg

SEQ ID NO: 106094 - DNA, 60 bp, Artificial
  Synthetic oligonucleotide
cgtgaatatttgcaagagacgctaatgattgggaacgtaagagaaccatatgacggagta

SEQ ID NO: 106095 - DNA, 60 bp, Artificial
  Synthetic oligonucleotide
atttcttcgggaagaatgtgtatgaagttaaaggacgaaagtatccatatccatatactg

SEQ ID NO: 106096 - DNA, 60 bp, Artificial
  Synthetic oligonucleotide
agccgaggcgtttttattcttatcactataagatcaccagagaagaatccattatgaata

SEQ ID NO: 106097 - DNA, 60 bp, Artificial
  Synthetic oligonucleotide
cgaaccgtttcgtatgtggagatgaaatgggaatgtgatgaaattagaactgatgctccg

SEQ ID NO: 106098 - DNA, 60 bp, Artificial
  Synthetic oligonucleotide
gagtggggtcggtgcatatattttgagtttgggcggttgattcacttgttatttaggcgc

SEQ ID NO: 106099 - DNA, 60 bp, Artificial
  Synthetic oligonucleotide
agtgagtggggtcggtgcatatattttgagtttgggcggttgattcacttgttatttagg

SEQ ID NO: 106100 - DNA, 60 bp, Artificial
  Synthetic oligonucleotide
tatgaacatataccaacgtcaatacaggcggaggagagtttatatacacaaatcagatcg

SEQ ID NO: 106101 - DNA, 60 bp, Artificial
  Synthetic oligonucleotide
attaagagaacatactatgaacatataccaacgtcaatacaggcggaggagagtttatat

SEQ ID NO: 106102 - DNA, 60 bp, Artificial
  Synthetic oligonucleotide
atgacgcttggaatataatagatggggatgaaggaaggagaacctttccgaattattgtg

SEQ ID NO: 106103 - DNA, 60 bp, Artificial
  Synthetic oligonucleotide
cacatcagagagaagggttgtttcaactgatatcaactaaacccatatatgacgcttgga

SEQ ID NO: 106104 - DNA, 60 bp, Artificial
  Synthetic oligonucleotide
aaggatcagtcaaatagagaatatgatgagagacgaacacatcagagagaagggttgttt

SEQ ID NO: 106105 - DNA, 60 bp, Artificial
  Synthetic oligonucleotide
cgtggtaggataaaaaaggatcagtcaaatagagaatatgatgagagacgaacacatcag

SEQ ID NO: 106106 - DNA, 60 bp, Artificial
  Synthetic oligonucleotide
aatcagatcgtttagagactacaagtgcggtaaaatatgcgttgaaccttatgtaggctc

SEQ ID NO: 106107 - DNA, 60 bp, Artificial
  Synthetic oligonucleotide
cctgaggagcatagcgctcatatagtacaccatgagctggcgttgaatgaagaggataga

SEQ ID NO: 106108 - DNA, 53 bp, Artificial
  Synthetic oligonucleotide
cagttgataaggttgctgcattagttaatgtgttgcctttttttaaaaagatg

SEQ ID NO: 106109 - DNA, 60 bp, Artificial
  Synthetic oligonucleotide
atacacggagcaaggaatgagaatgatacctgtttcggtagataatgtgaagtcatctca

SEQ ID NO: 106110 - DNA, 60 bp, Artificial
  Synthetic oligonucleotide
agaagggtcacagcgactaacggtcgacgctttattttacgtgacgcatgcagttgataa

SEQ ID NO: 106111 - DNA, 60 bp, Artificial
  Synthetic oligonucleotide
cagcgactaacggtcgacgctttattttacgtgacgcatgcagttgataaggttgctgca

SEQ ID NO: 106112 - DNA, 60 bp, Artificial
  Synthetic oligonucleotide
agaaatccatcaacgctggctgatgctttattagatgcgatcgcagatatagaagggtca

SEQ ID NO: 106113 - DNA, 60 bp, Artificial
  Synthetic oligonucleotide
ccgcaatggatgaattttcgctttgtatagtgaaagagatacctgaggagcatagcgctc

SEQ ID NO: 106114 - DNA, 60 bp, Artificial
  Synthetic oligonucleotide
gttatttaggcgcataacatctaaggggccgcatccgatgttctcggattttgaaaaaga

SEQ ID NO: 106115 - DNA, 60 bp, Artificial
  Synthetic oligonucleotide
gtcatcgccttagtcctagaaaataatgggtgtttagaatatggtcgtaaacattggtat

SEQ ID NO: 106116 - DNA, 60 bp, Artificial
  Synthetic oligonucleotide
acattggtattcaacaatactacaagcatgtcttgatttagatccacaagtaataagata

SEQ ID NO: 106117 - DNA, 60 bp, Artificial
  Synthetic oligonucleotide
taataagatattttagagaaaaggtaggcgctgaggctgtatgtggagtggagataagtg

SEQ ID NO: 106118 - DNA, 60 bp, Artificial
  Synthetic oligonucleotide
ataactttgacattacaacaggtggtccattatggcaagcgtatgtacagactgcagggg

SEQ ID NO: 106119 - DNA, 60 bp, Artificial
  Synthetic oligonucleotide
ggattgtgcgatatgaaaatgcaattaagagaatcgcgatagaagattggatggagtgga

SEQ ID NO: 106120 - DNA, 60 bp, Artificial
  Synthetic oligonucleotide
ttgtcgcacgtgcgcgacgtctctttgaaagtgtgttaacgtcgaaccacggaattgtcc

SEQ ID NO: 106121 - DNA, 60 bp, Artificial
  Synthetic oligonucleotide
agtgatacacgataagttgatagacatatctgtctctaggtatagtaagctggaaggtga

SEQ ID NO: 106122 - DNA, 60 bp, Artificial
  Synthetic oligonucleotide
tggaaggtgaccagccagcgatcatttggcttatacagactgaaaactccaaattcggta

SEQ ID NO: 106123 - DNA, 60 bp, Artificial
  Synthetic oligonucleotide
gagaaaaggtaggcgctgaggctgtatgtggagtggagataagtgatcccacaagcgatc

SEQ ID NO: 106124 - DNA, 60 bp, Artificial
  Synthetic oligonucleotide
aaattcggtaacaaacacatgattgcgaagcttatgaacgatattgcgtagtgtgacaac

SEQ ID NO: 106125 - DNA, 60 bp, Artificial
  Synthetic oligonucleotide
cacatgattgcgaagcttatgaacgatattgcgtagtgtgacaactacgtgttgcgggac

SEQ ID NO: 106126 - DNA, 60 bp, Artificial
  Synthetic oligonucleotide
cgaaagtggtataacttctagacaatttcaggaaatttcaaggttgggagagggtcatcc

SEQ ID NO: 106127 - DNA, 60 bp, Artificial
  Synthetic oligonucleotide
acatgttgatcgagttcagagtagaagaggtgttgcggggcatgcaagcatatagctgta

SEQ ID NO: 106128 - DNA, 60 bp, Artificial
  Synthetic oligonucleotide
cgagttcagagtagaagaggtgttgcggggcatgcaagcatatagctgtaaaacatatgg

SEQ ID NO: 106129 - DNA, 60 bp, Artificial
  Synthetic oligonucleotide
tatagctgtaaaacatatggaacgtttgatgggatgatagatgaacagagtttaacgcgt

SEQ ID NO: 106130 - DNA, 60 bp, Artificial
  Synthetic oligonucleotide
gcgttgaaccttatgtaggctctatttcagtggatccaacgtatagtgattttacgatgc

SEQ ID NO: 106131 - DNA, 60 bp, Artificial
  Synthetic oligonucleotide
gattttacgatgcaaatgagggtacccctacatcggaaaaagtgtgacgctttcccaggt

SEQ ID NO: 106132 - DNA, 60 bp, Artificial
  Synthetic oligonucleotide
gagggttaggagcttcatatagtgttcagactgataatatcatcgaaagtgtagttggcg

SEQ ID NO: 106133 - DNA, 60 bp, Artificial
  Synthetic oligonucleotide
tatggaacgtttgatgggatgatagatgaacagagtttaacgcgtaagctaacttggcgg

SEQ ID NO: 106134 - DNA, 60 bp, Artificial
  Synthetic oligonucleotide
tttaacgcgtaagctaacttggcgggtccggaaaatcatgtcgtatgacgagagagattt

SEQ ID NO: 106135 - DNA, 60 bp, Artificial
  Synthetic oligonucleotide
cgttaacctaagatcagtaggtagagtggcgccccaaggtttgcaccgcatggagtggtt

SEQ ID NO: 106136 - DNA, 60 bp, Artificial
  Synthetic oligonucleotide
cttgttaaaacgtacgattttatactgcgagctagaccatccaacgtaagacagaagaga

SEQ ID NO: 106137 - DNA, 60 bp, Artificial
  Synthetic oligonucleotide
cgattttatactgcgagctagaccatccaacgtaagacagaagagagggaaagtattgcc

SEQ ID NO: 106138 - DNA, 60 bp, Artificial
  Synthetic oligonucleotide
atcagattcttcttcctttaattgcattgacacttgtattgttgctaatacttgttaaaa

SEQ ID NO: 106139 - DNA, 60 bp, Artificial
  Synthetic oligonucleotide
ttaaaaaccacgagctagatatgctaaacatcggaacccttgatcactttttcgcaaatg

SEQ ID NO: 106140 - DNA, 60 bp, Artificial
  Synthetic oligonucleotide
ttcgcaaatgtctaatacggatttacagttttgtaccacagttcttaacaatcagattct

SEQ ID NO: 106141 - DNA, 60 bp, Artificial
  Synthetic oligonucleotide
aggacgattttcagctagattattcagttatttcatactaatggattattgtaacagtga

SEQ ID NO: 106142 - DNA, 60 bp, Artificial
  Synthetic oligonucleotide
gttacttgacttgtaccattggaatcgcaattggtgaagcttttttaagtatttgtatat

SEQ ID NO: 106143 - DNA, 60 bp, Artificial
  Synthetic oligonucleotide
gttcaggagttaagggctttagtcgacgatctcacttggcgtgtaacagatgtgagaggg

SEQ ID NO: 106144 - DNA, 59 bp, Artificial
  Synthetic oligonucleotide
gtgttaacggttgtttttggggctatggagatcgtataggtccattcgcaaaagagcat

SEQ ID NO: 106145 - DNA, 60 bp, Artificial
  Synthetic oligonucleotide
cttaaagtagccaacttagcaaagaatcagttagtaggaccctttattggaggatatgag

SEQ ID NO: 106146 - DNA, 60 bp, Artificial
  Synthetic oligonucleotide
gcggtctaactaagttaatctcatttgaggtaagtaacgctcaaacttctgtaacatacg

SEQ ID NO: 106147 - DNA, 60 bp, Artificial
  Synthetic oligonucleotide
ggaactttctcctctggacgtgccgacacttctgctcatcatactatgttgttacctgcc

SEQ ID NO: 106148 - DNA, 60 bp, Artificial
  Synthetic oligonucleotide
gggtgatgatttaattcaggtgtgtaatggtaatgaagcaatgtgtgttaaaaacttaga

SEQ ID NO: 106149 - DNA, 60 bp, Artificial
  Synthetic oligonucleotide
gttacctgccataattcgcgccgtagaactagattatgataatagcgctgtaaacttgcg

SEQ ID NO: 106150 - DNA, 60 bp, Artificial
  Synthetic oligonucleotide
gttgttttcctaacaatgtcatcttctggtacgagggtaacagagcatgaaaagaagcga

SEQ ID NO: 106151 - DNA, 60 bp, Artificial
  Synthetic oligonucleotide
gcgatcatttatttcaaggctcttcgtaaggtgttgtacggcgtacatgcggtccgtggt

SEQ ID NO: 106152 - DNA, 50 bp, Artificial
  Synthetic oligonucleotide
catgtattacgtaattgttttgaactgagaggtgctagacttaacatcca

SEQ ID NO: 106153 - DNA, 55 bp, Artificial
  Synthetic oligonucleotide
ttaaagcaataaatgctgacatggctagacagcagttatttattaaagcttttga

SEQ ID NO: 106154 - DNA, 60 bp, Artificial
  Synthetic oligonucleotide
gctaattccgaatccacaatggcattagcctatcttgggatgtatgacgacttttctaat

SEQ ID NO: 106155 - DNA, 60 bp, Artificial
  Synthetic oligonucleotide
gatgatagcgaatacatttaagttcggtccagaaagcgtatttcttaaattagtgcgcgc

SEQ ID NO: 106156 - DNA, 60 bp, Artificial
  Synthetic oligonucleotide
catttaagttcggtccagaaagcgtatttcttaaattagtgcgcgcttcactgcgaaagt

SEQ ID NO: 106157 - DNA, 60 bp, Artificial
  Synthetic oligonucleotide
gtgcgcgcttcactgcgaaagttgtgtcctaaccttaattattctgagcgcgaatttcca

SEQ ID NO: 106158 - DNA, 60 bp, Artificial
  Synthetic oligonucleotide
aaaaggtgttagtcgtagttggtatttggaagcgttacataacattggtaaaacgatgat

SEQ ID NO: 106159 - DNA, 60 bp, Artificial
  Synthetic oligonucleotide
gctttctctagataaggctattcaagcgactgtacgtgagtctgtagtacaaaagccatc

SEQ ID NO: 106160 - DNA, 60 bp, Artificial
  Synthetic oligonucleotide
gtctgtagtacaaaagccatcgtatataaaactaaattcatttggtgtgcatgaacaacg

SEQ ID NO: 106161 - DNA, 60 bp, Artificial
  Synthetic oligonucleotide
gtgcatgaacaacgttattatgagggcctgcctgctagagttagtgacttcctacaattg

SEQ ID NO: 106162 - DNA, 60 bp, Artificial
  Synthetic oligonucleotide
gtttttggtattgctggatatttattatatcgtataggctattcgagaggtgtacattct

SEQ ID NO: 106163 - DNA, 51 bp, Artificial
  Synthetic oligonucleotide
gactttctttgattcaggtgatcctttacatattgtatcagcagcaaccgt

SEQ ID NO: 106164 - DNA, 61 bp, Artificial
  Synthetic oligonucleotide
caggagtatgttctaatggattattgatgactcaaactttaactataccaaacgagttagc

SEQ ID NO: 106165 - DNA, 60 bp, Artificial
  Synthetic oligonucleotide
cataccaatattaaattgaacgtcgaatccatcgcatctttcgaacagctcatcttcaat

SEQ ID NO: 106166 - DNA, 60 bp, Artificial
  Synthetic oligonucleotide
ggctatgactatttaacaacaagggaagtaggctctatgataaacgctgacgataaagac

SEQ ID NO: 106167 - DNA, 59 bp, Artificial
  Synthetic oligonucleotide
aacgagttagctaagcctaagaaattcaactataatgattatccccttaatgataataa

SEQ ID NO: 106168 - DNA, 60 bp, Artificial
  Synthetic oligonucleotide
cttcaatgtcaatcacgtatggcgaattgttggcgtcaattagcatcaatgatgatagcg

SEQ ID NO: 106169 - DNA, 61 bp, Artificial
  Synthetic oligonucleotide
cattagatattctgagttaatggatttacttaaaacgcttcaatgtcaatcacgtatggcg

SEQ ID NO: 106170 - DNA, 60 bp, Artificial
  Synthetic oligonucleotide
ttatattgatgagttagaggcaacgccaggtaatataattggtactaataatattgaatt

SEQ ID NO: 106171 - DNA, 60 bp, Artificial
  Synthetic oligonucleotide
cgtatatggtgaacaactgactgagagagttttgcaaactgccgaaacattacaaatgag

SEQ ID NO: 106172 - DNA, 59 bp, Artificial
  Synthetic oligonucleotide
aactgccgaaacattacaaatgagtgaagcccaaagacgtatattttcaaatgaaatgg

SEQ ID NO: 106173 - DNA, 60 bp, Artificial
  Synthetic oligonucleotide
tgatctacctcattttgaagcactacgaatcaatgatgcatttaggctgttggagatgag

SEQ ID NO: 106174 - DNA, 60 bp, Artificial
  Synthetic oligonucleotide
tagaaggtatagtaggtggatttgctttttcgagttcaagagaagcagccgcacaactaa

SEQ ID NO: 106175 - DNA, 60 bp, Artificial
  Synthetic oligonucleotide
ggtggtgaattaccatgctttccagtagaacgaagcgatggaagttatacatgtgaagaa

SEQ ID NO: 106176 - DNA, 60 bp, Artificial
  Synthetic oligonucleotide
atcagtaatgtgaaagagctcattaaagctggatcctcaaaagtagaatttgatctacct

SEQ ID NO: 106177 - DNA, 55 bp, Artificial
  Synthetic oligonucleotide
tgcttgtgtgcggggaaatttacgctttcaattagcaagttaagttatgaaccat

SEQ ID NO: 106178 - DNA, 60 bp, Artificial
  Synthetic oligonucleotide
tactctagtagattagtgactatctttgtccctttgatgtggttctttatgcaaaaaggt

SEQ ID NO: 106179 - DNA, 60 bp, Artificial
  Synthetic oligonucleotide
acgtgaaaggcatggacgcatctattcaatcatcattgcgtgaggtagttaacggattta

SEQ ID NO: 106180 - DNA, 60 bp, Artificial
  Synthetic oligonucleotide
ggcgatgcaattattatagttcaaagacaacaaatagacagacgtcaacggggtattgct

SEQ ID NO: 106181 - DNA, 54 bp, Artificial
  Synthetic oligonucleotide
aaaagcgactggtacgtgcagctgaagagagtgatcaatatcgtgacctagaat

SEQ ID NO: 106182 - DNA, 60 bp, Artificial
  Synthetic oligonucleotide
gtaacagagcatgaaaagaagcgattgggtgagacgctaagcaagttgatgaaaaagcga

SEQ ID NO: 106183 - DNA, 60 bp, Artificial
  Synthetic oligonucleotide
ggacatctactgtaaattcactattctcatctatggacgtgaaaggcatggacgcatcta

SEQ ID NO: 106184 - DNA, 60 bp, Artificial
  Synthetic oligonucleotide
actgaaactgctgctcaaggtaagcaaactggtaacattaacgatataagcaatatgtta

SEQ ID NO: 106185 - DNA, 60 bp, Artificial
  Synthetic oligonucleotide
gggtattgctggaattaataatcaaaaacttcttgcgagttttggtggttatatcattgc

SEQ ID NO: 106186 - DNA, 60 bp, Artificial
  Synthetic oligonucleotide
ttagattgtcattgattggaactggactctctccattagatgatttggtaatcatccgtt

SEQ ID NO: 106187 - DNA, 60 bp, Artificial
  Synthetic oligonucleotide
aatctttatttgacacgcttatgggaagtttgattgcaccgaacacatcacaaactggtg

SEQ ID NO: 106188 - DNA, 60 bp, Artificial
  Synthetic oligonucleotide
cacgcttatgggaagtttgattgcaccgaacacatcacaaactggtgacgtagatggaga

SEQ ID NO: 106189 - DNA, 60 bp, Artificial
  Synthetic oligonucleotide
tgtaacacttggtcgattctggactgtacttgatgaccatagaccatttattgcgatcaa

SEQ ID NO: 106190 - DNA, 60 bp, Artificial
  Synthetic oligonucleotide
cacttggtcgattctggactgtacttgatgaccatagaccatttattgcgatcaaaaccg

SEQ ID NO: 106191 - DNA, 60 bp, Artificial
  Synthetic oligonucleotide
ggctatgtcccagttcataacgggtaagagagcagacaagcatgagatggaatctttatt

SEQ ID NO: 106192 - DNA, 60 bp, Artificial
  Synthetic oligonucleotide
cccagttcataacgggtaagagagcagacaagcatgagatggaatctttatttgacacgc

SEQ ID NO: 106193 - DNA, 60 bp, Artificial
  Synthetic oligonucleotide
gacgttacattttgttcactcttactgtgagttggcattcgtgccacattctctagctta

SEQ ID NO: 106194 - DNA, 60 bp, Artificial
  Synthetic oligonucleotide
ctctagcttatttaacattacatagcagcttcaattcatcagtacttaatcttttaacac

SEQ ID NO: 106195 - DNA, 60 bp, Artificial
  Synthetic oligonucleotide
caaactggtgacgtagatggagaaagtatcttagatgcattcaatcgagtatttcattta

SEQ ID NO: 106196 - DNA, 60 bp, Artificial
  Synthetic oligonucleotide
ctggtgacgtagatggagaaagtatcttagatgcattcaatcgagtatttcatttaatcc

SEQ ID NO: 106197 - DNA, 60 bp, Artificial
  Synthetic oligonucleotide
cccgatccgacatcttggttttattgtgttgatgacgaatgtcaattaccagtttgaccc

SEQ ID NO: 106198 - DNA, 60 bp, Artificial
  Synthetic oligonucleotide
agtttgacccaccttctgaatgccacaacttttacacattgaagaaaaatcatggaatga

SEQ ID NO: 106199 - DNA, 60 bp, Artificial
  Synthetic oligonucleotide
catggaatgacgtttaatgaactagaatttttccttaattcaaaaatgctattaggtcaa

SEQ ID NO: 106200 - DNA, 60 bp, Artificial
  Synthetic oligonucleotide
agtttgaaacatattactttgatccccgttctgaaaagacaagttatggcttcctgaaac

SEQ ID NO: 106201 - DNA, 60 bp, Artificial
  Synthetic oligonucleotide
actttgatccccgttctgaaaagacaagttatggcttcctgaaacgtatggctttagtta

SEQ ID NO: 106202 - DNA, 60 bp, Artificial
  Synthetic oligonucleotide
ttcctgaaacgtatggctttagttagatttgactttctatcttataattatgttaatgat

SEQ ID NO: 106203 - DNA, 60 bp, Artificial
  Synthetic oligonucleotide
tgaacatcacaaacagccttctttcacgtgaaatttttcgtgacagtattgacccttcac

SEQ ID NO: 106204 - DNA, 60 bp, Artificial
  Synthetic oligonucleotide
gacccttcacaacactatgctgttattgttttgaaaaacgacgtaacaaatgtaacactt

SEQ ID NO: 106205 - DNA, 60 bp, Artificial
  Synthetic oligonucleotide
aggcaaacagacaacctttcaaaacatgccaactactctctgcttttagccgcctcgaaa

SEQ ID NO: 106206 - DNA, 60 bp, Artificial
  Synthetic oligonucleotide
ggcaaacagacaacctttcaaaacatgccaactactctctgcttttagccgcctcgaaac

SEQ ID NO: 106207 - DNA, 60 bp, Artificial
  Synthetic oligonucleotide
ttgtctgccattgggtgaacccctggtctttaatcctaaaagctataagtttagattgtc

SEQ ID NO: 106208 - DNA, 60 bp, Artificial
  Synthetic oligonucleotide
cgaccgatataccactgatgtaaatccaacttcagtcttcttatttaagtatcattttgg

SEQ ID NO: 106209 - DNA, 60 bp, Artificial
  Synthetic oligonucleotide
ccgatataccactgatgtaaatccaacttcagtcttcttatttaagtatcattttgggct

SEQ ID NO: 106210 - DNA, 60 bp, Artificial
  Synthetic oligonucleotide
catccgtttgaaggatttaattaatgtattcaagcaaggacatgatgttcaagtgattgg

SEQ ID NO: 106211 - DNA, 60 bp, Artificial
  Synthetic oligonucleotide
atcatccgtttgaaggatttaattaatgtattcaagcaaggacatgatgttcaagtgatt

SEQ ID NO: 106212 - DNA, 60 bp, Artificial
  Synthetic oligonucleotide
gtcagacacatatcctcatttacttgtaattgatagtgatgattacggacggttcttaac

SEQ ID NO: 106213 - DNA, 60 bp, Artificial
  Synthetic oligonucleotide
agaatgatgtcagacacatatcctcatttacttgtaattgatagtgatgattacggacgg

SEQ ID NO: 106214 - DNA, 60 bp, Artificial
  Synthetic oligonucleotide
gtcattgattggaactggactctctccattagatgatttggtaatcatccgtttgaagga

SEQ ID NO: 106215 - DNA, 60 bp, Artificial
  Synthetic oligonucleotide
ctgccattgggtgaacccctggtctttaatcctaaaagctataagtttagattgtcattg

SEQ ID NO: 106216 - DNA, 60 bp, Artificial
  Synthetic oligonucleotide
gtctgacatccgtttcgtttcagtctaatatccgatgacgtgctaggtcttggacgattc

SEQ ID NO: 106217 - DNA, 60 bp, Artificial
  Synthetic oligonucleotide
gcaaaatcaggaaatattaaacatgttctgaataattgtctgccattgggtgaacccctg

SEQ ID NO: 106218 - DNA, 60 bp, Artificial
  Synthetic oligonucleotide
gagaatagtatcgaagcaaaatcaggaaatattaaacatgttctgaataattgtctgcca

SEQ ID NO: 106219 - DNA, 60 bp, Artificial
  Synthetic oligonucleotide
gggcttactaaaggattgaatgtaattgaagcatctaaactagttaactaaacacgcatc

SEQ ID NO: 106220 - DNA, 60 bp, Artificial
  Synthetic oligonucleotide
atcattttgggcttactaaaggattgaatgtaattgaagcatctaaactagttaactaaa

SEQ ID NO: 106221 - DNA, 60 bp, Artificial
  Synthetic oligonucleotide
gcatctattaaagaatatcgtccttttagggtcatgcgtctgacatccgtttcgtttcag

SEQ ID NO: 106222 - DNA, 60 bp, Artificial
  Synthetic oligonucleotide
gttaactaaacacgcatctattaaagaatatcgtccttttagggtcatgcgtctgacatc

SEQ ID NO: 106223 - DNA, 60 bp, Artificial
  Synthetic oligonucleotide
cgtcggagttcttgacagtaagccccatcggacctgatggctggctgagaagccacagtc

SEQ ID NO: 106224 - DNA, 60 bp, Artificial
  Synthetic oligonucleotide
ggagtccttcacagtaagtcccatcggacctgatggctggctgagaagccacagtcagtc

SEQ ID NO: 106225 - DNA, 60 bp, Artificial
  Synthetic oligonucleotide
aagtcccatcggacctgatggctggctgagaagccacagtcagtcatatcgcgtgtggct

SEQ ID NO: 106226 - DNA, 60 bp, Artificial
  Synthetic oligonucleotide
gatggacagaattgttaaagagatgagacgtcagctggagatgattgataaactaaccac

SEQ ID NO: 106227 - DNA, 60 bp, Artificial
  Synthetic oligonucleotide
gatggacagaattgttaaagagatgagacgtcagctggagatgattgataaactgactac

SEQ ID NO: 106228 - DNA, 50 bp, Artificial
  Synthetic oligonucleotide
gttcgagagcgcattgcaaaggcaaagaacgagcgcaaatatgatgatac

SEQ ID NO: 106229 - DNA, 60 bp, Artificial
  Synthetic oligonucleotide
agtgactgcatccatgtgagaggttgagttaccgtcgtctgtcttcggaagcggcggaac

SEQ ID NO: 106230 - DNA, 60 bp, Artificial
  Synthetic oligonucleotide
gcttttacatggagtggagataatgactcgcccaaattttctcacgaacgacgcgcaatc

SEQ ID NO: 106231 - DNA, 60 bp, Artificial
  Synthetic oligonucleotide
ggagataatgactcgcccaaattttctcacgaacgacgcgcaatcgagtgattagtcggt

SEQ ID NO: 106232 - DNA, 60 bp, Artificial
  Synthetic oligonucleotide
tgcgcatccaatttatctaggatctgttgattaccagatatcgtatgaccaattgtacgc

SEQ ID NO: 106233 - DNA, 60 bp, Artificial
  Synthetic oligonucleotide
tctaggatctgttgattaccagatatcgtatgaccaattgtacgcgcacgcaaatcaact

SEQ ID NO: 106234 - DNA, 60 bp, Artificial
  Synthetic oligonucleotide
aattgtacgcgcacgcaaatcaactggttactaatgaggagttgcagctacatgtgctac

SEQ ID NO: 106235 - DNA, 60 bp, Artificial
  Synthetic oligonucleotide
cgcacgcaaatcaactggttactaatgaggagttgcagctacatgtgctacgaggcccgc

SEQ ID NO: 106236 - DNA, 60 bp, Artificial
  Synthetic oligonucleotide
catcctaaaatacacatatatacagcgccgtgggattcggattatgtatttatgtttaaa

SEQ ID NO: 106237 - DNA, 60 bp, Artificial
  Synthetic oligonucleotide
cacatatatacagcgccgtgggattcggattatgtatttatgtttaaatgtgtagcgcca

SEQ ID NO: 106238 - DNA, 53 bp, Artificial
  Synthetic oligonucleotide
gattttgtttattttgaggatctgaaggttgaagcgcatcagttgatcgaggg

SEQ ID NO: 106239 - DNA, 60 bp, Artificial
  Synthetic oligonucleotide
gtatcgggagcaagtgaaattcataagaaaagattacaacgatcgtccagtgcgcatcca

SEQ ID NO: 106240 - DNA, 60 bp, Artificial
  Synthetic oligonucleotide
catgtgctacgaggcccgctacatttccaaaggcgaactataatggcggcgcttttacat

SEQ ID NO: 106241 - DNA, 60 bp, Artificial
  Synthetic oligonucleotide
cgaggcccgctacatttccaaaggcgaactataatggcggcgcttttacatggagtggag

SEQ ID NO: 106242 - DNA, 60 bp, Artificial
  Synthetic oligonucleotide
gcggtcaattagacaatttggcaagggtatgatctctttagaagaaagtggtatgagcga

SEQ ID NO: 106243 - DNA, 60 bp, Artificial
  Synthetic oligonucleotide
tggtatgagcgaaatggagatgataaggaaatcgattaaaggaatggagaaaattgaatt

SEQ ID NO: 106244 - DNA, 60 bp, Artificial
  Synthetic oligonucleotide
cagaactagagaaagaggaacaagaggacagattttttgaccaaaacgagaaagagatca

SEQ ID NO: 106245 - DNA, 60 bp, Artificial
  Synthetic oligonucleotide
ttgcggtcaattagacaatttggcaagggtatgatctctttagaagaaagtggtatgagc

SEQ ID NO: 106246 - DNA, 60 bp, Artificial
  Synthetic oligonucleotide
aatttgggagaatcaattaaacaagcagtcattttaaatgtgatgggtgcggcaaacgcg

SEQ ID NO: 106247 - DNA, 57 bp, Artificial
  Synthetic oligonucleotide
aaatgtgatgggtgcggcaaacgcgccgccggatccaattagcccaggagagcacgc

SEQ ID NO: 106248 - DNA, 55 bp, Artificial
  Synthetic oligonucleotide
gttaaaattgctctggcacgatgggtcggttcgtgaaatttttaaaacgggcagg

SEQ ID NO: 106249 - DNA, 60 bp, Artificial
  Synthetic oligonucleotide
gcgttagagggtgaaaatttgggagaatcaattaaacaagcagtcattttaaatgtgatg

SEQ ID NO: 106250 - DNA, 60 bp, Artificial
  Synthetic oligonucleotide
gagcgaaatggagatgataaggaaatcgattaaaggaatggagaaaattgaattgaagca

SEQ ID NO: 106251 - DNA, 52 bp, Artificial
  Synthetic oligonucleotide
aaattgaattgaagcatacaaatgatttacaaacattgaggagaggtttgac

SEQ ID NO: 106252 - DNA, 60 bp, Artificial
  Synthetic oligonucleotide
gaggttgtagataataagttggcgttagtgagagagttaggcgacgaacgtaagcattta

SEQ ID NO: 106253 - DNA, 60 bp, Artificial
  Synthetic oligonucleotide
tctattagaggttgtagataataagttggcgttagtgagagagttaggcgacgaacgtaa

SEQ ID NO: 106254 - DNA, 60 bp, Artificial
  Synthetic oligonucleotide
ttgggcgctggcgcagcgaatgcgattgcgtcagttcgggccgttgagggcgcattaaaa

SEQ ID NO: 106255 - DNA, 60 bp, Artificial
  Synthetic oligonucleotide
gaggtaccggtgttgggcgctggcgcagcgaatgcgattgcgtcagttcgggccgttgag

SEQ ID NO: 106256 - DNA, 60 bp, Artificial
  Synthetic oligonucleotide
gggtcttgcaagacgcgatatccgttgaacaagaagggcttcatgaggaagcggtgcagg

SEQ ID NO: 106257 - DNA, 60 bp, Artificial
  Synthetic oligonucleotide
tgagggtcttgcaagacgcgatatccgttgaacaagaagggcttcatgaggaagcggtgc

SEQ ID NO: 106258 - DNA, 60 bp, Artificial
  Synthetic oligonucleotide
agtttattgttacgtcggaatgcggacggggacgtaatacaagaaaaagatctattagag

SEQ ID NO: 106259 - DNA, 60 bp, Artificial
  Synthetic oligonucleotide
atatgacttataagtcgctccaaccagataaaatgagtttattgttacgtcggaatgcgg

SEQ ID NO: 106260 - DNA, 60 bp, Artificial
  Synthetic oligonucleotide
gagttgatttatcgcatatgacttataagtcgctccaaccagataaaatgagtttattgt

SEQ ID NO: 106261 - DNA, 60 bp, Artificial
  Synthetic oligonucleotide
ggccgttgagggcgcattaaaactgaaagaagtcattcaaaaattaagtggagttgattt

SEQ ID NO: 106262 - DNA, 60 bp, Artificial
  Synthetic oligonucleotide
cgatgattcagaacgcattggatggatcaataatcgaaaatggaaatgtagccacacgag

SEQ ID NO: 106263 - DNA, 60 bp, Artificial
  Synthetic oligonucleotide
cgatatgttcaacgcattattacccgacctagttgctggggcgcatcagaacgccgaccc

SEQ ID NO: 106264 - DNA, 60 bp, Artificial
  Synthetic oligonucleotide
tacgaaatcgcacgtctacaggcaaacatggggcaattccgagcggctttaagacgtatt

SEQ ID NO: 106265 - DNA, 60 bp, Artificial
  Synthetic oligonucleotide
ctgcgatggcaggtagattagcaaacgatgaggataacccaatcatgtttgattaccgcg

SEQ ID NO: 106266 - DNA, 60 bp, Artificial
  Synthetic oligonucleotide
gaagttgaagctgcgatggcaggtagattagcaaacgatgaggataacccaatcatgttt

SEQ ID NO: 106267 - DNA, 60 bp, Artificial
  Synthetic oligonucleotide
cgccgaagcagctaacaccttattcgatcaagtattatcagaagttgatgcactggcttc

SEQ ID NO: 106268 - DNA, 60 bp, Artificial
  Synthetic oligonucleotide
ggttacgccgaagcagctaacaccttattcgatcaagtattatcagaagttgatgcactg

SEQ ID NO: 106269 - DNA, 60 bp, Artificial
  Synthetic oligonucleotide
ttgaaccttctgagcatgaagcagcaagagtccattcagatcaggttgtagaggagcgtg

SEQ ID NO: 106270 - DNA, 60 bp, Artificial
  Synthetic oligonucleotide
catcaaatgatgtacttgaaccttctgagcatgaagcagcaagagtccattcagatcagg

SEQ ID NO: 106271 - DNA, 60 bp, Artificial
  Synthetic oligonucleotide
gttgtagaggagcgtgtacaacgtccactagttcgattagaatcgccaggagaggatgag

SEQ ID NO: 106272 - DNA, 60 bp, Artificial
  Synthetic oligonucleotide
tcagatcaggttgtagaggagcgtgtacaacgtccactagttcgattagaatcgccagga

SEQ ID NO: 106273 - DNA, 60 bp, Artificial
  Synthetic oligonucleotide
gccaggagaggatgagattatctttcgtggaccatccgatatacgatataccccaataac

SEQ ID NO: 106274 - DNA, 60 bp, Artificial
  Synthetic oligonucleotide
atcgccaggagaggatgagattatctttcgtggaccatccgatatacgatataccccaat

SEQ ID NO: 106275 - DNA, 59 bp, Artificial
  Synthetic oligonucleotide
cccgtcgagaaagatcaaccatatccctcttttaaggttaatcaattacatccaaacac

SEQ ID NO: 106276 - DNA, 60 bp, Artificial
  Synthetic oligonucleotide
gggccggtacggggtgcgtgatgactcacttgtctattcacataatacaacacataatca

SEQ ID NO: 106277 - DNA, 60 bp, Artificial
  Synthetic oligonucleotide
ataccccaataacacttcgtactcacttccactttaaaacctttgaacgacccgtcgaga

SEQ ID NO: 106278 - DNA, 60 bp, Artificial
  Synthetic oligonucleotide
ccccaataacacttcgtactcacttccactttaaaacctttgaacgacccgtcgagaaag

SEQ ID NO: 106279 - DNA, 60 bp, Artificial
  Synthetic oligonucleotide
acaatgtgagcatttgatacgacatatgatcagttatcatattaacacaccagatacaca

SEQ ID NO: 106280 - DNA, 60 bp, Artificial
  Synthetic oligonucleotide
cagatacacatggattaattgttgagtgctatgagcaggtcggagatttaagagctgact

SEQ ID NO: 106281 - DNA, 60 bp, Artificial
  Synthetic oligonucleotide
ggccggtacggggtgcgtgatgactcacttgtctattcacataatacaacacataatcag

SEQ ID NO: 106282 - DNA, 60 bp, Artificial
  Synthetic oligonucleotide
cgtgtacgagattcagttacttattttagttcaaaaagattaacgcgcggacaatgtgag

SEQ ID NO: 106283 - DNA, 60 bp, Artificial
  Synthetic oligonucleotide
ggattaattgttgagtgctatgagcaggtcggagatttaagagctgactttaccttagag

SEQ ID NO: 106284 - DNA, 60 bp, Artificial
  Synthetic oligonucleotide
agagctgactttaccttagagtcattacgtataccattacttaatgttgattggacaagg

SEQ ID NO: 106285 - DNA, 60 bp, Artificial
  Synthetic oligonucleotide
cgtcagttagtcccagcatacactacttttgaagatctcgaagcacaactaccgccagac

SEQ ID NO: 106286 - DNA, 60 bp, Artificial
  Synthetic oligonucleotide
tcacactcactgcgtcagttagtcccagcatacactacttttgaagatctcgaagcacaa

SEQ ID NO: 106287 - DNA, 60 bp, Artificial
  Synthetic oligonucleotide
cgaagcacaactaccgccagactatgtatttccagaaagttttcagtatcccccgaggat

SEQ ID NO: 106288 - DNA, 53 bp, Artificial
  Synthetic oligonucleotide
cgaagcacaactaccgccagactatgtatttccagaaagttttcagtatcccc

SEQ ID NO: 106289 - DNA, 60 bp, Artificial
  Synthetic oligonucleotide
ctcggaacatggagcgtctcattaattcgtaccgaaccatctcacactcactgcgtcagt

SEQ ID NO: 106290 - DNA, 60 bp, Artificial
  Synthetic oligonucleotide
aaataaaatctcggaacatggagcgtctcattaattcgtaccgaaccatctcacactcac

SEQ ID NO: 106291 - DNA, 60 bp, Artificial
  Synthetic oligonucleotide
atcgtgaaattcactctgatgcagggtttacacgtgaagttgaagctgcgatggcaggta

SEQ ID NO: 106292 - DNA, 60 bp, Artificial
  Synthetic oligonucleotide
ccccgaggattagatatcgtgaaattcactctgatgcagggtttacacgtgaagttgaag

SEQ ID NO: 106293 - DNA, 60 bp, Artificial
  Synthetic oligonucleotide
gcgaacttacgtttaatggatgactctgtagctgtgccttagccccgagagagaggtagg

SEQ ID NO: 106294 - DNA, 60 bp, Artificial
  Synthetic oligonucleotide
gatgttttaatgtttgttgcaataatgaagtttagtgtagttgtgaccgaacctcaacga

SEQ ID NO: 106295 - DNA, 60 bp, Artificial
  Synthetic oligonucleotide
agcgtgcaatttttgatgttttaatgtttgttgcaataatgaagtttagtgtagttgtga

SEQ ID NO: 106296 - DNA, 60 bp, Artificial
  Synthetic oligonucleotide
ttggacaaggatatgctataacatttctaatgcattagagaatgagttagagcgtgcaat

SEQ ID NO: 106297 - DNA, 60 bp, Artificial
  Synthetic oligonucleotide
gagctgactttaccttagagtcattacgtataccattacttaatgttgattggacaagga

SEQ ID NO: 106298 - DNA, 60 bp, Artificial
  Synthetic oligonucleotide
ggtgagaaatgagcgaacttacgtttaatggatgactctgtagctgtgccttagccccga

SEQ ID NO: 106299 - DNA, 60 bp, Artificial
  Synthetic oligonucleotide
tggttataaataacatgtaatatgtgaacggacgtggtgagaaatgagcgaacttacgtt

SEQ ID NO: 106300 - DNA, 60 bp, Artificial
  Synthetic oligonucleotide
gatgtttattatcaatggttataaataacatgtaatatgtgaacggacgtggtgagaaat

SEQ ID NO: 106301 - DNA, 60 bp, Artificial
  Synthetic oligonucleotide
agaatggccattaactaaaacatcttatcacttcccccaagctattggagtgccatgtac

SEQ ID NO: 106302 - DNA, 60 bp, Artificial
  Synthetic oligonucleotide
aagatacgtaatgttgccacagccatgctgacaagaacgaactgtgtcgcttatatttca

SEQ ID NO: 106303 - DNA, 60 bp, Artificial
  Synthetic oligonucleotide
ttatatttcattttatgagtcagggataataaccagactaggacaatcaacggcgcacaa

SEQ ID NO: 106304 - DNA, 60 bp, Artificial
  Synthetic oligonucleotide
gatccagccgcgcggatcgaaacactcacgcaggaaacaaagaatattgaaatacaatcc

SEQ ID NO: 106305 - DNA, 60 bp, Artificial
  Synthetic oligonucleotide
cttagctgatgtgtctgtcgttccactcactatgaagtatgttgtgatagatccagccgc

SEQ ID NO: 106306 - DNA, 60 bp, Artificial
  Synthetic oligonucleotide
cggcgcacaaaactatacgtgttgaggatggcaggttgaaggtagcgaattatgtacccg

SEQ ID NO: 106307 - DNA, 60 bp, Artificial
  Synthetic oligonucleotide
ccccagcaattctcaactattctaacccgcaggatgctttcaacagtgtgtttgtggcat

SEQ ID NO: 106308 - DNA, 60 bp, Artificial
  Synthetic oligonucleotide
cgatgatggcgcgacgccctataacgtacgcatttggtacgcacctactatgacggaggt

SEQ ID NO: 106309 - DNA, 60 bp, Artificial
  Synthetic oligonucleotide
ttggcatagactacctgtacactttcaattcacaaaggagatcacacacactacgattac

SEQ ID NO: 106310 - DNA, 60 bp, Artificial
  Synthetic oligonucleotide
agagtactttagtgtcgacacactcatcttggcattggaatgtgttgcacacgtttcact

SEQ ID NO: 106311 - DNA, 60 bp, Artificial
  Synthetic oligonucleotide
gcgaatgatcaacttaaacgtttatatcggcggatgtataacgactcgaggacactgtac

SEQ ID NO: 106312 - DNA, 60 bp, Artificial
  Synthetic oligonucleotide
ccactcgcgctttctcaactaaaatcctattgctcagaggcaacgacctggcgcgtggac

SEQ ID NO: 106313 - DNA, 60 bp, Artificial
  Synthetic oligonucleotide
gccaacgcgtgatatctggccagctgatgaacaggtagagcagaagggtgacgcagttgc

SEQ ID NO: 106314 - DNA, 60 bp, Artificial
  Synthetic oligonucleotide
tttactttctccactactaggtcaagtgtatagaacatacgcaaaaggagatacaatggc

SEQ ID NO: 106315 - DNA, 60 bp, Artificial
  Synthetic oligonucleotide
ctgcacgcatagctttagagtttcggacgcgctcgaatactagtgcctaccatgaatacc

SEQ ID NO: 106316 - DNA, 60 bp, Artificial
  Synthetic oligonucleotide
gcagtgatcaatagatatatgaccgcggtagcggatgatgatgcgcctgtgattcccagt

SEQ ID NO: 106317 - DNA, 60 bp, Artificial
  Synthetic oligonucleotide
tacttaatgtcaccagatacatctatcattttacttggcgctgagcgggagcctgcagtg

SEQ ID NO: 106318 - DNA, 60 bp, Artificial
  Synthetic oligonucleotide
ccggtctgttctgcggatgcgtcgacgtccaatcagccccactcgcgctttctcaactaa

SEQ ID NO: 106319 - DNA, 60 bp, Artificial
  Synthetic oligonucleotide
gtatcattggaatgggagatagagcggtcgagcctaatatcagagttcgcgtgccattcc

SEQ ID NO: 106320 - DNA, 60 bp, Artificial
  Synthetic oligonucleotide
gcatcgtgaggtaacgtttatacataaactgatgttgtacgctttaatacgagaccagat

SEQ ID NO: 106321 - DNA, 60 bp, Artificial
  Synthetic oligonucleotide
aaggccatcaacgccagagcttgtgagcgcctgctcgagctacggtattcgcctaggttc

SEQ ID NO: 106322 - DNA, 60 bp, Artificial
  Synthetic oligonucleotide
cgcacgctcagaagataattccttgcgctataattggatgttaggtgtatacgcacgctc

SEQ ID NO: 106323 - DNA, 60 bp, Artificial
  Synthetic oligonucleotide
gctagttgataatttacactcatggatgcgctcggttcatctattacacgcacgctcaga

SEQ ID NO: 106324 - DNA, 60 bp, Artificial
  Synthetic oligonucleotide
catcacgcctatagctgcggctgttggattccccttctataataactctgcagtgatcaa

SEQ ID NO: 106325 - DNA, 60 bp, Artificial
  Synthetic oligonucleotide
gacaccctttattccgcttaccccttaaatatccatcgaaagcgataccgacagatgagc

SEQ ID NO: 106326 - DNA, 60 bp, Artificial
  Synthetic oligonucleotide
ctacgattactaggacctttccagtattttaacttttcggagacagatagaggacaccct

SEQ ID NO: 106327 - DNA, 60 bp, Artificial
  Synthetic oligonucleotide
gcaagtgctgctacacgtgcgcttgtcaagatcaaccacccatctgagtatatgataaac

SEQ ID NO: 106328 - DNA, 60 bp, Artificial
  Synthetic oligonucleotide
cgcacgctcaactaattataccacaccagttggacagttagtggttaaaaccccagcaat

SEQ ID NO: 106329 - DNA, 60 bp, Artificial
  Synthetic oligonucleotide
acgtatatatttaccaccgcgcacatcaccgcgaattatatttccaacacaggacaaggt

SEQ ID NO: 106330 - DNA, 60 bp, Artificial
  Synthetic oligonucleotide
cgaggacactgtacatgacgccaagacatcaagagctgttgctagcacaaataactgcca

SEQ ID NO: 106331 - DNA, 60 bp, Artificial
  Synthetic oligonucleotide
aggacaaggtcgtattaaacattcactggctgttaccggaataacacaacatagtactgt

SEQ ID NO: 106332 - DNA, 60 bp, Artificial
  Synthetic oligonucleotide
cctgacatagtgctgggaccaacaagcgaagatgttatcaccatatctatggttgagcca

SEQ ID NO: 106333 - DNA, 60 bp, Artificial
  Synthetic oligonucleotide
acatagctttacaattggaacgtacagattattttgcttttacctcgggagatgaagtga

SEQ ID NO: 106334 - DNA, 60 bp, Artificial
  Synthetic oligonucleotide
cttcaatattcaacgtagtttcgaccactccattatcaatggaagtgtacccgggttcga

SEQ ID NO: 106335 - DNA, 60 bp, Artificial
  Synthetic oligonucleotide
gacgatgagattcttgaagcatatgccactagatatgctctggccgcgttggggctcaat

SEQ ID NO: 106336 - DNA, 60 bp, Artificial
  Synthetic oligonucleotide
cttaatctaacggtgcaaggggatgatacaagaaccatcaactatggacccaagggttgc

SEQ ID NO: 106337 - DNA, 60 bp, Artificial
  Synthetic oligonucleotide
taaggacagagaggcttgtagcagaagagttcatcgcatcagaggttggtcgagcatgct

SEQ ID NO: 106338 - DNA, 60 bp, Artificial
  Synthetic oligonucleotide
gccggagtagagttgcctgatagcgtgttgtatagtcgccatacccaatccaggatacaa

SEQ ID NO: 106339 - DNA, 60 bp, Artificial
  Synthetic oligonucleotide
ttggtattgggatgttagtctcactgaagagaagtggataactacagtggagatgcgctc

SEQ ID NO: 106340 - DNA, 60 bp, Artificial
  Synthetic oligonucleotide
gatcacttcgtgaattagtgaagtctaaatcaggcgatttggctatgatacataggtgcg

SEQ ID NO: 106341 - DNA, 60 bp, Artificial
  Synthetic oligonucleotide
gggacggcacttggacgtgttttcccagttactacttccaacgcggcgactctaaccgat

SEQ ID NO: 106342 - DNA, 60 bp, Artificial
  Synthetic oligonucleotide
cgctaatgtgattttcaattcggcggatgtggatgcaatggatgctagtgtgcaggcctc

SEQ ID NO: 106343 - DNA, 60 bp, Artificial
  Synthetic oligonucleotide
tgctcatagtggacaattggctggtttagtaggtttgttacaaggtaaatacggcggtgg

SEQ ID NO: 106344 - DNA, 60 bp, Artificial
  Synthetic oligonucleotide
cagtggagatgcgctccgactgggactcgaataacgctatcgagctgatagacgatgaga

SEQ ID NO: 106345 - DNA, 60 bp, Artificial
  Synthetic oligonucleotide
agcgttcctaacatcatcgagctcaggcaaagacttcgaagacgcagccatcgcaactat

SEQ ID NO: 106346 - DNA, 60 bp, Artificial
  Synthetic oligonucleotide
cctcgggagatgaagtgatatatgagctagttgaaggaaaggattcagttgctaccagta

SEQ ID NO: 106347 - DNA, 60 bp, Artificial
  Synthetic oligonucleotide
gtattcatatgagtggtcttgcaagatcttgtttacgcgcaatgcatttacttcagccac

SEQ ID NO: 106348 - DNA, 60 bp, Artificial
  Synthetic oligonucleotide
caaggcggttcgaccgagaatagaggaaactacagtgaaatacccgaactcacgttactt

SEQ ID NO: 106349 - DNA, 60 bp, Artificial
  Synthetic oligonucleotide
tattgcagtacataaaccacgccatccacaaagctatcagcccgtatcagacccatcagt

SEQ ID NO: 106350 - DNA, 60 bp, Artificial
  Synthetic oligonucleotide
cgcgcgtgtctagtatttggcgtcagtgtgtagcagcatgcctagcgttcgagcctcaga

SEQ ID NO: 106351 - DNA, 60 bp, Artificial
  Synthetic oligonucleotide
gagcctcagatccaaaacaacaactctacccaatcgccgaacttgaacaacttagtcaag

SEQ ID NO: 106352 - DNA, 60 bp, Artificial
  Synthetic oligonucleotide
ggaattggttgcgcgagggattagcaaagttctcgaagatagccatgccaaattggacgg

SEQ ID NO: 106353 - DNA, 60 bp, Artificial
  Synthetic oligonucleotide
gatagccatgccaaattggacggtttcgggagtcatcagctgtacgacagtcaaacctat

SEQ ID NO: 106354 - DNA, 60 bp, Artificial
  Synthetic oligonucleotide
cgaagcgcgtgtattatccgtactcttatacttgtttgggcttcgatagtcacccttacg

SEQ ID NO: 106355 - DNA, 60 bp, Artificial
  Synthetic oligonucleotide
aaatgttacgaggcgttgagttttcaacggtacacaccccaaggcagtttttctttggtg

SEQ ID NO: 106356 - DNA, 60 bp, Artificial
  Synthetic oligonucleotide
tccaagcaattcggaaaattactctaacgcgtaagctatcaattgccacacagtccgatc

SEQ ID NO: 106357 - DNA, 60 bp, Artificial
  Synthetic oligonucleotide
gaagccagaactcttattttcatatatcacggacgccgaacctttagcaaccggagaagt

SEQ ID NO: 106358 - DNA, 60 bp, Artificial
  Synthetic oligonucleotide
gtatttgtaggacccgacatctgcggcaattgtataacccatactttcagagttcccgac

SEQ ID NO: 106359 - DNA, 60 bp, Artificial
  Synthetic oligonucleotide
acccatactttcagagttcccgactacgtcgcgaaaccccctccttatgattcgaagcgc

SEQ ID NO: 106360 - DNA, 60 bp, Artificial
  Synthetic oligonucleotide
cgtctttcgtgagtgattggggctttaaagtctcgaacgagacgtcatctcacacttcgg

SEQ ID NO: 106361 - DNA, 60 bp, Artificial
  Synthetic oligonucleotide
ccaagggggatgtggtcgcggtgtacgaacttctaagagcccggggttgaacgcccggtg

SEQ ID NO: 106362 - DNA, 60 bp, Artificial
  Synthetic oligonucleotide
cacttcggaatatttacaacagcgtgtttcatgtggtacctttgtcggatacccagatcg

SEQ ID NO: 106363 - DNA, 60 bp, Artificial
  Synthetic oligonucleotide
taagttctaacgctcagtcctgtaccggtaggtctattcgtgtacgagtaccaaggggga

SEQ ID NO: 106364 - DNA, 60 bp, Artificial
  Synthetic oligonucleotide
tctttggtgttgattcgggagttacgcttggtaatcatcttgactacccaaacggattcc

SEQ ID NO: 106365 - DNA, 60 bp, Artificial
  Synthetic oligonucleotide
cagaacggccaaaagaaggcaagacgatgaaagagaagatgtcagaaatttggagtttgg

SEQ ID NO: 106366 - DNA, 60 bp, Artificial
  Synthetic oligonucleotide
cgggaaacagatgggtaattatttagatttgttaattcctctcggattatcaccatacgc

SEQ ID NO: 106367 - DNA, 60 bp, Artificial
  Synthetic oligonucleotide
tggagtttggttacggatttgggttgtcgctctagagatccgcagcgattggttcgattg

SEQ ID NO: 106368 - DNA, 60 bp, Artificial
  Synthetic oligonucleotide
gttaatgttaaaagcgttgctggatatgacaggaactacctcgtccgggaaacagatggg

SEQ ID NO: 106369 - DNA, 60 bp, Artificial
  Synthetic oligonucleotide
ccatgactctattagtgatcaccgagcagaccatacattcactgtgtctcgaccacggag

SEQ ID NO: 106370 - DNA, 60 bp, Artificial
  Synthetic oligonucleotide
cagagagctattgctggtgtcaataatactcgttcactgttaggattccctcctatgtta

SEQ ID NO: 106371 - DNA, 60 bp, Artificial
  Synthetic oligonucleotide
agtgcttagccgccgcaaaattagtgggtcgcacccagattggaaggagacagagagcta

SEQ ID NO: 106372 - DNA, 60 bp, Artificial
  Synthetic oligonucleotide
ctagaatcgcggagttatctcaatcaacaattcatcgccgatgagtgcttagccgccgca

SEQ ID NO: 106373 - DNA, 60 bp, Artificial
  Synthetic oligonucleotide
cgatactacccttgctcctttacagtattcagaacctggtgactcaattttgcgcgggag

SEQ ID NO: 106374 - DNA, 60 bp, Artificial
  Synthetic oligonucleotide
cggggagttagtcactcgtgagcccacctttccttctggtcagccgtttacgacagtcca

SEQ ID NO: 106375 - DNA, 60 bp, Artificial
  Synthetic oligonucleotide
cgcgggagtgataaacaggatggaaatgattctagcctttcaatattatctagactgtgg

SEQ ID NO: 106376 - DNA, 60 bp, Artificial
  Synthetic oligonucleotide
gaggatgttcgcaacattgctaaaacccatcggtcgcctacccttctacgaacgcagacg

SEQ ID NO: 106377 - DNA, 60 bp, Artificial
  Synthetic oligonucleotide
gcagacgaaattttgtgtgggaagaagaggtgagttgtcctacgatactacccttgctcc

SEQ ID NO: 106378 - DNA, 60 bp, Artificial
  Synthetic oligonucleotide
gaagaaggaggccagctaccacctttagcgactaaaagaagggacggcacttggacgtgt

SEQ ID NO: 106379 - DNA, 60 bp, Artificial
  Synthetic oligonucleotide
gtctcgaccacggagaaactaaccagattatcgcggagattaaacaacttgagaagccag

SEQ ID NO: 106380 - DNA, 60 bp, Artificial
  Synthetic oligonucleotide
ctagactgtggtgttacggcgtatcaagacgaaaagctcaggcttcagaaattgattcgg

SEQ ID NO: 106381 - DNA, 60 bp, Artificial
  Synthetic oligonucleotide
cgatgttgagcagctagcttccgggctgaatgcttatcgtaatcttagtaaaatagcgat

SEQ ID NO: 106382 - DNA, 60 bp, Artificial
  Synthetic oligonucleotide
ggttcgattgatgtatgctattggagtagcgtgctgttgtcgattaactataaggacaga

SEQ ID NO: 106383 - DNA, 60 bp, Artificial
  Synthetic oligonucleotide
gtagataatctagtatcacgtacgacgaaaggtagcgagatatataagaccgggcaacgg

SEQ ID NO: 106384 - DNA, 60 bp, Artificial
  Synthetic oligonucleotide
gcctcggatgataacatgactcaaagtgtcactagtgacgtatctaatgaaaacgattgg

SEQ ID NO: 106385 - DNA, 60 bp, Artificial
  Synthetic oligonucleotide
attttagaagcggacattttggatttagtaacaagaactggtgcaagacgtgtcatgcga

SEQ ID NO: 106386 - DNA, 60 bp, Artificial
  Synthetic oligonucleotide
cattttggatttagtaacaagaactggtgcaagacgtgtcatgcgagaacaattacggcg

SEQ ID NO: 106387 - DNA, 60 bp, Artificial
  Synthetic oligonucleotide
tgtcatgcgagaacaattacggcgactttcaaaattatgtgttgtgccgcttaccataac

SEQ ID NO: 106388 - DNA, 60 bp, Artificial
  Synthetic oligonucleotide
cgagaacaattacggcgactttcaaaattatgtgttgtgccgcttaccataactgatgcg

SEQ ID NO: 106389 - DNA, 60 bp, Artificial
  Synthetic oligonucleotide
ggatttgattactctactatttataatgtatttatacgcgacttgccgttggttaattct

SEQ ID NO: 106390 - DNA, 60 bp, Artificial
  Synthetic oligonucleotide
catgtgcggatattaatgagaaagacgggatatagcgagttaataatacgaatgttctta

SEQ ID NO: 106391 - DNA, 60 bp, Artificial
  Synthetic oligonucleotide
atatttgattatactcccacaattagttcatggggtgtcatcttgcgttcggttgtggat

SEQ ID NO: 106392 - DNA, 60 bp, Artificial
  Synthetic oligonucleotide
tactttcttagcacattttgaaactccacactatgtcacagttaaaacagcgaaaagtga

SEQ ID NO: 106393 - DNA, 60 bp, Artificial
  Synthetic oligonucleotide
agctgttggaacccataaatgtgcctcttgcaatgcagttgtagataatctagtatcacg

SEQ ID NO: 106394 - DNA, 60 bp, Artificial
  Synthetic oligonucleotide
cagttgtagataatctagtatcacgtacgacgaaaggtagcgagatatataagaccgggc

SEQ ID NO: 106395 - DNA, 60 bp, Artificial
  Synthetic oligonucleotide
cgagcctatagcgcacatgcatctcgtaactttatataacgctattgtctttttccgtac

SEQ ID NO: 106396 - DNA, 60 bp, Artificial
  Synthetic oligonucleotide
atttcaactcaaggaagctgttggaacccataaatgtgcctcttgcaatgcagttgtaga

SEQ ID NO: 106397 - DNA, 60 bp, Artificial
  Synthetic oligonucleotide
ttttccgtaccgtacttggttttgaattgaaattgtacgagtttgaggccatatttgatt

SEQ ID NO: 106398 - DNA, 60 bp, Artificial
  Synthetic oligonucleotide
ccgctacgattatacagtataactttgatactagagacaaacatgctccattcgctcctc

SEQ ID NO: 106399 - DNA, 60 bp, Artificial
  Synthetic oligonucleotide
ttgatgcctcggatgataacatgactcaaagtgtcactagtgacgtatctaatgaaaacg

SEQ ID NO: 106400 - DNA, 60 bp, Artificial
  Synthetic oligonucleotide
actcaatgctagtgagataatcttcacccagatggttgatgcctcggatgataacatgac

SEQ ID NO: 106401 - DNA, 60 bp, Artificial
  Synthetic oligonucleotide
gcacattttgaaactccacactatgtcacagttaaaacagcgaaaagtgagatacggtac

SEQ ID NO: 106402 - DNA, 57 bp, Artificial
  Synthetic oligonucleotide
ggaggtatacatattggttttgaacgtatcactgttcgtgaaagagcactcaatcta

SEQ ID NO: 106403 - DNA, 60 bp, Artificial
  Synthetic oligonucleotide
ataacgcgtatattggtgatgccgtcacttgcgttaagccggtcaggttaggtacccctc

SEQ ID NO: 106404 - DNA, 60 bp, Artificial
  Synthetic oligonucleotide
acaagcggaaattgatttaatcgatagttatcaacgacagagagatgaggcaatgttaaa

SEQ ID NO: 106405 - DNA, 60 bp, Artificial
  Synthetic oligonucleotide
caatgttaaacatcttatcgaaatttagtgagtccctaacagataacaatctaattagaa

SEQ ID NO: 106406 - DNA, 60 bp, Artificial
  Synthetic oligonucleotide
ctaattagaatgaagggttttcatgatttaatttctcctccatcagcaagtgttggcact

SEQ ID NO: 106407 - DNA, 53 bp, Artificial
  Synthetic oligonucleotide
agttcgaaacgacctataatattgacgataaacagattacgaacactcctatc

SEQ ID NO: 106408 - DNA, 60 bp, Artificial
  Synthetic oligonucleotide
gcatcatcatctacggcaagtcaatctgatgattcatcaccatatgatatacaagcggaa

SEQ ID NO: 106409 - DNA, 60 bp, Artificial
  Synthetic oligonucleotide
ggttttcatgatttaatttctcctccatcagcaagtgttggcactcgtaaggacgccagg

SEQ ID NO: 106410 - DNA, 60 bp, Artificial
  Synthetic oligonucleotide
ccgaaattccccgaagttgattttgtcactctttctgaggacaaatatgacgagcctata

SEQ ID NO: 106411 - DNA, 60 bp, Artificial
  Synthetic oligonucleotide
ttgtaccaacatcgaaactcctctgaaatctaaactaagcagtatagtacaatcaaccga

SEQ ID NO: 106412 - DNA, 51 bp, Artificial
  Synthetic oligonucleotide
gtattcaaactccttcaactattcgctggaactgttttggctctggatcat

SEQ ID NO: 106413 - DNA, 60 bp, Artificial
  Synthetic oligonucleotide
cattacgaaaacgatctaaggatgatgttctcaaagattttacgcaaatcgtcaagcaca

SEQ ID NO: 106414 - DNA, 60 bp, Artificial
  Synthetic oligonucleotide
tgacattaaccttggcaaccccattcagttctgtgagaatacaccatctatcgatctagc

SEQ ID NO: 106415 - DNA, 60 bp, Artificial
  Synthetic oligonucleotide
cgcgtatattggtgatgccgtcacttgcgttaagccggtcaggttaggtacccctctatg

SEQ ID NO: 106416 - DNA, 60 bp, Artificial
  Synthetic oligonucleotide
aatccatcgccatcatcaagctcactcatcgatggtattgaccatatatttgacattaac

SEQ ID NO: 106417 - DNA, 60 bp, Artificial
  Synthetic oligonucleotide
cccctctatgtgattttagcacgtatctcaaagcatacaactatcaagcttttactacga

SEQ ID NO: 106418 - DNA, 60 bp, Artificial
  Synthetic oligonucleotide
acctacgttttccgaagtgacgcgcaacgggactaagagtaactatactaaactgagtaa

SEQ ID NO: 106419 - DNA, 60 bp, Artificial
  Synthetic oligonucleotide
cgcaaatcgtcaagcacatttatgtacatggcgttggaatcaaccattttagaagcggac

SEQ ID NO: 106420 - DNA, 60 bp, Artificial
  Synthetic oligonucleotide
ttttacgcaaatcgtcaagcacatttatgtacatggcgttggaatcaaccattttagaag

SEQ ID NO: 106421 - DNA, 60 bp, Artificial
  Synthetic oligonucleotide
tttttgttagctgaccaattaattatgagtgcaatgcctgacgcaattggtaccgctacg

SEQ ID NO: 106422 - DNA, 60 bp, Artificial
  Synthetic oligonucleotide
gctgaccaattaattatgagtgcaatgcctgacgcaattggtaccgctacgattatacag

SEQ ID NO: 106423 - DNA, 60 bp, Artificial
  Synthetic oligonucleotide
ccttggcaaccccattcagttctgtgagaatacaccatctatcgatctagcccacgttgt

SEQ ID NO: 106424 - DNA, 60 bp, Artificial
  Synthetic oligonucleotide
cgtacttggttttgaattgaaattgtacgagtttgaggccatatttgattatactcccac

SEQ ID NO: 106425 - DNA, 60 bp, Artificial
  Synthetic oligonucleotide
agcttttactacgatttgtaccaacatcgaaactcctctgaaatctaaactaagcagtat

SEQ ID NO: 106426 - DNA, 60 bp, Artificial
  Synthetic oligonucleotide
ggttgtggatatcttactcaatgctagtgagataatcttcacccagatggttgatgcctc

SEQ ID NO: 106427 - DNA, 60 bp, Artificial
  Synthetic oligonucleotide
catcaagctcactcatcgatggtattgaccatatatttgacattaaccttggcaacccca

SEQ ID NO: 106428 - DNA, 60 bp, Artificial
  Synthetic oligonucleotide
cccacaattagttcatggggtgtcatcttgcgttcggttgtggatatcttactcaatgct

SEQ ID NO: 106429 - DNA, 60 bp, Artificial
  Synthetic oligonucleotide
ggtacccctctatgtgattttagcacgtatctcaaagcatacaactatcaagcttttact

SEQ ID NO: 106430 - DNA, 60 bp, Artificial
  Synthetic oligonucleotide
gaactaacgaatgatacggacgtactccttcaatcccctctcttcgaaagtactaatcca

SEQ ID NO: 106431 - DNA, 60 bp, Artificial
  Synthetic oligonucleotide
gaatttagatattcattacgaaaacgatctaaggatgatgttctcaaagattttacgcaa

SEQ ID NO: 106432 - DNA, 60 bp, Artificial
  Synthetic oligonucleotide
ccgaagttgattttgtcactctttctgaggacaaatatgacgagcctatagcgcacatgc

SEQ ID NO: 106433 - DNA, 60 bp, Artificial
  Synthetic oligonucleotide
ggatctggttgttgttcacatacgtctcggaatgtcgccatcgttgcaatcagtagcttc

SEQ ID NO: 106434 - DNA, 60 bp, Artificial
  Synthetic oligonucleotide
ttggtcccagtcttagtcagcgcgattatgaattctataccttatgctaccgcctcattg

SEQ ID NO: 106435 - DNA, 60 bp, Artificial
  Synthetic oligonucleotide
cccagtcttagtcagcgcgattatgaattctataccttatgctaccgcctcattgcaggt

SEQ ID NO: 106436 - DNA, 60 bp, Artificial
  Synthetic oligonucleotide
cgcctcattgcaggttacatctccttcattgccggtttctgttccgttaaattcgcagga

SEQ ID NO: 106437 - DNA, 60 bp, Artificial
  Synthetic oligonucleotide
gtggccccaccctacccagtcccatctctagcatcccatcacggcatctttaccacaatt

SEQ ID NO: 106438 - DNA, 60 bp, Artificial
  Synthetic oligonucleotide
ctaacttcgaggcattctatgcggtgagtgaaggattcagaagtgcatactggtcttacg

SEQ ID NO: 106439 - DNA, 60 bp, Artificial
  Synthetic oligonucleotide
cattctacaccaatcgctgattccatccaaccgactgttacagatagtggatctggttgt

SEQ ID NO: 106440 - DNA, 60 bp, Artificial
  Synthetic oligonucleotide
tgttacagatagtggatctggttgttgttcacatacgtctcggaatgtcgccatcgttgc

SEQ ID NO: 106441 - DNA, 60 bp, Artificial
  Synthetic oligonucleotide
gaagtgcatactggtcttacgtatacgcatctcatggggtgtgtgaccgttctgtgtagg

SEQ ID NO: 106442 - DNA, 60 bp, Artificial
  Synthetic oligonucleotide
ctggtcttacgtatacgcatctcatggggtgtgtgaccgttctgtgtaggggccgccagc

SEQ ID NO: 106443 - DNA, 60 bp, Artificial
  Synthetic oligonucleotide
tacatctccttcattgccggtttctgttccgttaaattcgcaggacgtccgcccggagtc

SEQ ID NO: 106444 - DNA, 50 bp, Artificial
  Synthetic oligonucleotide
attcgcaggacgtccgcccggagtcaggttcggattctacgatagggtca

SEQ ID NO: 106445 - DNA, 60 bp, Artificial
  Synthetic oligonucleotide
ctcttgtgagaactttgcgctaaaccgcgctgatgtcgagtctttatcaggtgaagatgt

SEQ ID NO: 106446 - DNA, 60 bp, Artificial
  Synthetic oligonucleotide
gacgttgttgcatatctgctggcgcttggttatgactccgccgctaccacatctgtgctc

SEQ ID NO: 106447 - DNA, 60 bp, Artificial
  Synthetic oligonucleotide
ctgctggcgcttggttatgactccgccgctaccacatctgtgctcgagtcttatgttgca

SEQ ID NO: 106448 - DNA, 60 bp, Artificial
  Synthetic oligonucleotide
gtggtgcggtgacccgtctcgcgtggttaggtgactcaaaacatcgttctgacgttgttg

SEQ ID NO: 106449 - DNA, 60 bp, Artificial
  Synthetic oligonucleotide
gtcacgcttgccgctctgagacccctccgtgccaggaaatcggccaagtacgttatatgc

SEQ ID NO: 106450 - DNA, 60 bp, Artificial
  Synthetic oligonucleotide
ggtgcggtgacccgtctcgcgtggttaggtgactcaaaacatcgttctgacgttgttgca

SEQ ID NO: 106451 - DNA, 60 bp, Artificial
  Synthetic oligonucleotide
agtggccccaccctacccagtcccatctctagcatcccatcacggcatctttaccacaat

SEQ ID NO: 106452 - DNA, 60 bp, Artificial
  Synthetic oligonucleotide
gattacacccatcttgttccacgatttgaccctttctcttgtgagaactttgcgctaaac

SEQ ID NO: 106453 - DNA, 60 bp, Artificial
  Synthetic oligonucleotide
agctcagatgtcaatgattacacccatcttgttccacgatttgaccctttctcttgtgag

SEQ ID NO: 106454 - DNA, 60 bp, Artificial
  Synthetic oligonucleotide
gtatatccgacggaaagctcgttttggacatcacaagctcagatgtcaatgattacaccc

SEQ ID NO: 106455 - DNA, 60 bp, Artificial
  Synthetic oligonucleotide
agtacgacaatcttcgtatatccgacggaaagctcgttttggacatcacaagctcagatg

SEQ ID NO: 106456 - DNA, 60 bp, Artificial
  Synthetic oligonucleotide
attgcggaatcgtcacgttgaaggatgatgccactgacaccatatctgaggtcacgcttg

SEQ ID NO: 106457 - DNA, 60 bp, Artificial
  Synthetic oligonucleotide
gtgaagatgttaaacattgcggaatcgtcacgttgaaggatgatgccactgacaccatat

SEQ ID NO: 106458 - DNA, 60 bp, Artificial
  Synthetic oligonucleotide
ctttgcgctaaaccgcgctgatgtcgagtctttatcaggtgaagatgttaaacattgcgg

SEQ ID NO: 106459 - DNA, 60 bp, Artificial
  Synthetic oligonucleotide
ttaccacaattttatcattctacaccaatcgctgattccatccaaccgactgttacagat

SEQ ID NO: 106460 - DNA, 60 bp, Artificial
  Synthetic oligonucleotide
cgccagcatcagggcttagctgaggtgtgtgtgcccacatctcccttggtgttttctcgc

SEQ ID NO: 106461 - DNA, 60 bp, Artificial
  Synthetic oligonucleotide
tctgtgtaggggccgccagcatcagggcttagctgaggtgtgtgtgcccacatctccctt

SEQ ID NO: 106462 - DNA, 60 bp, Artificial
  Synthetic oligonucleotide
atctgtgctcgagtcttatgttgcagcagcgtcacaggcggcgtacatgaaggtcattgg

SEQ ID NO: 106463 - DNA, 60 bp, Artificial
  Synthetic oligonucleotide
tctgtgctcgagtcttatgttgcagcagcgtcacaggcggcgtacatgaaggtcattggt

SEQ ID NO: 106464 - DNA, 60 bp, Artificial
  Synthetic oligonucleotide
gacaccatatctgaggtcacgcttgccgctctgagacccctccgtgccaggaaatcggcc

SEQ ID NO: 106465 - DNA, 60 bp, Artificial
  Synthetic oligonucleotide
ttatgcatcatctaacttcgaggcattctatgcggtgagtgaaggattcagaagtgcata

SEQ ID NO: 106466 - DNA, 60 bp, Artificial
  Synthetic oligonucleotide
caccaagctggctgcgccaactgtgtagatgtgcgaccgatctatgcacttggtagcggc

SEQ ID NO: 106467 - DNA, 60 bp, Artificial
  Synthetic oligonucleotide
gggatgtggtcgggtggaaaagcgacgccacctttatcagattcgagaagtgagaagggg

SEQ ID NO: 106468 - DNA, 60 bp, Artificial
  Synthetic oligonucleotide
gacctggcccaattactacagagttccaccatgtctttgctttttattgttactggggat

SEQ ID NO: 106469 - DNA, 60 bp, Artificial
  Synthetic oligonucleotide
gtgggttgagactaaggagtatgagcgatctttgagattttatgagttccgacctggccc

SEQ ID NO: 106470 - DNA, 60 bp, Artificial
  Synthetic oligonucleotide
aatgtacattatgctagagagttgggcatgaaagcgagcgatgttgtagttcggattccc

SEQ ID NO: 106471 - DNA, 60 bp, Artificial
  Synthetic oligonucleotide
caccgacgcggtgttagtgtgtgaggggcttgtcgtaggtgagatgcatcggttacaacg

SEQ ID NO: 106472 - DNA, 60 bp, Artificial
  Synthetic oligonucleotide
ccgaggacggagagaaagtgaaagttcaaggtcgaacacatgtgactgcgacgagggctg

SEQ ID NO: 106473 - DNA, 60 bp, Artificial
  Synthetic oligonucleotide
aaaccccggggattattggattcaggcggcttttcccggtaatgtttatcctcccggttt

SEQ ID NO: 106474 - DNA, 60 bp, Artificial
  Synthetic oligonucleotide
ggggtggtttgagctggatgtcccgggggatgatattggtcgtggcctgcagttgatggg

SEQ ID NO: 106475 - DNA, 60 bp, Artificial
  Synthetic oligonucleotide
ctaatttgttagatgagatgttagtttttgatattgggggacggaatggcgagttgtcgg

SEQ ID NO: 106476 - DNA, 60 bp, Artificial
  Synthetic oligonucleotide
ggaagaggccattcctaaaggtcaacgcgttaggctgccgggtgggagagcgatatggga

SEQ ID NO: 106477 - DNA, 59 bp, Artificial
  Synthetic oligonucleotide
aaatagcattgtggcggcgtatgaggcggctggtcgcaacaacagaaaccaggtagcga

SEQ ID NO: 106478 - DNA, 60 bp, Artificial
  Synthetic oligonucleotide
cttggggtggtcgtgttttcattcgtgatcagttggttccgacgcgagcaaaccccgggg

SEQ ID NO: 106479 - DNA, 60 bp, Artificial
  Synthetic oligonucleotide
cggcgaatcaggaagagccttttgaggagtggttgtatgagacccaggctatggagcgag

SEQ ID NO: 106480 - DNA, 60 bp, Artificial
  Synthetic oligonucleotide
ctaacaagaagagtaatatagtggtgttcaattacgcgcgtccatatgagaggggtccag

SEQ ID NO: 106481 - DNA, 58 bp, Artificial
  Synthetic oligonucleotide
aggggtccagtttttgagaatctgattcgtgatacagtttctcttcgggaagcggcgg

SEQ ID NO: 106482 - DNA, 60 bp, Artificial
  Synthetic oligonucleotide
ggccggtgatccagctacgccagagtatatagcgcaggcaaagctttgggctaacaagaa

SEQ ID NO: 106483 - DNA, 60 bp, Artificial
  Synthetic oligonucleotide
gagctgcagcgtatcttgcgtgaagtgtcgatgacgaggtttgttgctgtggccggtgat

SEQ ID NO: 106484 - DNA, 60 bp, Artificial
  Synthetic oligonucleotide
ttgcgtgaagtgtcgatgacgaggtttgttgctgtggccggtgatccagctacgccagag

SEQ ID NO: 106485 - DNA, 60 bp, Artificial
  Synthetic oligonucleotide
ggtgaggcaggcgtataagagggtggttgaaaacttggatcatatgtacgcctggcatta

SEQ ID NO: 106486 - DNA, 60 bp, Artificial
  Synthetic oligonucleotide
gtacggcatgaaactacttctgaggcgtatggaatgcaatgtggtggtatcatcggagga

SEQ ID NO: 106487 - DNA, 60 bp, Artificial
  Synthetic oligonucleotide
gtctctggcgaaaatgagtttgtctgagcttcgcgagccccattggaacggtgttcgggt

SEQ ID NO: 106488 - DNA, 60 bp, Artificial
  Synthetic oligonucleotide
taaagcgtggttgatgtctctggcgaaaatgagtttgtctgagcttcgcgagccccattg

SEQ ID NO: 106489 - DNA, 60 bp, Artificial
  Synthetic oligonucleotide
caggctatggagcgagtaattccgacaacgtgggaatcagaaattgtcgatgcgcgtggg

SEQ ID NO: 106490 - DNA, 60 bp, Artificial
  Synthetic oligonucleotide
gatgcgcgtgggatgctagtgtcaatcttaacgtttcattttcgcttcgcggggtggttt

SEQ ID NO: 106491 - DNA, 60 bp, Artificial
  Synthetic oligonucleotide
gcgacgagggctgtccagcatgagaaatgtaatccgaatgaggatatcatctactcaagg

SEQ ID NO: 106492 - DNA, 60 bp, Artificial
  Synthetic oligonucleotide
ctactcaagggaatttgctcgggaactggcgctgacgggaaaaatcaaggaggctggggc

SEQ ID NO: 106493 - DNA, 60 bp, Artificial
  Synthetic oligonucleotide
tgggtgcgtgaaggtcgaccgaaacagagaaccgctaagctttgtcatcttttgactaga

SEQ ID NO: 106494 - DNA, 58 bp, Artificial
  Synthetic oligonucleotide
tttgactagaatattgacagcattcttttcttaccgtggcgggtcgtcaagtttggtg

SEQ ID NO: 106495 - DNA, 60 bp, Artificial
  Synthetic oligonucleotide
aattttttccatcatattatattacttgcgtttgaagcatgtggatcaagaggttcgata

SEQ ID NO: 106496 - DNA, 60 bp, Artificial
  Synthetic oligonucleotide
agctaacattgatctggtatggggatggcggggttgagctgcagcgtatcttgcgtgaag

SEQ ID NO: 106497 - DNA, 60 bp, Artificial
  Synthetic oligonucleotide
acatgaaggtgatgcattaatggcggcagagttatttgtcaccgacgcggtgttagtgtg

SEQ ID NO: 106498 - DNA, 60 bp, Artificial
  Synthetic oligonucleotide
agccccattggaacggtgttcgggtgcaactatcgagggatcatagaatcttgtactatg

SEQ ID NO: 106499 - DNA, 60 bp, Artificial
  Synthetic oligonucleotide
ccaatctattgtcggcatgtcgtagttctggcaaccaggccatgatcgcgtagtctccgc

SEQ ID NO: 106500 - DNA, 60 bp, Artificial
  Synthetic oligonucleotide
ccgcaagaggttttatcctgaatgggtttggcagattgatttggccaatctattgtcggc

SEQ ID NO: 106501 - DNA, 60 bp, Artificial
  Synthetic oligonucleotide
taacggtagattggggcacttaacctcatcgtggtttcagagtctgtattgtggggccgc

SEQ ID NO: 106502 - DNA, 60 bp, Artificial
  Synthetic oligonucleotide
ctcccggtttatgtgaggatttcaatattgatcctgatgcggggattttgcctctgagat

SEQ ID NO: 106503 - DNA, 60 bp, Artificial
  Synthetic oligonucleotide
tttcggctatcggtcgatttagatgttgatcgagtcttgaggaatatgagacatgaaggt

SEQ ID NO: 106504 - DNA, 60 bp, Artificial
  Synthetic oligonucleotide
cagggcagggcgtatggtgggagcatatggtgcggggtcaacctctggcatgttcaatca

SEQ ID NO: 106505 - DNA, 60 bp, Artificial
  Synthetic oligonucleotide
ctagttgtagattacgaggatggacctcttcacgtgtctattcgtgttaggcttttgaat

SEQ ID NO: 106506 - DNA, 60 bp, Artificial
  Synthetic oligonucleotide
ctgactgcgtggctcatgggtggaagcaaactcgagatgcgagggatgttcgagagtggc

SEQ ID NO: 106507 - DNA, 60 bp, Artificial
  Synthetic oligonucleotide
gcgagggatgttcgagagtggcaacgatctgctgcgattatgtgcgcggagaggtatatg

SEQ ID NO: 106508 - DNA, 60 bp, Artificial
  Synthetic oligonucleotide
gttgatgggaagcattaacaaggttgtgcatgttagctgtttcgtacaaaacggtagacg

SEQ ID NO: 106509 - DNA, 60 bp, Artificial
  Synthetic oligonucleotide
ggtgagttagtaagagatggcacggtcgcaatttcattcggacctgggatttattcacgt

SEQ ID NO: 106510 - DNA, 60 bp, Artificial
  Synthetic oligonucleotide
gaggtgttggaagggtgtgcgggatacatggattaagttgcggctcggttatgaggaggg

SEQ ID NO: 106511 - DNA, 60 bp, Artificial
  Synthetic oligonucleotide
tcacactatctggtttccagaaggagatttcgagaccatgatgggtgcaatgcttcgaga

SEQ ID NO: 106512 - DNA, 60 bp, Artificial
  Synthetic oligonucleotide
attctgttgttgtctagctcgaggtgtgtcacgtgatcaagtgcggacgctgaaggatgt

SEQ ID NO: 106513 - DNA, 60 bp, Artificial
  Synthetic oligonucleotide
tgaaggatgtacggaatgtagctcaggcgcagattaggcacgttgtttcagggcagggcg

SEQ ID NO: 106514 - DNA, 60 bp, Artificial
  Synthetic oligonucleotide
gggtgtgcgggatacatggattaagttgcggctcggttatgaggagggaggagtgaacga

SEQ ID NO: 106515 - DNA, 60 bp, Artificial
  Synthetic oligonucleotide
caatgcttcgagattcgtttccagcaggttgtcatgcacacttaaatattccagtgcctc

SEQ ID NO: 106516 - DNA, 60 bp, Artificial
  Synthetic oligonucleotide
tatgttttctcatttacgtgatgattctgattatcggtctgcccttactgactgcgtggc

SEQ ID NO: 106517 - DNA, 60 bp, Artificial
  Synthetic oligonucleotide
atacgacagaccctactgactgacgagggcttgatgatagaaacacgaccattacagatg

SEQ ID NO: 106518 - DNA, 60 bp, Artificial
  Synthetic oligonucleotide
gctacacgcctgcagtattcacgtcgtagtgcgttcgtggtccgaagtgttattggctgc

SEQ ID NO: 106519 - DNA, 60 bp, Artificial
  Synthetic oligonucleotide
gtctacgctacacgcctgcagtattcacgtcgtagtgcgttcgtggtccgaagtgttatt

SEQ ID NO: 106520 - DNA, 60 bp, Artificial
  Synthetic oligonucleotide
ccctactgactgacgagggcttgatgatagaaacacgaccattacagatgcttggtccga

SEQ ID NO: 106521 - DNA, 60 bp, Artificial
  Synthetic oligonucleotide
tggccttggcggaatgcagactagaataattaatcgagcgtcatattcagcgttagattc

SEQ ID NO: 106522 - DNA, 60 bp, Artificial
  Synthetic oligonucleotide
gcaggtgctatcgacgcagttggaattgtcttatcggttggccttggcggaatgcagact

SEQ ID NO: 106523 - DNA, 60 bp, Artificial
  Synthetic oligonucleotide
aattgatctcaacaccaattgaactgaatgagagcatacgacagaccctactgactgacg

SEQ ID NO: 106524 - DNA, 60 bp, Artificial
  Synthetic oligonucleotide
ttaaccggttaccaggtaatttgttttattttccagcagttatacttccacgtgttaaac

SEQ ID NO: 106525 - DNA, 60 bp, Artificial
  Synthetic oligonucleotide
acccaataataatccagtacttaccgatgcaccacgtatctactaccaaatgaatgaagt

SEQ ID NO: 106526 - DNA, 57 bp, Artificial
  Synthetic oligonucleotide
taaccatcttcaactctacgcattacacgttggtgaaaccaaatatgtaaaacttgg

SEQ ID NO: 106527 - DNA, 60 bp, Artificial
  Synthetic oligonucleotide
aaataaatcccattatgtcaagcctcgtcaatataccaattcctaacccacttaccccac

SEQ ID NO: 106528 - DNA, 60 bp, Artificial
  Synthetic oligonucleotide
gcttttgaaatatgatactgctccagtacatgctagagttgtcaataagattacacgaag

SEQ ID NO: 106529 - DNA, 60 bp, Artificial
  Synthetic oligonucleotide
cccctaagttgtatcgtcatccgatgcgtgaatttcaagatcttaaccggttaccaggta

SEQ ID NO: 106530 - DNA, 60 bp, Artificial
  Synthetic oligonucleotide
cactcgtgagattagaaactttttcgctcaaggaaagttgacaaaggtgaagttgaataa

SEQ ID NO: 106531 - DNA, 60 bp, Artificial
  Synthetic oligonucleotide
tcctcagctaccgaccaatgtgaaattatcactgaatgaaagatgccttgttagttattt

SEQ ID NO: 106532 - DNA, 60 bp, Artificial
  Synthetic oligonucleotide
gcacatattgaagttgattgttctgagttttcggtacatctacttttaaatccatacggc

SEQ ID NO: 106533 - DNA, 60 bp, Artificial
  Synthetic oligonucleotide
cttttaaatccatacggctatacatcagatagattggttaatgctgatgtttttactgac

SEQ ID NO: 106534 - DNA, 60 bp, Artificial
  Synthetic oligonucleotide
acatctcccgccattagtgtgtcaatcccagatcaaccatctacgattggagatcaatca

SEQ ID NO: 106535 - DNA, 60 bp, Artificial
  Synthetic oligonucleotide
actaacgactaaccaattccttacgtcaacctcagctgatgaccgtaatctgtttaatca

SEQ ID NO: 106536 - DNA, 60 bp, Artificial
  Synthetic oligonucleotide
ggatagtttcacctttactcgaataactgggggacagtcagttcaatgcaaactaccaac

SEQ ID NO: 106537 - DNA, 60 bp, Artificial
  Synthetic oligonucleotide
gttgacacctaattgggattcgtttgaggtcgacaattattcaacttttgagtctctacc

SEQ ID NO: 106538 - DNA, 60 bp, Artificial
  Synthetic oligonucleotide
ttagttattttgttggtttacggtgctgtttatggatgtcgctatttcaacttgatcgta

SEQ ID NO: 106539 - DNA, 60 bp, Artificial
  Synthetic oligonucleotide
aacgatcttgaagacgatttattccatttgacgtcaaaaatatcaaaactgtcgcaagca

SEQ ID NO: 106540 - DNA, 60 bp, Artificial
  Synthetic oligonucleotide
gtcgcaagcatcttttagacccagtgttctccaatttgattcaactgttggtcagcaact

SEQ ID NO: 106541 - DNA, 60 bp, Artificial
  Synthetic oligonucleotide
gtcagcaactattcaatctggtagtagacgtccaaacacagggaagattgttactaacga

SEQ ID NO: 106542 - DNA, 60 bp, Artificial
  Synthetic oligonucleotide
caatctggtagtagacgtccaaacacagggaagattgttactaacgactaaccaattcct

SEQ ID NO: 106543 - DNA, 60 bp, Artificial
  Synthetic oligonucleotide
ccgttaatgacgttgtttcacatgttagagtattgtctaaggcttttcaggatgcaacga

SEQ ID NO: 106544 - DNA, 60 bp, Artificial
  Synthetic oligonucleotide
gttaagttcacttactgggttgattggaatgattgttatgccattttgcccgattgctgg

SEQ ID NO: 106545 - DNA, 60 bp, Artificial
  Synthetic oligonucleotide
caattggccttattctcggaagattgcatacaattgaagagacattatctcacttaattt

SEQ ID NO: 106546 - DNA, 60 bp, Artificial
  Synthetic oligonucleotide
cacttaatttcgaccgttaatgacgttgtttcacatgttagagtattgtctaaggctttt

SEQ ID NO: 106547 - DNA, 60 bp, Artificial
  Synthetic oligonucleotide
acagagattgatattgatctacttttacgagcagctattgattcgattggacgattacga

SEQ ID NO: 106548 - DNA, 60 bp, Artificial
  Synthetic oligonucleotide
cttcctgaatatacaccagagcttcatacagcaattagatcacgatttgatgagacactt

SEQ ID NO: 106549 - DNA, 60 bp, Artificial
  Synthetic oligonucleotide
cacgttggattccaagtgacctgtttgccgaggctattggtgttgaggaagcacatattg

SEQ ID NO: 106550 - DNA, 60 bp, Artificial
  Synthetic oligonucleotide
cttaccccacacgacgatgaattacaccttgcacttgcctcagtttctagacaactccgc

SEQ ID NO: 106551 - DNA, 60 bp, Artificial
  Synthetic oligonucleotide
ccccacacgacgatgaattacaccttgcacttgcctcagtttctagacaactccgcttac

SEQ ID NO: 106552 - DNA, 60 bp, Artificial
  Synthetic oligonucleotide
ttgcttcggacagtgagaaacgtcttgcattagttgatgctcaaaagtacattgaaagat

SEQ ID NO: 106553 - DNA, 60 bp, Artificial
  Synthetic oligonucleotide
ccattatgtcaagcctcgtcaatataccaattcctaacccacttaccccacacgacgatg

SEQ ID NO: 106554 - DNA, 60 bp, Artificial
  Synthetic oligonucleotide
ttacacgaaggattggatcgaaatatgtacgcattaatacctattcaggtgttgctgatg

SEQ ID NO: 106555 - DNA, 60 bp, Artificial
  Synthetic oligonucleotide
tgggttgattggaatgattgttatgccattttgcccgattgctggaattggactcctggc

SEQ ID NO: 106556 - DNA, 60 bp, Artificial
  Synthetic oligonucleotide
ggcacgcccaggtcattttgagttacgcaacgttatcgacgagaacagtggcaagttgac

SEQ ID NO: 106557 - DNA, 60 bp, Artificial
  Synthetic oligonucleotide
cctattcaggtgttgctgatggattaccagagatggcacatctgacggcacgcccaggtc

SEQ ID NO: 106558 - DNA, 60 bp, Artificial
  Synthetic oligonucleotide
ggtgactatgttgcaggtgctatcgacgcagttggaattgtcttatcggttggccttggc

SEQ ID NO: 106559 - DNA, 60 bp, Artificial
  Synthetic oligonucleotide
tgtacaaacacgttggattccaagtgacctgtttgccgaggctattggtgttgaggaagc

SEQ ID NO: 106560 - DNA, 60 bp, Artificial
  Synthetic oligonucleotide
agaggatccatcagttgcgatactcgggactttgatgtatgctccacaaattagtaagca

SEQ ID NO: 106561 - DNA, 54 bp, Artificial
  Synthetic oligonucleotide
gatattaccgtgtaggaggttacgagggtgtttttcataaattaacaaccgaac

SEQ ID NO: 106562 - DNA, 60 bp, Artificial
  Synthetic oligonucleotide
cacgaagagagggtttgagcgatctttctgacggttcggcagttgttgagctcgaagcca

SEQ ID NO: 106563 - DNA, 60 bp, Artificial
  Synthetic oligonucleotide
gagtatacggtattcagaattgtagctgtcgtcagtgacatcgaatctccaaccgtgaac

SEQ ID NO: 106564 - DNA, 60 bp, Artificial
  Synthetic oligonucleotide
tgagtttggagttgagtatacggtattcagaattgtagctgtcgtcagtgacatcgaatc

SEQ ID NO: 106565 - DNA, 60 bp, Artificial
  Synthetic oligonucleotide
gcaaggttacgagcaacaccacgttcggctgaaggaaagtcatttgatgatgagtttgga

SEQ ID NO: 106566 - DNA, 60 bp, Artificial
  Synthetic oligonucleotide
acaccaatagtattcgttatgaaaagacacatccgatgaagtttttagttgttgagcgac

SEQ ID NO: 106567 - DNA, 60 bp, Artificial
  Synthetic oligonucleotide
ccttatctgatcgtcttggagtgagggggtccccccacacccctcacgactgaccacaca

SEQ ID NO: 106568 - DNA, 60 bp, Artificial
  Synthetic oligonucleotide
ctcaatggacttgcagtcatttgaaaaggaattgtttatttaatgggatgtgtgtcaagc

SEQ ID NO: 106569 - DNA, 60 bp, Artificial
  Synthetic oligonucleotide
gtgtaatcactttaatgaatgacacattacattctataattcaggatcctggaatggcgt

SEQ ID NO: 106570 - DNA, 60 bp, Artificial
  Synthetic oligonucleotide
cactttaatgaatgacacattacattctataattcaggatcctggaatggcgtattttcc

SEQ ID NO: 106571 - DNA, 60 bp, Artificial
  Synthetic oligonucleotide
gcaatgtcaaatacaacgggtgctacgcaaacacaaaaagcggagaaggctgcattcgca

SEQ ID NO: 106572 - DNA, 60 bp, Artificial
  Synthetic oligonucleotide
gatgtaagttggatttcgctttggtttgcctttaatcggtcgtttgagccaacgcatcgt

SEQ ID NO: 106573 - DNA, 60 bp, Artificial
  Synthetic oligonucleotide
gtcaaacacaactggtgcaacgcaaacacaaaaagcggagaaggctgcattcgcatcgta

SEQ ID NO: 106574 - DNA, 60 bp, Artificial
  Synthetic oligonucleotide
gtgacatggtagacgggattaaactacagttggacgcatctagacagtgtcatgagtgtc

SEQ ID NO: 106575 - DNA, 60 bp, Artificial
  Synthetic oligonucleotide
ggcttttaaaagttctgttccgagagagcgcgtgcggaaagatggaaaagcttaccgacc

SEQ ID NO: 106576 - DNA, 50 bp, Artificial
  Synthetic oligonucleotide
gccatatcgcgtatggctcaagccttaatcccgtttaaccaatccggtca

SEQ ID NO: 106577 - DNA, 60 bp, Artificial
  Synthetic oligonucleotide
cagccatatcgcgtgtggctcaagccttaatcccgtttaaccaatccggtcagcaccgga

SEQ ID NO: 106578 - DNA, 60 bp, Artificial
  Synthetic oligonucleotide
acagtcagtcatatcgcgtgtggctcaagccttaatcccgtttaaccaatccggtgagcg

SEQ ID NO: 106579 - DNA, 60 bp, Artificial
  Synthetic oligonucleotide
ctgttccgagagagcgcgtgcggaaagatggataaacttaccgacctcaattacacattg

SEQ ID NO: 106580 - DNA, 60 bp, Artificial
  Synthetic oligonucleotide
cgcgtgtggctcaagccttaatcccgtttaaccaatccggtgagcgccggacgttaatgg

SEQ ID NO: 106581 - DNA, 60 bp, Artificial
  Synthetic oligonucleotide
gggttttaaaagttctgttccgagagagcgcgtgcggaaagatggaaaagcttaccgacc

SEQ ID NO: 106582 - DNA, 60 bp, Artificial
  Synthetic oligonucleotide
taatcccgtttaaccaatccggtcagcaccggacgttaatggaaggaacggtcttaatgt

SEQ ID NO: 106583 - DNA, 60 bp, Artificial
  Synthetic oligonucleotide
cccgtttaaccaatccggtcagcaccggacgttaatggaaggaacggtcttaatgtgacc

SEQ ID NO: 106584 - DNA, 60 bp, Artificial
  Synthetic oligonucleotide
gccatatcgcgtgtggctcaagccttaatcccgtttaaccaatccggtcagcaccggacg

SEQ ID NO: 106585 - DNA, 53 bp, Artificial
  Synthetic oligonucleotide
caaacgtatattaaacccttttgtgcggctttcgggataataaatttagctgc

SEQ ID NO: 106586 - DNA, 60 bp, Artificial
  Synthetic oligonucleotide
ggcgatacaaacgtatattaaacccttttgtgcggctttcggaataataaatttagccgc

SEQ ID NO: 106587 - DNA, 60 bp, Artificial
  Synthetic oligonucleotide
ggcaatacagacgtatattaaacccttttgtgcggctttcggaataataaatttagccgc

SEQ ID NO: 106588 - DNA, 60 bp, Artificial
  Synthetic oligonucleotide
aatacaacaacggaggcaatacaaacgtatattaaacccttttgtgcggctttcggaata

SEQ ID NO: 106589 - DNA, 60 bp, Artificial
  Synthetic oligonucleotide
ggcgatacaaacgtatattaaacccttttgtgcggctttcggaataataaatttggccgc

SEQ ID NO: 106590 - DNA, 60 bp, Artificial
  Synthetic oligonucleotide
ggcaatacaaacgtatattaaacccttttgtgcggctttcggaataataaatttagccgc

SEQ ID NO: 106591 - DNA, 60 bp, Artificial
  Synthetic oligonucleotide
taatacaacgacagaggcgatacaaacgtatattaaacccttttgtgcggctttcgggat

SEQ ID NO: 106592 - DNA, 60 bp, Artificial
  Synthetic oligonucleotide
aatacaacaacggaggcaatacagacgtatattaaacccttttgtgcggctttcggaata

SEQ ID NO: 106593 - DNA, 60 bp, Artificial
  Synthetic oligonucleotide
gaccagttgacattgtagatatgacgaaggaatttaatcagaagaatataaaaacgctag

SEQ ID NO: 106594 - DNA, 60 bp, Artificial
  Synthetic oligonucleotide
ccagttgacattgtagatatgacgaaggaatttaatcagaagaatataaaaacgctagat

SEQ ID NO: 106595 - DNA, 60 bp, Artificial
  Synthetic oligonucleotide
atccgctccaatgcggctattccagccggggcatatcaatttgttgttcctgcctgggca

SEQ ID NO: 106596 - DNA, 60 bp, Artificial
  Synthetic oligonucleotide
gtagccgtggaggaaatgcccggtcctgaatctggaacgctcgtagtcaggtggacggtt

SEQ ID NO: 106597 - DNA, 60 bp, Artificial
  Synthetic oligonucleotide
cgccacctgccactatgtcacgccagatgtggttagacacaagtgctctccttgaagcca

SEQ ID NO: 106598 - DNA, 51 bp, Artificial
  Synthetic oligonucleotide
gatcactggttccatggatacagtatatgcaaattcatcacagcaagaaac

SEQ ID NO: 106599 - DNA, 60 bp, Artificial
  Synthetic oligonucleotide
aaatgtgttgggagcgggagattcaattccagatcctttaagcccaggagagcgaggtat

SEQ ID NO: 106600 - DNA, 60 bp, Artificial
  Synthetic oligonucleotide
acaagcggtattattgaatgtgttgggagcgggagattcaattccagatcctttaagtcc

SEQ ID NO: 106601 - DNA, 60 bp, Artificial
  Synthetic oligonucleotide
aggagaccaagaggattcttcctaaaactgctatgcgatttaaagtgccattaagccagc

SEQ ID NO: 106602 - DNA, 60 bp, Artificial
  Synthetic oligonucleotide
gctgcaccttgggattcagacgacgtgttcatattgcattgtgttgcaccacatcatgcg

SEQ ID NO: 106603 - DNA, 66 bp, Artificial
  Synthetic oligonucleotide
gcattacagaaagagatttcagatagaagtaaaattgagagagagatggttgttgaatatcgtaac

SEQ ID NO: 106604 - DNA, 60 bp, Artificial
  Synthetic oligonucleotide
cagatagaagtaaaattgagagaaagatggttgttgaatatcgtaacaagattgaagcgc

SEQ ID NO: 106605 - DNA, 60 bp, Artificial
  Synthetic oligonucleotide
gaatgtgttgggagcgggagattcaattccagatcctttaagtccaggagaacgaggtat

SEQ ID NO: 106606 - DNA, 60 bp, Artificial
  Synthetic oligonucleotide
tgcattacagaaagagatttcagatagaagtaaaattgagagagagatggttgttgaata

SEQ ID NO: 106607 - DNA, 60 bp, Artificial
  Synthetic oligonucleotide
tgcgattaaggtaggcctaagcttaattggagagattgacttgcccgagtttatgcgtta

SEQ ID NO: 106608 - DNA, 60 bp, Artificial
  Synthetic oligonucleotide
aaatgtgttgggagcgggagattcaattccagatcctttaagtccaggagagcgaggtat

SEQ ID NO: 106609 - DNA, 60 bp, Artificial
  Synthetic oligonucleotide
agcgtcatacatcaacgcagattagcgcgttcacgaggcgcgcacccgatttatttagga

SEQ ID NO: 106610 - DNA, 60 bp, Artificial
  Synthetic oligonucleotide
tgcgattaaggtaggcctaagcttaattcgagagattgacttgcccgagtttatgcgtta

SEQ ID NO: 106611 - DNA, 60 bp, Artificial
  Synthetic oligonucleotide
gtgaggatgagttttacggaattttcatcagttccgctagatggtttcgaattaccatta

SEQ ID NO: 106612 - DNA, 60 bp, Artificial
  Synthetic oligonucleotide
gatgcggtgaggatgagttttacggaattttcatcagttccgctagatggtttcgaatta

SEQ ID NO: 106613 - DNA, 60 bp, Artificial
  Synthetic oligonucleotide
actactacaccacaaactgaacgtatgatgcgagtaaattggaagaaagggggcaagctt

SEQ ID NO: 106614 - DNA, 60 bp, Artificial
  Synthetic oligonucleotide
tcgtcctatttctattatagagtgtagaagaagactactccagaattgtatgatgtgacc

SEQ ID NO: 106615 - DNA, 60 bp, Artificial
  Synthetic oligonucleotide
gaatttccgtttggctagcggatagctccttttaatgtgtggtattgaatataccacagt

SEQ ID NO: 106616 - DNA, 60 bp, Artificial
  Synthetic oligonucleotide
agattcgtcctatttctattatagagtgtagaagaagactactccagaattgtatgatgt

SEQ ID NO: 106617 - DNA, 60 bp, Artificial
  Synthetic oligonucleotide
ctgttgtgttcgttcattctatgcctgagctgttcgaggccatgggtggatgtgttgctg

SEQ ID NO: 106618 - DNA, 60 bp, Artificial
  Synthetic oligonucleotide
gcctgacttaaagtctgttgtctttgttcattctatgcctgagctgttcgaggccatggg

SEQ ID NO: 106619 - DNA, 50 bp, Artificial
  Synthetic oligonucleotide
aagccggtgggattggtgaccggtgcaggatgctgatctcccttgcagtc

SEQ ID NO: 106620 - DNA, 60 bp, Artificial
  Synthetic oligonucleotide
tcctgagttgaagactgttgtgttcgttcattctatgcctgagctgttcgaggccatggg

SEQ ID NO: 106621 - DNA, 60 bp, Artificial
  Synthetic oligonucleotide
gctacctacaagctttaactgcctacctaacttattttagtgctaaagtaggtcaagctg

SEQ ID NO: 106622 - DNA, 60 bp, Artificial
  Synthetic oligonucleotide
ttttgctacctacaagctttaactgcctacctaacttattttagtgctaaagtaggtcaa

SEQ ID NO: 106623 - DNA, 60 bp, Artificial
  Synthetic oligonucleotide
agctagtcagaactctgaaccattaatcgttcccgcaagtagttcttcttttgcggcgac

SEQ ID NO: 106624 - DNA, 60 bp, Artificial
  Synthetic oligonucleotide
tccgtcataaccggaaactttgggtcctctggaccaactaatgctcactacaatcagaac

SEQ ID NO: 106625 - DNA, 60 bp, Artificial
  Synthetic oligonucleotide
cagaactctgaaccattaatcgttcccgcaagtagttcttcttttgcggcgacctctgac

SEQ ID NO: 106626 - DNA, 60 bp, Artificial
  Synthetic oligonucleotide
cggaactggtgacggagttgaacaatactacaaatttgactgcgaagaaggaatgtccgc

SEQ ID NO: 106627 - DNA, 60 bp, Artificial
  Synthetic oligonucleotide
tttgcttaaggaatcgtccaaaggacgaggatcaagcacacccgatgctagacatactgc

SEQ ID NO: 106628 - DNA, 60 bp, Artificial
  Synthetic oligonucleotide
ggaactggtgacggagttgaacaatactacaaatttgactgcgaagaaggaatgtccgcg

SEQ ID NO: 106629 - DNA, 60 bp, Artificial
  Synthetic oligonucleotide
cgttatgtttttatctggtggtggcgatcttggtctactagttatgagtagatatcaaga

SEQ ID NO: 106630 - DNA, 60 bp, Artificial
  Synthetic oligonucleotide
aatattttgaatatccggctgaagatgggcattccaccctatattcggacgttatgtttt

SEQ ID NO: 106631 - DNA, 60 bp, Artificial
  Synthetic oligonucleotide
cacgacgggtgtattcacatcgggagtagctcacgatctgcgtaaacttacacagatact

SEQ ID NO: 106632 - DNA, 60 bp, Artificial
  Synthetic oligonucleotide
cacagatacttgagaccttttctcttgaacggtgatatccagcctggtagtaatgaaccc

SEQ ID NO: 106633 - DNA, 60 bp, Artificial
  Synthetic oligonucleotide
gcaaatttgtaatgaatttcgtcacgggcctatccccgggttggcaaacgggatcgacgc

SEQ ID NO: 106634 - DNA, 60 bp, Artificial
  Synthetic oligonucleotide
ggagagtgcggccgtaacaagcgttggtcagggacttgaaaagactgggaacaacgtgcg

SEQ ID NO: 106635 - DNA, 60 bp, Artificial
  Synthetic oligonucleotide
tcattaactcaaggtgttgacaatgggccgtcaagggaaatcgaggcgctcaaaaaacaa

SEQ ID NO: 106636 - DNA, 55 bp, Artificial
  Synthetic oligonucleotide
tcattaactcaaggtgttgacaatgggccgtcaagggaaatcgaggcgctcaaaa

SEQ ID NO: 106637 - DNA, 60 bp, Artificial
  Synthetic oligonucleotide
tttccgcattgggtcagcgagtcgatgctggagaacaaagaattagcgagctggatacta

SEQ ID NO: 106638 - DNA, 60 bp, Artificial
  Synthetic oligonucleotide
gggtcagcgagtcgatgctggagaacaaagaattagcgagctggatactatcacgaacga

SEQ ID NO: 106639 - DNA, 60 bp, Artificial
  Synthetic oligonucleotide
gcgggctatcgcctcgatcacagcagatgtgggcggaatcaataacagtgtttccgcatt

SEQ ID NO: 106640 - DNA, 60 bp, Artificial
  Synthetic oligonucleotide
cgcctcgatcacagcagatgtgggcggaatcaataacagtgtttccgcattgggtcagcg

SEQ ID NO: 106641 - DNA, 60 bp, Artificial
  Synthetic oligonucleotide
agatgtcggcgcattaagaactgatctggcggcgttaaataccagggttactacggaatt

SEQ ID NO: 106642 - DNA, 60 bp, Artificial
  Synthetic oligonucleotide
cggcgcattaagaactgatctggcggcgttaaataccagggttactacggaattgtctga

SEQ ID NO: 106643 - DNA, 60 bp, Artificial
  Synthetic oligonucleotide
ctggatactatcacgaacgatctctctgtcagagcatccactttggaagcagatgtcggc

SEQ ID NO: 106644 - DNA, 60 bp, Artificial
  Synthetic oligonucleotide
ggatactatcacgaacgatctctctgtcagagcatccactttggaagcagatgtcggcgc

SEQ ID NO: 106645 - DNA, 60 bp, Artificial
  Synthetic oligonucleotide
ctcttccgctaacattgttactttaagctcgaactataggatgagaactggacagtggtc

SEQ ID NO: 106646 - DNA, 60 bp, Artificial
  Synthetic oligonucleotide
ataggatgagaactggacagtggtcgggggacttagagtaccagaccccaactctaagct

SEQ ID NO: 106647 - DNA, 60 bp, Artificial
  Synthetic oligonucleotide
ctacggaattgtctgatgtgagaagtagtttgagtgcgctgacagccagccttcaggctt

SEQ ID NO: 106648 - DNA, 60 bp, Artificial
  Synthetic oligonucleotide
atgtgagaagtagtttgagtgcgctgacagccagccttcaggctttggagagtgcggccg

SEQ ID NO: 106649 - DNA, 60 bp, Artificial
  Synthetic oligonucleotide
ccgggttggcaaacgggatcgacgcaaccgtcgtcaacaacagatccgatgtcgacaacg

SEQ ID NO: 106650 - DNA, 58 bp, Artificial
  Synthetic oligonucleotide
ccgggttggcaaacgggatcgacgcaaccgtcgtcaacaacagatccgatgtcgacaa

SEQ ID NO: 106651 - DNA, 56 bp, Artificial
  Synthetic oligonucleotide
gtcgacaacgttcgcagccgtacaatttgtagatggatcgaatagagtggatgctt

SEQ ID NO: 106652 - DNA, 60 bp, Artificial
  Synthetic oligonucleotide
cggaatgggtggatggggagttggaaatatctaattacggtggaacctatgcagctcatc

SEQ ID NO: 106653 - DNA, 60 bp, Artificial
  Synthetic oligonucleotide
ggaatgggtggatggggagttggaaatatctaattacggtggaacctatgcagctcatcg

SEQ ID NO: 106654 - DNA, 60 bp, Artificial
  Synthetic oligonucleotide
gcagctcatcgtaatgtcgactgggcgcctatgacaattatgtatccatgcttaggctga

SEQ ID NO: 106655 - DNA, 60 bp, Artificial
  Synthetic oligonucleotide
gagtcgcccagcaacaacagtccatcactagcatcactgcacagctgggaaccattgaca

SEQ ID NO: 106656 - DNA, 60 bp, Artificial
  Synthetic oligonucleotide
gtcgactgggcgcctatgacaattatgtatccatgcttaggctgaagctcagcgtacgcc

SEQ ID NO: 106657 - DNA, 60 bp, Artificial
  Synthetic oligonucleotide
cccattagagctagactcttccgctaacattgttactttaagctcgaactataggatgag

SEQ ID NO: 106658 - DNA, 60 bp, Artificial
  Synthetic oligonucleotide
ctggtggggtgagactgctaagacttttgtatgaagcatcggatttgagagtagtaaatc

SEQ ID NO: 106659 - DNA, 60 bp, Artificial
  Synthetic oligonucleotide
gacacccgacttagtgacattagcaatagacttactgaaaacgagcgggctatcgcctcg

SEQ ID NO: 106660 - DNA, 60 bp, Artificial
  Synthetic oligonucleotide
accattgacacccgacttagtgacattagcaatagacttactgaaaacgagcgggctatc

SEQ ID NO: 106661 - DNA, 60 bp, Artificial
  Synthetic oligonucleotide
cacaactgtcttctgatgtcagtgggcttagtattagagtcgcccagcaacaacagtcca

SEQ ID NO: 106662 - DNA, 60 bp, Artificial
  Synthetic oligonucleotide
caaaaaacaaatcacacaactgtcttctgatgtcagtgggcttagtattagagtcgccca

SEQ ID NO: 106663 - DNA, 60 bp, Artificial
  Synthetic oligonucleotide
cgcccagcaacaacagtccatcactagcatcactgcacagctgggaaccattgacacccg

SEQ ID NO: 106664 - DNA, 60 bp, Artificial
  Synthetic oligonucleotide
cttcaggctttggagagtgcggccgtaacaagcgttggtcagggacttgaaaagactggg

SEQ ID NO: 106665 - DNA, 60 bp, Artificial
  Synthetic oligonucleotide
tctggtggggtgagactgctaagacttttgtatgaagcatcggatttgagagtagtaaat

SEQ ID NO: 106666 - DNA, 60 bp, Artificial
  Synthetic oligonucleotide
tcgacgctgtggcaccaccgttagccataaacgagtctggtggggtgagactgctaagac

SEQ ID NO: 106667 - DNA, 60 bp, Artificial
  Synthetic oligonucleotide
tagaagctatgaaaatcgacgctgtggcaccaccgttagccataaacgagtctggtgggg

SEQ ID NO: 106668 - DNA, 60 bp, Artificial
  Synthetic oligonucleotide
caccctcagctcgacaatttcagatctgccggcgagaacgcagacgctagaagctatgaa

SEQ ID NO: 106669 - DNA, 60 bp, Artificial
  Synthetic oligonucleotide
catcaccctcagctcgacaatttcagatctgccggcgagaacgcagacgctagaagctat

SEQ ID NO: 106670 - DNA, 57 bp, Artificial
  Synthetic oligonucleotide
acagccagaatcaattgcaacttgatctatcaggtcagatgaagggtgtcggtttcg

SEQ ID NO: 106671 - DNA, 60 bp, Artificial
  Synthetic oligonucleotide
gaatcttgccatctggcaaatttgtaatgaatttcgtcacgggcctatccccgggttggc

SEQ ID NO: 106672 - DNA, 60 bp, Artificial
  Synthetic oligonucleotide
gctacaatgctttaaaagcttctctcagccgtatgaggaggatatcgaaggcaagataaa

SEQ ID NO: 106673 - DNA, 60 bp, Artificial
  Synthetic oligonucleotide
ctgcagtgttttaaaagcttctctcagccgtatgaggaggatatcgaaggcaagataaaa

SEQ ID NO: 106674 - DNA, 60 bp, Artificial
  Synthetic oligonucleotide
tagacatcattttaaaaggaccggagctcagcgaagatgaggatgaaagagcttacgcta

SEQ ID NO: 106675 - DNA, 60 bp, Artificial
  Synthetic oligonucleotide
tttaggcagtttcttagatatcatcctgaaaggaccggagctcagcgaagatgaggatga

SEQ ID NO: 106676 - DNA, 60 bp, Artificial
  Synthetic oligonucleotide
agcttctctcagccgtatgaggaggatatcgaaggcaagataaaacgatgcggtgcacag

SEQ ID NO: 106677 - DNA, 60 bp, Artificial
  Synthetic oligonucleotide
gctttaaaagcttctctcagccgtatgaggaggatatcgaaggcaagataaaacgatgcg

SEQ ID NO: 106678 - DNA, 60 bp, Artificial
  Synthetic oligonucleotide
aaggaccggagctcagcgaagatgaggatgaaagagcttacgctacaatgtttgagacgg

SEQ ID NO: 106679 - DNA, 60 bp, Artificial
  Synthetic oligonucleotide
caacgattggaaaagcagcggaacgttttgcagaaagtgaaataggtgcggcaacgattg

SEQ ID NO: 106680 - DNA, 60 bp, Artificial
  Synthetic oligonucleotide
ttactcaacgattggaaaagcagcggaacgttttgcagaaagtgaaataggtgcggcaac

SEQ ID NO: 106681 - DNA, 60 bp, Artificial
  Synthetic oligonucleotide
aagcagcggaacgttttgcagaaagtgaaataggtgcggcaacgattgatgggttagtac

SEQ ID NO: 106682 - DNA, 60 bp, Artificial
  Synthetic oligonucleotide
gaaaagcagcggaacgttttgcagaaagtgaaataggtgcggcaacgattgatgggttag

SEQ ID NO: 106683 - DNA, 60 bp, Artificial
  Synthetic oligonucleotide
gagaatcgtatggggaatcggtgaaacaggcggtcctattgaatgtgttgggtacaggcg

SEQ ID NO: 106684 - DNA, 60 bp, Artificial
  Synthetic oligonucleotide
attataacaggagaatcgtatggggaatcggtgaaacaggcggtcctattgaatgtgttg

SEQ ID NO: 106685 - DNA, 60 bp, Artificial
  Synthetic oligonucleotide
agtgcctttgataggtgccggtatggcaacggctgtcgcaacgggacgagcaatagaggg

SEQ ID NO: 106686 - DNA, 60 bp, Artificial
  Synthetic oligonucleotide
atcagaagaagtgcctttgataggtgccggtatggcaacggctgtcgcaacgggacgagc

SEQ ID NO: 106687 - DNA, 60 bp, Artificial
  Synthetic oligonucleotide
ggaatgacagcagacgtgctagaggcggcatcagaagaagtgcctttgataggtgccggt

SEQ ID NO: 106688 - DNA, 60 bp, Artificial
  Synthetic oligonucleotide
gagcaacgtaacgaacttgttaggcttaaatataataaagagatcaccgagaaattcggt

SEQ ID NO: 106689 - DNA, 60 bp, Artificial
  Synthetic oligonucleotide
caagagatcgctggaatgacagcagacgtgctagaggcggcatcagaagaagtgcctttg

SEQ ID NO: 106690 - DNA, 60 bp, Artificial
  Synthetic oligonucleotide
gaggctatacaagagatcgctggaatgacagcagacgtgctagaggcggcatcagaagaa

SEQ ID NO: 106691 - DNA, 60 bp, Artificial
  Synthetic oligonucleotide
agattgagcgtgatggaatgcaggaagaggctatacaagagatcgctggaatgacagcag

SEQ ID NO: 106692 - DNA, 60 bp, Artificial
  Synthetic oligonucleotide
gtgcgatagagattgagcgtgatggaatgcaggaagaggctatacaagagatcgctggaa

SEQ ID NO: 106693 - DNA, 60 bp, Artificial
  Synthetic oligonucleotide
ttaaaagtgcgatagagattgagcgtgatggaatgcaggaagaggctatacaagagatcg

SEQ ID NO: 106694 - DNA, 60 bp, Artificial
  Synthetic oligonucleotide
ttgatgcgcttaaaagtgcgatagagattgagcgtgatggaatgcaggaagaggctatac

SEQ ID NO: 106695 - DNA, 60 bp, Artificial
  Synthetic oligonucleotide
gaagattcgaagatggctattttagcgcgtgcgttacaacgagaggcagcggaaagaagt

SEQ ID NO: 106696 - DNA, 60 bp, Artificial
  Synthetic oligonucleotide
acgtacgcagcagccccaaattcatatctatgcagccccatgggattcggacgatgtctt

SEQ ID NO: 106697 - DNA, 60 bp, Artificial
  Synthetic oligonucleotide
aatgtgttgggtacaggcgaagaattgcctgatcccctcagccctggtgagcgcggcatg

SEQ ID NO: 106698 - DNA, 60 bp, Artificial
  Synthetic oligonucleotide
tggacggactttaacggaggcttatagagagttcctcaatctttcgatttcgagcacgtt

SEQ ID NO: 106699 - DNA, 60 bp, Artificial
  Synthetic oligonucleotide
gtcactggcacgcgttagggatggcacaagaggccagtggacggactttaacggaggctt

SEQ ID NO: 106700 - DNA, 60 bp, Artificial
  Synthetic oligonucleotide
atctttttaggttcaatgcattacgatataacttatgaagctctgaagaataatgcgcag

SEQ ID NO: 106701 - DNA, 60 bp, Artificial
  Synthetic oligonucleotide
cggaggcttatagagagttcctcaatctttcgatttcgagcacgttcagtagcgcaatac

SEQ ID NO: 106702 - DNA, 60 bp, Artificial
  Synthetic oligonucleotide
acgatgtcttcttctttcactgtgtgtcttaccatcatcggaatgaatcattctttctag

SEQ ID NO: 106703 - DNA, 60 bp, Artificial
  Synthetic oligonucleotide
cgtacgcagcagccccaaattcatatctatgcagccccatgggattcggacgatgtcttc

SEQ ID NO: 106704 - DNA, 60 bp, Artificial
  Synthetic oligonucleotide
gaagatttaaccagtcactggcacgcgttagggatggcacaagaggccagtggacggact

SEQ ID NO: 106705 - DNA, 60 bp, Artificial
  Synthetic oligonucleotide
gatgtcttcttctttcactgtgtgtcttaccatcatcggaatgaatcattctttctaggc

SEQ ID NO: 106706 - DNA, 60 bp, Artificial
  Synthetic oligonucleotide
cgaacttgttaggcttaaatataataaagagatcaccgagaaattcggtaaagagctcgg

SEQ ID NO: 106707 - DNA, 60 bp, Artificial
  Synthetic oligonucleotide
gatcgctggaatgacagcagacgtgctagaggcggcatcagaagaagtgcctttgatagg

SEQ ID NO: 106708 - DNA, 60 bp, Artificial
  Synthetic oligonucleotide
ggaaagaagtgaagatgaaatcaaaatggtaaaagagtatagacagaagattgatgcgct

SEQ ID NO: 106709 - DNA, 60 bp, Artificial
  Synthetic oligonucleotide
aagatggctattttagcgcgtgcgttacaacgagaggcagcggaaagaagtgaagatgaa

SEQ ID NO: 106710 - DNA, 60 bp, Artificial
  Synthetic oligonucleotide
ggctattttagcgcgtgcgttacaacgagaggcagcggaaagaagtgaagatgaaatcaa

SEQ ID NO: 106711 - DNA, 60 bp, Artificial
  Synthetic oligonucleotide
catacacccgagagtaatgatgaggtttaagatcccacgtacgcagcagccccaaattca

SEQ ID NO: 106712 - DNA, 60 bp, Artificial
  Synthetic oligonucleotide
cgaagatggctattttagcgcgtgcgttacaacgagaggcagcggaaagaagtgaagatg

SEQ ID NO: 106713 - DNA, 60 bp, Artificial
  Synthetic oligonucleotide
gaaattcggtaaagagctcggagaagtttatgacttcatgaatggggaggcaaaagaagt

SEQ ID NO: 106714 - DNA, 60 bp, Artificial
  Synthetic oligonucleotide
ggtaaagagctcggagaagtttatgacttcatgaatggggaggcaaaagaagtggaggcg

SEQ ID NO: 106715 - DNA, 60 bp, Artificial
  Synthetic oligonucleotide
gtggctgataattgcaacgagattgctcatattaaacaagagatactaccaaagtttaaa

SEQ ID NO: 106716 - DNA, 61 bp, Artificial
  Synthetic oligonucleotide
ggctgataattgcaacgagattgctcatattaaacaagagatactaccaaagtttaaacag

SEQ ID NO: 106717 - DNA, 60 bp, Artificial
  Synthetic oligonucleotide
atagaggataaagtcatacacccgagagtaatgatgaggtttaagatcccacgtacgcag

SEQ ID NO: 106718 - DNA, 55 bp, Artificial
  Synthetic oligonucleotide
cgggacgagcaatagagggggcgtataaattaaagaaggtcatcaatgcactcag

SEQ ID NO: 106719 - DNA, 60 bp, Artificial
  Synthetic oligonucleotide
atatgcgaagccccaagatcgaacctactattatcgccacaactcttgagcataggttta

SEQ ID NO: 106720 - DNA, 60 bp, Artificial
  Synthetic oligonucleotide
gcgaagccccaagatcgaacctactattatcgccacaactcttgagcataggtttaaaga

SEQ ID NO: 106721 - DNA, 60 bp, Artificial
  Synthetic oligonucleotide
cagaagatggggaagataatcaaatcgcttagtcgttttggaaaaaaggtcgggaatgct

SEQ ID NO: 106722 - DNA, 60 bp, Artificial
  Synthetic oligonucleotide
cttagtcgttttggaaaaaaggtcgggaatgctttgacatcgaatacagcgaaaaagatt

SEQ ID NO: 106723 - DNA, 60 bp, Artificial
  Synthetic oligonucleotide
tttggaaaaaaggtcgggaatgctttgacttcgaatacagcgaaaaagatttactcaacg

SEQ ID NO: 106724 - DNA, 60 bp, Artificial
  Synthetic oligonucleotide
cgggaatgctttgacttcgaatacagcgaaaaagatttactcaacgattggaaaagcagc

SEQ ID NO: 106725 - DNA, 60 bp, Artificial
  Synthetic oligonucleotide
gaaaaagatttactcaacgattggaaaagcagcggaacgttttgcagaaagtgaaatagg

SEQ ID NO: 106726 - DNA, 60 bp, Artificial
  Synthetic oligonucleotide
gaagatgaaatcaaaatggtaaaagagtatagacagaagattgatgcgcttaaaagtgcg

SEQ ID NO: 106727 - DNA, 60 bp, Artificial
  Synthetic oligonucleotide
aatggtaaaagagtatagacagaagattgatgcgcttaaaagtgcgatagagattgagcg

SEQ ID NO: 106728 - DNA, 60 bp, Artificial
  Synthetic oligonucleotide
gaatgtgttgggtacaggcgaagaattgcctgatcccctcagccctggtgagcgcggcat

SEQ ID NO: 106729 - DNA, 60 bp, Artificial
  Synthetic oligonucleotide
cagtcgttatctagcacacgcaattacctcacggagtaatccatatgaagtaacttcaga

SEQ ID NO: 106730 - DNA, 60 bp, Artificial
  Synthetic oligonucleotide
ttcgaatggctttttcagtcgttatctagcacacgcaattacctcacggagtaatccata

SEQ ID NO: 106731 - DNA, 54 bp, Artificial
  Synthetic oligonucleotide
agaatgctggaccacgcccaactcgcgagattggcttacggcagcatcaacagg

SEQ ID NO: 106732 - DNA, 60 bp, Artificial
  Synthetic oligonucleotide
ccagttaatgcggtattgcttaaactcggtggtattccaatgggaggtggacgctttcag

SEQ ID NO: 106733 - DNA, 60 bp, Artificial
  Synthetic oligonucleotide
atgggaggtggacgctttcagatcgaggttattaaccaactactcacttcggttcgctct

SEQ ID NO: 106734 - DNA, 60 bp, Artificial
  Synthetic oligonucleotide
acatgctttccttcgtctaccaacaattagtttgtcgcgttctcatccagttaatgcggt

SEQ ID NO: 106735 - DNA, 60 bp, Artificial
  Synthetic oligonucleotide
cgcgttctcatccagttaatgcggtattgcttaaactcggtggtattccaatgggaggtg

SEQ ID NO: 106736 - DNA, 60 bp, Artificial
  Synthetic oligonucleotide
agcaacatctttgaaacatgctttccttcgtctaccaacaattagtttgtcgcgttctca

SEQ ID NO: 106737 - DNA, 60 bp, Artificial
  Synthetic oligonucleotide
tcagtctctggtgttgcaacaatctcgacaacgctgtcaccaaatgcactagcaacatct

SEQ ID NO: 106738 - DNA, 60 bp, Artificial
  Synthetic oligonucleotide
ccgccgttagcatgttcttgagcccgatgttagcctcccactttgacaattcagtctctg

SEQ ID NO: 106739 - DNA, 60 bp, Artificial
  Synthetic oligonucleotide
aatttcttctggtccaattggtaagagaagcttttgccggtactgtttctcagaattacc

SEQ ID NO: 106740 - DNA, 60 bp, Artificial
  Synthetic oligonucleotide
gtccaattggtaagagaagcttttgccggtactgtttctcagaattacccaacgttacgc

SEQ ID NO: 106741 - DNA, 60 bp, Artificial
  Synthetic oligonucleotide
agtttgattgaagttaaggcagttacaactcaagtcgctcggaatacatacgatgttaca

SEQ ID NO: 106742 - DNA, 60 bp, Artificial
  Synthetic oligonucleotide
tagcaataaatcggttaaatcaacagctaatctatgccgtcggttcgctaatggtgatga

SEQ ID NO: 106743 - DNA, 60 bp, Artificial
  Synthetic oligonucleotide
atgagtctgaactttcgctaataacccttcatccatgtgttgcacctttaacaactctgg

SEQ ID NO: 106744 - DNA, 60 bp, Artificial
  Synthetic oligonucleotide
cgctaataacccttcatccatgtgttgcacctttaacaactctgggcattgacgagactt

SEQ ID NO: 106745 - DNA, 60 bp, Artificial
  Synthetic oligonucleotide
acaactctgggcattgacgagactttcactctacaaaacggcatcgcaacaatttcttct

SEQ ID NO: 106746 - DNA, 60 bp, Artificial
  Synthetic oligonucleotide
ctgggcattgacgagactttcactctacaaaacggcatcgcaacaatttcttctggtcca

SEQ ID NO: 106747 - DNA, 60 bp, Artificial
  Synthetic oligonucleotide
tatcattagtgcgaaataatagagtcgtcaactcatttgttgatcaacaacccatccatc

SEQ ID NO: 106748 - DNA, 60 bp, Artificial
  Synthetic oligonucleotide
ccccttatgtgtattgctcgcaatgtcttctaccaacgtaatcctccaaccaacatggcc

SEQ ID NO: 106749 - DNA, 60 bp, Artificial
  Synthetic oligonucleotide
aaataaaaccccttatgtgtattgctcgcaatgtcttctaccaacgtaatcctccaacca

SEQ ID NO: 106750 - DNA, 60 bp, Artificial
  Synthetic oligonucleotide
ccgaagaagtacgaacgatgataattcgtccatgtctcgagagtcagcgaacccgaaggc

SEQ ID NO: 106751 - DNA, 60 bp, Artificial
  Synthetic oligonucleotide
gccgtcggttcgctaatggtgatgagtggacgtgtgttgttgatggtaggcacctaaatt

SEQ ID NO: 106752 - DNA, 60 bp, Artificial
  Synthetic oligonucleotide
cacctaaatttacccgacacgccaactccgaaacgtcgtatcaacaagattaccacacgt

SEQ ID NO: 106753 - DNA, 60 bp, Artificial
  Synthetic oligonucleotide
gcaccattgataccattactatcagcgaaacatgaactacaagctgccaattcgaatggc

SEQ ID NO: 106754 - DNA, 60 bp, Artificial
  Synthetic oligonucleotide
cccatccatccatcttgcatcggggaatctctaactacaacgattatcgtgaatcaggtt

SEQ ID NO: 106755 - DNA, 60 bp, Artificial
  Synthetic oligonucleotide
agctcgaatgtctattagcaataaatcggttaaatcaacagctaatctatgccgtcggtt

SEQ ID NO: 106756 - DNA, 60 bp, Artificial
  Synthetic oligonucleotide
ccgacgtgctgatgatacacgagtaccaaaacttggccactctaactacaccgccgttag

SEQ ID NO: 106757 - DNA, 60 bp, Artificial
  Synthetic oligonucleotide
gtttgaattgacacgcgactgggcacttgtcaaacttggatgtggttacgagatgtctga

SEQ ID NO: 106758 - DNA, 60 bp, Artificial
  Synthetic oligonucleotide
gtaatccatatgaagtaacttcagagcaaattcttggtatggttaatgatagtttgattg

SEQ ID NO: 106759 - DNA, 60 bp, Artificial
  Synthetic oligonucleotide
cgatgttacaatcggattacaaagtttatcgaaacaattgactgacgctattgcaacaat

SEQ ID NO: 106760 - DNA, 60 bp, Artificial
  Synthetic oligonucleotide
ccacatatcagcttcaggagattctagatgtcggacatatggttggtaagtttccaacta

SEQ ID NO: 106761 - DNA, 60 bp, Artificial
  Synthetic oligonucleotide
ttgcaacaatacagcaaccagctactaaaccagatgtaagtggaaaggtttgtgcgtgtg

SEQ ID NO: 106762 - DNA, 60 bp, Artificial
  Synthetic oligonucleotide
cggattacaaagtttatcgaaacaattgactgacgctattgcaacaatacagcaaccagc

SEQ ID NO: 106763 - DNA, 60 bp, Artificial
  Synthetic oligonucleotide
taactcatcttggtggaattcgtaccgcagtttgtaaccgaagtggatatgttacaatgt

SEQ ID NO: 106764 - DNA, 60 bp, Artificial
  Synthetic oligonucleotide
gcaaccagctactaaaccagatgtaagtggaaaggtttgtgcgtgtgtagccaccatacc

SEQ ID NO: 106765 - DNA, 60 bp, Artificial
  Synthetic oligonucleotide
gttacaatgtttgaattgacacgcgactgggcacttgtcaaacttggatgtggttacgag

SEQ ID NO: 106766 - DNA, 60 bp, Artificial
  Synthetic oligonucleotide
gaattcgtaccgcagtttgtaaccgaagtggatatgttacaatgtttgaattgacacgcg

SEQ ID NO: 106767 - DNA, 60 bp, Artificial
  Synthetic oligonucleotide
tttccaactacgctcgaagaacaacggttttaccacggcaaggagattgaatatttttcc

SEQ ID NO: 106768 - DNA, 60 bp, Artificial
  Synthetic oligonucleotide
tgttaaggtcctgcgtgttattcctcatgctggtcatagacctgtatgcggccaggatgc

SEQ ID NO: 106769 - DNA, 60 bp, Artificial
  Synthetic oligonucleotide
gttgcctgtaatgcatgttaaggtcctgcgtgttattcctcatgctggtcatagacctgt

SEQ ID NO: 106770 - DNA, 60 bp, Artificial
  Synthetic oligonucleotide
ggttcgctctttcctaaattcttgtaaggtaacaccatggcttgtgctttccacatatca

SEQ ID NO: 106771 - DNA, 60 bp, Artificial
  Synthetic oligonucleotide
tccgcagcttgattttagtagattatcatgggctgacgttgtagacgatgatgacttagg

SEQ ID NO: 106772 - DNA, 60 bp, Artificial
  Synthetic oligonucleotide
cccatgttggaggacgataagcgtttcccaagtatgttgcctgtaatgcatgttaaggtc

SEQ ID NO: 106773 - DNA, 60 bp, Artificial
  Synthetic oligonucleotide
actgatattaaccaacccatgttggaggacgataagcgtttcccaagtatgttgcctgta

SEQ ID NO: 106774 - DNA, 60 bp, Artificial
  Synthetic oligonucleotide
taccacacgtgagattgtttacactgacgaggatcgcgcgatgggtattgagaatgctgg

SEQ ID NO: 106775 - DNA, 60 bp, Artificial
  Synthetic oligonucleotide
cccgacacgccaactccgaaacgtcgtatcaacaagattaccacacgtgagattgtttac

SEQ ID NO: 106776 - DNA, 60 bp, Artificial
  Synthetic oligonucleotide
gtcagcgaacccgaaggctagagatgtaccaaggaataacgcatgtcgaggatgatcgat

SEQ ID NO: 106777 - DNA, 60 bp, Artificial
  Synthetic oligonucleotide
tgtttacactgacgaggatcgcgcgatgggtattgagaatgctggaccacgcccaactcg

SEQ ID NO: 106778 - DNA, 60 bp, Artificial
  Synthetic oligonucleotide
cctaaattcttgtaaggtaacaccatggcttgtgctttccacatatcagcttcaggagat

SEQ ID NO: 106779 - DNA, 60 bp, Artificial
  Synthetic oligonucleotide
gtaatgcgtgcctccgtgcacttaagccctttgcagctatgagtagttcatcgcgaccag

SEQ ID NO: 106780 - DNA, 60 bp, Artificial
  Synthetic oligonucleotide
tcgcgaccagggttcctcagccgactcggttcgagtatggcgcgtgtacttacttcttca

SEQ ID NO: 106781 - DNA, 60 bp, Artificial
  Synthetic oligonucleotide
ccgtgcacttaagccctttgcagctatgagtagttcatcgcgaccagggttcctcagccg

SEQ ID NO: 106782 - DNA, 60 bp, Artificial
  Synthetic oligonucleotide
ggtacagctgtataagcttattcagcttattaaggagctgtcgggtctccacgtaaatca

SEQ ID NO: 106783 - DNA, 60 bp, Artificial
  Synthetic oligonucleotide
ggcgaattcgttgcctcagggatggccactgcgcgtggtgcggtacagctgtataagctt

SEQ ID NO: 106784 - DNA, 60 bp, Artificial
  Synthetic oligonucleotide
tacggaagggtcgcttatcaagaggtgtacgtctatccttcagctgtaggtccaacgaga

SEQ ID NO: 106785 - DNA, 60 bp, Artificial
  Synthetic oligonucleotide
cggaagggtcgcttatcaagaggtgtacgtctatccttcagctgtaggtccaacgagata

SEQ ID NO: 106786 - DNA, 60 bp, Artificial
  Synthetic oligonucleotide
ccagccgtgaaagcgcgcgcccttcaaacttcttctcagcactctacacaacgtagaggc

SEQ ID NO: 106787 - DNA, 51 bp, Artificial
  Synthetic oligonucleotide
acacaacgtagaggcatcattcctccaatacctctcagacagcagccgctc

SEQ ID NO: 106788 - DNA, 60 bp, Artificial
  Synthetic oligonucleotide
caggatgtggccaataatccggagagcgctcttatgaacgcatccgaacgcttacggcat

SEQ ID NO: 106789 - DNA, 60 bp, Artificial
  Synthetic oligonucleotide
tcattccagccgtgaaagcgcgcgcccttcaaacttcttctcagcactctacacaacgta

SEQ ID NO: 106790 - DNA, 60 bp, Artificial
  Synthetic oligonucleotide
ctatccctcatgttggtcagcgcttcctgtgtgactttctcgaaaacattcaggatgtgg

SEQ ID NO: 106791 - DNA, 60 bp, Artificial
  Synthetic oligonucleotide
tttctcgaaaacattcaggatgtggccaataatccggagagcgctcttatgaacgcatcc

SEQ ID NO: 106792 - DNA, 60 bp, Artificial
  Synthetic oligonucleotide
gcttattcagcttattaaggagctgtcgggtctccacgtaaatcacctcactatccctca

SEQ ID NO: 106793 - DNA, 60 bp, Artificial
  Synthetic oligonucleotide
acgtaaatcacctcactatccctcatgttggtcagcgcttcctgtgtgactttctcgaaa

SEQ ID NO: 106794 - DNA, 60 bp, Artificial
  Synthetic oligonucleotide
ttgcgaacgttgctgggatggattctcctcctatagatcctctttcacgtggcgagatca

SEQ ID NO: 106795 - DNA, 60 bp, Artificial
  Synthetic oligonucleotide
gctgggatggattctcctcctatagatcctctttcacgtggcgagatcacgctcgccaga

SEQ ID NO: 106796 - DNA, 60 bp, Artificial
  Synthetic oligonucleotide
gaggatgagaggaaagaggctctagacaaatggataaccgagaagcatgccaacgataac

SEQ ID NO: 106797 - DNA, 60 bp, Artificial
  Synthetic oligonucleotide
gaggctctagacaaatggataaccgagaagcatgccaacgataacttcgctcaagctctt

SEQ ID NO: 106798 - DNA, 60 bp, Artificial
  Synthetic oligonucleotide
cgcgaccagggttcctcagccgactcggttcgagtatggcgcgtgtacttacttcttcaa

SEQ ID NO: 106799 - DNA, 60 bp, Artificial
  Synthetic oligonucleotide
tacttcttcaaaaactcaagacatgctcaaaggtataggacgtctcgcatctcgtgccgc

SEQ ID NO: 106800 - DNA, 60 bp, Artificial
  Synthetic oligonucleotide
actcaagacatgctcaaaggtataggacgtctcgcatctcgtgccgcatcttcagatatc

SEQ ID NO: 106801 - DNA, 55 bp, Artificial
  Synthetic oligonucleotide
gagtcgcgaccggtgcgatcacgtccgccgttacaggcgccaacttccttgagtc

SEQ ID NO: 106802 - DNA, 60 bp, Artificial
  Synthetic oligonucleotide
ccgaggagaggcaaattactctactcgaacgagcaggtgaggcactttcgactgccgttc

SEQ ID NO: 106803 - DNA, 60 bp, Artificial
  Synthetic oligonucleotide
tcaataaggtcattaccgctctgggtaaggaatcagccgaaagaacgcaggacgaaaacg

SEQ ID NO: 106804 - DNA, 60 bp, Artificial
  Synthetic oligonucleotide
ggaggtcgttcaaaaggagaaacagacgatgctcgctgaagcggttgagcaaaccattga

SEQ ID NO: 106805 - DNA, 60 bp, Artificial
  Synthetic oligonucleotide
gctctcgtcgcgtatgtttcgagaggaatctcaaatcttcaggaggtcgttcaaaaggag

SEQ ID NO: 106806 - DNA, 60 bp, Artificial
  Synthetic oligonucleotide
tgcgccggagcgtggccgaagatcctttctacataggtagtctcccctaccgcgccaggt

SEQ ID NO: 106807 - DNA, 60 bp, Artificial
  Synthetic oligonucleotide
cacatgccgccgccttgcgccggagcgtggccgaagatcctttctacataggtagtctcc

SEQ ID NO: 106808 - DNA, 60 bp, Artificial
  Synthetic oligonucleotide
tcgcttcttccgcatggccgcttccggtgagcaggaccattctccacatgccgccgcctt

SEQ ID NO: 106809 - DNA, 60 bp, Artificial
  Synthetic oligonucleotide
cgcatctcgcttcttccgcatggccgcttccggtgagcaggaccattctccacatgccgc

SEQ ID NO: 106810 - DNA, 60 bp, Artificial
  Synthetic oligonucleotide
tgaatgctctacaacacggcgtcgcacttgttccgaaaaaccgagtctagcgctgctctc

SEQ ID NO: 106811 - DNA, 57 bp, Artificial
  Synthetic oligonucleotide
tcggattgccaattccccaatacatcaagctcacttgatgaggggtcctatctccgt

SEQ ID NO: 106812 - DNA, 60 bp, Artificial
  Synthetic oligonucleotide
cccctaccgcgccaggtacgccgatatgatggagaatgcatatcggattgccaattcccc

SEQ ID NO: 106813 - DNA, 60 bp, Artificial
  Synthetic oligonucleotide
ggtagtctcccctaccgcgccaggtacgccgatatgatggagaatgcatatcggattgcc

SEQ ID NO: 106814 - DNA, 60 bp, Artificial
  Synthetic oligonucleotide
gacgaaaacgctctcgtcgcgtatgtttcgagaggaatctcaaatcttcaggaggtcgtt

SEQ ID NO: 106815 - DNA, 60 bp, Artificial
  Synthetic oligonucleotide
ccgctctgggtaaggaatcagccgaaagaacgcaggacgaaaacgctctcgtcgcgtatg

SEQ ID NO: 106816 - DNA, 60 bp, Artificial
  Synthetic oligonucleotide
gcgatcactctcatgagtggtcggggtgtccgcgtggacaaagtgtcggagcgtctatct

SEQ ID NO: 106817 - DNA, 60 bp, Artificial
  Synthetic oligonucleotide
cgctgctctcgcgatcactctcatgagtggtcggggtgtccgcgtggacaaagtgtcgga

SEQ ID NO: 106818 - DNA, 60 bp, Artificial
  Synthetic oligonucleotide
aaaccattgagatttctggagacatcgccgagcatgcagccgcttctattcctgtagtcg

SEQ ID NO: 106819 - DNA, 60 bp, Artificial
  Synthetic oligonucleotide
gaggtcgttcaaaaggagaaacagacgatgctcgctgaagcggttgagcaaaccattgag

SEQ ID NO: 106820 - DNA, 60 bp, Artificial
  Synthetic oligonucleotide
cctgtagtcggcgaattcgttgcctcagggatggccactgcgcgtggtgcggtacagctg

SEQ ID NO: 106821 - DNA, 60 bp, Artificial
  Synthetic oligonucleotide
ctggagacatcgccgagcatgcagccgcttctattcctgtagtcggcgaattcgttgcct

SEQ ID NO: 106822 - DNA, 60 bp, Artificial
  Synthetic oligonucleotide
ggagcggggataattcacaatcctccgtcattattcgatgtgccccataaatggtatcag

SEQ ID NO: 106823 - DNA, 60 bp, Artificial
  Synthetic oligonucleotide
tcagatccttttctcaagatggtaagcgttggaccaatgctccagagtacgagaaagtac

SEQ ID NO: 106824 - DNA, 60 bp, Artificial
  Synthetic oligonucleotide
ctgggaatgtatagttggattagtctgatacgccctctgatgacaagatggatggtggct

SEQ ID NO: 106825 - DNA, 60 bp, Artificial
  Synthetic oligonucleotide
gatggatggtggctaatggttacgtaactgacagatgctcacctatattcgggaacgcag

SEQ ID NO: 106826 - DNA, 60 bp, Artificial
  Synthetic oligonucleotide
ctcaagcccgacagattaaggctccattggagaagtttgtgttggcactattagtggctg

SEQ ID NO: 106827 - DNA, 60 bp, Artificial
  Synthetic oligonucleotide
agctcgacagattaaggctccattggagaagtttgtgttggcactattagtggccgaagc

SEQ ID NO: 106828 - DNA, 60 bp, Artificial
  Synthetic oligonucleotide
agaattgctgagtctcaagcccgacagattaaggctccattggagaagtttgtgttggca

SEQ ID NO: 106829 - DNA, 60 bp, Artificial
  Synthetic oligonucleotide
tcaagatggtaagcgttggaccaatgctccagagtacgagaaagtactttgctcagacac

SEQ ID NO: 106830 - DNA, 60 bp, Artificial
  Synthetic oligonucleotide
ggtaatgactgcgactggagttgctgtcgacatctatctggaggatatacatggcggtgg

SEQ ID NO: 106831 - DNA, 60 bp, Artificial
  Synthetic oligonucleotide
gctcgtatatgatgaagatttacaaatgcatatactgagggggcccttacactttcagcg

SEQ ID NO: 106832 - DNA, 60 bp, Artificial
  Synthetic oligonucleotide
cgatgcattacgatattacttatgaaacgttaaagacgaacgcacagaggctcgtatatg

SEQ ID NO: 106833 - DNA, 60 bp, Artificial
  Synthetic oligonucleotide
tttttaggcttcgatttgggaattgacgttgttcatttcgaggacctcgctgcgcactgg

SEQ ID NO: 106834 - DNA, 60 bp, Artificial
  Synthetic oligonucleotide
atgtatttttctttcactgtgtgtcgcacttccacgcgaatgaatcattctttttaggct

SEQ ID NO: 106835 - DNA, 60 bp, Artificial
  Synthetic oligonucleotide
atcacaacagccgcaaattcacatatacagtgctccgtgggattcagacgatgtattttt

SEQ ID NO: 106836 - DNA, 59 bp, Artificial
  Synthetic oligonucleotide
atcacaacagccgcaaattcacatatacagtgctccgtgggattcagacgatgtatttt

SEQ ID NO: 106837 - DNA, 60 bp, Artificial
  Synthetic oligonucleotide
tcgatgcattacgatattacttatgaaacgttaaagacgaacgcacagaggctcgtatat

SEQ ID NO: 106838 - DNA, 60 bp, Artificial
  Synthetic oligonucleotide
atgcgcggcgtatgattagatcaaaaactgtgcaccccatttatttaggctcgatgcatt

SEQ ID NO: 106839 - DNA, 59 bp, Artificial
  Synthetic oligonucleotide
tgcgcactggcatgcgttaggcgcagctcaagaagcaaagggacgtacactgaatgagg

SEQ ID NO: 106840 - DNA, 60 bp, Artificial
  Synthetic oligonucleotide
ttgggaattgacgttgttcatttcgaggacctcgctgcgcactggcatgcgttaggcgca

SEQ ID NO: 106841 - DNA, 60 bp, Artificial
  Synthetic oligonucleotide
gattcatatgaaaacctactcgtcacagagaatgagcaaatgcgtacgttggcgcgcgcg

SEQ ID NO: 106842 - DNA, 60 bp, Artificial
  Synthetic oligonucleotide
gagccaactatggttgcgacaacgttagagcatagattcaaggagataccggataaggaa

SEQ ID NO: 106843 - DNA, 60 bp, Artificial
  Synthetic oligonucleotide
gatagtagcgaatactaaagagattaagcacataaaagaggagattctaccaaaatttaa

SEQ ID NO: 106844 - DNA, 60 bp, Artificial
  Synthetic oligonucleotide
cgctttaagcggcattgatttatcccatttgcgcactccgaaaattgagccaactatggt

SEQ ID NO: 106845 - DNA, 60 bp, Artificial
  Synthetic oligonucleotide
ccgaaaattgagccaactatggttgcgacaacgttagagcatagattcaaggagataccg

SEQ ID NO: 106846 - DNA, 60 bp, Artificial
  Synthetic oligonucleotide
ggcaacggctattgcaacaggtagagcgattgaaggtgcgtacaaacttaagaaagtgat

SEQ ID NO: 106847 - DNA, 60 bp, Artificial
  Synthetic oligonucleotide
ggcgcaggagatgagatcccggacccacttagtcctggagagcgtggcatccagacaaaa

SEQ ID NO: 106848 - DNA, 60 bp, Artificial
  Synthetic oligonucleotide
gatgttctggaggcggcttcggaagaagttcctctagtaggatcgggaatggcaacggct

SEQ ID NO: 106849 - DNA, 60 bp, Artificial
  Synthetic oligonucleotide
ggcggcttcggaagaagttcctctagtaggatcgggaatggcaacggctattgcaacagg

SEQ ID NO: 106850 - DNA, 60 bp, Artificial
  Synthetic oligonucleotide
aatcgggaaggcagcggagcgttttgctgaaagtgagattggttcggccgcgattgatgg

SEQ ID NO: 106851 - DNA, 60 bp, Artificial
  Synthetic oligonucleotide
ggaaggcagcggagcgttttgctgaaagtgagattggttcggccgcgattgatggactgg

SEQ ID NO: 106852 - DNA, 60 bp, Artificial
  Synthetic oligonucleotide
gattatcacgggggaatcctacggtgaatcagttaagcaagcggtgctattgaatgtgct

SEQ ID NO: 106853 - DNA, 60 bp, Artificial
  Synthetic oligonucleotide
gggaatcctacggtgaatcagttaagcaagcggtgctattgaatgtgctcggcgcaggag

SEQ ID NO: 106854 - DNA, 60 bp, Artificial
  Synthetic oligonucleotide
gatcgcggaagatggggaagatcataaaatcacttagccgttttggcaaaaaagtaggta

SEQ ID NO: 106855 - DNA, 51 bp, Artificial
  Synthetic oligonucleotide
gatcgcggaagatggggaagatcataaaatcacttagccgttttggcaaaa

SEQ ID NO: 106856 - DNA, 60 bp, Artificial
  Synthetic oligonucleotide
aaagtaggtaatgcgttaacctcgaatacagctaagaagatttataatacaatcgggaag

SEQ ID NO: 106857 - DNA, 60 bp, Artificial
  Synthetic oligonucleotide
agaaagtgataaacgctttaagcggcattgatttatcccatttgcgcactccgaaaattg

SEQ ID NO: 106858 - DNA, 60 bp, Artificial
  Synthetic oligonucleotide
cgttggcgcgcgcgttacagcgagaagcgactgaacgaacagaaaacgaatcgaagatgg

SEQ ID NO: 106859 - DNA, 60 bp, Artificial
  Synthetic oligonucleotide
gtgttaggtgataaagttgatgttccgctcttcctaaaaaacgcgtgacagcggtgatcc

SEQ ID NO: 106860 - DNA, 60 bp, Artificial
  Synthetic oligonucleotide
catccgagagtgatgatgagatttaaggtgcctagatcacaacagccgcaaattcacata

SEQ ID NO: 106861 - DNA, 57 bp, Artificial
  Synthetic oligonucleotide
aaaatcaaggagatcgaggaagagcagaggaatgagttagtaagaataaaatacgga

SEQ ID NO: 106862 - DNA, 60 bp, Artificial
  Synthetic oligonucleotide
gagcgtggcatccagacaaaaatcaaggagatcgaggaagagcagaggaatgagttagta

SEQ ID NO: 106863 - DNA, 60 bp, Artificial
  Synthetic oligonucleotide
tgcaaggctgttgattcatatgaaaacctactcgtcacagagaatgagcaaatgcgtacg

SEQ ID NO: 106864 - DNA, 60 bp, Artificial
  Synthetic oligonucleotide
tgagttagtaagaataaaatacggaaaagagataagagagaaatttggtgaacaattgga

SEQ ID NO: 106865 - DNA, 60 bp, Artificial
  Synthetic oligonucleotide
aatgcgtacgttggcgcgcgcgttacagcgagaagcgactgaacgaacagaaaacgaatc

SEQ ID NO: 106866 - DNA, 60 bp, Artificial
  Synthetic oligonucleotide
gacgataaaaagatacatccgagagtgatgatgagatttaaggtgcctagatcacaacag

SEQ ID NO: 106867 - DNA, 60 bp, Artificial
  Synthetic oligonucleotide
aaaacgaatcgaagatggttaaagaatataggcagaaaatagatgccttaaaggttgcaa

SEQ ID NO: 106868 - DNA, 60 bp, Artificial
  Synthetic oligonucleotide
tgaatgtgctcggcgcaggagatgagatcccggacccacttagtcctggagagcgtggca

SEQ ID NO: 106869 - DNA, 55 bp, Artificial
  Synthetic oligonucleotide
aaggttgcaatagaggtagaaagagatggtatgcaagaggaagcaatccaagaga

SEQ ID NO: 106870 - DNA, 60 bp, Artificial
  Synthetic oligonucleotide
cgaagatggttaaagaatataggcagaaaatagatgccttaaaggttgcaatagaggtag

SEQ ID NO: 106871 - DNA, 60 bp, Artificial
  Synthetic oligonucleotide
gcgttaacctcgaatacagctaagaagatttataatacaatcgggaaggcagcggagcgt

SEQ ID NO: 106872 - DNA, 60 bp, Artificial
  Synthetic oligonucleotide
catggagagattggatcatctaaaacgatcgatccgtggaataggcgcgtagtttatgga

SEQ ID NO: 106873 - DNA, 54 bp, Artificial
  Synthetic oligonucleotide
gagtacggcgttgcctgcttcgaatattacatgaacacgaagatatcgcagggt

SEQ ID NO: 106874 - DNA, 60 bp, Artificial
  Synthetic oligonucleotide
gaaggacgcgtacctaaactctcggtcggagctagtgttcccaaactactttgacaaatg

SEQ ID NO: 106875 - DNA, 60 bp, Artificial
  Synthetic oligonucleotide
ggacgcgtacctaaactctcggtcggagctagtgttcccaaactactttgacaaatggat

SEQ ID NO: 106876 - DNA, 60 bp, Artificial
  Synthetic oligonucleotide
aagcgcgtcatatgatagaactcggattagggcgttggagttatgtaatatattatccgc

SEQ ID NO: 106877 - DNA, 60 bp, Artificial
  Synthetic oligonucleotide
gcgcgtcatatgatagaactcggattagggcgttggagttatgtaatatattatccgcca

SEQ ID NO: 106878 - DNA, 60 bp, Artificial
  Synthetic oligonucleotide
agacatatatgtgggattgtagctgtaagtgtgggtcaagagggccagttacaggtgtat

SEQ ID NO: 106879 - DNA, 60 bp, Artificial
  Synthetic oligonucleotide
tgtagctgtaagtgtgggtcaagagggccagttacaggtgtattccaccggtatagtaag

SEQ ID NO: 106880 - DNA, 60 bp, Artificial
  Synthetic oligonucleotide
agctgtaagtgtgggtcaagagggccagttacaggtgtattccaccggtatagtaagaca

SEQ ID NO: 106881 - DNA, 60 bp, Artificial
  Synthetic oligonucleotide
cacaagtaggacacactaaaattgaagcagaatccgattcggatgattatgcacttggtg

SEQ ID NO: 106882 - DNA, 60 bp, Artificial
  Synthetic oligonucleotide
atgggaaacactaccctaaaattgaagcagaatccgattcagatgattatgtacttgacg

SEQ ID NO: 106883 - DNA, 60 bp, Artificial
  Synthetic oligonucleotide
ccacacaagtaggacacactaaaattgaagcagaatccgattcggatgattatgcacttg

SEQ ID NO: 106884 - DNA, 60 bp, Artificial
  Synthetic oligonucleotide
aattgaagattcgtaagtctgacctgagaggtcactagggagctccccactcccgttttg

SEQ ID NO: 106885 - DNA, 60 bp, Artificial
  Synthetic oligonucleotide
tcacgactattaagcaacgctgggtgcaatcaaatggatttctcctttaataaagcagta

SEQ ID NO: 106886 - DNA, 60 bp, Artificial
  Synthetic oligonucleotide
taaagcagtaaagacaaacacaaatttagattcattagtacccatgtcaatgaattaaag

SEQ ID NO: 106887 - DNA, 60 bp, Artificial
  Synthetic oligonucleotide
aattaattgaagatttgtaagtctgaatacatacagttaagacagatatagtcgctagtg

SEQ ID NO: 106888 - DNA, 60 bp, Artificial
  Synthetic oligonucleotide
ttgaagatttgtaagtctgaatacatacagttaagacagatatagtcgctagtgtgtcca

SEQ ID NO: 106889 - DNA, 60 bp, Artificial
  Synthetic oligonucleotide
caaaaggaagtacttcgcgctaagaatgagaatgaaacacgttgcaatgcaattaattga

SEQ ID NO: 106890 - DNA, 60 bp, Artificial
  Synthetic oligonucleotide
cgcgctaagaatgagaatgaaacacgttgcaatgcaattaattgaagatttgtaagtctg

SEQ ID NO: 106891 - DNA, 56 bp, Artificial
  Synthetic oligonucleotide
atcaagtaatgttgggtgcgatcaagtggatttctcctttaacaaagcagtgaagg

SEQ ID NO: 106892 - DNA, 60 bp, Artificial
  Synthetic oligonucleotide
gaccataaaaatgggaaacactaccctaaaattgaagcagaatccgattcagatgattat

SEQ ID NO: 106893 - DNA, 60 bp, Artificial
  Synthetic oligonucleotide
cggaactgctttgtactaagaatgggactgaaacatgtcgcaatgcaattaattgaagat

SEQ ID NO: 106894 - DNA, 60 bp, Artificial
  Synthetic oligonucleotide
ctaagaatgggactgaaacatgtcgcaatgcaattaattgaagattcgtaagtctgacct

SEQ ID NO: 106895 - DNA, 60 bp, Artificial
  Synthetic oligonucleotide
cgatggctatacaacaatatctgagagttggttacgctgaagaggtcaggtatgtgcagc

SEQ ID NO: 106896 - DNA, 60 bp, Artificial
  Synthetic oligonucleotide
ccagtcgctaatttatacgaaacattggaaccagagatggtaataaagaagaaaggacca

SEQ ID NO: 106897 - DNA, 60 bp, Artificial
  Synthetic oligonucleotide
ataaagaagaaaggaccaacaatatatcaaccaatacgtggcgcgacatacgcagtacta

SEQ ID NO: 106898 - DNA, 60 bp, Artificial
  Synthetic oligonucleotide
cacagcaagttggcgtaacagggaggttgattttattatgtttgacacgcgtaatgtggt

SEQ ID NO: 106899 - DNA, 60 bp, Artificial
  Synthetic oligonucleotide
acgctagaccagtcgctaatttatacgaaacattggaaccagagatggtaataaagaaga

SEQ ID NO: 106900 - DNA, 66 bp, Artificial
  Synthetic oligonucleotide
gagcgattcagtctatatgcagaaaggttatcaagtatttacaaattcagttattgtatacacagc

SEQ ID NO: 106901 - DNA, 60 bp, Artificial
  Synthetic oligonucleotide
ttcagttattgtatacacagcaagttggcgtaacagggaggttgattttattatgtttga

SEQ ID NO: 106902 - DNA, 60 bp, Artificial
  Synthetic oligonucleotide
gtgccattggatttgaaacacatctttcggaacatcgttgtcgtacgagaatataatgaa

SEQ ID NO: 106903 - DNA, 60 bp, Artificial
  Synthetic oligonucleotide
gtactgagcgattcagtctatatgcagaaaggttatcaagtatttacaaattcagttatt

SEQ ID NO: 106904 - DNA, 60 bp, Artificial
  Synthetic oligonucleotide
cttttactatacgagacatatggtatgctaacttcatatgtacatacaagcatgtacgct

SEQ ID NO: 106905 - DNA, 60 bp, Artificial
  Synthetic oligonucleotide
gacatatggtatgctaacttcatatgtacatacaagcatgtacgcttgtgaattgcttcg

SEQ ID NO: 106906 - DNA, 60 bp, Artificial
  Synthetic oligonucleotide
gacatatggtatgctaacttcatatgtgcatacaagcatgtacgcttgtgaattgcttcg

SEQ ID NO: 106907 - DNA, 60 bp, Artificial
  Synthetic oligonucleotide
catgtacgcttgtgaattgcttcgttttattgagtatgattggtgaggtcttcaacgaac

SEQ ID NO: 106908 - DNA, 60 bp, Artificial
  Synthetic oligonucleotide
aactgcgcctcgcatattgatcttaaatcaacatacagtaacgcaagatgtgactgctgg

SEQ ID NO: 106909 - DNA, 60 bp, Artificial
  Synthetic oligonucleotide
gcctagacgtgaaatcgaactttcagagaaaggtagaatagtagtgccattggatttgaa

SEQ ID NO: 106910 - DNA, 60 bp, Artificial
  Synthetic oligonucleotide
ccaacaatatatcaaccaatacgtggcgcgacatacgcagtactattgaagtttcgcgag

SEQ ID NO: 106911 - DNA, 60 bp, Artificial
  Synthetic oligonucleotide
ggcaataaagggtttggagaaacatcattcttacgcgatgtgatagcggctttgaatagt

SEQ ID NO: 106912 - DNA, 60 bp, Artificial
  Synthetic oligonucleotide
gccatttatgcctagacgtgaaatcgaactttcagagaaaggtagaatggtagtgccatt

SEQ ID NO: 106913 - DNA, 60 bp, Artificial
  Synthetic oligonucleotide
gaaggatcaaaagatagtgggaaaagctatagacggtgcaaatgtcaaggttacagttaa

SEQ ID NO: 106914 - DNA, 60 bp, Artificial
  Synthetic oligonucleotide
aaaggatcgaaagatagtgggaaaagctatagacggtgcaaatgtcaaggttacagttaa

SEQ ID NO: 106915 - DNA, 60 bp, Artificial
  Synthetic oligonucleotide
gacagtatacaatacctcagaatcgaagagtttgtggtatattaaagacgagcgttacag

SEQ ID NO: 106916 - DNA, 60 bp, Artificial
  Synthetic oligonucleotide
gagatgttatggcggacatgcctgcgcaaacgtcactagctgccgaccaggaaggtgtat

SEQ ID NO: 106917 - DNA, 60 bp, Artificial
  Synthetic oligonucleotide
gccatttatgcctagacgtgaaatcgaactttcagagaaaggtagaatagtagtgccatt

SEQ ID NO: 106918 - DNA, 60 bp, Artificial
  Synthetic oligonucleotide
agtaactacgagtaaaactgcgcctcgcatattgatcttaaatcaacatacagtaacgca

SEQ ID NO: 106919 - DNA, 60 bp, Artificial
  Synthetic oligonucleotide
cagattggtatggcatttgggagtataagagaactgtagaaggcatcgaacttcctttgg

SEQ ID NO: 106920 - DNA, 60 bp, Artificial
  Synthetic oligonucleotide
attgattcagattggtatggcatttgggagtataagagaactgtagaaggcatcgaactt

SEQ ID NO: 106921 - DNA, 60 bp, Artificial
  Synthetic oligonucleotide
gctttgaatagtaaactgggcgataacgcggcaggcgcgattgattcagattggtatggc

SEQ ID NO: 106922 - DNA, 60 bp, Artificial
  Synthetic oligonucleotide
atgtgatagcggctttgaatagtaaactgggcgataacgcggcaggcgcgattgattcag

SEQ ID NO: 106923 - DNA, 60 bp, Artificial
  Synthetic oligonucleotide
caacattggcttaatggcaaacaaagtccggaataccaattcaatgttagagtaactacg

SEQ ID NO: 106924 - DNA, 60 bp, Artificial
  Synthetic oligonucleotide
gagaaactatgattaacgagtgcaaatcgaaggtcgaacaacattggcttaatggcaaac

SEQ ID NO: 106925 - DNA, 60 bp, Artificial
  Synthetic oligonucleotide
agattcagcaaagagaaactatgattaacgagtgcaaatcgaaggtcgaacaacattggc

SEQ ID NO: 106926 - DNA, 57 bp, Artificial
  Synthetic oligonucleotide
catcgaacttcctttggaatacaatgtctgtgtagagcaacttgaatctggtcctag

SEQ ID NO: 106927 - DNA, 60 bp, Artificial
  Synthetic oligonucleotide
tacaatacctcagaatcgaagagtttgtggtatattaaagacgagcgttacagcatgcta

SEQ ID NO: 106928 - DNA, 60 bp, Artificial
  Synthetic oligonucleotide
ggcaaacaaagtccggaataccaattcaatgttagagtaactacgagtaaaactgcgcct

SEQ ID NO: 106929 - DNA, 60 bp, Artificial
  Synthetic oligonucleotide
tagtgccattggatttgaaacacatctttcggaacatcgttgtcgtacgagaatataatg

SEQ ID NO: 106930 - DNA, 60 bp, Artificial
  Synthetic oligonucleotide
gcctagacgtgaaatcgaactttcagagaaaggtagaatggtagtgccattggatttgaa

SEQ ID NO: 106931 - DNA, 60 bp, Artificial
  Synthetic oligonucleotide
cagtaacgcaagatgtgactgctgggcgatcagacataaatttgatacttaaacctataa

SEQ ID NO: 106932 - DNA, 60 bp, Artificial
  Synthetic oligonucleotide
gtgactgctgggcgatcagacataaatttgatacttaaacctataatagatccagtgtca

SEQ ID NO: 106933 - DNA, 60 bp, Artificial
  Synthetic oligonucleotide
cttttactatacgagacatatggtatgctaacttcatatgtgcatacaagcatgtacgct

SEQ ID NO: 106934 - DNA, 60 bp, Artificial
  Synthetic oligonucleotide
tcaaataagaaggatcaaaagatagtgggaaaagctatagacggtgcaaatgtcaaggtt

SEQ ID NO: 106935 - DNA, 60 bp, Artificial
  Synthetic oligonucleotide
tcaaataaaaaggatcgaaagatagtgggaaaagctatagacggtgcaaatgtcaaggtt

SEQ ID NO: 106936 - DNA, 60 bp, Artificial
  Synthetic oligonucleotide
tagccattgattacctgcaaaatgaaagactttatcacacatacatgctgaaaattaaaa

SEQ ID NO: 106937 - DNA, 60 bp, Artificial
  Synthetic oligonucleotide
tagccattgattacctgcaaaatgaaagactttatcacacatacatgctgaaaactaaaa

SEQ ID NO: 106938 - DNA, 60 bp, Artificial
  Synthetic oligonucleotide
gccattgattacctgcaaaatgaaagactttatcacacatacatgctgaaaactaaaacg

SEQ ID NO: 106939 - DNA, 60 bp, Artificial
  Synthetic oligonucleotide
caagctgttgcgagcgtattcaaataaaacgaaaggcgtgattaaagatccagcattgct

SEQ ID NO: 106940 - DNA, 60 bp, Artificial
  Synthetic oligonucleotide
gttgcgagcgtattcaaataaaacgaaaggcgtgattaaagatccagcattgctaggcgc

SEQ ID NO: 106941 - DNA, 60 bp, Artificial
  Synthetic oligonucleotide
cagcattgctaggcgcaataatatccactggttcgtatgatgtgcaagtgtcaaataaaa

SEQ ID NO: 106942 - DNA, 60 bp, Artificial
  Synthetic oligonucleotide
cagcattgctaggcgcaataatatccactggttcgtatgatgtgcaagtgtcaaataaga

SEQ ID NO: 106943 - DNA, 60 bp, Artificial
  Synthetic oligonucleotide
gctaggcgcaataatatccactggttcgtatgatgtgcaagtgtcaaataagaaggatca

SEQ ID NO: 106944 - DNA, 60 bp, Artificial
  Synthetic oligonucleotide
acaggtatgcttcgatggcgatacagcaatatttgagagttggttatgctgaagaggtta

SEQ ID NO: 106945 - DNA, 60 bp, Artificial
  Synthetic oligonucleotide
ggagtctcgcggagtggttctgcggtataaagctcagtcggttatttcggaattctcgac

SEQ ID NO: 106946 - DNA, 60 bp, Artificial
  Synthetic oligonucleotide
gaggagtctcgcggagtggttctgcggtataaagctcagtcggttatttcggaattctcg

SEQ ID NO: 106947 - DNA, 57 bp, Artificial
  Synthetic oligonucleotide
ggggttgtgcacccgacccctaattcttgaggagtctcgcggagtggttctgcggta

SEQ ID NO: 106948 - DNA, 53 bp, Artificial
  Synthetic oligonucleotide
ggggttgtgcacccgacccctaattcttgaggagtctcgcggagtggttctgc

SEQ ID NO: 106949 - DNA, 60 bp, Artificial
  Synthetic oligonucleotide
ccaacttgtcaagtttcgggggttgtgcacccgacccctaattcttgaggagtctcgcgg

SEQ ID NO: 106950 - DNA, 60 bp, Artificial
  Synthetic oligonucleotide
ggtaccaacttgtcaagtttcgggggttgtgcacccgacccctaattcttgaggagtctc

SEQ ID NO: 106951 - DNA, 60 bp, Artificial
  Synthetic oligonucleotide
aaaatcgtaagatatacacttataattggaggatgggtaccaacttgtcaagtttcgggg

SEQ ID NO: 106952 - DNA, 60 bp, Artificial
  Synthetic oligonucleotide
caaatcgtaagttacacacttataattggatgatgggtaccaacttgtcaagtttcgggg

SEQ ID NO: 106953 - DNA, 60 bp, Artificial
  Synthetic oligonucleotide
ctacctggtgttaatacccatcgggatattattggcactgtcaagtatttttgtgagctt

SEQ ID NO: 106954 - DNA, 58 bp, Artificial
  Synthetic oligonucleotide
agtctcgcggagtggttctgcggtataaagcttagtctgttatttcggaattcctgac

SEQ ID NO: 106955 - DNA, 60 bp, Artificial
  Synthetic oligonucleotide
ttgcctggtgttagtacccgtcgggatattattggcactgtcaagtatttttgtgagctt

SEQ ID NO: 106956 - DNA, 60 bp, Artificial
  Synthetic oligonucleotide
aaggtgatacagtacgcgaattcattttcaggaacatgtatgactgtaagattaaataat

SEQ ID NO: 106957 - DNA, 58 bp, Artificial
  Synthetic oligonucleotide
acattctcctacaacataccgaaaaagtgaatactatttactcattgataaacatatc

SEQ ID NO: 106958 - DNA, 60 bp, Artificial
  Synthetic oligonucleotide
caatgagggtattggggctttttgaacgtgggaataacttgaatttcgcagatacctacg

SEQ ID NO: 106959 - DNA, 60 bp, Artificial
  Synthetic oligonucleotide
gtaatgaatcaataccacaggctttggataatatacactcacagtggattaattattctg

SEQ ID NO: 106960 - DNA, 60 bp, Artificial
  Synthetic oligonucleotide
cgaatgagatttgcagttccatttgatcaattatcaaatagaattactagatctcgtgtt

SEQ ID NO: 106961 - DNA, 60 bp, Artificial
  Synthetic oligonucleotide
gttaacgtgaaaacaaatggtgtttatattgatgtgagatctgaatttaaaacaaatgac

SEQ ID NO: 106962 - DNA, 53 bp, Artificial
  Synthetic oligonucleotide
catagtaacatacgacaacaaggaagtcgatagtacagaacatcataatagat

SEQ ID NO: 106963 - DNA, 60 bp, Artificial
  Synthetic oligonucleotide
gatggtgataaagttggtgagaaatattcaaagaaaatgatggagatttgggaagttcaa

SEQ ID NO: 106964 - DNA, 60 bp, Artificial
  Synthetic oligonucleotide
gttggtgagaaatattcaaagaaaatgatggagatttgggaagttcaagtgtgaggctaa

SEQ ID NO: 106965 - DNA, 59 bp, Artificial
  Synthetic oligonucleotide
ttattaccatataaaatactttattatgaacgaggaatgagagaattatatgctggtag

SEQ ID NO: 106966 - DNA, 60 bp, Artificial
  Synthetic oligonucleotide
atcatattggaatatttacgtcatcaaactttacatatgattggcaatacaaaatagtat

SEQ ID NO: 106967 - DNA, 59 bp, Artificial
  Synthetic oligonucleotide
gatacctacgtatatacatggaaccaacagtactcgtatcatgaaaatgcattcctaat

SEQ ID NO: 106968 - DNA, 56 bp, Artificial
  Synthetic oligonucleotide
ttttgaacgtgggaataacttgaatttcgcagatacctacgtatatacatggaacc

SEQ ID NO: 106969 - DNA, 60 bp, Artificial
  Synthetic oligonucleotide
gacttcatatagagggtatgctggaatatttgggtatgcaataacaaaagatctgaagtc

SEQ ID NO: 106970 - DNA, 60 bp, Artificial
  Synthetic oligonucleotide
gagggtatgctggaatatttgggtatgcaataacaaaagatctgaagtccaatggaaaca

SEQ ID NO: 106971 - DNA, 60 bp, Artificial
  Synthetic oligonucleotide
gatcatacttttctaccatcagattttacatgctcattaaacacaatcttgacttcatat

SEQ ID NO: 106972 - DNA, 60 bp, Artificial
  Synthetic oligonucleotide
ccatcagattttacatgctcattaaacacaatcttgacttcatatagagggtatgctgga

SEQ ID NO: 106973 - DNA, 60 bp, Artificial
  Synthetic oligonucleotide
gttagtggaaaagagaatatgcaggatacggataaagataattatgcatccggccatgtt

SEQ ID NO: 106974 - DNA, 60 bp, Artificial
  Synthetic oligonucleotide
catatgatattgtaggatggcttagattgcataagactggtcaatttaaagtcaaatcag

SEQ ID NO: 106975 - DNA, 60 bp, Artificial
  Synthetic oligonucleotide
atctgaagtccaatggaaacaatcatatatacatcattccaaatgcaagagatgagaata

SEQ ID NO: 106976 - DNA, 60 bp, Artificial
  Synthetic oligonucleotide
gatgagaataatttcgatacttttgggtcacatttaggattatcaagatactcacattct

SEQ ID NO: 106977 - DNA, 57 bp, Artificial
  Synthetic oligonucleotide
ctggatcagtctattttaaagaatatactgatatcgcttcattctcaattgatccac

SEQ ID NO: 106978 - DNA, 60 bp, Artificial
  Synthetic oligonucleotide
ggaattgtaagagttaggaccaagagaaaatgtagcgattgtacaagtcggtggctcaga

SEQ ID NO: 106979 - DNA, 60 bp, Artificial
  Synthetic oligonucleotide
ggctggatataaagagcaggttactacaaaagacgaaattgagcaacagatggacagaat

SEQ ID NO: 106980 - DNA, 60 bp, Artificial
  Synthetic oligonucleotide
tgaattggcgggaatggctgcgttttagttgggctttcgcttgttactcttcgcgaggtg

SEQ ID NO: 106981 - DNA, 60 bp, Artificial
  Synthetic oligonucleotide
gtgattggtcatcatctcaacggtgtcactgatgtgctgaattggcgggaatggctgcgt

SEQ ID NO: 106982 - DNA, 60 bp, Artificial
  Synthetic oligonucleotide
ccggtcggtaaagaatacgcggctcctcagacggatgaaatctggcccagcttaattgac

SEQ ID NO: 106983 - DNA, 60 bp, Artificial
  Synthetic oligonucleotide
aactgtacgctctcatgggttgccgcatccccaacactagccgccaccctccggtcggta

SEQ ID NO: 106984 - DNA, 60 bp, Artificial
  Synthetic oligonucleotide
tgacatcgactggtctgacaccgctgagtacctcaaactgtacgctctcatgggttgccg

SEQ ID NO: 106985 - DNA, 60 bp, Artificial
  Synthetic oligonucleotide
gctgacgacatgaatgaattacttacgtgtctgcgcgattatggacagctgttcggttgg

SEQ ID NO: 106986 - DNA, 60 bp, Artificial
  Synthetic oligonucleotide
gcctccctcaagcgtatcctcactgacatgactattcagagaaattacgtctgccaggga

SEQ ID NO: 106987 - DNA, 60 bp, Artificial
  Synthetic oligonucleotide
gacccggacgttccgcaagtcgctggcgctgatcccgctaatgacgatcactggtttaag

SEQ ID NO: 106988 - DNA, 60 bp, Artificial
  Synthetic oligonucleotide
tattcgacgtacccggtaagtgggtcgctgctggccgtgacgccgagaaaccgccaccgt

SEQ ID NO: 106989 - DNA, 60 bp, Artificial
  Synthetic oligonucleotide
tgacgatcactggtttaagtatacttgccttggtgacatcccgtctgccacccgcaatta

SEQ ID NO: 106990 - DNA, 60 bp, Artificial
  Synthetic oligonucleotide
ccgcccttaaagctcgggtcatgaagggccgatataactgggagcgtctttcctcgtcgt

SEQ ID NO: 106991 - DNA, 60 bp, Artificial
  Synthetic oligonucleotide
cagccttatccttgcgctccatgtatcgtaacaaagggtttggcggcaaagcgcccgcaa

SEQ ID NO: 106992 - DNA, 60 bp, Artificial
  Synthetic oligonucleotide
cacgcctacaccttgcttcaaatgaagagcgtattcccagccttatccttgcgctccatg

SEQ ID NO: 106993 - DNA, 60 bp, Artificial
  Synthetic oligonucleotide
cgcatcgcatttatgcttctaatcgctgccatccacgccgaagtcacgatgggtattcgg

SEQ ID NO: 106994 - DNA, 58 bp, Artificial
  Synthetic oligonucleotide
cccgcaattactttggtgaatctctcttcgtgggtcgggtagtttcaggattggacgt

SEQ ID NO: 106995 - DNA, 60 bp, Artificial
  Synthetic oligonucleotide
cctccggtagcgttgttactgataaggtcatccctctcattctctacgcctccactcccc

SEQ ID NO: 106996 - DNA, 60 bp, Artificial
  Synthetic oligonucleotide
gcgcccgcaatagagtggactgaaccgcgctctaaatacaaattccgatggactggcgtc

SEQ ID NO: 106997 - DNA, 60 bp, Artificial
  Synthetic oligonucleotide
ccgtttggggcctatcggacgtcccgtcactcctttcccaattcggagtatatgccggtt

SEQ ID NO: 106998 - DNA, 60 bp, Artificial
  Synthetic oligonucleotide
ggtcgacatcggacatatcatcattcgagaacgcaacgctcatcctcgacataatcacga

SEQ ID NO: 106999 - DNA, 60 bp, Artificial
  Synthetic oligonucleotide
ccgcacctcataccttagtcgccaactacattaataaacacatgaacctctccacaacct

SEQ ID NO: 107000 - DNA, 60 bp, Artificial
  Synthetic oligonucleotide
aatcgaaaatgatgccaccaccctgcgcgcggaacgtgctcgatgcgcttccactttcta

SEQ ID NO: 107001 - DNA, 60 bp, Artificial
  Synthetic oligonucleotide
tcaaacccgggatcactcaaccatcggctaaatcccgcgacaagtcaatctggatgtcgc

SEQ ID NO: 107002 - DNA, 60 bp, Artificial
  Synthetic oligonucleotide
gcacgatgatggagtatttcctcaatgtgcacgccccgtcacacgtcaagtctgcctccc

SEQ ID NO: 107003 - DNA, 60 bp, Artificial
  Synthetic oligonucleotide
cgagatagatgggtcggcagccgctctcagtggtaacttgcgggtctggatgcgtgatgt

SEQ ID NO: 107004 - DNA, 60 bp, Artificial
  Synthetic oligonucleotide
gcgggtctggatgcgtgatgtttagtggttgacttttggcgtccttcctggtgcatcact

SEQ ID NO: 107005 - DNA, 60 bp, Artificial
  Synthetic oligonucleotide
catcgccgtactgaatggtatcggtatgtcggactcggaagcccaccaaatcgccggacg

SEQ ID NO: 107006 - DNA, 60 bp, Artificial
  Synthetic oligonucleotide
atcgccggacgtatctccctagccaatgctcaactcgtccagatagcgcgagtcgtacac

SEQ ID NO: 107007 - DNA, 60 bp, Artificial
  Synthetic oligonucleotide
ccctcaataccggtccgtacattcaccatcacgcctatgacttcaaacccgggatcactc

SEQ ID NO: 107008 - DNA, 60 bp, Artificial
  Synthetic oligonucleotide
gcgacgcctccatcacttacaattacttcctctcggttatttgcggagctatgcatgagg

SEQ ID NO: 107009 - DNA, 60 bp, Artificial
  Synthetic oligonucleotide
atgcatgagggtttcgaggtcggcaacgctgacgccgcgttcatgggagttccctccacc

SEQ ID NO: 107010 - DNA, 60 bp, Artificial
  Synthetic oligonucleotide
gcttgcagactatggtgcagcacttggctgatctgtacgctgctggcttccgctattccg

SEQ ID NO: 107011 - DNA, 60 bp, Artificial
  Synthetic oligonucleotide
ccgctattccgtctctgacgctttctccagcggcaacaaattctcttttcccacgtccac

SEQ ID NO: 107012 - DNA, 60 bp, Artificial
  Synthetic oligonucleotide
tatgccggttaccatgcagctcagcactatcgacggcccaaacctgcgcctgagacggcc

SEQ ID NO: 107013 - DNA, 60 bp, Artificial
  Synthetic oligonucleotide
aaggaccagcgcgtcatttatacgacacgtggcgagccgctgcccgtcaaatagcccaag

SEQ ID NO: 107014 - DNA, 59 bp, Artificial
  Synthetic oligonucleotide
tccatccttaacggctggcgcgattggctcatatcccacgcttccacaacgcttccacc

SEQ ID NO: 107015 - DNA, 60 bp, Artificial
  Synthetic oligonucleotide
tccctggtggaccttcgtgtatctcggcattccaccgattcttttacccggccaaacgcc

SEQ ID NO: 107016 - DNA, 60 bp, Artificial
  Synthetic oligonucleotide
tcgcgaggtggctatactaatcctaaaggccaatcattctcggcacagtatccctggtgg

SEQ ID NO: 107017 - DNA, 60 bp, Artificial
  Synthetic oligonucleotide
ccattcgcatgctaggtttcttacttctggtgcaagctcgtcctcgcgtcccctcaggcc

SEQ ID NO: 107018 - DNA, 60 bp, Artificial
  Synthetic oligonucleotide
ccccacgcagtcgcccgcccttcacgctatatggcaggtaatgcagtactacaaggttgc

SEQ ID NO: 107019 - DNA, 60 bp, Artificial
  Synthetic oligonucleotide
cgactccgtccgattcgtccgcgacgtgatggctcttaccagtgggatgtatcttgtgcg

SEQ ID NO: 107020 - DNA, 60 bp, Artificial
  Synthetic oligonucleotide
gggatgtatcttgtgcgtcaacccaccatgtccgtacttcgcgagtactcccaagtccct

SEQ ID NO: 107021 - DNA, 60 bp, Artificial
  Synthetic oligonucleotide
gagcttaccggtgtcctgatgtacctcagagccgcttcctctcatagtcacgcctacacc

SEQ ID NO: 107022 - DNA, 60 bp, Artificial
  Synthetic oligonucleotide
ctacgcctccactcccccaaacaccgtcgtcaatgtcgacattaaggcttgcgacgcctc

SEQ ID NO: 107023 - DNA, 60 bp, Artificial
  Synthetic oligonucleotide
aatacgtcaccgcccgaggaggttccagcgcgtcgctgaagttcgcccttaaagtgacag

SEQ ID NO: 107024 - DNA, 60 bp, Artificial
  Synthetic oligonucleotide
gcttcgctgttaaccaggatcgtgtagagcgcgttcctactatagacgacccagacgacg

SEQ ID NO: 107025 - DNA, 60 bp, Artificial
  Synthetic oligonucleotide
ctatagacgacccagacgacgtgtacgttccgaactccgacatcggccccctcctcactt

SEQ ID NO: 107026 - DNA, 60 bp, Artificial
  Synthetic oligonucleotide
acagatcacattttcgaacaagcagcttccacctggcacgtccagccccgatcactcacc

SEQ ID NO: 107027 - DNA, 60 bp, Artificial
  Synthetic oligonucleotide
gcacgtccagccccgatcactcacctataagttattagatcatattcccttttctactcc

SEQ ID NO: 107028 - DNA, 60 bp, Artificial
  Synthetic oligonucleotide
tgttcaacgccctacctcaaccactacaacaactctcattagctctggccggtgagatac

SEQ ID NO: 107029 - DNA, 60 bp, Artificial
  Synthetic oligonucleotide
ttgctggtgtgtactacgcccctgctctggtcgtcccatctggcgctatatggtggatcc

SEQ ID NO: 107030 - DNA, 60 bp, Artificial
  Synthetic oligonucleotide
gctaaagtcacgcctgtcgtcgtcactatggcttcctcactcagagctgcgatctccaag

SEQ ID NO: 107031 - DNA, 60 bp, Artificial
  Synthetic oligonucleotide
gctaaagtcacacctgttatcgtcgccatggcttcctcactcagagctgcgatctcaaag

SEQ ID NO: 107032 - DNA, 60 bp, Artificial
  Synthetic oligonucleotide
gtaactcccacggtcagttgtctacagagattaatagaattaaggaggctgagggtcatt

SEQ ID NO: 107033 - DNA, 60 bp, Artificial
  Synthetic oligonucleotide
cagcagaggattcccatttacccgtagggtcggctgattgtttggctgctttgctcgatt

SEQ ID NO: 107034 - DNA, 60 bp, Artificial
  Synthetic oligonucleotide
tttgctcgatttattatatcgtaggtcggaggaaatgacattagcattaaatcgagaata

SEQ ID NO: 107035 - DNA, 60 bp, Artificial
  Synthetic oligonucleotide
ctcgaattgataggctgactcaggaagtagtagctttacaaaatagtgagaagccgaggt

SEQ ID NO: 107036 - DNA, 60 bp, Artificial
  Synthetic oligonucleotide
tcccatgttattgcgatctatatcccgagatgttccgggctgaggttgcttccgtgatgg

SEQ ID NO: 107037 - DNA, 60 bp, Artificial
  Synthetic oligonucleotide
ggtgttctgcatgaagtcgaatcaaacattgtgttggaccaatgtgatcatgttcccggg

SEQ ID NO: 107038 - DNA, 60 bp, Artificial
  Synthetic oligonucleotide
gccttgcgggtgtctcatccgtagtgaatgaggtgcagggattacgtaactcccacggtc

SEQ ID NO: 107039 - DNA, 60 bp, Artificial
  Synthetic oligonucleotide
tgagactggtcatttaaggagtcaacttgggaattctctcgtgacaatttttaagccaat

SEQ ID NO: 107040 - DNA, 60 bp, Artificial
  Synthetic oligonucleotide
gagtcgtggtactacaccgaactgtgtactagttccccattagatgttggtggctcaggg

SEQ ID NO: 107041 - DNA, 60 bp, Artificial
  Synthetic oligonucleotide
gccaataattaagatgatatcgagagatataggaatgtgtctgaaagttggcagtgctga

SEQ ID NO: 107042 - DNA, 60 bp, Artificial
  Synthetic oligonucleotide
aaaacaaagcgggccattcaagcactttcgatctctcagggtgagtcgtggtactacacc

SEQ ID NO: 107043 - DNA, 60 bp, Artificial
  Synthetic oligonucleotide
cccacggtcagttgtctacagagattaatagaattaaggaggctgagggtcatttcttga

SEQ ID NO: 107044 - DNA, 60 bp, Artificial
  Synthetic oligonucleotide
gagggtcatttcttgaatgatctagagagtgtgcgccgtcatttgcaaggtgagactggt

SEQ ID NO: 107045 - DNA, 60 bp, Artificial
  Synthetic oligonucleotide
atgttggtggctcagggttagctttcttcatgcgtattcgcggagtcggactacggtcag

SEQ ID NO: 107046 - DNA, 60 bp, Artificial
  Synthetic oligonucleotide
gctcagggttagctttcttcatgcgtattcgcggagtcggactacggtcagaggcagggg

SEQ ID NO: 107047 - DNA, 60 bp, Artificial
  Synthetic oligonucleotide
ccaatgtgatcatgttcccgggattgttcggttgtctcgagatcgggtgtctcctgtgga

SEQ ID NO: 107048 - DNA, 60 bp, Artificial
  Synthetic oligonucleotide
aatagtgagaagccgaggttattctatcttcatgataaaagtgagattaaggctgcagca

SEQ ID NO: 107049 - DNA, 56 bp, Artificial
  Synthetic oligonucleotide
cgcgatccagacttatcaaaatctggtggcggggatgttaggagagcttaacaagt

SEQ ID NO: 107050 - DNA, 51 bp, Artificial
  Synthetic oligonucleotide
cccctgttttgggaaccgtgtaccatcatgaccgatatattcagggtgtat

SEQ ID NO: 107051 - DNA, 55 bp, Artificial
  Synthetic oligonucleotide
ctacggtcagaggcaggggtaacaccttggaaggtgagtgaaatttttaagcctc

SEQ ID NO: 107052 - DNA, 60 bp, Artificial
  Synthetic oligonucleotide
tcagggtgagtcgtggtactacaccgaactgtgtactagttccccattagatgttggtgg

SEQ ID NO: 107053 - DNA, 60 bp, Artificial
  Synthetic oligonucleotide
ctctttcgtctcgaattgataggctgactcaggaagtagtagctttacaaaatagtgaga

SEQ ID NO: 107054 - DNA, 60 bp, Artificial
  Synthetic oligonucleotide
gaccaatgtgatcatgttcccgggattgttcggttgtctcgagatcgggtgtctcctgtg

SEQ ID NO: 107055 - DNA, 60 bp, Artificial
  Synthetic oligonucleotide
aaattctgccggtgggtgttctgcatgaagtcgaatcaaacattgtgttggaccaatgtg

SEQ ID NO: 107056 - DNA, 60 bp, Artificial
  Synthetic oligonucleotide
ggatgagtcagcgtttcatttgcccccctgttttgggaaccgtgtaccatcatgaccgat

SEQ ID NO: 107057 - DNA, 60 bp, Artificial
  Synthetic oligonucleotide
gcagcaggagcattagaggccgtagctgcgcatgtgtacttagggtggatgagtcagcgt

SEQ ID NO: 107058 - DNA, 60 bp, Artificial
  Synthetic oligonucleotide
ggctgcagcaggagcattagaggccgtagctgcgcatgtgtacttagggtggatgagtca

SEQ ID NO: 107059 - DNA, 60 bp, Artificial
  Synthetic oligonucleotide
gagaagccgaggttattctatcttcatgataaaagtgagattaaggctgcagcaggagca

SEQ ID NO: 107060 - DNA, 60 bp, Artificial
  Synthetic oligonucleotide
tgaaatggttcaccttgataaagggacgatgatcctgttaattcgtgatgaaattctgcc

SEQ ID NO: 107061 - DNA, 60 bp, Artificial
  Synthetic oligonucleotide
cagggtgtatattataaattggtggcgtgtactattgaaatggttcaccttgataaaggg

SEQ ID NO: 107062 - DNA, 60 bp, Artificial
  Synthetic oligonucleotide
catgaccgatatattcagggtgtatattataaattggtggcgtgtactattgaaatggtt

SEQ ID NO: 107063 - DNA, 60 bp, Artificial
  Synthetic oligonucleotide
atctatatcccgagatgttccgggctgaggttgcttccgtgatggcggtgcaccacgcca

SEQ ID NO: 107064 - DNA, 60 bp, Artificial
  Synthetic oligonucleotide
tccaagacccagctgttcccgcgatccagacttatcaaaatctggtggcggggatgttag

SEQ ID NO: 107065 - DNA, 60 bp, Artificial
  Synthetic oligonucleotide
atatcgtaggtcggaggaaatgacattagcattaaatcgagaatataagcctcgtagacg

SEQ ID NO: 107066 - DNA, 60 bp, Artificial
  Synthetic oligonucleotide
aaggaaaatttgagcagttggagaggaaagtgaataaccatttagccgtcaatccgctta

SEQ ID NO: 107067 - DNA, 60 bp, Artificial
  Synthetic oligonucleotide
ggttcaccttgataaagggacgatgatcctgttaattcgtgatgaaattctgccggtggg

SEQ ID NO: 107068 - DNA, 60 bp, Artificial
  Synthetic oligonucleotide
aatccgcttacgaagctaagtcggataaagcagagaatggatcagtttgaaactagcctt

SEQ ID NO: 107069 - DNA, 60 bp, Artificial
  Synthetic oligonucleotide
cagttggagaggaaagtgaataaccatttagccgtcaatccgcttacgaagctaagtcgg

SEQ ID NO: 107070 - DNA, 60 bp, Artificial
  Synthetic oligonucleotide
aactagccttgcgggtgtctcatccgtagtgaatgaggtgcagggattacgtaactccca

SEQ ID NO: 107071 - DNA, 60 bp, Artificial
  Synthetic oligonucleotide
ctaagtcggataaagcagagaatggatcagtttgaaactagccttgcgggtgtctcatcc

SEQ ID NO: 107072 - DNA, 59 bp, Artificial
  Synthetic oligonucleotide
tgggactaaggtatatggtatgttcaattatgtgtctttatcaagtttggtggtcgttg

SEQ ID NO: 107073 - DNA, 59 bp, Artificial
  Synthetic oligonucleotide
atctggcatttcggataattatgacttgtaacgttggtacgatgtattttactgctacc

SEQ ID NO: 107074 - DNA, 60 bp, Artificial
  Synthetic oligonucleotide
agtagcaaaattaattttgtggtctgtaactgagacaactaattatttgagttttgaaaa

SEQ ID NO: 107075 - DNA, 60 bp, Artificial
  Synthetic oligonucleotide
gcacatgtggaagcattaatcgctgttgaaggtgctgcagtccgtaaccaagtagcaaaa

SEQ ID NO: 107076 - DNA, 60 bp, Artificial
  Synthetic oligonucleotide
tttcaatacaacctgctcaacaagataacaagaaaaatttggtaatagagttcccaccag

SEQ ID NO: 107077 - DNA, 58 bp, Artificial
  Synthetic oligonucleotide
gacattttgtaagaatggcagcctcgggatggaacgcagtgataccaaagacctcaag

SEQ ID NO: 107078 - DNA, 60 bp, Artificial
  Synthetic oligonucleotide
cggtggactttccaaaaccagaaatttacgtgtagtgttggcagtgatctggcatttcgg

SEQ ID NO: 107079 - DNA, 60 bp, Artificial
  Synthetic oligonucleotide
aaactgatttctaaggcgggtaaggatgttgagtcaggctactataaaggtgatacaaaa

SEQ ID NO: 107080 - DNA, 60 bp, Artificial
  Synthetic oligonucleotide
gttttgaaaaactgatttctaaggcgggtaaggatgttgagtcaggctactataaaggtg

SEQ ID NO: 107081 - DNA, 60 bp, Artificial
  Synthetic oligonucleotide
tataaaggtgatacaaaaacaaagcgggccattcaagcactttcgatctctcagggtgag

SEQ ID NO: 107082 - DNA, 60 bp, Artificial
  Synthetic oligonucleotide
tacgtgcaagatagaataacttatagactaccaaaattgttgattgagaggtttttagat

SEQ ID NO: 107083 - DNA, 60 bp, Artificial
  Synthetic oligonucleotide
ggggacgatccagaaaagatgctaaagcctaacgattcgaattttataacgcgattatgc

SEQ ID NO: 107084 - DNA, 60 bp, Artificial
  Synthetic oligonucleotide
gagccgtttattcatggtttgtaaaatgttggggggtcggttcgaaggaaataatcgtgt

SEQ ID NO: 107085 - DNA, 60 bp, Artificial
  Synthetic oligonucleotide
ggatttcgaaagattcaaaacccgtattcaatagcaattcaaaaatcgaagtttttcgaa

SEQ ID NO: 107086 - DNA, 60 bp, Artificial
  Synthetic oligonucleotide
agggaattgaagagttcgaatttgagaattgtcgttttcaactgtctgatttggttaagg

SEQ ID NO: 107087 - DNA, 60 bp, Artificial
  Synthetic oligonucleotide
accactcaagttttgaatttgtaataagcagagcgagagatgaatgtcaggtattcggtg

SEQ ID NO: 107088 - DNA, 56 bp, Artificial
  Synthetic oligonucleotide
agagatgaatgtcaggtattcggtgacatagctttaaaacattggtgtgcgttgtt

SEQ ID NO: 107089 - DNA, 60 bp, Artificial
  Synthetic oligonucleotide
tgcttagagcttcaaagggtataagaagacagattattaattacaaagttacaacggaac

SEQ ID NO: 107090 - DNA, 60 bp, Artificial
  Synthetic oligonucleotide
ggtccaacacaaatttcgaaaacaatgatgcatgctgcattactaaaagaaccaaaggct

SEQ ID NO: 107091 - DNA, 60 bp, Artificial
  Synthetic oligonucleotide
aattagatttgacgctcagaaattaaataaaagtggtgaatgtggtgatgaattctctat

SEQ ID NO: 107092 - DNA, 60 bp, Artificial
  Synthetic oligonucleotide
ggaatgtctatccaggctgggatgagacaaaagttgataaacatagcttaaagacaaaaa

SEQ ID NO: 107093 - DNA, 60 bp, Artificial
  Synthetic oligonucleotide
gagcaaatgttaatgtgttcattacgaagtgcagcagagggtttagtgcagagttagctc

SEQ ID NO: 107094 - DNA, 60 bp, Artificial
  Synthetic oligonucleotide
aagagctacatgagagcaaatgttaatgtgttcattacgaagtgcagcagagggtttagt

SEQ ID NO: 107095 - DNA, 60 bp, Artificial
  Synthetic oligonucleotide
tcgtaggatatcgaaaattggaaaggacaattatggagaatgggaagatgagatctagac

SEQ ID NO: 107096 - DNA, 60 bp, Artificial
  Synthetic oligonucleotide
agggtttagtgcagagttagctcatattatattatgtttcaaaagtattttcgtaggata

SEQ ID NO: 107097 - DNA, 60 bp, Artificial
  Synthetic oligonucleotide
agatctagacagtttgacagcattgaagatggttatactttatgtatggttagaaaccct

SEQ ID NO: 107098 - DNA, 60 bp, Artificial
  Synthetic oligonucleotide
cgaaaattggaaaggacaattatggagaatgggaagatgagatctagacagtttgacagc

SEQ ID NO: 107099 - DNA, 60 bp, Artificial
  Synthetic oligonucleotide
tatgatcagctaccagaaatagagaaaatagtaccagctgacgctcctttcaaattctca

SEQ ID NO: 107100 - DNA, 60 bp, Artificial
  Synthetic oligonucleotide
ggatttacggtgaatgaattattagaagctggatatggaaaaggcagactcattggatct

SEQ ID NO: 107101 - DNA, 60 bp, Artificial
  Synthetic oligonucleotide
tcacgatgaagtccgagtcgtttcagagatcgcggggaatgtctatccaggctgggatga

SEQ ID NO: 107102 - DNA, 60 bp, Artificial
  Synthetic oligonucleotide
cattatatgtcccagtagattggaatggatatggtgcacatccatcggcattgaacgtcg

SEQ ID NO: 107103 - DNA, 60 bp, Artificial
  Synthetic oligonucleotide
caacggggtctcgagttattgatgcaggagatacatttcggaacacatcagatccaacca

SEQ ID NO: 107104 - DNA, 60 bp, Artificial
  Synthetic oligonucleotide
gaaaacgtatgggcccggtgcagaaagaagaaacttacccataagagtagtatcgagaca

SEQ ID NO: 107105 - DNA, 60 bp, Artificial
  Synthetic oligonucleotide
aacacatcatcaggaatgtcaacatctgtagaagtaatgaaaacgtatgggcccggtgca

SEQ ID NO: 107106 - DNA, 60 bp, Artificial
  Synthetic oligonucleotide
ctacgtatggcgaaaaacacatcatcaggaatgtcaacatctgtagaagtaatgaaaacg

SEQ ID NO: 107107 - DNA, 60 bp, Artificial
  Synthetic oligonucleotide
gcgatatgacagaaaactatatcattcaagcttactatgaagcagaaagacatgggtata

SEQ ID NO: 107108 - DNA, 60 bp, Artificial
  Synthetic oligonucleotide
gttaaaacattccaatggctgtcgtggcacatcgacgtgaacttactcaaagagctgcag

SEQ ID NO: 107109 - DNA, 60 bp, Artificial
  Synthetic oligonucleotide
acgccgcccaagatttttattacaaatactctgaattacggaagacaaatcaaccgcaag

SEQ ID NO: 107110 - DNA, 60 bp, Artificial
  Synthetic oligonucleotide
cattccaatggctgtcgtggcacatcgacgtgaacttactcaaagagctgcagaacggat

SEQ ID NO: 107111 - DNA, 60 bp, Artificial
  Synthetic oligonucleotide
caaatggagaccaataccactcaagttttgaatttgtaataagcagagcgagagatgaat

SEQ ID NO: 107112 - DNA, 60 bp, Artificial
  Synthetic oligonucleotide
caaccgcaagacagtagcaataaacgtgatgagaaagaaggcaagatcaaaggtaaaact

SEQ ID NO: 107113 - DNA, 60 bp, Artificial
  Synthetic oligonucleotide
ttagatgaaaaagtatgtgaaaaattaggaaattatatcgcacgagacaaaattagattt

SEQ ID NO: 107114 - DNA, 60 bp, Artificial
  Synthetic oligonucleotide
gaacacatcagatccaaccatttgtacattagcactagattattcggaatatgataccca

SEQ ID NO: 107115 - DNA, 60 bp, Artificial
  Synthetic oligonucleotide
gaaagagtccaaggcaaaggatgtcatatacagatcagatagacagtattttgagaggag

SEQ ID NO: 107116 - DNA, 60 bp, Artificial
  Synthetic oligonucleotide
ccggagaaaatactacgttagtatggaattctattcataatttagcagcgggtacaataa

SEQ ID NO: 107117 - DNA, 60 bp, Artificial
  Synthetic oligonucleotide
atttaaggtatgaaggatttacggtgaatgaattattagaagctggatatggaaaaggca

SEQ ID NO: 107118 - DNA, 60 bp, Artificial
  Synthetic oligonucleotide
cgacacaataaagttatttggacatgaggcctccgaagcaaagactacttttctaccttt

SEQ ID NO: 107119 - DNA, 58 bp, Artificial
  Synthetic oligonucleotide
tgcgaaacaaggggtatacattggacaagacagaatgatgttcatttcatcggaaaga

SEQ ID NO: 107120 - DNA, 60 bp, Artificial
  Synthetic oligonucleotide
tgatggagagattttcaagattcccgcatgaattaacgcaaacagagcgagatgcagtag

SEQ ID NO: 107121 - DNA, 60 bp, Artificial
  Synthetic oligonucleotide
caatacgttaaaatatttcaagtggaatttgaggagacgagggaggaaagagagacgttc

SEQ ID NO: 107122 - DNA, 60 bp, Artificial
  Synthetic oligonucleotide
ttatgttgggaaatagaaagagtccaaggcaaaggatgtcatatacagatcagatagaca

SEQ ID NO: 107123 - DNA, 60 bp, Artificial
  Synthetic oligonucleotide
ggatttcaatagctaatcttacacctcaaggaatggatttacagattacaacacaatacg

SEQ ID NO: 107124 - DNA, 60 bp, Artificial
  Synthetic oligonucleotide
agattacaacacaatacgttaaaatatttcaagtggaatttgaggagacgagggaggaaa

SEQ ID NO: 107125 - DNA, 60 bp, Artificial
  Synthetic oligonucleotide
ccagaaatagagaaaatagtaccagctgacgctcctttcaaattctcaccaccaggggtt

SEQ ID NO: 107126 - DNA, 60 bp, Artificial
  Synthetic oligonucleotide
caaattctcaccaccaggggttaaactaatacgaaatttgggtttaataaagaataaaga

SEQ ID NO: 107127 - DNA, 60 bp, Artificial
  Synthetic oligonucleotide
ggtagctccttgggatggaagtgatttagtttcagtttcaactcatctttccggagaaaa

SEQ ID NO: 107128 - DNA, 60 bp, Artificial
  Synthetic oligonucleotide
cagatagacagtattttgagaggagatgttattatgaggggtttcataacgtcgaaccat

SEQ ID NO: 107129 - DNA, 60 bp, Artificial
  Synthetic oligonucleotide
cgttagtatggaattctattcataatttagcagcgggtacaataattcgagaggaaatag

SEQ ID NO: 107130 - DNA, 60 bp, Artificial
  Synthetic oligonucleotide
ggtacaataattcgagaggaaatagcgaaaaagaatctgaacgtactaaatgttgagtct

SEQ ID NO: 107131 - DNA, 60 bp, Artificial
  Synthetic oligonucleotide
gtaacattattaaatcatcgaggagatgtaattgacggattattagatacagtattcgac

SEQ ID NO: 107132 - DNA, 60 bp, Artificial
  Synthetic oligonucleotide
cttaataattgcggctgtagtagcgttgataacgtcagccagtacgctgacgagtgactt

SEQ ID NO: 107133 - DNA, 60 bp, Artificial
  Synthetic oligonucleotide
cttaataatagcggctgtagtagcgttgataacgtcagccagtacgctgacgagtgactt

SEQ ID NO: 107134 - DNA, 60 bp, Artificial
  Synthetic oligonucleotide
tcttttttcacacaaccagagtttcgcaccaattacccgattttgccgttggtcagacga

SEQ ID NO: 107135 - DNA, 60 bp, Artificial
  Synthetic oligonucleotide
tgagctgccgtcgactgtcctcggaagcggcggagttctttacagtaagcaccatcggac

SEQ ID NO: 107136 - DNA, 60 bp, Artificial
  Synthetic oligonucleotide
attgtgagaggttgggctgccgtcgactgtcctcggaagcggcggagtccttcacagtaa

SEQ ID NO: 107137 - DNA, 60 bp, Artificial
  Synthetic oligonucleotide
tgcattcgcatcgtacgcagaagcgtttcgtgatgatgtgaggctgagacaaattaaacg

SEQ ID NO: 107138 - DNA, 60 bp, Artificial
  Synthetic oligonucleotide
tgcattcgcatcgtacgcagaagcgtttcgtgatgacgtgaggttgagacagattaaacg

SEQ ID NO: 107139 - DNA, 60 bp, Artificial
  Synthetic oligonucleotide
tgcattcgcatcgtacgcagaagcgtttcgtgatgatgtgaggctgagacagattaaacg

SEQ ID NO: 107140 - DNA, 60 bp, Artificial
  Synthetic oligonucleotide
attcgcatcgtacgcagaagcgtttcgtgatgacgtaagactaagacagattaaacgcca

SEQ ID NO: 107141 - DNA, 60 bp, Artificial
  Synthetic oligonucleotide
ggctaatggctacgtaactgatagatgctcgcccgtattcgggaacgcagattatcgcag

SEQ ID NO: 107142 - DNA, 60 bp, Artificial
  Synthetic oligonucleotide
tggttgggcgacgattgatgtcgagtatagagaacctgcgccctacgtacatgctcagcg

SEQ ID NO: 107143 - DNA, 60 bp, Artificial
  Synthetic oligonucleotide
attaatgcaatcgactttctcactagtttacaggatggcttgactacccattctgattta

SEQ ID NO: 107144 - DNA, 60 bp, Artificial
  Synthetic oligonucleotide
cttaaggaagttgcctcttgaaaagatattcattaagcgtggttatctaggtttgcctga

SEQ ID NO: 107145 - DNA, 60 bp, Artificial
  Synthetic oligonucleotide
ttctgatttaatgtctgctatagctggagttccttttgacggcttgttagctaataatga

SEQ ID NO: 107146 - DNA, 60 bp, Artificial
  Synthetic oligonucleotide
ctttctcactagtttacaggatggcttgactacccattctgatttaatgtctgctatagc

SEQ ID NO: 107147 - DNA, 60 bp, Artificial
  Synthetic oligonucleotide
ctaataatgagtacatcgacgatgacttatcagataatgaatgtaatgttaatttggatg

SEQ ID NO: 107148 - DNA, 60 bp, Artificial
  Synthetic oligonucleotide
ctgctatagctggagttccttttgacggcttgttagctaataatgagtacatcgacgatg

SEQ ID NO: 107149 - DNA, 60 bp, Artificial
  Synthetic oligonucleotide
aatttggatgcaggtattgacaatttagagtttaacaatttagacgttgatgactctgac

SEQ ID NO: 107150 - DNA, 61 bp, Artificial
  Synthetic oligonucleotide
gtacatcgacgatgacttatcagataatgaatgtaatgttaatttggatgcaggtattgac

SEQ ID NO: 107151 - DNA, 60 bp, Artificial
  Synthetic oligonucleotide
tgactctgactctgagtgagtgttagtcttatcatcattgttactttccgttggtttatt

SEQ ID NO: 107152 - DNA, 60 bp, Artificial
  Synthetic oligonucleotide
ggtattgacaatttagagtttaacaatttagacgttgatgactctgactctgagtgagtg

SEQ ID NO: 107153 - DNA, 60 bp, Artificial
  Synthetic oligonucleotide
tagatctgaattctgtcgctgtggataataggtttagaggtaacgctaccatggtggcgt

SEQ ID NO: 107154 - DNA, 59 bp, Artificial
  Synthetic oligonucleotide
tagatctgaattctgtcgctgtggataataggtttagaggtaacgctaccatggtggcg

SEQ ID NO: 107155 - DNA, 60 bp, Artificial
  Synthetic oligonucleotide
gaaggacaaccattcactgttaaatttcgtcagaaagggaagattcagcacattgagctt

SEQ ID NO: 107156 - DNA, 60 bp, Artificial
  Synthetic oligonucleotide
ccgacccatccgaaggacacttttgtatctatagattcgatgaaggacaaccattcactg

SEQ ID NO: 107157 - DNA, 60 bp, Artificial
  Synthetic oligonucleotide
gttatggatccgacccatccgaaggacacttttgtatctatagattcgatgaaggacaac

SEQ ID NO: 107158 - DNA, 60 bp, Artificial
  Synthetic oligonucleotide
tgtcggccttaccctaattaataacaatatgactatagatctgaattctgtcgctgtgga

SEQ ID NO: 107159 - DNA, 60 bp, Artificial
  Synthetic oligonucleotide
gtatttcactagcattgtcggccttaccctaattaataacaatatgactatagatctgaa

SEQ ID NO: 107160 - DNA, 52 bp, Artificial
  Synthetic oligonucleotide
cattgagcttgagaactcgattggccataatggtgctattaactacggtagt

SEQ ID NO: 107161 - DNA, 60 bp, Artificial
  Synthetic oligonucleotide
actgttaaatttcgtcagaaagggaagattcagcacattgagcttgagaactcgattggc

SEQ ID NO: 107162 - DNA, 60 bp, Artificial
  Synthetic oligonucleotide
tgttgtttcatgagcatacgaactgtattcacggtgattgtaatccatctaacataatgt

SEQ ID NO: 107163 - DNA, 60 bp, Artificial
  Synthetic oligonucleotide
gcatacgaactgtattcacggtgattgtaatccatctaacataatgtgtgacaaaatggg

SEQ ID NO: 107164 - DNA, 60 bp, Artificial
  Synthetic oligonucleotide
aataaaagatttgcctatgaataagattcttgctggactaaaagcattaatgttgtttca

SEQ ID NO: 107165 - DNA, 60 bp, Artificial
  Synthetic oligonucleotide
cctatgaataagattcttgctggactaaaagcattaatgttgtttcatgagcatacgaac

SEQ ID NO: 107166 - DNA, 60 bp, Artificial
  Synthetic oligonucleotide
atgatgtatttgctgggatgtatggtttaattaatttgcgaaattcgaagtttaacgata

SEQ ID NO: 107167 - DNA, 60 bp, Artificial
  Synthetic oligonucleotide
tttaacgataatgcttataactatggcataattattgaacagtgttatccaataaaagat

SEQ ID NO: 107168 - DNA, 60 bp, Artificial
  Synthetic oligonucleotide
atggtggcgttgaaatgtaatgttttgggtaacctattccttaagaagatagtctctagt

SEQ ID NO: 107169 - DNA, 60 bp, Artificial
  Synthetic oligonucleotide
ggtggcgttgaaatgtaatgttttgggtaacctattccttaagaagatagtctctagtga

SEQ ID NO: 107170 - DNA, 60 bp, Artificial
  Synthetic oligonucleotide
cccggcttctctggtaacaagagtagttacgtatatcaacgagtattataaagatttgac

SEQ ID NO: 107171 - DNA, 60 bp, Artificial
  Synthetic oligonucleotide
cgagatagttagtgacttaaggaagttgcctcttgaaaagatattcattaagcgtggtta

SEQ ID NO: 107172 - DNA, 60 bp, Artificial
  Synthetic oligonucleotide
gagaggctgttgtttcaacccagcagtcgatcgacgaacacgtactcggtgtggtaaccg

SEQ ID NO: 107173 - DNA, 60 bp, Artificial
  Synthetic oligonucleotide
gacgcgggttcatagagaggctgttgtttcaacccagcagtcgatcgacgaacacgtact

SEQ ID NO: 107174 - DNA, 60 bp, Artificial
  Synthetic oligonucleotide
ctctgagtgagtgttagtcttatcatcattgttactttccgttggtttatttgggtgacg

SEQ ID NO: 107175 - DNA, 60 bp, Artificial
  Synthetic oligonucleotide
gcaggttttctaaacagtagtagattatattaatcagattgtgcaagttatgtccaaaag

SEQ ID NO: 107176 - DNA, 60 bp, Artificial
  Synthetic oligonucleotide
tcttatacagtagtagattatattaatcagattgtgcaagttatgtccaaaagatcacgg

SEQ ID NO: 107177 - DNA, 57 bp, Artificial
  Synthetic oligonucleotide
tctatacggtagtagattatattaatcagattgtgcaagttatgtccaaaagatcac

SEQ ID NO: 107178 - DNA, 52 bp, Artificial
  Synthetic oligonucleotide
agaggcgatgtatgatcgagagacggtttggctccaatgtttcaaaagtttt

SEQ ID NO: 107179 - DNA, 60 bp, Artificial
  Synthetic oligonucleotide
gagatggtgcggtgcatcattactctgtgctatgccgagaaggttcactttgctggattc

SEQ ID NO: 107180 - DNA, 60 bp, Artificial
  Synthetic oligonucleotide
ctcagtgaggatgaagatgaaagagcttatgccactatgcttgagatggtgcggtgcatc

SEQ ID NO: 107181 - DNA, 60 bp, Artificial
  Synthetic oligonucleotide
gcaacgcagcgcgctgcttagactcttctgcttcgtatgttacggatatgcgccacgcgc

SEQ ID NO: 107182 - DNA, 60 bp, Artificial
  Synthetic oligonucleotide
gcaacgtagcgcgttgcttagactcttctgcttcgtatgttacggatatgcgccacgcgc

SEQ ID NO: 107183 - DNA, 60 bp, Artificial
  Synthetic oligonucleotide
accagaacttggtgaggatgaagatgaaagagcttatgccactatgtttgagatggtgcg

SEQ ID NO: 107184 - DNA, 60 bp, Artificial
  Synthetic oligonucleotide
gaccagaactcagtgaggatgaagatgaaagagcttatgccactatgcttgagatggtgc

SEQ ID NO: 107185 - DNA, 60 bp, Artificial
  Synthetic oligonucleotide
cgaagagcatgtgggtaatgattcagtgttcaagacaaagctggttcgtgatgagcagat

SEQ ID NO: 107186 - DNA, 60 bp, Artificial
  Synthetic oligonucleotide
agatcggagagcatgtaggtaatgattcagtgttcaagacaaagctggttcgtgatgaac

SEQ ID NO: 107187 - DNA, 60 bp, Artificial
  Synthetic oligonucleotide
aggcgcaacgcagcgcgctgcttagactcttctgcttcgtatgttacggatatgcgccac

SEQ ID NO: 107188 - DNA, 60 bp, Artificial
  Synthetic oligonucleotide
gttaacgaaggcgcaacgtagcgcgttgcttagactcttctgcttcgtatgttacggata

SEQ ID NO: 107189 - DNA, 60 bp, Artificial
  Synthetic oligonucleotide
agaacggttaagatcgaagagcatgtgggtaatgattcagtgttcaagacaaagctggtt

SEQ ID NO: 107190 - DNA, 60 bp, Artificial
  Synthetic oligonucleotide
agaatggttaagatcggagagcatgtaggtaatgattcagtgttcaagacaaagctggtt

SEQ ID NO: 107191 - DNA, 60 bp, Artificial
  Synthetic oligonucleotide
gagatggtgcgatgcatcattactctgtgttatgccgagaaggttcactttgctggattc

SEQ ID NO: 107192 - DNA, 60 bp, Artificial
  Synthetic oligonucleotide
agaggcgatgtatgatcgagagacggtttggctccaatgtttcaaaagtttttctcaacc

SEQ ID NO: 107193 - DNA, 60 bp, Artificial
  Synthetic oligonucleotide
cgctgtcagcaatgccatacatctatgtaccaatcagagaaggccaaatcgttaatccaa

SEQ ID NO: 107194 - DNA, 60 bp, Artificial
  Synthetic oligonucleotide
gctgtcagcaatgccatacatctatgtaccaatcagagaaggccaaatcgttaatccaac

SEQ ID NO: 107195 - DNA, 60 bp, Artificial
  Synthetic oligonucleotide
gcaacataatcagataaaacgggaagtagagaggcaaattaatacatgtccttattcagg

SEQ ID NO: 107196 - DNA, 60 bp, Artificial
  Synthetic oligonucleotide
caacataatcagataaaacgggaagtagagaggcaaattaatacatgtccttattcaggc

SEQ ID NO: 107197 - DNA, 60 bp, Artificial
  Synthetic oligonucleotide
acacaatcagataaaacgggaagtagagaggcaaattaatacatgtccttattcaggcta

SEQ ID NO: 107198 - DNA, 60 bp, Artificial
  Synthetic oligonucleotide
agtcagatatgtgcaacaactgtttgggaaagttccaacgggtgaatttccattgcatca

SEQ ID NO: 107199 - DNA, 60 bp, Artificial
  Synthetic oligonucleotide
gtcagatatgtgcaacaactgtttgggaaagttccaacgggtgaatttccattgcatcaa

SEQ ID NO: 107200 - DNA, 60 bp, Artificial
  Synthetic oligonucleotide
cgattcttaggtgccggaatggtgatgactgcgactggagttgctgtcgacatatatctg

SEQ ID NO: 107201 - DNA, 60 bp, Artificial
  Synthetic oligonucleotide
gcccgcgaaccgtcggttgatttgcgattaccattatgtgcgggtattgacccattaaac

SEQ ID NO: 107202 - DNA, 51 bp, Artificial
  Synthetic oligonucleotide
ggtaatgactgcgactggagttgctgtcgacatatatctggaggatataca

SEQ ID NO: 107203 - DNA, 60 bp, Artificial
  Synthetic oligonucleotide
ggaatggtgatgactgcgactggagttgctgtcgacatatatctggaggacattcacggc

SEQ ID NO: 107204 - DNA, 60 bp, Artificial
  Synthetic oligonucleotide
acgtgggacccactatttcaggcgattatgagatctcaatacgtgacagctaggggtggc

SEQ ID NO: 107205 - DNA, 60 bp, Artificial
  Synthetic oligonucleotide
aagactaagtctatttttcctcaaaacacgttgcacagtatgtatgaatctctagaaggg

SEQ ID NO: 107206 - DNA, 60 bp, Artificial
  Synthetic oligonucleotide
gatgacaagatggatggtggctaatggttacgtaactgacagatgctcacctatattcgg

SEQ ID NO: 107207 - DNA, 60 bp, Artificial
  Synthetic oligonucleotide
ggcccgcgaaccgtcggttgatttgcgattaccattatgtgcgggtattgacccattaaa

SEQ ID NO: 107208 - DNA, 60 bp, Artificial
  Synthetic oligonucleotide
ttatgggggttcctgcatccattgtaaatgatgagtctgtcgttggagtgagagctgcta

SEQ ID NO: 107209 - DNA, 60 bp, Artificial
  Synthetic oligonucleotide
ggggttcctgcatccattgtaaatgatgagtctgtcgttggagtgagagctgctaggccg

SEQ ID NO: 107210 - DNA, 60 bp, Artificial
  Synthetic oligonucleotide
ttaccagtgaaggcagcaactaagatatttcaggcggcacaattagcgaacttgccgttc

SEQ ID NO: 107211 - DNA, 60 bp, Artificial
  Synthetic oligonucleotide
ggcagcaactaagatatttcaggcggcacaattagcgaacttgccgttctcccacacatc

SEQ ID NO: 107212 - DNA, 60 bp, Artificial
  Synthetic oligonucleotide
acgccctctgatgacaagatggatggtggctaatggttacgtaactgacagatgctcaac

SEQ ID NO: 107213 - DNA, 60 bp, Artificial
  Synthetic oligonucleotide
acgccctctgatgacaagatggatggtggctaatggttacgtaactgacagatgctcacc

SEQ ID NO: 107214 - DNA, 57 bp, Artificial
  Synthetic oligonucleotide
ggggttcctgcatccattgtaaatgatgagtctgtcgttggagtgagagctgctagg

SEQ ID NO: 107215 - DNA, 60 bp, Artificial
  Synthetic oligonucleotide
ttggattagcttgatacgccctctgatgacaagatggatggtggctaatggttacgtaac

SEQ ID NO: 107216 - DNA, 60 bp, Artificial
  Synthetic oligonucleotide
tcatatggatgtgaggttgatgccaacaaccggtcagcgggagatcaaagtatggactca

SEQ ID NO: 107217 - DNA, 60 bp, Artificial
  Synthetic oligonucleotide
ccttagctcgactgtttacaatgggaatggctggtctccacatcacgactgagcctgcgt

SEQ ID NO: 107218 - DNA, 60 bp, Artificial
  Synthetic oligonucleotide
aggttgatcacgtggatggactacgctatgtccccatggatgacaggtactccccctctt

SEQ ID NO: 107219 - DNA, 60 bp, Artificial
  Synthetic oligonucleotide
ccaggcttccaccatgagagaattagtttgtgaccacttcaaggttgatcacgtggatgg

SEQ ID NO: 107220 - DNA, 60 bp, Artificial
  Synthetic oligonucleotide
tccccctcttccttagctcgactgtttacaatgggaatggctggtctccacatcacgact

SEQ ID NO: 107221 - DNA, 60 bp, Artificial
  Synthetic oligonucleotide
taatgggtgagtgatgctaggcgatcgtcagggcatgtgccggtgccctggtggagggtg

SEQ ID NO: 107222 - DNA, 60 bp, Artificial
  Synthetic oligonucleotide
ccaagcgtgaaagattgctgggtcaacgcaacctagaacgtatcgctgcccgagacgtgc

SEQ ID NO: 107223 - DNA, 60 bp, Artificial
  Synthetic oligonucleotide
tcctttgcaatatgccaagcgtgaaagattgctgggtcaacgcaacctagaacgtatcgc

SEQ ID NO: 107224 - DNA, 60 bp, Artificial
  Synthetic oligonucleotide
gactaattaccaggcttccaccatgagagaattagtttgtgaccacttcaaggttgatca

SEQ ID NO: 107225 - DNA, 59 bp, Artificial
  Synthetic oligonucleotide
aacgtatcgctgcccgagacgtgctgcaaaccagggatctacactcactatgcatgccc

SEQ ID NO: 107226 - DNA, 55 bp, Artificial
  Synthetic oligonucleotide
aggttgatcacgtggatggactacgctatgtccccatggatgacaggtactcccc

SEQ ID NO: 107227 - DNA, 60 bp, Artificial
  Synthetic oligonucleotide
gatcctgaattgtatgcagtttaagttggagatggacgacttggcacacaatggattcga

SEQ ID NO: 107228 - DNA, 60 bp, Artificial
  Synthetic oligonucleotide
accattcagcgagagagtgtttcggatggcttccgcatttgctaccatagatgttcagtg

SEQ ID NO: 107229 - DNA, 60 bp, Artificial
  Synthetic oligonucleotide
gtgaggttgatgccaacaaccggtcagcgggagatcaaagtatggactcatccagatgca

SEQ ID NO: 107230 - DNA, 60 bp, Artificial
  Synthetic oligonucleotide
cttaaaacttgtttgatcctgaattgtatgcagtttaagttggagatggacgacttggca

SEQ ID NO: 107231 - DNA, 60 bp, Artificial
  Synthetic oligonucleotide
cttccctgactatttcactggaccgtggacggtgggtggcgatggatatgaacgaggtgc

SEQ ID NO: 107232 - DNA, 60 bp, Artificial
  Synthetic oligonucleotide
gtggcgatggatatgaacgaggtgcgtctcttagtgttccctgctcgtgtgtaatgggtg

SEQ ID NO: 107233 - DNA, 60 bp, Artificial
  Synthetic oligonucleotide
cagcgagagagtgtttcggatggcttccgcatttgctaccatagatgttcagtgtttcag

SEQ ID NO: 107234 - DNA, 60 bp, Artificial
  Synthetic oligonucleotide
acgccatctctacatcttccctgactatttcactggaccgtggacggtgggtggcgatgg

SEQ ID NO: 107235 - DNA, 60 bp, Artificial
  Synthetic oligonucleotide
gaacgaggtgcgtctcttagtgttccctgctcgtgtgtaatgggtgagtgatgctaggcg

SEQ ID NO: 107236 - DNA, 60 bp, Artificial
  Synthetic oligonucleotide
gtaatgggtgagtgatgctaggcgatcgtcagggcatgtgccggtgccctggtggagggt

SEQ ID NO: 107237 - DNA, 60 bp, Artificial
  Synthetic oligonucleotide
gactaccagattaaaactggcggcttcttctcctgtatcgcaatgctgcgtcctttgcaa

SEQ ID NO: 107238 - DNA, 60 bp, Artificial
  Synthetic oligonucleotide
actggcggcttcttctcctgtatcgcaatgctgcgtcctttgcaatatgccaagcgtgaa

SEQ ID NO: 107239 - DNA, 60 bp, Artificial
  Synthetic oligonucleotide
gatctcaaagatcaagcgcgatgatgtcggtcagcaagtatgccctaactatgtcatgtt

SEQ ID NO: 107240 - DNA, 60 bp, Artificial
  Synthetic oligonucleotide
gcgcgatgatgtcggtcagcaagtatgccctaactatgtcatgttgaggtcttctgtgaa

SEQ ID NO: 107241 - DNA, 60 bp, Artificial
  Synthetic oligonucleotide
atgtcatgttgaggtcttctgtgaataccaaagtggtgagaaatgtggttgactaccaga

SEQ ID NO: 107242 - DNA, 60 bp, Artificial
  Synthetic oligonucleotide
cttctgtgaataccaaagtggtgagaaatgtggttgactaccagattaaaactggcggct

SEQ ID NO: 107243 - DNA, 60 bp, Artificial
  Synthetic oligonucleotide
ggggttggaccaattaatcgtggagttccagtgttccctactgtgttttctcctagaatg

SEQ ID NO: 107244 - DNA, 60 bp, Artificial
  Synthetic oligonucleotide
cattatggggttggaccaattaatcgtggagttccagtgttccctactgtgttttctcct

SEQ ID NO: 107245 - DNA, 60 bp, Artificial
  Synthetic oligonucleotide
agaatgtcatcgttagcggtgcggcttctttaggctctcgcgcacggggaatttgcagtc

SEQ ID NO: 107246 - DNA, 60 bp, Artificial
  Synthetic oligonucleotide
gttttctcctagaatgtcatcgttagcggtgcggcttctttaggctctcgcgcacgggga

SEQ ID NO: 107247 - DNA, 60 bp, Artificial
  Synthetic oligonucleotide
tcgaggattggtgctccgagccccgcttccgatcatacgggttttgactcagataattca

SEQ ID NO: 107248 - DNA, 60 bp, Artificial
  Synthetic oligonucleotide
gctccgagccccgcttccgatcatacgggttttgactcagataattcaccacccctcagg

SEQ ID NO: 107249 - DNA, 60 bp, Artificial
  Synthetic oligonucleotide
gggattgagcccgagagtctcttgcctgcgttggctgttcgcacaaattgtcgaggattg

SEQ ID NO: 107250 - DNA, 60 bp, Artificial
  Synthetic oligonucleotide
agtctcttgcctgcgttggctgttcgcacaaattgtcgaggattggtgctccgagccccg

SEQ ID NO: 107251 - DNA, 60 bp, Artificial
  Synthetic oligonucleotide
gtattacttactgacatgcgtgagcgagtttcgactttgacgacagctgattctacgaga

SEQ ID NO: 107252 - DNA, 60 bp, Artificial
  Synthetic oligonucleotide
ctgacatgcgtgagcgagtttcgactttgacgacagctgattctacgagacgtattcgtg

SEQ ID NO: 107253 - DNA, 60 bp, Artificial
  Synthetic oligonucleotide
agataattcaccacccctcaggtctcgaccgactcgaagcgaccttgaatgtattactta

SEQ ID NO: 107254 - DNA, 60 bp, Artificial
  Synthetic oligonucleotide
ccacccctcaggtctcgaccgactcgaagcgaccttgaatgtattacttactgacatgcg

SEQ ID NO: 107255 - DNA, 60 bp, Artificial
  Synthetic oligonucleotide
ttctacgagacgtattcgtgtaaatgatgctcatgatcttgcagccatgacagcgccgtt

SEQ ID NO: 107256 - DNA, 60 bp, Artificial
  Synthetic oligonucleotide
gacgtattcgtgtaaatgatgctcatgatcttgcagccatgacagcgccgttaggtcacg

SEQ ID NO: 107257 - DNA, 60 bp, Artificial
  Synthetic oligonucleotide
gctgccatatgtgatagacatgataatgtagtcactctgcgcttccgagatagtggaggg

SEQ ID NO: 107258 - DNA, 60 bp, Artificial
  Synthetic oligonucleotide
ggatccccagtagttgctgccatatgtgatagacatgataatgtagtcactctgcgcttc

SEQ ID NO: 107259 - DNA, 54 bp, Artificial
  Synthetic oligonucleotide
ttgaagatgtgacaaagctacatgatttagctaatggagatttggtcccacatt

SEQ ID NO: 107260 - DNA, 60 bp, Artificial
  Synthetic oligonucleotide
ctgtgttgcaaatggctggttctttaaaattggtaaccaggttatcatacctgttctgcg

SEQ ID NO: 107261 - DNA, 60 bp, Artificial
  Synthetic oligonucleotide
ggggttgattgcccaacgcccgcggatctaagtagatactgtgttgcaaatggctggttc

SEQ ID NO: 107262 - DNA, 60 bp, Artificial
  Synthetic oligonucleotide
aattttaccgttgaaggggttgattgcccaacgcccgcggatctaagtagatactgtgtt

SEQ ID NO: 107263 - DNA, 60 bp, Artificial
  Synthetic oligonucleotide
acgcccatccttacatgctgtgattcaaactggaaatttaaatgcgttcaattttaccgt

SEQ ID NO: 107264 - DNA, 60 bp, Artificial
  Synthetic oligonucleotide
gcgctaggatgagagccgacagacagagtaccgctaagctacgcccatccttacatgctg

SEQ ID NO: 107265 - DNA, 60 bp, Artificial
  Synthetic oligonucleotide
gcttggttcaatttttggagttctgggaggagtttgtgacatggttccctcattatgggg

SEQ ID NO: 107266 - DNA, 60 bp, Artificial
  Synthetic oligonucleotide
tggagttctgggaggagtttgtgacatggttccctcattatggggttggaccaattaatc

SEQ ID NO: 107267 - DNA, 60 bp, Artificial
  Synthetic oligonucleotide
gtagagtattaaatttatttgcaaatcgtcagctgcgatatcaatcccagcttgaatggg

SEQ ID NO: 107268 - DNA, 60 bp, Artificial
  Synthetic oligonucleotide
tatttgcaaatcgtcagctgcgatatcaatcccagcttgaatgggtgtatcctcatctat

SEQ ID NO: 107269 - DNA, 60 bp, Artificial
  Synthetic oligonucleotide
tgctcgtaagtatgcggagtggcgtccagggcaacactacaccattcctggtagagtatt

SEQ ID NO: 107270 - DNA, 60 bp, Artificial
  Synthetic oligonucleotide
gtggccaggttgagggcgagcgctcaacatcaattgatagctcaggaacttgctcgtaag

SEQ ID NO: 107271 - DNA, 60 bp, Artificial
  Synthetic oligonucleotide
ggcgagcgctcaacatcaattgatagctcaggaacttgctcgtaagtatgcggagtggcg

SEQ ID NO: 107272 - DNA, 60 bp, Artificial
  Synthetic oligonucleotide
cagcgccgttaggtcacgtatatgctatgctgtctagatggagggacaacgtggccaggt

SEQ ID NO: 107273 - DNA, 60 bp, Artificial
  Synthetic oligonucleotide
acgtatatgctatgctgtctagatggagggacaacgtggccaggttgagggcgagcgctc

SEQ ID NO: 107274 - DNA, 60 bp, Artificial
  Synthetic oligonucleotide
ccagagggatggtgttgtttgcaagatgttgaggtgcaagtccaagggattgagcccgag

SEQ ID NO: 107275 - DNA, 60 bp, Artificial
  Synthetic oligonucleotide
tcggtctacatgattttgaaattgcagagaggccagaaagagctctcttacatgccgagt

SEQ ID NO: 107276 - DNA, 60 bp, Artificial
  Synthetic oligonucleotide
gtttaggtggtgaaatcggtctacatgattttgaaattgcagagaggccagaaagagctc

SEQ ID NO: 107277 - DNA, 60 bp, Artificial
  Synthetic oligonucleotide
ggtcgtacgtttgtagcccatattcatcaggctgggtactgtaatccagagggatggtgt

SEQ ID NO: 107278 - DNA, 60 bp, Artificial
  Synthetic oligonucleotide
attaacaactggtcgtacgtttgtagcccatattcatcaggctgggtactgtaatccaga

SEQ ID NO: 107279 - DNA, 60 bp, Artificial
  Synthetic oligonucleotide
cggtccgtgcatcgggttgatggaattttacgggcttaccaagagcgagtgaatccgttc

SEQ ID NO: 107280 - DNA, 60 bp, Artificial
  Synthetic oligonucleotide
gagttgtgtcggtccgtgcatcgggttgatggaattttacgggcttaccaagagcgagtg

SEQ ID NO: 107281 - DNA, 60 bp, Artificial
  Synthetic oligonucleotide
agagcgagtgaatccgttcagattaggtttgaattatagacctcctatcttgctcgagga

SEQ ID NO: 107282 - DNA, 60 bp, Artificial
  Synthetic oligonucleotide
ggcggagcagaaattcattaatgaaatgattcaagaagtgggcgtaattgagcaacagag

SEQ ID NO: 107283 - DNA, 60 bp, Artificial
  Synthetic oligonucleotide
tgggcgtaattgagcaacagagagatgtggcggcggctggaatgcgattggagttgtgtc

SEQ ID NO: 107284 - DNA, 60 bp, Artificial
  Synthetic oligonucleotide
agcaacagagagatgtggcggcggctggaatgcgattggagttgtgtcggtccgtgcatc

SEQ ID NO: 107285 - DNA, 60 bp, Artificial
  Synthetic oligonucleotide
atttaccagttgggcgtgaagatgaacttagaccagaagatgtagcagatgctcgtggac

SEQ ID NO: 107286 - DNA, 60 bp, Artificial
  Synthetic oligonucleotide
cagttgggcgtgaagatgaacttagaccagaagatgtagcagatgctcgtggacaagcgg

SEQ ID NO: 107287 - DNA, 60 bp, Artificial
  Synthetic oligonucleotide
tcaggtacgtgaggcggagcagaaattcattaatgaaatgattcaagaagtgggcgtaat

SEQ ID NO: 107288 - DNA, 60 bp, Artificial
  Synthetic oligonucleotide
gacattttgtcgcgctaggatgagagccgacagacagagtaccgctaagctacgcccatc

SEQ ID NO: 107289 - DNA, 60 bp, Artificial
  Synthetic oligonucleotide
tctgcgcttccgagatagtggagggcgaatcataacggttgaagagttgctagctggtga

SEQ ID NO: 107290 - DNA, 60 bp, Artificial
  Synthetic oligonucleotide
gcgcttccgagatagtggagggcgaatcataacggttgaagagttgctagctggtgagca

SEQ ID NO: 107291 - DNA, 60 bp, Artificial
  Synthetic oligonucleotide
tgcacaacaacaggcggctgcagcggcggcaggtgtgcaggctcaagaggatttaccagt

SEQ ID NO: 107292 - DNA, 60 bp, Artificial
  Synthetic oligonucleotide
ggctgcagcggcggcaggtgtgcaggctcaagaggatttaccagttgggcgtgaagatga

SEQ ID NO: 107293 - DNA, 60 bp, Artificial
  Synthetic oligonucleotide
tgtaagtgatctaattcaacaatttaatcaaatgataattactatgaatggaaatgagtt

SEQ ID NO: 107294 - DNA, 60 bp, Artificial
  Synthetic oligonucleotide
gtgagtgatctaattcaacaatttaatcaaatgataattactatgaatggaaatgaattt

SEQ ID NO: 107295 - DNA, 60 bp, Artificial
  Synthetic oligonucleotide
tagtgatctaattcaacaatttaatcaaatgataattactatgaatgggaatgaatttca

SEQ ID NO: 107296 - DNA, 60 bp, Artificial
  Synthetic oligonucleotide
actaggaccgagagaaaatgtggccataatacaggttggtggttctaatatattagatat

SEQ ID NO: 107297 - DNA, 60 bp, Artificial
  Synthetic oligonucleotide
gttgttgacagcgtaaatcataaattagatgtcacatctactacatgtacgaaacgggat

SEQ ID NO: 107298 - DNA, 56 bp, Artificial
  Synthetic oligonucleotide
actaggaccgagagaaaatgtggccataatacaggttggtggttctaatatattag

SEQ ID NO: 107299 - DNA, 60 bp, Artificial
  Synthetic oligonucleotide
ctgatagcgaaaaactggcaataattgatgttgttgacagcgtaaatcataaattagatg

SEQ ID NO: 107300 - DNA, 60 bp, Artificial
  Synthetic oligonucleotide
gttaatgagaactggggactatggtcaaattactaatatgctattaaacaaccagcctgt

SEQ ID NO: 107301 - DNA, 60 bp, Artificial
  Synthetic oligonucleotide
ggaagagttaatgagaactggggactatggtcaaattactaatatgctattaaacaacca

SEQ ID NO: 107302 - DNA, 60 bp, Artificial
  Synthetic oligonucleotide
atcaattaatggaagcattaatgcagttatctagacaacaatttccgaccatgccagttg

SEQ ID NO: 107303 - DNA, 60 bp, Artificial
  Synthetic oligonucleotide
gacaagttattaatcaattaatggaagcattaatgcagttgtctagacaacaatttccga

SEQ ID NO: 107304 - DNA, 53 bp, Artificial
  Synthetic oligonucleotide
caatttccgaccatgccagttgattataaaagatcaatccaaagaggaatatt

SEQ ID NO: 107305 - DNA, 60 bp, Artificial
  Synthetic oligonucleotide
ggaagcattaatgcagttatctagacaacaatttccgaccatgccagttgattataaaag

SEQ ID NO: 107306 - DNA, 60 bp, Artificial
  Synthetic oligonucleotide
tgatgtaccacgagtaccagatgaccaaatgtacaggttgagagacagacttagattatt

SEQ ID NO: 107307 - DNA, 60 bp, Artificial
  Synthetic oligonucleotide
aacatgttcaaactctcactaccgaaaaattacagttaacttctgtcacatctttatgta

SEQ ID NO: 107308 - DNA, 60 bp, Artificial
  Synthetic oligonucleotide
cacgagtaccagatgaccaaatgtacaggttgagagacagacttagattattgccagttg

SEQ ID NO: 107309 - DNA, 60 bp, Artificial
  Synthetic oligonucleotide
gtaccacgagtgccagatgaccaaatgtacaggttgagagacagacttagattattgcca

SEQ ID NO: 107310 - DNA, 60 bp, Artificial
  Synthetic oligonucleotide
ggatatgaatttgccatcgacagcgagatatattagaccaaatctattgcaagatagact

SEQ ID NO: 107311 - DNA, 60 bp, Artificial
  Synthetic oligonucleotide
atggatatgaatttgccatcgacagcgagatatattagaccaaatctattgcaagataga

SEQ ID NO: 107312 - DNA, 60 bp, Artificial
  Synthetic oligonucleotide
gagacagagggagttattagaagattcatcgcagatatgagacaacaagttcaggctgat

SEQ ID NO: 107313 - DNA, 60 bp, Artificial
  Synthetic oligonucleotide
aagaagatcatcagaaagaagtacagtacgaaattctacaaaaaacaataccgacttttg

SEQ ID NO: 107314 - DNA, 60 bp, Artificial
  Synthetic oligonucleotide
aagaagaccatcagaaagaagtacagtacgaaattctacaaaaaacgataccgacttttg

SEQ ID NO: 107315 - DNA, 60 bp, Artificial
  Synthetic oligonucleotide
agcagccatgttaagccagcgtacaatgtcattagattttgtaactacgaattatatgtc

SEQ ID NO: 107316 - DNA, 60 bp, Artificial
  Synthetic oligonucleotide
agcagctatgttaagccaacgtacaatgtcattagattttgtaactacgaattatatgtc

SEQ ID NO: 107317 - DNA, 60 bp, Artificial
  Synthetic oligonucleotide
acccagcatttggaatgcaaagaatgcattatagaaatggcgatccccagactccatttc

SEQ ID NO: 107318 - DNA, 60 bp, Artificial
  Synthetic oligonucleotide
cccagcatttggaatgcaaagaatgcattatagaaatggcgatccccagactccatttca

SEQ ID NO: 107319 - DNA, 60 bp, Artificial
  Synthetic oligonucleotide
taaatactatagtttacccagcatttggaatgcaaagaatgcattatagaaatggcgatc

SEQ ID NO: 107320 - DNA, 60 bp, Artificial
  Synthetic oligonucleotide
tactatagtttacccagcatttggaatgcaaagaatgcattatagaaatggcgatcccca

SEQ ID NO: 107321 - DNA, 60 bp, Artificial
  Synthetic oligonucleotide
tatctggcatgtggctattgactgttataccaaatgacatgtttcttcgtgaatcgctag

SEQ ID NO: 107322 - DNA, 60 bp, Artificial
  Synthetic oligonucleotide
tatctggtatgtggctattgactgttataccaaatgatatgtttcttcgtgagtcgttag

SEQ ID NO: 107323 - DNA, 60 bp, Artificial
  Synthetic oligonucleotide
attatatgtcacttatatctggtatgtggctattgactgttataccaaatgatatgtttc

SEQ ID NO: 107324 - DNA, 60 bp, Artificial
  Synthetic oligonucleotide
attatatgtcacttatatctggcatgtggctattgactgttataccaaatgacatgtttc

SEQ ID NO: 107325 - DNA, 60 bp, Artificial
  Synthetic oligonucleotide
cagccatgttaagccagcgtacaatgtcattagattttgtaactacgaattatatgtcac

SEQ ID NO: 107326 - DNA, 60 bp, Artificial
  Synthetic oligonucleotide
aaagtttataagcaagtaccacaaccttttgatttcagagcgtcaatgcatatgttaacg

SEQ ID NO: 107327 - DNA, 60 bp, Artificial
  Synthetic oligonucleotide
aaagtttataagcaagtaccgcaaccttttgatttcagagcgtcaatgcatatgttaacg

SEQ ID NO: 107328 - DNA, 60 bp, Artificial
  Synthetic oligonucleotide
gaactggggactatggtcaaattactaatatgctattaaacaaccagcctgtagctttgg

SEQ ID NO: 107329 - DNA, 60 bp, Artificial
  Synthetic oligonucleotide
ggactatggtcaaattactaatatgctattaaacaaccagcctgtagctttagtaggagc

SEQ ID NO: 107330 - DNA, 60 bp, Artificial
  Synthetic oligonucleotide
accagcctgtagctttagtaggagcattgccatttgtgacagattcatcagttatatcgc

SEQ ID NO: 107331 - DNA, 60 bp, Artificial
  Synthetic oligonucleotide
tctaatgatttctacttagttgcaaattatgattggataccaacttcaaccacaaaagtt

SEQ ID NO: 107332 - DNA, 60 bp, Artificial
  Synthetic oligonucleotide
tctaacgatttctacttagttgcaaattacgattggataccaacttcaaccacaaaagtt

SEQ ID NO: 107333 - DNA, 60 bp, Artificial
  Synthetic oligonucleotide
ttagttgcaaattacgattggataccaacttcaaccacaaaagtttataagcaagtaccg

SEQ ID NO: 107334 - DNA, 60 bp, Artificial
  Synthetic oligonucleotide
cacaaaagtttataagcaagtaccacaaccttttgatttcagagcgtcaatgcatatgtt

SEQ ID NO: 107335 - DNA, 60 bp, Artificial
  Synthetic oligonucleotide
cacaaaagtttataagcaagtaccgcaaccttttgatttcagagcgtcaatgcatatgtt

SEQ ID NO: 107336 - DNA, 60 bp, Artificial
  Synthetic oligonucleotide
ccacaaattcttgatggtataagtgatctgttaaaagcagcttcatcagcttttaaaaaa

SEQ ID NO: 107337 - DNA, 60 bp, Artificial
  Synthetic oligonucleotide
ctgatcttacttcgggagttatgtctgttttttctgtcgcaacatcttttccacaaattc

SEQ ID NO: 107338 - DNA, 60 bp, Artificial
  Synthetic oligonucleotide
gtgaaaggaaaggtaggaagtgttgctaaaagactgagagggaagagatatgttagactt

SEQ ID NO: 107339 - DNA, 60 bp, Artificial
  Synthetic oligonucleotide
ttttaaaaaagtgaaaggaaaggtaggaagtgttgctaaaagactgagagggaagagata

SEQ ID NO: 107340 - DNA, 60 bp, Artificial
  Synthetic oligonucleotide
cgctaatgtcggtctaacatcatttcaagatagacaagaagctaatggaacttattgggt

SEQ ID NO: 107341 - DNA, 60 bp, Artificial
  Synthetic oligonucleotide
ttcgctaatgtcggtctaacatcatttcaagatagacaagaagctaatggaacttattgg

SEQ ID NO: 107342 - DNA, 60 bp, Artificial
  Synthetic oligonucleotide
caatgtgacatatactacactgttgccatctgatccagaatttacaacggggggaactaa

SEQ ID NO: 107343 - DNA, 52 bp, Artificial
  Synthetic oligonucleotide
caatgtgacatatactacactgttgccatctgatccagaatttacaacgggg

SEQ ID NO: 107344 - DNA, 60 bp, Artificial
  Synthetic oligonucleotide
gtagacgaccgtcaatcttgtccaacatgttcaatgacgacgaaacttttactgctttgc

SEQ ID NO: 107345 - DNA, 60 bp, Artificial
  Synthetic oligonucleotide
caattagatcaagtagacgaccgtcaatcttgtccaacatgttcaatgacgacgaaactt

SEQ ID NO: 107346 - DNA, 60 bp, Artificial
  Synthetic oligonucleotide
tcgaaggatatggagttatgggtggcacatttggaaattggctaattgatagtggattta

SEQ ID NO: 107347 - DNA, 58 bp, Artificial
  Synthetic oligonucleotide
taaaataggaggaattcaaatagctgaatcaaaagacggattttggaaaatattaacg

SEQ ID NO: 107348 - DNA, 60 bp, Artificial
  Synthetic oligonucleotide
cgatctcagtcacaaaagctacatttggagacacatttgtgtgcaatcatccgaacatga

SEQ ID NO: 107349 - DNA, 60 bp, Artificial
  Synthetic oligonucleotide
gtaacgatctcagtcacaaaagctacatttggagacacatttgtgtgcaatcatccgaac

SEQ ID NO: 107350 - DNA, 60 bp, Artificial
  Synthetic oligonucleotide
gaaaattcattgattaactattcagcacctgtaacggtaacgatctcagtcacaaaagct

SEQ ID NO: 107351 - DNA, 60 bp, Artificial
  Synthetic oligonucleotide
ccgatatagataatgaaaattcattgattaactattcagcacctgtaacggtaacgatct

SEQ ID NO: 107352 - DNA, 60 bp, Artificial
  Synthetic oligonucleotide
gccacacattccttctgtaggatgtgagatgatagcaaaaatatttagaaccgatataga

SEQ ID NO: 107353 - DNA, 60 bp, Artificial
  Synthetic oligonucleotide
gccagttatagttcaactaatttaaacttcacatcacagccaagtatcggtgttaaccta

SEQ ID NO: 107354 - DNA, 60 bp, Artificial
  Synthetic oligonucleotide
agtggatttaaaaccgttgagacaaattatgagtaccagagaaacgggaagacaattaat

SEQ ID NO: 107355 - DNA, 60 bp, Artificial
  Synthetic oligonucleotide
ggagttatgggtggcacatttggaaattggctaattgatagtggatttaaaaccgttgag

SEQ ID NO: 107356 - DNA, 60 bp, Artificial
  Synthetic oligonucleotide
gataccgcgcaatttttttagttagacctcaaaatcaagaacaacattatatagccagtt

SEQ ID NO: 107357 - DNA, 60 bp, Artificial
  Synthetic oligonucleotide
atagccagttatagttcaactaatttaaacttcacatcacagccaagtatcggtgttaac

SEQ ID NO: 107358 - DNA, 60 bp, Artificial
  Synthetic oligonucleotide
ttagcgaagatttacccgaaggttattatgacagagataaagctttagctttcgctaatg

SEQ ID NO: 107359 - DNA, 58 bp, Artificial
  Synthetic oligonucleotide
ttagcgaagatttacccgaaggttattatgacagagataaagctttagctttcgctaa

SEQ ID NO: 107360 - DNA, 60 bp, Artificial
  Synthetic oligonucleotide
caacggttgcttcagttaaaccatcaagaaaatgtggaactagaagtcctgtatttggac

SEQ ID NO: 107361 - DNA, 60 bp, Artificial
  Synthetic oligonucleotide
actgaaagggaatgggctttgtctaatgctatatatgcaaaaaactttgcaacggatttt

SEQ ID NO: 107362 - DNA, 60 bp, Artificial
  Synthetic oligonucleotide
cgttgagacaaattatgagtaccagagaaacgggaagacaattaatgcaacaacggttgc

SEQ ID NO: 107363 - DNA, 60 bp, Artificial
  Synthetic oligonucleotide
gacaattaatgcaacaacggttgcttcagttaaaccatcaagaaaatgtggaactagaag

SEQ ID NO: 107364 - DNA, 60 bp, Artificial
  Synthetic oligonucleotide
gctttaatggaatattcacatggaggttttggccaaattgatacttccgactatactggc

SEQ ID NO: 107365 - DNA, 60 bp, Artificial
  Synthetic oligonucleotide
ggaatattcacatggaggttttggccaaattgatacttccgactatactggcatggcact

SEQ ID NO: 107366 - DNA, 60 bp, Artificial
  Synthetic oligonucleotide
aacggattttaaaagacaatttgaaataactgcacagtcagatgaattattagttcgtac

SEQ ID NO: 107367 - DNA, 60 bp, Artificial
  Synthetic oligonucleotide
tagttcgtactaatgtagttccacatactataaaaaatacaccaggaaaagctttaatgg

SEQ ID NO: 107368 - DNA, 60 bp, Artificial
  Synthetic oligonucleotide
gagaccactcaaacgagtgatcatcaaacatcatttagcacaagaacgtataacgaaatc

SEQ ID NO: 107369 - DNA, 60 bp, Artificial
  Synthetic oligonucleotide
tataacgaaatcaatgatagaccttcactgagaatagaaaaggatggagaaaaagcatac

SEQ ID NO: 107370 - DNA, 60 bp, Artificial
  Synthetic oligonucleotide
aaaagcatactgttttaaaaatctagatccagtaagatatgatacacgaatgggagagta

SEQ ID NO: 107371 - DNA, 58 bp, Artificial
  Synthetic oligonucleotide
aaaatctagatccagtaagatatgatacacgaatgggagagtacccgtttgattacgg

SEQ ID NO: 107372 - DNA, 60 bp, Artificial
  Synthetic oligonucleotide
ggcacttaagatgtctctcagaagtttgttgattacaactgaggcggttggagagaccac

SEQ ID NO: 107373 - DNA, 60 bp, Artificial
  Synthetic oligonucleotide
ctctcagaagtttgttgattacaactgaggcggttggagagaccactcaaacgagtgatc

SEQ ID NO: 107374 - DNA, 60 bp, Artificial
  Synthetic oligonucleotide
gagagaccactcaaacgagtgatcatcaaacatcatttagcacaagaacgtataacgaaa

SEQ ID NO: 107375 - DNA, 60 bp, Artificial
  Synthetic oligonucleotide
tggtaggtggacacgctagatcgttattttcacttaaagttaggaaacatttgttagatg

SEQ ID NO: 107376 - DNA, 60 bp, Artificial
  Synthetic oligonucleotide
tatctaatactatcagcatattagattcaacaaagaaattagcacaatatgctgttgatc

SEQ ID NO: 107377 - DNA, 60 bp, Artificial
  Synthetic oligonucleotide
gctttgcatactttagcaagtagaacgaattccgttgcaagtgatgtgacatatttacag

SEQ ID NO: 107378 - DNA, 60 bp, Artificial
  Synthetic oligonucleotide
gacgaaacttttactgctttgcatactttagcaagtagaacgaattccgttgcaagtgat

SEQ ID NO: 107379 - DNA, 60 bp, Artificial
  Synthetic oligonucleotide
tttgatgggtaaactattaaatgatagagaactgttagatataacaaataatctatcctc

SEQ ID NO: 107380 - DNA, 60 bp, Artificial
  Synthetic oligonucleotide
gatgccgtggaaaaggacgcattcgtgaaatataattatcacgatttgatgggtaaacta

SEQ ID NO: 107381 - DNA, 60 bp, Artificial
  Synthetic oligonucleotide
ttgttagatgccgtggaaaaggacgcattcgtgaaatataattatcacgatttgatgggt

SEQ ID NO: 107382 - DNA, 60 bp, Artificial
  Synthetic oligonucleotide
gtggacacgctagatcgttattttcacttaaagttaggaaacatttgttagatgccgtgg

SEQ ID NO: 107383 - DNA, 60 bp, Artificial
  Synthetic oligonucleotide
cgcgatctgttaattaacgctcttgcctagatgatatgaaagagatctttaaatataccc

SEQ ID NO: 107384 - DNA, 60 bp, Artificial
  Synthetic oligonucleotide
gatatattggacaaagcaatgtcaaatcaaacgggcgcaactatggcacaaaaagtagag

SEQ ID NO: 107385 - DNA, 53 bp, Artificial
  Synthetic oligonucleotide
gatatattggacaaagcaatgtcaaatcaaacgggcgcaactatggcacaaaa

SEQ ID NO: 107386 - DNA, 60 bp, Artificial
  Synthetic oligonucleotide
ccaacttgctccacattcaggacacgattcagaggaccgttcaggatgggttcctcgcac

SEQ ID NO: 107387 - DNA, 60 bp, Artificial
  Synthetic oligonucleotide
ctaacctgctccatatccaggacacgattcagaggaccgttcaggatgggttcctcgcac

SEQ ID NO: 107388 - DNA, 60 bp, Artificial
  Synthetic oligonucleotide
cgctccctggcatctaacctgctccatatccaggacacgattcagaggaccgttcaggat

SEQ ID NO: 107389 - DNA, 60 bp, Artificial
  Synthetic oligonucleotide
tcgttccctggcatccaacttgctccacattcaggacacgattcagaggaccgttcagga

SEQ ID NO: 107390 - DNA, 60 bp, Artificial
  Synthetic oligonucleotide
ccagaactgttggtgctggaggatgaggactaggtctcccggtagtcagggattgcccgc

SEQ ID NO: 107391 - DNA, 60 bp, Artificial
  Synthetic oligonucleotide
gttttagaaagcacaccaattatcaccatggagaccaaaccaattcatccgactatcgct

SEQ ID NO: 107392 - DNA, 60 bp, Artificial
  Synthetic oligonucleotide
cgttcaggatgggttcctcgcactacgcagtcgagattccctctctaagaccctgtcagg

SEQ ID NO: 107393 - DNA, 60 bp, Artificial
  Synthetic oligonucleotide
gttttagaaagcacaccaattatcaccatggagaccaaaccaattcatcccactatcgct

SEQ ID NO: 107394 - DNA, 60 bp, Artificial
  Synthetic oligonucleotide
ccaattatcaccatggagaccaaaccaattcatccgactatcgctactcagttctgtgac

SEQ ID NO: 107395 - DNA, 60 bp, Artificial
  Synthetic oligonucleotide
ccaattatcaccatggagaccaaaccaattcatcccactatcgctactcagttctgtgac

SEQ ID NO: 107396 - DNA, 60 bp, Artificial
  Synthetic oligonucleotide
ccgttcaggatgggttcctcgcactacgcagtcgggattcactctccaagatgttgtcag

SEQ ID NO: 107397 - DNA, 60 bp, Artificial
  Synthetic oligonucleotide
aactgttggtgctggaggatgaggactaggtctcccggtagtcagggattgcccgcccca

SEQ ID NO: 107398 - DNA, 60 bp, Artificial
  Synthetic oligonucleotide
tgtactccggagctgttggtgttggaggatgaggactaggtctcccggtagtcagggacc

SEQ ID NO: 107399 - DNA, 60 bp, Artificial
  Synthetic oligonucleotide
aattagtaatgatctaaaggagaatggattattagaagaggctaaaacattcaaaccaga

SEQ ID NO: 107400 - DNA, 60 bp, Artificial
  Synthetic oligonucleotide
ctgtatctgtagtacatagcttcgctaggagtcaaggcctgccacttaactttgaaactg

SEQ ID NO: 107401 - DNA, 60 bp, Artificial
  Synthetic oligonucleotide
gtattaaaaattgatagcgcttgcgtaagagtaagatctcaagatggatcctgtatctgt

SEQ ID NO: 107402 - DNA, 60 bp, Artificial
  Synthetic oligonucleotide
accaggaaactactggtcctgtgccgttaggtcccactttgggactaggtcgccatgcat

SEQ ID NO: 107403 - DNA, 60 bp, Artificial
  Synthetic oligonucleotide
cagtgtaccgatagcagtaagaaacgagctattcaaaagatttgtgtcttaattagtaat

SEQ ID NO: 107404 - DNA, 60 bp, Artificial
  Synthetic oligonucleotide
ccaggaaactactggtcctgtgccgttaggtcccactttgggactaggtcgccatgcatc

SEQ ID NO: 107405 - DNA, 60 bp, Artificial
  Synthetic oligonucleotide
cgccatgcatcttatgctactaggatgtaagatttagatcggaaggacgtcccacaccct

SEQ ID NO: 107406 - DNA, 61 bp, Artificial
  Synthetic oligonucleotide
cagtgtaccgatagcagtaagaaacgagctattcaaaagatttgtgtcttaattagtaatg

SEQ ID NO: 107407 - DNA, 56 bp, Artificial
  Synthetic oligonucleotide
aactgtgggttgtgagggtccaagtcacgacccacgctttgtaattgaatgtaaat

SEQ ID NO: 107408 - DNA, 60 bp, Artificial
  Synthetic oligonucleotide
tttgaaactgtgggttgtgagggtccaagtcacgacccacgctttgtaattgaatgtaaa

SEQ ID NO: 107409 - DNA, 60 bp, Artificial
  Synthetic oligonucleotide
ttcaggtatccgcttgagtggccatggagccgtcggtaattttatggaccaccaggaaac

SEQ ID NO: 107410 - DNA, 60 bp, Artificial
  Synthetic oligonucleotide
gagtggccatggagccgtcggtaattttatggaccaccaggaaactactggtcctgtgcc

SEQ ID NO: 107411 - DNA, 60 bp, Artificial
  Synthetic oligonucleotide
agcgcttgcgtaagagtaagatctcaagatggatcctgtatctgtagtacatagcttcgc

SEQ ID NO: 107412 - DNA, 60 bp, Artificial
  Synthetic oligonucleotide
tgcaaaagataataacattaagaaacagctgcagattcaggtatccgcttgagtggccat

SEQ ID NO: 107413 - DNA, 65 bp, Artificial
  Synthetic oligonucleotide
gatctaaaggagaatggattattagaagaggctaaaacattcaaaccagagtataaatcaatcgc

SEQ ID NO: 107414 - DNA, 60 bp, Artificial
  Synthetic oligonucleotide
aagcgttgtaatatttgcaaaagataataacattaagaaacagctgcagattcaggtatc

SEQ ID NO: 107415 - DNA, 60 bp, Artificial
  Synthetic oligonucleotide
atagcttcgctaggagtcaaggcctgccacttaactttgaaactgtgggttgtgagggtc

SEQ ID NO: 107416 - DNA, 60 bp, Artificial
  Synthetic oligonucleotide
gattggcgtatgaatcaagagtgtccgcgattagttgttgcaagaaagatgtatacagag

SEQ ID NO: 107417 - DNA, 60 bp, Artificial
  Synthetic oligonucleotide
gcgtatgaatcaagagtgtccgcgattagttgttgcaagaaagatgtatacagagaggtc

SEQ ID NO: 107418 - DNA, 60 bp, Artificial
  Synthetic oligonucleotide
atgaatcaagagtgtccgcgattagttgttgcaagaaagatgtatacagagaggtcaatg

SEQ ID NO: 107419 - DNA, 60 bp, Artificial
  Synthetic oligonucleotide
atgaatcgagagtgtccgcgattagttgttgcaagaaagatgtatacagagaggtcaatg

SEQ ID NO: 107420 - DNA, 60 bp, Artificial
  Synthetic oligonucleotide
aatcaagagtgtccgcgattagttgttgcaagaaagatgtatacagagaggtcaatgagc

SEQ ID NO: 107421 - DNA, 60 bp, Artificial
  Synthetic oligonucleotide
cgagagtgtccgcgattagttgttgcaagaaagatgtatacagagaggtcaatgagcatt

SEQ ID NO: 107422 - DNA, 60 bp, Artificial
  Synthetic oligonucleotide
ccgcgattagttgttgcaagaaagatgtatacagagaggtcaatgagcatttaactgctg

SEQ ID NO: 107423 - DNA, 60 bp, Artificial
  Synthetic oligonucleotide
gcgattagttgttgcaagaaagatgtatacagagaggtcaatgagcatttaactgctgaa

SEQ ID NO: 107424 - DNA, 60 bp, Artificial
  Synthetic oligonucleotide
gctaatgtgtcatgggaggcccccccttctaacgtacttctgtatcaggggtatgtccat

SEQ ID NO: 107425 - DNA, 60 bp, Artificial
  Synthetic oligonucleotide
tctggtcgcggagacacagttcagtctttcgcacgccgttccccgcgaaggttctcactc

SEQ ID NO: 107426 - DNA, 60 bp, Artificial
  Synthetic oligonucleotide
aagatggacccttcgcatgtcgtcctctacctcagtcggtcgctctgtcgctatctgggc

SEQ ID NO: 107427 - DNA, 60 bp, Artificial
  Synthetic oligonucleotide
gtaatacaagatggacccttcgcatgtcgtcctctacctcagtcggtcgctctgtcgcta

SEQ ID NO: 107428 - DNA, 60 bp, Artificial
  Synthetic oligonucleotide
ggtcgcactccgaaccctccgaattccaattttccttatccttcacttcccttcaagggg

SEQ ID NO: 107429 - DNA, 60 bp, Artificial
  Synthetic oligonucleotide
cacatctcaggtcgcactccgaaccctccgaattccaattttccttatccttcacttccc

SEQ ID NO: 107430 - DNA, 60 bp, Artificial
  Synthetic oligonucleotide
aggatcggaggccgaaacgatcatgatgctgcgaactgataggtatcacatctcaggtcg

SEQ ID NO: 107431 - DNA, 60 bp, Artificial
  Synthetic oligonucleotide
tccctcatgctgagtatcgagccatttacgtaggttctggtcgcggagacacagttcagt

SEQ ID NO: 107432 - DNA, 60 bp, Artificial
  Synthetic oligonucleotide
tgctcgactatcttatccctcatgctgagtatcgagccatttacgtaggttctggtcgcg

SEQ ID NO: 107433 - DNA, 60 bp, Artificial
  Synthetic oligonucleotide
ttcacttcccttcaagggggatagggagtgtggtgacaaacttgttgccatgctcgacta

SEQ ID NO: 107434 - DNA, 60 bp, Artificial
  Synthetic oligonucleotide
ggctggactcctatgcgtagactaaccctcgcgcatagtgggctctccttagaacccgag

SEQ ID NO: 107435 - DNA, 60 bp, Artificial
  Synthetic oligonucleotide
tagtgggctctccttagaacccgagtgggtttgtacggtgtgaaggcctcttttacctac

SEQ ID NO: 107436 - DNA, 60 bp, Artificial
  Synthetic oligonucleotide
cggtcccacatggataaaccgtggcactcgttcgatgatcttactgcttccctcgtggct

SEQ ID NO: 107437 - DNA, 60 bp, Artificial
  Synthetic oligonucleotide
gtcgagtacgaggatggctggactcctatgcgtagactaaccctcgcgcatagtgggctc

SEQ ID NO: 107438 - DNA, 60 bp, Artificial
  Synthetic oligonucleotide
gacaagatcagagacatagagtcacacggtgcggcggtcatcgagtgggatcggtcccac

SEQ ID NO: 107439 - DNA, 60 bp, Artificial
  Synthetic oligonucleotide
ccgtacatctgggtcaacatgatcatgctgtggtcacagcaatctagaacggacaagatc

SEQ ID NO: 107440 - DNA, 60 bp, Artificial
  Synthetic oligonucleotide
gcaatctagaacggacaagatcagagacatagagtcacacggtgcggcggtcatcgagtg

SEQ ID NO: 107441 - DNA, 60 bp, Artificial
  Synthetic oligonucleotide
ggccttgcagtcggaactcgctgccgcacttcttaaacatagaatcccgcagttctcaga

SEQ ID NO: 107442 - DNA, 60 bp, Artificial
  Synthetic oligonucleotide
cgcagttctcagataatcgggatgaagtgttcacttccactcttctgcctcagcccggag

SEQ ID NO: 107443 - DNA, 60 bp, Artificial
  Synthetic oligonucleotide
gccatggagcaggacatgttaggcgagaacaccgctgaggccttgcagtcggaactcgct

SEQ ID NO: 107444 - DNA, 60 bp, Artificial
  Synthetic oligonucleotide
gggacgtcaggactgacaatgtcggtttgagtaagttccaatgggaggagcgcgccatgg

SEQ ID NO: 107445 - DNA, 60 bp, Artificial
  Synthetic oligonucleotide
caatgggaggagcgcgccatggagcaggacatgttaggcgagaacaccgctgaggccttg

SEQ ID NO: 107446 - DNA, 53 bp, Artificial
  Synthetic oligonucleotide
ccccttctaacgtacttctgtatcaggggtatgtccattctgtcgacgacgtg

SEQ ID NO: 107447 - DNA, 60 bp, Artificial
  Synthetic oligonucleotide
aaattctcatttgggacgtcaggactgacaatgtcggtttgagtaagttccaatgggagg

SEQ ID NO: 107448 - DNA, 60 bp, Artificial
  Synthetic oligonucleotide
taatcgggatgaagtgttcacttccactcttctgcctcagcccggagcgcccgctggcat

SEQ ID NO: 107449 - DNA, 60 bp, Artificial
  Synthetic oligonucleotide
cagcccggagcgcccgctggcatgtatgaaatgcggaacttttgtcgcctcgacggtccc

SEQ ID NO: 107450 - DNA, 60 bp, Artificial
  Synthetic oligonucleotide
aacttttggtgacgagatccggaaacacgctgccaccttttgtgatagcttctcaggatc

SEQ ID NO: 107451 - DNA, 60 bp, Artificial
  Synthetic oligonucleotide
gtgacgagatccggaaacacgctgccaccttttgtgatagcttctcaggatcggaggccg

SEQ ID NO: 107452 - DNA, 60 bp, Artificial
  Synthetic oligonucleotide
tctgtcgctatctgggcgcgggtgctgacctattgacactgaggggagcggaagatcccc

SEQ ID NO: 107453 - DNA, 60 bp, Artificial
  Synthetic oligonucleotide
tctgggcgcgggtgctgacctattgacactgaggggagcggaagatccccaatggttatg

SEQ ID NO: 107454 - DNA, 60 bp, Artificial
  Synthetic oligonucleotide
aaggacttctattgcactggtcccatacataacttttccattcgacagctaaggggatac

SEQ ID NO: 107455 - DNA, 60 bp, Artificial
  Synthetic oligonucleotide
gcactggtcccatacataacttttccattcgacagctaaggggatactccttccttttcg

SEQ ID NO: 107456 - DNA, 60 bp, Artificial
  Synthetic oligonucleotide
tccttccttttcgtcgtatatgagggagatcgtgtgcgatgtttagatggagatgtcccc

SEQ ID NO: 107457 - DNA, 60 bp, Artificial
  Synthetic oligonucleotide
gtttagatggagatgtcccccgtgatgtcgttatcaccccacatcaactctcttcactta

SEQ ID NO: 107458 - DNA, 58 bp, Artificial
  Synthetic oligonucleotide
ccccgtgatgtcgttatcaccccacatcaactctcttcacttaagggacagaaggatc

SEQ ID NO: 107459 - DNA, 51 bp, Artificial
  Synthetic oligonucleotide
aactacgtctccgctttcgagaggtgcacgatgttatggatgtagtcaagt

SEQ ID NO: 107460 - DNA, 60 bp, Artificial
  Synthetic oligonucleotide
cacgaaggacagaatggtgtattccggtctaggatacatcctcttacttatgtgggaagg

SEQ ID NO: 107461 - DNA, 60 bp, Artificial
  Synthetic oligonucleotide
gttcagttcccacttcgctgcctttcgacccctggtgggccgactcttttgccgttatcg

SEQ ID NO: 107462 - DNA, 60 bp, Artificial
  Synthetic oligonucleotide
tacttatgtgggaaggttcagttcccacttcgctgcctttcgacccctggtgggccgact

SEQ ID NO: 107463 - DNA, 60 bp, Artificial
  Synthetic oligonucleotide
tgggccgactcttttgccgttatcgtcaagagacgcgaggttcccttcctcccagacgtc

SEQ ID NO: 107464 - DNA, 60 bp, Artificial
  Synthetic oligonucleotide
gtgcaggtttatcggtattagagaacggtcctctcaactacgtctccgctttcgagaggt

SEQ ID NO: 107465 - DNA, 60 bp, Artificial
  Synthetic oligonucleotide
cccagacgtctctttgtgcaggtttatcggtattagagaacggtcctctcaactacgtct

SEQ ID NO: 107466 - DNA, 60 bp, Artificial
  Synthetic oligonucleotide
aaatacgatgagtgtcgcgctatggtggaagagctgcatcgatcgcgtaggggcgccaat

SEQ ID NO: 107467 - DNA, 60 bp, Artificial
  Synthetic oligonucleotide
gagcgcccgctggcatgtatgaaatgcggaacttttgtcgcctcgacggtccccgtactt

SEQ ID NO: 107468 - DNA, 60 bp, Artificial
  Synthetic oligonucleotide
tgagtgtcgcgctatggtggaagagctgcatcgatcgcgtaggggcgccaatcttagacg

SEQ ID NO: 107469 - DNA, 60 bp, Artificial
  Synthetic oligonucleotide
tcttttctatttgaccaattcatgtaatgaggaacacatcggtgacctacgcgccatcgt

SEQ ID NO: 107470 - DNA, 57 bp, Artificial
  Synthetic oligonucleotide
cacatacaggacgaggacgggctgttgcatttcggagaaaagaccgcgcatcttttc

SEQ ID NO: 107471 - DNA, 60 bp, Artificial
  Synthetic oligonucleotide
gcgccatcgttcgtagtgctggaatcgcaactctgtgggttggaggcgagattttcggct

SEQ ID NO: 107472 - DNA, 60 bp, Artificial
  Synthetic oligonucleotide
gaccaattcatgtaatgaggaacacatcggtgacctacgcgccatcgttcgtagtgctgg

SEQ ID NO: 107473 - DNA, 60 bp, Artificial
  Synthetic oligonucleotide
ggctatccggatttctcgtacgatagacggctcgctattgctgatttctgcacgaaggac

SEQ ID NO: 107474 - DNA, 60 bp, Artificial
  Synthetic oligonucleotide
tcttatgccccattctttgtacctaatgagaccaagccgggtagtcgcatcgatctaata

SEQ ID NO: 107475 - DNA, 60 bp, Artificial
  Synthetic oligonucleotide
cgtcctattgatgttgagaattatgccatgaacagtaatcacacggtatcttatgcccca

SEQ ID NO: 107476 - DNA, 60 bp, Artificial
  Synthetic oligonucleotide
cgatctaataatggttaaccatcttaagaaattcaatctgatgttcgattcttggtacaa

SEQ ID NO: 107477 - DNA, 60 bp, Artificial
  Synthetic oligonucleotide
gccccattctttgtacctaatgagaccaagccgggtagtcgcatcgatctaataatggtt

SEQ ID NO: 107478 - DNA, 60 bp, Artificial
  Synthetic oligonucleotide
tttgtattaatcggacgtctatgttatggccagacaacgtcaccgcctccgatccaattg

SEQ ID NO: 107479 - DNA, 60 bp, Artificial
  Synthetic oligonucleotide
gcattacggcagagtcgcgtgacttctgcaaccagatgaagtttgtattaatcggacgtc

SEQ ID NO: 107480 - DNA, 60 bp, Artificial
  Synthetic oligonucleotide
atcgtcctattgatgttgagaattatgccatgaacagtaatcacacggtatcttatgccc

SEQ ID NO: 107481 - DNA, 60 bp, Artificial
  Synthetic oligonucleotide
aatcggacgtctatgttatggccagacaacgtcaccgcctccgatccaattgtatcaata

SEQ ID NO: 107482 - DNA, 60 bp, Artificial
  Synthetic oligonucleotide
cttggtacaaaactggtggtagtgtgatggtatcttctcgtcctgagcgtacacagaatg

SEQ ID NO: 107483 - DNA, 60 bp, Artificial
  Synthetic oligonucleotide
ggttaaccatcttaagaaattcaatctgatgttcgattcttggtacaaaactggtggtag

SEQ ID NO: 107484 - DNA, 60 bp, Artificial
  Synthetic oligonucleotide
ttcgcatcctcgaacagacttaccgatgtgccagcactcactaaaacgacgttcccgcaa

SEQ ID NO: 107485 - DNA, 53 bp, Artificial
  Synthetic oligonucleotide
acacatcgtttgaacttgccagcgtacacgaagttgattcatgaattacggac

SEQ ID NO: 107486 - DNA, 60 bp, Artificial
  Synthetic oligonucleotide
gaatgaggcttcagttagccagattatgcctacttctgtaaaacatattgctaatgaaga

SEQ ID NO: 107487 - DNA, 60 bp, Artificial
  Synthetic oligonucleotide
tattgctaatgaagatttaacggcagatgacggtgaaggatcagagtagtgtccttggtg

SEQ ID NO: 107488 - DNA, 60 bp, Artificial
  Synthetic oligonucleotide
gtggtagtgtgatggtatcttctcgtcctgagcgtacacagaatgaggcttcagttagcc

SEQ ID NO: 107489 - DNA, 60 bp, Artificial
  Synthetic oligonucleotide
acacagaatgaggcttcagttagccagattatgcctacttctgtaaaacatattgctaat

SEQ ID NO: 107490 - DNA, 60 bp, Artificial
  Synthetic oligonucleotide
gggtggtgggtgtcttacgtgtgtgtccctgtgagattagtataggtggtgggtagtata

SEQ ID NO: 107491 - DNA, 60 bp, Artificial
  Synthetic oligonucleotide
gaagatttaacggcagatgacggtgaaggatcagagtagtgtccttggtggtatgtgtgt

SEQ ID NO: 107492 - DNA, 60 bp, Artificial
  Synthetic oligonucleotide
atttaagggtggtgggtgtcttacgtgtgtgtccctgtgagattagtataggtggtgggt

SEQ ID NO: 107493 - DNA, 60 bp, Artificial
  Synthetic oligonucleotide
gttcaaaagtggaactaatctaaacaaggagttgtacaatcgatgcattacggcagagtc

SEQ ID NO: 107494 - DNA, 60 bp, Artificial
  Synthetic oligonucleotide
acaatcgatgcattacggcagagtcgcgtgacttctgcaaccagatgaagtttgtattaa

SEQ ID NO: 107495 - DNA, 60 bp, Artificial
  Synthetic oligonucleotide
cgcatcctcgaacagacttaccgatgtgccagcactcactaaaacgacgttcccgcaatc

SEQ ID NO: 107496 - DNA, 60 bp, Artificial
  Synthetic oligonucleotide
gttcccgcaatcagatgtgaagttaatagagacgactcccttgcctaacgatgaaacctc

SEQ ID NO: 107497 - DNA, 60 bp, Artificial
  Synthetic oligonucleotide
cccgcaatcagatgtgaagttaatagagacgactcccttgcctaacgatgaaacctcaca

SEQ ID NO: 107498 - DNA, 60 bp, Artificial
  Synthetic oligonucleotide
atgaaacctcacatgtcgcatcattccagctcgtaacttggatggagggagcactgaaca

SEQ ID NO: 107499 - DNA, 60 bp, Artificial
  Synthetic oligonucleotide
cctcacatgtcgcatcattccagctcgtaacttggatggagggagcactgaacattctga

SEQ ID NO: 107500 - DNA, 60 bp, Artificial
  Synthetic oligonucleotide
gcactgaacattctgaatgatttgagtaagtgtgcgatcagtttcatcaatcaatgcgag

SEQ ID NO: 107501 - DNA, 60 bp, Artificial
  Synthetic oligonucleotide
cactgaacattctgaatgatttgagtaagtgtgcgatcagtttcatcaatcaatgcgagg

SEQ ID NO: 107502 - DNA, 60 bp, Artificial
  Synthetic oligonucleotide
tcaatgcgaggatacgttcaaaagtggaactaatctaaacaaggagttgtacaatcgatg

SEQ ID NO: 107503 - DNA, 60 bp, Artificial
  Synthetic oligonucleotide
tcactacagtttcaaacttaagatatttcctactacattaaatcctttagatgatttggt

SEQ ID NO: 107504 - DNA, 60 bp, Artificial
  Synthetic oligonucleotide
tggatctttaactggtattagtaatggtcatttttggtctgtattgaatgatcgccgaag

SEQ ID NO: 107505 - DNA, 50 bp, Artificial
  Synthetic oligonucleotide
gaggaatttataacgatgttgttgaatgtatcgacccaagtcaacagttc

SEQ ID NO: 107506 - DNA, 60 bp, Artificial
  Synthetic oligonucleotide
gagatagttaaaacagtagatttaaagatagatcaatcatttgaatcctattattatgat

SEQ ID NO: 107507 - DNA, 60 bp, Artificial
  Synthetic oligonucleotide
cacacatgacgagaaaattgagatcgttaagaatcacatcttaaacggtgagatagttaa

SEQ ID NO: 107508 - DNA, 60 bp, Artificial
  Synthetic oligonucleotide
acacacatgacgagaaaattgagatcgttaagaatcacatcttaaacggtgagatagtta

SEQ ID NO: 107509 - DNA, 60 bp, Artificial
  Synthetic oligonucleotide
cctgcctttcatcctaagtgtaagttttacaaactttcagataatcacacacatgacgag

SEQ ID NO: 107510 - DNA, 60 bp, Artificial
  Synthetic oligonucleotide
aatacctgcctttcatcctaagtgtaagttttacaaactttcagataatcacacacatga

SEQ ID NO: 107511 - DNA, 60 bp, Artificial
  Synthetic oligonucleotide
tgaaattatgtcacttaatctgacgaatggtgaatatgatgttgatgctatatttcattc

SEQ ID NO: 107512 - DNA, 56 bp, Artificial
  Synthetic oligonucleotide
atagatagtgacgattatggtaagtttatcactctactgctaaacaactgtcctaa

SEQ ID NO: 107513 - DNA, 60 bp, Artificial
  Synthetic oligonucleotide
attgtctttttaccctcactgcgtagcttatattactttagagccaagttacaatccttg

SEQ ID NO: 107514 - DNA, 57 bp, Artificial
  Synthetic oligonucleotide
ttttaccctcactgcgtagcttatattactttagagccaagttacaatccttgttgt

SEQ ID NO: 107515 - DNA, 60 bp, Artificial
  Synthetic oligonucleotide
caatgattggttatcgtctattttttacaaaatttcgtaagttaatgtttgataatttca

SEQ ID NO: 107516 - DNA, 60 bp, Artificial
  Synthetic oligonucleotide
gataatttcaattacactcaagtgttacattttgttcattcatacagtgaattgtctttt

SEQ ID NO: 107517 - DNA, 60 bp, Artificial
  Synthetic oligonucleotide
tagtccaatatgggatggcagtcctgacgccccgaggataggttagggagaagtaggctt

SEQ ID NO: 107518 - DNA, 60 bp, Artificial
  Synthetic oligonucleotide
gggatggcagtcctgacgccccgaggataggttagggagaagtaggcttaaatcagcaga

SEQ ID NO: 107519 - DNA, 60 bp, Artificial
  Synthetic oligonucleotide
gattgacgaatggattatctataagtgaattggctttggacgaaaacacttaaattgtta

SEQ ID NO: 107520 - DNA, 60 bp, Artificial
  Synthetic oligonucleotide
taaattgttatgattttacgctgatgcgtagtcgtaatttaaaagtacttttatgcattc

SEQ ID NO: 107521 - DNA, 60 bp, Artificial
  Synthetic oligonucleotide
atagcagaactgagcaataattttgaatttgcgggatttacggctccgacgccccacaac

SEQ ID NO: 107522 - DNA, 60 bp, Artificial
  Synthetic oligonucleotide
atttacggctccgacgccccacaacattcgaaaagcctttactcgacttaagattatgtt

SEQ ID NO: 107523 - DNA, 60 bp, Artificial
  Synthetic oligonucleotide
ggctccgacgccccacaacattcgaaaagcctttactcgacttaagattatgtttgaacg

SEQ ID NO: 107524 - DNA, 60 bp, Artificial
  Synthetic oligonucleotide
agattatgtttgaacgtatgaataggtaccccgacgagatatttttatcaagacatcgaa

SEQ ID NO: 107525 - DNA, 60 bp, Artificial
  Synthetic oligonucleotide
ttattttacgagctatgggataataatgcaaaactaaccaagaacaaaacaactacccct

SEQ ID NO: 107526 - DNA, 60 bp, Artificial
  Synthetic oligonucleotide
cgagctatgggataataatgcaaaactaaccaagaacaaaacaactacccctacaacaag

SEQ ID NO: 107527 - DNA, 60 bp, Artificial
  Synthetic oligonucleotide
tatgacgcggattatatagcagaactgagcaataattttgaatttgcgggatttacggct

SEQ ID NO: 107528 - DNA, 60 bp, Artificial
  Synthetic oligonucleotide
agacatcgaatgttaggattcgtaatatatcaaccagaaacttcaggaccaatacctgcc

SEQ ID NO: 107529 - DNA, 60 bp, Artificial
  Synthetic oligonucleotide
ggattcgtaatatatcaaccagaaacttcaggaccaatacctgcctttcatcctaagtgt

SEQ ID NO: 107530 - DNA, 60 bp, Artificial
  Synthetic oligonucleotide
aagttttttttcctcacccataatggctgatataagactcgacatagcgcccgatcttat

SEQ ID NO: 107531 - DNA, 60 bp, Artificial
  Synthetic oligonucleotide
cctcacccataatggctgatataagactcgacatagcgcccgatcttatccataatggtg

SEQ ID NO: 107532 - DNA, 60 bp, Artificial
  Synthetic oligonucleotide
gaatcctggaggggtaccatggattgcgattggagatgaaacatctgtgacttcaccagg

SEQ ID NO: 107533 - DNA, 60 bp, Artificial
  Synthetic oligonucleotide
gtctaatcgccgagtgaagcgtgactcatacgcaggagtggctaaacgtgggtacacacg

SEQ ID NO: 107534 - DNA, 60 bp, Artificial
  Synthetic oligonucleotide
ccgctgtaccatcgttaagtctgtcacctggaatgctgaatcctggaggggtaccatgga

SEQ ID NO: 107535 - DNA, 60 bp, Artificial
  Synthetic oligonucleotide
tgaatcctggaggggtaccatggattgcgattggtgatgagacatctgtgacttcaccgg

SEQ ID NO: 107536 - DNA, 60 bp, Artificial
  Synthetic oligonucleotide
gtctaatcgccgagtgaagcgcgactcatacgcaggagtggtcaaacgtgggtacacacg

SEQ ID NO: 107537 - DNA, 60 bp, Artificial
  Synthetic oligonucleotide
atgccacgagaacttttttggctatatcacctcaatggacttgcagtcacttaaaaagaa

SEQ ID NO: 107538 - DNA, 60 bp, Artificial
  Synthetic oligonucleotide
gctaatctgctgaccgttactctgcaaagatggggaacgcttcctctatcgttcagacga

SEQ ID NO: 107539 - DNA, 56 bp, Artificial
  Synthetic oligonucleotide
gctattctgctgaccgttactctgcaaagatggggaacgcttcctctatcgttcag

SEQ ID NO: 107540 - DNA, 56 bp, Artificial
  Synthetic oligonucleotide
gctaatctgctgaccgttactctgcaaagatggggaacgcttcctctatcgttcag

SEQ ID NO: 107541 - DNA, 56 bp, Artificial
  Synthetic oligonucleotide
gctaatctgctgaccgtcactctgcaaagatggggaacgcttcctctatcgttcag

SEQ ID NO: 107542 - DNA, 60 bp, Artificial
  Synthetic oligonucleotide
ggctaatctgctgaccgttactctgcaaagatggggaacgcttcctctatcgttcagacg

SEQ ID NO: 107543 - DNA, 60 bp, Artificial
  Synthetic oligonucleotide
gctaatctgctgaccgtcactctgcaaagatggggaacgcttcctctatcgttcagacga

SEQ ID NO: 107544 - DNA, 59 bp, Artificial
  Synthetic oligonucleotide
gctattctgctgaccgttactctgcaaagatggggaacgcttcctctatcgttcagacg

SEQ ID NO: 107545 - DNA, 57 bp, Artificial
  Synthetic oligonucleotide
ggctaatctgctgaccgttactctgcaaagatggggaacgcttcctctatcgttcag

SEQ ID NO: 107546 - DNA, 60 bp, Artificial
  Synthetic oligonucleotide
cactactcccccgtgatcaaacttgtacgctcgtaatgctgagtcttaagcacgtgagtt

SEQ ID NO: 107547 - DNA, 60 bp, Artificial
  Synthetic oligonucleotide
ctactcccccgtgatcaaacttgtacgctcgtaatgctgagtcttaaccacaggagttga

SEQ ID NO: 107548 - DNA, 60 bp, Artificial
  Synthetic oligonucleotide
ccatgtggcattatacgagtatcaacaatgacacgagagtagcgctagaccccaaaccga

SEQ ID NO: 107549 - DNA, 60 bp, Artificial
  Synthetic oligonucleotide
ccatgtggcattatacgagtatcaacaatgacacgagagtagcacttgaccccaaaccga

SEQ ID NO: 107550 - DNA, 60 bp, Artificial
  Synthetic oligonucleotide
agtaatttccaccatgtggcactatacgagtatcaacaatgacacgagagtagcacttga

SEQ ID NO: 107551 - DNA, 60 bp, Artificial
  Synthetic oligonucleotide
agtaatttccaccatgtggcattatacgagtatcaacaatgacacgagagtagcacttga

SEQ ID NO: 107552 - DNA, 60 bp, Artificial
  Synthetic oligonucleotide
agtaatctccaccatgtggcattatacgagtatcaacaatgacacgagagtagcgctaga

SEQ ID NO: 107553 - DNA, 60 bp, Artificial
  Synthetic oligonucleotide
agtaatttccaccatgtggcattatacgagtatcaacaatgacacgagagtagcgctaga

SEQ ID NO: 107554 - DNA, 60 bp, Artificial
  Synthetic oligonucleotide
tggcaacgacgctggcgactcgattattgataaggcgtactgcgaacctgtaagcttcat

SEQ ID NO: 107555 - DNA, 60 bp, Artificial
  Synthetic oligonucleotide
ggtggttcccaactgaaggtcagatggtcgagcagttcattaagcaacaatccatcccat

SEQ ID NO: 107556 - DNA, 60 bp, Artificial
  Synthetic oligonucleotide
ccatcccatatgttaccgctgacaacgtaatgattgcgccatgcgtacgcgaaatccgtc

SEQ ID NO: 107557 - DNA, 60 bp, Artificial
  Synthetic oligonucleotide
tgtccatatcggaaaccctcgattacgatgacctcattaataatgtaaaccgttgtaagt

SEQ ID NO: 107558 - DNA, 60 bp, Artificial
  Synthetic oligonucleotide
cttgtactatcgtgaccacagcgtgcgtgtttggaagttgaccaatcctgtgtccatatc

SEQ ID NO: 107559 - DNA, 60 bp, Artificial
  Synthetic oligonucleotide
aagagtgatcaatcctacatttacgtatttgtcttcttgtactatcgtgaccacagcgtg

SEQ ID NO: 107560 - DNA, 60 bp, Artificial
  Synthetic oligonucleotide
ccctcgattacgatgacctcattaataatgtaaaccgttgtaagtcggcgcgcgaacccg

SEQ ID NO: 107561 - DNA, 60 bp, Artificial
  Synthetic oligonucleotide
gtgaccacagcgtgcgtgtttggaagttgaccaatcctgtgtccatatcggaaaccctcg

SEQ ID NO: 107562 - DNA, 60 bp, Artificial
  Synthetic oligonucleotide
ggcaacgacgctggcgactcgattattgataaggcgtactgcgaacctgtaagcttcatg

SEQ ID NO: 107563 - DNA, 60 bp, Artificial
  Synthetic oligonucleotide
gcaacgtgactcccccttacgctattaccgcaactaagtttgagcgaaagactagcggtg

SEQ ID NO: 107564 - DNA, 60 bp, Artificial
  Synthetic oligonucleotide
ccccttacgctattaccgcaactaagtttgagcgaaagactagcggtggatacgttttct

SEQ ID NO: 107565 - DNA, 60 bp, Artificial
  Synthetic oligonucleotide
aagaaagattggtggttcccaactgaaggtcagatggtcgagcagttcattaagcaacaa

SEQ ID NO: 107566 - DNA, 60 bp, Artificial
  Synthetic oligonucleotide
caaacttgtacgctcgtaatgctgagtcttaaccacaggagttgaggagctctgtcccgg

SEQ ID NO: 107567 - DNA, 60 bp, Artificial
  Synthetic oligonucleotide
atcaaacttgtacgctcgtaatgctgagtcttaagcacgtgagttgaggagctccgtccc

SEQ ID NO: 107568 - DNA, 60 bp, Artificial
  Synthetic oligonucleotide
tcaaacttgtacgctcgtaatgctgagtcttaaccacaggagttgaggagctctgtcccg

SEQ ID NO: 107569 - DNA, 60 bp, Artificial
  Synthetic oligonucleotide
acgcttttgaaggtcgtgtatcaatctacagcgcgcaagagggatgggacaaaacaatct

SEQ ID NO: 107570 - DNA, 60 bp, Artificial
  Synthetic oligonucleotide
tacaacgcaagctgaagcatttgcctcaccatagatgtaatcaacagatccgtcatcagg

SEQ ID NO: 107571 - DNA, 60 bp, Artificial
  Synthetic oligonucleotide
gcaacgcaagctgaagcatttgcctcaccatagatgtaatcaacagattcgtcatcagga

SEQ ID NO: 107572 - DNA, 60 bp, Artificial
  Synthetic oligonucleotide
tgcaacgcaagctgaagcatttgcctcaccatagatgtaatcaacagattcgtcatcagg

SEQ ID NO: 107573 - DNA, 60 bp, Artificial
  Synthetic oligonucleotide
cactttggattatcccattattctagggcgactaccccaatccttggaaagatgccggcc

SEQ ID NO: 107574 - DNA, 60 bp, Artificial
  Synthetic oligonucleotide
tggacttgattaacaacgcttttgaaggtcgtgtatcaatctacagcgcgcaagagggat

SEQ ID NO: 107575 - DNA, 60 bp, Artificial
  Synthetic oligonucleotide
agcatgatccatcgaagggccgtgcttacagaaaggaattggtgacgccagctcgagatt

SEQ ID NO: 107576 - DNA, 59 bp, Artificial
  Synthetic oligonucleotide
tggacttgattaacaacgcttttgaaggtcgtgtatcaatctacagcgcgcaagaggga

SEQ ID NO: 107577 - DNA, 50 bp, Artificial
  Synthetic oligonucleotide
caatgtttagatcaatacactcaagttggacagatcctctgcaggtagtg

SEQ ID NO: 107578 - DNA, 60 bp, Artificial
  Synthetic oligonucleotide
aacgcaagctgaagcatttgcctcaccatagatgtaatcaacagatccgtcatcaggatt

SEQ ID NO: 107579 - DNA, 60 bp, Artificial
  Synthetic oligonucleotide
gctgaagcatttgcctcaccatagatgtaatcaacagatccgtcatcaggattacgtcga

SEQ ID NO: 107580 - DNA, 60 bp, Artificial
  Synthetic oligonucleotide
ccaccaagttcggggatttggattatccggtgatgattggcgatccgatgattcttggct

SEQ ID NO: 107581 - DNA, 50 bp, Artificial
  Synthetic oligonucleotide
tctagggcgactaccccaatccttggaaagatgccagctgtattctcggg

SEQ ID NO: 107582 - DNA, 60 bp, Artificial
  Synthetic oligonucleotide
gagcatgatccatcgaagggccgtgcttacaggaaggaattggtgacgccagcacgagac

SEQ ID NO: 107583 - DNA, 60 bp, Artificial
  Synthetic oligonucleotide
cgcaattgatccacttaagcattcaaagttatacgaagaatatggcctatacttacgtcc

SEQ ID NO: 107584 - DNA, 60 bp, Artificial
  Synthetic oligonucleotide
ccacttaagcattcaaagttatacgaagaatatggcctatacttacgtcctcaccaaatc

SEQ ID NO: 107585 - DNA, 60 bp, Artificial
  Synthetic oligonucleotide
ttggcacattaaaccagatttaattgcagcgttgatggaattttcaagatttattaatgt

SEQ ID NO: 107586 - DNA, 61 bp, Artificial
  Synthetic oligonucleotide
ccagatttaattgcagcgttgatggaattttcaagatttattaatgtcatgatgacggatg

SEQ ID NO: 107587 - DNA, 60 bp, Artificial
  Synthetic oligonucleotide
attggtttgaggacagtaagcactatgatgagagttcaaacaaattcagttcatcagatt

SEQ ID NO: 107588 - DNA, 60 bp, Artificial
  Synthetic oligonucleotide
ggacagtaagcactatgatgagagttcaaacaaattcagttcatcagatttccgataagg

SEQ ID NO: 107589 - DNA, 60 bp, Artificial
  Synthetic oligonucleotide
aagaggatattccaagaatacctgttccagagctttcactatgtagatttattggtttga

SEQ ID NO: 107590 - DNA, 60 bp, Artificial
  Synthetic oligonucleotide
ccaagaatacctgttccagagctttcactatgtagatttattggtttgaggacagtaagc

SEQ ID NO: 107591 - DNA, 60 bp, Artificial
  Synthetic oligonucleotide
gaaatgaatgcggaagttattgaatggaaagaagatcgagcgaatgagccttggcacatt

SEQ ID NO: 107592 - DNA, 60 bp, Artificial
  Synthetic oligonucleotide
gcggaagttattgaatggaaagaagatcgagcgaatgagccttggcacattaaaccagat

SEQ ID NO: 107593 - DNA, 60 bp, Artificial
  Synthetic oligonucleotide
ctgatagttacatttcggatattatgtggtggtttgacatgatattaaattggtcggtct

SEQ ID NO: 107594 - DNA, 60 bp, Artificial
  Synthetic oligonucleotide
tcggatattatgtggtggtttgacatgatattaaattggtcggtcttaaatcgtgaagag

SEQ ID NO: 107595 - DNA, 60 bp, Artificial
  Synthetic oligonucleotide
gggtccaccaacacacttaaatcttctgggaagttatgagaatgatggaccgactgatga

SEQ ID NO: 107596 - DNA, 60 bp, Artificial
  Synthetic oligonucleotide
aatgatggaccgactgatgaaaaacttgtttcaatgattgattatattacatatagtgct

SEQ ID NO: 107597 - DNA, 60 bp, Artificial
  Synthetic oligonucleotide
tgcaaaaagagataagagaagattcaatcgcgtgcgttggttttgctttgatcctatcgc

SEQ ID NO: 107598 - DNA, 60 bp, Artificial
  Synthetic oligonucleotide
gagaagattcaatcgcgtgcgttggttttgctttgatcctatcgctccggaaagttttgc

SEQ ID NO: 107599 - DNA, 60 bp, Artificial
  Synthetic oligonucleotide
atcctatcgctccggaaagttttgctgagaacgtattagtgaggaaaacaaagatagaaa

SEQ ID NO: 107600 - DNA, 60 bp, Artificial
  Synthetic oligonucleotide
cctatcgctccggaaagttttgctgagaacgtattagtgaggaaaacaaagatagaaaat

SEQ ID NO: 107601 - DNA, 60 bp, Artificial
  Synthetic oligonucleotide
aagatagaaaattataaagatctgaaaaaatatatggatagcggctcggtagaaagagta

SEQ ID NO: 107602 - DNA, 60 bp, Artificial
  Synthetic oligonucleotide
agaaagagtattgatatgggatgtgagtggagatggaaagaaagggacgattgaatggga

SEQ ID NO: 107603 - DNA, 60 bp, Artificial
  Synthetic oligonucleotide
atgggatgtgagtggagatggaaagaaagggacgattgaatgggaacaacaacgtgcatc

SEQ ID NO: 107604 - DNA, 60 bp, Artificial
  Synthetic oligonucleotide
ttgaatgggaacaacaacgtgcatcagaagacaggatgggggagcaaattgcaaaaggat

SEQ ID NO: 107605 - DNA, 60 bp, Artificial
  Synthetic oligonucleotide
caattcgacagttaagaggtcacagatttatatttgtgagcacgaagaaaagaatacatc

SEQ ID NO: 107606 - DNA, 60 bp, Artificial
  Synthetic oligonucleotide
ttcttcccatcttcgatgtaaatcgaatttcgacgttaaatgatttatggattgagcgag

SEQ ID NO: 107607 - DNA, 53 bp, Artificial
  Synthetic oligonucleotide
gttaaaatcatggagccttgtgcagtgttacacgtcagtggtgacatcgtgcc

SEQ ID NO: 107608 - DNA, 60 bp, Artificial
  Synthetic oligonucleotide
tgaagctgagacattaaatgtagctgagccaaatgtccataaggtgcgtgggctcacaat

SEQ ID NO: 107609 - DNA, 60 bp, Artificial
  Synthetic oligonucleotide
agaatacatctaaaagacacaataataacaccagatgttgttattagccaacaggtttta

SEQ ID NO: 107610 - DNA, 60 bp, Artificial
  Synthetic oligonucleotide
gacgagccaagagctgatttgttttacctcacaaatcatagaaatgcagcgcgagttgag

SEQ ID NO: 107611 - DNA, 60 bp, Artificial
  Synthetic oligonucleotide
ggactagattctctagacgagccaagagctgatttgttttacctcacaaatcatagaaat

SEQ ID NO: 107612 - DNA, 60 bp, Artificial
  Synthetic oligonucleotide
cagcgcgagttgaggacattagaagagtagttgaacaaagtacgatctcaacattatggg

SEQ ID NO: 107613 - DNA, 60 bp, Artificial
  Synthetic oligonucleotide
tcatagaaatgcagcgcgagttgaggacattagaagagtagttgaacaaagtacgatctc

SEQ ID NO: 107614 - DNA, 60 bp, Artificial
  Synthetic oligonucleotide
ccaaaggataacgaagtctatagttgctattcatctctaattatcccacaaccgggtgcg

SEQ ID NO: 107615 - DNA, 60 bp, Artificial
  Synthetic oligonucleotide
attaaacatcgaattccaaaggataacgaagtctatagttgctattcatctctaattatc

SEQ ID NO: 107616 - DNA, 53 bp, Artificial
  Synthetic oligonucleotide
cgataggacacatttgggagaggcgagaattcattatgtttcacccaaagatt

SEQ ID NO: 107617 - DNA, 60 bp, Artificial
  Synthetic oligonucleotide
tcttcccatcttcgatgtaaatcgaatttcgacgttaaatgatttatggattgagcgagg

SEQ ID NO: 107618 - DNA, 60 bp, Artificial
  Synthetic oligonucleotide
ggctcacaatgggtccaccaacacacttaaatcttctgggaagttatgagaatgatggac

SEQ ID NO: 107619 - DNA, 60 bp, Artificial
  Synthetic oligonucleotide
aaatgtagctgagccaaatgtccataaggtgcgtgggctcacaatgggtccaccaacaca

SEQ ID NO: 107620 - DNA, 60 bp, Artificial
  Synthetic oligonucleotide
cccagcgtgggcagaaaattattgtgtcattttaaaagaggatattccaagaatacctgt

SEQ ID NO: 107621 - DNA, 60 bp, Artificial
  Synthetic oligonucleotide
gaagattaattatgacccagcgtgggcagaaaattattgtgtcattttaaaagaggatat

SEQ ID NO: 107622 - DNA, 56 bp, Artificial
  Synthetic oligonucleotide
tacctccgttcaaaagagtaggtgagactcgaagaggctttcatgaaacaactcac

SEQ ID NO: 107623 - DNA, 60 bp, Artificial
  Synthetic oligonucleotide
tgacggatgaggcctgtgtcacaaagtggatactgtacctccgttcaaaagagtaggtga

SEQ ID NO: 107624 - DNA, 60 bp, Artificial
  Synthetic oligonucleotide
ttattaatgtcatgatgacggatgaggcctgtgtcacaaagtggatactgtacctccgtt

SEQ ID NO: 107625 - DNA, 59 bp, Artificial
  Synthetic oligonucleotide
tctaattatcccacaaccgggtgcggcgcaagatatgtatgaatgtaggaatataataa

SEQ ID NO: 107626 - DNA, 60 bp, Artificial
  Synthetic oligonucleotide
ggatatcattctgaaggggccagaacttagtgaagatgaggatgaaagagcttatgctac

SEQ ID NO: 107627 - DNA, 60 bp, Artificial
  Synthetic oligonucleotide
atgaggatgaaagagcttatgctacaatgtttgaaatggttcggtgtattatcaccttgt

SEQ ID NO: 107628 - DNA, 60 bp, Artificial
  Synthetic oligonucleotide
aggggccagaacttagtgaagatgaggatgaaagagcttatgctacaatgtttgaaatgg

SEQ ID NO: 107629 - DNA, 60 bp, Artificial
  Synthetic oligonucleotide
gagcttatgctacaatgtttgaaatggttcggtgtattatcaccttgtgttatgctgaga

SEQ ID NO: 107630 - DNA, 60 bp, Artificial
  Synthetic oligonucleotide
aattatggacattacgcaatcgctcaaaatgggcactaagctggctgcgccgactgtgta

SEQ ID NO: 107631 - DNA, 60 bp, Artificial
  Synthetic oligonucleotide
atcacgctcactcaacgaattacaacgaccgggccctttgcgatattgactggatcaacg

SEQ ID NO: 107632 - DNA, 60 bp, Artificial
  Synthetic oligonucleotide
gcgttgtaggtcatctgcttttcacggcgggaggaagatttactaacctaactcaaaata

SEQ ID NO: 107633 - DNA, 60 bp, Artificial
  Synthetic oligonucleotide
agaagaagaaccgcaacgcattcggacgcatgcatcctgtgtacgtcgctgcgaattaca

SEQ ID NO: 107634 - DNA, 60 bp, Artificial
  Synthetic oligonucleotide
gctattcgctggtcagttatggctcgcgctgcgttcctattcaagactgttggatttggt

SEQ ID NO: 107635 - DNA, 60 bp, Artificial
  Synthetic oligonucleotide
gctggtcagttatggctcgcgctgcgttcctattcaagactgttggatttggtggtttgc

SEQ ID NO: 107636 - DNA, 60 bp, Artificial
  Synthetic oligonucleotide
gctggtcagttatggctcgcgctgcgttcctattcaagactgttggatttggtggcttgc

SEQ ID NO: 107637 - DNA, 60 bp, Artificial
  Synthetic oligonucleotide
gctggtcagttatggctcgcgctgcgttcctattcaagactgttggatttggtggtctgc

SEQ ID NO: 107638 - DNA, 60 bp, Artificial
  Synthetic oligonucleotide
cgctgtcatgctatccgggctgatccaaaggttcgaagaagaaaagatgaaacacaatca

SEQ ID NO: 107639 - DNA, 60 bp, Artificial
  Synthetic oligonucleotide
gtcgctgtcatgctatccgggctgatccaaaggttcgaagaagaaaagatgaaacacaat

SEQ ID NO: 107640 - DNA, 60 bp, Artificial
  Synthetic oligonucleotide
gtgtcgctgtcatgctatccgggctgatccaaaggttcgaagaagaaaagatgaaacaca

SEQ ID NO: 107641 - DNA, 60 bp, Artificial
  Synthetic oligonucleotide
gtgtcgctgccatgctatccgggctgatccaaaggttcgaagaagaaaagatgaaacaca

SEQ ID NO: 107642 - DNA, 60 bp, Artificial
  Synthetic oligonucleotide
attgggtaagatttggtggcgttttacgaacggttcgcgttaaattctatgacgcacgac

SEQ ID NO: 107643 - DNA, 60 bp, Artificial
  Synthetic oligonucleotide
gtattggaggaggaagcttgggctgcggcgaatgattttgaggatttgatgctgactgat

SEQ ID NO: 107644 - DNA, 60 bp, Artificial
  Synthetic oligonucleotide
cgcgtgtgcaggttaattatggccccacgggggagccgttggatttccagatcggcagga

SEQ ID NO: 107645 - DNA, 60 bp, Artificial
  Synthetic oligonucleotide
ttggtggtgttttacgaacggttcgcgttaaattctatgacgcacgacctccggatgatg

SEQ ID NO: 107646 - DNA, 60 bp, Artificial
  Synthetic oligonucleotide
cgttttacgaacggttcgcgttaaattctatgatgcgcgacccccagatgatgttttgca

SEQ ID NO: 107647 - DNA, 54 bp, Artificial
  Synthetic oligonucleotide
cggttagttcaactcatagttacgaagattattctaaagcgtataaagagttaa

SEQ ID NO: 107648 - DNA, 60 bp, Artificial
  Synthetic oligonucleotide
gatgtaaatgactcagcttctacaatcgttgacagtgtttgtgaagagtcttggtatgat

SEQ ID NO: 107649 - DNA, 60 bp, Artificial
  Synthetic oligonucleotide
actatgagataatcgagagccggatacattcccctcattactaagggtcagcccctgagg

SEQ ID NO: 107650 - DNA, 60 bp, Artificial
  Synthetic oligonucleotide
agtgctatattagcaactatgagataatcgagagccggatacattcccctcattactaag

SEQ ID NO: 107651 - DNA, 60 bp, Artificial
  Synthetic oligonucleotide
gactcagcttctacaatcgttgacagtgtttgtgaagagtcttggtatgataaaacgatt

SEQ ID NO: 107652 - DNA, 60 bp, Artificial
  Synthetic oligonucleotide
tgaatctatgttacagatcgactgtgagacagattctcttatttcagaatcggttagttc

SEQ ID NO: 107653 - DNA, 60 bp, Artificial
  Synthetic oligonucleotide
gatcgactgtgagacagattctcttatttcagaatcggttagttcaactcatagttacga

SEQ ID NO: 107654 - DNA, 56 bp, Artificial
  Synthetic oligonucleotide
aaaagcggagaaggctgcattcgcatcgtacgcggaagcgtttcgtgatgatgtga

SEQ ID NO: 107655 - DNA, 60 bp, Artificial
  Synthetic oligonucleotide
aaaagcggagaaggctgcattcgcatcgtacgcggaagcgtttcgtgatgatgtgaggtt

SEQ ID NO: 107656 - DNA, 54 bp, Artificial
  Synthetic oligonucleotide
aaaagcggagaaggctgcattcgcatcgtacgcggaagcgtttcgtgatgatgt

SEQ ID NO: 107657 - DNA, 60 bp, Artificial
  Synthetic oligonucleotide
gttatgtgccatcggccccaataccaacagcaatgccgagagtcgcgttggatatattgg

SEQ ID NO: 107658 - DNA, 60 bp, Artificial
  Synthetic oligonucleotide
gcagaacaacgaaggcttagaaaacttgacgaactggctagacgaaatagaaatggacga

SEQ ID NO: 107659 - DNA, 60 bp, Artificial
  Synthetic oligonucleotide
aacaaaatttcgacaagacccgcatgtacaacacaacctctaagaaacaattaataaaac

SEQ ID NO: 107660 - DNA, 60 bp, Artificial
  Synthetic oligonucleotide
ccattcctatataactcccgctgaaaatgaactccgagcaagtacctacactgcagttgc

SEQ ID NO: 107661 - DNA, 60 bp, Artificial
  Synthetic oligonucleotide
ttaataaaaccaattgactgtaataacaccgaagactgtacctgtaatatccattcctat

SEQ ID NO: 107662 - DNA, 60 bp, Artificial
  Synthetic oligonucleotide
cgacaagacccgcatgtacaacacaacctctaagaaacaattaataaaaccaattgactg

SEQ ID NO: 107663 - DNA, 60 bp, Artificial
  Synthetic oligonucleotide
gataaaggagagcttaacgtactagtgcccggcgaagtgatatcaattgagtactcggag

SEQ ID NO: 107664 - DNA, 60 bp, Artificial
  Synthetic oligonucleotide
ctcaaattcctcctctcgttaggtatggtttatgtcctcgcaattacccaaactcgagga

SEQ ID NO: 107665 - DNA, 60 bp, Artificial
  Synthetic oligonucleotide
aactcgaggaatctaaaatgcaaacgtatccataggtttaccgccagatctattggacat

SEQ ID NO: 107666 - DNA, 60 bp, Artificial
  Synthetic oligonucleotide
gtttcgtaatgagacaggagtatttgagtccactggaagctgcgaaacttgagtgctcag

SEQ ID NO: 107667 - DNA, 60 bp, Artificial
  Synthetic oligonucleotide
agcaaggtttcgtaatgagacaggagtatttgagtccactggaagctgcgaaacttgagt

SEQ ID NO: 107668 - DNA, 60 bp, Artificial
  Synthetic oligonucleotide
ggaaggcaagtattttaaatacaagtgacatccttgagcaaggtttcgtaatgagacagg

SEQ ID NO: 107669 - DNA, 60 bp, Artificial
  Synthetic oligonucleotide
tacgatagtctggagtataatgacttggcagaaatgagttctatggatgtggtgacaaag

SEQ ID NO: 107670 - DNA, 60 bp, Artificial
  Synthetic oligonucleotide
ggtccgagaccccgcgatgtgattcagattattttaaatgatgtgctagaaggaaatcgg

SEQ ID NO: 107671 - DNA, 60 bp, Artificial
  Synthetic oligonucleotide
cgaaatagaaatggacgaaaaactaagtcctggtttgattgcgcgaacgaaaatctaccc

SEQ ID NO: 107672 - DNA, 60 bp, Artificial
  Synthetic oligonucleotide
tattggacatgggatgattcaattagcttgcggatttgtgactacattaaatagccctac

SEQ ID NO: 107673 - DNA, 60 bp, Artificial
  Synthetic oligonucleotide
ggatgattcaattagcttgcggatttgtgactacattaaatagccctacgattcattggc

SEQ ID NO: 107674 - DNA, 59 bp, Artificial
  Synthetic oligonucleotide
aggtcactcctggtatgcagactgtctacaccctgcccgctcaacaattgtctggactt

SEQ ID NO: 107675 - DNA, 60 bp, Artificial
  Synthetic oligonucleotide
gctagaaattattcagctatctccccccatcctcgagcagtttgatcgtaagttctgcgt

SEQ ID NO: 107676 - DNA, 60 bp, Artificial
  Synthetic oligonucleotide
atgagttttatttgcattatcattctaagccagaggagaatattagcatgcgtaagagag

SEQ ID NO: 107677 - DNA, 60 bp, Artificial
  Synthetic oligonucleotide
ctcccgctgaaaatgaactccgagcaagtacctacactgcagttgcagaacaacgaaggc

SEQ ID NO: 107678 - DNA, 57 bp, Artificial
  Synthetic oligonucleotide
aaaactaagtcctggtttgattgcgcgaacgaaaatctacccgctaaagaataagga

SEQ ID NO: 107679 - DNA, 51 bp, Artificial
  Synthetic oligonucleotide
ggtgacaaagaatgtaaaggttatggacgcgattgatgatgacgaaattcc

SEQ ID NO: 107680 - DNA, 60 bp, Artificial
  Synthetic oligonucleotide
atgtgactatcgctgataaaggagagcttaacgtactagtgcccggcgaagtgatatcaa

SEQ ID NO: 107681 - DNA, 54 bp, Artificial
  Synthetic oligonucleotide
caaaaggaatgcgatatttgttgacgcggattcagatgttgtgattcagaatgt

SEQ ID NO: 107682 - DNA, 60 bp, Artificial
  Synthetic oligonucleotide
cgaggaatctaaaatgcaaacgtatccataggtttaccgccagatctattggacatggga

SEQ ID NO: 107683 - DNA, 60 bp, Artificial
  Synthetic oligonucleotide
aaatctacccgctaaagaataaggataactggaacgaatcaccgtacttaatagatggtc

SEQ ID NO: 107684 - DNA, 60 bp, Artificial
  Synthetic oligonucleotide
cattggcattcatgcgttgtttaagttgaatttctttgaggtctaatgatgatgccggtc

SEQ ID NO: 107685 - DNA, 60 bp, Artificial
  Synthetic oligonucleotide
atagccctacgattcattggcattcatgcgttgtttaagttgaatttctttgaggtctaa

SEQ ID NO: 107686 - DNA, 60 bp, Artificial
  Synthetic oligonucleotide
gaggtctaatgatgatgccggtctgcgtgcaactgggtggaatgcgtaagagaagcccgg

SEQ ID NO: 107687 - DNA, 60 bp, Artificial
  Synthetic oligonucleotide
aatgcgcggtatttttaatggacgtacagactggatatcatatctaaagcggatagcatc

SEQ ID NO: 107688 - DNA, 60 bp, Artificial
  Synthetic oligonucleotide
tgaggtctaatgatgatgccggtctgcgtgcaactgggtggaatgcgtaagagaagcccg

SEQ ID NO: 107689 - DNA, 60 bp, Artificial
  Synthetic oligonucleotide
cgaagtattcccgaccgtggatcatgatcatgtttttaacgttgctagtttacctgcggt

SEQ ID NO: 107690 - DNA, 60 bp, Artificial
  Synthetic oligonucleotide
atgtcatcatctccccaacatacatcgaacctttaccagctggggcattgcaatatgacg

SEQ ID NO: 107691 - DNA, 60 bp, Artificial
  Synthetic oligonucleotide
cgcgcttgtaacgttgagatatttgaaggtaaatctgaaggtcagggcatgttcaaaggc

SEQ ID NO: 107692 - DNA, 60 bp, Artificial
  Synthetic oligonucleotide
aaagctttccgcgcttgtaacgttgagatatttgaaggtaaatctgaaggtcagggcatg

SEQ ID NO: 107693 - DNA, 60 bp, Artificial
  Synthetic oligonucleotide
gcggtcatcgcccagccaaactttaaatcaggatggcaaggctataaagctttccgcgct

SEQ ID NO: 107694 - DNA, 60 bp, Artificial
  Synthetic oligonucleotide
tacctgcggtcatcgcccagccaaactttaaatcaggatggcaaggctataaagctttcc

SEQ ID NO: 107695 - DNA, 60 bp, Artificial
  Synthetic oligonucleotide
gctagaaggaaatcggaaggcaagtattttaaatacaagtgacatccttgagcaaggttt

SEQ ID NO: 107696 - DNA, 60 bp, Artificial
  Synthetic oligonucleotide
gagttttatttgcattatcattctaagccagaggagaatattagcatgcgtaagagagga

SEQ ID NO: 107697 - DNA, 60 bp, Artificial
  Synthetic oligonucleotide
ctgcagttgcagaacaacgaaggcttagaaaacttgacgaactggctagacgaaatagaa

SEQ ID NO: 107698 - DNA, 60 bp, Artificial
  Synthetic oligonucleotide
cgatagtctggagtataatgacttggcagaaatgagttctatggatgtggtgacaaagaa

SEQ ID NO: 107699 - DNA, 60 bp, Artificial
  Synthetic oligonucleotide
agaataaggataactggaacgaatcaccgtacttaatagatggtccgagaccccgcgatg

SEQ ID NO: 107700 - DNA, 60 bp, Artificial
  Synthetic oligonucleotide
atagatggtccgagaccccgcgatgtgattcagattattttaaatgatgtgctagaagga

SEQ ID NO: 107701 - DNA, 60 bp, Artificial
  Synthetic oligonucleotide
caatatgacgtttatgaaattgagaggaatggatattggcgtttcatgacaatgcgcggt

SEQ ID NO: 107702 - DNA, 60 bp, Artificial
  Synthetic oligonucleotide
gtcatcatctccccaacatacatcgaacctttaccagctggggcattgcaatatgacgtt

SEQ ID NO: 107703 - DNA, 60 bp, Artificial
  Synthetic oligonucleotide
taatggacgtacagactggatatcatatctaaagcggatagcatcaggggtggtggtaga

SEQ ID NO: 107704 - DNA, 60 bp, Artificial
  Synthetic oligonucleotide
gactgtaataacaccgaagactgtacctgtaatatccattcctatataactcccgctgaa

SEQ ID NO: 107705 - DNA, 60 bp, Artificial
  Synthetic oligonucleotide
cggaaggtcgttttctcgtctagcaaggaggtgatggtagtttaggccctcgcagtggtg

SEQ ID NO: 107706 - DNA, 60 bp, Artificial
  Synthetic oligonucleotide
tcactattactaactcatctaggacttccagtttcatccgcatcatatacatcatctttt

SEQ ID NO: 107707 - DNA, 60 bp, Artificial
  Synthetic oligonucleotide
gcctgtaactgatcttgagtacggtgagaacactatgaccacattgacgcaactcagtga

SEQ ID NO: 107708 - DNA, 60 bp, Artificial
  Synthetic oligonucleotide
gatacgcccatcgtggaacagctaaggtccgacagagtatgtacgaactgcctgtaactg

SEQ ID NO: 107709 - DNA, 60 bp, Artificial
  Synthetic oligonucleotide
gatctgagatacttgctgagtcaaatgtcgtcgtcccatatgagttacgatacgcccatc

SEQ ID NO: 107710 - DNA, 60 bp, Artificial
  Synthetic oligonucleotide
cgaggtacgacgaccgaccaaagcaggcatgcgatatcaacagcaacgacgaccacgtgt

SEQ ID NO: 107711 - DNA, 60 bp, Artificial
  Synthetic oligonucleotide
tgggagagttttaggtgacgacattctactcaaagcttttggaccacccaccctaacacc

SEQ ID NO: 107712 - DNA, 58 bp, Artificial
  Synthetic oligonucleotide
tggaactctcgccactgtctataaatcttgataaggattatgacattgataccttacg

SEQ ID NO: 107713 - DNA, 55 bp, Artificial
  Synthetic oligonucleotide
acagatgtatatgttgaaggtagatggattaccattgatgtcgaaccagtctcac

SEQ ID NO: 107714 - DNA, 60 bp, Artificial
  Synthetic oligonucleotide
tgctggtaatacgaaggaaacacttgcaggtttacgaagtgaaattattgagcagcatga

SEQ ID NO: 107715 - DNA, 60 bp, Artificial
  Synthetic oligonucleotide
atggtataacacctcatctcaacatactatgcttggatctctcgtattattatcactcga

SEQ ID NO: 107716 - DNA, 55 bp, Artificial
  Synthetic oligonucleotide
gcgcagtattatatgtaactggaccagtatcacttgcactcgaacaatctggaat

SEQ ID NO: 107717 - DNA, 60 bp, Artificial
  Synthetic oligonucleotide
ccctacatgggatgcatggaccaacgattttatatgatggctacttcgctccggcagtac

SEQ ID NO: 107718 - DNA, 60 bp, Artificial
  Synthetic oligonucleotide
gccatgagacggtttaatacaacatttagagatcatactgaattccttaacgaggtacga

SEQ ID NO: 107719 - DNA, 60 bp, Artificial
  Synthetic oligonucleotide
cacaggaaggtagattgttagctagtatggctggtattcgcgttatagatgccatgagac

SEQ ID NO: 107720 - DNA, 60 bp, Artificial
  Synthetic oligonucleotide
ggctacttcgctccggcagtacttacaagtcaaactgttttccgatcaggatggtataac

SEQ ID NO: 107721 - DNA, 60 bp, Artificial
  Synthetic oligonucleotide
cgttatgctgattccctattaaatcctactcgagttcgaagttctcatcatggatctgag

SEQ ID NO: 107722 - DNA, 60 bp, Artificial
  Synthetic oligonucleotide
tcttggttatactagttcaggaaagaacattggagacatccgtgatatgcaagctgtcct

SEQ ID NO: 107723 - DNA, 60 bp, Artificial
  Synthetic oligonucleotide
cacattgacgcaactcagtgaatcattgaaggtcaagcctggaactagtaagcttctacg

SEQ ID NO: 107724 - DNA, 60 bp, Artificial
  Synthetic oligonucleotide
cgaagaggatcaataaccatgcttaaatctcgtgtcgtttcaacgggaacaatatttcga

SEQ ID NO: 107725 - DNA, 60 bp, Artificial
  Synthetic oligonucleotide
cgattttcccaacgggagtttgttattgagtctatcactgagcaacgatcaactgacata

SEQ ID NO: 107726 - DNA, 60 bp, Artificial
  Synthetic oligonucleotide
gcgaccttatatgtgtgttcccttcttcgttgacaggcttggtgttcaaattctccctgg

SEQ ID NO: 107727 - DNA, 60 bp, Artificial
  Synthetic oligonucleotide
ggcaacctatctgactctctctctggatggtgcttttatacatggctagatcgtgctcga

SEQ ID NO: 107728 - DNA, 60 bp, Artificial
  Synthetic oligonucleotide
tctttgaggcgattgaattaatgcacaccgttggacttggcaacctatctgactctctct

SEQ ID NO: 107729 - DNA, 60 bp, Artificial
  Synthetic oligonucleotide
gctcctgagcgtagtttgattgcgaaacattggcactcaattcggattattgggagagtt

SEQ ID NO: 107730 - DNA, 65 bp, Artificial
  Synthetic oligonucleotide
ctcagattcacagtacattcaagacaactgttataagcctatctatgatattactactactcttg

SEQ ID NO: 107731 - DNA, 60 bp, Artificial
  Synthetic oligonucleotide
ggtgacgcaaattctagagtgcttccaactagagtaactcgtgacggacagacaatacct

SEQ ID NO: 107732 - DNA, 60 bp, Artificial
  Synthetic oligonucleotide
ggttttggtggtgctcctcatatgtttcctgatagattagtactgtatacatccgaacga

SEQ ID NO: 107733 - DNA, 60 bp, Artificial
  Synthetic oligonucleotide
actttgttcccgactcaaccatcaccgaaattctcaatgactcaaacacaccacagattc

SEQ ID NO: 107734 - DNA, 60 bp, Artificial
  Synthetic oligonucleotide
caccagatgagttacgagaggtgactgcggaggtttgtgctgaatttgaacatcgcatgg

SEQ ID NO: 107735 - DNA, 60 bp, Artificial
  Synthetic oligonucleotide
gtcgcgtcgcaaaggtgtctgatggtatattatccgaactgcataaccataagaccgtct

SEQ ID NO: 107736 - DNA, 60 bp, Artificial
  Synthetic oligonucleotide
gttatgggccacaaaccatatccttggctgtcctccacctgcaatagtcagtatttctgg

SEQ ID NO: 107737 - DNA, 60 bp, Artificial
  Synthetic oligonucleotide
atccgaacgaggaaaccaggctatgacaaatccaaccacaatgtatcgtgtatgtgacgc

SEQ ID NO: 107738 - DNA, 60 bp, Artificial
  Synthetic oligonucleotide
cagcaacgacgaccacgtgttattcaaatgactggaactgaagctcaacttggtggatgg

SEQ ID NO: 107739 - DNA, 60 bp, Artificial
  Synthetic oligonucleotide
ctggtgctaatataccagctgcatcaccattaacatatccttccgcggctatcactactt

SEQ ID NO: 107740 - DNA, 60 bp, Artificial
  Synthetic oligonucleotide
gcgtcctttgcatataatccgcgtgggggtttctttttcagatttgatcaggacaatgca

SEQ ID NO: 107741 - DNA, 60 bp, Artificial
  Synthetic oligonucleotide
ggacaatgcagatagatttggtacctcactatcgccaagtccaacaattcgacgattaga

SEQ ID NO: 107742 - DNA, 60 bp, Artificial
  Synthetic oligonucleotide
ggatattatcggtatggatgcttcaactcagaacactcatgtaacactacttggttcagc

SEQ ID NO: 107743 - DNA, 60 bp, Artificial
  Synthetic oligonucleotide
cctgagagaattgggtttcctaagatgttctttcaatccactcacaatggtggtgacgca

SEQ ID NO: 107744 - DNA, 60 bp, Artificial
  Synthetic oligonucleotide
ccacagattcttcttcattatgcgaacatcgttaatggttctactcctgtgcactttacc

SEQ ID NO: 107745 - DNA, 60 bp, Artificial
  Synthetic oligonucleotide
ttgaacatcgcatggaattactcggttttctctgtgagcgtgcttttagtgatgttatgt

SEQ ID NO: 107746 - DNA, 60 bp, Artificial
  Synthetic oligonucleotide
catataagaaaggaccatcagccgttgcataccttaaggatgctataggatttagtgatt

SEQ ID NO: 107747 - DNA, 60 bp, Artificial
  Synthetic oligonucleotide
gcgcgctctatctccaatcatgtctatgttccattcgttgttatcctatcgttgtccatg

SEQ ID NO: 107748 - DNA, 60 bp, Artificial
  Synthetic oligonucleotide
ttaagctaccatgtctctaacgtcacgatatacgcactttgttcccgactcaaccatcac

SEQ ID NO: 107749 - DNA, 60 bp, Artificial
  Synthetic oligonucleotide
caacctgcctcgacctgaaatcaagatccctatcgaaatactctcgccaccgaaaccgaa

SEQ ID NO: 107750 - DNA, 60 bp, Artificial
  Synthetic oligonucleotide
tccaacaactcatccagtcacacttccatgcccatctttcgatgctcacggttatggtca

SEQ ID NO: 107751 - DNA, 60 bp, Artificial
  Synthetic oligonucleotide
gtcaatatatgatccccgattttatgaaattatttccgccacttgaaccgactctgagtc

SEQ ID NO: 107752 - DNA, 60 bp, Artificial
  Synthetic oligonucleotide
ccgcggctatcactactttttggttaactgctactagtcgtagaaaaatagatttcgatt

SEQ ID NO: 107753 - DNA, 60 bp, Artificial
  Synthetic oligonucleotide
attaccaaaggtttacttaagacgtttcatgactcaatcaaactgcgcgctctatctcca

SEQ ID NO: 107754 - DNA, 60 bp, Artificial
  Synthetic oligonucleotide
ctttgacgtctctcaactcatacgcgatgtcgcagcaatcaaaactgactcaccaagtgg

SEQ ID NO: 107755 - DNA, 58 bp, Artificial
  Synthetic oligonucleotide
gaatggggaaatggaaaaaatccatatgaaccaaaagaagtgactgcagcaatgtgag

SEQ ID NO: 107756 - DNA, 60 bp, Artificial
  Synthetic oligonucleotide
aggaaatcccaggtgtaaaccgaatatcactacattcgcaactcgaaaccaccaggaaaa

SEQ ID NO: 107757 - DNA, 60 bp, Artificial
  Synthetic oligonucleotide
agtaaatcccagttgtaaaccgaatatcactacattcgcaactcgaaaccatctggaaaa

SEQ ID NO: 107758 - DNA, 60 bp, Artificial
  Synthetic oligonucleotide
agtaaatcccaggtgtaaaccgaatatcactacattcgcaactcgaaaccaccaggaaaa

SEQ ID NO: 107759 - DNA, 60 bp, Artificial
  Synthetic oligonucleotide
ccaggtgtaaaccgaatatcactacattcgcaactcgaaaccaccaggaaaatactacgg

SEQ ID NO: 107760 - DNA, 60 bp, Artificial
  Synthetic oligonucleotide
agccaaatacatatggtatgggtaaaatcaggtcttgttttcttcacgcctagcgcgtct

SEQ ID NO: 107761 - DNA, 60 bp, Artificial
  Synthetic oligonucleotide
cagttgtaaaccgaatatcactacattcgcaactcgaaaccatctggaaaatacttacgg

SEQ ID NO: 107762 - DNA, 60 bp, Artificial
  Synthetic oligonucleotide
ctttcatcaatcaatgcgaggatacgttcaaaagtggcaccaatttaaacaaggagatgt

SEQ ID NO: 107763 - DNA, 51 bp, Artificial
  Synthetic oligonucleotide
acaaataatccgttaattacccgagatctctccttgggctaaatacacccc

SEQ ID NO: 107764 - DNA, 60 bp, Artificial
  Synthetic oligonucleotide
acaccgtattggtcgctgctcgataacgttggtcgaacgggtctcgggggagatgttcag

SEQ ID NO: 107765 - DNA, 60 bp, Artificial
  Synthetic oligonucleotide
atcttacggccgcacaccgtattggtcgctgctcgataacgttggtcgaacgggtctcgg

SEQ ID NO: 107766 - DNA, 60 bp, Artificial
  Synthetic oligonucleotide
ggagaactccgcaagacaagtcgcacaagatacccgagaactacacctgctccaacacat

SEQ ID NO: 107767 - DNA, 60 bp, Artificial
  Synthetic oligonucleotide
aaatggagaactccgcaagacaagtcgcacaagatacccgagaattacacctgctccaac

SEQ ID NO: 107768 - DNA, 60 bp, Artificial
  Synthetic oligonucleotide
aaatggagaactccgcaagacaagtcgcacaagatacccgagaactacacctgctccaac

SEQ ID NO: 107769 - DNA, 60 bp, Artificial
  Synthetic oligonucleotide
ccgaactatcgagctttgccccgaaagagaaaatacaaccaaaatggagaactccgcaag

SEQ ID NO: 107770 - DNA, 60 bp, Artificial
  Synthetic oligonucleotide
ccgcgaccacagcgtgcgcgtttggaaattgaccaatcctgtgtccatatcggaaaccct

SEQ ID NO: 107771 - DNA, 60 bp, Artificial
  Synthetic oligonucleotide
ctgctccaacacattaagagtgatcaatcctacatttacgtatttgtcttcttgtactat

SEQ ID NO: 107772 - DNA, 60 bp, Artificial
  Synthetic oligonucleotide
ctgctccaacacattaagagtgatcaatcctacatctacgtgttcgtcttcctgtactac

SEQ ID NO: 107773 - DNA, 60 bp, Artificial
  Synthetic oligonucleotide
ggagaactccgcaagacaagtcgcacaagatacccgagaattacacctgctccaacacat

SEQ ID NO: 107774 - DNA, 60 bp, Artificial
  Synthetic oligonucleotide
cgttgtaagtcggcgcgcgaacccgcaatctactaccgcgaaggaatcactggcaacgac

SEQ ID NO: 107775 - DNA, 60 bp, Artificial
  Synthetic oligonucleotide
gtgaatcgttgcaaatcggcacgcgaacccgcaatctactaccgcgaaggaatcactggc

SEQ ID NO: 107776 - DNA, 60 bp, Artificial
  Synthetic oligonucleotide
gaactcttaagagcttgtgatgagtatcttacggtcgcacaccgtattggtcgctgctcg

SEQ ID NO: 107777 - DNA, 60 bp, Artificial
  Synthetic oligonucleotide
aagagcttgtgatgagtatcttacggccgcacaccgtattggtcgctgctcgataacgtt

SEQ ID NO: 107778 - DNA, 60 bp, Artificial
  Synthetic oligonucleotide
caaatggtcgagcagttcattaagcaacagtccatcccatatgttaccgctgacaacgtg

SEQ ID NO: 107779 - DNA, 60 bp, Artificial
  Synthetic oligonucleotide
caaatggtcgagcagttcattaaacaacagtccatcccatatgttaccgctgacaacgtg

SEQ ID NO: 107780 - DNA, 60 bp, Artificial
  Synthetic oligonucleotide
aaatcggcacgcgaacccgcaatctactaccgcgaaggaatcactggcaacgacgctggc

SEQ ID NO: 107781 - DNA, 60 bp, Artificial
  Synthetic oligonucleotide
cgcgaacccgcaatctactaccgcgaaggaatcactggcaacgacgctggcgactcgatt

SEQ ID NO: 107782 - DNA, 60 bp, Artificial
  Synthetic oligonucleotide
ctgttaggctattgtctcatatagggctctcacgaactcttaagagcttgtgatgagtat

SEQ ID NO: 107783 - DNA, 60 bp, Artificial
  Synthetic oligonucleotide
tagggctctcacgaactcttaagagcttgtgatgagtatcttacggtcgcacaccgtatt

SEQ ID NO: 107784 - DNA, 60 bp, Artificial
  Synthetic oligonucleotide
taagcaacaatccatcccatatgttaccgctgacaacgtaatgattgcgccatgcgtacg

SEQ ID NO: 107785 - DNA, 51 bp, Artificial
  Synthetic oligonucleotide
ctgttaggctattgtctcatatagggctctcacgaactcttaagagcttgt

SEQ ID NO: 107786 - DNA, 60 bp, Artificial
  Synthetic oligonucleotide
agaattttcccgaactatcgagctttgccccgaaagagaaaatacaaccaaaatggagaa

SEQ ID NO: 107787 - DNA, 60 bp, Artificial
  Synthetic oligonucleotide
gtatcttacggccgcacaccgtattggtcgctgctcgataacgttggtcgaacgggtctc

SEQ ID NO: 107788 - DNA, 60 bp, Artificial
  Synthetic oligonucleotide
tgatgagtatcttacggccgcacaccgtattggtcgctgctcgataacgttggtcgaacg

SEQ ID NO: 107789 - DNA, 57 bp, Artificial
  Synthetic oligonucleotide
gtttctacatttgatcgatcacctctaaagggtccagggtaccttcttgacgtaggg

SEQ ID NO: 107790 - DNA, 60 bp, Artificial
  Synthetic oligonucleotide
gtttctacatttgatcgatcacctctaaagggtccagggtaccttcttgacgtagggcga

SEQ ID NO: 107791 - DNA, 55 bp, Artificial
  Synthetic oligonucleotide
taagtgtgggtcaagagggccagttacaggtgtattccaccggtatagtaagaca

SEQ ID NO: 107792 - DNA, 60 bp, Artificial
  Synthetic oligonucleotide
ttattcacgcagacatatatgcggagttgtagctgtaagtgtgggtcaagagggccagtt

SEQ ID NO: 107793 - DNA, 60 bp, Artificial
  Synthetic oligonucleotide
acggaattttcatcagttccgctagatggtttcgaattaccattaacctaaggtcagtag

SEQ ID NO: 107794 - DNA, 56 bp, Artificial
  Synthetic oligonucleotide
tcgaaagtgtatgtgtttgaaaccagtgatagtggcagcaacaataattggaacac

SEQ ID NO: 107795 - DNA, 56 bp, Artificial
  Synthetic oligonucleotide
atattcaagttatagttaatagaaatagagaaggatcatgtggtatatgtatggga

SEQ ID NO: 107796 - DNA, 51 bp, Artificial
  Synthetic oligonucleotide
ctgtggagcccttcaccctgtgattagtaatattgaatttgagcataatca

SEQ ID NO: 107797 - DNA, 55 bp, Artificial
  Synthetic oligonucleotide
caattaaaaactagaccacaagtggcatcagagcttaatctgttcattccatgtg

SEQ ID NO: 107798 - DNA, 60 bp, Artificial
  Synthetic oligonucleotide
tctgtggagcccttcaccctgtgattagtaatattgaatttgagcataatcaattaaaaa

SEQ ID NO: 107799 - DNA, 60 bp, Artificial
  Synthetic oligonucleotide
tccacatcaagtctgactttaattccactgaatatgacgaacctccaattagcggattta

SEQ ID NO: 107800 - DNA, 52 bp, Artificial
  Synthetic oligonucleotide
agcttgtggaaattggactaacgaaacatggggagaggaatttagcttagac

SEQ ID NO: 107801 - DNA, 60 bp, Artificial
  Synthetic oligonucleotide
gatgagtaccggacataaaccatacgtcagtaagaaacaatttgaagaaaatagaagaaa

SEQ ID NO: 107802 - DNA, 60 bp, Artificial
  Synthetic oligonucleotide
ttgttgcagcaaggatgactagtgcattcaatgtatgattagcgacctatcatatacccc

SEQ ID NO: 107803 - DNA, 60 bp, Artificial
  Synthetic oligonucleotide
atacaattttccacatcaagtctgactttaattccactgaatatgacgaacctccaatta

SEQ ID NO: 107804 - DNA, 60 bp, Artificial
  Synthetic oligonucleotide
gactacatgtcaattaaagaactgtggatggcgaaatttccattgcataaacccggtgat

SEQ ID NO: 107805 - DNA, 60 bp, Artificial
  Synthetic oligonucleotide
cacatgttactataaagatatgaaaacacaatcaactggaccgtcaaagaaaaacgctaa

SEQ ID NO: 107806 - DNA, 60 bp, Artificial
  Synthetic oligonucleotide
aaaacgctaaacatcaagctgcagaacaaatgttcagacatcaatgtttctaatttcctt

SEQ ID NO: 107807 - DNA, 60 bp, Artificial
  Synthetic oligonucleotide
atcaagctgcagaacaaatgttcagacatcaatgtttctaatttccttgttgcagcaagg

SEQ ID NO: 107808 - DNA, 60 bp, Artificial
  Synthetic oligonucleotide
taatttccttgttgcagcaaggatgactagtgcattcaatgtatgattagcgacctatca

SEQ ID NO: 107809 - DNA, 60 bp, Artificial
  Synthetic oligonucleotide
cttgttgcagcaaggatgactagtgcattcaatgtatgattagcgacctatcatataccc

SEQ ID NO: 107810 - DNA, 60 bp, Artificial
  Synthetic oligonucleotide
gcattgaatctaaccctggaccaaactatatacagctcctcaatgagcattctcaaagat

SEQ ID NO: 107811 - DNA, 60 bp, Artificial
  Synthetic oligonucleotide
gtaccggacataaaccatacgtcagtaagaaacaatttgaagaaaatagaagaaagtggg

SEQ ID NO: 107812 - DNA, 60 bp, Artificial
  Synthetic oligonucleotide
ctggaccaaactatatacagctcctcaatgagcattctcaaagatatggatttgtacagc

SEQ ID NO: 107813 - DNA, 60 bp, Artificial
  Synthetic oligonucleotide
tctcaaagatatggatttgtacagcctacatatgagataatagctgtggttagtgacgga

SEQ ID NO: 107814 - DNA, 60 bp, Artificial
  Synthetic oligonucleotide
attggaaggggtggtgaagagatcattgcgagtcatttgtgtaataagctatcagcgggg

SEQ ID NO: 107815 - DNA, 60 bp, Artificial
  Synthetic oligonucleotide
gggtggtgaagagatcattgcgagtcatttgtgtaataagctatcagcggcggactaccg

SEQ ID NO: 107816 - DNA, 60 bp, Artificial
  Synthetic oligonucleotide
gactagttcagtgctgtgcgatcttcagttcattattgatgccgagtgacgacggctagg

SEQ ID NO: 107817 - DNA, 60 bp, Artificial
  Synthetic oligonucleotide
ctagttcagtgctgtgcgatcttcagttcattattgatgccgagtgacgacggctagggg

SEQ ID NO: 107818 - DNA, 60 bp, Artificial
  Synthetic oligonucleotide
caaacgtgaggttgagagacaaattaacacatgcccctacactggatacaaaggcagagt

SEQ ID NO: 107819 - DNA, 60 bp, Artificial
  Synthetic oligonucleotide
tctgttccaactgatgagttgtaaataatccgtgatgcagtgttgccctaatcccttaag

SEQ ID NO: 107820 - DNA, 60 bp, Artificial
  Synthetic oligonucleotide
gcttgcttcaaccagcgtgtccgtcaggactgaagaagcgaaggttgctgatgaggagct

SEQ ID NO: 107821 - DNA, 60 bp, Artificial
  Synthetic oligonucleotide
ccaaatgattcagaatctattgaacagatagcagaatggattttaaatgtttggagatgt

SEQ ID NO: 107822 - DNA, 60 bp, Artificial
  Synthetic oligonucleotide
aatctattgaacagatagcagaatggattttaaatgtttggaaatgtgatgacatgaatt

SEQ ID NO: 107823 - DNA, 60 bp, Artificial
  Synthetic oligonucleotide
ttggagatgtgatgacatgaatttggaaatttatacttatgaacaaattggaataaacaa

SEQ ID NO: 107824 - DNA, 60 bp, Artificial
  Synthetic oligonucleotide
caatttatgggctgcatttggtagtgactgcgatatatctgtctgtccattagatactac

SEQ ID NO: 107825 - DNA, 56 bp, Artificial
  Synthetic oligonucleotide
atgggctgcatttggtagtgactgtgatatatctgtctgtccattagatactacaa

SEQ ID NO: 107826 - DNA, 60 bp, Artificial
  Synthetic oligonucleotide
tcgccagctagtacagaaacttatgaagttgtatcaaatgacacccaattggcattaatt

SEQ ID NO: 107827 - DNA, 60 bp, Artificial
  Synthetic oligonucleotide
tacaattgtacaagcaatgactcccagacatcgtgcgatttatccagaagggtggatgtt

SEQ ID NO: 107828 - DNA, 60 bp, Artificial
  Synthetic oligonucleotide
cgccagctagtacagaaacttatgaagttgtatcaaatgacacccaattggcattaatta

SEQ ID NO: 107829 - DNA, 60 bp, Artificial
  Synthetic oligonucleotide
tcaccagctagtacagaaacttatgaagttgtatcaaatgacacccaattggcattaatt

SEQ ID NO: 107830 - DNA, 60 bp, Artificial
  Synthetic oligonucleotide
ggcattaattaatgttgtggataatgttagacatagaatacagatgaacactgctcaatg

SEQ ID NO: 107831 - DNA, 60 bp, Artificial
  Synthetic oligonucleotide
ctgctcaatgtaaattaaaaaattgtattaagggtgaagctcgactgaatactgcactaa

SEQ ID NO: 107832 - DNA, 60 bp, Artificial
  Synthetic oligonucleotide
ctgctcaatgtaaattaaaaaattgtattaagggtgaggctcgactgaatactgcactaa

SEQ ID NO: 107833 - DNA, 60 bp, Artificial
  Synthetic oligonucleotide
tacaattgtacaagcaatgactcccagacatcgggcaatttatccagaagggtggatgtt

SEQ ID NO: 107834 - DNA, 60 bp, Artificial
  Synthetic oligonucleotide
gaataaacaatttatgggctgcatttggtagtgactgcgatatatctgtctgtccattag

SEQ ID NO: 107835 - DNA, 60 bp, Artificial
  Synthetic oligonucleotide
gacatgaatttggaaatttatacttatgaacaaattggaataaacaatttatgggctgca

SEQ ID NO: 107836 - DNA, 60 bp, Artificial
  Synthetic oligonucleotide
caccagctagtacagaaacttatgaagttgtatcaaatgacacccaattggcattaatta

SEQ ID NO: 107837 - DNA, 57 bp, Artificial
  Synthetic oligonucleotide
tgttgcatcctacccttgagcttggctaggctcttgggctcgtcaaagtgtaccgac

SEQ ID NO: 107838 - DNA, 60 bp, Artificial
  Synthetic oligonucleotide
catgtaatagagatctacataccggcttatgttgcatcctacccttgagcttggctaggc

SEQ ID NO: 107839 - DNA, 50 bp, Artificial
  Synthetic oligonucleotide
tcctacccttgagcttggctaggctcttgggcccgtcaaagtgtaccgac

SEQ ID NO: 107840 - DNA, 60 bp, Artificial
  Synthetic oligonucleotide
tcttcgccatgtgcagagatctacataccggcttatgttgcatcctacccttgagcttgg

SEQ ID NO: 107841 - DNA, 60 bp, Artificial
  Synthetic oligonucleotide
taaagtttcttcgccatgtaatagagatctacataccggcttatgttgcatcctaccctt

SEQ ID NO: 107842 - DNA, 60 bp, Artificial
  Synthetic oligonucleotide
atcgagagacggtttggctccaatgtttcaaaagtttttcccaaccgtatgaagaggaca

SEQ ID NO: 107843 - DNA, 60 bp, Artificial
  Synthetic oligonucleotide
cgggagacggtttggctccaatgtttcaaaagtttctctcaaccgtacgaggaggatgtt

SEQ ID NO: 107844 - DNA, 60 bp, Artificial
  Synthetic oligonucleotide
ctagggttggcgggataactagtccggattataagaagatcggaggaaaagtaattgtcg

SEQ ID NO: 107845 - DNA, 60 bp, Artificial
  Synthetic oligonucleotide
taaatgttcagctttggctctgcgtagttcacagactacgtacattataaactttccacg

SEQ ID NO: 107846 - DNA, 60 bp, Artificial
  Synthetic oligonucleotide
tttaagactatcactattcccgtccacaacggggacatagtgtgcatggttgagcgtact

SEQ ID NO: 107847 - DNA, 60 bp, Artificial
  Synthetic oligonucleotide
ccttcggctttaagctcgaattcggaaactccaggatcaatgagttcaccatctgaaggg

SEQ ID NO: 107848 - DNA, 60 bp, Artificial
  Synthetic oligonucleotide
gaaccaatctcgaagctttgttacggggagaggacgcgacttgtctcggactccttcggc

SEQ ID NO: 107849 - DNA, 60 bp, Artificial
  Synthetic oligonucleotide
ctcggactccttcggctttaagctcgaattcggaaactccaggatcaatgagttcaccat

SEQ ID NO: 107850 - DNA, 60 bp, Artificial
  Synthetic oligonucleotide
gctgactgagtgtgccgctaacgctaagtcagcgaatgatctgaggcagtacatcgtcac

SEQ ID NO: 107851 - DNA, 60 bp, Artificial
  Synthetic oligonucleotide
tgactgatgtgaagccgacgaccgttgtgctgactgagtgtgccgctaacgctaagtcag

SEQ ID NO: 107852 - DNA, 60 bp, Artificial
  Synthetic oligonucleotide
ctacttctgctcgctgacgtctctctatggtgaattccatggtttcagcgtcggatttag

SEQ ID NO: 107853 - DNA, 56 bp, Artificial
  Synthetic oligonucleotide
acttatgctccaggttttctatccgatggtgtgtgcaaggaacatcctaacttgtt

SEQ ID NO: 107854 - DNA, 60 bp, Artificial
  Synthetic oligonucleotide
cgtctctctatggtgaattccatggtttcagcgtcggatttagcggagagataacgcatg

SEQ ID NO: 107855 - DNA, 60 bp, Artificial
  Synthetic oligonucleotide
ctgctcgctgacgtctctctatggtgaattccatggtttcagcgtcggatttagcggaga

SEQ ID NO: 107856 - DNA, 60 bp, Artificial
  Synthetic oligonucleotide
tcggatttagcggagaaataactcatgtgaacgttgcgagcgtgattgctaagaattggg

SEQ ID NO: 107857 - DNA, 60 bp, Artificial
  Synthetic oligonucleotide
aattccatggtttcagcgtcggatttagcggagagataacgcatgtgaacgttgcgagcg

SEQ ID NO: 107858 - DNA, 60 bp, Artificial
  Synthetic oligonucleotide
ataacgcatgtgaacgttgcgagcgtgattgctaagaattgggacacgcagtcaggcatc

SEQ ID NO: 107859 - DNA, 60 bp, Artificial
  Synthetic oligonucleotide
cggagaaataactcatgtgaacgttgcgagcgtgattgctaagaattgggacacgcagtc

SEQ ID NO: 107860 - DNA, 60 bp, Artificial
  Synthetic oligonucleotide
taaatgttcagctttggctctgcgtagttcacagactacgtacattatcaactttccacg

SEQ ID NO: 107861 - DNA, 60 bp, Artificial
  Synthetic oligonucleotide
gctttggctctgcgtagttcacagactacgtacattatcaactttccacgccagcactgg

SEQ ID NO: 107862 - DNA, 60 bp, Artificial
  Synthetic oligonucleotide
caggatgaaccaatctcgaagctttgttacggggagaggacgcgacttgtctcggactcc

SEQ ID NO: 107863 - DNA, 60 bp, Artificial
  Synthetic oligonucleotide
gctttggctctgcgtagttcacagactacgtacattataaactttccacgccagcactgg

SEQ ID NO: 107864 - DNA, 60 bp, Artificial
  Synthetic oligonucleotide
tagagtcggggcccttctattatagagtatagagaacctcaataatagaattgtatgatg

SEQ ID NO: 107865 - DNA, 60 bp, Artificial
  Synthetic oligonucleotide
ttattttaatgaatattcaaaggttttagaattttccatgcacccaaagctatactgtga

SEQ ID NO: 107866 - DNA, 60 bp, Artificial
  Synthetic oligonucleotide
ctacttttggaacagttgctgatagcgggaaattgggaataattgatgttgttgacagcg

SEQ ID NO: 107867 - DNA, 60 bp, Artificial
  Synthetic oligonucleotide
cagctacttttggaacagttgctgatagcgggaaattgggaataattgatgttgttgaca

SEQ ID NO: 107868 - DNA, 60 bp, Artificial
  Synthetic oligonucleotide
cgggattgtaataaactaggaccgagagaaaatgtggccataatacaggttggtggttct

SEQ ID NO: 107869 - DNA, 60 bp, Artificial
  Synthetic oligonucleotide
gaaacgggattgtaataaactaggaccgagagaaaatgtggccataatacaggttggtgg

SEQ ID NO: 107870 - DNA, 60 bp, Artificial
  Synthetic oligonucleotide
atatattagatattgcggctgatcccacaacttctccaccaacagaacgaatgatgcgcg

SEQ ID NO: 107871 - DNA, 60 bp, Artificial
  Synthetic oligonucleotide
aggttggtggttctaatatattagatattgcggctgatcccacaacttctccaccaacag

SEQ ID NO: 107872 - DNA, 60 bp, Artificial
  Synthetic oligonucleotide
ttactcgctttgtcattatacgccatcactcttccttcgtgtgttatgcttgctcctcag

SEQ ID NO: 107873 - DNA, 60 bp, Artificial
  Synthetic oligonucleotide
ccttcgctcaaaatgttactcgctttgtcattatacgccatcactcttccttcgtgtgtt

SEQ ID NO: 107874 - DNA, 60 bp, Artificial
  Synthetic oligonucleotide
tgctcctcagttaatgcgaatacttcatgtatatgctttggaagtcgaagtaggtggacg

SEQ ID NO: 107875 - DNA, 60 bp, Artificial
  Synthetic oligonucleotide
ttcgtgtgttatgcttgctcctcagttaatgcgaatacttcatgtatatgctttggaagt

SEQ ID NO: 107876 - DNA, 60 bp, Artificial
  Synthetic oligonucleotide
gtcgaagtaggtggacggtatcctataacgctaactgtcaacggacgtgtccacacatgc

SEQ ID NO: 107877 - DNA, 60 bp, Artificial
  Synthetic oligonucleotide
ctttggaagtcgaagtaggtggacggtatcctataacgctaactgtcaacggacgtgtcc

SEQ ID NO: 107878 - DNA, 60 bp, Artificial
  Synthetic oligonucleotide
cgaatgcgtgttaggacctgatcgattaattaatccgcctaattcgcgatcgcatgcaaa

SEQ ID NO: 107879 - DNA, 60 bp, Artificial
  Synthetic oligonucleotide
ggacgtgtccacacatgcttgaactacggtacatcggctgaacggtttcgcgaatgcgtg

SEQ ID NO: 107880 - DNA, 60 bp, Artificial
  Synthetic oligonucleotide
cgcatgcaaacatcatcgaatttgtaatcttggatgataagccggacggttcatcgtggc

SEQ ID NO: 107881 - DNA, 60 bp, Artificial
  Synthetic oligonucleotide
gcgtgttaggacctgatcgattaattaatccgcctaattcgcgatcgcatgcaaacatca

SEQ ID NO: 107882 - DNA, 60 bp, Artificial
  Synthetic oligonucleotide
actggactgacgaaacctctcttgcctcatgacctgctgacctcgctcctagacccctcc

SEQ ID NO: 107883 - DNA, 60 bp, Artificial
  Synthetic oligonucleotide
gctgacctcgctcctagacccctcccttgaaaatattcattcttttaccaccttcgctca

SEQ ID NO: 107884 - DNA, 60 bp, Artificial
  Synthetic oligonucleotide
ctttaccatcggcacaatgaaacaatcattttacgatcctgtacgcatgttaccgacccc

SEQ ID NO: 107885 - DNA, 60 bp, Artificial
  Synthetic oligonucleotide
gggtcgggcgcatgttacgtgttcgctttactcggtcgtgtctttaccatcggcacaatg

SEQ ID NO: 107886 - DNA, 60 bp, Artificial
  Synthetic oligonucleotide
cgtatattgtctcgcgagtcagctaggatcgccgatgctagaaaccttgtcgcaacagcc

SEQ ID NO: 107887 - DNA, 60 bp, Artificial
  Synthetic oligonucleotide
catgaatcataccggaatcgtcgaacgcttccagcatcgtatattgtctcgcgagtcagc

SEQ ID NO: 107888 - DNA, 60 bp, Artificial
  Synthetic oligonucleotide
tgtttcatgtgtgcatgaatcataccggaatcgtcgaacgcttccagcatcgtatattgt

SEQ ID NO: 107889 - DNA, 50 bp, Artificial
  Synthetic oligonucleotide
ttcgttacagcaacgggtaacggtctgtatcatactaatccagggtatga

SEQ ID NO: 107890 - DNA, 60 bp, Artificial
  Synthetic oligonucleotide
atctcaaacgggtcgggcgcatgttacgtgttcgctttactcggtcgtgtctttaccatc

SEQ ID NO: 107891 - DNA, 60 bp, Artificial
  Synthetic oligonucleotide
gccgcgaatcctcagttgggtaccggtttcgattgacatctcaaacgggtcgggcgcatg

SEQ ID NO: 107892 - DNA, 60 bp, Artificial
  Synthetic oligonucleotide
cgcaacagccatcgccgcgaatcctcagttgggtaccggtttcgattgacatctcaaacg

SEQ ID NO: 107893 - DNA, 52 bp, Artificial
  Synthetic oligonucleotide
taggatcgccgatgctagaaaccttgtcgcaacagccatcgccgcgaatcct

SEQ ID NO: 107894 - DNA, 60 bp, Artificial
  Synthetic oligonucleotide
gctatatcggattcagttcgggaatattttatatgtacgtcaatcgaacgtggcataaag

SEQ ID NO: 107895 - DNA, 60 bp, Artificial
  Synthetic oligonucleotide
cagttcgggaatattttatatgtacgtcaatcgaacgtggcataaagatctgggcatgct

SEQ ID NO: 107896 - DNA, 60 bp, Artificial
  Synthetic oligonucleotide
acacgtacattatatcgggccagtttcatctcacggtctattaagtcataccggtttacc

SEQ ID NO: 107897 - DNA, 60 bp, Artificial
  Synthetic oligonucleotide
acattatatcgggccagtttcatctcacggtctattaagtcataccggtttaccggtcca

SEQ ID NO: 107898 - DNA, 60 bp, Artificial
  Synthetic oligonucleotide
tagggcggacgttgacaccccatttccctgtgacggacacgtttcgacaattgtattttc

SEQ ID NO: 107899 - DNA, 60 bp, Artificial
  Synthetic oligonucleotide
ggcggacgttgacaccccatttccctgtgacggacacgtttcgacaattgtattttctac

SEQ ID NO: 107900 - DNA, 60 bp, Artificial
  Synthetic oligonucleotide
tcatcgtggcatacaaaagaccaactcgtttcgacgattcaggactggtttagggcggac

SEQ ID NO: 107901 - DNA, 60 bp, Artificial
  Synthetic oligonucleotide
caaaagaccaactcgtttcgacgattcaggactggtttagggcggacgttgacaccccat

SEQ ID NO: 107902 - DNA, 60 bp, Artificial
  Synthetic oligonucleotide
acaattttaaagggaactggactgacgaaacctctcttgcctcatgacctgctgacctcg

SEQ ID NO: 107903 - DNA, 60 bp, Artificial
  Synthetic oligonucleotide
agcgatgggctaacggcactagcgcgcgcaaacaaggttccgaagtatgatgaatatttc

SEQ ID NO: 107904 - DNA, 60 bp, Artificial
  Synthetic oligonucleotide
gcgatgggctaacggcactagcgcgcgcaaacaaggttccgaagtatgatgaatatttct

SEQ ID NO: 107905 - DNA, 60 bp, Artificial
  Synthetic oligonucleotide
ggcacaatgaaacaatcattttacgatcctgtacgcatgttaccgaccccttcgtcaacg

SEQ ID NO: 107906 - DNA, 60 bp, Artificial
  Synthetic oligonucleotide
taccgaccccttcgtcaacgtgagccgacagttgcaggttggtaactagcagagaagtcg

SEQ ID NO: 107907 - DNA, 60 bp, Artificial
  Synthetic oligonucleotide
caacgtgagccgacagttgcaggttggtaactagcagagaagtcgcaagcgatggggagc

SEQ ID NO: 107908 - DNA, 57 bp, Artificial
  Synthetic oligonucleotide
agagaagtcgcaagcgatggggagcgtcagcggcatgtaccacccctctcgtgcaga

SEQ ID NO: 107909 - DNA, 58 bp, Artificial
  Synthetic oligonucleotide
agagaagtcgcaagcgatggggagcgtcagcggcatgtaccacccctctcgtgcagac

SEQ ID NO: 107910 - DNA, 60 bp, Artificial
  Synthetic oligonucleotide
gcctggtttacagaacgtacattaaaggcgatacaatgactatgactcagggcagtttag

SEQ ID NO: 107911 - DNA, 60 bp, Artificial
  Synthetic oligonucleotide
tatgtgcagcgcttagcagcgatcggcgcgttatatcccaatgaattcaccgagaatgta

SEQ ID NO: 107912 - DNA, 60 bp, Artificial
  Synthetic oligonucleotide
ggtcgagccaatgagcatagctgcggaggatatgtatggatacgtgcttgatacgccgac

SEQ ID NO: 107913 - DNA, 60 bp, Artificial
  Synthetic oligonucleotide
cgctcggaagacaacacgctacgttacaactggatgttaggtgtgtacgcgcgctccact

SEQ ID NO: 107914 - DNA, 60 bp, Artificial
  Synthetic oligonucleotide
ctgcggtggcagatgatgagacgcatataattcccagcatccatacagttattaaggggc

SEQ ID NO: 107915 - DNA, 60 bp, Artificial
  Synthetic oligonucleotide
cataatcgggatgggagacagagcagtcgagcctaacattagggtccgtgtgccattccc

SEQ ID NO: 107916 - DNA, 60 bp, Artificial
  Synthetic oligonucleotide
tctttgacgacagttcgacaccctataatgttcgtatttggcatgcccctactatgacgg

SEQ ID NO: 107917 - DNA, 60 bp, Artificial
  Synthetic oligonucleotide
acagtacctcaactcggcacagactatttgtatactttcaactcacaacgacgatcacac

SEQ ID NO: 107918 - DNA, 60 bp, Artificial
  Synthetic oligonucleotide
tggaagattggcgacagaaagagagacttgataagggcgcattagtcgaggctgatagag

SEQ ID NO: 107919 - DNA, 60 bp, Artificial
  Synthetic oligonucleotide
tgacacaaagacatcaggagctactgctagcacaaataactgccgatccgaatatacttt

SEQ ID NO: 107920 - DNA, 60 bp, Artificial
  Synthetic oligonucleotide
cccgccagaacgcaaatggataagatacgtaatgttgccacagctatgctaaccaggact

SEQ ID NO: 107921 - DNA, 58 bp, Artificial
  Synthetic oligonucleotide
taaaatcctattgctcagaagcgacaacctggcgcgttgacagtgacgataacttggt

SEQ ID NO: 107922 - DNA, 60 bp, Artificial
  Synthetic oligonucleotide
ttcgatgagactatatcggtagtgaccacatgcgctagcgccgcggcacgtgtacttgta

SEQ ID NO: 107923 - DNA, 60 bp, Artificial
  Synthetic oligonucleotide
tacagggcaaggccgtataaagcattcgctagctgttactggaacaacggagcatgatac

SEQ ID NO: 107924 - DNA, 60 bp, Artificial
  Synthetic oligonucleotide
catcgacgcctgaactcataaatgcctgttcaaactatggcattcgcctaggttcgacag

SEQ ID NO: 107925 - DNA, 60 bp, Artificial
  Synthetic oligonucleotide
ccaacgctatgtgccaaatggactcggcttcaaagggcggaagacgcgagagtttaggta

SEQ ID NO: 107926 - DNA, 60 bp, Artificial
  Synthetic oligonucleotide
ggtcgactgaaagtggcaaactatgtacccgtggatacgctcgttgaagcagacgtgacg

SEQ ID NO: 107927 - DNA, 60 bp, Artificial
  Synthetic oligonucleotide
ttggcggccgtaacctcgctgatatatctgtcgtccctcttaatatgaaatacgtggtga

SEQ ID NO: 107928 - DNA, 60 bp, Artificial
  Synthetic oligonucleotide
cggctatcacaattgggaggtgtgttttatcacaatgcactactgaagacagcttcgcag

SEQ ID NO: 107929 - DNA, 60 bp, Artificial
  Synthetic oligonucleotide
gggtatacacgctaagctgctcgccctggtgacacggggttaagggatgcaggcacatca

SEQ ID NO: 107930 - DNA, 60 bp, Artificial
  Synthetic oligonucleotide
atggcagtgaaccgtctgctcggcgagtgaagcgcgactcatacgcaggagtggttaagc

SEQ ID NO: 107931 - DNA, 60 bp, Artificial
  Synthetic oligonucleotide
caggccctaaataatttccagaagcaggtgcctgtgattacacctactagacaaacaatg

SEQ ID NO: 107932 - DNA, 60 bp, Artificial
  Synthetic oligonucleotide
ggtatcgacgcactttccagcgcctaagcccgactgtccgaccaacggagatggcagtga

SEQ ID NO: 107933 - DNA, 60 bp, Artificial
  Synthetic oligonucleotide
gcattagtgccctataatgatgagccattggtagtggtgacggagcacgctatcgcaaac

SEQ ID NO: 107934 - DNA, 60 bp, Artificial
  Synthetic oligonucleotide
ggtgacggagcacgctatcgcaaacttcaccaaagccgagatggcacttgagttcaatcg

SEQ ID NO: 107935 - DNA, 60 bp, Artificial
  Synthetic oligonucleotide
cccagagacagcaataatcaatacggataattcatcaggcgcggtgccaagtgaatcagc

SEQ ID NO: 107936 - DNA, 60 bp, Artificial
  Synthetic oligonucleotide
gtacggatattcaatcccaaaggaattctctcaaaaatcgcatctagagctatgcaggct

SEQ ID NO: 107937 - DNA, 58 bp, Artificial
  Synthetic oligonucleotide
aaaattgatgatgacgccgggccagacgaatactctcccaactctgtaccgatccaag

SEQ ID NO: 107938 - DNA, 60 bp, Artificial
  Synthetic oligonucleotide
actagtttgcgtactaaaagtttatcggcgggggtgaagacggcggtgagtaagctgagc

SEQ ID NO: 107939 - DNA, 60 bp, Artificial
  Synthetic oligonucleotide
tgactccatacaggcggccttgaaagccttagagaaatgggaaattgatttgagagtggc

SEQ ID NO: 107940 - DNA, 60 bp, Artificial
  Synthetic oligonucleotide
cggtgctgtcagataagaataattggattgcattggcacaaggagttaagactagtttgc

SEQ ID NO: 107941 - DNA, 60 bp, Artificial
  Synthetic oligonucleotide
atcttgtaactgcagctgaacctgagataatcgcatctctcgtaccagttccagcgcccg

SEQ ID NO: 107942 - DNA, 60 bp, Artificial
  Synthetic oligonucleotide
cgtaccagttccagcgcccgtgtttgccattccacctaagccagccgactataatgtgcg

SEQ ID NO: 107943 - DNA, 60 bp, Artificial
  Synthetic oligonucleotide
tgggtacgccttttcaaatccaagtgactgacaacacaggaactaactggcaccttaact

SEQ ID NO: 107944 - DNA, 60 bp, Artificial
  Synthetic oligonucleotide
caccttaacttgagaggagggacacgcgtagtgaacttggatcagattgctccgatgaga

SEQ ID NO: 107945 - DNA, 60 bp, Artificial
  Synthetic oligonucleotide
tccgatgagattcgttctggatctggggggaaaaagctataaggagacaagttgggatcc

SEQ ID NO: 107946 - DNA, 60 bp, Artificial
  Synthetic oligonucleotide
gaccgccgcctcacagattggccaagctacagtggttaactatgttcagctatatgctga

SEQ ID NO: 107947 - DNA, 60 bp, Artificial
  Synthetic oligonucleotide
attccgaccttctgacgtatgttgattgttacgttggtgtgtcggcccgtcaggccctaa

SEQ ID NO: 107948 - DNA, 60 bp, Artificial
  Synthetic oligonucleotide
tgagagtggctcagacactgttgcctacaaatgtcccaattggggaggtctcttgtccaa

SEQ ID NO: 107949 - DNA, 60 bp, Artificial
  Synthetic oligonucleotide
tattcaaaccctcagctgagacttcatccaccgctgtaccgtcactgagtctatcacctg

SEQ ID NO: 107950 - DNA, 60 bp, Artificial
  Synthetic oligonucleotide
ccgttacttcaccgggtgcattgcggcgaatgacttcgaaggatatcccagagacagcaa

SEQ ID NO: 107951 - DNA, 60 bp, Artificial
  Synthetic oligonucleotide
gacacagcctgatgtttgggatgctctgttgacgatgtctccactgtccgctggagaggt

SEQ ID NO: 107952 - DNA, 60 bp, Artificial
  Synthetic oligonucleotide
gggaggtctcttgtccaatgcagtcagtagtgaaactattagacgatcagctgccggacg

SEQ ID NO: 107953 - DNA, 60 bp, Artificial
  Synthetic oligonucleotide
ctggagaggtgactgtgaagggtgcggtagtaagcgaggtggtcccagcggagttgatag

SEQ ID NO: 107954 - DNA, 60 bp, Artificial
  Synthetic oligonucleotide
tgtctccactgtccgctggagaggtgactgtgaagggtgcggtagtaagcgaggtggtcc

SEQ ID NO: 107955 - DNA, 60 bp, Artificial
  Synthetic oligonucleotide
catcgttggcttataattatgaacctgagcaattgaataagactgaccctgagatgaact

SEQ ID NO: 107956 - DNA, 60 bp, Artificial
  Synthetic oligonucleotide
aaaggaatggagggatacagtggatggacgtatcagaaggaactgtgatgaatgaggccg

SEQ ID NO: 107957 - DNA, 60 bp, Artificial
  Synthetic oligonucleotide
taccttttagcgactttcatagactcagctgctataacaccgacaaacatgacacagcct

SEQ ID NO: 107958 - DNA, 60 bp, Artificial
  Synthetic oligonucleotide
cagctgccggacgatagccttatacggaggtatcctaaggaggccgctgttgctttggct

SEQ ID NO: 107959 - DNA, 60 bp, Artificial
  Synthetic oligonucleotide
ctgtgatgaatgaggccgtgaatgctgtcgcagcaagtgccctggcaccttccgcatcag

SEQ ID NO: 107960 - DNA, 60 bp, Artificial
  Synthetic oligonucleotide
gtggtcccagcggagttgatagggagctatactccagagtcactaaatgcctcacttccg

SEQ ID NO: 107961 - DNA, 60 bp, Artificial
  Synthetic oligonucleotide
gtcgcgttggatatattggacaaagcgatgtcaaatcaaacgggcgcaactatggcacaa

SEQ ID NO: 107962 - DNA, 60 bp, Artificial
  Synthetic oligonucleotide
agtcgcgttggatatattggacaaagcgatgtcaaatcaaacgggcgcaactatggcaca

SEQ ID NO: 107963 - DNA, 60 bp, Artificial
  Synthetic oligonucleotide
gactgacgcgaacaacctccctgtccaaacggattcacgtttgtcgttctcacttggtgg

SEQ ID NO: 107964 - DNA, 60 bp, Artificial
  Synthetic oligonucleotide
tacatttactgttccgactgacgcgaacaacctccctgtccaaacggattcacgtttgtc

SEQ ID NO: 107965 - DNA, 60 bp, Artificial
  Synthetic oligonucleotide
attgaaccatgtaaattgtttcggtctgttgcggggcagactgggaacataccactaatg

SEQ ID NO: 107966 - DNA, 60 bp, Artificial
  Synthetic oligonucleotide
gaacccattgaaccatgcaaattgtttcggtctgttgcggggcagactgggaacataccg

SEQ ID NO: 107967 - DNA, 60 bp, Artificial
  Synthetic oligonucleotide
aatctgctggtgcgcatacgtgtgtaaccgcggaggctgggtcaaccagataggggtagc

SEQ ID NO: 107968 - DNA, 60 bp, Artificial
  Synthetic oligonucleotide
taaggaatctgctggtgcgcatacgtgtgtaaccgcggaggctgggtcaaccagataggg

SEQ ID NO: 107969 - DNA, 60 bp, Artificial
  Synthetic oligonucleotide
tagatataccttattctgaacccattgaaccatgtaaattgtttcggtctgttgcggggc

SEQ ID NO: 107970 - DNA, 60 bp, Artificial
  Synthetic oligonucleotide
cagctaagccaaagctgtatgagcgccaaaatgcaattatgaagggtttagatatacctt

SEQ ID NO: 107971 - DNA, 60 bp, Artificial
  Synthetic oligonucleotide
ctgaacccattgaaccatgtaaattgtttcggtctgttgcggggcagactgggaacatac

SEQ ID NO: 107972 - DNA, 60 bp, Artificial
  Synthetic oligonucleotide
taccttattctgaacccattgaaccatgcaaattgtttcggtctgttgcggggcagactg

SEQ ID NO: 107973 - DNA, 60 bp, Artificial
  Synthetic oligonucleotide
ccaaacggattcacgtttgtcgttctcacttggtggtgggaacatcaacctggaactggg

SEQ ID NO: 107974 - DNA, 60 bp, Artificial
  Synthetic oligonucleotide
tactttctccgggctcacaacaggtgattttaatgcactctcgaacatgttcacacagct

SEQ ID NO: 107975 - DNA, 60 bp, Artificial
  Synthetic oligonucleotide
agtgctctccttgaagccatttccgaatatgtcgttcggtgcaacggagatactttctcc

SEQ ID NO: 107976 - DNA, 60 bp, Artificial
  Synthetic oligonucleotide
atcagctaagccaaagctgtatgagcgccaaaatgcaattatgaagggtttagatatacc

SEQ ID NO: 107977 - DNA, 60 bp, Artificial
  Synthetic oligonucleotide
gtcgttacagccatcagctaagccaaagctgtatgagcgccaaaatgcgatcatgaaggg

SEQ ID NO: 107978 - DNA, 60 bp, Artificial
  Synthetic oligonucleotide
acaattgaacaatttgtcgttacagccatcagctaagccaaagctgtatgagcgccaaaa

SEQ ID NO: 107979 - DNA, 60 bp, Artificial
  Synthetic oligonucleotide
cagacaattaaataatctgtcgttacagccatcagctaagccaaagctgtatgagcgcca

SEQ ID NO: 107980 - DNA, 60 bp, Artificial
  Synthetic oligonucleotide
atgtccgataccgtcagacaattaaataatctgtcgttacagccatcagctaagccaaag

SEQ ID NO: 107981 - DNA, 60 bp, Artificial
  Synthetic oligonucleotide
agacttggttcaatagcgataccaagcctaccgtttcagatgattttattactgcgtaca

SEQ ID NO: 107982 - DNA, 54 bp, Artificial
  Synthetic oligonucleotide
ccgctgtggatacatgcttaggaagacttggttcaatagcgataccaagcctac

SEQ ID NO: 107983 - DNA, 60 bp, Artificial
  Synthetic oligonucleotide
ccgctgtggatacatgcttaggaagacttggttcaatagcgataccaagcctaccgtttc

SEQ ID NO: 107984 - DNA, 60 bp, Artificial
  Synthetic oligonucleotide
tcaaatatgtttgtatcctttatcacgtcgacagaccgctgtggatacatgcttaggaag

SEQ ID NO: 107985 - DNA, 60 bp, Artificial
  Synthetic oligonucleotide
cctttgcaaactatgtcaaatatgtttgtatcctttatcacgtcgacagaccgctgtgga

SEQ ID NO: 107986 - DNA, 50 bp, Artificial
  Synthetic oligonucleotide
ccagataggggtagccgtggaggaaatgcccggtcctgaatctcgagcgc

SEQ ID NO: 107987 - DNA, 60 bp, Artificial
  Synthetic oligonucleotide
gccggggcatatcaatttgttgttcctgcttgggcatcagtgctaagtgtcactggtgca

SEQ ID NO: 107988 - DNA, 60 bp, Artificial
  Synthetic oligonucleotide
ggattcacgtttgtcgttctcacttggtggtgggaacatcaacctggaactgggtgtggc

SEQ ID NO: 107989 - DNA, 60 bp, Artificial
  Synthetic oligonucleotide
cacgtttgtcgttctcacttggtggtgggaacatcaacctggaactgggtgtggctaaaa

SEQ ID NO: 107990 - DNA, 60 bp, Artificial
  Synthetic oligonucleotide
gtccaaacggattcacgtttgtcgttctcacttggtggtgggaacatcaacctggaactg

SEQ ID NO: 107991 - DNA, 60 bp, Artificial
  Synthetic oligonucleotide
gcggctattccagccggggcatatcaatttgttgttcctgcttgggcatcagtgctaagt

SEQ ID NO: 107992 - DNA, 60 bp, Artificial
  Synthetic oligonucleotide
ggaccagctgaccaataatttgatcacgaactatatggatccgccggccatacctgcagg

SEQ ID NO: 107993 - DNA, 60 bp, Artificial
  Synthetic oligonucleotide
ccagctgactaatagtttgatcacgaactatatggatccgccggccatacctgcaggttt

SEQ ID NO: 107994 - DNA, 60 bp, Artificial
  Synthetic oligonucleotide
cacttggtggtgggaacatcaacctggaactgggtgtggctaaaacgggattttgtgtcg

SEQ ID NO: 107995 - DNA, 54 bp, Artificial
  Synthetic oligonucleotide
aaaacgggattttgtgtcgcaattgaaggcgaatttacgattttggcaaatcgt

SEQ ID NO: 107996 - DNA, 60 bp, Artificial
  Synthetic oligonucleotide
cagctgactaatagtttgatcacgaactatatggatccgccggccatacctgcaggtttg

SEQ ID NO: 107997 - DNA, 60 bp, Artificial
  Synthetic oligonucleotide
atgtcacgccagatgtggttagacacaagtgctctccttgaagccatttccgaatatgtc

SEQ ID NO: 107998 - DNA, 60 bp, Artificial
  Synthetic oligonucleotide
ccgccggccatacctgcaggtttggcattcacctcaccatggtttcgattttctgaaagg

SEQ ID NO: 107999 - DNA, 60 bp, Artificial
  Synthetic oligonucleotide
cgccagatgtggttagacacaagtgctctccttgaagccatttccgaatatgtcgttcgg

SEQ ID NO: 108000 - DNA, 60 bp, Artificial
  Synthetic oligonucleotide
gatccgagagtacctttgcaaactatgtcaaatatgtttgtatcctttatcacgtcgaca

SEQ ID NO: 108001 - DNA, 60 bp, Artificial
  Synthetic oligonucleotide
cccttgcaaactatgtcaaatatgtttgtatcctttatcacgtcgacagaccgttgtgga

SEQ ID NO: 108002 - DNA, 60 bp, Artificial
  Synthetic oligonucleotide
tcacacagctctcagtttcgagcgctggatatgttagtgatccgagagtacctttgcaaa

SEQ ID NO: 108003 - DNA, 60 bp, Artificial
  Synthetic oligonucleotide
cacacagctctcagtttcgagcgctggatatgttagtgatccgagagtacccttgcaaac

SEQ ID NO: 108004 - DNA, 60 bp, Artificial
  Synthetic oligonucleotide
cacacagctctcagtttcgagcgctggatatgttagtgatccgagagtacctttgcaaac

SEQ ID NO: 108005 - DNA, 60 bp, Artificial
  Synthetic oligonucleotide
gctggatatgttagtgatccgagagtacctttgcaaactatgtcaaatatgtttgtatcc

SEQ ID NO: 108006 - DNA, 60 bp, Artificial
  Synthetic oligonucleotide
ctccgggctcacaacaggtgattttaatgcactctcgaacatgttcacacagctctcagt

SEQ ID NO: 108007 - DNA, 60 bp, Artificial
  Synthetic oligonucleotide
gtgattttaatgcactctcgaacatgttcacacagctctcagtttcgagcgctggatatg

SEQ ID NO: 108008 - DNA, 60 bp, Artificial
  Synthetic oligonucleotide
gcactctcgaacatgttcacacagctctcagtttcgagcgctggatatgttagtgatccg

SEQ ID NO: 108009 - DNA, 60 bp, Artificial
  Synthetic oligonucleotide
tcacacagctctcagtttcgagcgctggatatgttagtgatccgagagtacccttgcaaa

SEQ ID NO: 108010 - DNA, 60 bp, Artificial
  Synthetic oligonucleotide
cagatcaaaccattctgcgctgctttcggcataataaatttagccgcaacgatgattatg

SEQ ID NO: 108011 - DNA, 60 bp, Artificial
  Synthetic oligonucleotide
tctgcgctgctttcggtataataaatttagccgcaacgatgattatgatgttcatggcga

SEQ ID NO: 108012 - DNA, 60 bp, Artificial
  Synthetic oligonucleotide
gcggttgttgccttaataacttctgcgagcacactaacgagcgatttgggaatcattcta

SEQ ID NO: 108013 - DNA, 58 bp, Artificial
  Synthetic oligonucleotide
aacttctgcgagcacactaacgagcgatttggggatcattctaaagaatactaccgca

SEQ ID NO: 108014 - DNA, 57 bp, Artificial
  Synthetic oligonucleotide
gacagataaagaaacgtgtgaatgaacaggtattgccaaaaatgcgcgtagagttaa

SEQ ID NO: 108015 - DNA, 60 bp, Artificial
  Synthetic oligonucleotide
tgcggttgttgccttaataacttctgcgagcacactaacgagcgatttgggaatcattct

SEQ ID NO: 108016 - DNA, 51 bp, Artificial
  Synthetic oligonucleotide
ctacgactgcgacagataaagaaacgtgtgaatgaacaggtattgccaaaa

SEQ ID NO: 108017 - DNA, 60 bp, Artificial
  Synthetic oligonucleotide
ctacgactgcgacagataaagaaacgtgtgaatgaacaggtattgccaaaaatgcgcgta

SEQ ID NO: 108018 - DNA, 60 bp, Artificial
  Synthetic oligonucleotide
tgcgctgctttcggcataataaatttagccgcaacgatgattatgatgttcatggcgaag

SEQ ID NO: 108019 - DNA, 60 bp, Artificial
  Synthetic oligonucleotide
atgcgtacaacgaagcagtgaggatgagtataacggagctcagtgaagtgcctttagatg

SEQ ID NO: 108020 - DNA, 60 bp, Artificial
  Synthetic oligonucleotide
gagtttagtgccatatcaagagaatgcgaggccaccgagttacgcaccaacagcgcctac

SEQ ID NO: 108021 - DNA, 60 bp, Artificial
  Synthetic oligonucleotide
cagcgcctacgccgacatcgatgccaagagtcgcgctggatatactcgacaaagcaatgt

SEQ ID NO: 108022 - DNA, 60 bp, Artificial
  Synthetic oligonucleotide
tagtgccatatcaagagaatgcgaggccaccaagttacgcaccaacagcgcctacgccgg

SEQ ID NO: 108023 - DNA, 52 bp, Artificial
  Synthetic oligonucleotide
ggcatcgatgccgagagtcgcgctggatatactcgacaaagcaatgtcaaat

SEQ ID NO: 108024 - DNA, 60 bp, Artificial
  Synthetic oligonucleotide
gcgcctacgccgacatcgatgccaagagtcgcgctggatatactcgacaaagcaatgtca

SEQ ID NO: 108025 - DNA, 60 bp, Artificial
  Synthetic oligonucleotide
gaaaaggtcgcgtatgcatcatatgcagaagcatttagagatgatctacgactgcgacag

SEQ ID NO: 108026 - DNA, 60 bp, Artificial
  Synthetic oligonucleotide
aagtagaaaaggtcgcgtatgcatcatatgcagaagcatttagagatgatctacgactgc

SEQ ID NO: 108027 - DNA, 60 bp, Artificial
  Synthetic oligonucleotide
gtcgcgtatgcatcatatgcggaagcatttagagatgatctacgactgcgacagataaag

SEQ ID NO: 108028 - DNA, 60 bp, Artificial
  Synthetic oligonucleotide
ggtcgcgtatgcatcatatgcggaagcatttagagatgatctacgactgcgacagataaa

SEQ ID NO: 108029 - DNA, 60 bp, Artificial
  Synthetic oligonucleotide
cctttagatggatttgacataccacctgagctgatcagatagagtggtgcccccaggttg

SEQ ID NO: 108030 - DNA, 60 bp, Artificial
  Synthetic oligonucleotide
gcgtacaacgaagcggtgaggatgagtataacggagctcagtgaagtgcctttagatgga

SEQ ID NO: 108031 - DNA, 60 bp, Artificial
  Synthetic oligonucleotide
gcgtacaacgaagcagtgaggatgagtataacggagctcagtgaagtgcctttagatgga

SEQ ID NO: 108032 - DNA, 60 bp, Artificial
  Synthetic oligonucleotide
atgcgtacaacgaagcggtgaggatgagtataacggagctcagtgaagtgcctttagatg

SEQ ID NO: 108033 - DNA, 60 bp, Artificial
  Synthetic oligonucleotide
cctttagatggatttgacataccacctgagctgatcagatagagtggtgcccccaggtta

SEQ ID NO: 108034 - DNA, 60 bp, Artificial
  Synthetic oligonucleotide
gcaagatttcagtaactttgatgagatattggaacatccgttatctgattctgacataga

SEQ ID NO: 108035 - DNA, 60 bp, Artificial
  Synthetic oligonucleotide
atccgttatctgattctgacatagacgagaaattcgagaaactcgaacatgatgttgaag

SEQ ID NO: 108036 - DNA, 60 bp, Artificial
  Synthetic oligonucleotide
tctcttctttgaaattagacgtttgattattatactcgtttgttatctggttttatatca

SEQ ID NO: 108037 - DNA, 60 bp, Artificial
  Synthetic oligonucleotide
agtaaaaccaattatgcaagatttcagtaactttgatgagatattggaacatccgttatc

SEQ ID NO: 108038 - DNA, 60 bp, Artificial
  Synthetic oligonucleotide
taacgcacgaggacagtatcaatctgttttgttaagaggaatcaatggtagtgaatctta

SEQ ID NO: 108039 - DNA, 60 bp, Artificial
  Synthetic oligonucleotide
cgcacgaggacagtatcaatctgttttgttaagaggaatcaatggtagtgaatcttacct

SEQ ID NO: 108040 - DNA, 60 bp, Artificial
  Synthetic oligonucleotide
caatcatcggatacgagtttgcagttggtacaagagctactcatactaaaatcaatcata

SEQ ID NO: 108041 - DNA, 60 bp, Artificial
  Synthetic oligonucleotide
ctcatactaaaatcaatcatatttactaccagttggctacctttgataattatccctttg

SEQ ID NO: 108042 - DNA, 60 bp, Artificial
  Synthetic oligonucleotide
gaaaacccgaattcctacgaccgtcaattgactatcgaaaaatatcgtccacttcttatt

SEQ ID NO: 108043 - DNA, 60 bp, Artificial
  Synthetic oligonucleotide
acttcttatttcaatcatcggatacgagtttgcagttggtacaagagctactcatactaa

SEQ ID NO: 108044 - DNA, 60 bp, Artificial
  Synthetic oligonucleotide
cgtacgtcgattctcttgcagttatggatacgctccttgacacctctttctgaagcgggc

SEQ ID NO: 108045 - DNA, 60 bp, Artificial
  Synthetic oligonucleotide
aaaatattcacgttcgtacgtcgattctcttgcagttatggatacgctccttgacacctc

SEQ ID NO: 108046 - DNA, 60 bp, Artificial
  Synthetic oligonucleotide
gacggagcatcttgttaataatggaggtattgttaatttaactctaattaattaaagcgt

SEQ ID NO: 108047 - DNA, 57 bp, Artificial
  Synthetic oligonucleotide
gatgttgaagaaattgtcgatcctgttgttagacgcaattacggtaaatgtggtcac

SEQ ID NO: 108048 - DNA, 60 bp, Artificial
  Synthetic oligonucleotide
ctgacatagacgagaaattcgagaaactcgaacatgatgttgaagaaattgtcgatcctg

SEQ ID NO: 108049 - DNA, 60 bp, Artificial
  Synthetic oligonucleotide
ctatggaaatgttttatcaccttttccgttgtgtttgttgtaatccgttagttagaggag

SEQ ID NO: 108050 - DNA, 60 bp, Artificial
  Synthetic oligonucleotide
aaagttactatggaaatgttttatcaccttttccgttgtgtttgttgtaatccgttagtt

SEQ ID NO: 108051 - DNA, 60 bp, Artificial
  Synthetic oligonucleotide
ggcgatgcaatttatgaattttacaatgaaatgtctacttttaaagaatcaattaacgtg

SEQ ID NO: 108052 - DNA, 60 bp, Artificial
  Synthetic oligonucleotide
tccgttagttagaggagtttttagtatattattcactattttgctttatgttttaatcat

SEQ ID NO: 108053 - DNA, 60 bp, Artificial
  Synthetic oligonucleotide
cggcgtagtagataaagatactggagcggttcatgagacggagcatcttgttaataatgg

SEQ ID NO: 108054 - DNA, 60 bp, Artificial
  Synthetic oligonucleotide
ggatcattgtttttcggcgtagtagataaagatactggagcggttcatgagacggagcat

SEQ ID NO: 108055 - DNA, 60 bp, Artificial
  Synthetic oligonucleotide
aaatgttcatgaaaggattccttgtacatcttggtgaaaacccgaattcctacgaccgtc

SEQ ID NO: 108056 - DNA, 60 bp, Artificial
  Synthetic oligonucleotide
ttattcaagtattgaaaatgttcatgaaaggattccttgtacatcttggtgaaaacccga

SEQ ID NO: 108057 - DNA, 60 bp, Artificial
  Synthetic oligonucleotide
acctaattaactaccttttaaatggcacccacttcgacaaaactcattattgtggtttcg

SEQ ID NO: 108058 - DNA, 60 bp, Artificial
  Synthetic oligonucleotide
acgacggcatttttgacctaattaactaccttttaaatggcacccacttcgacaaaactc

SEQ ID NO: 108059 - DNA, 60 bp, Artificial
  Synthetic oligonucleotide
gcctggaactgacacattcctgcaggaaagagcgtaagagaatggcagacctagaacgga

SEQ ID NO: 108060 - DNA, 60 bp, Artificial
  Synthetic oligonucleotide
cgaatccactttatcagagttaccagcaaaaatcattcgtgaactaccattattgccaat

SEQ ID NO: 108061 - DNA, 54 bp, Artificial
  Synthetic oligonucleotide
taagtatgaaagatcggagtcaattagccttaagtccccagatttcacagtcgt

SEQ ID NO: 108062 - DNA, 60 bp, Artificial
  Synthetic oligonucleotide
tgtggtttcgattattcacaccttccaacacttgagcgtgactttaacaccgcctcaaac

SEQ ID NO: 108063 - DNA, 60 bp, Artificial
  Synthetic oligonucleotide
gacaaaactcattattgtggtttcgattattcacaccttccaacacttgagcgtgacttt

SEQ ID NO: 108064 - DNA, 60 bp, Artificial
  Synthetic oligonucleotide
aagaaaacgctaccagctatctttgattattggattgagttggagatgaagcgattggac

SEQ ID NO: 108065 - DNA, 60 bp, Artificial
  Synthetic oligonucleotide
cgctaccagctatctttgattattggattgagttggagatgaagcgattggacacgggag

SEQ ID NO: 108066 - DNA, 60 bp, Artificial
  Synthetic oligonucleotide
catccgcttatcttgttttgtcaagacaaagttagagtagtgcctatacgaacggcgacg

SEQ ID NO: 108067 - DNA, 54 bp, Artificial
  Synthetic oligonucleotide
agtagtgcctatacgaacggcgacgcaagaaagagggttacctttactgtgctg

SEQ ID NO: 108068 - DNA, 60 bp, Artificial
  Synthetic oligonucleotide
caggccttgttattatctgatccctgtactgacaattccgagaaaagttcacatccgctt

SEQ ID NO: 108069 - DNA, 60 bp, Artificial
  Synthetic oligonucleotide
tccgagaaaagttcacatccgcttatcttgttttgtcaagacaaagttagagtagtgcct

SEQ ID NO: 108070 - DNA, 60 bp, Artificial
  Synthetic oligonucleotide
cgagtcagaacgtccgaaaacatagaagaccttttgccattagccttttatcaggccttg

SEQ ID NO: 108071 - DNA, 60 bp, Artificial
  Synthetic oligonucleotide
cattagccttttatcaggccttgttattatctgatccctgtactgacaattccgagaaaa

SEQ ID NO: 108072 - DNA, 60 bp, Artificial
  Synthetic oligonucleotide
gcgattggacacgggagatagactgagaacccgtgcacaaatggtagaattatactattc

SEQ ID NO: 108073 - DNA, 60 bp, Artificial
  Synthetic oligonucleotide
tatactattcaacaaactgtggagggtcgtatgaaacgctgaacttcgtatttccaattg

SEQ ID NO: 108074 - DNA, 60 bp, Artificial
  Synthetic oligonucleotide
tttccaattgtacatccgaacaaagggtttattgcgtgtgtgatttctagtaagggcgga

SEQ ID NO: 108075 - DNA, 60 bp, Artificial
  Synthetic oligonucleotide
caacaaactgtggagggtcgtatgaaacgctgaacttcgtatttccaattgtacatccga

SEQ ID NO: 108076 - DNA, 60 bp, Artificial
  Synthetic oligonucleotide
taagggcggaatgggagcgttaaacgaggacgacgtaagacgacgtttcagacgtattca

SEQ ID NO: 108077 - DNA, 60 bp, Artificial
  Synthetic oligonucleotide
gtacatccgaacaaagggtttattgcgtgtgtgatttctagtaagggcggaatgggagcg

SEQ ID NO: 108078 - DNA, 57 bp, Artificial
  Synthetic oligonucleotide
gacgtattcagagctcgatccaggggattttttccatcagcattgatgaagagatgg

SEQ ID NO: 108079 - DNA, 60 bp, Artificial
  Synthetic oligonucleotide
ggcggaatgggagcgttaaacgaggacgacgtaagacgacgtttcagacgtattcagagc

SEQ ID NO: 108080 - DNA, 51 bp, Artificial
  Synthetic oligonucleotide
gacgtattcagagctcgatccaggggattttttccatcagcattgatgaag

SEQ ID NO: 108081 - DNA, 60 bp, Artificial
  Synthetic oligonucleotide
tctggataaagagtgttacaagaaagagtcgctcattctgaacctccgaagtatcttttc

SEQ ID NO: 108082 - DNA, 60 bp, Artificial
  Synthetic oligonucleotide
ctggataaagagtgttacaagaaagagtcgctcattctgaacctccgaagtatcttttct

SEQ ID NO: 108083 - DNA, 60 bp, Artificial
  Synthetic oligonucleotide
gtatcttttctttaatatgcttcttaattgattttggttatgaagggagagaaatcacac

SEQ ID NO: 108084 - DNA, 60 bp, Artificial
  Synthetic oligonucleotide
ctttaatatgcttcttaattgattttggttatgaagggagagaaatcacacggggagagg

SEQ ID NO: 108085 - DNA, 60 bp, Artificial
  Synthetic oligonucleotide
tcaaagattgatgcgagtcagaacgtccgaaaacatagaagaccttttgccattagcctt

SEQ ID NO: 108086 - DNA, 60 bp, Artificial
  Synthetic oligonucleotide
atcagctgcggtcatctattaggcatcaaagagtgaagccgagaatggacgaggcgcata

SEQ ID NO: 108087 - DNA, 60 bp, Artificial
  Synthetic oligonucleotide
gttaaattgtgtcaggatggaggacattaacctaactatattcagtgatgatgcattacc

SEQ ID NO: 108088 - DNA, 60 bp, Artificial
  Synthetic oligonucleotide
gcgtatgaggtcttgttatcaggaggtataaatgtaggcactggaacatgctacgattta

SEQ ID NO: 108089 - DNA, 60 bp, Artificial
  Synthetic oligonucleotide
ttctcgaaccgcatcaaatgtatgacagatacacgcaagaatttttacaaggcaaagcga

SEQ ID NO: 108090 - DNA, 60 bp, Artificial
  Synthetic oligonucleotide
gagttaatcagatcggatcgcagcaattcatagatagagcaattgggcctgataagttcg

SEQ ID NO: 108091 - DNA, 60 bp, Artificial
  Synthetic oligonucleotide
atatgacgattttataccggtgcaagagggcgtacgaccatgcgttcagggacatgtatg

SEQ ID NO: 108092 - DNA, 60 bp, Artificial
  Synthetic oligonucleotide
ggcaaagcgagggatgttctacgccaaaacggtcgagacggatataagttaatcatacct

SEQ ID NO: 108093 - DNA, 60 bp, Artificial
  Synthetic oligonucleotide
aattgggcctgataagttcgaattgaagcgagaaattttcgatcggctgaaggcgttgga

SEQ ID NO: 108094 - DNA, 60 bp, Artificial
  Synthetic oligonucleotide
ggcgttggacgttgatgtgagaaaagtcataagagaagaagaagcgagcgcagagctgga

SEQ ID NO: 108095 - DNA, 60 bp, Artificial
  Synthetic oligonucleotide
catcgatgaacagtgcttatggaaaattccactgcccaacattattgacgtaagaccgtg

SEQ ID NO: 108096 - DNA, 60 bp, Artificial
  Synthetic oligonucleotide
ggtggatctgggagtgatctaggtcagtgcaggagtagcgaccaaggcgtatatgcagac

SEQ ID NO: 108097 - DNA, 60 bp, Artificial
  Synthetic oligonucleotide
cgacaggttgtgcgacccagacatttcctctgctatgaaagcaatagcccagttgaccgc

SEQ ID NO: 108098 - DNA, 60 bp, Artificial
  Synthetic oligonucleotide
acgcgcacacgttccgacaggttgtgcgacccagacatttcctctgctatgaaagcaata

SEQ ID NO: 108099 - DNA, 60 bp, Artificial
  Synthetic oligonucleotide
cctcacgtatggcttggaaacctttctccgttcagattgcaaacaactcattcgtctgtg

SEQ ID NO: 108100 - DNA, 60 bp, Artificial
  Synthetic oligonucleotide
ccgccaattatgtctcctcacgtatggcttggaaacctttctccgttcagattgcaaaca

SEQ ID NO: 108101 - DNA, 60 bp, Artificial
  Synthetic oligonucleotide
cattcgtctgtgcctccgcccagcagctcaacgttgcacaaactgattcatcgcgtgctc

SEQ ID NO: 108102 - DNA, 60 bp, Artificial
  Synthetic oligonucleotide
attgcaaacaactcattcgtctgtgcctccgcccagcagctcaacgttgcacaaactgat

SEQ ID NO: 108103 - DNA, 60 bp, Artificial
  Synthetic oligonucleotide
aaatcaacgcccgcgcccgtgcctactctcccacgacatgcatcttctaacccctggtct

SEQ ID NO: 108104 - DNA, 60 bp, Artificial
  Synthetic oligonucleotide
acaattttaaatcaacgcccgcgcccgtgcctactctcccacgacatgcatcttctaacc

SEQ ID NO: 108105 - DNA, 60 bp, Artificial
  Synthetic oligonucleotide
acaggcgagctgcgtcacctctctcccgccctgacaccccacgatacgcgacgcgcacac

SEQ ID NO: 108106 - DNA, 60 bp, Artificial
  Synthetic oligonucleotide
cacctctctcccgccctgacaccccacgatacgcgacgcgcacacgttccgacaggttgt

SEQ ID NO: 108107 - DNA, 60 bp, Artificial
  Synthetic oligonucleotide
ttcgctcatggaggagggatcgccagttgctccagtgtcaatgttcgatcacaggcgagc

SEQ ID NO: 108108 - DNA, 60 bp, Artificial
  Synthetic oligonucleotide
gggatcgccagttgctccagtgtcaatgttcgatcacaggcgagctgcgtcacctctctc

SEQ ID NO: 108109 - DNA, 60 bp, Artificial
  Synthetic oligonucleotide
caacgaagtgccagtagtcctcccgcgccttccgcctttcacgcgccgtcatccccaatt

SEQ ID NO: 108110 - DNA, 60 bp, Artificial
  Synthetic oligonucleotide
aagtgccagtagtcctcccgcgccttccgcctttcacgcgccgtcatccccaattcctca

SEQ ID NO: 108111 - DNA, 60 bp, Artificial
  Synthetic oligonucleotide
aacaatcatcccctgatcatgcggagccccaacaccccactgttaccccgcaacgaagtg

SEQ ID NO: 108112 - DNA, 60 bp, Artificial
  Synthetic oligonucleotide
acaaactgattcatcgcgtgctcaagttgaacagaaagtcaaatttgcaaagtacgagga

SEQ ID NO: 108113 - DNA, 60 bp, Artificial
  Synthetic oligonucleotide
cccactgcaatacggaaagttaattcccgctgttacggttggtcacgaagcgcgttgcag

SEQ ID NO: 108114 - DNA, 51 bp, Artificial
  Synthetic oligonucleotide
cgcgttgcagatacgtcgacttaagattccccgccaagaaaaggttgctcc

SEQ ID NO: 108115 - DNA, 60 bp, Artificial
  Synthetic oligonucleotide
ccctggtctcgtttcacatctctctgctaagcaccactctaccgccaattatgtctcctc

SEQ ID NO: 108116 - DNA, 60 bp, Artificial
  Synthetic oligonucleotide
tcttctaacccctggtctcgtttcacatctctctgctaagcaccactctaccgccaatta

SEQ ID NO: 108117 - DNA, 60 bp, Artificial
  Synthetic oligonucleotide
cgcgtgctcaagttgaacagaaagtcaaatttgcaaagtacgaggaacgcgacttgattg

SEQ ID NO: 108118 - DNA, 60 bp, Artificial
  Synthetic oligonucleotide
aatcatcccctgatcatgcggagccccaacaccccactgttaccccgcaacgaagtgcca

SEQ ID NO: 108119 - DNA, 60 bp, Artificial
  Synthetic oligonucleotide
ccatgagggcatgatcacgataccaaacagcattaatggtgcaaccccactgcaatacgg

SEQ ID NO: 108120 - DNA, 60 bp, Artificial
  Synthetic oligonucleotide
cgttgccatgagggcatgatcacgataccaaacagcattaatggtgcaaccccactgcaa

SEQ ID NO: 108121 - DNA, 60 bp, Artificial
  Synthetic oligonucleotide
acgaggaacgcgacttgattgtagggtacaccctcactgcgtcatgtcctttgtgtggcg

SEQ ID NO: 108122 - DNA, 60 bp, Artificial
  Synthetic oligonucleotide
agtacgaggaacgcgacttgattgtagggtacaccctcactgcgtcatgtcctttgtgtg

SEQ ID NO: 108123 - DNA, 60 bp, Artificial
  Synthetic oligonucleotide
cccctcgagttcgcactcctactgttccggtccctgcccaatctacgtctgtcagtgatg

SEQ ID NO: 108124 - DNA, 60 bp, Artificial
  Synthetic oligonucleotide
ataccaccgcccctcgagttcgcactcctactgttccggtccctgcccaatctacgtctg

SEQ ID NO: 108125 - DNA, 50 bp, Artificial
  Synthetic oligonucleotide
attacatcgactgagtggaacgagcgattttcccacattccgtcggactt

SEQ ID NO: 108126 - DNA, 53 bp, Artificial
  Synthetic oligonucleotide
tctacgtctgtcagtgatgatcgcgagctaacttggaaatctgacctagatga

SEQ ID NO: 108127 - DNA, 60 bp, Artificial
  Synthetic oligonucleotide
gactcgcctgtcccctattacgctagcaaggcatctaaatttccacgttgccatgagggc

SEQ ID NO: 108128 - DNA, 60 bp, Artificial
  Synthetic oligonucleotide
ttgcagactcgcctgtcccctattacgctagcaaggcatctaaatttccacgttgccatg

SEQ ID NO: 108129 - DNA, 60 bp, Artificial
  Synthetic oligonucleotide
cgtacaccctcgcaattacaatcaacggggagcagcaaatgttcactgcgccaacccagc

SEQ ID NO: 108130 - DNA, 60 bp, Artificial
  Synthetic oligonucleotide
ttacaacttcggccgcgtatgatgtagatttggaatcgcaattcgatgagatttgtgggg

SEQ ID NO: 108131 - DNA, 60 bp, Artificial
  Synthetic oligonucleotide
aattcgatgagatttgtgggggatcgccatctgttcagcgtgtcattaggatgtatgata

SEQ ID NO: 108132 - DNA, 60 bp, Artificial
  Synthetic oligonucleotide
gtgcatttcttatttccagatttgttagtggcgcgtgatcgcattgttacaacttcggcc

SEQ ID NO: 108133 - DNA, 60 bp, Artificial
  Synthetic oligonucleotide
ctgtgagcagtttggttttacaacgctgccaagataccatacggtttcaaacatcccacc

SEQ ID NO: 108134 - DNA, 60 bp, Artificial
  Synthetic oligonucleotide
cgttcaggtccaattaacacgaggtatttgaagtttcttaaaactttctttcaacagcag

SEQ ID NO: 108135 - DNA, 60 bp, Artificial
  Synthetic oligonucleotide
cactgcgccaacccagcaaatgccaaatgtcctgctactcgttacagcacgttcaggtcc

SEQ ID NO: 108136 - DNA, 60 bp, Artificial
  Synthetic oligonucleotide
cgtcgcagctgagtttgagaagatgcgtatgatccagcgtgagggcatgttgtttggtga

SEQ ID NO: 108137 - DNA, 60 bp, Artificial
  Synthetic oligonucleotide
tattttattccgtgctatgtcagttttaataccgaccgagacgcgtgcctactgtgagca

SEQ ID NO: 108138 - DNA, 60 bp, Artificial
  Synthetic oligonucleotide
gattggcagcgagtttcaggattatgacattttccgtgcgttgagtgcagacatttcaac

SEQ ID NO: 108139 - DNA, 60 bp, Artificial
  Synthetic oligonucleotide
gcgacggcttttcaggcaatttttagagtgttcacggtcatgctatggttcaatctcttc

SEQ ID NO: 108140 - DNA, 60 bp, Artificial
  Synthetic oligonucleotide
gtaccatatcaacgtggcgactatacttttccaatcttacaggccccaccgaacgctgga

SEQ ID NO: 108141 - DNA, 60 bp, Artificial
  Synthetic oligonucleotide
cctggctgttgatgggttgactggaatggaggcgtacgttacaccaccaaacgtcgcagc

SEQ ID NO: 108142 - DNA, 60 bp, Artificial
  Synthetic oligonucleotide
gtgcgacgagtcaagcaatgggatttggcattggtgcggcacgatttgtattggtttcgg

SEQ ID NO: 108143 - DNA, 60 bp, Artificial
  Synthetic oligonucleotide
tccgaagcaagtaaacgaaatgaggccttaaccttaaaaatgattgatactatgtttaag

SEQ ID NO: 108144 - DNA, 60 bp, Artificial
  Synthetic oligonucleotide
caggccccaccgaacgctggaaatctgctccattttggaagactccatcggttattgatt

SEQ ID NO: 108145 - DNA, 60 bp, Artificial
  Synthetic oligonucleotide
gcgaccgtttgggattgaagcatatgcgggcgatctagtaactgagctacatatgttggg

SEQ ID NO: 108146 - DNA, 60 bp, Artificial
  Synthetic oligonucleotide
gggttccaaatttattaaccaatcaagaccagttcttccagcggttgggtattgtgacag

SEQ ID NO: 108147 - DNA, 60 bp, Artificial
  Synthetic oligonucleotide
cggttgggtattgtgacagaaccgattatgttcgcgaacgtgtaaggggtctctttaccg

SEQ ID NO: 108148 - DNA, 60 bp, Artificial
  Synthetic oligonucleotide
ttgcaaagacttaattcacgcatactctacaacaacagttcgtggcgttgcaccaaaagg

SEQ ID NO: 108149 - DNA, 57 bp, Artificial
  Synthetic oligonucleotide
gctcgctgtaactttacgacaaccatccctacacgtaaccatggaaacacaacagaa

SEQ ID NO: 108150 - DNA, 60 bp, Artificial
  Synthetic oligonucleotide
gtgatcttgatagccgtgctggagcgtttcaaatctcattgtcacctttttatgcacccg

SEQ ID NO: 108151 - DNA, 60 bp, Artificial
  Synthetic oligonucleotide
cggtctaccacgcaatgggtgatctttggagcccaagtgagaaatggttttatctagcag

SEQ ID NO: 108152 - DNA, 60 bp, Artificial
  Synthetic oligonucleotide
gaaattaccaagtaatattgcaatgtcagtaactgaagcgattgatgaacaacggttacg

SEQ ID NO: 108153 - DNA, 56 bp, Artificial
  Synthetic oligonucleotide
taagtccgttaggttggttgtgtgactaatcgtaactatcggagattgggtaggtt

SEQ ID NO: 108154 - DNA, 60 bp, Artificial
  Synthetic oligonucleotide
tcaaaggtgcgacacatctaacaactcatgatggtgagagattcgtgacaggacctccaa

SEQ ID NO: 108155 - DNA, 60 bp, Artificial
  Synthetic oligonucleotide
accttcgctattaaccacgatttgtaaccacgctgatggatgtcctaagttaagtccgtt

SEQ ID NO: 108156 - DNA, 60 bp, Artificial
  Synthetic oligonucleotide
ggccgcccaagtttacagttgacgaaagctcgctactagactcaaccttcgctattaacc

SEQ ID NO: 108157 - DNA, 60 bp, Artificial
  Synthetic oligonucleotide
gtcaactataacaatgtcgttcgtactattgttgatgaaatggttttaaggccgcccaag

SEQ ID NO: 108158 - DNA, 60 bp, Artificial
  Synthetic oligonucleotide
ctccaacgatgtgggcatatggacagaatggtggacaaacgataagacacgaaaatgcag

SEQ ID NO: 108159 - DNA, 60 bp, Artificial
  Synthetic oligonucleotide
gcacccgcgaaccagccacagcctcaggtccagggaacactatatggtgagaatctcgag

SEQ ID NO: 108160 - DNA, 60 bp, Artificial
  Synthetic oligonucleotide
cccgagactgcacccattgccttgttctcacgcggattgttcatcacgcgtcggcatgtg

SEQ ID NO: 108161 - DNA, 60 bp, Artificial
  Synthetic oligonucleotide
atgtttggtcacccgaccttgtacgcacccaaatgattgataacactttcagaagatcag

SEQ ID NO: 108162 - DNA, 60 bp, Artificial
  Synthetic oligonucleotide
caccaaaaggcacgttcggttcagatggaactagagctgctgcaatgacggacttcttta

SEQ ID NO: 108163 - DNA, 60 bp, Artificial
  Synthetic oligonucleotide
tcacgcatactctacaacaacagttcgtggcgttgcaccaaaaggcacgttcggttcaga

SEQ ID NO: 108164 - DNA, 60 bp, Artificial
  Synthetic oligonucleotide
agatacccttggtttaaaatttgacggaatgccggcttatatgagtgcgacgagtcaagc

SEQ ID NO: 108165 - DNA, 60 bp, Artificial
  Synthetic oligonucleotide
gtaccaggtgagaccagatttggggcacggttgtcagacatctatgctttttgcaaagac

SEQ ID NO: 108166 - DNA, 60 bp, Artificial
  Synthetic oligonucleotide
cgtgcgtgcatatatccagccatgggaatttcagcctttcacagtaccaggtgagaccag

SEQ ID NO: 108167 - DNA, 60 bp, Artificial
  Synthetic oligonucleotide
gagctgttgcagcggattaacgttgtgaaagtacgaaaaccctcggacttaactcgagag

SEQ ID NO: 108168 - DNA, 60 bp, Artificial
  Synthetic oligonucleotide
ggaaaacaatcaagcccatcgacgagtacaaatgatgatagtcaaactttaaacgtcaag

SEQ ID NO: 108169 - DNA, 60 bp, Artificial
  Synthetic oligonucleotide
caactatcacgcttgaggatgaagcacaatatgactttcactattggcctaactggcgtc

SEQ ID NO: 108170 - DNA, 60 bp, Artificial
  Synthetic oligonucleotide
gatgtcactgatgacgaagactcggatacaaaggagaatccagtaccacaaactgatagt

SEQ ID NO: 108171 - DNA, 60 bp, Artificial
  Synthetic oligonucleotide
aactggcgtcgggaagattgttatggagccgtgttaatgtatgcattatccgtgtcacgc

SEQ ID NO: 108172 - DNA, 60 bp, Artificial
  Synthetic oligonucleotide
taatgaccggcgtgttgacttaccatcttttctagctcaattgcgaatctttgcattccc

SEQ ID NO: 108173 - DNA, 60 bp, Artificial
  Synthetic oligonucleotide
accgtattcaggcgaagggtactagcttcagtacaactgttgacattccaacgacaagtg

SEQ ID NO: 108174 - DNA, 60 bp, Artificial
  Synthetic oligonucleotide
cttctttaattacttatcggctgacatgctaagtaccaaatttgcgtcacgtgtccactg

SEQ ID NO: 108175 - DNA, 60 bp, Artificial
  Synthetic oligonucleotide
ccgaggaagaaaatcggatgcatctcggagtaattaatgatgctggcgcggagaggttac

SEQ ID NO: 108176 - DNA, 60 bp, Artificial
  Synthetic oligonucleotide
aatgtatgcattatccgtgtcacgccaaaaacagtactatgaccacttagttgagctgtt

SEQ ID NO: 108177 - DNA, 60 bp, Artificial
  Synthetic oligonucleotide
gaagtttatgattggcgatttgtttacaaatgcagtacgtgacatagaacgtgatcttga

SEQ ID NO: 108178 - DNA, 60 bp, Artificial
  Synthetic oligonucleotide
agaggcccttggtttttggacgtgatagaaatcaaaggtggacgtccttcccttttaaaa

SEQ ID NO: 108179 - DNA, 60 bp, Artificial
  Synthetic oligonucleotide
ggaaggggtggtgaagagatcattgcgcgtcatttgtgtaataagctatcaacaggctgg

SEQ ID NO: 108180 - DNA, 60 bp, Artificial
  Synthetic oligonucleotide
gattttgcgaagcattttaacaggtatgcttcgatggcgatacagcaatatttgagagtt

SEQ ID NO: 108181 - DNA, 60 bp, Artificial
  Synthetic oligonucleotide
tcccacacgtgcgtcaatacccaggagctgccgcttatccaaagcgtaatgggtgatcaa

SEQ ID NO: 108182 - DNA, 60 bp, Artificial
  Synthetic oligonucleotide
tattctgactgaccaccgccttgaccacgccgccacccatgccgttatgtccatgcgctt

SEQ ID NO: 108183 - DNA, 60 bp, Artificial
  Synthetic oligonucleotide
taaccgcccagctcgctatcgctgagaccgatgcgatgactgctgcgaatgaacgtgacc

SEQ ID NO: 108184 - DNA, 60 bp, Artificial
  Synthetic oligonucleotide
tggaagtaacatggcacgccgcattactttgaacagtttgaaacctctgagcgcgatgag

SEQ ID NO: 108185 - DNA, 60 bp, Artificial
  Synthetic oligonucleotide
cccacgcctggatgatgccctaccgtggtttcgaacagcacatggtcaacatggtgattg

SEQ ID NO: 108186 - DNA, 60 bp, Artificial
  Synthetic oligonucleotide
gtcatcgacatggatgtgcagatcaacgcgttgctgcgaacgatctcggacctcaagagc

SEQ ID NO: 108187 - DNA, 60 bp, Artificial
  Synthetic oligonucleotide
aagcgctctgtgtttctctgtctgtgtgttgtcgtgtcctctgtccttcccgctctcccc

SEQ ID NO: 108188 - DNA, 60 bp, Artificial
  Synthetic oligonucleotide
ttccgacccaccccacccctgacctacggcaccgccccctccgcccttcctgccgtcggg

SEQ ID NO: 108189 - DNA, 60 bp, Artificial
  Synthetic oligonucleotide
cgccaccatcctggaagctgacaagggaatgcgcgtcgctgacacccccggttcctccac

SEQ ID NO: 108190 - DNA, 60 bp, Artificial
  Synthetic oligonucleotide
gttcctccaccctacgcgaactcgaagcctccaacactgctctccaacgtcaggtcatcg

SEQ ID NO: 108191 - DNA, 60 bp, Artificial
  Synthetic oligonucleotide
ccaccctacgcgaactcgaagcctccaacactgctctccaacgtcaggtcatcgacatgg

SEQ ID NO: 108192 - DNA, 60 bp, Artificial
  Synthetic oligonucleotide
agtccgcctcctaccaagctaccaaggcctggcttcgtggccacttgcccgtcaccatct

SEQ ID NO: 108193 - DNA, 60 bp, Artificial
  Synthetic oligonucleotide
tcctaccaagctaccaaggcctggcttcgtggccacttgcccgtcaccatcttcgcctcc

SEQ ID NO: 108194 - DNA, 60 bp, Artificial
  Synthetic oligonucleotide
gtcaccatcttcgcctccgccacgactgactcctcctccgactccatccacgccaccatc

SEQ ID NO: 108195 - DNA, 60 bp, Artificial
  Synthetic oligonucleotide
tccgccacgactgactcctcctccgactccatccacgccaccatcctggaagctgacaag

SEQ ID NO: 108196 - DNA, 60 bp, Artificial
  Synthetic oligonucleotide
gcttaccctcatgctgccaacggcgtctggaccgcctaccaacactccatcatcctcatc

SEQ ID NO: 108197 - DNA, 60 bp, Artificial
  Synthetic oligonucleotide
cagacattctactctgcttaccctcatgctgccaacggcgtctggaccgcctaccaacac

SEQ ID NO: 108198 - DNA, 60 bp, Artificial
  Synthetic oligonucleotide
gccacgtctgccaggtactgttgttccccgtcggccttcacacatcgctgatgacgaaac

SEQ ID NO: 108199 - DNA, 60 bp, Artificial
  Synthetic oligonucleotide
tctacgccacgtctgccaggtactgttgttccccgtcggccttcacacatcgctgatgac

SEQ ID NO: 108200 - DNA, 56 bp, Artificial
  Synthetic oligonucleotide
aagcctcatgtcactgcccatcgcttcgcccccacgatcccgttccagcaccctct

SEQ ID NO: 108201 - DNA, 51 bp, Artificial
  Synthetic oligonucleotide
tctctcgttgcactcgacgtcccggacgctgctctcccgtcgatgccacgc

SEQ ID NO: 108202 - DNA, 60 bp, Artificial
  Synthetic oligonucleotide
cccgatgtactgcaccggcaaggagcgtcacttcgaacagacattctactctgcttaccc

SEQ ID NO: 108203 - DNA, 60 bp, Artificial
  Synthetic oligonucleotide
tccctgctatgtccccgatgtactgcaccggcaaggagcgtcacttcgaacagacattct

SEQ ID NO: 108204 - DNA, 60 bp, Artificial
  Synthetic oligonucleotide
gacgaaacttacaacagatcccgtgccgcgtatgcgatgggtgtccctgctatgtccccg

SEQ ID NO: 108205 - DNA, 60 bp, Artificial
  Synthetic oligonucleotide
atggcccaccttcatgaggcgcgggcgcacaacggcgacctaaccgcccagctcgctatc

SEQ ID NO: 108206 - DNA, 60 bp, Artificial
  Synthetic oligonucleotide
gggtgatcaagctgctaatgccatccaggccatgcgcacgcacgcgaacgaagccgcccg

SEQ ID NO: 108207 - DNA, 60 bp, Artificial
  Synthetic oligonucleotide
aagccgcccgctctgccctcacggataaagtcaccgctcctctcaccgcccagctctccg

SEQ ID NO: 108208 - DNA, 60 bp, Artificial
  Synthetic oligonucleotide
atcaagctgctaatgccatccaggccatgcgcacgcacgcgaacgaagccgcccgctctg

SEQ ID NO: 108209 - DNA, 60 bp, Artificial
  Synthetic oligonucleotide
cagctctccgacaccatggcccaccttcatgaggcgcgggcgcacaacggcgacctaacc

SEQ ID NO: 108210 - DNA, 60 bp, Artificial
  Synthetic oligonucleotide
tgccctcacggataaagtcaccgctcctctcaccgcccagctctccgacaccatggccca

SEQ ID NO: 108211 - DNA, 60 bp, Artificial
  Synthetic oligonucleotide
cgacctaaccgcccagctcgctatcgctgagaccgatgcgatgactgctgcgaatgaacg

SEQ ID NO: 108212 - DNA, 60 bp, Artificial
  Synthetic oligonucleotide
gctattctgactgaccaccgccttgaccacgccgccacccatgccgttatgtccatgcgc

SEQ ID NO: 108213 - DNA, 60 bp, Artificial
  Synthetic oligonucleotide
cgaatgaacgtgaccgcgcctgcgagctcgccgtcgaacttgaatctcaactcgccacca

SEQ ID NO: 108214 - DNA, 60 bp, Artificial
  Synthetic oligonucleotide
tgaccgatggggtattcagcaagtccttccgtcgcatcgtcatgggtatcgaccccgtca

SEQ ID NO: 108215 - DNA, 60 bp, Artificial
  Synthetic oligonucleotide
gtcatgatgtgcatgcgatgatggccggccacaacgtcgtgtcgatttccgggcttgctg

SEQ ID NO: 108216 - DNA, 60 bp, Artificial
  Synthetic oligonucleotide
ctcccaccatgacttgtcatgatgtgcatgcgatgatggccggccacaacgtcgtgtcga

SEQ ID NO: 108217 - DNA, 60 bp, Artificial
  Synthetic oligonucleotide
gcgcgctcttgatggtgctacagtcgcacgcgtcgctgtcttccgtcttgctcccaccat

SEQ ID NO: 108218 - DNA, 60 bp, Artificial
  Synthetic oligonucleotide
ttcacaacgtggagcgtgagcaatccgccaccgaagcctaccacctgcgcgctcttgatg

SEQ ID NO: 108219 - DNA, 60 bp, Artificial
  Synthetic oligonucleotide
acccttcacaacgtggagcgtgagcaatccgccaccgaagcctaccacctgcgcgctctt

SEQ ID NO: 108220 - DNA, 60 bp, Artificial
  Synthetic oligonucleotide
cttcaaccagatgattttcgaatttaatggtgtgaagtacactggtgccccccacgcctg

SEQ ID NO: 108221 - DNA, 60 bp, Artificial
  Synthetic oligonucleotide
ctgactatccaccccctcctccccacgtcgctgacccggccgtctctcactctctcgttg

SEQ ID NO: 108222 - DNA, 60 bp, Artificial
  Synthetic oligonucleotide
ctcctccccacgtcgctgacccggccgtctctcactctctcgttgcactcgacgtcccgg

SEQ ID NO: 108223 - DNA, 60 bp, Artificial
  Synthetic oligonucleotide
atggtgattgaaacacgtccagacgccactttctcccgcttcgatgatctcctctctgct

SEQ ID NO: 108224 - DNA, 60 bp, Artificial
  Synthetic oligonucleotide
tccctgctgctgtaagcgctctgtgtttctctgtctgtgtgttgtcgtgtcctctgtcct

SEQ ID NO: 108225 - DNA, 60 bp, Artificial
  Synthetic oligonucleotide
ttaacggcatcactgctaccacctctctcaccgacggcgaactcgtgcttctgcgcttcg

SEQ ID NO: 108226 - DNA, 60 bp, Artificial
  Synthetic oligonucleotide
tctgcgcttcgctgacctggccacccgccacgcttccctgccctctccttcacctgcgat

SEQ ID NO: 108227 - DNA, 60 bp, Artificial
  Synthetic oligonucleotide
tgacctggccacccgccacgcttccctgccctctccttcacctgcgatttctgactggtc

SEQ ID NO: 108228 - DNA, 60 bp, Artificial
  Synthetic oligonucleotide
cacctgcgatttctgactggtcccaatccgttcccggtcctctgctcgacaccctcgaat

SEQ ID NO: 108229 - DNA, 60 bp, Artificial
  Synthetic oligonucleotide
actggtcccaatccgttcccggtcctctgctcgacaccctcgaatatggtgctcctctga

SEQ ID NO: 108230 - DNA, 56 bp, Artificial
  Synthetic oligonucleotide
accctcgaatatggtgctcctctgatccccgccgaacccactgccacccctgctcc

SEQ ID NO: 108231 - DNA, 60 bp, Artificial
  Synthetic oligonucleotide
tgataagggaatgaatgagcctgtatccttccaatttattgttcaaggagatgtcgatct

SEQ ID NO: 108232 - DNA, 60 bp, Artificial
  Synthetic oligonucleotide
gccctcgaaatactagacagacaatattcgcgtgattcatacatctacgcacatttagta

SEQ ID NO: 108233 - DNA, 60 bp, Artificial
  Synthetic oligonucleotide
acatttagtattgtacatgaaggactctagtctgcaaatcataagagcccagaacccgcg

SEQ ID NO: 108234 - DNA, 60 bp, Artificial
  Synthetic oligonucleotide
aacaaaattccacgaaacataatcagcaacatggcttaccacggagcaccccacgaaatt

SEQ ID NO: 108235 - DNA, 60 bp, Artificial
  Synthetic oligonucleotide
ttccacgaaacataatcagcaacatggcttaccacggagcaccccacgaaattcgcaaca

SEQ ID NO: 108236 - DNA, 60 bp, Artificial
  Synthetic oligonucleotide
gaacccgcgcatcatatctcgtagctacaactgggaccaactcgtgttacccaattatcg

SEQ ID NO: 108237 - DNA, 60 bp, Artificial
  Synthetic oligonucleotide
cccaattatcgtatcaacgacgagaagtactacggaaggagtgagttacgccatctaaga

SEQ ID NO: 108238 - DNA, 60 bp, Artificial
  Synthetic oligonucleotide
catgaaggactctagtctgcaaatcataagagcccagaacccgcgcatcatatctcgtag

SEQ ID NO: 108239 - DNA, 60 bp, Artificial
  Synthetic oligonucleotide
agaacccgcgcatcatatctcgtagctacaactgggaccaactcgtgttacccaattatc

SEQ ID NO: 108240 - DNA, 60 bp, Artificial
  Synthetic oligonucleotide
ctgtacgcacattacgatgatgaggagacttcagtcgcaaactactggacccgattccaa

SEQ ID NO: 108241 - DNA, 60 bp, Artificial
  Synthetic oligonucleotide
ggacccgattccaatatctgtacaggaccaagtgtgatattgcggtgtgaacacggtcag

SEQ ID NO: 108242 - DNA, 60 bp, Artificial
  Synthetic oligonucleotide
cgtatcaacgacgagaagtactacggaaggagtgagttacgccatctaagagacggtttg

SEQ ID NO: 108243 - DNA, 60 bp, Artificial
  Synthetic oligonucleotide
acacggtcagccactagcgtccttcgggtttgaggagtcacgacctcttatacgctggtc

SEQ ID NO: 108244 - DNA, 60 bp, Artificial
  Synthetic oligonucleotide
gtcagccactagcgtccttcgggtttgaggagtcacgacctcttatacgctggtctgcgg

SEQ ID NO: 108245 - DNA, 60 bp, Artificial
  Synthetic oligonucleotide
cgatctgtacgcacattacgatgatgaggagacttcagtcgcaaactactggacccgatt

SEQ ID NO: 108246 - DNA, 60 bp, Artificial
  Synthetic oligonucleotide
caaattcgacggcatcctgttcccttgccaccctgttatcagtttcgctgttcagcgcgc

SEQ ID NO: 108247 - DNA, 60 bp, Artificial
  Synthetic oligonucleotide
agctcgtctagcttcgcaatggaggcagtttctgagcgtgcggagaattacatcggccca

SEQ ID NO: 108248 - DNA, 60 bp, Artificial
  Synthetic oligonucleotide
cagtctggttccgcgttaacaagtataataatatcagctcgtctagcttcgcaatggagg

SEQ ID NO: 108249 - DNA, 60 bp, Artificial
  Synthetic oligonucleotide
atgtcgatctaggttcagtctggttccgcgttaacaagtataataatatcagctcgtcta

SEQ ID NO: 108250 - DNA, 60 bp, Artificial
  Synthetic oligonucleotide
tgagcctgtatccttccaatttattgttcaaggagatgtcgatctaggttcagtctggtt

SEQ ID NO: 108251 - DNA, 60 bp, Artificial
  Synthetic oligonucleotide
ggtcctacgttggcaaattcgacggcatcctgttcccttgccaccctgttatcagtttcg

SEQ ID NO: 108252 - DNA, 60 bp, Artificial
  Synthetic oligonucleotide
ggcccactgatgcgcccaattcgctacttcgatcgtgagatggcatggtcctacgttggc

SEQ ID NO: 108253 - DNA, 60 bp, Artificial
  Synthetic oligonucleotide
catcggcccactgatgcgcccaattcgctacttcgatcgtgagatggcatggtcctacgt

SEQ ID NO: 108254 - DNA, 60 bp, Artificial
  Synthetic oligonucleotide
cttcgcaatggaggcagtttctgagcgtgcggagaattacatcggcccactgatgcgccc

SEQ ID NO: 108255 - DNA, 60 bp, Artificial
  Synthetic oligonucleotide
atctgtacaggaccaagtgtgatattgcggtgtgaacacggtcagccactagcgtccttc

SEQ ID NO: 108256 - DNA, 60 bp, Artificial
  Synthetic oligonucleotide
agtgcggttcatacgcggaaaaggatcctttatattacatgatattccgaccagggatca

SEQ ID NO: 108257 - DNA, 60 bp, Artificial
  Synthetic oligonucleotide
agtgcggttcatacgcggaaaaggatcctttatattacatgatattccgaccagagatca

SEQ ID NO: 108258 - DNA, 60 bp, Artificial
  Synthetic oligonucleotide
cagttgtgttagatgtgagttggatatcactgtggtttgctttcaacagatcgtttgaac

SEQ ID NO: 108259 - DNA, 60 bp, Artificial
  Synthetic oligonucleotide
cccgacctaattgctggggcgcatcagaacgccgacccagttgtgttagatgtgagttgg

SEQ ID NO: 108260 - DNA, 60 bp, Artificial
  Synthetic oligonucleotide
tcctatgcgttggttcaaacgatctgttgaaagcaaaccacagtgatatccaactcacat

SEQ ID NO: 108261 - DNA, 60 bp, Artificial
  Synthetic oligonucleotide
cctatgcgttggttcaaacgatctgttgaaagcaaaccacagtgatatccaactcacatc

SEQ ID NO: 108262 - DNA, 60 bp, Artificial
  Synthetic oligonucleotide
ttatcgatccatccaatgcgttctgaatcattgcgcgatgctcggcagtcaacacaggta

SEQ ID NO: 108263 - DNA, 60 bp, Artificial
  Synthetic oligonucleotide
cggtgatccctggtcggaatatcatgtaatataaaggatccttttccgcgtatgaaccgc

SEQ ID NO: 108264 - DNA, 60 bp, Artificial
  Synthetic oligonucleotide
caacgcattattacccgacctaattgctggggcgcatcagaacgccgacccagttgtgtt

SEQ ID NO: 108265 - DNA, 60 bp, Artificial
  Synthetic oligonucleotide
catcgcgcaatgattcagaacgcattggatggatcgataatcgagaacggaaacgtagct

SEQ ID NO: 108266 - DNA, 60 bp, Artificial
  Synthetic oligonucleotide
gatggcagatccacgaagacatactgtatatggcaaacctacctcacctcctgctctagg

SEQ ID NO: 108267 - DNA, 60 bp, Artificial
  Synthetic oligonucleotide
gcagtatgtaacaatgtgtaatagggactggttgtcacttgcgtgtctgaaacttcgaat

SEQ ID NO: 108268 - DNA, 57 bp, Artificial
  Synthetic oligonucleotide
ttatgggatgtgcgatctgacaaaacgggacatgacagtgaagcttgggaaagaatt

SEQ ID NO: 108269 - DNA, 60 bp, Artificial
  Synthetic oligonucleotide
cttgaaaagtctgcagttggatgtatctgggcatttgttgatttcacttatcagcggagc

SEQ ID NO: 108270 - DNA, 60 bp, Artificial
  Synthetic oligonucleotide
cagaaagcctgatatcttgaaaagtctgcagttggatgtatctgggcatttgttgatttc

SEQ ID NO: 108271 - DNA, 59 bp, Artificial
  Synthetic oligonucleotide
attgtacctcaaccaaatgctccgatcacaatgtttgaacttaggtcaatagtaaggct

SEQ ID NO: 108272 - DNA, 60 bp, Artificial
  Synthetic oligonucleotide
atagtgcagatgtagtctattacgttggatcgggggacttacgtacactgcagaaatttc

SEQ ID NO: 108273 - DNA, 60 bp, Artificial
  Synthetic oligonucleotide
cgcatggttctggatggaaatggatttgtcctattcttgatgtggaaaggcgctctggga

SEQ ID NO: 108274 - DNA, 60 bp, Artificial
  Synthetic oligonucleotide
tgaccatccaactgatgaaaagttagtgtgcttgctggattatatgacctatagtgcaga

SEQ ID NO: 108275 - DNA, 60 bp, Artificial
  Synthetic oligonucleotide
actttaaggacctatcctacagatttagctccagacgtctcactatgcaggtttttaggt

SEQ ID NO: 108276 - DNA, 60 bp, Artificial
  Synthetic oligonucleotide
gcacctgagaggcttgaagaaacctggcaacttagagcatatgttgttatgggatgtgcg

SEQ ID NO: 108277 - DNA, 60 bp, Artificial
  Synthetic oligonucleotide
ccgagtggatataatagatgaaatcttggaaacatccgcgcttgcaacggtttggatagg

SEQ ID NO: 108278 - DNA, 54 bp, Artificial
  Synthetic oligonucleotide
ttgtattgatcctatagtaggtgagtcttttgcaccgaacgtcatatgtatgag

SEQ ID NO: 108279 - DNA, 60 bp, Artificial
  Synthetic oligonucleotide
cagaaatttcgcgccaaagatcaaaaacgctttgaacgtgtaacttggttttgtattgat

SEQ ID NO: 108280 - DNA, 60 bp, Artificial
  Synthetic oligonucleotide
caggaaccgagtggatataatagatgaaatcttggaaacatccgcgcttgcaacggtttg

SEQ ID NO: 108281 - DNA, 60 bp, Artificial
  Synthetic oligonucleotide
catcgcacctgagaggcttgaagaaacctggcaacttagagcatatgttgttatgggatg

SEQ ID NO: 108282 - DNA, 60 bp, Artificial
  Synthetic oligonucleotide
gcggcagagttacacctcccagctgtttgtgcgtcagattacctccggtggttagagatt

SEQ ID NO: 108283 - DNA, 60 bp, Artificial
  Synthetic oligonucleotide
cctcccagctgtttgtgcgtcagattacctccggtggttagagattctgcgctagtccgg

SEQ ID NO: 108284 - DNA, 60 bp, Artificial
  Synthetic oligonucleotide
gatgatatcgcagtataaagctgaagtggtggaatggagagaagataaagcaaatgagcc

SEQ ID NO: 108285 - DNA, 60 bp, Artificial
  Synthetic oligonucleotide
cgcagtataaagctgaagtggtggaatggagagaagataaagcaaatgagccatggcatc

SEQ ID NO: 108286 - DNA, 60 bp, Artificial
  Synthetic oligonucleotide
caaatgagccatggcatcaagtcgaagatgtgcgcgcagcgttaattttagcggcagagt

SEQ ID NO: 108287 - DNA, 60 bp, Artificial
  Synthetic oligonucleotide
gcatcaagtcgaagatgtgcgcgcagcgttaattttagcggcagagttacacctcccagc

SEQ ID NO: 108288 - DNA, 60 bp, Artificial
  Synthetic oligonucleotide
tgttgatttcacttatcagcggagcttactgctttgatctgtattggtggattaagatga

SEQ ID NO: 108289 - DNA, 60 bp, Artificial
  Synthetic oligonucleotide
tcagcggagcttactgctttgatctgtattggtggattaagatgattagagattggtctg

SEQ ID NO: 108290 - DNA, 60 bp, Artificial
  Synthetic oligonucleotide
attaagatgattagagattggtctgttcttcctgagactgataagttaatgatgatatcg

SEQ ID NO: 108291 - DNA, 60 bp, Artificial
  Synthetic oligonucleotide
gagattggtctgttcttcctgagactgataagttaatgatgatatcgcagtataaagctg

SEQ ID NO: 108292 - DNA, 52 bp, Artificial
  Synthetic oligonucleotide
ggcgctctgggaaaagacggttataaactcagttatgatccggcttgggctt

SEQ ID NO: 108293 - DNA, 60 bp, Artificial
  Synthetic oligonucleotide
ccaactgatgaaaagttagtgtgcttgctggattatatgacctatagtgcagatgtagtc

SEQ ID NO: 108294 - DNA, 60 bp, Artificial
  Synthetic oligonucleotide
gttacgaaacagatattcaacgtgttcaccagtctaattgtacctcaaccaaatgctccg

SEQ ID NO: 108295 - DNA, 60 bp, Artificial
  Synthetic oligonucleotide
tcacctcctgctctaggaataccttctcaaattgatacaccttatagtagtgaccatcca

SEQ ID NO: 108296 - DNA, 60 bp, Artificial
  Synthetic oligonucleotide
caatgtgtaatagggactggttgtcacttgcgtgtctgaaacttcgaattccagttacga

SEQ ID NO: 108297 - DNA, 60 bp, Artificial
  Synthetic oligonucleotide
aacttcgaattccagttacgaaacagatattcaacgtgttcaccagtctaattgtacctc

SEQ ID NO: 108298 - DNA, 60 bp, Artificial
  Synthetic oligonucleotide
gaaatttgttagagtacttgcacattacccaaagagatggtcttgagcatagaagtggtc

SEQ ID NO: 108299 - DNA, 60 bp, Artificial
  Synthetic oligonucleotide
gtacttgcacattacccaaagagatggtcttgagcatagaagtggtctacctcgtgttga

SEQ ID NO: 108300 - DNA, 60 bp, Artificial
  Synthetic oligonucleotide
tggatcgcagtcacataccattaggtcgtgtaataacagttcaacatgcagattgctgca

SEQ ID NO: 108301 - DNA, 60 bp, Artificial
  Synthetic oligonucleotide
gcagaaatggaccgtgcggcagttaaggggattaggcttcattttctgtgcgcgtcgtgg

SEQ ID NO: 108302 - DNA, 60 bp, Artificial
  Synthetic oligonucleotide
cgcgtcgtggacaaactatactcactctaagtggaccagcacccattgacattgtttttc

SEQ ID NO: 108303 - DNA, 60 bp, Artificial
  Synthetic oligonucleotide
agaagtggtctacctcgtgttgatttattttacttaacaaataattgcaacaggaaccga

SEQ ID NO: 108304 - DNA, 60 bp, Artificial
  Synthetic oligonucleotide
attggcgtggatagagtccatttacgaaggaagttcggaaatatactaagagattgggct

SEQ ID NO: 108305 - DNA, 60 bp, Artificial
  Synthetic oligonucleotide
agattgggctttcaaattcgcaattgaatttcacgggagcgaagctgaaacggttatgat

SEQ ID NO: 108306 - DNA, 60 bp, Artificial
  Synthetic oligonucleotide
attcgcaattgaatttcacgggagcgaagctgaaacggttatgatggcagatccacgaag

SEQ ID NO: 108307 - DNA, 60 bp, Artificial
  Synthetic oligonucleotide
cggttatgatggcagatccacgaagacatactgtatatggcaaacctacctcacctcctg

SEQ ID NO: 108308 - DNA, 60 bp, Artificial
  Synthetic oligonucleotide
aacgcatggttctggatggaaatggatttgtcctattcttgatgtggaaaggcgctctgg

SEQ ID NO: 108309 - DNA, 60 bp, Artificial
  Synthetic oligonucleotide
cggtttggataggtaatgctgtacacacaggatatgatgattttgtatattcacctcaga

SEQ ID NO: 108310 - DNA, 60 bp, Artificial
  Synthetic oligonucleotide
ctcctgctctaggaataccttctcaaattgatacaccttatagtagtgaccatccaactg

SEQ ID NO: 108311 - DNA, 60 bp, Artificial
  Synthetic oligonucleotide
ggaatgtacaatacagatatttactgtcaagggacactgcagaaatggaccgtgcggcag

SEQ ID NO: 108312 - DNA, 60 bp, Artificial
  Synthetic oligonucleotide
tggaaagcaattggaatgtacaatacagatatttactgtcaagggacactgcagaaatgg

SEQ ID NO: 108313 - DNA, 60 bp, Artificial
  Synthetic oligonucleotide
cacgcagtaatctatctcgcacgaggatttgagccacagcttgccgatgtatttctgccg

SEQ ID NO: 108314 - DNA, 60 bp, Artificial
  Synthetic oligonucleotide
ctgccgattctacaaataacgggaaaggaagatttgaattcattatggaaagcaattgga

SEQ ID NO: 108315 - DNA, 60 bp, Artificial
  Synthetic oligonucleotide
tatttctgccgattctacaaataacgggaaaggaagatttgaattcattatggaaagcaa

SEQ ID NO: 108316 - DNA, 60 bp, Artificial
  Synthetic oligonucleotide
acattcggcgagtgacttaaccacattatttgagataatgaatttgtcatcaagcgtcgc

SEQ ID NO: 108317 - DNA, 60 bp, Artificial
  Synthetic oligonucleotide
gcagcgtgttgcccgatttaacacacacttgcctaagatgcggatggttaaaagattgat

SEQ ID NO: 108318 - DNA, 60 bp, Artificial
  Synthetic oligonucleotide
ccatcaacctctcaattttagttccgcagctcatagtgacattacctttgaatgagtatt

SEQ ID NO: 108319 - DNA, 60 bp, Artificial
  Synthetic oligonucleotide
ggtttctcgcatgagctggcgcaaatcatttttatgatgaaatcgtcgattatcgggcat

SEQ ID NO: 108320 - DNA, 60 bp, Artificial
  Synthetic oligonucleotide
tttcttacagaagagtgttttagggaatagagagagtccgagagcacgaatgtcatacgt

SEQ ID NO: 108321 - DNA, 60 bp, Artificial
  Synthetic oligonucleotide
cttgtcgaaagaatttttcttacagaagagtgttttagggaatagagagagtccgagagc

SEQ ID NO: 108322 - DNA, 60 bp, Artificial
  Synthetic oligonucleotide
accgaacgcgttcgcttcgatgccatgaaactctcgaagaggggtatatgtggtgatgaa

SEQ ID NO: 108323 - DNA, 60 bp, Artificial
  Synthetic oligonucleotide
caagcgtcgctcagaggctatcagagtacatcacgaccgaacgcgttcgcttcgatgcca

SEQ ID NO: 108324 - DNA, 60 bp, Artificial
  Synthetic oligonucleotide
taatgaatttgtcatcaagcgtcgctcagaggctatcagagtacatcacgaccgaacgcg

SEQ ID NO: 108325 - DNA, 60 bp, Artificial
  Synthetic oligonucleotide
gaaacagaaaggttgtccgcgagattggttcagaaccagtttgtctgattagaactagca

SEQ ID NO: 108326 - DNA, 60 bp, Artificial
  Synthetic oligonucleotide
atagagtttggatatggagagggtcgcgtaatgaatacattatggaatggaaagaggcga

SEQ ID NO: 108327 - DNA, 60 bp, Artificial
  Synthetic oligonucleotide
tcaggaacgggatgctagatggtatacgagaagcgatgcgcagatatcaacatctgagat

SEQ ID NO: 108328 - DNA, 58 bp, Artificial
  Synthetic oligonucleotide
tacggatggaagcgacctagcgctgattaacactcatttatccggggagaactccacg

SEQ ID NO: 108329 - DNA, 60 bp, Artificial
  Synthetic oligonucleotide
ggagagggtcgcgtaatgaatacattatggaatggaaagaggcgagtgtttaaagtggcg

SEQ ID NO: 108330 - DNA, 57 bp, Artificial
  Synthetic oligonucleotide
cactgaattgagaacgcggtcagttgagcggttcgattcaatcgtggatacgatttt

SEQ ID NO: 108331 - DNA, 60 bp, Artificial
  Synthetic oligonucleotide
ctgggtacctgagatctcaagttcaaacgttgacaacaaaaattagtcgtggtttctcgc

SEQ ID NO: 108332 - DNA, 57 bp, Artificial
  Synthetic oligonucleotide
tagctcccttttcggtcgagaaaacacagacgcacgctaagcagggaatatatattc

SEQ ID NO: 108333 - DNA, 60 bp, Artificial
  Synthetic oligonucleotide
ctgaatttttccaaacgaagggttcgagagatgttccgattaagtcgacgagaatagtgt

SEQ ID NO: 108334 - DNA, 60 bp, Artificial
  Synthetic oligonucleotide
ttcaaattacgtcgcggattaaagcgttagtcatttttacaaaaggtcatgaaatattta

SEQ ID NO: 108335 - DNA, 60 bp, Artificial
  Synthetic oligonucleotide
tgtaatgcctgaagatatgtatacatcgattttacgtctcgctaaaaatacaagctcggg

SEQ ID NO: 108336 - DNA, 56 bp, Artificial
  Synthetic oligonucleotide
tgatttggaagcgcagatgaaaccaagtagtgacaactatgtacagcgcgtatgcg

SEQ ID NO: 108337 - DNA, 60 bp, Artificial
  Synthetic oligonucleotide
gagcgatggtcatcaccgtgcaaggtgcagatctagtcaggagggctttaaatcgattat

SEQ ID NO: 108338 - DNA, 60 bp, Artificial
  Synthetic oligonucleotide
gcgattacgtattcgcaaaaacttggcaatcatgggagaacgatgcccattttcctgaaa

SEQ ID NO: 108339 - DNA, 60 bp, Artificial
  Synthetic oligonucleotide
cgaaattttatagagaaagcttgaaacaaaatatgacgaaaacggaagaggcgattacgt

SEQ ID NO: 108340 - DNA, 60 bp, Artificial
  Synthetic oligonucleotide
agaatagtgtattccatcaacctctcaattttagttccgcagctcatagtgacattacct

SEQ ID NO: 108341 - DNA, 60 bp, Artificial
  Synthetic oligonucleotide
gggctttaaatcgattatttaagtatgggaggatagatggaactaagatgtattatgaat

SEQ ID NO: 108342 - DNA, 60 bp, Artificial
  Synthetic oligonucleotide
caatgtcattggatgtttgcacacaaacgatggtagatagatatatacgtgcgccgacgc

SEQ ID NO: 108343 - DNA, 60 bp, Artificial
  Synthetic oligonucleotide
gtgcgccgacgcagttcactaagacggagcttgatgccgtaaacctatatgttgcccaac

SEQ ID NO: 108344 - DNA, 60 bp, Artificial
  Synthetic oligonucleotide
tccacttaacttaactatcgcgattgactacagcgaatttgatacgcatttaacacctta

SEQ ID NO: 108345 - DNA, 60 bp, Artificial
  Synthetic oligonucleotide
gacgccatcacgatatgatattaatgtgtctggagacgaaagggtgcgatttaagcagcg

SEQ ID NO: 108346 - DNA, 60 bp, Artificial
  Synthetic oligonucleotide
cgatatgatattaatgtgtctggagacgaaagggtgcgatttaagcagcgtgttgcccga

SEQ ID NO: 108347 - DNA, 63 bp, Artificial
  Synthetic oligonucleotide
cgagatggaaattactacaaattatatgaagatgtttaacgttggtaaaattccactgcacgg

SEQ ID NO: 108348 - DNA, 60 bp, Artificial
  Synthetic oligonucleotide
cattacttaccccagcgtatgagatggagtatcaaaaagagttgcaaggttggagaccaa

SEQ ID NO: 108349 - DNA, 60 bp, Artificial
  Synthetic oligonucleotide
gaacccttagttaagttgattgatcaatctcctcccttgtggaacgaaacgagcgcggat

SEQ ID NO: 108350 - DNA, 60 bp, Artificial
  Synthetic oligonucleotide
gaatggcaaggccagcggtacgaacggtattaaccaactctgaggtgggagatgccgtaa

SEQ ID NO: 108351 - DNA, 60 bp, Artificial
  Synthetic oligonucleotide
aagatatgttcgtagactcagtgatgagaggggaatgtagagcgtggatggaacccttag

SEQ ID NO: 108352 - DNA, 60 bp, Artificial
  Synthetic oligonucleotide
cgggcataggaaactaaagaggacaattaaggatggaggatatagagatagaaaatacga

SEQ ID NO: 108353 - DNA, 60 bp, Artificial
  Synthetic oligonucleotide
gcgagatccgcttattgctttttatcccgttgaatggaacggctttggagcgcacccggc

SEQ ID NO: 108354 - DNA, 60 bp, Artificial
  Synthetic oligonucleotide
gctgaaggatttcgttgaaatgagagcgaaaaatgaaatgcagatttttggtgatatgcc

SEQ ID NO: 108355 - DNA, 60 bp, Artificial
  Synthetic oligonucleotide
caggatcgcgtgtgatggacgcagctgatacatttaggaattcttcagatccacttaact

SEQ ID NO: 108356 - DNA, 60 bp, Artificial
  Synthetic oligonucleotide
gcgagagggatgcggggaggttgaagctttatgatctacaagtgatacgggaagcgtctt

SEQ ID NO: 108357 - DNA, 60 bp, Artificial
  Synthetic oligonucleotide
ttcggattttgtcggaagatttggttcgccttttgaacagaattttagagatttgtcaca

SEQ ID NO: 108358 - DNA, 65 bp, Artificial
  Synthetic oligonucleotide
caagtccattattatttgagatgtgtgtaactgagtcaattttggaatttaatatgtggtaccgg

SEQ ID NO: 108359 - DNA, 60 bp, Artificial
  Synthetic oligonucleotide
atggaaatctcgcgcgaaacaaagcataaacctcttgggttaatggtagcttcggatttt

SEQ ID NO: 108360 - DNA, 60 bp, Artificial
  Synthetic oligonucleotide
gtccgagagcacgaatgtcatacgtcgatagaattgactcaatactacgtggcgatgtcg

SEQ ID NO: 108361 - DNA, 60 bp, Artificial
  Synthetic oligonucleotide
tactggttaccatgaaacagagaacctatactcagagattgtcctgaaatcgaaatttta

SEQ ID NO: 108362 - DNA, 60 bp, Artificial
  Synthetic oligonucleotide
ctgaaactcaacgtatgggtggaaaaattatcgttggagatttggaggctacaggatcgc

SEQ ID NO: 108363 - DNA, 60 bp, Artificial
  Synthetic oligonucleotide
taacaccttataatttcaggaacgggatgctagatggtatacgagaagcgatgcgcagat

SEQ ID NO: 108364 - DNA, 60 bp, Artificial
  Synthetic oligonucleotide
gttgcccaacatattatgttagatgcagcgactggattgacgccatcacgatatgatatt

SEQ ID NO: 108365 - DNA, 60 bp, Artificial
  Synthetic oligonucleotide
gacattacctttgaatgagtattttgcaagggcgggaggaagtactttacctgaaactca

SEQ ID NO: 108366 - DNA, 60 bp, Artificial
  Synthetic oligonucleotide
ctgctgccactttaacacagagtagagatttgcttatcaatagaattgtaggatgtctac

SEQ ID NO: 108367 - DNA, 60 bp, Artificial
  Synthetic oligonucleotide
tccaacgacaatgcccccaacagaaagaatgatgcgagtgaatttggaagaaatggtggc

SEQ ID NO: 108368 - DNA, 55 bp, Artificial
  Synthetic oligonucleotide
ccccaacagaaagaatgatgcgagtgaatttggaagaaatggtggcaagtgtttt

SEQ ID NO: 108369 - DNA, 60 bp, Artificial
  Synthetic oligonucleotide
aaatggtggcaagtgttttttacattatgttgactacccgaatcaaaattgtggcacgca

SEQ ID NO: 108370 - DNA, 60 bp, Artificial
  Synthetic oligonucleotide
taattaaaatctgctgccactttaacacagagtagagatttgcttatcaatagaattgta

SEQ ID NO: 108371 - DNA, 60 bp, Artificial
  Synthetic oligonucleotide
atccacaactgtattgggattataatttgggattaatgaaatatgacgctaccctgcaac

SEQ ID NO: 108372 - DNA, 60 bp, Artificial
  Synthetic oligonucleotide
gggattataatttgggattaatgaaatatgacgctaccctgcaactagacatgtccgaac

SEQ ID NO: 108373 - DNA, 60 bp, Artificial
  Synthetic oligonucleotide
caaacacttgtacgattagaaattgcaaaaaattatgaccaagggaaaacgtaacagttc

SEQ ID NO: 108374 - DNA, 60 bp, Artificial
  Synthetic oligonucleotide
gtaacagttctacagggtggtggcccagatgtacttgacataacagctgatccaacgaca

SEQ ID NO: 108375 - DNA, 60 bp, Artificial
  Synthetic oligonucleotide
ttgaaaaataagtcttccgtcataaccggaaacttcgagtcctctggaccaactaatgct

SEQ ID NO: 108376 - DNA, 60 bp, Artificial
  Synthetic oligonucleotide
ttgcggcgacctctgactttgtacctgaaaaaacaaagtctgaagggaatttgaaaaata

SEQ ID NO: 108377 - DNA, 60 bp, Artificial
  Synthetic oligonucleotide
cgtccaaaggacgaggatcaagcacacccgatgctagacatactgccacagactctcgac

SEQ ID NO: 108378 - DNA, 60 bp, Artificial
  Synthetic oligonucleotide
ttgaaaaataagtcttccgtcataaccggaaactttgggtcctctggaccaactaatgct

SEQ ID NO: 108379 - DNA, 60 bp, Artificial
  Synthetic oligonucleotide
ggtaaattgagcagtatttcaacattgttgttggagttataatgttcaagagcgggtccg

SEQ ID NO: 108380 - DNA, 60 bp, Artificial
  Synthetic oligonucleotide
ggtaaattgagcagtatttcaacattgttgttggagttataatgttcaagagtgggtccg

SEQ ID NO: 108381 - DNA, 56 bp, Artificial
  Synthetic oligonucleotide
actctcgactcagtcaagaagtcaagcagccgttttccgaagaaaatgctggcggc

SEQ ID NO: 108382 - DNA, 60 bp, Artificial
  Synthetic oligonucleotide
gacatactgccacagactctcgactcagtcaagaagtcaagcagccgttttccgaggaaa

SEQ ID NO: 108383 - DNA, 56 bp, Artificial
  Synthetic oligonucleotide
actctcgactcagtcaagaagtcaagcagccgttttccgaggaaaatgctggcggc

SEQ ID NO: 108384 - DNA, 60 bp, Artificial
  Synthetic oligonucleotide
actctcgactcagtcaagaagtcaagcagccgttttccgaggaaaatgctagcggcaacg

SEQ ID NO: 108385 - DNA, 60 bp, Artificial
  Synthetic oligonucleotide
gtatttcaacattgttgttggagttataatgttcaagagcgggtccggttctttgaagcg

SEQ ID NO: 108386 - DNA, 60 bp, Artificial
  Synthetic oligonucleotide
gtatttcaacattgttgttggagttataatgttcaagagtgggtccggttctttgaagcg

SEQ ID NO: 108387 - DNA, 60 bp, Artificial
  Synthetic oligonucleotide
gctagacatactgccacagactctcgactcagtcaagaagtcaagcagccgttttccgag

SEQ ID NO: 108388 - DNA, 60 bp, Artificial
  Synthetic oligonucleotide
gctagacatactgccacagactctcgactcagtcaagaagtcaagcagccgttttccgaa

SEQ ID NO: 108389 - DNA, 60 bp, Artificial
  Synthetic oligonucleotide
ggtgatatccagcctggtagtaatgaacccacgctggggactcagttatatctcttcggg

SEQ ID NO: 108390 - DNA, 60 bp, Artificial
  Synthetic oligonucleotide
tatccagcctgggagtaatgaacccacgctggggactcagttatatctcttcgggagtga

SEQ ID NO: 108391 - DNA, 60 bp, Artificial
  Synthetic oligonucleotide
tctcttgaacgttgatatccagcctgggagtaatgaacccacgctggggactcagttata

SEQ ID NO: 108392 - DNA, 60 bp, Artificial
  Synthetic oligonucleotide
tctcttgaacggtgatatccagcctggtagtaatgaacccacgctggggactcagttata

SEQ ID NO: 108393 - DNA, 60 bp, Artificial
  Synthetic oligonucleotide
ggttatgagtagatatcaagaagtcatgaccttacgggtacgaagtgccatttatggcat

SEQ ID NO: 108394 - DNA, 50 bp, Artificial
  Synthetic oligonucleotide
cacgacgggtgtatttacatcgggagtagctcacgatctgcgtaaactta

SEQ ID NO: 108395 - DNA, 60 bp, Artificial
  Synthetic oligonucleotide
tggtggtggcgatcttggtctactagttatgagtagatatcaagaagtcatgaccttacg

SEQ ID NO: 108396 - DNA, 60 bp, Artificial
  Synthetic oligonucleotide
tggttgtggcgacctcgatctactggttatgagtagatatcaagaagtcatgaccttacg

SEQ ID NO: 108397 - DNA, 60 bp, Artificial
  Synthetic oligonucleotide
taatgaacccacgctggggactcagttatatctcttcgggagtgatataccgagtactgc

SEQ ID NO: 108398 - DNA, 51 bp, Artificial
  Synthetic oligonucleotide
ctcagttatatctcttcgggagtgatataccgagtactgctcataactgat

SEQ ID NO: 108399 - DNA, 60 bp, Artificial
  Synthetic oligonucleotide
tgacccattaaactcagatccttttctcaagatggttagcgttggaccaatgcttcagag

SEQ ID NO: 108400 - DNA, 60 bp, Artificial
  Synthetic oligonucleotide
acccattaaactcagatccttttctcaagatggtaagcgttggaccaatgctccagagta

SEQ ID NO: 108401 - DNA, 60 bp, Artificial
  Synthetic oligonucleotide
cccattaaactcagatccttttctcaagatggttagcgttggaccaatgcttcagagtac

SEQ ID NO: 108402 - DNA, 60 bp, Artificial
  Synthetic oligonucleotide
cccattaaactcagatccttttctcaagatggtcagcgttggaccaatgctccagagtac

SEQ ID NO: 108403 - DNA, 60 bp, Artificial
  Synthetic oligonucleotide
acggtgcgtatattgtgaagcatacaattaaattgaaacaggagaaatggttgggtaaaa

SEQ ID NO: 108404 - DNA, 60 bp, Artificial
  Synthetic oligonucleotide
cggtgcgtatattgtgaagcatacaattaaattgaaacaggagaaatggttgggtaaaag

SEQ ID NO: 108405 - DNA, 60 bp, Artificial
  Synthetic oligonucleotide
tgaatctatgttcacattcctaaattttccaactattaagcaattttcaaacggtgcgta

SEQ ID NO: 108406 - DNA, 66 bp, Artificial
  Synthetic oligonucleotide
gttcacattcctaaattttccaactattaagcaattttcaaacggtgcgtatattgtgaagcatac

SEQ ID NO: 108407 - DNA, 60 bp, Artificial
  Synthetic oligonucleotide
tgatataataattgaatatatatactccaatgagttagactttcaaaattttctattgcg

SEQ ID NO: 108408 - DNA, 60 bp, Artificial
  Synthetic oligonucleotide
ttctattgcgaaagattaaagagagaatgaccacatctcttccaattgctagattatcaa

SEQ ID NO: 108409 - DNA, 60 bp, Artificial
  Synthetic oligonucleotide
tcaacattggataactaaaactgatataattgactatctattacctggatggaaattaac

SEQ ID NO: 108410 - DNA, 60 bp, Artificial
  Synthetic oligonucleotide
ggaaattaacgtatgtaggctataatggaaagaatacacgaggtcaatataatttttcat

SEQ ID NO: 108411 - DNA, 60 bp, Artificial
  Synthetic oligonucleotide
gctttaagacacagtgtggctcaggtgtatgcagatactcaaacctatttgcatgatgat

SEQ ID NO: 108412 - DNA, 60 bp, Artificial
  Synthetic oligonucleotide
aatgaagacagagctatttaaaatggaaattagtactagttatacttatatgctatctga

SEQ ID NO: 108413 - DNA, 51 bp, Artificial
  Synthetic oligonucleotide
tgctatctgataatacgtatgtagcaaatgctagtggtgtgttatcaactt

SEQ ID NO: 108414 - DNA, 60 bp, Artificial
  Synthetic oligonucleotide
atgttttatagaaatcatatcacgtttggacaatcacgaatgtttatcccacacattacg

SEQ ID NO: 108415 - DNA, 60 bp, Artificial
  Synthetic oligonucleotide
catatcacgtttggacaatcacgaatgtttatcccacacattacgcttagttttagtaac

SEQ ID NO: 108416 - DNA, 60 bp, Artificial
  Synthetic oligonucleotide
ttatttatatctgataacatgatacatgatgtaatcacagtgctgaagaaaatgaagaca

SEQ ID NO: 108417 - DNA, 60 bp, Artificial
  Synthetic oligonucleotide
gtataccttatgaatacgatgttaagattccacatttgacgctaggagtattatttatat

SEQ ID NO: 108418 - DNA, 60 bp, Artificial
  Synthetic oligonucleotide
agaatggagaaaaatagtagaacaacaaactgttagcaatctaaatattgcatataaata

SEQ ID NO: 108419 - DNA, 60 bp, Artificial
  Synthetic oligonucleotide
aaatgtggttactactatttactattactataatttatactattcaaaacctataatata

SEQ ID NO: 108420 - DNA, 60 bp, Artificial
  Synthetic oligonucleotide
catctactgattatatagtggcattgtatgctttatccaatgacttcaattcaaggcaag

SEQ ID NO: 108421 - DNA, 60 bp, Artificial
  Synthetic oligonucleotide
cttcatcatccaactactgaagttagatcagaattttatgcaatattggatgcatgggat

SEQ ID NO: 108422 - DNA, 64 bp, Artificial
  Synthetic oligonucleotide
ggaactgacaaatatgataaactagaccaatatgcaaatcatatgggtatttctagaagatcgc

SEQ ID NO: 108423 - DNA, 60 bp, Artificial
  Synthetic oligonucleotide
taaatggaactgacaaatatgataaactagaccaatatgcaaatcatatgggtatttcta

SEQ ID NO: 108424 - DNA, 51 bp, Artificial
  Synthetic oligonucleotide
tataaataaagtatataatataacctatgctgacgatcccaattattttat

SEQ ID NO: 108425 - DNA, 60 bp, Artificial
  Synthetic oligonucleotide
ttacaaaatgatttaacggtattgagatacgctaatgaaattgaagggtatataaataaa

SEQ ID NO: 108426 - DNA, 60 bp, Artificial
  Synthetic oligonucleotide
cgctgtgccggcttcaggctccgatcaccgtggcggtttcctctcgacgtactggccgcc

SEQ ID NO: 108427 - DNA, 60 bp, Artificial
  Synthetic oligonucleotide
tcaggctccgatcaccgtggcggtttcctctcgacgtactggccgccggaattggcacca

SEQ ID NO: 108428 - DNA, 60 bp, Artificial
  Synthetic oligonucleotide
tcattctgtggtttcgcatcgagagcgccctccggcatacgattcgcttgattttgaacc

SEQ ID NO: 108429 - DNA, 60 bp, Artificial
  Synthetic oligonucleotide
gcatcgagagcgccctccggcatacgattcgcttgattttgaaccaacagaatacacgcc

SEQ ID NO: 108430 - DNA, 60 bp, Artificial
  Synthetic oligonucleotide
actgcgctcggtctcggttgtctcgcttgcggtatcgtcggtgtcctcgttgtcgctggt

SEQ ID NO: 108431 - DNA, 60 bp, Artificial
  Synthetic oligonucleotide
ggtcccgttcctggaaatcccctccagcatcactgtgcactaaccaacctctcgctttca

SEQ ID NO: 108432 - DNA, 60 bp, Artificial
  Synthetic oligonucleotide
ctcgctttcaatcttcgtgaccttactcggtctgatattcgctgcacttctgatcctcgt

SEQ ID NO: 108433 - DNA, 60 bp, Artificial
  Synthetic oligonucleotide
cgctttcaatcttcgtgaccttactcggtctgatattcgctgcacttctgatcctcgttc

SEQ ID NO: 108434 - DNA, 60 bp, Artificial
  Synthetic oligonucleotide
tggacagtgacctcctcggcccaaacgatggcttctggcccctgctccaccgctgtgccg

SEQ ID NO: 108435 - DNA, 60 bp, Artificial
  Synthetic oligonucleotide
acacgtcggtttacgtgcaacattcgtgttgtgtgtcgacatctacatctgcctccactt

SEQ ID NO: 108436 - DNA, 60 bp, Artificial
  Synthetic oligonucleotide
tgcaacattcgtgttgtgtgtcgacatctacatctgcctccacttccgccactgcgctcg

SEQ ID NO: 108437 - DNA, 60 bp, Artificial
  Synthetic oligonucleotide
gcctccacttccgccactgcgctcggtctcggttgtctcgcttgcggtatcgtcggtgtc

SEQ ID NO: 108438 - DNA, 60 bp, Artificial
  Synthetic oligonucleotide
tccgacccagcctggcctcgtgactccgttatgcaatacgactcaaactggagcccttac

SEQ ID NO: 108439 - DNA, 60 bp, Artificial
  Synthetic oligonucleotide
ccgacccagcctggcctcgtgactccgttatgcaatacgactcaaactggagcccttacc

SEQ ID NO: 108440 - DNA, 60 bp, Artificial
  Synthetic oligonucleotide
ctccggcttacggccgcatgccaccccttcaaattcccaccttcaccggtcctacgccaa

SEQ ID NO: 108441 - DNA, 60 bp, Artificial
  Synthetic oligonucleotide
ccaattgattaaagacccctctgacgacaccctccctcaccactacgccgctacctggac

SEQ ID NO: 108442 - DNA, 60 bp, Artificial
  Synthetic oligonucleotide
tgattaaagacccctctgacgacaccctccctcaccactacgccgctacctggacctgct

SEQ ID NO: 108443 - DNA, 60 bp, Artificial
  Synthetic oligonucleotide
cctacgccaacgtactttgtgtatgacggcaacgtcgaggaagtgtctggccaattgatt

SEQ ID NO: 108444 - DNA, 60 bp, Artificial
  Synthetic oligonucleotide
ggccgcatgccaccccttcaaattcccaccttcaccggtcctacgccaacgtactttgtg

SEQ ID NO: 108445 - DNA, 60 bp, Artificial
  Synthetic oligonucleotide
gttatttgaacccatgccttgccaggatactgtctccctttctatacagcacacgtcggt

SEQ ID NO: 108446 - DNA, 60 bp, Artificial
  Synthetic oligonucleotide
ccatgccttgccaggatactgtctccctttctatacagcacacgtcggtttacgtgcaac

SEQ ID NO: 108447 - DNA, 60 bp, Artificial
  Synthetic oligonucleotide
cgtggcgtatgaacgacacatcactccgcatgccgtgctctccgtgcgtactccggctta

SEQ ID NO: 108448 - DNA, 60 bp, Artificial
  Synthetic oligonucleotide
gccgaccgcaccttatccgacgagcagtacgattggatcgtggcgtatgaacgacacatc

SEQ ID NO: 108449 - DNA, 60 bp, Artificial
  Synthetic oligonucleotide
tctaacatgaacgccgaccgcaccttatccgacgagcagtacgattggatcgtggcgtat

SEQ ID NO: 108450 - DNA, 60 bp, Artificial
  Synthetic oligonucleotide
ccggttcacgcttgtccaccgctagtaccaatcccttcgtctaacatgaacgccgaccgc

SEQ ID NO: 108451 - DNA, 60 bp, Artificial
  Synthetic oligonucleotide
gtacaccagacccggttcacgcttgtccaccgctagtaccaatcccttcgtctaacatga

SEQ ID NO: 108452 - DNA, 60 bp, Artificial
  Synthetic oligonucleotide
tcggcccaaacgatggcttctggcccctgctccaccgctgtgccggcttcaggctccgat

SEQ ID NO: 108453 - DNA, 60 bp, Artificial
  Synthetic oligonucleotide
tgacctcgacgtcatagaccccgcctcatggttcgacggactgctccgctcacccatcta

SEQ ID NO: 108454 - DNA, 60 bp, Artificial
  Synthetic oligonucleotide
gctgacctcgacgtcatagaccccgcctcatggttcgacggactgctccgctcacccatc

SEQ ID NO: 108455 - DNA, 60 bp, Artificial
  Synthetic oligonucleotide
ggattagggtccagttaatggacgatggctgctaagccatgggaagggtcctttttgacc

SEQ ID NO: 108456 - DNA, 55 bp, Artificial
  Synthetic oligonucleotide
ggattagggtccagttaatggacgatggctgctaagccatgggaagggtcctttt

SEQ ID NO: 108457 - DNA, 60 bp, Artificial
  Synthetic oligonucleotide
gcacttgggtggaaataccaccatctgtccggcttaagacctcaacacgtggagtattgc

SEQ ID NO: 108458 - DNA, 60 bp, Artificial
  Synthetic oligonucleotide
gagcccttaccatcgcgtgcccatgaggtatttcccaagcttcatgacactggacagtga

SEQ ID NO: 108459 - DNA, 60 bp, Artificial
  Synthetic oligonucleotide
attgcatgtctgtatggtctctctctttcactcgtgctgacctcgacgtcatagaccccg

SEQ ID NO: 108460 - DNA, 60 bp, Artificial
  Synthetic oligonucleotide
ctcaacacgtggagtattgcatgtctgtatggtctctctctttcactcgtgctgacctcg

SEQ ID NO: 108461 - DNA, 60 bp, Artificial
  Synthetic oligonucleotide
tggcgtatgaacgacacatcactccgcatgccgtgctctccgtgcgtactccggcttacg

SEQ ID NO: 108462 - DNA, 60 bp, Artificial
  Synthetic oligonucleotide
attttgaaccaacagaatacacgcctgaggcgtttcagtagcgcccccgagtacaccaga

SEQ ID NO: 108463 - DNA, 60 bp, Artificial
  Synthetic oligonucleotide
ccatcgcgtgcccatgaggtatttcccaagcttcatgacactggacagtgacctcctcgg

SEQ ID NO: 108464 - DNA, 60 bp, Artificial
  Synthetic oligonucleotide
cctgttacgtgcacttgggtggaaataccaccatctgtccggcttaagacctcaacacgt

SEQ ID NO: 108465 - DNA, 60 bp, Artificial
  Synthetic oligonucleotide
aaagatgaaacatcttgaggtgcatgatgaaaggaagagcgtttcaattatgagtatttt

SEQ ID NO: 108466 - DNA, 60 bp, Artificial
  Synthetic oligonucleotide
gttggtcctgaccatgcaccaaccattactgttaaattaacagctaatggtattgaagtg

SEQ ID NO: 108467 - DNA, 56 bp, Artificial
  Synthetic oligonucleotide
cgttaagggtatgcttcaagagttatgtgttaaacgtggattggaactgcctgttt

SEQ ID NO: 108468 - DNA, 50 bp, Artificial
  Synthetic oligonucleotide
gaactgtcaaacttaaacggaatttttgcggaaagtcattatttcgtatt

SEQ ID NO: 108469 - DNA, 60 bp, Artificial
  Synthetic oligonucleotide
agttactgatgatgttcattttgatccaacattgagtaacctgatgtcaagtggattaac

SEQ ID NO: 108470 - DNA, 60 bp, Artificial
  Synthetic oligonucleotide
cgacgtgtaaacaagatatcatattttgctctgaagtagatgaagttactgatgatgttc

SEQ ID NO: 108471 - DNA, 60 bp, Artificial
  Synthetic oligonucleotide
ttattctcgacgtgtaaacaagatatcatattttgctctgaagtagatgaagttactgat

SEQ ID NO: 108472 - DNA, 60 bp, Artificial
  Synthetic oligonucleotide
tgaggtgcatgatgaaaggaagagcgtttcaattatgagtattttgatggtatcgtttgc

SEQ ID NO: 108473 - DNA, 60 bp, Artificial
  Synthetic oligonucleotide
cacagtaaatcccacgctgcggcggaggtttgtgaaggcggctgagatcactccattcag

SEQ ID NO: 108474 - DNA, 60 bp, Artificial
  Synthetic oligonucleotide
tctagtccggtcaacgatatctggtgccgactctcaagtacgcatagattacgattaggt

SEQ ID NO: 108475 - DNA, 60 bp, Artificial
  Synthetic oligonucleotide
ctagctttagagaatggattcaattgcataacgagaaagaatggtaaaggtttgttattt

SEQ ID NO: 108476 - DNA, 60 bp, Artificial
  Synthetic oligonucleotide
ccacagtaaatcccacgctgcggcggaggtttgtgaaggcggctgagatcactccattca

SEQ ID NO: 108477 - DNA, 56 bp, Artificial
  Synthetic oligonucleotide
caaagaggtcagtatgttatgttacaatcgatgctgtcaaggaagtggttcacccc

SEQ ID NO: 108478 - DNA, 60 bp, Artificial
  Synthetic oligonucleotide
tttgttatttagaagtttgctaaatgatgatttggtagcaaatgaatctttcaaaaatag

SEQ ID NO: 108479 - DNA, 60 bp, Artificial
  Synthetic oligonucleotide
atggtcgttgctgcgattgcaactgccgacaggctcgtcccacagtaaatcccacgctgc

SEQ ID NO: 108480 - DNA, 60 bp, Artificial
  Synthetic oligonucleotide
gttcattttgatccaacattgagtaacctgatgtcaagtggattaacggatcgtagtgct

SEQ ID NO: 108481 - DNA, 60 bp, Artificial
  Synthetic oligonucleotide
caaagaggtcagtatgttatgttacaatcgatgctgtcaaggaagtggttcacccccctc

SEQ ID NO: 108482 - DNA, 60 bp, Artificial
  Synthetic oligonucleotide
gatatctggtgccgactctcaagtacgcatagattacgattaggtcatggtcgttgctgc

SEQ ID NO: 108483 - DNA, 60 bp, Artificial
  Synthetic oligonucleotide
acgattaggtcatggtcgttgctgcgattgcaactgccgacaggctcgtcccacagtaaa

SEQ ID NO: 108484 - DNA, 60 bp, Artificial
  Synthetic oligonucleotide
ttgttcaatacacatacgaaattgcgcgacttcaggcaaacatgggacagttccgcgcgg

SEQ ID NO: 108485 - DNA, 60 bp, Artificial
  Synthetic oligonucleotide
gagatgtcacaggtgggtgatgttatcacggaagatgaaccggagaagttctattcgacg

SEQ ID NO: 108486 - DNA, 60 bp, Artificial
  Synthetic oligonucleotide
atcacgcttacccaacgaatcacaacgaccgggccctttgcgatattgactggatcaacg

SEQ ID NO: 108487 - DNA, 60 bp, Artificial
  Synthetic oligonucleotide
atcacgctcactcaacgaatcacaacgactgggccctttgcgatattgactggatcaacg

SEQ ID NO: 108488 - DNA, 60 bp, Artificial
  Synthetic oligonucleotide
cccaacgaatcacaacgaccgggccctttgcgatattgactggatcaacgccaaccgcac

SEQ ID NO: 108489 - DNA, 60 bp, Artificial
  Synthetic oligonucleotide
cgaatcacaacgactgggccctttgcgatattgactggatcaacgccaaccgcacagcag

SEQ ID NO: 108490 - DNA, 59 bp, Artificial
  Synthetic oligonucleotide
ctcggaggcagcgtattttcgcagtatgttacctttccatatggtaagattcgctagaa

SEQ ID NO: 108491 - DNA, 60 bp, Artificial
  Synthetic oligonucleotide
tgtcgttttagatgtaagttggatttcgctttggtttgcctttaatcggtcgtttgagcc

SEQ ID NO: 108492 - DNA, 60 bp, Artificial
  Synthetic oligonucleotide
gttgttcaatacacatacgaaattgcgcgactacaggcaaatatgggacagtttcgcgcg

SEQ ID NO: 108493 - DNA, 60 bp, Artificial
  Synthetic oligonucleotide
ggatatttcccttccagtgcagaagatcaaattaaccggaaccgaacatctcggccgagc

SEQ ID NO: 108494 - DNA, 60 bp, Artificial
  Synthetic oligonucleotide
ggagagcatgtggatatttcccttccagtgcagaagatcaaattaaccggaaccgaacat

SEQ ID NO: 108495 - DNA, 60 bp, Artificial
  Synthetic oligonucleotide
tggctgtgatcgagagacattttatcacattgacgtccgaacctcagagatggtaggctg

SEQ ID NO: 108496 - DNA, 60 bp, Artificial
  Synthetic oligonucleotide
gtgcttcctgaaaaatggctgtgatcgagagacattttatcacattgacgtccgaacctc

SEQ ID NO: 108497 - DNA, 60 bp, Artificial
  Synthetic oligonucleotide
gaacctcagagatggtaggctgcagtacagtcactcaagtgatgattggagagcatgtgg

SEQ ID NO: 108498 - DNA, 60 bp, Artificial
  Synthetic oligonucleotide
tccgaacctcagagatggtaggctgcagtacagtcactcaagtgatgattggagagcatg

SEQ ID NO: 108499 - DNA, 60 bp, Artificial
  Synthetic oligonucleotide
ccgatgatcttagtaagaattgcagtaaaggagccagcaaactttgagtatgtgagaggg

SEQ ID NO: 108500 - DNA, 60 bp, Artificial
  Synthetic oligonucleotide
gatgctcagaagatgggaaggaaatggcagaccacagacacttgtgcaaatgcggcatac

SEQ ID NO: 108501 - DNA, 60 bp, Artificial
  Synthetic oligonucleotide
ctttgagtatgtgagagggttcatgcaaggtcgacataagtgtcaactgtgcttcctgaa

SEQ ID NO: 108502 - DNA, 60 bp, Artificial
  Synthetic oligonucleotide
aactttgagtatgtgagagggttcatgcaaggtcgacataagtgtcaactgtgcttcctg

SEQ ID NO: 108503 - DNA, 60 bp, Artificial
  Synthetic oligonucleotide
ctacagggatggaggcgttaattcgtactgcaatacaaattcataggtggataagaggga

SEQ ID NO: 108504 - DNA, 60 bp, Artificial
  Synthetic oligonucleotide
gcctagaatggagatgtgccggcaagtgaaggaagcggtgggatcttgcagcttcacagg

SEQ ID NO: 108505 - DNA, 60 bp, Artificial
  Synthetic oligonucleotide
tctgctagcgagagtgctactacgctgggaactatcaacgcaagcacgctccatcatgtt

SEQ ID NO: 108506 - DNA, 60 bp, Artificial
  Synthetic oligonucleotide
gctagcgagagtgctactacgctgggaactatcaacgcaagcacgctccatcatgttcag

SEQ ID NO: 108507 - DNA, 60 bp, Artificial
  Synthetic oligonucleotide
ccagatgcagtagatgattgggttgctccagatatttacccaatgagaaggcctagaatg

SEQ ID NO: 108508 - DNA, 60 bp, Artificial
  Synthetic oligonucleotide
aaccgaacatctcggccgagcaagtgatcattattttaaatataacgctactacagggat

SEQ ID NO: 108509 - DNA, 60 bp, Artificial
  Synthetic oligonucleotide
catctcggccgagcaagtgatcattattttaaatataacgctactacagggatggaggcg

SEQ ID NO: 108510 - DNA, 60 bp, Artificial
  Synthetic oligonucleotide
gcttcacaggctttagtggcccggtgttccaaatcatgtttttcccaatgcaaatgttac

SEQ ID NO: 108511 - DNA, 60 bp, Artificial
  Synthetic oligonucleotide
atacgcccaaatggctgtgcagcaatatttacgagtcggttacatcgaggagagacgtta

SEQ ID NO: 108512 - DNA, 60 bp, Artificial
  Synthetic oligonucleotide
gagacgttatgttacacagctatttggggaatgcccagcaggtgagtttccaatgcatca

SEQ ID NO: 108513 - DNA, 60 bp, Artificial
  Synthetic oligonucleotide
ccaatgcatcatatgatgctcagaagatgggaaggaaatggcagaccacagacacttgtg

SEQ ID NO: 108514 - DNA, 60 bp, Artificial
  Synthetic oligonucleotide
aaggatggaacaatacctgactggaaagatctaggcacgttcctagacataattctgaat

SEQ ID NO: 108515 - DNA, 60 bp, Artificial
  Synthetic oligonucleotide
ataagagggactggtatttgggaaaatgatgaatggcaggagggaatctatctgctagcg

SEQ ID NO: 108516 - DNA, 60 bp, Artificial
  Synthetic oligonucleotide
ggactggtatttgggaaaatgatgaatggcaggagggaatctatctgctagcgagagtgc

SEQ ID NO: 108517 - DNA, 60 bp, Artificial
  Synthetic oligonucleotide
atgtgccggcaagtgaaggaagcggtgggatcttgcagcttcacaggctttagtggcccg

SEQ ID NO: 108518 - DNA, 60 bp, Artificial
  Synthetic oligonucleotide
ctattttgcttcgtctgctttggatatgcgccaaggaaggatggaacaatacctgactgg

SEQ ID NO: 108519 - DNA, 60 bp, Artificial
  Synthetic oligonucleotide
cgcccaaatggctgtgcagcaatatttacgagtcggttacatcgaggagagacgttatgt

SEQ ID NO: 108520 - DNA, 60 bp, Artificial
  Synthetic oligonucleotide
tatatcgattgggatgatttaggtgaatttcttaatagaatgcttaaagttgaaccgttt

SEQ ID NO: 108521 - DNA, 65 bp, Artificial
  Synthetic oligonucleotide
cgattgggatgatttaggtgaatttcttaatagaatgcttaaagttgaaccgttttctatgtctg

SEQ ID NO: 108522 - DNA, 60 bp, Artificial
  Synthetic oligonucleotide
tgaaccgttttctatgtctgaagatacggattcatatgtgtcagcatttaaattaatgct

SEQ ID NO: 108523 - DNA, 60 bp, Artificial
  Synthetic oligonucleotide
tgttttagaggaggcatttcagactttaccgctaattagtagagaaccaaaaacttatgc

SEQ ID NO: 108524 - DNA, 60 bp, Artificial
  Synthetic oligonucleotide
aaatattcagttttttgtagtttgtagtttaggttaggatcgttcggtgaccagttcaac

SEQ ID NO: 108525 - DNA, 51 bp, Artificial
  Synthetic oligonucleotide
ttttgtagtttgtagtttaggttaggatcgttcggtgaccagttcaacgaa

SEQ ID NO: 108526 - DNA, 58 bp, Artificial
  Synthetic oligonucleotide
ggatttgaaactgttgtgatcattgacacaagattgagtgatctatgtggttgcaatg

SEQ ID NO: 108527 - DNA, 60 bp, Artificial
  Synthetic oligonucleotide
ggatttgaaactgttgtgatcattgacacaagattgagtgatctatgtggttgcaatgaa

SEQ ID NO: 108528 - DNA, 60 bp, Artificial
  Synthetic oligonucleotide
atggcaaggtgaggaaacatcaattggacggagcaggatcttatcaatgaaggattacgc

SEQ ID NO: 108529 - DNA, 60 bp, Artificial
  Synthetic oligonucleotide
gaatggcaaggtgaggaaacatcaattggacggagcaggatcttatcaatgaaggattac

SEQ ID NO: 108530 - DNA, 54 bp, Artificial
  Synthetic oligonucleotide
atcaattgatacgagattgttttcgaggttgatgatgcaacgatttggtttgaa

SEQ ID NO: 108531 - DNA, 64 bp, Artificial
  Synthetic oligonucleotide
gcttttcattaatgcattgcttttatttaccatatactaaggatggaattgtacctgtcacagg

SEQ ID NO: 108532 - DNA, 60 bp, Artificial
  Synthetic oligonucleotide
gatagcttttcattaatgcattgcttttatttaccatatactaaggatggaattgtacct

SEQ ID NO: 108533 - DNA, 51 bp, Artificial
  Synthetic oligonucleotide
cgtaggccaatgcgtacatatacagatgatagcttttcattaatgcattgc

SEQ ID NO: 108534 - DNA, 60 bp, Artificial
  Synthetic oligonucleotide
attttcaaagcttccgcaaaaaacgtaggccaatgcgtacatatacagatgatagctttt

SEQ ID NO: 108535 - DNA, 60 bp, Artificial
  Synthetic oligonucleotide
gatgatatttataggaaatatgtagaggtaggggtaagggctgattttcaaagcttccgc

SEQ ID NO: 108536 - DNA, 56 bp, Artificial
  Synthetic oligonucleotide
ttttggaacgcagagtgaaagtgagggcagatatatcgattgggatgatttaggtg

SEQ ID NO: 108537 - DNA, 60 bp, Artificial
  Synthetic oligonucleotide
ggcttttatgctttgcaatttttggaacgcagagtgaaagtgagggcagatatatcgatt

SEQ ID NO: 108538 - DNA, 60 bp, Artificial
  Synthetic oligonucleotide
gtcactgggtggctcaggaggttccaagtagtttgatggcaacaatgattgtgatggagg

SEQ ID NO: 108539 - DNA, 60 bp, Artificial
  Synthetic oligonucleotide
aggatgggttgtcactgggtggctcaggaggttccaagtagtttgatggcaacaatgatt

SEQ ID NO: 108540 - DNA, 60 bp, Artificial
  Synthetic oligonucleotide
tcctggctcgcaattatcgtcatgatgtggaacagatgccaaggatgcgtgatctgcgac

SEQ ID NO: 108541 - DNA, 60 bp, Artificial
  Synthetic oligonucleotide
ttgcaatgaagttttcctggctcgcaattatcgtcatgatgtggaacagatgccaaggat

SEQ ID NO: 108542 - DNA, 60 bp, Artificial
  Synthetic oligonucleotide
gctgtactggaaacatggttctgctgaacgcactcaattgtttaggcttttatgctttgc

SEQ ID NO: 108543 - DNA, 60 bp, Artificial
  Synthetic oligonucleotide
agttatgctgtactggaaacatggttctgctgaacgcactcaattgtttaggcttttatg

SEQ ID NO: 108544 - DNA, 60 bp, Artificial
  Synthetic oligonucleotide
ggaggaagttcataaaatgattcgtgcagatcagcattgggagacacctgcgtttcgttc

SEQ ID NO: 108545 - DNA, 60 bp, Artificial
  Synthetic oligonucleotide
aacaatgattgtgatggaggaagttcataaaatgattcgtgcagatcagcattgggagac

SEQ ID NO: 108546 - DNA, 60 bp, Artificial
  Synthetic oligonucleotide
gcttcaactgcgcttcatgataaagatagagtatggcttaacctgcttaaatcgcttggc

SEQ ID NO: 108547 - DNA, 60 bp, Artificial
  Synthetic oligonucleotide
cagaatagatgatatttataggaaatatgtagaggtaggggtaagggctgattttcaaag

SEQ ID NO: 108548 - DNA, 60 bp, Artificial
  Synthetic oligonucleotide
ggggaatatgcgcaagacagttcttttcaacttgttgcgagatggctgttgatcatgcgg

SEQ ID NO: 108549 - DNA, 53 bp, Artificial
  Synthetic oligonucleotide
gcgagatggctgttgatcatgcggaatggggcatggctgatcaacttgtaaaa

SEQ ID NO: 108550 - DNA, 60 bp, Artificial
  Synthetic oligonucleotide
gcgagatggctgttgatcatgcggaatggggcatggctgatcaacttgtaaaaattgctt

SEQ ID NO: 108551 - DNA, 60 bp, Artificial
  Synthetic oligonucleotide
aaaattgcttcaactgcgcttcatgataaagatagagtatggcttaacctgcttaaatcg

SEQ ID NO: 108552 - DNA, 60 bp, Artificial
  Synthetic oligonucleotide
ttgttgtttggacagatctcgccagagtggacatgctctcatcaccgtagggattgtttg

SEQ ID NO: 108553 - DNA, 60 bp, Artificial
  Synthetic oligonucleotide
ggacagatctcgccagagtggacatgctctcatcaccgtagggattgtttgatgtgggga

SEQ ID NO: 108554 - DNA, 60 bp, Artificial
  Synthetic oligonucleotide
ggattgtttgatgtggggaatatgcgcaagacagttcttttcaacttgttgcgagatggc

SEQ ID NO: 108555 - DNA, 60 bp, Artificial
  Synthetic oligonucleotide
ggcagcaaatgaaatcgcacgtgttacgggtgaaacttcaacatggggccctgcgcgcca

SEQ ID NO: 108556 - DNA, 56 bp, Artificial
  Synthetic oligonucleotide
ttcaacatggggccctgcgcgccaaccgtatggttttttcttagaaacggaagagg

SEQ ID NO: 108557 - DNA, 60 bp, Artificial
  Synthetic oligonucleotide
ggtttatgcgagctgcacaggcggtaacggccgttgtgtgtggacctgacatgatacaag

SEQ ID NO: 108558 - DNA, 60 bp, Artificial
  Synthetic oligonucleotide
tgttccagggtcgtaatgatcccatgatgatatatctagtttggagaaggattgagaact

SEQ ID NO: 108559 - DNA, 60 bp, Artificial
  Synthetic oligonucleotide
ttaacattgcgtggagttacaatgagacccacatcattagcgcagaggaatgaaatgttt

SEQ ID NO: 108560 - DNA, 60 bp, Artificial
  Synthetic oligonucleotide
taacattgcgtggagttacaatgagacccacatcattagcgcagaggaatgaaatgtttt

SEQ ID NO: 108561 - DNA, 57 bp, Artificial
  Synthetic oligonucleotide
tgaaatgtttttcatgtgcttagatatgatgttgtcagcagcagggattaatgtggg

SEQ ID NO: 108562 - DNA, 60 bp, Artificial
  Synthetic oligonucleotide
ccattcacaactgaggcagcaaatgaaatcgcacgtgttacgggtgaaacttcaacatgg

SEQ ID NO: 108563 - DNA, 60 bp, Artificial
  Synthetic oligonucleotide
ccagggtcgtaatgatcccatgatgatatatctagtttggagaaggattgagaactttgc

SEQ ID NO: 108564 - DNA, 57 bp, Artificial
  Synthetic oligonucleotide
attgagaactttgctatgccccaaggtaattcgcagcaaacgctagctggcgttact

SEQ ID NO: 108565 - DNA, 60 bp, Artificial
  Synthetic oligonucleotide
gatggaaatattgggcattgcaattaacagatataatggattaacattgcgtggagttac

SEQ ID NO: 108566 - DNA, 60 bp, Artificial
  Synthetic oligonucleotide
aagcaaatgtgatggaaatattgggcattgcaattaacagatataatggattaacattgc

SEQ ID NO: 108567 - DNA, 60 bp, Artificial
  Synthetic oligonucleotide
gcgggcatgtgccactttacaagaagcaagaatcgttttggaagcaaatgtgatggaaat

SEQ ID NO: 108568 - DNA, 60 bp, Artificial
  Synthetic oligonucleotide
tactgtaatgcgggcatgtgccactttacaagaagcaagaatcgttttggaagcaaatgt

SEQ ID NO: 108569 - DNA, 60 bp, Artificial
  Synthetic oligonucleotide
gatcgagatagcatcttaaccttacttttactgtctactttagcggatgtgtatactgtt

SEQ ID NO: 108570 - DNA, 60 bp, Artificial
  Synthetic oligonucleotide
gaaccactttaccaaatatgctaccaccaatcttcccaccaaacgatcgagatagcatct

SEQ ID NO: 108571 - DNA, 60 bp, Artificial
  Synthetic oligonucleotide
tgaatagaaccactttaccaaatatgctaccaccaatcttcccaccaaacgatcgagata

SEQ ID NO: 108572 - DNA, 60 bp, Artificial
  Synthetic oligonucleotide
cagggatcacacatggcatggattgagaactgcgattttgaatagaaccactttaccaaa

SEQ ID NO: 108573 - DNA, 60 bp, Artificial
  Synthetic oligonucleotide
cgtgtatagtttcagggatcacacatggcatggattgagaactgcgattttgaatagaac

SEQ ID NO: 108574 - DNA, 60 bp, Artificial
  Synthetic oligonucleotide
aaccaatatccgtctctaacggcagagattttcaacgtgtatagtttcagggatcacaca

SEQ ID NO: 108575 - DNA, 60 bp, Artificial
  Synthetic oligonucleotide
atggacaagaccttaaaccaatatccgtctctaacggcagagattttcaacgtgtatagt

SEQ ID NO: 108576 - DNA, 60 bp, Artificial
  Synthetic oligonucleotide
cgacacagcagaatgcgatggttcaaattcaggtggttttttacatttcgatggacaaga

SEQ ID NO: 108577 - DNA, 60 bp, Artificial
  Synthetic oligonucleotide
gcatcttaaccttacttttactgtctactttagcggatgtgtatactgttcttcgacccg

SEQ ID NO: 108578 - DNA, 60 bp, Artificial
  Synthetic oligonucleotide
atcacctggaatgctgaatcctggaggggtaccatggattgcgattggagatgaaacatc

SEQ ID NO: 108579 - DNA, 60 bp, Artificial
  Synthetic oligonucleotide
gttatgtcactccttttgctatcaatgccgatcttagacatgcttcacaaatgtcttata

SEQ ID NO: 108580 - DNA, 60 bp, Artificial
  Synthetic oligonucleotide
gtttcttgacagatggtgaatgtcattctcttgtggtaagattcactaaacgcaaaccgt

SEQ ID NO: 108581 - DNA, 60 bp, Artificial
  Synthetic oligonucleotide
attcttgctacgattaccctaactctcacatcattaacagaatcttaaacactaaaaagg

SEQ ID NO: 108582 - DNA, 60 bp, Artificial
  Synthetic oligonucleotide
ctaggcaaacgagagtcagaagttagtgaaggaaagccttcctacgttgataaagtcaaa

SEQ ID NO: 108583 - DNA, 60 bp, Artificial
  Synthetic oligonucleotide
ccctggtctagaaactttgtacgttgaacgtgagaaatgggaattactcaatcgtttgta

SEQ ID NO: 108584 - DNA, 60 bp, Artificial
  Synthetic oligonucleotide
gtggctgcgcagaatactttgctggttttatctcagattacctaacctcgattgaagtgc

SEQ ID NO: 108585 - DNA, 60 bp, Artificial
  Synthetic oligonucleotide
tttggatgatctgcttaaaggacattttcctgacatttcaacaggtgacgaatccacgga

SEQ ID NO: 108586 - DNA, 60 bp, Artificial
  Synthetic oligonucleotide
cggttggaatttagtagacctggattcgatgggatcagacgaaaatattggacgcattac

SEQ ID NO: 108587 - DNA, 60 bp, Artificial
  Synthetic oligonucleotide
ctacttaccacaatgatgatcgttcacgaattctccgacctaacgacccgcgactcagta

SEQ ID NO: 108588 - DNA, 60 bp, Artificial
  Synthetic oligonucleotide
atccctgtgcgttgcgactcagaaatatcggacattttgtcttcggcaaacattttagat

SEQ ID NO: 108589 - DNA, 60 bp, Artificial
  Synthetic oligonucleotide
cacaatacgtgattccagaatggcttggagagagcattactttgtatgaagagaagcacg

SEQ ID NO: 108590 - DNA, 56 bp, Artificial
  Synthetic oligonucleotide
gaaacggtacgatccaacacaattactagtcaatctcgaacaaaacttcaaccgtc

SEQ ID NO: 108591 - DNA, 60 bp, Artificial
  Synthetic oligonucleotide
ctgtaatcatggtgaactgtcctcagcaagtcgtgtcggttggaatttagtagacctgga

SEQ ID NO: 108592 - DNA, 60 bp, Artificial
  Synthetic oligonucleotide
cgacgtttcatttaaagtgcacacccgtaagtcttcagaacaacatccctttcgctctag

SEQ ID NO: 108593 - DNA, 60 bp, Artificial
  Synthetic oligonucleotide
aagcaagaatacgagtcactacttaagaaagcacgacgtcaagatgttcttagaatgcca

SEQ ID NO: 108594 - DNA, 60 bp, Artificial
  Synthetic oligonucleotide
gtaaagtttgttggatatttggacggtataagcaaagacgaattagttggtgcttcaggc

SEQ ID NO: 108595 - DNA, 60 bp, Artificial
  Synthetic oligonucleotide
tgtttcgagaatagttctaacaagctagtttcttttatggacggtataatcagcgcgatg

SEQ ID NO: 108596 - DNA, 60 bp, Artificial
  Synthetic oligonucleotide
caacgcttgtagaaaaacacgatgattattcttacaatagaactgacgcttactccattt

SEQ ID NO: 108597 - DNA, 60 bp, Artificial
  Synthetic oligonucleotide
ctcgaccaaaccacatttatgacaaaatttccgcttgtatcgcaaagaaacaaaatggga

SEQ ID NO: 108598 - DNA, 60 bp, Artificial
  Synthetic oligonucleotide
tgcaattgaccctgaacagatagttggatacgaagaacttgaaaattttgcaacgcttgt

SEQ ID NO: 108599 - DNA, 59 bp, Artificial
  Synthetic oligonucleotide
ttcaaaaccaatatctgatatcaatgtgaccaattcaccatcttattccaaccacgtat

SEQ ID NO: 108600 - DNA, 55 bp, Artificial
  Synthetic oligonucleotide
tttaaaatcctcagcggaattaaaacaccaagatgcacggactagacgacgcaca

SEQ ID NO: 108601 - DNA, 60 bp, Artificial
  Synthetic oligonucleotide
ggtgaaggagtcgagcatcagcacggattaattcgctcgaacggtggaaatggaagctac

SEQ ID NO: 108602 - DNA, 60 bp, Artificial
  Synthetic oligonucleotide
tgaacccagacaaacatggtagaattgaatggccaggtgaaggagtcgagcatcagcacg

SEQ ID NO: 108603 - DNA, 60 bp, Artificial
  Synthetic oligonucleotide
agtttcccaattacatgaacccagacaaacatggtagaattgaatggccaggtgaaggag

SEQ ID NO: 108604 - DNA, 57 bp, Artificial
  Synthetic oligonucleotide
agtttaaaatcctcagcggaattaaaacaccaagatgcacggactagacgacgcaca

SEQ ID NO: 108605 - DNA, 60 bp, Artificial
  Synthetic oligonucleotide
ctggcaagggaccgaggtgattgcgggtagcttgaacaggcagttgatgaagtttcccaa

SEQ ID NO: 108606 - DNA, 60 bp, Artificial
  Synthetic oligonucleotide
caccgcgtttcccgacaattggatttgaggtttaccgttacagagtaggagcgaccaacg

SEQ ID NO: 108607 - DNA, 60 bp, Artificial
  Synthetic oligonucleotide
tacagagtaggagcgaccaacgaaatgggtggagagagcgcgcgtaccgcagtagcatca

SEQ ID NO: 108608 - DNA, 60 bp, Artificial
  Synthetic oligonucleotide
cgttgactggaatgcaactcgtctgagattctttggtcccgacggtagccgttggatgcc

SEQ ID NO: 108609 - DNA, 60 bp, Artificial
  Synthetic oligonucleotide
ccgacggtagccgttggatgcctgatgaccagggtggtgcttccgttcgcgccggattat

SEQ ID NO: 108610 - DNA, 60 bp, Artificial
  Synthetic oligonucleotide
ccgttggatgcctgatgaccagggtggtgcttccgttcgcgccggattattaaacgcagc

SEQ ID NO: 108611 - DNA, 60 bp, Artificial
  Synthetic oligonucleotide
gccggattattaaacgcagctgaagacatcattaactcgaagatgcagccattgtacttc

SEQ ID NO: 108612 - DNA, 60 bp, Artificial
  Synthetic oligonucleotide
gcagctgaagacatcattaactcgaagatgcagccattgtacttctgcgatcgtatggcg

SEQ ID NO: 108613 - DNA, 60 bp, Artificial
  Synthetic oligonucleotide
attgtacttctgcgatcgtatggcgggaaaatcgtactacgtacgtttcgacgataaata

SEQ ID NO: 108614 - DNA, 60 bp, Artificial
  Synthetic oligonucleotide
ctgcgatcgtatggcgggaaaatcgtactacgtacgtttcgacgataaatatgcaccgcg

SEQ ID NO: 108615 - DNA, 60 bp, Artificial
  Synthetic oligonucleotide
acgataaatatgcaccgcgtttcccgacaattggatttgaggtttaccgttacagagtag

SEQ ID NO: 108616 - DNA, 60 bp, Artificial
  Synthetic oligonucleotide
tgttcaaggaagcgttgactggaatgcaactcgtctgagattctttggtcccgacggtag

SEQ ID NO: 108617 - DNA, 60 bp, Artificial
  Synthetic oligonucleotide
gcatcagcacggattaattcgctcgaacggtggaaatggaagctacgatatcggagcagg

SEQ ID NO: 108618 - DNA, 60 bp, Artificial
  Synthetic oligonucleotide
cgtcaccgaaaccgggatttaattccgtaacactgtcgcatgttcagaggattgagttgc

SEQ ID NO: 108619 - DNA, 60 bp, Artificial
  Synthetic oligonucleotide
ttgaagtacaccaatggagtggtacaggtatataactggcaagggaccgaggtgattgcg

SEQ ID NO: 108620 - DNA, 60 bp, Artificial
  Synthetic oligonucleotide
aatgtgacagtagtattgaagtacaccaatggagtggtacaggtatataactggcaaggg

SEQ ID NO: 108621 - DNA, 60 bp, Artificial
  Synthetic oligonucleotide
cgcataataagcgtatctcagaattcagaagctccagcaactcaggcataaatgtgacag

SEQ ID NO: 108622 - DNA, 60 bp, Artificial
  Synthetic oligonucleotide
gggtacaccgtttgaggtccgtttggtgcctatggatcgattcgtcaccgaaaccgggat

SEQ ID NO: 108623 - DNA, 60 bp, Artificial
  Synthetic oligonucleotide
agtagcatcactgatttcattcccaacattctcaacagcatacgtgaatgagaaagtggc

SEQ ID NO: 108624 - DNA, 60 bp, Artificial
  Synthetic oligonucleotide
gagtaggagcgaccaacgaaatgggtggagagagcgcgcgtaccgcagtagcatcactga

SEQ ID NO: 108625 - DNA, 60 bp, Artificial
  Synthetic oligonucleotide
agaaagtggccgtagagaacttcttccaaccgcgcgaactggtttaccagaacagctatg

SEQ ID NO: 108626 - DNA, 60 bp, Artificial
  Synthetic oligonucleotide
ctgatttcattcccaacattctcaacagcatacgtgaatgagaaagtggccgtagagaac

SEQ ID NO: 108627 - DNA, 60 bp, Artificial
  Synthetic oligonucleotide
aacagctatgggtacaccgtttgaggtccgtttggtgcctatggatcgattcgtcaccga

SEQ ID NO: 108628 - DNA, 60 bp, Artificial
  Synthetic oligonucleotide
ccgtagagaacttcttccaaccgcgcgaactggtttaccagaacagctatgggtacaccg

SEQ ID NO: 108629 - DNA, 60 bp, Artificial
  Synthetic oligonucleotide
tcgtcaccgaaaccgggatttaattccgtaacactgtcgcatgttcagaggattgagttg

SEQ ID NO: 108630 - DNA, 60 bp, Artificial
  Synthetic oligonucleotide
tcaacacataaccgatgaaaccaataactattcaggaagtgcgtgactcagtaaacaagt

SEQ ID NO: 108631 - DNA, 60 bp, Artificial
  Synthetic oligonucleotide
cggacgatgacaagagtggatttgttaaatcatgatattattactcccattagtgatgat

SEQ ID NO: 108632 - DNA, 60 bp, Artificial
  Synthetic oligonucleotide
atacgctattgataatgctatgtgtttgggacctgttttttggaattcaatccgtgtaaa

SEQ ID NO: 108633 - DNA, 60 bp, Artificial
  Synthetic oligonucleotide
ctatattcaagccttcattgtatttcgctattagtggggacttggatgtggcgttctcat

SEQ ID NO: 108634 - DNA, 60 bp, Artificial
  Synthetic oligonucleotide
ttactagtatgttgagtgcgtcatttgatatcgatagtgctgttgattttggtattagaa

SEQ ID NO: 108635 - DNA, 61 bp, Artificial
  Synthetic oligonucleotide
ctgagttcattgagatgtcaatagataaactaattaatgctaagattcctatactgccagg

SEQ ID NO: 108636 - DNA, 60 bp, Artificial
  Synthetic oligonucleotide
gatgacactgtgattaatgagttcaaccttccacagtcaatgaccgtgttaggtgggtca

SEQ ID NO: 108637 - DNA, 60 bp, Artificial
  Synthetic oligonucleotide
ggccgatgttcggtatagtgacaacacgtttaggacctgatgacactgtgattaatgagt

SEQ ID NO: 108638 - DNA, 60 bp, Artificial
  Synthetic oligonucleotide
atactgccaggttatcatattaactcagattacggtaaattgtatctgtatatgggtcga

SEQ ID NO: 108639 - DNA, 60 bp, Artificial
  Synthetic oligonucleotide
ccgattgttccacatatattgattggagtgctcgaaattcatttggatttacgatcgcgg

SEQ ID NO: 108640 - DNA, 60 bp, Artificial
  Synthetic oligonucleotide
aggtgggtcatgttcgcgtagtcatattaatcatatttttgctacaaataggtatccgat

SEQ ID NO: 108641 - DNA, 50 bp, Artificial
  Synthetic oligonucleotide
aaaattaacaccaatcttgcgcgcttgggcacgagacatgctttttatgt

SEQ ID NO: 108642 - DNA, 60 bp, Artificial
  Synthetic oligonucleotide
aatgagactacgtttacaacccgcaggacaagtagaaaattaacaccaatcttgcgcgct

SEQ ID NO: 108643 - DNA, 60 bp, Artificial
  Synthetic oligonucleotide
cctaagtatagcttttaaaacgctagaatggttaagaagagttactatgttatttaacac

SEQ ID NO: 108644 - DNA, 60 bp, Artificial
  Synthetic oligonucleotide
tatttaacaccttaactaatttcggtatttataataaaacatctttaattttagattaca

SEQ ID NO: 108645 - DNA, 60 bp, Artificial
  Synthetic oligonucleotide
gaattgatgggtaatgatcgttttcttggtattgatgttaaaacatgcgacctaagtata

SEQ ID NO: 108646 - DNA, 60 bp, Artificial
  Synthetic oligonucleotide
tcctgctccagcaaaaaccttaataactaatgacagtagactcacttttacatatcattg

SEQ ID NO: 108647 - DNA, 50 bp, Artificial
  Synthetic oligonucleotide
tggatccaaatttaccagaatcgttacaaaatatttctaacgctagaata

SEQ ID NO: 108648 - DNA, 60 bp, Artificial
  Synthetic oligonucleotide
gattacagaaaatcgacaggaaccaaattcgtgacacctataacacgtcctgctccagca

SEQ ID NO: 108649 - DNA, 60 bp, Artificial
  Synthetic oligonucleotide
caatgcgaagtattatgatacagctaaatttttggaattgttaaatgctgcaggtaagtg

SEQ ID NO: 108650 - DNA, 60 bp, Artificial
  Synthetic oligonucleotide
gggtgcgtcatcaaattgatcgtaggggtcgaataatcgtgatcgtcccaaatgcgatac

SEQ ID NO: 108651 - DNA, 60 bp, Artificial
  Synthetic oligonucleotide
cctattgttaatgatgatgaacgtgttttgataggtcatattactagtatgttgagtgcg

SEQ ID NO: 108652 - DNA, 60 bp, Artificial
  Synthetic oligonucleotide
gttacagacataacattgacgcgtgcccagagatcatacgctattgataatgctatgtgt

SEQ ID NO: 108653 - DNA, 60 bp, Artificial
  Synthetic oligonucleotide
ccttcacatttaagcttgttcaatggaattgcttatacttcgcattacgctggaatattc

SEQ ID NO: 108654 - DNA, 60 bp, Artificial
  Synthetic oligonucleotide
gacgttattaaagttgttacagacataacattgacgcgtgcccagagatcatacgctatt

SEQ ID NO: 108655 - DNA, 60 bp, Artificial
  Synthetic oligonucleotide
tatatatcgataacattagtaattccttattagatcatagtttagtacaaggtcaattag

SEQ ID NO: 108656 - DNA, 60 bp, Artificial
  Synthetic oligonucleotide
tggtactttggcagaattattaggtgatttaaatgataagactgcagaaatatatatcga

SEQ ID NO: 108657 - DNA, 60 bp, Artificial
  Synthetic oligonucleotide
ggctatagttagacactacaatggtttgccattttatggaaaacgaatgtcagaaacatc

SEQ ID NO: 108658 - DNA, 55 bp, Artificial
  Synthetic oligonucleotide
ctaccggatgatgatgaggtaaactgtccgaaaagtctcattaagaaaactgcca

SEQ ID NO: 108659 - DNA, 60 bp, Artificial
  Synthetic oligonucleotide
cttgttcaatggaattgcttatacttcgcattacgctggaatattcctacccttgctgcc

SEQ ID NO: 108660 - DNA, 60 bp, Artificial
  Synthetic oligonucleotide
ttaaaactttgttgagttacgtcatacctaaataatagtgagggagtattaggaaggtcg

SEQ ID NO: 108661 - DNA, 60 bp, Artificial
  Synthetic oligonucleotide
tctcgagaatgtgaaatacggatattacgtgctagattgccaaccgttatttctgcacta

SEQ ID NO: 108662 - DNA, 51 bp, Artificial
  Synthetic oligonucleotide
gacttctaataaagacaaggatgaatttgatgcccaagcgcaaattaagcg

SEQ ID NO: 108663 - DNA, 60 bp, Artificial
  Synthetic oligonucleotide
agaccaaaccaaccaagcatagtgaacattctaataagacttctaataaagacaaggatg

SEQ ID NO: 108664 - DNA, 60 bp, Artificial
  Synthetic oligonucleotide
tggatttacgatcgcggaacatttcaacgcttttcatcgtatacggaagttaagcgcggt

SEQ ID NO: 108665 - DNA, 60 bp, Artificial
  Synthetic oligonucleotide
agcgcggtgcgattagaagaagtaggtgggagtgtggaacagatggcttcgagtttaaaa

SEQ ID NO: 108666 - DNA, 60 bp, Artificial
  Synthetic oligonucleotide
tcgagtttaaaaatgtatagtaatcagactaagctttcggcttcttatgcttcgtatcaa

SEQ ID NO: 108667 - DNA, 60 bp, Artificial
  Synthetic oligonucleotide
caaactttgttaaatagtggtatacatgttccagaccgattatgttattttaatgccgcc

SEQ ID NO: 108668 - DNA, 61 bp, Artificial
  Synthetic oligonucleotide
ggaatctcgattagaaagtctggatgaacaaatcgctatagatttatcgtattacacatac

SEQ ID NO: 108669 - DNA, 60 bp, Artificial
  Synthetic oligonucleotide
ataattatacagtaataccgactggagaagtaatgcgagagcacgagttatcatgtgtaa

SEQ ID NO: 108670 - DNA, 60 bp, Artificial
  Synthetic oligonucleotide
tagtgatgattcatttctaataatgtatccttatttctgcttacatactaatcctataaa

SEQ ID NO: 108671 - DNA, 56 bp, Artificial
  Synthetic oligonucleotide
attgaatggtgtgtatgttccgttacccatgcgtgttggcgtgttctgtgatgaga

SEQ ID NO: 108672 - DNA, 60 bp, Artificial
  Synthetic oligonucleotide
caaacatttatgtcaggactttttgccacgtcaggacaacacacgatgtttttagtatta

SEQ ID NO: 108673 - DNA, 60 bp, Artificial
  Synthetic oligonucleotide
tagcgagagtgttgcaatcaatgttgcctaaaaatcttattttgaaatctgatattaatt

SEQ ID NO: 108674 - DNA, 60 bp, Artificial
  Synthetic oligonucleotide
atcgatggtaattattcaaaatattcagcacaattcctgcaacaggttgcattgaatggt

SEQ ID NO: 108675 - DNA, 55 bp, Artificial
  Synthetic oligonucleotide
aagaatggggttgttcatgatgatcaggctagagtatggattaacttaatgaaga

SEQ ID NO: 108676 - DNA, 60 bp, Artificial
  Synthetic oligonucleotide
cctgttatcacgtgttttttgagatatcttatgattgaatgtttacaaatgctagataga

SEQ ID NO: 108677 - DNA, 60 bp, Artificial
  Synthetic oligonucleotide
ggcagttggaaaacaggttggtaatatacttgatgctaataaacagttaattgcttcggg

SEQ ID NO: 108678 - DNA, 60 bp, Artificial
  Synthetic oligonucleotide
gacaggagcgaaggatattttactggtcaccgtggtgaaagtgttatgattactgaaggc

SEQ ID NO: 108679 - DNA, 60 bp, Artificial
  Synthetic oligonucleotide
gctagatagagacaggagcgaaggatattttactggtcaccgtggtgaaagtgttatgat

SEQ ID NO: 108680 - DNA, 60 bp, Artificial
  Synthetic oligonucleotide
taacgtgtggaatgatattctctagaatgttgactatggcgctttcgaacatggaccgag

SEQ ID NO: 108681 - DNA, 60 bp, Artificial
  Synthetic oligonucleotide
cgaggagtgttggtggaggactacgtctgatatgcgagcggacgtaagaatcacggggag

SEQ ID NO: 108682 - DNA, 60 bp, Artificial
  Synthetic oligonucleotide
cctagcgcagcgatgcgtcagggcacatctgggcatttaacgaatggtttaacgtgtgga

SEQ ID NO: 108683 - DNA, 60 bp, Artificial
  Synthetic oligonucleotide
cagactaatggtgtgttcctactaatgcgagtgtatgttcgtgagttagacaatgacgta

SEQ ID NO: 108684 - DNA, 60 bp, Artificial
  Synthetic oligonucleotide
tactactatcccacatctcatgcaggtacatccatcataaatcataaacagtgtgtgact

SEQ ID NO: 108685 - DNA, 60 bp, Artificial
  Synthetic oligonucleotide
gagatatgttgcaggaaatatgttctgagaatgatgatgtgattaaggcgctataccagc

SEQ ID NO: 108686 - DNA, 60 bp, Artificial
  Synthetic oligonucleotide
cataaacagtgtgtgactgataataagcagcttgcgccgttgtttggatctactccgaag

SEQ ID NO: 108687 - DNA, 60 bp, Artificial
  Synthetic oligonucleotide
cgcgagaacagactcatcccaatgcacgatctcaacagtgcgattcaactttccaccgac

SEQ ID NO: 108688 - DNA, 60 bp, Artificial
  Synthetic oligonucleotide
tcgatgtattttacgaaatgtcttatgattatggaatcgacgagctggttcagcttttga

SEQ ID NO: 108689 - DNA, 60 bp, Artificial
  Synthetic oligonucleotide
cacgagaaacatgtcgcacaatatgctcatgatttgatcatgcgcgagaacagactcatc

SEQ ID NO: 108690 - DNA, 60 bp, Artificial
  Synthetic oligonucleotide
ccccgtcacttaaaggttctacgatacaggcacatagcatctttgacgagaaatcacgaa

SEQ ID NO: 108691 - DNA, 60 bp, Artificial
  Synthetic oligonucleotide
agcgagatttcccatgccttatttcccggcgaagctttgaaacccgtagatggtagcaca

SEQ ID NO: 108692 - DNA, 60 bp, Artificial
  Synthetic oligonucleotide
cttgtcctctgacgaagcttacgaaatcaacgcgtcataccgtaccgggtgcaaggcggt

SEQ ID NO: 108693 - DNA, 60 bp, Artificial
  Synthetic oligonucleotide
gactttcagtttctagaggtggaaggactagtgagcgatgatgagaaggacagagatatg

SEQ ID NO: 108694 - DNA, 60 bp, Artificial
  Synthetic oligonucleotide
gacgaaacaagagcaacatttgtcctctgacgaagcttacgaaatcaacgcgtcataccg

SEQ ID NO: 108695 - DNA, 60 bp, Artificial
  Synthetic oligonucleotide
gtggtcacgtttcgatgtcttaaaccagaagaatccgacataccctccgagaccgcagcc

SEQ ID NO: 108696 - DNA, 60 bp, Artificial
  Synthetic oligonucleotide
agatgcgctaataccacgtatcaaacgaagacttacatcgacgaaacaagagcaacactt

SEQ ID NO: 108697 - DNA, 60 bp, Artificial
  Synthetic oligonucleotide
cccttcctatcacgacgtgcgttatggattgcatccagcaatgagcatattaaggatttg

SEQ ID NO: 108698 - DNA, 60 bp, Artificial
  Synthetic oligonucleotide
gtcacccaatgcattattcgagttgaaccaaactgtttacgctacagacttcctctcgat

SEQ ID NO: 108699 - DNA, 60 bp, Artificial
  Synthetic oligonucleotide
cgttcgattttcagcaggctgttttccgttcaaattatgacttattgaagttgtgcggtg

SEQ ID NO: 108700 - DNA, 60 bp, Artificial
  Synthetic oligonucleotide
gcagagacagttttcctaccacttaaatgtttcccattctgtaatatcttaatgcgtgga

SEQ ID NO: 108701 - DNA, 60 bp, Artificial
  Synthetic oligonucleotide
ttctgtaatatcttaatgcgtggatactcacgagaaacgagcctatgcatgtcacccaat

SEQ ID NO: 108702 - DNA, 60 bp, Artificial
  Synthetic oligonucleotide
tgtgattaaggcgctataccagcagataaataagacggagcgagaaatatcacgccaaat

SEQ ID NO: 108703 - DNA, 60 bp, Artificial
  Synthetic oligonucleotide
ccacagcgcatttaaatgtagtaagtgtcataaggtgtataacaacaatatcctagcgca

SEQ ID NO: 108704 - DNA, 55 bp, Artificial
  Synthetic oligonucleotide
tacataaacactcatgcacattaggtttacatgcacttacaggcagcgcgacagg

SEQ ID NO: 108705 - DNA, 60 bp, Artificial
  Synthetic oligonucleotide
gttgccgtgtggcatgatcacaacagtcgataaccctatcttacataaacactcatgcac

SEQ ID NO: 108706 - DNA, 60 bp, Artificial
  Synthetic oligonucleotide
caactcgtacaccacagcgtataagaatgctctacaaacattgacgactataatgtactc

SEQ ID NO: 108707 - DNA, 60 bp, Artificial
  Synthetic oligonucleotide
taaggatttggaccatcacttggcatcgataagaacatgtgcagttaatattgccgaaca

SEQ ID NO: 108708 - DNA, 60 bp, Artificial
  Synthetic oligonucleotide
agagttacactcacaagcgagatttcccatgccttatttcccggcgaagctttgaaaccc

SEQ ID NO: 108709 - DNA, 60 bp, Artificial
  Synthetic oligonucleotide
ttaagcaagctacacgtattatcacaaagaatgtctacttcaccgatattgctgtgcaca

SEQ ID NO: 108710 - DNA, 60 bp, Artificial
  Synthetic oligonucleotide
cgcaaaggcgagtatacgtattttcaatacggcatgtccggaacataagatagccatccc

SEQ ID NO: 108711 - DNA, 60 bp, Artificial
  Synthetic oligonucleotide
catgagaacaatcaggcgtatctaacccgaacttgcaataccgatcagacacttttcctg

SEQ ID NO: 108712 - DNA, 60 bp, Artificial
  Synthetic oligonucleotide
cgatcagacacttttcctgttaatctctaaggagataggctcagatagcgttagcgtacc

SEQ ID NO: 108713 - DNA, 60 bp, Artificial
  Synthetic oligonucleotide
gagccatgatgaagcgcgctgacttccgacttgtaatgcatgagacggatgaggttcgtt

SEQ ID NO: 108714 - DNA, 57 bp, Artificial
  Synthetic oligonucleotide
tcagacagcgtccagacaatgactttgttcaataccttgcgctcgaagggtgaagct

SEQ ID NO: 108715 - DNA, 60 bp, Artificial
  Synthetic oligonucleotide
aagtaagcgagaaattagtcatgagtatcgccttcggaatgaacattgtggtcattgacc

SEQ ID NO: 108716 - DNA, 60 bp, Artificial
  Synthetic oligonucleotide
cagatcagcgttagtgtccataggtttaaggtgcttcagattcctgtattcacgcacata

SEQ ID NO: 108717 - DNA, 60 bp, Artificial
  Synthetic oligonucleotide
ggtactcatatcatattaactacatcttatctagagcgaattgggcagtcaatgctggta

SEQ ID NO: 108718 - DNA, 60 bp, Artificial
  Synthetic oligonucleotide
gattcaggtgtgatttatgttacattgcgcgttgggaatgatggtattggtactcatatc

SEQ ID NO: 108719 - DNA, 60 bp, Artificial
  Synthetic oligonucleotide
cgaattgggcagtcaatgctggtaaatcatgtatataagatcagacgcgcggatggagaa

SEQ ID NO: 108720 - DNA, 60 bp, Artificial
  Synthetic oligonucleotide
ttagcgtaccgtttgttggtgaagacggagatcatttacgatatgtttcaagagttacgc

SEQ ID NO: 108721 - DNA, 60 bp, Artificial
  Synthetic oligonucleotide
caagcgacaaagtctacaacatattcaaggaatacgacattattgatccatcagacagcg

SEQ ID NO: 108722 - DNA, 60 bp, Artificial
  Synthetic oligonucleotide
taaaataccttcagacgatgaagtcaaatccttattgccaactctgttctcaagcgacaa

SEQ ID NO: 108723 - DNA, 60 bp, Artificial
  Synthetic oligonucleotide
ggtcttcgctctcagtggaagctataacactttgcgcaccaattaaaataccttcagacg

SEQ ID NO: 108724 - DNA, 60 bp, Artificial
  Synthetic oligonucleotide
agggtgaccgttctattccacacattttctggacaaagcaaacactagagtttaactcac

SEQ ID NO: 108725 - DNA, 60 bp, Artificial
  Synthetic oligonucleotide
tctgtctatgcctttccctttcgtgagcagaaaagcgggaggtaccatagcatcagtgaa

SEQ ID NO: 108726 - DNA, 60 bp, Artificial
  Synthetic oligonucleotide
ctaaatctgtctatgcctttccctttcgtgagcagaaaagcgggaggtaccatagcatca

SEQ ID NO: 108727 - DNA, 60 bp, Artificial
  Synthetic oligonucleotide
cttggcgctggcgcgggtattcatcaacgtaaaatcaggcaagtcgtagctcgtcggtac

SEQ ID NO: 108728 - DNA, 60 bp, Artificial
  Synthetic oligonucleotide
aactttcttccttggaatgggatccgtcgccatcgcgtgggcaaccacgcttggcgctgg

SEQ ID NO: 108729 - DNA, 60 bp, Artificial
  Synthetic oligonucleotide
ggtacaaaaccgacgacgtttctggacatgccttatcagccctattaatgcattcatccc

SEQ ID NO: 108730 - DNA, 60 bp, Artificial
  Synthetic oligonucleotide
tcgtcggtacaaaaccgacgacgtttctggacatgccttatcagccctattaatgcattc

SEQ ID NO: 108731 - DNA, 60 bp, Artificial
  Synthetic oligonucleotide
aatacggttgaattaacaccatatgatatgtcacaaccttacgtaaacaacgatccattc

SEQ ID NO: 108732 - DNA, 60 bp, Artificial
  Synthetic oligonucleotide
cggtccagattagttatcagtcatcacatggattgttatggcgtggtaacagacctcaac

SEQ ID NO: 108733 - DNA, 60 bp, Artificial
  Synthetic oligonucleotide
caactttcttccttggaatgggatccgtcgccatcgcgtgggcaaccacgcttggcgctg

SEQ ID NO: 108734 - DNA, 60 bp, Artificial
  Synthetic oligonucleotide
cggttgaattaacaccatatgatatgtcacaaccttacgtaaacaacgatccattcgtgg

SEQ ID NO: 108735 - DNA, 59 bp, Artificial
  Synthetic oligonucleotide
tacgtgacagtgaaacggataagttattgggacctactgcaactaatgaagcactaaaa

SEQ ID NO: 108736 - DNA, 60 bp, Artificial
  Synthetic oligonucleotide
tacgtgacagtgaaacggataagttattgggacctactgcaactaatgaagcactaaaaa

SEQ ID NO: 108737 - DNA, 60 bp, Artificial
  Synthetic oligonucleotide
cgtctcctgtgtcttataacgaacttgtcgtttggacacaaggtaagatacgtgacagtg

SEQ ID NO: 108738 - DNA, 60 bp, Artificial
  Synthetic oligonucleotide
tacgtctcctgtgtcttataacgaacttgtcgtttggacacaaggtaagatacgtgacag

SEQ ID NO: 108739 - DNA, 58 bp, Artificial
  Synthetic oligonucleotide
tagtgatccggtcgtagtgtcacacacacgtgcgaataagctaattacgtctcctgtg

SEQ ID NO: 108740 - DNA, 60 bp, Artificial
  Synthetic oligonucleotide
gatcttagtgatccggtcgtagtgtcacacacacgtgcgaataagctaattacgtctcct

SEQ ID NO: 108741 - DNA, 60 bp, Artificial
  Synthetic oligonucleotide
ccgcttacatcgaatcagttgttggcgcaccattttacgatcttagtgatccggtcgtag

SEQ ID NO: 108742 - DNA, 60 bp, Artificial
  Synthetic oligonucleotide
aagatcgtggtaccgcttacatcgaatcagttgttggcgcaccattttacgatcttagtg

SEQ ID NO: 108743 - DNA, 60 bp, Artificial
  Synthetic oligonucleotide
cttgggtcagaagtttccgctaacataatatggaaggccaactcgttagagtatagtgtt

SEQ ID NO: 108744 - DNA, 60 bp, Artificial
  Synthetic oligonucleotide
gcactaaaaactcttcttgggtcagaagtttccgctaacataatatggaaggccaactcg

SEQ ID NO: 108745 - DNA, 60 bp, Artificial
  Synthetic oligonucleotide
ggccaactcgttagagtatagtgttccaaaattgacagccctttacgcaaagggtgaccg

SEQ ID NO: 108746 - DNA, 60 bp, Artificial
  Synthetic oligonucleotide
gggtgaccgttctattccacacattttctggacaaagcaaacactagagtttaactcacc

SEQ ID NO: 108747 - DNA, 60 bp, Artificial
  Synthetic oligonucleotide
ggaacgcacgctcaaagatctacatacggagatccgtatatggtattcgttacgtacagg

SEQ ID NO: 108748 - DNA, 60 bp, Artificial
  Synthetic oligonucleotide
tctgttcttatggggaacgaatcagcattcattgggaaaataaacaatgatgacttcaag

SEQ ID NO: 108749 - DNA, 60 bp, Artificial
  Synthetic oligonucleotide
ggggaacgaatcagcattcattgggaaaataaacaatgatgacttcaagaaaatgtgttc

SEQ ID NO: 108750 - DNA, 55 bp, Artificial
  Synthetic oligonucleotide
gcagccttgcaacttaatctaccagatttcgcaattaagaggcttggacagttca

SEQ ID NO: 108751 - DNA, 51 bp, Artificial
  Synthetic oligonucleotide
ctagatttgtagcgttgggcgtgtgagttgtatagcgaatccgtaaaagtc

SEQ ID NO: 108752 - DNA, 60 bp, Artificial
  Synthetic oligonucleotide
cacttgaatatgtaccttgggtaactaggaacatgtcatataggtcactaccggtccaga

SEQ ID NO: 108753 - DNA, 60 bp, Artificial
  Synthetic oligonucleotide
gtcactaccggtccagattagttatcagtcatcacatggattgttatggcgtggtaacag

SEQ ID NO: 108754 - DNA, 60 bp, Artificial
  Synthetic oligonucleotide
gtacaggacgtaacccagtcaagcaaactgtgtcagctgcaccaagtaagtcaacacttg

SEQ ID NO: 108755 - DNA, 60 bp, Artificial
  Synthetic oligonucleotide
aagtcaacacttgaatatgtaccttgggtaactaggaacatgtcatataggtcactaccg

SEQ ID NO: 108756 - DNA, 60 bp, Artificial
  Synthetic oligonucleotide
cgcacgctcaaagatctacatacggagatccgtatatggtattcgttacgtacaggacgt

SEQ ID NO: 108757 - DNA, 60 bp, Artificial
  Synthetic oligonucleotide
tacgtacaggacgtaacccagtcaagcaaactgtgtcagctgcaccaagtaagtcaacac

SEQ ID NO: 108758 - DNA, 60 bp, Artificial
  Synthetic oligonucleotide
ggggggaagatcaggtgatttgttggacagaagaacatctagacgcggtttcacatgcgt

SEQ ID NO: 108759 - DNA, 60 bp, Artificial
  Synthetic oligonucleotide
ggggaagatcaggtgatttgttggacagaagaacatctagacgcggtttcacatgcgttt

SEQ ID NO: 108760 - DNA, 60 bp, Artificial
  Synthetic oligonucleotide
tcacatgcgttttggaattttcggattccgatacgaatgtggatccagtctctgttctta

SEQ ID NO: 108761 - DNA, 60 bp, Artificial
  Synthetic oligonucleotide
ggaattttcggattccgatacgaatgtggatccagtctctgttcttatggggaacgaatc

SEQ ID NO: 108762 - DNA, 60 bp, Artificial
  Synthetic oligonucleotide
cggttactctaatgatgacgatgatccgccgttatttgcaaaggatttatccgactatgc

SEQ ID NO: 108763 - DNA, 60 bp, Artificial
  Synthetic oligonucleotide
ccaagcccacggtgatgtactggaagtggcagccggacggaaatatatccaaatgaacgg

SEQ ID NO: 108764 - DNA, 60 bp, Artificial
  Synthetic oligonucleotide
tacaatgataaatgaccttctcggtgcgggtgttagcctggcacagtttttccaagccca

SEQ ID NO: 108765 - DNA, 60 bp, Artificial
  Synthetic oligonucleotide
cagtcacgttaacgtctttgtggctaacgccctcgttggagctttcctatctaaccaagc

SEQ ID NO: 108766 - DNA, 60 bp, Artificial
  Synthetic oligonucleotide
ccctttgtcacgaataacgtggaggtgttctttgtagcgttcggtgttcaccgacagtcg

SEQ ID NO: 108767 - DNA, 60 bp, Artificial
  Synthetic oligonucleotide
gaactgtccaactgatgtgattcgcagtgtgcgtggatacttagagatcgatcagacctc

SEQ ID NO: 108768 - DNA, 60 bp, Artificial
  Synthetic oligonucleotide
tgcaaaagcattctattgtgagagttttgaagttcttgacagattcttttggacgcatga

SEQ ID NO: 108769 - DNA, 60 bp, Artificial
  Synthetic oligonucleotide
ccgcttcaattgctcaatactatcactcttcccactaatgaggacttattcttgagtgca

SEQ ID NO: 108770 - DNA, 60 bp, Artificial
  Synthetic oligonucleotide
cgatcagacctcaaagagatataggttcccgaaatttggacgcgatgaaccatattccga

SEQ ID NO: 108771 - DNA, 60 bp, Artificial
  Synthetic oligonucleotide
cagggggctcattcgttgcaaaaataaactttccgacacgctcaatatggtactacattg

SEQ ID NO: 108772 - DNA, 60 bp, Artificial
  Synthetic oligonucleotide
gccccttattgatccgagatctctggaagtgcaatcgcggactatcatgccctcaactcc

SEQ ID NO: 108773 - DNA, 60 bp, Artificial
  Synthetic oligonucleotide
cgctctcctgcatcagcaaagcgcaaagccagactaaggtacctgccccttattgatccg

SEQ ID NO: 108774 - DNA, 60 bp, Artificial
  Synthetic oligonucleotide
ctaagggagcgattgtcgaccttgcccggccctttccatcgggggactatcaattcgttt

SEQ ID NO: 108775 - DNA, 60 bp, Artificial
  Synthetic oligonucleotide
catgccggtaatgcgtgttgacattcacggactgcctatgaataagagtgggaacttcgt

SEQ ID NO: 108776 - DNA, 60 bp, Artificial
  Synthetic oligonucleotide
gtataattacgaagtgtcctcggctgtatatgacggtgacgtcgtccttgatcttggaac

SEQ ID NO: 108777 - DNA, 60 bp, Artificial
  Synthetic oligonucleotide
tggatcacaggggtgcgtggagacattgtaacctgcatgctatcgctaggggccgctgcc

SEQ ID NO: 108778 - DNA, 60 bp, Artificial
  Synthetic oligonucleotide
ccgctatcatacgacttacgatggactaggttagcgttgttggaagcagcaacattaaac

SEQ ID NO: 108779 - DNA, 60 bp, Artificial
  Synthetic oligonucleotide
gccgctgccgccggcaaatccatgacgtttgacgctgcgtttcaacaattcgtgcgcgtt

SEQ ID NO: 108780 - DNA, 60 bp, Artificial
  Synthetic oligonucleotide
ggatgctggaacgtgcgaactaccttcctacaattggattatttgagtgacggctggatc

SEQ ID NO: 108781 - DNA, 60 bp, Artificial
  Synthetic oligonucleotide
ggacatggtcttttctgatgccgggatctacaccatgcaggctgtcgtcggggttaacgc

SEQ ID NO: 108782 - DNA, 60 bp, Artificial
  Synthetic oligonucleotide
ggggatgagcaatatggtcggagtcttttctcactagcacgacgtattggggaccggtcc

SEQ ID NO: 108783 - DNA, 60 bp, Artificial
  Synthetic oligonucleotide
cgtgttgacggacacgattagttggtcgccctcgttgcccacttacgtcgtgccacctgg

SEQ ID NO: 108784 - DNA, 60 bp, Artificial
  Synthetic oligonucleotide
cttgagtgcaccagatatgcgagagtgggctgtcaaggagagcgggaacactatctgcat

SEQ ID NO: 108785 - DNA, 60 bp, Artificial
  Synthetic oligonucleotide
tcgcgtactttggagcctcggccggtcattctggcgcggatcaaccattggtcattgagc

SEQ ID NO: 108786 - DNA, 60 bp, Artificial
  Synthetic oligonucleotide
cgcgtgtggctatatcggcgttatgcgccaatacgggtaactcgcgcaagacgatttcga

SEQ ID NO: 108787 - DNA, 60 bp, Artificial
  Synthetic oligonucleotide
acgtccagcccaaccagccactaggttagatcaatgttaccatttacgatggggcgcgca

SEQ ID NO: 108788 - DNA, 60 bp, Artificial
  Synthetic oligonucleotide
ggggcgcgcaatacgtgggtgaggactcattaacgtatagattgggggtactgtccttat

SEQ ID NO: 108789 - DNA, 60 bp, Artificial
  Synthetic oligonucleotide
ggacgcatgacgcctctgctggggtattagtgcattatgacaaaccaacgaacggcaacc

SEQ ID NO: 108790 - DNA, 60 bp, Artificial
  Synthetic oligonucleotide
aatggtcagtgctccacccttcataattaacgcaactgacgctatgatgttggagtcttg

SEQ ID NO: 108791 - DNA, 60 bp, Artificial
  Synthetic oligonucleotide
ccaacgaacggcaaccattatttactcgggactcttactcaaatggtcagtgctccaccc

SEQ ID NO: 108792 - DNA, 60 bp, Artificial
  Synthetic oligonucleotide
gcgtgtgctgaaatatgaagtcttgagagtgtatccaattagcgggtatagtaacagtca

SEQ ID NO: 108793 - DNA, 60 bp, Artificial
  Synthetic oligonucleotide
ggatttcctggagagtttgatgcttgggaggtcttcgtgaaagaaaaactgcgtgtgctg

SEQ ID NO: 108794 - DNA, 60 bp, Artificial
  Synthetic oligonucleotide
gcggctattcaggccactgcaggggttgatattagatacgcacatgtatggatttcctgg

SEQ ID NO: 108795 - DNA, 60 bp, Artificial
  Synthetic oligonucleotide
ctgtccttattggccactaatgggtatcagttagcgcgacctatcccgaaacaattgact

SEQ ID NO: 108796 - DNA, 60 bp, Artificial
  Synthetic oligonucleotide
tcgtatacccttcatgatttttgttctgatctggatgcatcagctggaaaggaaccatgg

SEQ ID NO: 108797 - DNA, 60 bp, Artificial
  Synthetic oligonucleotide
gctattggcaccatggcgaatgtctggggcgtgaggttagcagattctttatcgtcacca

SEQ ID NO: 108798 - DNA, 60 bp, Artificial
  Synthetic oligonucleotide
ggaccggtccctaattaaggatactgcagtgctcaagcatgcgtaccaggccatagaccc

SEQ ID NO: 108799 - DNA, 60 bp, Artificial
  Synthetic oligonucleotide
acgaatcacacggagcgcgcgtattaatgctcgtctctaggcgctctcctgcatcagcaa

SEQ ID NO: 108800 - DNA, 60 bp, Artificial
  Synthetic oligonucleotide
cagcggcgtgccctcccccgcttcgatacgacaattcggttatgacgtcgctaagggagc

SEQ ID NO: 108801 - DNA, 60 bp, Artificial
  Synthetic oligonucleotide
ggcagtggcagatcgcgaatcccgataaattccaattctttgcgtccgcgacggggacac

SEQ ID NO: 108802 - DNA, 60 bp, Artificial
  Synthetic oligonucleotide
gctatattacatccgtgatgtccaatcccgtgaggtcgggttctacattcagcatccgct

SEQ ID NO: 108803 - DNA, 60 bp, Artificial
  Synthetic oligonucleotide
gactgcgctggaagacggcgacatggttggtcacatgtctcaattgccacttagacctga

SEQ ID NO: 108804 - DNA, 60 bp, Artificial
  Synthetic oligonucleotide
gcgttgtcgcggcgaaagaacttcctcaactacctgatacgtactttgatggggatgagc

SEQ ID NO: 108805 - DNA, 60 bp, Artificial
  Synthetic oligonucleotide
cggacgcttggcccgcgcaactagacttcacaattgctgggactgatgtggatattacgg

SEQ ID NO: 108806 - DNA, 60 bp, Artificial
  Synthetic oligonucleotide
catcatatggatatgtggatgatggttcctcggtgactggtctcgaagtaatcagtatcg

SEQ ID NO: 108807 - DNA, 60 bp, Artificial
  Synthetic oligonucleotide
tcggttgtcgatggggcagttcaatacggctacgtccgaaagaaccagttacggttgggc

SEQ ID NO: 108808 - DNA, 60 bp, Artificial
  Synthetic oligonucleotide
acggttgggcatgcggatatctcccatacaatcgttgagtgacgtaccagcgccagtggc

SEQ ID NO: 108809 - DNA, 60 bp, Artificial
  Synthetic oligonucleotide
caggccatagaccccagtacaggtcgagagtatctcagagctgggcagtcagtcgcgtac

SEQ ID NO: 108810 - DNA, 60 bp, Artificial
  Synthetic oligonucleotide
cagatggctgtcgagctttgtgagccaaataatgtccgagggtgcgaatgagacgcctct

SEQ ID NO: 108811 - DNA, 60 bp, Artificial
  Synthetic oligonucleotide
cgcctctttggcctcaggagcgttacgtgcagattgcttacgactctccttcggttgtcg

SEQ ID NO: 108812 - DNA, 60 bp, Artificial
  Synthetic oligonucleotide
tgagaccgttggaactagcttatggcagttaattgagaatattcatttattgcaagcacg

SEQ ID NO: 108813 - DNA, 60 bp, Artificial
  Synthetic oligonucleotide
gtgcgaatgctggttcgcggaatcactcgaaggctgaagattatgaaactcggattggag

SEQ ID NO: 108814 - DNA, 60 bp, Artificial
  Synthetic oligonucleotide
cctttacattaccactcacaagcatagcaccaacgatattactggatgaatacgtaggat

SEQ ID NO: 108815 - DNA, 60 bp, Artificial
  Synthetic oligonucleotide
cgaccaagtgtacacgttcttccaactatacaagctcacatgcgtaattaccagtcctcc

SEQ ID NO: 108816 - DNA, 60 bp, Artificial
  Synthetic oligonucleotide
atagtgttgtatttagtgaactcccactttcttctcattcgcttgatttaactgcagtta

SEQ ID NO: 108817 - DNA, 60 bp, Artificial
  Synthetic oligonucleotide
ttgtgtggttgatgaggataatggcgaaatcgcgacaccaatattcgaggatagtgttgt

SEQ ID NO: 108818 - DNA, 60 bp, Artificial
  Synthetic oligonucleotide
ttattgcgattcacacagctatcttttagatattctgactcaccgatcccaacctttttg

SEQ ID NO: 108819 - DNA, 60 bp, Artificial
  Synthetic oligonucleotide
gtacatgaatggctcgatagtacacgttatccacttacctttacattaccactcacaagc

SEQ ID NO: 108820 - DNA, 60 bp, Artificial
  Synthetic oligonucleotide
cggttttgaaccaacaaccttcctacttcaaacagaatacgatcggattgagatagtgcg

SEQ ID NO: 108821 - DNA, 60 bp, Artificial
  Synthetic oligonucleotide
accgcactaatgtcgcttacgaaatactacctaatttgcctactcgtttagcaccatcca

SEQ ID NO: 108822 - DNA, 60 bp, Artificial
  Synthetic oligonucleotide
agtgcatgtcctctgttctcgtatcagcgagtagcgtaagttattcgcaggtgtgtggac

SEQ ID NO: 108823 - DNA, 60 bp, Artificial
  Synthetic oligonucleotide
caggtgtgtggacacgtgtgtattccctgcagttgcacaagattgggcgtccctccgggt

SEQ ID NO: 108824 - DNA, 60 bp, Artificial
  Synthetic oligonucleotide
gaaaccacttttcgaccagaacgccaacatgtcttttgtaccaccagtggggatcactgc

SEQ ID NO: 108825 - DNA, 60 bp, Artificial
  Synthetic oligonucleotide
ctcgagtttggttatagtgcatgtcctctgttctcgtatcagcgagtagcgtaagttatt

SEQ ID NO: 108826 - DNA, 60 bp, Artificial
  Synthetic oligonucleotide
taaacaacgtcatgacctctgttggaatgtttgattttggaaagatacgtgagaacttaa

SEQ ID NO: 108827 - DNA, 60 bp, Artificial
  Synthetic oligonucleotide
ccagtggggatcactgctatgtcagttctcacgaaacgaccattaatggtgacaactacc

SEQ ID NO: 108828 - DNA, 60 bp, Artificial
  Synthetic oligonucleotide
atgatgaattgcagaaaatttttgcgctggaagctcaccctgacgcgagactaactcgtt

SEQ ID NO: 108829 - DNA, 60 bp, Artificial
  Synthetic oligonucleotide
acctgtctgatccatttgttaacgatcacgcccggtatactgacggcgccactcggaatc

SEQ ID NO: 108830 - DNA, 60 bp, Artificial
  Synthetic oligonucleotide
gttggttatggtactgacatgtcttatctcgggcgtatcagtcgtcaacgtcagatgttg

SEQ ID NO: 108831 - DNA, 60 bp, Artificial
  Synthetic oligonucleotide
ctatttatgctaatgaatgacgagccaacaaaagatgagttaactcataggttgacgaac

SEQ ID NO: 108832 - DNA, 55 bp, Artificial
  Synthetic oligonucleotide
gaaattatcgatacaactgatgtctttagtttaagtgagattgcgcgccgtgatc

SEQ ID NO: 108833 - DNA, 60 bp, Artificial
  Synthetic oligonucleotide
cggaaggtattgattcttggtgcgacaggtttaggtgatccaattgcacgtggactgaaa

SEQ ID NO: 108834 - DNA, 60 bp, Artificial
  Synthetic oligonucleotide
atttgattcagctagctctcacttatcggcgagcattacttcagaagaaacctaacgctg

SEQ ID NO: 108835 - DNA, 60 bp, Artificial
  Synthetic oligonucleotide
ctatgaagacgacattcatttcacttatgaggaaggcgatttgattcagctagctctcac

SEQ ID NO: 108836 - DNA, 60 bp, Artificial
  Synthetic oligonucleotide
gtcgttcgaatatcgacgtttttcccaaccggactatctagcgaagatatttattgacaa

SEQ ID NO: 108837 - DNA, 60 bp, Artificial
  Synthetic oligonucleotide
tgcgtaattaccagtcctcccaattccgaggtatcataatgacttgcccaagagggacgc

SEQ ID NO: 108838 - DNA, 60 bp, Artificial
  Synthetic oligonucleotide
atggtcgatattactcgtatccgtcgtctagcagagctgcgttcaattatgtcgttcgaa

SEQ ID NO: 108839 - DNA, 60 bp, Artificial
  Synthetic oligonucleotide
ggaatttagtacttcacacacctgagatttctgagatctattttaacgtatacctgtctg

SEQ ID NO: 108840 - DNA, 60 bp, Artificial
  Synthetic oligonucleotide
ctaatgcgttatatgtcttcagttcagattgcacgtgttggttatggtactgacatgtct

SEQ ID NO: 108841 - DNA, 60 bp, Artificial
  Synthetic oligonucleotide
agaatattcatttattgcaagcacggctactccagactttttccccaacaaacttaaagt

SEQ ID NO: 108842 - DNA, 60 bp, Artificial
  Synthetic oligonucleotide
tttggaagatggtaagttttgatggaactgtttcctggacatcgttactcaattattgcc

SEQ ID NO: 108843 - DNA, 60 bp, Artificial
  Synthetic oligonucleotide
ctcaattattgcctagcgatcgctttaggtcaaactgaaagagatgatattgtgatacga

SEQ ID NO: 108844 - DNA, 52 bp, Artificial
  Synthetic oligonucleotide
aatgtacccaatcacgcatgtacttgtgacaccaggtgtccagaaaccagcg

SEQ ID NO: 108845 - DNA, 60 bp, Artificial
  Synthetic oligonucleotide
tgcgacggcagggtttcatgacagctcatctcattccaaatttcggaatatttcatgtcc

SEQ ID NO: 108846 - DNA, 60 bp, Artificial
  Synthetic oligonucleotide
tttcatgtccacgagtttcaaaccattagcgcccttgtgcattacatgattgagaacgtt

SEQ ID NO: 108847 - DNA, 57 bp, Artificial
  Synthetic oligonucleotide
ttcaccatttattcgatttacacgctcagtgttatttactgactcagtaccaccagc

SEQ ID NO: 108848 - DNA, 60 bp, Artificial
  Synthetic oligonucleotide
cattgtcgttgacccacgtgctaacccacagttggatgtgtttaatattgagatcgcaag

SEQ ID NO: 108849 - DNA, 60 bp, Artificial
  Synthetic oligonucleotide
gagatcgcaagatttgaacttgattggaattacgagacaatgcgagagagtgtattgacg

SEQ ID NO: 108850 - DNA, 60 bp, Artificial
  Synthetic oligonucleotide
gttagagctattacacgcgaggttatgactcggacgattcagaccaaacatacaactctt

SEQ ID NO: 108851 - DNA, 60 bp, Artificial
  Synthetic oligonucleotide
ttgcctactcgtttagcaccatccacaattgggttactaagagggaaacgtgttctagca

SEQ ID NO: 108852 - DNA, 60 bp, Artificial
  Synthetic oligonucleotide
agacctattttgactgggacgtgtttattcgcagattgatttcatctgacttattgcgat

SEQ ID NO: 108853 - DNA, 60 bp, Artificial
  Synthetic oligonucleotide
atgtacgtaatgtcggttcagtatttcttaattcacgctacattgtcgttgacccacgtg

SEQ ID NO: 108854 - DNA, 60 bp, Artificial
  Synthetic oligonucleotide
caactctttcaactaagaatcgtactaatgaagacttgttatttattggtgtgggtgatg

SEQ ID NO: 108855 - DNA, 60 bp, Artificial
  Synthetic oligonucleotide
gtgtgggtgatgaaaatgtacgtaatgtcggttcagtatttcttaattcacgctacattg

SEQ ID NO: 108856 - DNA, 60 bp, Artificial
  Synthetic oligonucleotide
cgaattttcacattgttagcaacattaaatcttggataccgtgcttatattatgcggtca

SEQ ID NO: 108857 - DNA, 60 bp, Artificial
  Synthetic oligonucleotide
gcccaattcgatgcccatgttagatcaagcttagttgagattatcaacttaattcaacca

SEQ ID NO: 108858 - DNA, 65 bp, Artificial
  Synthetic oligonucleotide
caaccaaatatattaatttggaaattacagtacgcgacaatggcgttgctaaatcgaattttcac

SEQ ID NO: 108859 - DNA, 60 bp, Artificial
  Synthetic oligonucleotide
ttttaaatcaacagttcgtcaaataggtgcgtttggtacaggttcggttactcggggatt

SEQ ID NO: 108860 - DNA, 60 bp, Artificial
  Synthetic oligonucleotide
caggttcggttactcggggattaattgaatcagttgagttatcacaagggtatacttctg

SEQ ID NO: 108861 - DNA, 60 bp, Artificial
  Synthetic oligonucleotide
ctaactcgtttaggattactcgatcaagatgctttttgtttatataagcgcgatggctcc

SEQ ID NO: 108862 - DNA, 60 bp, Artificial
  Synthetic oligonucleotide
gattgctatcaatgtcatcggcatcaaatggagaatctagacagcttaaatttggtagaa

SEQ ID NO: 108863 - DNA, 60 bp, Artificial
  Synthetic oligonucleotide
gattgctatcaatgtcgtcggcatcaaatggagaatctagacagcttaaatttggcagaa

SEQ ID NO: 108864 - DNA, 60 bp, Artificial
  Synthetic oligonucleotide
tattacgtcgttacgttcgccatacactaatgcaaacttctttcaagattagaacgctta

SEQ ID NO: 108865 - DNA, 60 bp, Artificial
  Synthetic oligonucleotide
tattacgtcattacgttcgccatacactaatgcaaacttctttcaagattagagcgctta

SEQ ID NO: 108866 - DNA, 60 bp, Artificial
  Synthetic oligonucleotide
gttacgttcgccatacactaatgcaaacttctttcaagattagaacgcttagatgtgacc

SEQ ID NO: 108867 - DNA, 60 bp, Artificial
  Synthetic oligonucleotide
gcgaaactggtgtcatctccaatgtcaattttagtcgctttagtggacattaatggaacg

SEQ ID NO: 108868 - DNA, 60 bp, Artificial
  Synthetic oligonucleotide
agttggtgtcatctccaatgtcaattttagtcgctttagtggatattaatggaacgttta

SEQ ID NO: 108869 - DNA, 60 bp, Artificial
  Synthetic oligonucleotide
gtgtcatctccaatgtcaattttagtcgctttagtggatattaatggaacgtttattacg

SEQ ID NO: 108870 - DNA, 60 bp, Artificial
  Synthetic oligonucleotide
gaaacaaatgctcgataatatgaggaaagctggattggttgacatacctaagatgataca

SEQ ID NO: 108871 - DNA, 60 bp, Artificial
  Synthetic oligonucleotide
aaaacaaatgctcgataatatgaggaaagctggattggttgacatacctaagatgataca

SEQ ID NO: 108872 - DNA, 60 bp, Artificial
  Synthetic oligonucleotide
gctcgataatatgaggaaagctggattggttgacatacctaagatgatacaagactggtt

SEQ ID NO: 108873 - DNA, 60 bp, Artificial
  Synthetic oligonucleotide
aatggctaaaatatactcatggtcatttcacgttggattcagaaagcaaaaaatgttaga

SEQ ID NO: 108874 - DNA, 60 bp, Artificial
  Synthetic oligonucleotide
atggctaaaatatattcatggtcatttcacgttggattcagaaagcaaaaaatgttagat

SEQ ID NO: 108875 - DNA, 60 bp, Artificial
  Synthetic oligonucleotide
tggttcaagatgtatcaaatgacgtgagagaaacttacgcacgaatgaacgctaaagtca

SEQ ID NO: 108876 - DNA, 60 bp, Artificial
  Synthetic oligonucleotide
caagatgtatcaaatgacgtgagagaaacttacgcacgaatgaacgctaaagtcaaggct

SEQ ID NO: 108877 - DNA, 60 bp, Artificial
  Synthetic oligonucleotide
aagtgaccaaacaaatggttcaagatgtatcaaatgacgtgagagaaacttacgcacgaa

SEQ ID NO: 108878 - DNA, 50 bp, Artificial
  Synthetic oligonucleotide
attgtaaatagacttaggggttttgagactgatagagaatttattctaac

SEQ ID NO: 108879 - DNA, 60 bp, Artificial
  Synthetic oligonucleotide
cgtcagtcgctattactggatcgttaagactttttccctctgaacgtgtattaaccacga

SEQ ID NO: 108880 - DNA, 60 bp, Artificial
  Synthetic oligonucleotide
acgaatgaacgctaaagtcaaggctctagtgtccacagtaggaatagaaatagccaaaag

SEQ ID NO: 108881 - DNA, 60 bp, Artificial
  Synthetic oligonucleotide
cgaatgaacgctaaagtcaaggctctagtgtccacagtaggaatagaaatagccaaaagg

SEQ ID NO: 108882 - DNA, 60 bp, Artificial
  Synthetic oligonucleotide
cgtcagttgctattactggatcgttaagactttttccctctgaacgcgtattaaccacaa

SEQ ID NO: 108883 - DNA, 60 bp, Artificial
  Synthetic oligonucleotide
ttaaccacaaactctacgtttaaagtattcgattcagaagattttatcatagagtatgga

SEQ ID NO: 108884 - DNA, 60 bp, Artificial
  Synthetic oligonucleotide
ctatcaatgtcatcggcatcaaatggagaatctagacagcttaaatttggtagaaagacg

SEQ ID NO: 108885 - DNA, 60 bp, Artificial
  Synthetic oligonucleotide
cgagtatgatgtgatgaaagataaaccatattacttggtgacatgggcgaattcttcgat

SEQ ID NO: 108886 - DNA, 60 bp, Artificial
  Synthetic oligonucleotide
cagacactaaatctatataaacaaacgcaaattaatttaatggactcatacgttcaaata

SEQ ID NO: 108887 - DNA, 60 bp, Artificial
  Synthetic oligonucleotide
tcacattgagtgaagcacatttaccaatgcagtatcaaaagttcatgccaaacttgccgg

SEQ ID NO: 108888 - DNA, 60 bp, Artificial
  Synthetic oligonucleotide
cattgagtgaagcacatttaccaatgcagtatcaaaagttcatgccaaccttgccggaaa

SEQ ID NO: 108889 - DNA, 60 bp, Artificial
  Synthetic oligonucleotide
agagtatggaacaactgatgatgaagtgtatatacaaagagcatttatgtctttatcaag

SEQ ID NO: 108890 - DNA, 60 bp, Artificial
  Synthetic oligonucleotide
agactatgaaaataataaaataacatctgagttatttccaacagaagaagaatatactga

SEQ ID NO: 108891 - DNA, 60 bp, Artificial
  Synthetic oligonucleotide
agttataaactacgcgattaagaatggttcatggataagtctattttgtaactacccaaa

SEQ ID NO: 108892 - DNA, 55 bp, Artificial
  Synthetic oligonucleotide
caccggacttagaaaagctgattagaataccgttcaaaggaaagataccagctgt

SEQ ID NO: 108893 - DNA, 60 bp, Artificial
  Synthetic oligonucleotide
gtgaagcacatttaccaatgcagtatcaaaagttcatgccaaccttgccggaaaacgtgc

SEQ ID NO: 108894 - DNA, 60 bp, Artificial
  Synthetic oligonucleotide
ggactcatatgttcaaataccagatggcaatgttattaagaaaatacagtatggagccgt

SEQ ID NO: 108895 - DNA, 61 bp, Artificial
  Synthetic oligonucleotide
ctacgcgattaagaatggttcatggataagtctattttgtaactacccaaaatcagaaatg

SEQ ID NO: 108896 - DNA, 60 bp, Artificial
  Synthetic oligonucleotide
agtatgatgtgatgaaagataaaccatattacttagtaacatgggcgaattcttcgatcg

SEQ ID NO: 108897 - DNA, 60 bp, Artificial
  Synthetic oligonucleotide
ctatcaatgtcgtcggcatcaaatggagaatctagacagcttaaatttggcagaaagacg

SEQ ID NO: 108898 - DNA, 60 bp, Artificial
  Synthetic oligonucleotide
atacgagtatgatgtgatgaaagataaaccatattacttggtgacatgggcgaattcttc

SEQ ID NO: 108899 - DNA, 60 bp, Artificial
  Synthetic oligonucleotide
atgactaatgatgctagagtcatccagacactaaatctatataaacaaacgcaaattaat

SEQ ID NO: 108900 - DNA, 60 bp, Artificial
  Synthetic oligonucleotide
gaggcagatttaacagtgaatgaactagactatgaaaataataaaataacatctgaatta

SEQ ID NO: 108901 - DNA, 60 bp, Artificial
  Synthetic oligonucleotide
gcaaattaatttgatggactcatatgttcaaataccagatggcaatgttattaagaaaat

SEQ ID NO: 108902 - DNA, 60 bp, Artificial
  Synthetic oligonucleotide
cgttcaaataccagatggcaatgttattaagaaaatacagtatggagctgtagcatcagg

SEQ ID NO: 108903 - DNA, 60 bp, Artificial
  Synthetic oligonucleotide
gcagctaactctatagcaaatctagcattaattaagactgtcttatcacgtatctctaac

SEQ ID NO: 108904 - DNA, 60 bp, Artificial
  Synthetic oligonucleotide
tagcatcaggagaaaaacaaactaaagcagctaactccatagcaaatctagcgctaatta

SEQ ID NO: 108905 - DNA, 60 bp, Artificial
  Synthetic oligonucleotide
ggcgaaactggtgtcatctccaatgtcaattttagtcgctttagtggacattaatggaac

SEQ ID NO: 108906 - DNA, 60 bp, Artificial
  Synthetic oligonucleotide
tcttcgatcgaaatgttaatgtcagtcttttctcatgaagattacttaattgcaaaagaa

SEQ ID NO: 108907 - DNA, 60 bp, Artificial
  Synthetic oligonucleotide
ggtgttcacatcttcggacgagattgccgcatatcgtttggaatgaatggcgccgcgcca

SEQ ID NO: 108908 - DNA, 60 bp, Artificial
  Synthetic oligonucleotide
gagcctctcctaagcggtgatccgaggatgactcaactagcgattcagtatcagcaatac

SEQ ID NO: 108909 - DNA, 60 bp, Artificial
  Synthetic oligonucleotide
ccctggtgttcacatcttcggacgagattgccgtatatcgtttggaatgaatggcgccgc

SEQ ID NO: 108910 - DNA, 60 bp, Artificial
  Synthetic oligonucleotide
ccaatgtatctgcaacagctggctccggtggagttagcagtgatagctcccatgttgcct

SEQ ID NO: 108911 - DNA, 60 bp, Artificial
  Synthetic oligonucleotide
ggcgccgcgccaatgattagagatgagactgggatgatggtgccttttgaaggaaattgg

SEQ ID NO: 108912 - DNA, 60 bp, Artificial
  Synthetic oligonucleotide
tttggaatgaatggcgccgcgccaatgattagagatgagactgggatgatggtgcctttt

SEQ ID NO: 108913 - DNA, 60 bp, Artificial
  Synthetic oligonucleotide
ggatggctagactagctcgcatgaacataaatccaacagagatcgaatgggcattgactg

SEQ ID NO: 108914 - DNA, 60 bp, Artificial
  Synthetic oligonucleotide
acgttttcggctcggcaaatttgttcactccacctgaggtgctgttattgccaatcgatc

SEQ ID NO: 108915 - DNA, 60 bp, Artificial
  Synthetic oligonucleotide
cggctcggcaaatttgttcactccacctgaggtgctgttattgccaatcgatcatcaacc

SEQ ID NO: 108916 - DNA, 60 bp, Artificial
  Synthetic oligonucleotide
cactccacctgaggtgctgttattgccaatcgatcatcaacctgctaacgtaacgacgcc

SEQ ID NO: 108917 - DNA, 60 bp, Artificial
  Synthetic oligonucleotide
atcgatgacaccaatgtatctgcaacagctggctccggtagagttagcagtgatagctcc

SEQ ID NO: 108918 - DNA, 60 bp, Artificial
  Synthetic oligonucleotide
tattcatagatactggcctaacccttcacagattcgttatggtgcaccgaacgttttcgg

SEQ ID NO: 108919 - DNA, 60 bp, Artificial
  Synthetic oligonucleotide
gatactggcctaacccttcacagattcgttatggtgcaccgaacgttttcggctcggcaa

SEQ ID NO: 108920 - DNA, 60 bp, Artificial
  Synthetic oligonucleotide
tactggcctaacccttcacagattcgttatggtgcaccgaacgttttcggatcagcaaat

SEQ ID NO: 108921 - DNA, 60 bp, Artificial
  Synthetic oligonucleotide
cccttcacagattcgttatggtgcaccgaacgttttcggatcagcaaatttgttcactcc

SEQ ID NO: 108922 - DNA, 60 bp, Artificial
  Synthetic oligonucleotide
cggtttgatcgagcacagatgatgaacggagctatgtcagagtgggtggatgtcttcgag

SEQ ID NO: 108923 - DNA, 60 bp, Artificial
  Synthetic oligonucleotide
atgatgaacggagctatgtcagagtgggtggatgtcttcgagacttcagacgcgcttacc

SEQ ID NO: 108924 - DNA, 60 bp, Artificial
  Synthetic oligonucleotide
ccgtgttggacgatttgatcgagcacaaatgatgaacggagctatgtcagagtgggtgga

SEQ ID NO: 108925 - DNA, 60 bp, Artificial
  Synthetic oligonucleotide
ggttggacggtttgatcgagcacagatgatgaacggagctatgtcagagtgggtggatgt

SEQ ID NO: 108926 - DNA, 60 bp, Artificial
  Synthetic oligonucleotide
gcgcaagtcacatattcagacactggtatcaataatgctaatgaactgtcaagatctggg

SEQ ID NO: 108927 - DNA, 60 bp, Artificial
  Synthetic oligonucleotide
gggccactgaaagtgcagaactgcccatgaagaataatgacgaagggacgccagataaga

SEQ ID NO: 108928 - DNA, 60 bp, Artificial
  Synthetic oligonucleotide
agagggccactgaaagtgcagaactgcccatgaagaataatgacgaagggacgccagata

SEQ ID NO: 108929 - DNA, 60 bp, Artificial
  Synthetic oligonucleotide
cggagctatgtcagagtgggtggatgtcttcgagacttcagacgcgcttaccgtctccat

SEQ ID NO: 108930 - DNA, 60 bp, Artificial
  Synthetic oligonucleotide
agctatgtcagagtgggtggatgtcttcgagacttcagatgcgcttactgtctcaattcg

SEQ ID NO: 108931 - DNA, 60 bp, Artificial
  Synthetic oligonucleotide
ccgttgcgctgttgtcagggaaatatccgccggatttagtgacaaatgtatggtacgctg

SEQ ID NO: 108932 - DNA, 60 bp, Artificial
  Synthetic oligonucleotide
gctttagatgcgagggctattaccgttgcgctgttgtcagggaaatatccgccggatttg

SEQ ID NO: 108933 - DNA, 60 bp, Artificial
  Synthetic oligonucleotide
gcagacacggaggtgttctctaatcttcagagagacatgattacctgcgaggccgtgcag

SEQ ID NO: 108934 - DNA, 60 bp, Artificial
  Synthetic oligonucleotide
ggcttcgagacaatccctatggataatcagatctacactcagtcgcgacgtgcaagtgct

SEQ ID NO: 108935 - DNA, 60 bp, Artificial
  Synthetic oligonucleotide
ctgacatgctgctagagcctctcttaagcggtgatccgaggatgactcaactagcgattc

SEQ ID NO: 108936 - DNA, 60 bp, Artificial
  Synthetic oligonucleotide
tctaatcttcagagagacatgattacctgcgaggccgtgcagacattagtgactctggtg

SEQ ID NO: 108937 - DNA, 60 bp, Artificial
  Synthetic oligonucleotide
atatgctgttagagcctctcctaagcggtgatccgaggatgactcaactagcgattcagt

SEQ ID NO: 108938 - DNA, 60 bp, Artificial
  Synthetic oligonucleotide
acatgctgttagagcctctcctaagcggtgatccgaggatgactcaactagcgattcagt

SEQ ID NO: 108939 - DNA, 60 bp, Artificial
  Synthetic oligonucleotide
acgagtccctacgctcctatcgtaaatagattgatgccctatcgtatctccaacgctgag

SEQ ID NO: 108940 - DNA, 60 bp, Artificial
  Synthetic oligonucleotide
gagcctctcctaagcggtgatccgaggatgactcaactagcgattcagtatcagcagtac

SEQ ID NO: 108941 - DNA, 60 bp, Artificial
  Synthetic oligonucleotide
ggtcgatggatggctaggctagctcgcatgaacataaatccaacagagatcgaatgggcg

SEQ ID NO: 108942 - DNA, 60 bp, Artificial
  Synthetic oligonucleotide
tctcaattcgaggtcgatggatggctaggctagctcgcatgaacataaatccaacagaga

SEQ ID NO: 108943 - DNA, 60 bp, Artificial
  Synthetic oligonucleotide
cgctcctatcgtaaatagattgatgccctatcgtatctccaacgctgagcggcaaatatc

SEQ ID NO: 108944 - DNA, 60 bp, Artificial
  Synthetic oligonucleotide
acgctcctatcgtaaatagattgatgccctatcgtatctccaacgctgagcggcaaatat

SEQ ID NO: 108945 - DNA, 60 bp, Artificial
  Synthetic oligonucleotide
ccctacgctcctatcgtaaatagattgatgccctatcgtatctccaacgctgagcgggca

SEQ ID NO: 108946 - DNA, 60 bp, Artificial
  Synthetic oligonucleotide
acattccagttgaaagatataatattttgaccaaccccgacgctccacccacgcagatac

SEQ ID NO: 108947 - DNA, 60 bp, Artificial
  Synthetic oligonucleotide
aacattctgaccaaccccgacgctccacccacgcagatacaactgcctgaagttgttgac

SEQ ID NO: 108948 - DNA, 60 bp, Artificial
  Synthetic oligonucleotide
agttgttgacttgtataacgtcgtcacacgctatgcgtatgagactccgcctattaccgc

SEQ ID NO: 108949 - DNA, 60 bp, Artificial
  Synthetic oligonucleotide
cacatccaaccgagagcaatacaaagctcgaccaggtattgcatctgtgcagagggccac

SEQ ID NO: 108950 - DNA, 60 bp, Artificial
  Synthetic oligonucleotide
ttcgagacaatccctatggataatcagatctatactcaatcgagacgcgcgagtgctttc

SEQ ID NO: 108951 - DNA, 60 bp, Artificial
  Synthetic oligonucleotide
cgttgcgctgttgtcagggaaatatccgccggatttggtgacaaatgtatggtacgctga

SEQ ID NO: 108952 - DNA, 60 bp, Artificial
  Synthetic oligonucleotide
atggcgccgcgccaatgattagagatgagactggactgatggtgccttttgaaggaaatt

SEQ ID NO: 108953 - DNA, 60 bp, Artificial
  Synthetic oligonucleotide
gtatctgcaacagctggctccggtagagttagcagtgatagctcccatgttgccttttcc

SEQ ID NO: 108954 - DNA, 60 bp, Artificial
  Synthetic oligonucleotide
ttagatggagttgtttttagctttttagttcaaagacaatacactcaaaaacaattgtca

SEQ ID NO: 108955 - DNA, 60 bp, Artificial
  Synthetic oligonucleotide
gtcagattatccgtttattagctctatttataccctgattgctcctttgggagaatacgt

SEQ ID NO: 108956 - DNA, 60 bp, Artificial
  Synthetic oligonucleotide
cttcaataatcattttacttaccttggacctaaatcggaaacgcgtcttccaattctaga

SEQ ID NO: 108957 - DNA, 60 bp, Artificial
  Synthetic oligonucleotide
caattctagatataagagtgtcatcgcagttgtaaacacttttctccttaagattcgatg

SEQ ID NO: 108958 - DNA, 60 bp, Artificial
  Synthetic oligonucleotide
tactttatatacttctgacgctaatggtaacatcgacccagttcaacctgccacatgcgc

SEQ ID NO: 108959 - DNA, 52 bp, Artificial
  Synthetic oligonucleotide
atgggaggaatattcggcaatcctaatcaagctattaacaagttgactgata

SEQ ID NO: 108960 - DNA, 52 bp, Artificial
  Synthetic oligonucleotide
agagagaaacggtcaaacttcgaaatacttcatcagtaagagagataaaatc

SEQ ID NO: 108961 - DNA, 60 bp, Artificial
  Synthetic oligonucleotide
cgcagagaatctgtgataacagaatgacggccaaccattataaaaccttgatggctgcaa

SEQ ID NO: 108962 - DNA, 60 bp, Artificial
  Synthetic oligonucleotide
cttgatggctgcaaattatccaaatagagttagtatgcacgtttttgacaccatgattga

SEQ ID NO: 108963 - DNA, 66 bp, Artificial
  Synthetic oligonucleotide
cgacattggtgtgaaacttactacattgattaataataagaataatagtcctacatctcgagaagc

SEQ ID NO: 108964 - DNA, 60 bp, Artificial
  Synthetic oligonucleotide
gagtgtcatcgcagttgtaaacacttttctccttaagattcgatgtgtctagcctcttgc

SEQ ID NO: 108965 - DNA, 60 bp, Artificial
  Synthetic oligonucleotide
catctcgagaagcagttacttatttcatgaatgttttagctggtggtaatgttgaaagtt

SEQ ID NO: 108966 - DNA, 60 bp, Artificial
  Synthetic oligonucleotide
aaacacttatgttgaaactgaatatttagacattctagtattacttgaagttttatttgc

SEQ ID NO: 108967 - DNA, 60 bp, Artificial
  Synthetic oligonucleotide
gcttttctaattactcctcgtttagcatggtggaatagtcatagatttggtcgtacgttg

SEQ ID NO: 108968 - DNA, 60 bp, Artificial
  Synthetic oligonucleotide
catgaaaatgctttctatactatggattctgatcctcgtgtctatcatcctactttatat

SEQ ID NO: 108969 - DNA, 60 bp, Artificial
  Synthetic oligonucleotide
ctatactatggattctgatcctcgtgtctatcatcctactttatatacttctgacgctaa

SEQ ID NO: 108970 - DNA, 60 bp, Artificial
  Synthetic oligonucleotide
ccgtttgatggacaagaaatcactgatttagcattgaaaattgtaggtcatagtaaaagg

SEQ ID NO: 108971 - DNA, 60 bp, Artificial
  Synthetic oligonucleotide
aggtcatagtaaaaggattaatactgtattttccatatttaactatttacacaaagagag

SEQ ID NO: 108972 - DNA, 60 bp, Artificial
  Synthetic oligonucleotide
cttctgacgctaatggtaacatcgacccagttcaacctgccacatgcgcagttcataaga

SEQ ID NO: 108973 - DNA, 60 bp, Artificial
  Synthetic oligonucleotide
ctttgggagaatacgtaaacttaactagaaaaattaacgctaaatatcctttctttgaaa

SEQ ID NO: 108974 - DNA, 60 bp, Artificial
  Synthetic oligonucleotide
gttaaacagagatttgaacaacatccaactcaatttttatgatactcgtttcatcatcca

SEQ ID NO: 108975 - DNA, 60 bp, Artificial
  Synthetic oligonucleotide
agcgataatgaatattcaaggacatctcaaacaatcagaccagaaattagttgatgaaca

SEQ ID NO: 108976 - DNA, 60 bp, Artificial
  Synthetic oligonucleotide
acttatcagagtggtaacacaattcaagctaaaacagccttaactgttgaagcgataatg

SEQ ID NO: 108977 - DNA, 60 bp, Artificial
  Synthetic oligonucleotide
ccattactgcttgttcagactttcaactggtacctttctatcgaaccattgattatactg

SEQ ID NO: 108978 - DNA, 52 bp, Artificial
  Synthetic oligonucleotide
ttgatgaacaaaccagtcaatatcttacttatctaacttcaaatgttcccgc

SEQ ID NO: 108979 - DNA, 60 bp, Artificial
  Synthetic oligonucleotide
tcaaggacatctcaaacaatcagaccagaaattagttgatgaacaaaccagtcaatatct

SEQ ID NO: 108980 - DNA, 60 bp, Artificial
  Synthetic oligonucleotide
ccacatgcgcagttcataagaaatataagtatggtgatgagtacttagaaaacatgttaa

SEQ ID NO: 108981 - DNA, 60 bp, Artificial
  Synthetic oligonucleotide
ccttatcgaatgctatccccaaaatcaaattcatactgaagagattaggcaatatgaatg

SEQ ID NO: 108982 - DNA, 56 bp, Artificial
  Synthetic oligonucleotide
aaaaatgttttctcgactgaagactttccttgaaatagctgctaattgtaatttag

SEQ ID NO: 108983 - DNA, 60 bp, Artificial
  Synthetic oligonucleotide
ccgtcaagttgagggattagcctttggatattacagttctagtactgcttcacctactga

SEQ ID NO: 108984 - DNA, 60 bp, Artificial
  Synthetic oligonucleotide
ctccccttattccgtcaagttgagggattagcctttggatattacagttctagtactgct

SEQ ID NO: 108985 - DNA, 60 bp, Artificial
  Synthetic oligonucleotide
gaaagggaaaggcattactgtgcctctaactccgcttcactgttttagtaaactttacac

SEQ ID NO: 108986 - DNA, 58 bp, Artificial
  Synthetic oligonucleotide
gttgaaaaaaggattaacacttacgatatgatctgtcgcggctatggtaatatggacc

SEQ ID NO: 108987 - DNA, 60 bp, Artificial
  Synthetic oligonucleotide
aaagacaatgtgaatcatgagtatattaatcccttatcgaatgctatccctaaaatcaaa

SEQ ID NO: 108988 - DNA, 60 bp, Artificial
  Synthetic oligonucleotide
aatacaattagaattgcttctaataatttgggactcttgatgcattatactgtagcacct

SEQ ID NO: 108989 - DNA, 60 bp, Artificial
  Synthetic oligonucleotide
cgaatgctatccccaaaatcaaattcatactgaagagattaggcaatatgaatgaacact

SEQ ID NO: 108990 - DNA, 60 bp, Artificial
  Synthetic oligonucleotide
tcatcatccagaacagaactgatgaactgttagaccgttacatttatttgagttatcgta

SEQ ID NO: 108991 - DNA, 60 bp, Artificial
  Synthetic oligonucleotide
actaagcccttatccatagaatatgacaatactcgcatatccaaaaaattagctggaaag

SEQ ID NO: 108992 - DNA, 51 bp, Artificial
  Synthetic oligonucleotide
gttactccctttatgaataaaatcaatgatatgctaatggatggtaacaca

SEQ ID NO: 108993 - DNA, 60 bp, Artificial
  Synthetic oligonucleotide
accggaccctagaattcacccaagatcaaggacgaaatgaattctgaggagaaacgaaaa

SEQ ID NO: 108994 - DNA, 50 bp, Artificial
  Synthetic oligonucleotide
ttaagatcaagtgaaacatttcctgttaatgcctataaagtcagtgttgg

SEQ ID NO: 108995 - DNA, 51 bp, Artificial
  Synthetic oligonucleotide
gctcctgagattacagaccccacaatgatcggagatgtatctttaattaaa

SEQ ID NO: 108996 - DNA, 60 bp, Artificial
  Synthetic oligonucleotide
aaaaatgtttcttatgttggtgttcacagttcagacaattacaaagatcgaaaaatgttt

SEQ ID NO: 108997 - DNA, 60 bp, Artificial
  Synthetic oligonucleotide
cacttatattgctattggagtacatggcgtatgtcgaaatgataccgtgactacaactgg

SEQ ID NO: 108998 - DNA, 60 bp, Artificial
  Synthetic oligonucleotide
aactttacacttatattgctattggagtacatggcgtatgtcgaaatgatactgtgacta

SEQ ID NO: 108999 - DNA, 60 bp, Artificial
  Synthetic oligonucleotide
cagactttcaactggtacctttctatcgaaccatcgactatactgaagatacgtcacaac

SEQ ID NO: 109000 - DNA, 60 bp, Artificial
  Synthetic oligonucleotide
aacagaactgatgaactgttagaccgttacatttatttgagttatcgtaacattactgcc

SEQ ID NO: 109001 - DNA, 59 bp, Artificial
  Synthetic oligonucleotide
acgatactgagtattttactattaatctagatgagactcctggtgtctttagaactaca

SEQ ID NO: 109002 - DNA, 56 bp, Artificial
  Synthetic oligonucleotide
tggaaaagacctcgtatgatttcctacagtggctataacgtactacaggacacagg

SEQ ID NO: 109003 - DNA, 60 bp, Artificial
  Synthetic oligonucleotide
aagtttttttaccggaccctagaattcacccaagatcaaggacgaaatgaattctgagga

SEQ ID NO: 109004 - DNA, 60 bp, Artificial
  Synthetic oligonucleotide
ctgcgacagtcaacgatctcacccgacgcactatgactggtgtcatgaccgctatgcgcc

SEQ ID NO: 109005 - DNA, 60 bp, Artificial
  Synthetic oligonucleotide
acaacttcacgtaccccaccctcgatggcataatgtacgtgcgcagcgcgacgtgatcgg

SEQ ID NO: 109006 - DNA, 60 bp, Artificial
  Synthetic oligonucleotide
aacgccgcttccattgacacggccttcggtgagaacgctgccgtttccccgctccgatgg

SEQ ID NO: 109007 - DNA, 55 bp, Artificial
  Synthetic oligonucleotide
acatattcgggagacgtatgtcatgctcctccgctcaatgcatcaagaccccacc

SEQ ID NO: 109008 - DNA, 60 bp, Artificial
  Synthetic oligonucleotide
accgcggctgctctgcccctagtggaagccctctctacactattgcgctctgtgactcct

SEQ ID NO: 109009 - DNA, 60 bp, Artificial
  Synthetic oligonucleotide
gtctgcaacaagtgatgcatctcgtcaatatttcctctaacaccgcggctgctctgcccc

SEQ ID NO: 109010 - DNA, 59 bp, Artificial
  Synthetic oligonucleotide
ccccaactcatcaacccgcaacaagcgccattactccgtgccttcgccgagcatatccg

SEQ ID NO: 109011 - DNA, 56 bp, Artificial
  Synthetic oligonucleotide
tttggctatggcagcaccctccaaggatccgcgaatctcttcattccccccaatcg

SEQ ID NO: 109012 - DNA, 60 bp, Artificial
  Synthetic oligonucleotide
cgcatcggacgtctggatcgtgccaacctcattggcggcgaagttagtgccatggtagag

SEQ ID NO: 109013 - DNA, 60 bp, Artificial
  Synthetic oligonucleotide
ccaatcagccactcccacggttgaccgtcgcgcccacgtatgattcggccatgtccaatt

SEQ ID NO: 109014 - DNA, 60 bp, Artificial
  Synthetic oligonucleotide
tacttccggtcgcatgatacgtgccttcgaaggtcggcccgagctactcgccttagcgta

SEQ ID NO: 109015 - DNA, 60 bp, Artificial
  Synthetic oligonucleotide
aatgtacgcgtcgtcggtcgattcggaaccatcgtgccgcgtcctgacggcttagaacct

SEQ ID NO: 109016 - DNA, 60 bp, Artificial
  Synthetic oligonucleotide
cccctgccgacacgaacgttgtgcctgccaaggacgctccaactactaactcacctccat

SEQ ID NO: 109017 - DNA, 60 bp, Artificial
  Synthetic oligonucleotide
gctccgatggcccggtctagtcgaccccaattatcgcgttggcaccaatgacctccctaa

SEQ ID NO: 109018 - DNA, 60 bp, Artificial
  Synthetic oligonucleotide
tccgtgccttcgccgagcatatccgtgctaattggcctcagcccagtgaatttggctatg

SEQ ID NO: 109019 - DNA, 60 bp, Artificial
  Synthetic oligonucleotide
tgtctgtaacgctcgattttccactatgtccgcgctgtccgagcacctgcggtccgatca

SEQ ID NO: 109020 - DNA, 60 bp, Artificial
  Synthetic oligonucleotide
accttatcccctcccaccactatggcaaagccttcgctcccctctttgcgtccaacgcga

SEQ ID NO: 109021 - DNA, 60 bp, Artificial
  Synthetic oligonucleotide
aatctgccactgcctcccctgccgacacgaacgttgtgcctgccaaggacgctccaacta

SEQ ID NO: 109022 - DNA, 60 bp, Artificial
  Synthetic oligonucleotide
caacaagccggcatcgtcagttctcagagtggtcctaacgccgttggtgactccgccccc

SEQ ID NO: 109023 - DNA, 60 bp, Artificial
  Synthetic oligonucleotide
cctccgaccgaccattctctgcccctggttcgcttcgtctgaggatttgcgtctgcaaca

SEQ ID NO: 109024 - DNA, 60 bp, Artificial
  Synthetic oligonucleotide
gctgttgacatccgggccactcatgctaccttcgctgccgccttgccggtcgatcccgct

SEQ ID NO: 109025 - DNA, 60 bp, Artificial
  Synthetic oligonucleotide
ctccgccccctccacctccgtgaataatgatggcgacatcatcacgcgcccgacctccga

SEQ ID NO: 109026 - DNA, 60 bp, Artificial
  Synthetic oligonucleotide
ccgctgccatcgttgtagctatgctatgtggacaaacggagacgaaccttatcccctccc

SEQ ID NO: 109027 - DNA, 60 bp, Artificial
  Synthetic oligonucleotide
atacagcacatgtgtcccacagagctgtccgtccttgcctccgttaccgtgacaccccct

SEQ ID NO: 109028 - DNA, 60 bp, Artificial
  Synthetic oligonucleotide
ggtgcctttcactcggttggtccaaaacgatgttatcaccaatgtcctcgtcgctcgtgt

SEQ ID NO: 109029 - DNA, 60 bp, Artificial
  Synthetic oligonucleotide
tcaccaatgtcctcgtcgctcgtgttgatccagcgcaacgaggcgatgccgctgttgaca

SEQ ID NO: 109030 - DNA, 60 bp, Artificial
  Synthetic oligonucleotide
ccaatggtaaaggcaggccgaacccgcgtccttgtggaactggggcactatgtgtacacc

SEQ ID NO: 109031 - DNA, 60 bp, Artificial
  Synthetic oligonucleotide
gtacaccttacactactacgatccccaaatcagtctggacgaagcgcccatcctggagga

SEQ ID NO: 109032 - DNA, 60 bp, Artificial
  Synthetic oligonucleotide
tatcaaatgaccccccccttgcccgaaggcgccgtcaaccgcattgtgtgcatgaccaat

SEQ ID NO: 109033 - DNA, 60 bp, Artificial
  Synthetic oligonucleotide
ggtgtacccaagtgacgttctccaggtatccgttgctgtcttctgtgattatgtgtggcc

SEQ ID NO: 109034 - DNA, 60 bp, Artificial
  Synthetic oligonucleotide
gcttaccgccccctactgacagtagcgtccatgcctacaagaccgtactttcccgaggct

SEQ ID NO: 109035 - DNA, 60 bp, Artificial
  Synthetic oligonucleotide
caatgggaactggtcacctatggcacctgtcgccgccccccccttcgtgcgtggaggtcc

SEQ ID NO: 109036 - DNA, 60 bp, Artificial
  Synthetic oligonucleotide
tcccgaggctacatcgacaacgcacagttcaaccccctggccctgcggtccaatgtgctc

SEQ ID NO: 109037 - DNA, 60 bp, Artificial
  Synthetic oligonucleotide
ggaggatgcattccccgacagctcgcagtcaatcacgcacttgccatctatgtggaaatg

SEQ ID NO: 109038 - DNA, 60 bp, Artificial
  Synthetic oligonucleotide
gtgactcctttagtcctcgatcccactgtgctcacgaatgcaatcacgaccatctccgag

SEQ ID NO: 109039 - DNA, 60 bp, Artificial
  Synthetic oligonucleotide
tcccccatctccgaaattttgcgtctactgcaacccatgggtaatgactacgccgcgttc

SEQ ID NO: 109040 - DNA, 60 bp, Artificial
  Synthetic oligonucleotide
tagctaacttgctcgcgcagcctgagcccatcgccattggagtgcctggtatgcatcaga

SEQ ID NO: 109041 - DNA, 60 bp, Artificial
  Synthetic oligonucleotide
gcgcccatcctggaggaatggctaagcaagatcaatcccgctggtatcccacccgtacct

SEQ ID NO: 109042 - DNA, 60 bp, Artificial
  Synthetic oligonucleotide
gccactcatgctaccttcgctgccgccttgccggtcgatcccgctgccatcgttgtagct

SEQ ID NO: 109043 - DNA, 60 bp, Artificial
  Synthetic oligonucleotide
atgaccaattgggcatcccttggagacgaaggccgtggtctggaggtacgcttaccgccc

SEQ ID NO: 109044 - DNA, 60 bp, Artificial
  Synthetic oligonucleotide
atttggacagtgcggttgctaatgggccggaacttatcgtcgaggatactgggttgtgca

SEQ ID NO: 109045 - DNA, 60 bp, Artificial
  Synthetic oligonucleotide
ctgcgcatctgacgaaggagctgatcgggttcacctggttcatgcaaatgtatcaaatga

SEQ ID NO: 109046 - DNA, 60 bp, Artificial
  Synthetic oligonucleotide
tgtccgagcacctgcggtccgatcaccgtgatgacgcctccactctactcgccaccccca

SEQ ID NO: 109047 - DNA, 60 bp, Artificial
  Synthetic oligonucleotide
aatatggcggcaacgtcgtgcgcgaacatgtccctcccggcccatcccacatccatcgta

SEQ ID NO: 109048 - DNA, 60 bp, Artificial
  Synthetic oligonucleotide
aacaacgctatacgatccttccttactgcctgggatggtatacgcattctctccccggac

SEQ ID NO: 109049 - DNA, 60 bp, Artificial
  Synthetic oligonucleotide
tacccgtaaccaacgcgcggtcatcacacgtgaggcattcgtctgtgccagaagtgcggt

SEQ ID NO: 109050 - DNA, 60 bp, Artificial
  Synthetic oligonucleotide
accaccccagcctcgcagttttcacatcctggtgtttggccgcctggtttccttaacccc

SEQ ID NO: 109051 - DNA, 60 bp, Artificial
  Synthetic oligonucleotide
ggacgggttggccctatatggggatccacgtattgctgatctctccgctgcttacctgca

SEQ ID NO: 109052 - DNA, 60 bp, Artificial
  Synthetic oligonucleotide
cgttcaagacggcttttgatctcgacggtgctctcctggacgggttggccctatatgggg

SEQ ID NO: 109053 - DNA, 60 bp, Artificial
  Synthetic oligonucleotide
cgccaattcgatgtaacctccgctgcagccgccgaaatcatgcatgcagtcaatgacgcg

SEQ ID NO: 109054 - DNA, 60 bp, Artificial
  Synthetic oligonucleotide
atgatattaattattgctgcggttgttgccttaataacttctgcgagcacactaacgagc

SEQ ID NO: 109055 - DNA, 60 bp, Artificial
  Synthetic oligonucleotide
gatgattatgatgttcatggcgaagaacgaaaaagtaataagtcagcaaatcgaccatac

SEQ ID NO: 109056 - DNA, 60 bp, Artificial
  Synthetic oligonucleotide
tacgcaccaacagcgcctacgccggcatcgatgccgagagtcgcgctggatatactcgac

SEQ ID NO: 109057 - DNA, 60 bp, Artificial
  Synthetic oligonucleotide
cgtgcaatggcacatatgatattaattattgctgcggttgttgccttaataacttctgcg

SEQ ID NO: 109058 - DNA, 60 bp, Artificial
  Synthetic oligonucleotide
gtgacgagatgagtttagtgccatatcaagagaatgcgaggccaccaagttacgcaccaa

SEQ ID NO: 109059 - DNA, 60 bp, Artificial
  Synthetic oligonucleotide
agacggaattgcttatttgatggagtatgtgccaaacagcactttgaggaggtgatgaat

SEQ ID NO: 109060 - DNA, 60 bp, Artificial
  Synthetic oligonucleotide
tgtcaaacacaactggtgcaacgcaaacacaaaaagcggagaaggctgcattcgcatcgt

SEQ ID NO: 109061 - DNA, 60 bp, Artificial
  Synthetic oligonucleotide
aacgtatatcgactagagacattctgcagacacgcgatttacactcactatgtatgccaa

SEQ ID NO: 109062 - DNA, 60 bp, Artificial
  Synthetic oligonucleotide
gctgatttgcagttactttaaggttgaccatgctgatgggttaaagtatatacccatgga

SEQ ID NO: 109063 - DNA, 60 bp, Artificial
  Synthetic oligonucleotide
tgctgaattgtatgcagtttaaacttgaaatggatgacctggtgcataatgctgctgagc

SEQ ID NO: 109064 - DNA, 60 bp, Artificial
  Synthetic oligonucleotide
gcgatcagagcatggattcttcgcgatgcattaatgaattatactgcgaggaaacggcag

SEQ ID NO: 109065 - DNA, 60 bp, Artificial
  Synthetic oligonucleotide
ctggcgatcagagcatggattcttcgcgatgcattaatgaattatactgcgaggaaacgg

SEQ ID NO: 109066 - DNA, 60 bp, Artificial
  Synthetic oligonucleotide
ctcatatggatgtgaggtagatgctaataaccggtcagctggcgatcagagcatggattc

SEQ ID NO: 109067 - DNA, 60 bp, Artificial
  Synthetic oligonucleotide
ccaactcccgatgcgccaatgtccaatcatcaggcagctaccatgagagagctgatttgc

SEQ ID NO: 109068 - DNA, 60 bp, Artificial
  Synthetic oligonucleotide
tgtatgccaactcccgatgcgccaatgtccaatcatcaggcagctaccatgagagagctg

SEQ ID NO: 109069 - DNA, 60 bp, Artificial
  Synthetic oligonucleotide
gctgctgagctggataagatacagatgatgataccctttagtgaacgtgttttcagaatg

SEQ ID NO: 109070 - DNA, 60 bp, Artificial
  Synthetic oligonucleotide
cagtttaaacttgaaatggatgacctggtgcataatgctgctgagctggataagatacag

SEQ ID NO: 109071 - DNA, 60 bp, Artificial
  Synthetic oligonucleotide
ccgctccagtatgccaaacgtgagcgccttcttggacaaaggaatctggaacgtatatcg

SEQ ID NO: 109072 - DNA, 60 bp, Artificial
  Synthetic oligonucleotide
accgctccagtatgccaaacgtgagcgccttcttggacaaaggaatctggaacgtatatc

SEQ ID NO: 109073 - DNA, 60 bp, Artificial
  Synthetic oligonucleotide
gagacattctgcagacacgcgatttacactcactatgtatgccaactcccgatgcgccaa

SEQ ID NO: 109074 - DNA, 60 bp, Artificial
  Synthetic oligonucleotide
tggcttcgtcgtttgctaccattgatgcacagtgcttcagattttgtgtgttgatgaagg

SEQ ID NO: 109075 - DNA, 60 bp, Artificial
  Synthetic oligonucleotide
catctgttacaacaaaggtggtgcgaaatgtggttgagtatcagatccgtacgggcggat

SEQ ID NO: 109076 - DNA, 60 bp, Artificial
  Synthetic oligonucleotide
atgtcatgcttagatcatctgttacaacaaaggtggtgcgaaatgtggttgagtatcaga

SEQ ID NO: 109077 - DNA, 60 bp, Artificial
  Synthetic oligonucleotide
ccgtacgggcggattcttttcgtgcctagccatgttgagaccgctccagtatgccaaacg

SEQ ID NO: 109078 - DNA, 60 bp, Artificial
  Synthetic oligonucleotide
gagtatcagatccgtacgggcggattcttttcgtgcctagccatgttgagaccgctccag

SEQ ID NO: 109079 - DNA, 60 bp, Artificial
  Synthetic oligonucleotide
tttcagaatggcttcgtcgtttgctaccattgatgcacagtgcttcagattttgtgtgtt

SEQ ID NO: 109080 - DNA, 60 bp, Artificial
  Synthetic oligonucleotide
ctggataagatacagatgatgataccctttagtgaacgtgttttcagaatggcttcgtcg

SEQ ID NO: 109081 - DNA, 60 bp, Artificial
  Synthetic oligonucleotide
atgccaggttgctggtatttccgattcgcgtgtaatgggtgggtgagctgatgtggtcgc

SEQ ID NO: 109082 - DNA, 60 bp, Artificial
  Synthetic oligonucleotide
tgggtgggtgagctgatgtggtcgccaaggcatgtgccgatgtcttggtggtgggtggcg

SEQ ID NO: 109083 - DNA, 60 bp, Artificial
  Synthetic oligonucleotide
agctgatgtggtcgccaaggcatgtgccgatgtcttggtggtgggtggcgcctaatcatc

SEQ ID NO: 109084 - DNA, 60 bp, Artificial
  Synthetic oligonucleotide
gacatgcgtgagacgatgcggctctggacgcgatcggcattggatgactcagtggctact

SEQ ID NO: 109085 - DNA, 60 bp, Artificial
  Synthetic oligonucleotide
gcgtgagacgatgcggctctggacgcgatcggcattggatgactcagtggctacttcatc

SEQ ID NO: 109086 - DNA, 60 bp, Artificial
  Synthetic oligonucleotide
agtggctacttcatctttgagtatttcactagatcggggtcgatgggtggcagctgacgc

SEQ ID NO: 109087 - DNA, 60 bp, Artificial
  Synthetic oligonucleotide
ccagccctttctgcagaacagcttctggacgatggacttaaggggttagcgtgcatggat

SEQ ID NO: 109088 - DNA, 60 bp, Artificial
  Synthetic oligonucleotide
cagctgacgctaatgatgccaggttgctggtatttccgattcgcgtgtaatgggtgggtg

SEQ ID NO: 109089 - DNA, 60 bp, Artificial
  Synthetic oligonucleotide
ctctaccctatatgatcacacttgatggtgacacggtagtacctgttgctccagcccttt

SEQ ID NO: 109090 - DNA, 60 bp, Artificial
  Synthetic oligonucleotide
tcacacttgatggtgacacggtagtacctgttgctccagccctttctgcagaacagcttc

SEQ ID NO: 109091 - DNA, 60 bp, Artificial
  Synthetic oligonucleotide
acgtgtgcccataatgcacttagcagcggatttggattgcatgacattagctctacccta

SEQ ID NO: 109092 - DNA, 60 bp, Artificial
  Synthetic oligonucleotide
gtgcatggatatctcatatggatgtgaggtagatgctaataaccggtcagctggcgatca

SEQ ID NO: 109093 - DNA, 60 bp, Artificial
  Synthetic oligonucleotide
ttcactatgggtatggctggactgcacatcaccactgagccatcttacagacgtgtgccc

SEQ ID NO: 109094 - DNA, 60 bp, Artificial
  Synthetic oligonucleotide
ggctggactgcacatcaccactgagccatcttacagacgtgtgcccataatgcacttagc

SEQ ID NO: 109095 - DNA, 60 bp, Artificial
  Synthetic oligonucleotide
gagagagctgatttgcagttactttaaggttgaccatgctgatgggttaaagtatatacc

SEQ ID NO: 109096 - DNA, 60 bp, Artificial
  Synthetic oligonucleotide
cgtgtgcccataatgcacttagcagcggatttggattgcatgacattagctctaccctat

SEQ ID NO: 109097 - DNA, 60 bp, Artificial
  Synthetic oligonucleotide
ctccaagatcaagagagatgacgctggtcagcaggtttgtcccaattatgtcatgcttag

SEQ ID NO: 109098 - DNA, 60 bp, Artificial
  Synthetic oligonucleotide
gatctccaagatcaagagagatgacgctggtcagcaggtttgtcccaattatgtcatgct

SEQ ID NO: 109099 - DNA, 60 bp, Artificial
  Synthetic oligonucleotide
ctttgagtatttcactagatcggggtcgatgggtggcagctgacgctaatgatgccaggt

SEQ ID NO: 109100 - DNA, 60 bp, Artificial
  Synthetic oligonucleotide
aaaacaatcgtataatgatgcggtgaggatgagttttacggaattttcatcagtcccgct

SEQ ID NO: 109101 - DNA, 60 bp, Artificial
  Synthetic oligonucleotide
aacaatcgtataatgatgcggtgaggatgagttttacggaattttcatcagtcccgctag

SEQ ID NO: 109102 - DNA, 60 bp, Artificial
  Synthetic oligonucleotide
aattggcaggatataaagaacaagttaccactaaagacgaaattgagcaacagatggata

SEQ ID NO: 109103 - DNA, 60 bp, Artificial
  Synthetic oligonucleotide
aaaatggcaggatataaagaacaagtcaccactaaagacgaaattgagcaacagatggat

SEQ ID NO: 109104 - DNA, 55 bp, Artificial
  Synthetic oligonucleotide
tagtatgggtggtgggtagtatatgtaggcccttagggcactcgggtcgttagcc

SEQ ID NO: 109105 - DNA, 60 bp, Artificial
  Synthetic oligonucleotide
ggagagagttgaagagctaagtctggttcgtgtggatgatacaatttcacaaccaccgag

SEQ ID NO: 109106 - DNA, 60 bp, Artificial
  Synthetic oligonucleotide
acacagaaggcggagaaagctgcattcgcatcgtacgcagaagcgtttcgtgatgatgtg

SEQ ID NO: 109107 - DNA, 60 bp, Artificial
  Synthetic oligonucleotide
gaatccactgaagacgaaactgctcctttgactaagaaagacatgcttaagatgatgtct

SEQ ID NO: 109108 - DNA, 60 bp, Artificial
  Synthetic oligonucleotide
cgttggaatgacggaccgcgcgcaccgaagccggtcaacgacgtgaccgtttacgtcgcc

SEQ ID NO: 109109 - DNA, 60 bp, Artificial
  Synthetic oligonucleotide
tccaagcccgcttcgagtcaagacgatatgatcctgcgttggaatgacggaccgcgcgca

SEQ ID NO: 109110 - DNA, 60 bp, Artificial
  Synthetic oligonucleotide
cgcactgcttggagctcacgtcgccccttactcagccggagctattaaccagtttgatgg

SEQ ID NO: 109111 - DNA, 60 bp, Artificial
  Synthetic oligonucleotide
ggagctcacgtcgccccttactcagccggagctattaaccagtttgatggcgttgcttgg

SEQ ID NO: 109112 - DNA, 60 bp, Artificial
  Synthetic oligonucleotide
agtttgatggcgttgcttggagagatgcggtactcagttcatttgtcacggtaactcccg

SEQ ID NO: 109113 - DNA, 60 bp, Artificial
  Synthetic oligonucleotide
gcgttgcttggagagatgcggtactcagttcatttgtcacggtaactcccgccgttcccc

SEQ ID NO: 109114 - DNA, 60 bp, Artificial
  Synthetic oligonucleotide
gtaactcccgccgttccccccgctcctgcgaacccaccgatctgggcccctgcagatgac

SEQ ID NO: 109115 - DNA, 58 bp, Artificial
  Synthetic oligonucleotide
ccccgctcctgcgaacccaccgatctgggcccctgcagatgacgttcgtattgactca

SEQ ID NO: 109116 - DNA, 60 bp, Artificial
  Synthetic oligonucleotide
tgcagatgacgttcgtattgactcagctctttacccgacctacgccctgaagttcgacac

SEQ ID NO: 109117 - DNA, 60 bp, Artificial
  Synthetic oligonucleotide
cgtattgactcagctctttacccgacctacgccctgaagttcgacacgatgtggcctcag

SEQ ID NO: 109118 - DNA, 60 bp, Artificial
  Synthetic oligonucleotide
agttcgacacgatgtggcctcagaatcaggatcttcacatgatgactatgtggtcgctca

SEQ ID NO: 109119 - DNA, 60 bp, Artificial
  Synthetic oligonucleotide
gtcacgccgcctggttagcggatggtatcatcgatgctaacgcgcaggctgcttatgatg

SEQ ID NO: 109120 - DNA, 60 bp, Artificial
  Synthetic oligonucleotide
gcccagaacattgctggtttgactggtggaggcgtggctttgagggatgtggaacgctac

SEQ ID NO: 109121 - DNA, 60 bp, Artificial
  Synthetic oligonucleotide
ggctttgagggatgtggaacgctacaatgttgttgatctcgctgtgcgatgtcacgccgc

SEQ ID NO: 109122 - DNA, 60 bp, Artificial
  Synthetic oligonucleotide
gtctccccactggcaacagtcgatgctgcatgtctccttcgctatgctctcccagtccac

SEQ ID NO: 109123 - DNA, 60 bp, Artificial
  Synthetic oligonucleotide
aacctacctctcagagcccagaacattgctggtttgactggtggaggcgtggctttgagg

SEQ ID NO: 109124 - DNA, 60 bp, Artificial
  Synthetic oligonucleotide
gttggaatgacggaccgcgcgcaccgaagccggtcaacgacgtgaccgtttacgtcgccg

SEQ ID NO: 109125 - DNA, 60 bp, Artificial
  Synthetic oligonucleotide
ttacgtcgccgcagggtctccccactggcaacagtcgatgctgcatgtctccttcgctat

SEQ ID NO: 109126 - DNA, 60 bp, Artificial
  Synthetic oligonucleotide
ggcccattatttactaacgacgattaccttgacctcgcaggtacgaccgtccgcccatgg

SEQ ID NO: 109127 - DNA, 60 bp, Artificial
  Synthetic oligonucleotide
ccagctatggtctccacgtccatgaaatcgctgattggtgcctcggtcgctcagatagct

SEQ ID NO: 109128 - DNA, 60 bp, Artificial
  Synthetic oligonucleotide
tcttcttcgcacactccaagcccgcttcgagtcaagacgatatgatcctgcgttggaatg

SEQ ID NO: 109129 - DNA, 60 bp, Artificial
  Synthetic oligonucleotide
tttggttcgttgaccggacgactacaccgtgggcggacctgtgagggcttcttcttcgca

SEQ ID NO: 109130 - DNA, 60 bp, Artificial
  Synthetic oligonucleotide
ctttggttcgttgaccggacgactacaccgtgggcggacctgtgagggcttcttcttcgc

SEQ ID NO: 109131 - DNA, 60 bp, Artificial
  Synthetic oligonucleotide
ctatcagagcttaccgttacagtggtcaacttcctcaagaggccgtgtcgattcaagcac

SEQ ID NO: 109132 - DNA, 60 bp, Artificial
  Synthetic oligonucleotide
cggtcgctcagatagctatcagagcttaccgttacagtggtcaacttcctcaagaggccg

SEQ ID NO: 109133 - DNA, 60 bp, Artificial
  Synthetic oligonucleotide
cgccgcctggttagcggatggtatcatcgatgctaacgcgcaggctgcttatgatgctgc

SEQ ID NO: 109134 - DNA, 60 bp, Artificial
  Synthetic oligonucleotide
gaacataccagctatggtctccacgtccatgaaatcgctgattggtgcctcggtcgctca

SEQ ID NO: 109135 - DNA, 60 bp, Artificial
  Synthetic oligonucleotide
tggtcgctcactgataagggccccatttccctgcttaccttcccccgacggaacatacca

SEQ ID NO: 109136 - DNA, 60 bp, Artificial
  Synthetic oligonucleotide
attgccggagcgcgtcggatgttcccataatggcgacccagggggccatgacaaaacccc

SEQ ID NO: 109137 - DNA, 60 bp, Artificial
  Synthetic oligonucleotide
gcttatgatgctgcaacgaacgcccagttcgcaacgtttatggcacatatcgtcgccatg

SEQ ID NO: 109138 - DNA, 60 bp, Artificial
  Synthetic oligonucleotide
cgtcgccatggaagcagccaatcccatcgctaatggtcggatcatagtacaaccctttgc

SEQ ID NO: 109139 - DNA, 60 bp, Artificial
  Synthetic oligonucleotide
gctgcaacgaacgcccagttcgcaacgtttatggcacatatcgtcgccatggaagcagcc

SEQ ID NO: 109140 - DNA, 60 bp, Artificial
  Synthetic oligonucleotide
aaccctttgctgctggcgacgacgttgctccgttcgagacagcgcaggtgattgccggag

SEQ ID NO: 109141 - DNA, 60 bp, Artificial
  Synthetic oligonucleotide
cagccaatcccatcgctaatggtcggatcatagtacaaccctttgctgctggcgacgacg

SEQ ID NO: 109142 - DNA, 60 bp, Artificial
  Synthetic oligonucleotide
ggaacgctacaatgttgttgatctcgctgtgcgatgtcacgccgcctggttagcggatgg

SEQ ID NO: 109143 - DNA, 60 bp, Artificial
  Synthetic oligonucleotide
aacgacgattaccttgacctcgcaggtacgaccgtccgcccatggcagaaccgcatcaca

SEQ ID NO: 109144 - DNA, 60 bp, Artificial
  Synthetic oligonucleotide
ggcctcagaatcaggatcttcacatgatgactatgtggtcgctcactgataagggcccca

SEQ ID NO: 109145 - DNA, 60 bp, Artificial
  Synthetic oligonucleotide
cccatggcagaaccgcatcacaaatattgcgattaactctggtggctacccagtctgggg

SEQ ID NO: 109146 - DNA, 60 bp, Artificial
  Synthetic oligonucleotide
ccgcccatggcagaaccgcatcacaaatattgcgattaactctggtggctacccagtctg

SEQ ID NO: 109147 - DNA, 60 bp, Artificial
  Synthetic oligonucleotide
cgaatggtacgtgctataaggaaaacttataataatgctgttagaacggcgcttgttcga

SEQ ID NO: 109148 - DNA, 60 bp, Artificial
  Synthetic oligonucleotide
ggcacagaatgacatgcatagaacaagattacctttagatgctacgcaaagtattcatgc

SEQ ID NO: 109149 - DNA, 60 bp, Artificial
  Synthetic oligonucleotide
gtattacctagaggtacaacgttagcgattcttggcgcaattaaagagccagctgttgag

SEQ ID NO: 109150 - DNA, 60 bp, Artificial
  Synthetic oligonucleotide
catagttaatgaaggatacttattgccagggaaggaagactttaacatggttgagcgctt

SEQ ID NO: 109151 - DNA, 60 bp, Artificial
  Synthetic oligonucleotide
tcgtaagtatgttttcttaacgcgtgagacatatgaagcttacatattaaaaggtgtacc

SEQ ID NO: 109152 - DNA, 60 bp, Artificial
  Synthetic oligonucleotide
gcttatgttgagttcgtcgatgcgctcgtggctgaatgtactcgtatatctggggttgga

SEQ ID NO: 109153 - DNA, 60 bp, Artificial
  Synthetic oligonucleotide
tttgaatcctttaatgcttatgttgagttcgtcgatgcgctcgtggctgaatgtactcgt

SEQ ID NO: 109154 - DNA, 60 bp, Artificial
  Synthetic oligonucleotide
gctacttttgtcatcagcgacatagatcaagagcgcagtcggtttgaatcctttaatgct

SEQ ID NO: 109155 - DNA, 60 bp, Artificial
  Synthetic oligonucleotide
gtattcatgctacttttgtcatcagcgacatagatcaagagcgcagtcggtttgaatcct

SEQ ID NO: 109156 - DNA, 60 bp, Artificial
  Synthetic oligonucleotide
cgacttggataatttagatttggatacttgtacgctattcaagatgcgaatacctataca

SEQ ID NO: 109157 - DNA, 60 bp, Artificial
  Synthetic oligonucleotide
cgagcagcttttcaagtataatttctgattacatgcgaagtgatgttgaggatcttagtc

SEQ ID NO: 109158 - DNA, 60 bp, Artificial
  Synthetic oligonucleotide
gcgttgattggcttccaacagaaactgttcgtaagactaccattaatgatactttgtccg

SEQ ID NO: 109159 - DNA, 60 bp, Artificial
  Synthetic oligonucleotide
atgattcaaattcgcctattcgtaatgtgcaagctggtgtttatcatacgagcagctttt

SEQ ID NO: 109160 - DNA, 60 bp, Artificial
  Synthetic oligonucleotide
tgttagaacggcgcttgttcgaaacggatttcaaaatggtttcacacttgaatgtttctt

SEQ ID NO: 109161 - DNA, 60 bp, Artificial
  Synthetic oligonucleotide
caaacgcggtagctcttaaaagaaattctcactttattgttaatgtatatacacaggagt

SEQ ID NO: 109162 - DNA, 60 bp, Artificial
  Synthetic oligonucleotide
cggcacagctgtctcatctgcctatcagcttgatattttaagaagaattgcaaacgcggt

SEQ ID NO: 109163 - DNA, 60 bp, Artificial
  Synthetic oligonucleotide
gggagatttaattaatgtgaatgaggatgggaatataagtttcggcgttgattggcttcc

SEQ ID NO: 109164 - DNA, 60 bp, Artificial
  Synthetic oligonucleotide
ggatgaactcgggagatttaattaatgtgaatgaggatgggaatataagtttcggcgttg

SEQ ID NO: 109165 - DNA, 60 bp, Artificial
  Synthetic oligonucleotide
agcgaattacgataattcttgatcctctcgattttgctaacattgtgttggatgatgata

SEQ ID NO: 109166 - DNA, 60 bp, Artificial
  Synthetic oligonucleotide
tatatagcgatatttgtaataatgaatgctgtaaacggcacagctgtctcatctgcctat

SEQ ID NO: 109167 - DNA, 60 bp, Artificial
  Synthetic oligonucleotide
gcgaatacctatacatgaattatatgacgctatgaccttattagctcaatgttgccgtga

SEQ ID NO: 109168 - DNA, 60 bp, Artificial
  Synthetic oligonucleotide
gaagtgaatgaattgctgcgaacaattaacataatcataccttatggagatggagattgt

SEQ ID NO: 109169 - DNA, 60 bp, Artificial
  Synthetic oligonucleotide
gtttagcgtgcatgcatgtaagtttccatatgaaaatacctcacatgtttgtatatacaa

SEQ ID NO: 109170 - DNA, 60 bp, Artificial
  Synthetic oligonucleotide
gtgatgtaacgttaacagagatgaaacgtatagccgaaggttttggtttagcgtgcatgc

SEQ ID NO: 109171 - DNA, 60 bp, Artificial
  Synthetic oligonucleotide
tcgacaccgatttacgtagtggagattttatctatcgttatgatgaacgctcaaagagac

SEQ ID NO: 109172 - DNA, 60 bp, Artificial
  Synthetic oligonucleotide
ggcgatacattcctctcacaaatttagacagacagcgtgatctatttaaacttccaagct

SEQ ID NO: 109173 - DNA, 60 bp, Artificial
  Synthetic oligonucleotide
ggcttatggcgatacattcctctcacaaatttagacagacagcgtgatctatttaaactt

SEQ ID NO: 109174 - DNA, 60 bp, Artificial
  Synthetic oligonucleotide
actagctggatccgaacgtgcttataaattacaaaccttagggaatctctatcctgtaac

SEQ ID NO: 109175 - DNA, 60 bp, Artificial
  Synthetic oligonucleotide
gctgactggatacaagatcatagattgcgttctggtgagggattgcgtattactagggta

SEQ ID NO: 109176 - DNA, 53 bp, Artificial
  Synthetic oligonucleotide
tgcgctaaagcgatccgcagaagaacgattcatacatgatacatctagaatct

SEQ ID NO: 109177 - DNA, 60 bp, Artificial
  Synthetic oligonucleotide
cctacctgcctttgtaactagtgattatagaagtaccattgtgaaaagtgaagatgcacg

SEQ ID NO: 109178 - DNA, 60 bp, Artificial
  Synthetic oligonucleotide
gggtgatgcggtatatggttcaagtatttctgacgcagcagttaaagtgatggatgttgc

SEQ ID NO: 109179 - DNA, 60 bp, Artificial
  Synthetic oligonucleotide
ggattctataccacatggattgggaaagttttcaggtaatcctactattattcacgagca

SEQ ID NO: 109180 - DNA, 60 bp, Artificial
  Synthetic oligonucleotide
ccgaacgtgcttataaattacaaaccttagggaatctctatcctgtaacaagtggtgaag

SEQ ID NO: 109181 - DNA, 60 bp, Artificial
  Synthetic oligonucleotide
ttaacaacccagaaccaagatatcgtgatgtttttaagttagtaactgagaatcgtaagt

SEQ ID NO: 109182 - DNA, 60 bp, Artificial
  Synthetic oligonucleotide
gccacctacctagctatttacgactatattctcgaaaacgatatttctgttggaataagg

SEQ ID NO: 109183 - DNA, 60 bp, Artificial
  Synthetic oligonucleotide
ggaaaatggtgtcaataggaggtcgtgatttagctgacatcgcatgttgcccaaatgatc

SEQ ID NO: 109184 - DNA, 53 bp, Artificial
  Synthetic oligonucleotide
gacatcgcatgttgcccaaatgatctagaatatatagttcaagatccacaagc

SEQ ID NO: 109185 - DNA, 60 bp, Artificial
  Synthetic oligonucleotide
ccaatcattatatctaaatcatagtcatcttcgtacggggtctggtctccaatcgcggaa

SEQ ID NO: 109186 - DNA, 60 bp, Artificial
  Synthetic oligonucleotide
aaatcatagtcatcttcgtacggggtctggtctccaatcgcggaacactgtttggggaga

SEQ ID NO: 109187 - DNA, 60 bp, Artificial
  Synthetic oligonucleotide
aatcctactattattcacgagcataatagagctaagtggactttgctgcataaatttgcc

SEQ ID NO: 109188 - DNA, 60 bp, Artificial
  Synthetic oligonucleotide
gcaccatgtcgctcgttgctgtatgagagaaggcctactgttagatgcttatgaacgtga

SEQ ID NO: 109189 - DNA, 60 bp, Artificial
  Synthetic oligonucleotide
gtccgtaataggaggcattaaccataagtggattgatttacatatgcaccatgtcgctcg

SEQ ID NO: 109190 - DNA, 60 bp, Artificial
  Synthetic oligonucleotide
gttgccgtgaaatacgtactatgagagatgcgatgagtgatactgtctatgtatttggga

SEQ ID NO: 109191 - DNA, 55 bp, Artificial
  Synthetic oligonucleotide
tctatgtatttgggaaatcttcatctaacagactacaattaacggagcgtggcat

SEQ ID NO: 109192 - DNA, 60 bp, Artificial
  Synthetic oligonucleotide
cctgtgaccatgactactaccggcgactttgatgtgatttatgaactgattgacaaccga

SEQ ID NO: 109193 - DNA, 60 bp, Artificial
  Synthetic oligonucleotide
gacaaccgaatgcaacaagagcttaacctgaacgaacttgaacactttatcgacaccgat

SEQ ID NO: 109194 - DNA, 60 bp, Artificial
  Synthetic oligonucleotide
tggatgttgcgcttactaacaaacgtctaacgaatggtatcatagttttggttgaaaatc

SEQ ID NO: 109195 - DNA, 60 bp, Artificial
  Synthetic oligonucleotide
ggtgtttatcatacgagcagcttttcaagtataatttctgattacatgcgaagtgatgtt

SEQ ID NO: 109196 - DNA, 60 bp, Artificial
  Synthetic oligonucleotide
cacgagcataatagagctaagtggactttgctgcataaatttgccacctacctagctatt

SEQ ID NO: 109197 - DNA, 60 bp, Artificial
  Synthetic oligonucleotide
caggtatgcttcgatggcgatacagcaatatttgagagttggttatgctgaggagattag

SEQ ID NO: 109198 - DNA, 60 bp, Artificial
  Synthetic oligonucleotide
taggtatgcttcgatggcgatacagcaatatttaagagttggttatgctgaagagatcag

SEQ ID NO: 109199 - DNA, 60 bp, Artificial
  Synthetic oligonucleotide
cattttaataggtatgcttcgatggcgatacagcaatatttaagagttggttatgctgaa

SEQ ID NO: 109200 - DNA, 60 bp, Artificial
  Synthetic oligonucleotide
ttaacaggtatgcttcgatggcgatacagcaatatttgagagttggttatgctgaggaga

SEQ ID NO: 109201 - DNA, 60 bp, Artificial
  Synthetic oligonucleotide
ggtataatcctaccaatatgtcgaggcaggcttggattgaaacgagtgctcttgttgagt

SEQ ID NO: 109202 - DNA, 60 bp, Artificial
  Synthetic oligonucleotide
ccagtcgatccgagacgtcttgctcgtgctacggctggagcgaattccggaaactacaca

SEQ ID NO: 109203 - DNA, 60 bp, Artificial
  Synthetic oligonucleotide
ccttacctatctccagtcgatccgagacgtcttgctcgtgctacggctggagcgaattcc

SEQ ID NO: 109204 - DNA, 60 bp, Artificial
  Synthetic oligonucleotide
ccatgaatcgtttaaccatggcgctgttgtctaattattgccctgacgttcaaggaattg

SEQ ID NO: 109205 - DNA, 60 bp, Artificial
  Synthetic oligonucleotide
gccatgaatcgtttaaccatggcgctgttgtctaattattgccctgacgttcaaggaatt

SEQ ID NO: 109206 - DNA, 60 bp, Artificial
  Synthetic oligonucleotide
ccagttgatgattttggtctgactggtttgttggagccattcagaaacaggcttatggcc

SEQ ID NO: 109207 - DNA, 60 bp, Artificial
  Synthetic oligonucleotide
tatggctaatataccagttgatgattttggtctgactggtttgttggagccattcagaaa

SEQ ID NO: 109208 - DNA, 60 bp, Artificial
  Synthetic oligonucleotide
ttatggcctgcggacagtccgaaatattttctgatgccatgaatcgtttaaccatggcgc

SEQ ID NO: 109209 - DNA, 60 bp, Artificial
  Synthetic oligonucleotide
cattcagaaacaggcttatggcctgcggacagtccgaaatattttctgatgccatgaatc

SEQ ID NO: 109210 - DNA, 60 bp, Artificial
  Synthetic oligonucleotide
ccttgactggattcgccatcgctattgaaggtgatttccattttcagatgaacaggtgtc

SEQ ID NO: 109211 - DNA, 60 bp, Artificial
  Synthetic oligonucleotide
taaccaacgttcccttgactggattcgccatcgctattgaaggtgatttccattttcaga

SEQ ID NO: 109212 - DNA, 60 bp, Artificial
  Synthetic oligonucleotide
agatgtaatttcatgcttcgtccagcttggtttgactctgatgtcatacctgccgtaacc

SEQ ID NO: 109213 - DNA, 60 bp, Artificial
  Synthetic oligonucleotide
cattttcagatgaacaggtgtcagtcttattatactggtacctcaatagttatggctaat

SEQ ID NO: 109214 - DNA, 60 bp, Artificial
  Synthetic oligonucleotide
ttctgatgcaattgtatcattctcattcagtggtgggattgttacagttgtaaccaacgt

SEQ ID NO: 109215 - DNA, 60 bp, Artificial
  Synthetic oligonucleotide
caggtgtcagtcttattatactggtacctcaatagttatggctaatataccagttgatga

SEQ ID NO: 109216 - DNA, 60 bp, Artificial
  Synthetic oligonucleotide
ccagctatcccttggagatgtcggatttctaaatgatttgagaactccactccaaactat

SEQ ID NO: 109217 - DNA, 52 bp, Artificial
  Synthetic oligonucleotide
tttagcggattaaccatcagtgatgttaccacattggccaatttaatgggcc

SEQ ID NO: 109218 - DNA, 60 bp, Artificial
  Synthetic oligonucleotide
tttagcggattaaccatcagtgatgttaccacattggccaatttaatgggccagctatcc

SEQ ID NO: 109219 - DNA, 60 bp, Artificial
  Synthetic oligonucleotide
ttggttcaccaattaccaatgtcgatgtcaacgtagcaaacggcgccaacgtcgttgcta

SEQ ID NO: 109220 - DNA, 60 bp, Artificial
  Synthetic oligonucleotide
accaatatgtcgaggcaggcttggattgaaacgagtgctcttgttgagtccatatcctcc

SEQ ID NO: 109221 - DNA, 60 bp, Artificial
  Synthetic oligonucleotide
gtatcattctcattcagtggtgggattgttacagttgtaaccaacgttcccttgactgga

SEQ ID NO: 109222 - DNA, 52 bp, Artificial
  Synthetic oligonucleotide
aaacgagattttcaaatccgatttcggatactttgcggcagatgaacaattt

SEQ ID NO: 109223 - DNA, 60 bp, Artificial
  Synthetic oligonucleotide
ctctgatgtcatacctgccgtaaccgacaatttcattgttgattacgtgaaaacgagatt

SEQ ID NO: 109224 - DNA, 56 bp, Artificial
  Synthetic oligonucleotide
tcaaggaattgaattgatagcattcacttctccttggtacagaatgtcagagcgtt

SEQ ID NO: 109225 - DNA, 60 bp, Artificial
  Synthetic oligonucleotide
tttaatcaagcagggtttaaccttgagcgaaaacggttaattgttaggcatttatggata

SEQ ID NO: 109226 - DNA, 60 bp, Artificial
  Synthetic oligonucleotide
gcagggtttaaccttgagcgaaaacggttaattgttaggcatttatggataataatgtca

SEQ ID NO: 109227 - DNA, 60 bp, Artificial
  Synthetic oligonucleotide
tttatggataataatgtcattcatagccgttttcggacgttactataatacaacgtgatt

SEQ ID NO: 109228 - DNA, 60 bp, Artificial
  Synthetic oligonucleotide
caacgtgatttaatcacttttatcgggaagctcgtttcccctagcttggccacaatccgg

SEQ ID NO: 109229 - DNA, 60 bp, Artificial
  Synthetic oligonucleotide
cacttttatcgggaagctcgtttcccctagcttggccacaatccggacctctgttccgtg

SEQ ID NO: 109230 - DNA, 60 bp, Artificial
  Synthetic oligonucleotide
cacaatccggacctctgttccgtgagtacggcttgaaagcggaaccctggcgaggtggag

SEQ ID NO: 109231 - DNA, 60 bp, Artificial
  Synthetic oligonucleotide
cctctgttccgtgagtacggcttgaaagcggaaccctggcgaggtggagtagtaactccc

SEQ ID NO: 109232 - DNA, 60 bp, Artificial
  Synthetic oligonucleotide
ccaatgtcgatgtcaacgtagcaaacggcgccaacgtcgttgctaatattcgagtgccta

SEQ ID NO: 109233 - DNA, 60 bp, Artificial
  Synthetic oligonucleotide
gtcgttgctaatattcgagtgcctacagacgccaatgatatggcggtagattctgatgca

SEQ ID NO: 109234 - DNA, 60 bp, Artificial
  Synthetic oligonucleotide
gggcgccggtctctaaatcctttgccggctgcacaatatgatattaacgttccacagtat

SEQ ID NO: 109235 - DNA, 60 bp, Artificial
  Synthetic oligonucleotide
atctctaccactgatagatgtaatttcatgcttcgtccagcttggtttgactctgatgtc

SEQ ID NO: 109236 - DNA, 60 bp, Artificial
  Synthetic oligonucleotide
gtggaggagcagtaccagaagattttgttgtcgctgaaaaagacaagattatcatagggc

SEQ ID NO: 109237 - DNA, 60 bp, Artificial
  Synthetic oligonucleotide
atcatagggcgccggtctctaaatcctttgccggctgcacaatatgatattaacgttcca

SEQ ID NO: 109238 - DNA, 60 bp, Artificial
  Synthetic oligonucleotide
agcgaattccggaaactacacaagacgtagggctctggctactgtgttaggtggaggagc

SEQ ID NO: 109239 - DNA, 60 bp, Artificial
  Synthetic oligonucleotide
ccggaaactacacaagacgtagggctctggctactgtgttaggtggaggagcagtaccag

SEQ ID NO: 109240 - DNA, 53 bp, Artificial
  Synthetic oligonucleotide
atgctggtatcctcgtggagtctacaggaccagatagggttcgtagatccccg

SEQ ID NO: 109241 - DNA, 60 bp, Artificial
  Synthetic oligonucleotide
tggtaataagaaatctgataatatagtggtttgctttaaaaatggcttcccaaacaagaa

SEQ ID NO: 109242 - DNA, 60 bp, Artificial
  Synthetic oligonucleotide
gacaccatcacctctaataagccaggggtggtacttagagatggtaataagaaatctgat

SEQ ID NO: 109243 - DNA, 60 bp, Artificial
  Synthetic oligonucleotide
ggcttggtgacggacaacaacacttccatgcttcatgacaaaatattagacaccatcacc

SEQ ID NO: 109244 - DNA, 60 bp, Artificial
  Synthetic oligonucleotide
tccaaacctgtggcgttgcaggttcctgtttcgacaataattctagactataaggatgag

SEQ ID NO: 109245 - DNA, 60 bp, Artificial
  Synthetic oligonucleotide
atctagaagcctgacagacgaggtttctaaactgtataaattgaatcggggcaacgtcaa

SEQ ID NO: 109246 - DNA, 60 bp, Artificial
  Synthetic oligonucleotide
cctgacagacgaggtttctaaactgtataaattgaatcggggcaacgtcaaagaaccccg

SEQ ID NO: 109247 - DNA, 60 bp, Artificial
  Synthetic oligonucleotide
tgtccggtaacggcttggtgacggacagcaacacttccatgcttcatgacaaaatattag

SEQ ID NO: 109248 - DNA, 60 bp, Artificial
  Synthetic oligonucleotide
cgcgacctggcgaggtagattctgcaaaggagcaatgggaagctttgtccggtaacggct

SEQ ID NO: 109249 - DNA, 60 bp, Artificial
  Synthetic oligonucleotide
gaagagcgttctgagctgtccaaactcaaacgaacagacccggacgcgtatgagaagctc

SEQ ID NO: 109250 - DNA, 60 bp, Artificial
  Synthetic oligonucleotide
tgatgaagagcgttctgagctgtccaaactcaaacgaacagacccggacgcgtatgagaa

SEQ ID NO: 109251 - DNA, 60 bp, Artificial
  Synthetic oligonucleotide
aactcaaacgaacagacccggacgcgtatgagaagctctattctgaaacgatctctaagc

SEQ ID NO: 109252 - DNA, 60 bp, Artificial
  Synthetic oligonucleotide
gggcaatgccttggcattgttcttcccaaagggcatgagggagataccctatcatcccgc

SEQ ID NO: 109253 - DNA, 60 bp, Artificial
  Synthetic oligonucleotide
gcccttctctgatgaagagcgttctgagctgtccaaactcaaacgaacagacccggacgc

SEQ ID NO: 109254 - DNA, 60 bp, Artificial
  Synthetic oligonucleotide
tattaatgaaagtgagcccttctctgatgaagagcgttctgagctgtccaaactcaaacg

SEQ ID NO: 109255 - DNA, 60 bp, Artificial
  Synthetic oligonucleotide
gtgccatggatataattggaagccctagtaatacggctccgcaaacggcgtttcaaagta

SEQ ID NO: 109256 - DNA, 59 bp, Artificial
  Synthetic oligonucleotide
ggggcttttcggcaccgggtcatatcaagtatgggacctgaaatttcatacttagttat

SEQ ID NO: 109257 - DNA, 60 bp, Artificial
  Synthetic oligonucleotide
cctttcatccagggggcttttcggcaccgggtcatatcaagtatgggacctgaaatttca

SEQ ID NO: 109258 - DNA, 60 bp, Artificial
  Synthetic oligonucleotide
gcgtttcaaagtataatgccgtctctatctgcgctgtttaatacccctttcatccagggg

SEQ ID NO: 109259 - DNA, 60 bp, Artificial
  Synthetic oligonucleotide
ggtaaacgtgagccgttggcgctggaatttagaaaggataatgaggggcaatgccttggc

SEQ ID NO: 109260 - DNA, 60 bp, Artificial
  Synthetic oligonucleotide
cgctggaatttagaaaggataatgaaggtcaatgccttggcattgttcttcccaaagggc

SEQ ID NO: 109261 - DNA, 60 bp, Artificial
  Synthetic oligonucleotide
ggaattattctcgatgggctctggtaaacgtgagccgttggcgctggaatttagaaagga

SEQ ID NO: 109262 - DNA, 60 bp, Artificial
  Synthetic oligonucleotide
gggctctggtaaacgtgagccgttggcgctggaatttagaaaggataatgaggggcaatg

SEQ ID NO: 109263 - DNA, 60 bp, Artificial
  Synthetic oligonucleotide
ttccattcttcagaaattacgtcaatgtacaatcgaagggttctctccctccggctgtgg

SEQ ID NO: 109264 - DNA, 60 bp, Artificial
  Synthetic oligonucleotide
atcgctattaattcgacgatggctaaaagcacgaagttggtgtctgcttcaactcttcag

SEQ ID NO: 109265 - DNA, 60 bp, Artificial
  Synthetic oligonucleotide
gcatggatttgggtgggattttattatctcaggctcttccattcttcagaaattacgtca

SEQ ID NO: 109266 - DNA, 60 bp, Artificial
  Synthetic oligonucleotide
gtaagcagcttacatcgattggttttaaatgctatgataagtatttcttctctggaaaaa

SEQ ID NO: 109267 - DNA, 60 bp, Artificial
  Synthetic oligonucleotide
cagatcatgctcctgatgacagttatttcaagatgatctcaagcattgttaaacaccctg

SEQ ID NO: 109268 - DNA, 60 bp, Artificial
  Synthetic oligonucleotide
tggatttagtgaatgctcaggcgttaacaagactatttttgatgctaaaaattgtgactt

SEQ ID NO: 109269 - DNA, 60 bp, Artificial
  Synthetic oligonucleotide
cagaattatgaaaccaaaatacaacaactagaacaatggcaaaaacagatggaagcagca

SEQ ID NO: 109270 - DNA, 60 bp, Artificial
  Synthetic oligonucleotide
ttaaagttaaaagtaaaattgaagaatcaaaaagacggttattttttatcagtgctaatt

SEQ ID NO: 109271 - DNA, 60 bp, Artificial
  Synthetic oligonucleotide
taaattgaacagggatggatccaggacaagtcctcaaataccttttgtctcagaattatg

SEQ ID NO: 109272 - DNA, 60 bp, Artificial
  Synthetic oligonucleotide
gaacagggatggatccaggacaagtcctcaaataccttttgtctcagaattatgaaacca

SEQ ID NO: 109273 - DNA, 60 bp, Artificial
  Synthetic oligonucleotide
agcgtaaaccaaagtttacttatttagaagaattgggatttggtcgtcgtagagcctctt

SEQ ID NO: 109274 - DNA, 60 bp, Artificial
  Synthetic oligonucleotide
gcgtaaaccaaagtttacttatttagaagaattgggatttggtcgtcgtagagcctcttc

SEQ ID NO: 109275 - DNA, 60 bp, Artificial
  Synthetic oligonucleotide
gttctgcaatttccaatcttaggattttgttttattcttacagggatcatggttgatgca

SEQ ID NO: 109276 - DNA, 60 bp, Artificial
  Synthetic oligonucleotide
gcaatttccaatcttaggattttgttttattcttacagggatcatggttgatgcattagg

SEQ ID NO: 109277 - DNA, 60 bp, Artificial
  Synthetic oligonucleotide
gacaaccccagttcatgcgaagtttatgagttatgtatcaaaacttttgattattatcca

SEQ ID NO: 109278 - DNA, 60 bp, Artificial
  Synthetic oligonucleotide
ctctttttcagatcatgctcctgatgacagttatttcaagatgatctcaagcattgttaa

SEQ ID NO: 109279 - DNA, 60 bp, Artificial
  Synthetic oligonucleotide
tcttgtgacaaccccagttcatgcgaagtttatgagttgtgtatcaaaacttttgattat

SEQ ID NO: 109280 - DNA, 60 bp, Artificial
  Synthetic oligonucleotide
cacaatttgtcggttggaattttacttatggcgaaagagatagattcatttctcctattg

SEQ ID NO: 109281 - DNA, 60 bp, Artificial
  Synthetic oligonucleotide
gtttaccaaacgaataatgtcatttctgacatgatgaataatttcgacaagagattatct

SEQ ID NO: 109282 - DNA, 60 bp, Artificial
  Synthetic oligonucleotide
caagatgatctcaagcattgttaaacaccctgaaattctgagattttaatgtactttggg

SEQ ID NO: 109283 - DNA, 60 bp, Artificial
  Synthetic oligonucleotide
tgcgttttgcaatttccaatcttaggattttgttttattcttacagggatcatggttgat

SEQ ID NO: 109284 - DNA, 60 bp, Artificial
  Synthetic oligonucleotide
gggtgttgtgtctcctaaatttgcaagtgaattcgaatataatggtaagactctaaagct

SEQ ID NO: 109285 - DNA, 60 bp, Artificial
  Synthetic oligonucleotide
gggtgtcgtgtctcctaaatttacaagtgaattcgaatataatggtaagactctaaagct

SEQ ID NO: 109286 - DNA, 60 bp, Artificial
  Synthetic oligonucleotide
agttatatgatgaacatccaaaacttcaagcattatctgtggttagtgagaatgaaggtg

SEQ ID NO: 109287 - DNA, 61 bp, Artificial
  Synthetic oligonucleotide
gagttatatgatgaacatccaaaacttcaagcattatctatggttagtgagaatgaaggtg

SEQ ID NO: 109288 - DNA, 60 bp, Artificial
  Synthetic oligonucleotide
ttgagttatatgatgaacatccaaaacttcaagcattatctgtggttagtgagaatgaag

SEQ ID NO: 109289 - DNA, 60 bp, Artificial
  Synthetic oligonucleotide
ctcctattgtttgtgatgtagagacaaaattaaaaactaattcatctatcattagtaacg

SEQ ID NO: 109290 - DNA, 60 bp, Artificial
  Synthetic oligonucleotide
tagattcatttctcctattgtttgtgatgtagagacaaaattaaaaactaattcatctat

SEQ ID NO: 109291 - DNA, 60 bp, Artificial
  Synthetic oligonucleotide
cggttggaattttacttatggcgaaagagatagattcatttctcctattgtttgtgatgt

SEQ ID NO: 109292 - DNA, 60 bp, Artificial
  Synthetic oligonucleotide
gcaatttgtcggttggaattttacttatggcgaaagagatagattcatttctcctattgt

SEQ ID NO: 109293 - DNA, 60 bp, Artificial
  Synthetic oligonucleotide
gtactttgggtcgacgcgactggtgaaatctacgaactgttggaatttgacatacatggg

SEQ ID NO: 109294 - DNA, 60 bp, Artificial
  Synthetic oligonucleotide
ccctgaaattctgagattttaatgtactttgggtcgacgcgactggtgaaatctacgaac

SEQ ID NO: 109295 - DNA, 60 bp, Artificial
  Synthetic oligonucleotide
cattgttaaacaccctgaaattctgagattttaatgtactttgggtcgacgcgactggtg

SEQ ID NO: 109296 - DNA, 60 bp, Artificial
  Synthetic oligonucleotide
gcattgttaaacaccctgaaattctgagattttaatgtactttgggtcgacgcgactggt

SEQ ID NO: 109297 - DNA, 59 bp, Artificial
  Synthetic oligonucleotide
cgcgactggtgaaatctacgaactgttggaatttgacatacatgggaacagctatcgtc

SEQ ID NO: 109298 - DNA, 60 bp, Artificial
  Synthetic oligonucleotide
gggtcgacgcgactggtgaaatctacgaactgttggaatttgacatacatgggaacagct

SEQ ID NO: 109299 - DNA, 58 bp, Artificial
  Synthetic oligonucleotide
tcattctcttaaattaaatactccttttcgatcttatgacaattatagtgacattttg

SEQ ID NO: 109300 - DNA, 60 bp, Artificial
  Synthetic oligonucleotide
agtaggtttcacgataatgatgcttatttaagtgctattcaagcacattgtcattctctt

SEQ ID NO: 109301 - DNA, 60 bp, Artificial
  Synthetic oligonucleotide
tattttatttttgccttttaacagacctgtagatataatctacttagaacaatcctcagg

SEQ ID NO: 109302 - DNA, 60 bp, Artificial
  Synthetic oligonucleotide
aatcctcaggcgatgaagttctcaatgaaatgaaaattatatcattcgaggtcaaagagt

SEQ ID NO: 109303 - DNA, 60 bp, Artificial
  Synthetic oligonucleotide
gacctgtagatataatttacttagaacagtcctcaggcgatgaagttctcaatgaaatga

SEQ ID NO: 109304 - DNA, 60 bp, Artificial
  Synthetic oligonucleotide
ggagctagtttaccaaacgaataatgtcatttctgacatgatgaataatttcgacaagag

SEQ ID NO: 109305 - DNA, 60 bp, Artificial
  Synthetic oligonucleotide
ggcgatgaagttctcaatgaaatgaaaattatatcattcgaggtcaaagagtttactgca

SEQ ID NO: 109306 - DNA, 60 bp, Artificial
  Synthetic oligonucleotide
tctttgaaaacacaatttgtcggttggaattttacttatggcgaaagagatagattcatt

SEQ ID NO: 109307 - DNA, 60 bp, Artificial
  Synthetic oligonucleotide
cgtcatctaagactaaatttaacgacaaaacttggcccggtattagaagtagattttacg

SEQ ID NO: 109308 - DNA, 60 bp, Artificial
  Synthetic oligonucleotide
ataatggtaagactctaaagctttctggcaacttaactttaagtgaagattttgatggtg

SEQ ID NO: 109309 - DNA, 60 bp, Artificial
  Synthetic oligonucleotide
ggtaagactctaaagctttctggcaacttaactttaagtgaagattttgatggtgttcaa

SEQ ID NO: 109310 - DNA, 60 bp, Artificial
  Synthetic oligonucleotide
tttgatggtgttcaaatgaagaaatgtttaacatcagaagagtttgttttaattgaagac

SEQ ID NO: 109311 - DNA, 60 bp, Artificial
  Synthetic oligonucleotide
aattgaagacgttaaatgtttattcacatcttttatttgcgaaggcaaacgctcgtcatc

SEQ ID NO: 109312 - DNA, 60 bp, Artificial
  Synthetic oligonucleotide
gacgttaaatgtttattcacatcttttatttgcgaaggcaaacgctcgtcatctaagact

SEQ ID NO: 109313 - DNA, 60 bp, Artificial
  Synthetic oligonucleotide
gctcgtcatctaagactaaatttaacgacaaaacttggcccggtattagaagtagatttt

SEQ ID NO: 109314 - DNA, 60 bp, Artificial
  Synthetic oligonucleotide
gctcgtcatctaagactaaatttaacgacaaaacttggcccggtattagaagtaggtttc

SEQ ID NO: 109315 - DNA, 60 bp, Artificial
  Synthetic oligonucleotide
cgtcatctaagactaaatttaacgacaaaacttggcccggtattagaagtaggtttcacg

SEQ ID NO: 109316 - DNA, 60 bp, Artificial
  Synthetic oligonucleotide
gagataccgcttcatccatgcatctagcgaacttcttcatggctgaaaagccgcactggg

SEQ ID NO: 109317 - DNA, 60 bp, Artificial
  Synthetic oligonucleotide
ctgggaagataatgccatatctctcaccattgcggggtcattgcttgagaactgcgatag

SEQ ID NO: 109318 - DNA, 60 bp, Artificial
  Synthetic oligonucleotide
tggaagaaaatattggtacccgtcaaggagttcagtttaaaaaccgagggtacggaggat

SEQ ID NO: 109319 - DNA, 60 bp, Artificial
  Synthetic oligonucleotide
cccaagaagtattacacttcataagatccaacggcttggtgataactgaacaggctctga

SEQ ID NO: 109320 - DNA, 60 bp, Artificial
  Synthetic oligonucleotide
taaaagtggatagagacacttcgaaatttacgaatgaacggctactggtttcactccttg

SEQ ID NO: 109321 - DNA, 60 bp, Artificial
  Synthetic oligonucleotide
cacaattatctatgatctcatgtttctacgagtcatgttgaatcttggtggctattctag

SEQ ID NO: 109322 - DNA, 60 bp, Artificial
  Synthetic oligonucleotide
cgcaagggctaaacctgaagagggaatctattgataaagtgaagcttgaagtgtctcgca

SEQ ID NO: 109323 - DNA, 59 bp, Artificial
  Synthetic oligonucleotide
ttcgcgaggaccttaagaatgtggctgacttagacttgccaaaactgtatgagcatgtt

SEQ ID NO: 109324 - DNA, 60 bp, Artificial
  Synthetic oligonucleotide
acagggccgtgtttaccgacaccgtccgtggccatattcgcgaggaccttaagaatgtgg

SEQ ID NO: 109325 - DNA, 60 bp, Artificial
  Synthetic oligonucleotide
ggaatggatttcacgcataagcatccgatcactaagaccgctgactttacgtccccagtc

SEQ ID NO: 109326 - DNA, 60 bp, Artificial
  Synthetic oligonucleotide
gatagatagtggcagaactggcgtgccagggatgaaactgtctgaaatagtagattggtt

SEQ ID NO: 109327 - DNA, 60 bp, Artificial
  Synthetic oligonucleotide
ccgaatgatgggaggcaacttaagaaggcggtgacaaggttaaatcactattatggattg

SEQ ID NO: 109328 - DNA, 60 bp, Artificial
  Synthetic oligonucleotide
gctagatgtaaatgatgaggttctacttcacatgttgcgcacgccgaatgatgggaggca

SEQ ID NO: 109329 - DNA, 60 bp, Artificial
  Synthetic oligonucleotide
gaagcgtcctctactggtaaagcgctcagcgttctcgctgattgctcatcctgggatcag

SEQ ID NO: 109330 - DNA, 60 bp, Artificial
  Synthetic oligonucleotide
tgctacactgtatcaaagcggaaccgcggatataatcgttccagctatcgaagcgtcctc

SEQ ID NO: 109331 - DNA, 60 bp, Artificial
  Synthetic oligonucleotide
gattgctcatcctgggatcagacgtatctgacggcgacgatgattccgtactataatgga

SEQ ID NO: 109332 - DNA, 60 bp, Artificial
  Synthetic oligonucleotide
gcgcatactagggcagaacagcatcggctcacgttctaccacagcttggagaccggtacg

SEQ ID NO: 109333 - DNA, 60 bp, Artificial
  Synthetic oligonucleotide
ggctttcattatcgggcctcacataaatgcaactgttaatcagcatgaataccaacctac

SEQ ID NO: 109334 - DNA, 60 bp, Artificial
  Synthetic oligonucleotide
gggactattcttcagtaggagtaatgatcccttagctttacaggctcgttatgctcgaat

SEQ ID NO: 109335 - DNA, 60 bp, Artificial
  Synthetic oligonucleotide
atctgaggcgtacgatttggagttgaaaataatgaacattttgacgttgtggcgaaatgg

SEQ ID NO: 109336 - DNA, 60 bp, Artificial
  Synthetic oligonucleotide
gatgatctgtttaagctaaacaactatgaagtgccagatgatgttgtgcgtaggcatgac

SEQ ID NO: 109337 - DNA, 60 bp, Artificial
  Synthetic oligonucleotide
cgtaggcatgacaacaagattttagacataatattaaaagagtcttccgtgccattctgg

SEQ ID NO: 109338 - DNA, 60 bp, Artificial
  Synthetic oligonucleotide
cttccgtgccattctggtatgacatatcggatgacgaagctcatgaatcaatgctgcctg

SEQ ID NO: 109339 - DNA, 60 bp, Artificial
  Synthetic oligonucleotide
gtcgtttcaaactctctgtccgcgtattatcttaaggaccagaaagatttactgcgtgac

SEQ ID NO: 109340 - DNA, 60 bp, Artificial
  Synthetic oligonucleotide
ccgccaccaacctcagtaattgctccagccgcatttaagggaggattgggattgtcattt

SEQ ID NO: 109341 - DNA, 60 bp, Artificial
  Synthetic oligonucleotide
agagcgattggtaccctacgcgtgaacgctttatatggtaggctaatagccgggctagca

SEQ ID NO: 109342 - DNA, 60 bp, Artificial
  Synthetic oligonucleotide
aaatactctgtgatgcagagcgacgagcaaatgtgattgatcgccaggctatccgttggg

SEQ ID NO: 109343 - DNA, 60 bp, Artificial
  Synthetic oligonucleotide
aggtatatcctttaaatcctctgatttagccttttcgggtagtgatttctcgcaagggct

SEQ ID NO: 109344 - DNA, 60 bp, Artificial
  Synthetic oligonucleotide
ggatctaaaccaatcactcggaggaggaaagccatggctggaactaagcgtgaaccgatc

SEQ ID NO: 109345 - DNA, 60 bp, Artificial
  Synthetic oligonucleotide
gccatcaacgcacgcatatgaaaatctgccatatgcatcactgcatcagtctttcaaaag

SEQ ID NO: 109346 - DNA, 60 bp, Artificial
  Synthetic oligonucleotide
gtctcgcaaatctatccgtgatttgcgctcttcgggtattagtgtgccatcaacgcacgc

SEQ ID NO: 109347 - DNA, 60 bp, Artificial
  Synthetic oligonucleotide
gtagaattgagaacgtaaagaattttgtcagcgtccttgctactggcatgcaaaaggacc

SEQ ID NO: 109348 - DNA, 60 bp, Artificial
  Synthetic oligonucleotide
gcaaaaggacctacagaggatgttctattacgtcggatttgtctactatgcacagaggct

SEQ ID NO: 109349 - DNA, 60 bp, Artificial
  Synthetic oligonucleotide
gtctactatgcacagaggcttatatggtctggtggtcactccagtaaaatattcgtctcc

SEQ ID NO: 109350 - DNA, 60 bp, Artificial
  Synthetic oligonucleotide
gacacattgaatgcttggatggcgcctacaatggaggattgtggttatcgacttactaag

SEQ ID NO: 109351 - DNA, 60 bp, Artificial
  Synthetic oligonucleotide
ccatctgatttggaagctaagtccaatattgattattacgtaactgctagatcggctggg

SEQ ID NO: 109352 - DNA, 60 bp, Artificial
  Synthetic oligonucleotide
cgtaactgctagatcggctgggattggcaacctacgtatatcaatagaaacagataaaag

SEQ ID NO: 109353 - DNA, 60 bp, Artificial
  Synthetic oligonucleotide
ccatgggttctggaatacttgatgttaatcccgtcagtaatgaacctatgatgttaaccg

SEQ ID NO: 109354 - DNA, 60 bp, Artificial
  Synthetic oligonucleotide
gatgttaaccgattacttgttaacgcaaactcccgaaacgcgagcaaatttagaggcggc

SEQ ID NO: 109355 - DNA, 56 bp, Artificial
  Synthetic oligonucleotide
tcgattcagctgcatgaatctgaaaaggattctggagcaagtgacgtcaccgagtc

SEQ ID NO: 109356 - DNA, 60 bp, Artificial
  Synthetic oligonucleotide
cactggcttatcctggtttcaggttgctggcgatgacgccatcatggtatacgatggatc

SEQ ID NO: 109357 - DNA, 60 bp, Artificial
  Synthetic oligonucleotide
cgatggatcatcaatctccacaactgagcaagtcactagaattaatgaaatcacggttcg

SEQ ID NO: 109358 - DNA, 60 bp, Artificial
  Synthetic oligonucleotide
cctcctatttgaaggaaaggcattcatttgtggttaagtatatgtggtcgggacgactgg

SEQ ID NO: 109359 - DNA, 60 bp, Artificial
  Synthetic oligonucleotide
gatcaccaggagaatagctgaagaagtatctttgagggtgtcaaacactggcttatcctg

SEQ ID NO: 109360 - DNA, 60 bp, Artificial
  Synthetic oligonucleotide
ggcaaatgatcggctgtgcctggacttgattcgtcatggatcttgcgaggtcggatatca

SEQ ID NO: 109361 - DNA, 60 bp, Artificial
  Synthetic oligonucleotide
tggatgaaagtcagagtgataagcggcgtcgcaagaagaggatggagaagagtcgtcctg

SEQ ID NO: 109362 - DNA, 60 bp, Artificial
  Synthetic oligonucleotide
gtgggcacacgagtatattcgcactatccaataaagctacgtatgatactgaacgactta

SEQ ID NO: 109363 - DNA, 60 bp, Artificial
  Synthetic oligonucleotide
atctcaatacccgaacgttcccagttttatttggaagtgacggttcattcgtgggcacac

SEQ ID NO: 109364 - DNA, 65 bp, Artificial
  Synthetic oligonucleotide
gaacgacttaacttatttattaacctactcagatcttcataagttccaagaattcgagctagatg

SEQ ID NO: 109365 - DNA, 60 bp, Artificial
  Synthetic oligonucleotide
tcggatatcattccgcatttgctatgcctcttccaagagataatccaagccaacatccaa

SEQ ID NO: 109366 - DNA, 60 bp, Artificial
  Synthetic oligonucleotide
tgagaatgtgacagctaacaatttacgtcacttggccggcagaaaatatgaacatgacat

SEQ ID NO: 109367 - DNA, 60 bp, Artificial
  Synthetic oligonucleotide
gagaatgtgacagctaacaatttacgtcacttggccggcagaaaatatgaacatgacatt

SEQ ID NO: 109368 - DNA, 60 bp, Artificial
  Synthetic oligonucleotide
gggtattaaatgatattaatccaaatgatctcctcaatcgtgccatagaactttgtgcct

SEQ ID NO: 109369 - DNA, 60 bp, Artificial
  Synthetic oligonucleotide
aatcgtgccatagaactttgtgccttattacatttttcagggtttaacgctgagaatgtg

SEQ ID NO: 109370 - DNA, 60 bp, Artificial
  Synthetic oligonucleotide
aaggtcttactttccagacgctgttgataatgaggttctttacgactatgttcgtatcaa

SEQ ID NO: 109371 - DNA, 60 bp, Artificial
  Synthetic oligonucleotide
aggactgttataacagggtattaaatgatattaatccaaatgatctcctcaatcgtgcca

SEQ ID NO: 109372 - DNA, 60 bp, Artificial
  Synthetic oligonucleotide
ctagcacggattgatactctctatcgtttaaagatcaaacaacccagctctcatccttta

SEQ ID NO: 109373 - DNA, 60 bp, Artificial
  Synthetic oligonucleotide
ctctcatcctttaataaggtcttactttccagacgctgttgataatgaggttctttacga

SEQ ID NO: 109374 - DNA, 60 bp, Artificial
  Synthetic oligonucleotide
ctaggtatcacgttggtaattcatgtcgtattactgaaagttcagtgcttgagttacctg

SEQ ID NO: 109375 - DNA, 60 bp, Artificial
  Synthetic oligonucleotide
gtaattcatgtcgtattactgaaagttcagtgcttgagttacctgtaggtgacgagactc

SEQ ID NO: 109376 - DNA, 60 bp, Artificial
  Synthetic oligonucleotide
ttaacggcctactccatcattttggagttgttcctataacattagttcgtgacatagtcg

SEQ ID NO: 109377 - DNA, 60 bp, Artificial
  Synthetic oligonucleotide
cggcctactccatcattttggagttgttcctataacattagttcgtgacatagtcgagat

SEQ ID NO: 109378 - DNA, 60 bp, Artificial
  Synthetic oligonucleotide
cgctttaaatcatgtggaaatagtatttggagagaagggactatatgttagaccgaccgg

SEQ ID NO: 109379 - DNA, 60 bp, Artificial
  Synthetic oligonucleotide
ggaaatagtatttggagagaagggactatatgttagaccgaccggatctaaagatctgtc

SEQ ID NO: 109380 - DNA, 60 bp, Artificial
  Synthetic oligonucleotide
gagttacctgtaggtgacgagactcgttacttcaaaccactcaagtgttctggaccatat

SEQ ID NO: 109381 - DNA, 60 bp, Artificial
  Synthetic oligonucleotide
cctgtaggtgacgagactcgttacttcaaaccactcaagtgttctggaccatatgccata

SEQ ID NO: 109382 - DNA, 60 bp, Artificial
  Synthetic oligonucleotide
tggaccatatgccatattcgaacgattaccatgtgagaaggattatcgtgttaacggcct

SEQ ID NO: 109383 - DNA, 60 bp, Artificial
  Synthetic oligonucleotide
gccatattcgaacgattaccatgtgagaaggattatcgtgttaacggcctactccatcat

SEQ ID NO: 109384 - DNA, 60 bp, Artificial
  Synthetic oligonucleotide
ctctaaacaatgaacgaaccagatgtcacaaacaacttaaaccaggcaaacgtaacaaga

SEQ ID NO: 109385 - DNA, 60 bp, Artificial
  Synthetic oligonucleotide
cgaaccagatgtcacaaacaacttaaaccaggcaaacgtaacaagaagtctacctcacgg

SEQ ID NO: 109386 - DNA, 60 bp, Artificial
  Synthetic oligonucleotide
gtgaacgtatgaatactaatgaagtcgttggaatagcagacaaggcaacaaagtgtgtag

SEQ ID NO: 109387 - DNA, 60 bp, Artificial
  Synthetic oligonucleotide
gtctgaagttgagagattgactgctgagaacaacatgttacgttctcatgtttgtgaacg

SEQ ID NO: 109388 - DNA, 60 bp, Artificial
  Synthetic oligonucleotide
taagatctggtaatactgtacagcataaaggattaaaactagatagtgtattactagcac

SEQ ID NO: 109389 - DNA, 60 bp, Artificial
  Synthetic oligonucleotide
caaggcaacaaagtgtgtagataagtttcaagctcattgggacatgatgttaagatctgg

SEQ ID NO: 109390 - DNA, 60 bp, Artificial
  Synthetic oligonucleotide
acttcaatgatggaccatctggctgtcgaagtggccggttcttcttccggtttctcatcc

SEQ ID NO: 109391 - DNA, 59 bp, Artificial
  Synthetic oligonucleotide
catcgttggatcacctgtccactatgaagctgtttatcccacaccaatgttgccttaca

SEQ ID NO: 109392 - DNA, 60 bp, Artificial
  Synthetic oligonucleotide
atctaaggtctgaagttgagagattgactgctgagaacaacatgttacgttctcatgttt

SEQ ID NO: 109393 - DNA, 60 bp, Artificial
  Synthetic oligonucleotide
gatggaccatctggctgtcgaagtggccggttcttcttccggtttctcatccgatggctg

SEQ ID NO: 109394 - DNA, 60 bp, Artificial
  Synthetic oligonucleotide
ttactagcacggattgatactctctatcgtttaaagatcaaacaacccagctctcatcct

SEQ ID NO: 109395 - DNA, 60 bp, Artificial
  Synthetic oligonucleotide
ctgtacagcataaaggattaaaactagatagtgtattactagcacggattgatactctct

SEQ ID NO: 109396 - DNA, 60 bp, Artificial
  Synthetic oligonucleotide
cccagggtgtcgaaccacggttaataaaacattcggaataaacaaaattgggagttacac

SEQ ID NO: 109397 - DNA, 60 bp, Artificial
  Synthetic oligonucleotide
taacccagggtgtcgaaccacggttaataaaacattcggaataaacaaaattgggagtta

SEQ ID NO: 109398 - DNA, 60 bp, Artificial
  Synthetic oligonucleotide
ctacctcacggaataccaataaaacgaagtaaattaataacccagggtgtcgaaccacgg

SEQ ID NO: 109399 - DNA, 60 bp, Artificial
  Synthetic oligonucleotide
cgtaacaagaagtctacctcacggaataccaataaaacgaagtaaattaataacccaggg

SEQ ID NO: 109400 - DNA, 60 bp, Artificial
  Synthetic oligonucleotide
taccaccaaaaccaaagcttctgcaatcaagtcaagatgtgagtctcagaccgcaggctt

SEQ ID NO: 109401 - DNA, 60 bp, Artificial
  Synthetic oligonucleotide
ttgggagttacacaataccaccaaaaccaaagcttctgcaatcaagtcaagatgtgagtc

SEQ ID NO: 109402 - DNA, 60 bp, Artificial
  Synthetic oligonucleotide
aggatcattcaacttaatatatacattacttaaaacattctacttaatctacatatttac

SEQ ID NO: 109403 - DNA, 60 bp, Artificial
  Synthetic oligonucleotide
acatatttactgttctcgaaatgtatcaacagattgacttcaacgcagttgactacagcg

SEQ ID NO: 109404 - DNA, 53 bp, Artificial
  Synthetic oligonucleotide
gtatcaacagattgacttcaacgcagttgactacagcgtactctacaatccgg

SEQ ID NO: 109405 - DNA, 60 bp, Artificial
  Synthetic oligonucleotide
gactacagcgtactctacaatccgggtggccagctggtccaaccaaccgccatcgttgga

SEQ ID NO: 109406 - DNA, 60 bp, Artificial
  Synthetic oligonucleotide
gtactctacaatccgggtggccagctggtccaaccaaccgccatcgttggatcacctgtc

SEQ ID NO: 109407 - DNA, 60 bp, Artificial
  Synthetic oligonucleotide
cgtggcgggtgatacgataactatatcagattcatttggtactggcaccaatgcggtttt

SEQ ID NO: 109408 - DNA, 60 bp, Artificial
  Synthetic oligonucleotide
ccggaatgtgtgaagaagggcccaggtgtaattgccaacattatggacacggcacgtgtt

SEQ ID NO: 109409 - DNA, 60 bp, Artificial
  Synthetic oligonucleotide
ctgcaggaccaggtactatttacggttttattgcgcaggatatcatccaacatgtaccgg

SEQ ID NO: 109410 - DNA, 57 bp, Artificial
  Synthetic oligonucleotide
tcgcgacgttaatgaccatgaagcactagatattatacgactcataaaaccaaagaa

SEQ ID NO: 109411 - DNA, 60 bp, Artificial
  Synthetic oligonucleotide
tcagtacaatcctagcggtcttgctgctggtataatggccggcaccggtaacattgtagt

SEQ ID NO: 109412 - DNA, 60 bp, Artificial
  Synthetic oligonucleotide
cagggtaatggtctgctgtacgtcacctctggaaatacaagatacataagctatataggt

SEQ ID NO: 109413 - DNA, 60 bp, Artificial
  Synthetic oligonucleotide
cgcattgctacaatacagttctggtcacacgttcctaaattgtagcgccggttctggtgt

SEQ ID NO: 109414 - DNA, 60 bp, Artificial
  Synthetic oligonucleotide
cggaaacacttggttcaagaacgttcccatcagtggcaatcactcccataaataacccat

SEQ ID NO: 109415 - DNA, 60 bp, Artificial
  Synthetic oligonucleotide
ataaagcgtgttaccgtaagtggcaactcaaacgagcaaggtagtggctacgtggcgggt

SEQ ID NO: 109416 - DNA, 60 bp, Artificial
  Synthetic oligonucleotide
cgaattccggattggaggttgttggtaaattgggaaacaaagcgtctatggtgttgcgcc

SEQ ID NO: 109417 - DNA, 60 bp, Artificial
  Synthetic oligonucleotide
ggttcaacttctttaactataaccaatcccggtgcatacacatccataagtggtactccg

SEQ ID NO: 109418 - DNA, 60 bp, Artificial
  Synthetic oligonucleotide
tacacgcatttctatgaatgatacgttcaccacggttgattctgtaggcacgaattccgg

SEQ ID NO: 109419 - DNA, 60 bp, Artificial
  Synthetic oligonucleotide
gatgggttaataattgaatatggcacggccacttctggtgtggtagttatggatacacgc

SEQ ID NO: 109420 - DNA, 60 bp, Artificial
  Synthetic oligonucleotide
cgtacatggaggggctaactttacatccgggataacgtcgtccagcgcatcaattactgg

SEQ ID NO: 109421 - DNA, 60 bp, Artificial
  Synthetic oligonucleotide
tagttcagcaaatagtgtcggcattgccggtggcgcctcatcccaatataaactctacgt

SEQ ID NO: 109422 - DNA, 60 bp, Artificial
  Synthetic oligonucleotide
cgcgaaatttacctccaattctaatgtggttacgagttacagtgtctcgcagttgggtgc

SEQ ID NO: 109423 - DNA, 60 bp, Artificial
  Synthetic oligonucleotide
gatggtgtgaccatagatgagaaatttacctgtagtgtgttagagctaggttcactttta

SEQ ID NO: 109424 - DNA, 60 bp, Artificial
  Synthetic oligonucleotide
gactactactgtttctacgataacaaagggtggatccagtgtagttaggactgctgccga

SEQ ID NO: 109425 - DNA, 60 bp, Artificial
  Synthetic oligonucleotide
cctgtgttcatttacagaagtgagggtatttttaggcctgcaaattggggtagcgatgga

SEQ ID NO: 109426 - DNA, 60 bp, Artificial
  Synthetic oligonucleotide
caatctgagttgggtacgctgttgaaaactctaacagggagaatcgacttagtatcgcct

SEQ ID NO: 109427 - DNA, 60 bp, Artificial
  Synthetic oligonucleotide
gagtgtatctacacacgcgagtaatacggcatacacgctatcgactacagctttagccac

SEQ ID NO: 109428 - DNA, 60 bp, Artificial
  Synthetic oligonucleotide
caagcgttgaattgggagcacgcctaattgccactgaatcaaacgctgatacacgagcac

SEQ ID NO: 109429 - DNA, 60 bp, Artificial
  Synthetic oligonucleotide
ctgacgggactgcacaagacttacattcatatattataaatttggtcgccgggaatgcga

SEQ ID NO: 109430 - DNA, 60 bp, Artificial
  Synthetic oligonucleotide
cgcgcactttactcatgccgctataaatcctacgcattttggtaattacgcattgctaca

SEQ ID NO: 109431 - DNA, 60 bp, Artificial
  Synthetic oligonucleotide
cgcaggtgtctaagaattacgatgaaggtacattaaactatgaattgaacgcgtatacac

SEQ ID NO: 109432 - DNA, 60 bp, Artificial
  Synthetic oligonucleotide
agcacaacccgcctctggagaatcatttgcgcttgcatcatcactagttaatctagttga

SEQ ID NO: 109433 - DNA, 60 bp, Artificial
  Synthetic oligonucleotide
ggtttgcaccaatagcggctcccggtgaaacgtacgcatatctatccacaactagcctgg

SEQ ID NO: 109434 - DNA, 60 bp, Artificial
  Synthetic oligonucleotide
ccactaggacgcaaagtgacggtactactctttcgggatatacaggaggtattcatgtcc

SEQ ID NO: 109435 - DNA, 60 bp, Artificial
  Synthetic oligonucleotide
gcgggagttagtagtcactttacaaagtcaggcaacaatatcacatacaattatgctggc

SEQ ID NO: 109436 - DNA, 60 bp, Artificial
  Synthetic oligonucleotide
ctggcaatgtcggtatcggtggcacaccaaacactaaactagaggtatacggatcaatac

SEQ ID NO: 109437 - DNA, 60 bp, Artificial
  Synthetic oligonucleotide
acggtagatttgaaacgtcgggtttaaatttgacgagtttgacaagtcgtgtaagtgcgc

SEQ ID NO: 109438 - DNA, 60 bp, Artificial
  Synthetic oligonucleotide
aaacaaggatctttcagcatacaccggcagcgtagacgaaaatggggttccacagaaagt

SEQ ID NO: 109439 - DNA, 57 bp, Artificial
  Synthetic oligonucleotide
tgacgcgtacgaagataagagcgatatcgttaaagacggtgacacatatacaaggac

SEQ ID NO: 109440 - DNA, 60 bp, Artificial
  Synthetic oligonucleotide
atagcaataacgactgccgctcttcaagaaatcgatcgtcagctgcaactagagaaagcc

SEQ ID NO: 109441 - DNA, 60 bp, Artificial
  Synthetic oligonucleotide
acatctgtggaaagaacagggttgtttctgagacccgatagttttgcggtcgacgatcag

SEQ ID NO: 109442 - DNA, 60 bp, Artificial
  Synthetic oligonucleotide
catctaacctggtattcgcaagcttaactccaaatgtgatcccagcatcacccgatatac

SEQ ID NO: 109443 - DNA, 60 bp, Artificial
  Synthetic oligonucleotide
ggtgacttgagtgtatctgggaacatttctttaatagatacatctgtaactccaaacacc

SEQ ID NO: 109444 - DNA, 60 bp, Artificial
  Synthetic oligonucleotide
tgaaagtaggaaggtggtatggctcacgggtgccgggacagctgcatcatcgacattgga

SEQ ID NO: 109445 - DNA, 60 bp, Artificial
  Synthetic oligonucleotide
ctcaagagggccttggaaataagctcaaagttatggataacgaaattggattacgcgcac

SEQ ID NO: 109446 - DNA, 60 bp, Artificial
  Synthetic oligonucleotide
cgtaaccacgacgtatggcgttacgtctcttggtgctgagttacatcgtattgccgttgc

SEQ ID NO: 109447 - DNA, 60 bp, Artificial
  Synthetic oligonucleotide
gcttggacgtgtctcgaccttgataaatggtggtgacctatcaatgttacgccctgatgg

SEQ ID NO: 109448 - DNA, 60 bp, Artificial
  Synthetic oligonucleotide
ggtcgccgggaatgcgaaagtgttctatcgtgacgtatcgtacacatcgaaaattagact

SEQ ID NO: 109449 - DNA, 60 bp, Artificial
  Synthetic oligonucleotide
cactgtcagattatgagttgggcgcaatgctggaacgctttgacactacacacctgttga

SEQ ID NO: 109450 - DNA, 60 bp, Artificial
  Synthetic oligonucleotide
ctaaatgtttacacaattccccaaatagacggaataatcgccgagggtcacgtagcgggc

SEQ ID NO: 109451 - DNA, 60 bp, Artificial
  Synthetic oligonucleotide
ggtgtcacggttagagtcgaatggtgtagtggtacctgaatacacccttacacagacaga

SEQ ID NO: 109452 - DNA, 60 bp, Artificial
  Synthetic oligonucleotide
cctggaaaattatcaaacgagagccgcatcgaatatcttatatcaggcgaaagaaacagc

SEQ ID NO: 109453 - DNA, 60 bp, Artificial
  Synthetic oligonucleotide
gaaagcggcaacactatcaataagtaacactgcaacgcaactaaccagtgcgctaaatgg

SEQ ID NO: 109454 - DNA, 60 bp, Artificial
  Synthetic oligonucleotide
cggtaactggaattacgcaacaatcctcaagtggtagtggtaccggagttaccttctcgg

SEQ ID NO: 109455 - DNA, 60 bp, Artificial
  Synthetic oligonucleotide
cgggtaagggatacgtcacctctccatcagtagtagtcagtggtacatatgtagatacgg

SEQ ID NO: 109456 - DNA, 60 bp, Artificial
  Synthetic oligonucleotide
gtagatacggtcagtaacactacgacaacgtcgggaatacaaagtgcggtagctgttcta

SEQ ID NO: 109457 - DNA, 60 bp, Artificial
  Synthetic oligonucleotide
gttacttccatcagcgactcacctcctttcggattcgctcattcatctcttcctgtacct

SEQ ID NO: 109458 - DNA, 60 bp, Artificial
  Synthetic oligonucleotide
agaagctcatgttacttccatcagcgactcacctcctttcggattcgctcattcatctct

SEQ ID NO: 109459 - DNA, 60 bp, Artificial
  Synthetic oligonucleotide
cccgctcgaccgtctgtgactccgacctctcagacctcccttcattcagaagctcatgtt

SEQ ID NO: 109460 - DNA, 60 bp, Artificial
  Synthetic oligonucleotide
cttcccgctcgaccgtctgtgactccgacctctcagacctcccttcattcagaagctcat

SEQ ID NO: 109461 - DNA, 60 bp, Artificial
  Synthetic oligonucleotide
ccgctgcgactgatgattttctttccgatccgttcacgcctgtggagtttccttcaagcg

SEQ ID NO: 109462 - DNA, 60 bp, Artificial
  Synthetic oligonucleotide
acttctgccgctgcgactgatgattttctttccgatccgttcacgcctgtggagtttcct

SEQ ID NO: 109463 - DNA, 60 bp, Artificial
  Synthetic oligonucleotide
ccatgccccttcgtccatttctcttcgcccttcctccacttctgccgctgcgactgatga

SEQ ID NO: 109464 - DNA, 60 bp, Artificial
  Synthetic oligonucleotide
ggcatgtttccgaccatgccccttcgtccatttctcttcgcccttcctccacttctgccg

SEQ ID NO: 109465 - DNA, 60 bp, Artificial
  Synthetic oligonucleotide
acctggaatttattccagatttgccacagcatcttcgagccttcgctgagaagcgcgggt

SEQ ID NO: 109466 - DNA, 60 bp, Artificial
  Synthetic oligonucleotide
gcttaaacttcgcctttcaccttccgccccccaccattttgggggtgatgacctggaatt

SEQ ID NO: 109467 - DNA, 60 bp, Artificial
  Synthetic oligonucleotide
attcccttacgaagatcgtcttgaaggaaggtctcgtccgatttgaacgcccttcgcaac

SEQ ID NO: 109468 - DNA, 60 bp, Artificial
  Synthetic oligonucleotide
ctgactctcgacgcttcaggcgaccttttccacccgctcctggagaaggattcccttacg

SEQ ID NO: 109469 - DNA, 60 bp, Artificial
  Synthetic oligonucleotide
tctgactctcgacgcttcaggcgaccttttccacccgctcctggagaaggattcccttac

SEQ ID NO: 109470 - DNA, 60 bp, Artificial
  Synthetic oligonucleotide
atgtgggaaccaacttcgagttcaatatccgtgtatctgactctcgacgcttcaggcgac

SEQ ID NO: 109471 - DNA, 60 bp, Artificial
  Synthetic oligonucleotide
tccgttcgtcccgaaatgtgggaaccaacttcgagttcaatatccgtgtatctgactctc

SEQ ID NO: 109472 - DNA, 60 bp, Artificial
  Synthetic oligonucleotide
gggttggcttgaccgaaccagaatgtctggtgcaccttccgttcgtcccgaaatgtggga

SEQ ID NO: 109473 - DNA, 60 bp, Artificial
  Synthetic oligonucleotide
gtaatacaagtcagggttggcttgaccgaaccagaatgtctggtgcaccttccgttcgtc

SEQ ID NO: 109474 - DNA, 60 bp, Artificial
  Synthetic oligonucleotide
ccttcgcaactcactcctcgctcaaccattgcgattgtcgcgacgtttggaaattacgtc

SEQ ID NO: 109475 - DNA, 60 bp, Artificial
  Synthetic oligonucleotide
gatcgtcttgaaggaaggtctcgtccgatttgaacgcccttcgcaactcactcctcgctc

SEQ ID NO: 109476 - DNA, 60 bp, Artificial
  Synthetic oligonucleotide
gcatctagccaagcgaggtggaggtgttaccctattcacaacttagtacgtgaagaacgt

SEQ ID NO: 109477 - DNA, 60 bp, Artificial
  Synthetic oligonucleotide
agcgaggtggaggtgttaccctattcacaacttagtacgtgaagaacgtccctccaccgc

SEQ ID NO: 109478 - DNA, 60 bp, Artificial
  Synthetic oligonucleotide
aacaatgagggtgcctatgtattcaaaggacgcggtcctgcctcacttgtgcatctagcc

SEQ ID NO: 109479 - DNA, 60 bp, Artificial
  Synthetic oligonucleotide
gggtgcctatgtattcaaaggacgcggtcctgcctcacttgtgcatctagccaagcgagg

SEQ ID NO: 109480 - DNA, 60 bp, Artificial
  Synthetic oligonucleotide
atactttccaggcagggcctaatgcatcttgggtccctgtatgggagaagaacaatgagg

SEQ ID NO: 109481 - DNA, 60 bp, Artificial
  Synthetic oligonucleotide
ccaggcagggcctaatgcatcttgggtccctgtatgggagaagaacaatgagggtgccta

SEQ ID NO: 109482 - DNA, 60 bp, Artificial
  Synthetic oligonucleotide
cagatttgccacagcatcttcgagccttcgctgagaagcgcgggtcatcctctccttatc

SEQ ID NO: 109483 - DNA, 53 bp, Artificial
  Synthetic oligonucleotide
aagcgcgggtcatcctctccttatctcataacggctcagccgacggaaacgat

SEQ ID NO: 109484 - DNA, 60 bp, Artificial
  Synthetic oligonucleotide
cgcaaccagagtccacccttcagctcgaaactctcatggagcctgaggttcgggagaagg

SEQ ID NO: 109485 - DNA, 60 bp, Artificial
  Synthetic oligonucleotide
tggagcctgaggttcgggagaaggacaccccagtgagactttcaagtaagaaagggactg

SEQ ID NO: 109486 - DNA, 60 bp, Artificial
  Synthetic oligonucleotide
ggagcctgaggttcgggagaaggacaccccagtgagactttcaagtaagaaagggactgt

SEQ ID NO: 109487 - DNA, 60 bp, Artificial
  Synthetic oligonucleotide
aaagggactgtatcccttgacaatccgcttcctcctctcaggtcacttcgccctccctcc

SEQ ID NO: 109488 - DNA, 55 bp, Artificial
  Synthetic oligonucleotide
agaaagagaaagtcgttctccctcttccgttcctggctcctgtcgcccaggctga

SEQ ID NO: 109489 - DNA, 60 bp, Artificial
  Synthetic oligonucleotide
tcctggctcctgtcgcccaggctgagatttccgcaaggcgaggagactctcggcgtgacc

SEQ ID NO: 109490 - DNA, 60 bp, Artificial
  Synthetic oligonucleotide
cccaggctgagatttccgcaaggcgaggagactctcggcgtgacctgcccgcaaccagag

SEQ ID NO: 109491 - DNA, 60 bp, Artificial
  Synthetic oligonucleotide
cggcgtgacctgcccgcaaccagagtccacccttcagctcgaaactctcatggagcctga

SEQ ID NO: 109492 - DNA, 60 bp, Artificial
  Synthetic oligonucleotide
cccttgacaatccgcttcctcctctcaggtcacttcgccctccctcccctcacttgaatg

SEQ ID NO: 109493 - DNA, 60 bp, Artificial
  Synthetic oligonucleotide
ccctccctcccctcacttgaatgatggagacgtggagaggatgagcgaaaatattgacaa

SEQ ID NO: 109494 - DNA, 60 bp, Artificial
  Synthetic oligonucleotide
caggtttcgctctttcctagaggggatacaactacaccaacgtctctgtgcgtcccttcg

SEQ ID NO: 109495 - DNA, 60 bp, Artificial
  Synthetic oligonucleotide
ccaacgtctctgtgcgtcccttcgacatccaggctggtcatccctacctcgctgatcctt

SEQ ID NO: 109496 - DNA, 60 bp, Artificial
  Synthetic oligonucleotide
tgtgcgtcccttcgacatccaggctggtcatccctacctcgctgatccttctggagctag

SEQ ID NO: 109497 - DNA, 60 bp, Artificial
  Synthetic oligonucleotide
gctgatccttctggagctaggcgcgtctatgctgccacgcttcgcgacggatcgccgcca

SEQ ID NO: 109498 - DNA, 60 bp, Artificial
  Synthetic oligonucleotide
cctcgctcaaccattgcgattgtcgcgacgtttggaaattacgtcacgacggttggacgt

SEQ ID NO: 109499 - DNA, 60 bp, Artificial
  Synthetic oligonucleotide
aaattacgtcacgacggttggacgtaacgtgcatttgtatctttgtgtcgataggacgag

SEQ ID NO: 109500 - DNA, 60 bp, Artificial
  Synthetic oligonucleotide
cggttggacgtaacgtgcatttgtatctttgtgtcgataggacgaggcttcaggtttcgc

SEQ ID NO: 109501 - DNA, 60 bp, Artificial
  Synthetic oligonucleotide
ataggacgaggcttcaggtttcgctctttcctagaggggatacaactacaccaacgtctc

SEQ ID NO: 109502 - DNA, 60 bp, Artificial
  Synthetic oligonucleotide
gagctaggcgcgtctatgctgccacgcttcgcgacggatcgccgccattctatcataaga

SEQ ID NO: 109503 - DNA, 60 bp, Artificial
  Synthetic oligonucleotide
atcgccgccattctatcataagaaagagaaagtcgttctccctcttccgttcctggctcc

SEQ ID NO: 109504 - DNA, 60 bp, Artificial
  Synthetic oligonucleotide
tttttccaccaggtatgaattggactgatttaattactaactattcaccatctagagagg

SEQ ID NO: 109505 - DNA, 60 bp, Artificial
  Synthetic oligonucleotide
tttttccaccaggtatgaattggactgatttgattactaactactcaccatctagagagg

SEQ ID NO: 109506 - DNA, 60 bp, Artificial
  Synthetic oligonucleotide
ggctcatatgatcttgataattgcggctgtggtagcgttgataacgtcagccagtacgct

SEQ ID NO: 109507 - DNA, 60 bp, Artificial
  Synthetic oligonucleotide
agcatttcaggagaagttttatttacgatccgcagcacagctgatgttgaacttagcttt

SEQ ID NO: 109508 - DNA, 60 bp, Artificial
  Synthetic oligonucleotide
ggttttaacgaaagcggactcgaattcaattttaagtgcgccaagcatttcaggagaagt

SEQ ID NO: 109509 - DNA, 60 bp, Artificial
  Synthetic oligonucleotide
ttgatttggttttaacgaaagcggactcgaattcaattttaagtgcgccaagcatttcag

SEQ ID NO: 109510 - DNA, 60 bp, Artificial
  Synthetic oligonucleotide
gacgcccttaagccgtttccatgacttaggaaggccattatttattgagattgatttggt

SEQ ID NO: 109511 - DNA, 60 bp, Artificial
  Synthetic oligonucleotide
gaccggtcagccaccaagagttcaagtcacacgcatattagttgagcaaatgtttaccgt

SEQ ID NO: 109512 - DNA, 60 bp, Artificial
  Synthetic oligonucleotide
tcgaagaccggtcagccaccaagagttcaagtcacacgcatattagttgagcaaatgttt

SEQ ID NO: 109513 - DNA, 60 bp, Artificial
  Synthetic oligonucleotide
cagaaggatgtaacgacattactagccgatcaattattttcacgtagttcaggttctatt

SEQ ID NO: 109514 - DNA, 60 bp, Artificial
  Synthetic oligonucleotide
gctcaagtaagtggtcagttagcaggtgttcgagttgtgagacagaaggatgtaacgaca

SEQ ID NO: 109515 - DNA, 58 bp, Artificial
  Synthetic oligonucleotide
gactcgtatttaagtgacttaacaccattcgttggtccagtatcttacgtcggccgta

SEQ ID NO: 109516 - DNA, 60 bp, Artificial
  Synthetic oligonucleotide
aacgactcgtatttaagtgacttaacaccattcgttggtccagtatcttacgtcggccgt

SEQ ID NO: 109517 - DNA, 60 bp, Artificial
  Synthetic oligonucleotide
taagttcaaaatgtcgtggtaaagtattactctcgtcgaagaccggtcagccaccaagag

SEQ ID NO: 109518 - DNA, 60 bp, Artificial
  Synthetic oligonucleotide
atgatctccaagctttaagttcaaaatgtcgtggtaaagtattactctcgtcgaagaccg

SEQ ID NO: 109519 - DNA, 56 bp, Artificial
  Synthetic oligonucleotide
gcaaatgtttaccgtttatacccagttacgtggctataacttttcagttacactaa

SEQ ID NO: 109520 - DNA, 60 bp, Artificial
  Synthetic oligonucleotide
ccccacatccgaaagttctcgtaagccttagcaagcattcatgcatacacgtaattaatc

SEQ ID NO: 109521 - DNA, 60 bp, Artificial
  Synthetic oligonucleotide
aacaaaaacccccacatccgaaagttctcgtaagccttagcaagcattcatgcatacacg

SEQ ID NO: 109522 - DNA, 60 bp, Artificial
  Synthetic oligonucleotide
taagtactgctttagcgatgtcagttggtcgttctgagctaactctaaatagtaatgtat

SEQ ID NO: 109523 - DNA, 60 bp, Artificial
  Synthetic oligonucleotide
aggttctattgatttagcacgaatttttgttcaaatgaataaacaggcgacagtattaag

SEQ ID NO: 109524 - DNA, 60 bp, Artificial
  Synthetic oligonucleotide
cgacattactagccgatcaattattttcacgtagttcaggttctattgatttagcacgaa

SEQ ID NO: 109525 - DNA, 60 bp, Artificial
  Synthetic oligonucleotide
catgattaccaatgttaatagcgacattgcaatttcaattgggaaagtttggaatggagt

SEQ ID NO: 109526 - DNA, 60 bp, Artificial
  Synthetic oligonucleotide
aattgggaaagtttggaatggagtacctcctttgcgcttgttaaatggatcaggaagtaa

SEQ ID NO: 109527 - DNA, 60 bp, Artificial
  Synthetic oligonucleotide
gctttagcgatgtcagttggtcgttctgagctaactctaaatagtaatgtattatacatg

SEQ ID NO: 109528 - DNA, 60 bp, Artificial
  Synthetic oligonucleotide
agtaatgtattatacatgattaccaatgttaatagcgacattgcaatttcaattgggaaa

SEQ ID NO: 109529 - DNA, 60 bp, Artificial
  Synthetic oligonucleotide
caacaaacacagaattatcacggtggttttatcaaattgtgacgccaatcctaccctatc

SEQ ID NO: 109530 - DNA, 60 bp, Artificial
  Synthetic oligonucleotide
ttgtgacgccaatcctaccctatctacctggtattgtgagtatgcttaccacatctcagc

SEQ ID NO: 109531 - DNA, 60 bp, Artificial
  Synthetic oligonucleotide
ggaaagtttggaatggagtacctcctttgcgcttgttaaatggatcaggaagtaatgctg

SEQ ID NO: 109532 - DNA, 60 bp, Artificial
  Synthetic oligonucleotide
tttaacccgtatgctacgtaaactaccaggcgaagcccgagttgaattaacgaaacttgc

SEQ ID NO: 109533 - DNA, 60 bp, Artificial
  Synthetic oligonucleotide
cgcatgttcaacggtttggtgaaaaggtgacgtttccaactgggaagggtggtatacttg

SEQ ID NO: 109534 - DNA, 60 bp, Artificial
  Synthetic oligonucleotide
aattctgttcgaagtgggcagcgttcactaattgagatgggcattgaaggaacgttgggt

SEQ ID NO: 109535 - DNA, 60 bp, Artificial
  Synthetic oligonucleotide
aacgttgggtcaaacaacaaacacagaattatcacggtggttttatcaaattgtgacgcc

SEQ ID NO: 109536 - DNA, 60 bp, Artificial
  Synthetic oligonucleotide
cccgtatgctacgtaaactaccaggcgaagcccgagttgaattaacgaaacttgctcaag

SEQ ID NO: 109537 - DNA, 60 bp, Artificial
  Synthetic oligonucleotide
cgaaacttgctcaagtaagtggtcagttagcaggtgttcgagttgtgagacagaaggatg

SEQ ID NO: 109538 - DNA, 60 bp, Artificial
  Synthetic oligonucleotide
gtgacgccaatcctaccctatctacctggtattgtgagtatgcttaccacatctcagcca

SEQ ID NO: 109539 - DNA, 60 bp, Artificial
  Synthetic oligonucleotide
acatctcagccatttaattctgttaccagagtcatcagtccagaggttagtttgtacttt

SEQ ID NO: 109540 - DNA, 60 bp, Artificial
  Synthetic oligonucleotide
acttagcttttctatccttcgtggtgagacttcaacgataattaaactacaaccatattc

SEQ ID NO: 109541 - DNA, 60 bp, Artificial
  Synthetic oligonucleotide
gttttatttacgatccgcagcacagctgatgttgaacttagcttttctatccttcgtggt

SEQ ID NO: 109542 - DNA, 60 bp, Artificial
  Synthetic oligonucleotide
ccttcgtggtgagacttcaacgataattaaactacaaccatattcgcatgttcaacggtt

SEQ ID NO: 109543 - DNA, 60 bp, Artificial
  Synthetic oligonucleotide
aaccatattcgcatgttcaacggtttggtgaaaaggtgacgtttccaactgggaagggtg

SEQ ID NO: 109544 - DNA, 60 bp, Artificial
  Synthetic oligonucleotide
cgaagtgggcagcgttcactaattgagatgggcattgaaggaacgttgggtcaaacaaca

SEQ ID NO: 109545 - DNA, 60 bp, Artificial
  Synthetic oligonucleotide
gagctcagagatggcgtgtagatgacagtgagtagtcatctgtgaaggggtcatgtaggt

SEQ ID NO: 109546 - DNA, 60 bp, Artificial
  Synthetic oligonucleotide
cgaagagctcagagatggcgtgtagatgacagtgagtagtcatctgtgaaggggtcatgt

SEQ ID NO: 109547 - DNA, 60 bp, Artificial
  Synthetic oligonucleotide
ctaacaacaggcactacaccagctgataaacaacgtcgagtcttagttgcatacacgctc

SEQ ID NO: 109548 - DNA, 60 bp, Artificial
  Synthetic oligonucleotide
catctcagccatttaattctgttaccagagtcatcagtccagaggttagtttgtactttc

SEQ ID NO: 109549 - DNA, 60 bp, Artificial
  Synthetic oligonucleotide
actcatacccgaataccttttgaacccggtcattacgttgaacaatgttaacgagacacc

SEQ ID NO: 109550 - DNA, 60 bp, Artificial
  Synthetic oligonucleotide
atacacgctcattttactcatacccgaataccttttgaacccggtcattacgttgaacaa

SEQ ID NO: 109551 - DNA, 60 bp, Artificial
  Synthetic oligonucleotide
gttaacgagacaccaccatttatgtctatgtatggagctttagttgggcatttcagacag

SEQ ID NO: 109552 - DNA, 60 bp, Artificial
  Synthetic oligonucleotide
cgttgaacaatgttaacgagacaccaccatttatgtctatgtatggagctttagttgggc

SEQ ID NO: 109553 - DNA, 60 bp, Artificial
  Synthetic oligonucleotide
agacagatttatgagtaggaactctcatccgagagcgaagagctcagagatggcgtgtag

SEQ ID NO: 109554 - DNA, 60 bp, Artificial
  Synthetic oligonucleotide
ttagttgggcatttcagacagatttatgagtaggaactctcatccgagagcgaagagctc

SEQ ID NO: 109555 - DNA, 60 bp, Artificial
  Synthetic oligonucleotide
gcccgctgccaatcgcgctgctatcgctatgttaggtactgccctccaaatgacgacagc

SEQ ID NO: 109556 - DNA, 60 bp, Artificial
  Synthetic oligonucleotide
tcgtgtacgctgatctagaccaggttgaggatgccggtacggacatgcccgctgccaatc

SEQ ID NO: 109557 - DNA, 60 bp, Artificial
  Synthetic oligonucleotide
cgacagctggtggagtgtccgttctcaaagttaactttcccacgcgtgccttctggactc

SEQ ID NO: 109558 - DNA, 60 bp, Artificial
  Synthetic oligonucleotide
ccacgcgtgccttctggactcaagtgttcaacttatatgccactcacgcgacgaccctcc

SEQ ID NO: 109559 - DNA, 55 bp, Artificial
  Synthetic oligonucleotide
ggccccttcgtcttctaccccaatatcgcaacgctaccattaccgtccagcaagc

SEQ ID NO: 109560 - DNA, 60 bp, Artificial
  Synthetic oligonucleotide
tacgggctcatacaccgttgtacccgacgcctctcggccccttcgtcttctaccccaata

SEQ ID NO: 109561 - DNA, 60 bp, Artificial
  Synthetic oligonucleotide
gtctttggtggaaggcaatctaatggcgcccttcgctccaccactgcactgcagagggct

SEQ ID NO: 109562 - DNA, 60 bp, Artificial
  Synthetic oligonucleotide
tccccattcgtgcccccgataggcccgttctacgcgcccttccgaccggttaacttcccc

SEQ ID NO: 109563 - DNA, 60 bp, Artificial
  Synthetic oligonucleotide
cgcagcagtggtttccctaccgcgtcgatcaaattctgtattggcccgagtccccattcg

SEQ ID NO: 109564 - DNA, 60 bp, Artificial
  Synthetic oligonucleotide
ttcggagctttgtcgctcgcctcatggctgaaggtgatccgcagcagtggtttccctacc

SEQ ID NO: 109565 - DNA, 60 bp, Artificial
  Synthetic oligonucleotide
caaggagtgcaatctgaaagtgctattccggctattcctaccatgtctgatgttcggagc

SEQ ID NO: 109566 - DNA, 60 bp, Artificial
  Synthetic oligonucleotide
ccgcgctctcgcttttgtcggcgtactcactcagcgctaccctctcacgcagaacgctca

SEQ ID NO: 109567 - DNA, 60 bp, Artificial
  Synthetic oligonucleotide
ctgttatccagacgtatccccccttaaatgcctggtctccccaccccgctttcatcgaga

SEQ ID NO: 109568 - DNA, 60 bp, Artificial
  Synthetic oligonucleotide
ttcatcgagaacccacttgactaccgcgattggacggaattcattcatgaccgcgctctc

SEQ ID NO: 109569 - DNA, 60 bp, Artificial
  Synthetic oligonucleotide
cgccctccggtctgggtgatcgcatcgctttcccgattgttgacatttaccgcatcgcct

SEQ ID NO: 109570 - DNA, 60 bp, Artificial
  Synthetic oligonucleotide
ttcgtccttgacttggccgacaaccacgtcctgttgtacctgtgcgacgttacgccctcc

SEQ ID NO: 109571 - DNA, 60 bp, Artificial
  Synthetic oligonucleotide
ttagctgtgtgcatctttaaggacggccagtacgtgcgtgtcaatcccgagaaagccagc

SEQ ID NO: 109572 - DNA, 60 bp, Artificial
  Synthetic oligonucleotide
gcgtgtcaatcccgagaaagccagcgtcgtgaccaacgcccccaatcgcgacctacattt

SEQ ID NO: 109573 - DNA, 60 bp, Artificial
  Synthetic oligonucleotide
tcttcgacgtcttcctcacaacgttagggcagccccctgttccccgtggttccttcacca

SEQ ID NO: 109574 - DNA, 60 bp, Artificial
  Synthetic oligonucleotide
tctcgccaaccaagagttcttgctgcaattcactcccacgttgccaggtatcttcgacgt

SEQ ID NO: 109575 - DNA, 60 bp, Artificial
  Synthetic oligonucleotide
tcaatcgtatcaccccgttacctctttcgatccatccacgttcaacacattgctacagag

SEQ ID NO: 109576 - DNA, 60 bp, Artificial
  Synthetic oligonucleotide
ccctgcctgacctgatcgacattgacttgcgcgaccgtgtgtatcgttttaacggcggtg

SEQ ID NO: 109577 - DNA, 60 bp, Artificial
  Synthetic oligonucleotide
gatcgattgttctatggtccaacccaggaatcccctatcacgtcgatcactaaattccct

SEQ ID NO: 109578 - DNA, 60 bp, Artificial
  Synthetic oligonucleotide
accgacctgattgccttcgtccagcaattgatcccccgaattgtcgcagctggagggaca

SEQ ID NO: 109579 - DNA, 60 bp, Artificial
  Synthetic oligonucleotide
tactctacagctgccttctggaacggtatccggtgcgacagtgcgacggccattttcacc

SEQ ID NO: 109580 - DNA, 60 bp, Artificial
  Synthetic oligonucleotide
acttatcccaccgacgctccaggtcaccatgtccgacgcacgtccctgcgctgagctgat

SEQ ID NO: 109581 - DNA, 60 bp, Artificial
  Synthetic oligonucleotide
cgcgtctctcgtcaatccgacaactgccaacccagtgctggatacaagcttttccatggc

SEQ ID NO: 109582 - DNA, 60 bp, Artificial
  Synthetic oligonucleotide
cctactcctcgatcgcttgcagtccaccaatcttcatggtgtgttatatcgggcgctaga

SEQ ID NO: 109583 - DNA, 60 bp, Artificial
  Synthetic oligonucleotide
ttattttgatcgtgaacgcatggcgcgacgggatttgttccgacgactacgtgcccccgc

SEQ ID NO: 109584 - DNA, 60 bp, Artificial
  Synthetic oligonucleotide
gtgcccccgccgatcgttctgccattaaggatcgcgccgtgttcgacttcctcgcgtctc

SEQ ID NO: 109585 - DNA, 60 bp, Artificial
  Synthetic oligonucleotide
tgtgtcacgggaggcgtttctacgtccatctatgacatctctggggaccccaccgcgtac

SEQ ID NO: 109586 - DNA, 60 bp, Artificial
  Synthetic oligonucleotide
gctactgccgcagacaggtgacgtgttgggatacagttccagtctgataagccaagctgc

SEQ ID NO: 109587 - DNA, 60 bp, Artificial
  Synthetic oligonucleotide
ccaagctgctctattaatggtggagtcggttatggacgcccttcgggacaacgctaacgc

SEQ ID NO: 109588 - DNA, 60 bp, Artificial
  Synthetic oligonucleotide
ccttcgggacaacgctaacgctagtgcctctactgccgtaacgcgactagatcaatcgta

SEQ ID NO: 109589 - DNA, 60 bp, Artificial
  Synthetic oligonucleotide
atttgcattatggctgcggttttcggcattcagctcgtaccaaaactcaacacctctacg

SEQ ID NO: 109590 - DNA, 60 bp, Artificial
  Synthetic oligonucleotide
tatgatccctcacggccgtccacccccgctacatacggcaaacatcgacccacttatgct

SEQ ID NO: 109591 - DNA, 60 bp, Artificial
  Synthetic oligonucleotide
ccccggaaatgttatctccgtcgctggcgctgcagcgttacagtacattctcgccaacca

SEQ ID NO: 109592 - DNA, 60 bp, Artificial
  Synthetic oligonucleotide
ttccccgccgcatagttcagtttggctacgacgttgtccatggttctttgctcgatctgt

SEQ ID NO: 109593 - DNA, 60 bp, Artificial
  Synthetic oligonucleotide
tctatcccccacttgtgactggctgccctacatcatcggcgtcggctcgcctctcaacct

SEQ ID NO: 109594 - DNA, 59 bp, Artificial
  Synthetic oligonucleotide
caacaggcgatcgcagcactgctccctgctgctgctctctcatggcacactctatcccc

SEQ ID NO: 109595 - DNA, 60 bp, Artificial
  Synthetic oligonucleotide
ctctcaacctgtctgacatcaacactgccatcagctattcccggctaacccccatcctgc

SEQ ID NO: 109596 - DNA, 60 bp, Artificial
  Synthetic oligonucleotide
gccgacgcccctgaatcaacagtgtgccattcgcattacatctctagacccggccgctgt

SEQ ID NO: 109597 - DNA, 60 bp, Artificial
  Synthetic oligonucleotide
ctacgctcgttcatcaacgccgcttcaccactcctcccacgttcacgttgttcagctcag

SEQ ID NO: 109598 - DNA, 60 bp, Artificial
  Synthetic oligonucleotide
cgctggtcgccgctggttacaactccttcatttccgaacaaacacgcaatcccaacttag

SEQ ID NO: 109599 - DNA, 60 bp, Artificial
  Synthetic oligonucleotide
cggtggagctcatttaacatccggtggcaacccctttatgtcactcacaacgcctcccgc

SEQ ID NO: 109600 - DNA, 56 bp, Artificial
  Synthetic oligonucleotide
tcgcgccgtcactcacatccctttcttcggcgtgcccgatgacggtacctcagacc

SEQ ID NO: 109601 - DNA, 60 bp, Artificial
  Synthetic oligonucleotide
tgcactggcctcactagtgagtcgagtcgttccctcgtccattatgttcactcgtgtgcc

SEQ ID NO: 109602 - DNA, 60 bp, Artificial
  Synthetic oligonucleotide
aacggcccagtctctaccaccatctacggaaaacgtaccttcctcagcaaccgccgtcgg

SEQ ID NO: 109603 - DNA, 60 bp, Artificial
  Synthetic oligonucleotide
ccgccgtcgggctcgattacgtgacgtcccaatgctgatcacgactacgctcgttcatca

SEQ ID NO: 109604 - DNA, 60 bp, Artificial
  Synthetic oligonucleotide
gcgcacttattagaccttggcaccggtcccgaatgtcgcatcctatcacttatcccaccg

SEQ ID NO: 109605 - DNA, 60 bp, Artificial
  Synthetic oligonucleotide
atccatatgaaccgatagaagtgactgcatctatgtgagaggttgagttgccgccgtctg

SEQ ID NO: 109606 - DNA, 60 bp, Artificial
  Synthetic oligonucleotide
atccatatgaaccgatagaagtgactgcatctatgtgagaggttgagttgccgtcgtctg

SEQ ID NO: 109607 - DNA, 60 bp, Artificial
  Synthetic oligonucleotide
ctcaacctgacccacgaaatcagcggccccaatcagatcgcttgcgtgatgcccaaggac

SEQ ID NO: 109608 - DNA, 60 bp, Artificial
  Synthetic oligonucleotide
gatgcccaaggacaatcattgccagagaaatcttacgtaccatttggctctggagcacgg

SEQ ID NO: 109609 - DNA, 60 bp, Artificial
  Synthetic oligonucleotide
cggctccaacattggcggctgaactggaacaactccgagatggaagcgaaggtgtatgtc

SEQ ID NO: 109610 - DNA, 60 bp, Artificial
  Synthetic oligonucleotide
ggtgtatgtcttattccactggttcatgttgggatatgtgttattcaactgtctgatcaa

SEQ ID NO: 109611 - DNA, 60 bp, Artificial
  Synthetic oligonucleotide
tattcgaagcgacgtttcttctatttcactgacaattttatccaacatcaaatcctactt

SEQ ID NO: 109612 - DNA, 60 bp, Artificial
  Synthetic oligonucleotide
gcgacgtttcttctatttcactgacaattttatccaacatcaaatcctacttccaacttg

SEQ ID NO: 109613 - DNA, 60 bp, Artificial
  Synthetic oligonucleotide
taaccatcctaagcaagtacatgcccgtaggtcacagcctcaacctgacccacgaaatca

SEQ ID NO: 109614 - DNA, 60 bp, Artificial
  Synthetic oligonucleotide
agcctcaacctgacccacgaaatcagcggccccaatcagatcgcttgcgtgatgcccaag

SEQ ID NO: 109615 - DNA, 60 bp, Artificial
  Synthetic oligonucleotide
ccactggttcatgttgggatatgtgttattcaactgtctgatcaagattataaccatcct

SEQ ID NO: 109616 - DNA, 60 bp, Artificial
  Synthetic oligonucleotide
gtctgatcaagattataaccatcctaagcaagtacatgcccgtaggtcacagcctcaacc

SEQ ID NO: 109617 - DNA, 60 bp, Artificial
  Synthetic oligonucleotide
ctcaccaatccaaatgaaaaggtaaatgtatcggcgttgaagatgtacttagctacgacg

SEQ ID NO: 109618 - DNA, 60 bp, Artificial
  Synthetic oligonucleotide
ccaaatgaaaaggtaaatgtatcggcgttgaagatgtacttagctacgacggagatgtca

SEQ ID NO: 109619 - DNA, 60 bp, Artificial
  Synthetic oligonucleotide
acattatcactgcacaacgtttcatgtgtgttgccgcaatagctcgtgaactcaccaatc

SEQ ID NO: 109620 - DNA, 60 bp, Artificial
  Synthetic oligonucleotide
cactgcacaacgtttcatgtgtgttgccgcaatagctcgtgaactcaccaatccaaatga

SEQ ID NO: 109621 - DNA, 60 bp, Artificial
  Synthetic oligonucleotide
ttcgtgccttgaatgaaggtattactaagtttagaaccgagaagagaaacgaacgtatga

SEQ ID NO: 109622 - DNA, 60 bp, Artificial
  Synthetic oligonucleotide
tgaaggtattactaagtttagaaccgagaagagaaacgaacgtatgatgatgtccagcgc

SEQ ID NO: 109623 - DNA, 60 bp, Artificial
  Synthetic oligonucleotide
tggagcacggtatataggtaagttatctgttagagcgggtgatgaactcattcgtgcctt

SEQ ID NO: 109624 - DNA, 60 bp, Artificial
  Synthetic oligonucleotide
ggagcacggtatataggtaagttatctgttagagcgggtgatgaactcattcgtgccttg

SEQ ID NO: 109625 - DNA, 60 bp, Artificial
  Synthetic oligonucleotide
gaccggttggagctcgtgtgaatgtgaggatatctgttgtgtctgtgtgcctatgagcac

SEQ ID NO: 109626 - DNA, 60 bp, Artificial
  Synthetic oligonucleotide
gcgtcctatcagacagtacgtcgaattgaggttaagtaccaatcagctattcaggatcgg

SEQ ID NO: 109627 - DNA, 60 bp, Artificial
  Synthetic oligonucleotide
gctattcaggatcggagaaatatctaatattgcatatagattaagcgtatattatattag

SEQ ID NO: 109628 - DNA, 60 bp, Artificial
  Synthetic oligonucleotide
cgttcatgctgataccacagcgtctcaaagagtaagctgtcaagcacttatggcaagtag

SEQ ID NO: 109629 - DNA, 60 bp, Artificial
  Synthetic oligonucleotide
ccacagcgtctcaaagagtaagctgtcaagcacttatggcaagtagtgcagactatcctg

SEQ ID NO: 109630 - DNA, 60 bp, Artificial
  Synthetic oligonucleotide
aatttataggtgaccggttggagctcgtgtgaatgtgaggatatctgttgtgtctgtgtg

SEQ ID NO: 109631 - DNA, 60 bp, Artificial
  Synthetic oligonucleotide
aatttatagtgaccggttggagctcgtgtgaatgtgaggatatctgttgtgtctgtgtgc

SEQ ID NO: 109632 - DNA, 60 bp, Artificial
  Synthetic oligonucleotide
ggcaagtagtgcagactatcctgatcaattcctcggactctcaaaccgtgacgcgcttat

SEQ ID NO: 109633 - DNA, 60 bp, Artificial
  Synthetic oligonucleotide
tggcaagtagtgcagactatcctgatcaattcctcggactctcaaaccgtgacgcgctta

SEQ ID NO: 109634 - DNA, 60 bp, Artificial
  Synthetic oligonucleotide
actcatctgcgtcaacctggatgcatacctgatgttagagtgaaacttagtggtgggatt

SEQ ID NO: 109635 - DNA, 60 bp, Artificial
  Synthetic oligonucleotide
gacgcgcttattataactcatctgcgtcaacctggatgcatacctgatgttagagtgaaa

SEQ ID NO: 109636 - DNA, 60 bp, Artificial
  Synthetic oligonucleotide
ccgttgatggcaataacagcgacctcgaaattggaaagtaattcaacatcaacatgccgc

SEQ ID NO: 109637 - DNA, 59 bp, Artificial
  Synthetic oligonucleotide
tagagtgaaacttagtggtgggattctcttgactaagactaaccgtggaggctcatctg

SEQ ID NO: 109638 - DNA, 54 bp, Artificial
  Synthetic oligonucleotide
aacatgccgccaaatcaacatcacgtttatgtcactcaaaagtgccttaaatgt

SEQ ID NO: 109639 - DNA, 60 bp, Artificial
  Synthetic oligonucleotide
cgttgatggcaataacagcgacctcgaaattggaaagtaattcaacatcaacatgccgcc

SEQ ID NO: 109640 - DNA, 60 bp, Artificial
  Synthetic oligonucleotide
cagctgcgtcctatcagacagtacgtcgaattgaggttaagtaccaatcagctattcagg

SEQ ID NO: 109641 - DNA, 60 bp, Artificial
  Synthetic oligonucleotide
aacatgccgccaaatcaacatcacgtttatgtcactcaaaagtgccttaaatgtggcttc

SEQ ID NO: 109642 - DNA, 60 bp, Artificial
  Synthetic oligonucleotide
gacgtagtccttgaacaagactagacatggcttaccagacttcttctattcgaagcgacg

SEQ ID NO: 109643 - DNA, 60 bp, Artificial
  Synthetic oligonucleotide
aatcgacgtagtccttgaacaagactagacatggcttaccagacttcttctattcgaagc

SEQ ID NO: 109644 - DNA, 60 bp, Artificial
  Synthetic oligonucleotide
tgtcaaacacaactggtgcaacgcaaacacaaaaggcagagaaggctgcattcgcatcgt

SEQ ID NO: 109645 - DNA, 60 bp, Artificial
  Synthetic oligonucleotide
taaggatggatgattttgcgaaacattttaacaggtatgcttcgatggcgatacagcaat

SEQ ID NO: 109646 - DNA, 60 bp, Artificial
  Synthetic oligonucleotide
cagcaaattgacatgattaagaaggaagtgatgaagaaacaatcgtataatgatgcggtg

SEQ ID NO: 109647 - DNA, 60 bp, Artificial
  Synthetic oligonucleotide
cattaacctgagatcagtaggtagagtggcgccccaaggtttgcaccgcatggagtggtt

SEQ ID NO: 109648 - DNA, 60 bp, Artificial
  Synthetic oligonucleotide
ctccggttaatgtgaataatcctggcgcgggacccggaatgatagaaattgaggttattt

SEQ ID NO: 109649 - DNA, 60 bp, Artificial
  Synthetic oligonucleotide
cgtcaccgatgacaatgatccagaacttgaatcaaggcgagatcgtgtacaccacgacgg

SEQ ID NO: 109650 - DNA, 60 bp, Artificial
  Synthetic oligonucleotide
gagaaaatacaatatcagtggggattacgcaaatgccacgagaacttttttggctatttc

SEQ ID NO: 109651 - DNA, 54 bp, Artificial
  Synthetic oligonucleotide
catctgtcctaacagttttattcacattacataaagcatccattcctacaatga

SEQ ID NO: 109652 - DNA, 60 bp, Artificial
  Synthetic oligonucleotide
caaacgtgaggttgagagacaaattaacacatgtccctacactggatacaaaggcagagt

SEQ ID NO: 109653 - DNA, 60 bp, Artificial
  Synthetic oligonucleotide
tacatggcaaaacagaggaaaagccttatcataaagccatgcgtggccctcctcctgatc

SEQ ID NO: 109654 - DNA, 60 bp, Artificial
  Synthetic oligonucleotide
ccaattcaaggcatgcataatgaaagttgggaatgtttagctcctgagctcagaatttgt

SEQ ID NO: 109655 - DNA, 60 bp, Artificial
  Synthetic oligonucleotide
cctcctgatcaatggtatactcttttgcgacgtaagtttatttttagaagtttaaagtat

SEQ ID NO: 109656 - DNA, 60 bp, Artificial
  Synthetic oligonucleotide
ggcaaaacagaggaaaagccttatcataaagccatgcgtggccctcctcctgatcaatgg

SEQ ID NO: 109657 - DNA, 60 bp, Artificial
  Synthetic oligonucleotide
tgaagggttccgtgattcacagttatgttttgaactatcgacacgtgtcaaggtctaatc

SEQ ID NO: 109658 - DNA, 60 bp, Artificial
  Synthetic oligonucleotide
tcatcaagacgaagttcagccagatggaattaaaatgcgtacaaactcatttaatatatt

SEQ ID NO: 109659 - DNA, 60 bp, Artificial
  Synthetic oligonucleotide
tatgtgttaatgtactacgtatgcttcatacttactcgttgggtaatgcttatatgggag

SEQ ID NO: 109660 - DNA, 60 bp, Artificial
  Synthetic oligonucleotide
ctttatgtgttaatgtactacgtatgcttcatacttactcgttgggtaatgcttatatgg

SEQ ID NO: 109661 - DNA, 60 bp, Artificial
  Synthetic oligonucleotide
cattgttgtattctgatttgctattcgctgaatcatacgaattagacgtcgatatcaacc

SEQ ID NO: 109662 - DNA, 60 bp, Artificial
  Synthetic oligonucleotide
caaacattataatattcctaatgataatccaaagatgtgtaattcgattttaccacgtaa

SEQ ID NO: 109663 - DNA, 60 bp, Artificial
  Synthetic oligonucleotide
atggttattctacttcagaaggattacttgattattatattagaaataagctagatttat

SEQ ID NO: 109664 - DNA, 60 bp, Artificial
  Synthetic oligonucleotide
ttaatatattacttcacaggtaaggcatataaatcgttgagtttaagttgggatagtaaa

SEQ ID NO: 109665 - DNA, 61 bp, Artificial
  Synthetic oligonucleotide
cgaagttcagccagatggaattaaaatgcgtacaaactcatttaatatattacttcacagg

SEQ ID NO: 109666 - DNA, 60 bp, Artificial
  Synthetic oligonucleotide
atggtaatgattaaagactacagtccaattaaattagttcctttatatttaaacgctcta

SEQ ID NO: 109667 - DNA, 60 bp, Artificial
  Synthetic oligonucleotide
taccacgtaagcctaatttatcaatgatgtatatcagagcgattctaattatggtaatga

SEQ ID NO: 109668 - DNA, 60 bp, Artificial
  Synthetic oligonucleotide
aagttttttagacctgtcgtagcagaacatacctaccgaacatggaaaggtcttcaagag

SEQ ID NO: 109669 - DNA, 60 bp, Artificial
  Synthetic oligonucleotide
gcgcagttagcgtaacttacggagatgaagcccgtttggacgaatataaaccattgttgt

SEQ ID NO: 109670 - DNA, 57 bp, Artificial
  Synthetic oligonucleotide
tggcttctacgcctgatatttcgcgagtattacctgcttattttaatggtgttaaaa

SEQ ID NO: 109671 - DNA, 60 bp, Artificial
  Synthetic oligonucleotide
aaacgctctagaaatcgaagatcctgcatatatgtcatcaagaattacggacggtggaat

SEQ ID NO: 109672 - DNA, 60 bp, Artificial
  Synthetic oligonucleotide
acgctctagaaatcgaagatcctgcatatatgtcatcaagaattacggacggtggaatta

SEQ ID NO: 109673 - DNA, 59 bp, Artificial
  Synthetic oligonucleotide
tggcttctacgcctgatatttcgcgagtattacctgcttattttaatggtgttaaaaat

SEQ ID NO: 109674 - DNA, 60 bp, Artificial
  Synthetic oligonucleotide
cgaatataaaccattgttgtattctgatttgctattcgctgaatcatacgaattagacgt

SEQ ID NO: 109675 - DNA, 56 bp, Artificial
  Synthetic oligonucleotide
gttgatttagatgatcaatcagtagtcctttcaacttacgaatttccttcttttta

SEQ ID NO: 109676 - DNA, 57 bp, Artificial
  Synthetic oligonucleotide
ctatttccaaggattttaattcaactcatcttattatggaagaactcgatggtgtaa

SEQ ID NO: 109677 - DNA, 60 bp, Artificial
  Synthetic oligonucleotide
tctgaagcgctagagaagtggttagatattgatacttattttgaactaaaaccttttcct

SEQ ID NO: 109678 - DNA, 60 bp, Artificial
  Synthetic oligonucleotide
tttattattgcatcaatttcaaactttagcttataatcgtcctagagcaagttggtccac

SEQ ID NO: 109679 - DNA, 61 bp, Artificial
  Synthetic oligonucleotide
cttcaagagagcattcaaaatatagcaaagcaaacacactaaatgaaacataccaaatgcg

SEQ ID NO: 109680 - DNA, 60 bp, Artificial
  Synthetic oligonucleotide
ataccaaatgcgaatgtacaaagatgattctacaccagattactgttatagcgagataag

SEQ ID NO: 109681 - DNA, 60 bp, Artificial
  Synthetic oligonucleotide
gacctgtcgtagcagaacatacctaccgaacatggaaaggtcttcaagagagcattcaaa

SEQ ID NO: 109682 - DNA, 60 bp, Artificial
  Synthetic oligonucleotide
tcttcaagagagcattcaaaatatagcaaagcaaacacactaaatgaaacataccaaatg

SEQ ID NO: 109683 - DNA, 60 bp, Artificial
  Synthetic oligonucleotide
cggcctatcttcaagctcacccaagatgtcactttcagactactttagcgcagttagcgt

SEQ ID NO: 109684 - DNA, 60 bp, Artificial
  Synthetic oligonucleotide
gactactttagcgcagttagcgtaacttacggagatgaagcccgtttggacgaatataaa

SEQ ID NO: 109685 - DNA, 60 bp, Artificial
  Synthetic oligonucleotide
gcgaatgtacaaagatgattctacaccagattactgttatagcgagataagcgtcggcct

SEQ ID NO: 109686 - DNA, 60 bp, Artificial
  Synthetic oligonucleotide
gcgagataagcgtcggcctatcttcaagctcacccaagatgtcactttcagactacttta

SEQ ID NO: 109687 - DNA, 60 bp, Artificial
  Synthetic oligonucleotide
atttcaaactttagcttataatcgtcctagagcaagttggtccacattaagaaatcaagc

SEQ ID NO: 109688 - DNA, 60 bp, Artificial
  Synthetic oligonucleotide
cttaccaattcaaggcatgcataatgaaagttgggaatgtttagctcctgagctcagaat

SEQ ID NO: 109689 - DNA, 60 bp, Artificial
  Synthetic oligonucleotide
aagcaatcgtataatgatgcggtgaggatgagttttacggaattttcatcagttccgcta

SEQ ID NO: 109690 - DNA, 60 bp, Artificial
  Synthetic oligonucleotide
gaaaatacaacatcagtggggattacgcaaatgccacgaggacttttttggctatttcac

SEQ ID NO: 109691 - DNA, 60 bp, Artificial
  Synthetic oligonucleotide
gaaaatacaacatcagtggggattacgcaaatgccacgagaactttcttggctatttcgc

SEQ ID NO: 109692 - DNA, 60 bp, Artificial
  Synthetic oligonucleotide
acataccggacattttacttccagtgcaatcggcgaggtgacgctgctgaagtgtggact

SEQ ID NO: 109693 - DNA, 60 bp, Artificial
  Synthetic oligonucleotide
cacatattgctcgcgtatgtctgaggtatatagttttgcgttacctatagtacatccatc

SEQ ID NO: 109694 - DNA, 60 bp, Artificial
  Synthetic oligonucleotide
tgagaaagatggaattgggattctaatgaaagagcaagcggcgattgagctgtttgattt

SEQ ID NO: 109695 - DNA, 60 bp, Artificial
  Synthetic oligonucleotide
agggaccatggattgagaaagatggaattgggattctaatgaaagagcaagcagcgattg

SEQ ID NO: 109696 - DNA, 60 bp, Artificial
  Synthetic oligonucleotide
tgcagcggataattcagggaccatggattgagaaagatggaattgggattctaatgaaag

SEQ ID NO: 109697 - DNA, 60 bp, Artificial
  Synthetic oligonucleotide
aattttaagagtgttggagaatggtcacgtgagtgtctacggcgatggggacgtcaagtg

SEQ ID NO: 109698 - DNA, 60 bp, Artificial
  Synthetic oligonucleotide
aattttaagagtgttggagaatggtcacgtgagtgtttacgacgatggcgacgtcaagtg

SEQ ID NO: 109699 - DNA, 60 bp, Artificial
  Synthetic oligonucleotide
catattgcttgcgtatgtttgaggtatatagttttgcgttacctatagtacatccatcga

SEQ ID NO: 109700 - DNA, 53 bp, Artificial
  Synthetic oligonucleotide
atccaaagggagaaaagatgattacaaggagattcggaggtggcgagataaaa

SEQ ID NO: 109701 - DNA, 50 bp, Artificial
  Synthetic oligonucleotide
ccagctcaaaacgatcggggaggtaggcttacgtccacgcgaccatgttg

SEQ ID NO: 109702 - DNA, 60 bp, Artificial
  Synthetic oligonucleotide
gtttatgtaaatgcaaccatagcggaaactatagaaattagcgctcataatagtgaagag

SEQ ID NO: 109703 - DNA, 60 bp, Artificial
  Synthetic oligonucleotide
cgtttatgtaaatgcgaccatagcggaaactatagaaattagcgctcataatagtgaaaa

SEQ ID NO: 109704 - DNA, 60 bp, Artificial
  Synthetic oligonucleotide
taatgcagcttgatgaaatagctgtaaaatggattcggaatcagaatgccgatgacctag

SEQ ID NO: 109705 - DNA, 60 bp, Artificial
  Synthetic oligonucleotide
ataatgcagcttgatgaaatagctgtaaaatggattcggaatcagaacgccgatgacctg

SEQ ID NO: 109706 - DNA, 60 bp, Artificial
  Synthetic oligonucleotide
gaaataatgcagcttgatgaaatagctgtaaaatggattcggaatcagaacgccgatgac

SEQ ID NO: 109707 - DNA, 60 bp, Artificial
  Synthetic oligonucleotide
atccaaagggagaaaagatgattacaaggagattcggaggtggcgagataaaaacgctga

SEQ ID NO: 109708 - DNA, 60 bp, Artificial
  Synthetic oligonucleotide
gcgacgtaatgaaccgtgccatatggggagataataggtttaaactagtaagaggagtgt

SEQ ID NO: 109709 - DNA, 60 bp, Artificial
  Synthetic oligonucleotide
gcagcttgatgaaatagctgtaaaatggattcggaatcagaacgccgatgacctggaaaa

SEQ ID NO: 109710 - DNA, 60 bp, Artificial
  Synthetic oligonucleotide
aaaacggattttaatgaggagcatattcatcacgaattgtcatattgtgacgtttatgta

SEQ ID NO: 109711 - DNA, 60 bp, Artificial
  Synthetic oligonucleotide
cgtttatgtaaatgcaaccatagcggaaactatagaaattagcgctcataatagtgaaga

SEQ ID NO: 109712 - DNA, 60 bp, Artificial
  Synthetic oligonucleotide
aattatagatgtcggacaacggaaaggtgaaaatagattaccagtggaacgattggaagg

SEQ ID NO: 109713 - DNA, 60 bp, Artificial
  Synthetic oligonucleotide
tagatgtcggacaacggaaaggtgaaaatagattaccagtggaacgattggaaggcaaaa

SEQ ID NO: 109714 - DNA, 60 bp, Artificial
  Synthetic oligonucleotide
gtcggacaacggaaaggtgaaaatagattaccagtggaacgattggaaggcaaacacacc

SEQ ID NO: 109715 - DNA, 60 bp, Artificial
  Synthetic oligonucleotide
agaacggattttaatgaggagcatattcatcacgaattatcatattgtgacgtttatgta

SEQ ID NO: 109716 - DNA, 60 bp, Artificial
  Synthetic oligonucleotide
cctgcgttatgaatgcagctagtgcgtccgtgggtctgatgagcggttccagtgcacttc

SEQ ID NO: 109717 - DNA, 60 bp, Artificial
  Synthetic oligonucleotide
cggttccagtgcacttctgacatcggccatggatactcttgccgcgaagaatctagacct

SEQ ID NO: 109718 - DNA, 60 bp, Artificial
  Synthetic oligonucleotide
cgctaaatggaacatgtcgctgaaccaggccatgtccctgctcaccccagatctcctcgc

SEQ ID NO: 109719 - DNA, 60 bp, Artificial
  Synthetic oligonucleotide
tgctcaccccagatctcctcgctggctctggatcttgcaagtggaagtccatcttgctct

SEQ ID NO: 109720 - DNA, 60 bp, Artificial
  Synthetic oligonucleotide
tcctcgctggctctggatcttgcaagtggaagtccatcttgctctacatgcagaaggcgc

SEQ ID NO: 109721 - DNA, 60 bp, Artificial
  Synthetic oligonucleotide
atcttgctctacatgcagaaggcgctgccccctgataatgaagtgctccagtaccctgac

SEQ ID NO: 109722 - DNA, 60 bp, Artificial
  Synthetic oligonucleotide
gtaccctgacgagttttacactgtcgccgtcagcaagtatcccgctcttaaacccggcgt

SEQ ID NO: 109723 - DNA, 60 bp, Artificial
  Synthetic oligonucleotide
ttacactgtcgccgtcagcaagtatcccgctcttaaacccggcgtttcacccgacacacc

SEQ ID NO: 109724 - DNA, 60 bp, Artificial
  Synthetic oligonucleotide
aacccggcgtttcacccgacacacctgcccccgccgctggacccctaggtgagattgcct

SEQ ID NO: 109725 - DNA, 60 bp, Artificial
  Synthetic oligonucleotide
gagattgcctgcgttatgaatgcagctagtgcgtccgtgggtctgatgagcggttccagt

SEQ ID NO: 109726 - DNA, 52 bp, Artificial
  Synthetic oligonucleotide
gttttatctccttgcgcccttctcaatcatgggaaacgtccaaacctcaact

SEQ ID NO: 109727 - DNA, 60 bp, Artificial
  Synthetic oligonucleotide
gcgacaccacatacaaaggggagattgtcgaggagatcgtcccatccgatattttgggaa

SEQ ID NO: 109728 - DNA, 60 bp, Artificial
  Synthetic oligonucleotide
aaggggagattgtcgaggagatcgtcccatccgatattttgggaaactacacctccgagg

SEQ ID NO: 109729 - DNA, 60 bp, Artificial
  Synthetic oligonucleotide
cctcgagatgcttcatctgcgtactacctttgagcgtgaaacgatagctggaaagccgta

SEQ ID NO: 109730 - DNA, 60 bp, Artificial
  Synthetic oligonucleotide
gtcgtcgccagctctcccctatcgatcgttaactccactgtcaatatccgtggcctgact

SEQ ID NO: 109731 - DNA, 60 bp, Artificial
  Synthetic oligonucleotide
tggcctgactttcctcgagatgcttcatctgcgtactacctttgagcgtgaaacgatagc

SEQ ID NO: 109732 - DNA, 60 bp, Artificial
  Synthetic oligonucleotide
gagtcccggctaccgagatagaaaccgctgctgacattactggcgtttccgtcgtcgcca

SEQ ID NO: 109733 - DNA, 60 bp, Artificial
  Synthetic oligonucleotide
ctaccgagatagaaaccgctgctgacattactggcgtttccgtcgtcgccagctctcccc

SEQ ID NO: 109734 - DNA, 60 bp, Artificial
  Synthetic oligonucleotide
gaggcagggattcttctccaagattgaggagttgtggccagtactggacggctaggcgtg

SEQ ID NO: 109735 - DNA, 60 bp, Artificial
  Synthetic oligonucleotide
gaacccaactctcatggacggtctactgaccattacgcctatcctcctacgcgacaccac

SEQ ID NO: 109736 - DNA, 60 bp, Artificial
  Synthetic oligonucleotide
cggtgacaacaatgcctttacaccaacttcagaaatggtggcgtcactcaccggctattg

SEQ ID NO: 109737 - DNA, 60 bp, Artificial
  Synthetic oligonucleotide
aaacgatagctggaaagccgtatatttatggcttcggatgtctgatgctgctatccccca

SEQ ID NO: 109738 - DNA, 60 bp, Artificial
  Synthetic oligonucleotide
attgccgaaacttcggctctgaggcagcggtccggaaaccctcgcgctcttcctgatttc

SEQ ID NO: 109739 - DNA, 60 bp, Artificial
  Synthetic oligonucleotide
ccagtcgccggttgaagaatttcaagctcatgctttcgaatagatgtgaggctatcgcta

SEQ ID NO: 109740 - DNA, 60 bp, Artificial
  Synthetic oligonucleotide
agtactggacggctaggcgtgtggtttgtccacgtttggcccgacagcctccgggtgacg

SEQ ID NO: 109741 - DNA, 60 bp, Artificial
  Synthetic oligonucleotide
gcctttacaccaacttcagaaatggtggcgtcactcaccggctattgatctcaaacctgg

SEQ ID NO: 109742 - DNA, 60 bp, Artificial
  Synthetic oligonucleotide
caaccctgtcgctggtatagtgctgctggaggctcgagtcccggctaccgagatagaaac

SEQ ID NO: 109743 - DNA, 60 bp, Artificial
  Synthetic oligonucleotide
aaatcctgattacgccaaccctgtcgctggtatagtgctgctggaggctcgagtcccggc

SEQ ID NO: 109744 - DNA, 60 bp, Artificial
  Synthetic oligonucleotide
ctggacgtgagtggtatgccaattaactggctggaaaatcctgattacgccaaccctgtc

SEQ ID NO: 109745 - DNA, 60 bp, Artificial
  Synthetic oligonucleotide
gatactgatctactgctggacgtgagtggtatgccaattaactggctggaaaatcctgat

SEQ ID NO: 109746 - DNA, 60 bp, Artificial
  Synthetic oligonucleotide
gggtgacaccccttgtcgggacgcgattacgccattcagatcgggccggggccactaaaa

SEQ ID NO: 109747 - DNA, 60 bp, Artificial
  Synthetic oligonucleotide
ggacgccgacgcccattggatcacctcggtcaacccttcttcctttttccgggtgacacc

SEQ ID NO: 109748 - DNA, 60 bp, Artificial
  Synthetic oligonucleotide
ctcgcccctcgtgattacaggccagcattcattaaggacgccgacgcccattggatcacc

SEQ ID NO: 109749 - DNA, 60 bp, Artificial
  Synthetic oligonucleotide
acattcaccccatccctcgcccctcgtgattacaggccagcattcattaaggacgccgac

SEQ ID NO: 109750 - DNA, 60 bp, Artificial
  Synthetic oligonucleotide
cacttctgacatcggccatggatactcttgccgcgaagaatctagaccttgtctgcgctg

SEQ ID NO: 109751 - DNA, 60 bp, Artificial
  Synthetic oligonucleotide
agcgtgactaagttgaggcagggattcttctccaagattgaggagttgtggccagtactg

SEQ ID NO: 109752 - DNA, 60 bp, Artificial
  Synthetic oligonucleotide
ccctcacctccgctgtaggaacctccgtcagaaccggcaatatcggtaaaggcgttcagg

SEQ ID NO: 109753 - DNA, 60 bp, Artificial
  Synthetic oligonucleotide
ttcatttccagtcgccggttgaagaatttcaagctcatgctttcgaatagatgtgaggct

SEQ ID NO: 109754 - DNA, 56 bp, Artificial
  Synthetic oligonucleotide
accgtcgtcatgtctggttatgtcggtgcttcagtgagtgacgctttcgatggtgg

SEQ ID NO: 109755 - DNA, 60 bp, Artificial
  Synthetic oligonucleotide
ccggctattgatctcaaacctggtgttcttaatccgaatgggaaactttaccaattggaa

SEQ ID NO: 109756 - DNA, 52 bp, Artificial
  Synthetic oligonucleotide
ccccgacccatcgaacttggtcctcgttgtcgacgcgacagaaggcgatttt

SEQ ID NO: 109757 - DNA, 60 bp, Artificial
  Synthetic oligonucleotide
ccaattggaagccggttcggcccccgacccatcgaacttggtcctcgttgtcgacgcgac

SEQ ID NO: 109758 - DNA, 60 bp, Artificial
  Synthetic oligonucleotide
cacctccgaggagatggcagtcgccctggctaacgacgctgtagttctgatggaacactg

SEQ ID NO: 109759 - DNA, 60 bp, Artificial
  Synthetic oligonucleotide
attttgggaaactacacctccgaggagatggcagtcgccctggctaacgacgctgtagtt

SEQ ID NO: 109760 - DNA, 60 bp, Artificial
  Synthetic oligonucleotide
cgctgtagttctgatggaacactgtctaaaggaggtcgccgaagtgattggtaatgccgt

SEQ ID NO: 109761 - DNA, 60 bp, Artificial
  Synthetic oligonucleotide
atgtgaggctatcgctaaatggaacatgtcgctgaaccaggccatgtccctgctcacccc

SEQ ID NO: 109762 - DNA, 60 bp, Artificial
  Synthetic oligonucleotide
aggttagcgattgccgaaacttcggctctgaggcagcggtccggaaaccctcgcgctctt

SEQ ID NO: 109763 - DNA, 60 bp, Artificial
  Synthetic oligonucleotide
ggtgtcatcgatgccctcacctccgctgtaggaacctccgtcagaaccggcaatatcggt

SEQ ID NO: 109764 - DNA, 54 bp, Artificial
  Synthetic oligonucleotide
tcgcgctcttcctgatttcggcgccctgtggaaacgagccaagcgtgcagcctc

SEQ ID NO: 109765 - DNA, 60 bp, Artificial
  Synthetic oligonucleotide
tcgacgcgacagaaggcgatttttcatacctgaccaacaacacttgggagacattgagta

SEQ ID NO: 109766 - DNA, 60 bp, Artificial
  Synthetic oligonucleotide
aaaactgagtcctgaaatgcatgagggtttagaacaccaaatgtatgtacatccctccgc

SEQ ID NO: 109767 - DNA, 60 bp, Artificial
  Synthetic oligonucleotide
atctcgaattattgcgaagtttaacgacgattgaggcattccacatacttcaaggcgctg

SEQ ID NO: 109768 - DNA, 60 bp, Artificial
  Synthetic oligonucleotide
gggagatcccttacgccctgatcaaccaatatcccttggcaattcagacggatgttagag

SEQ ID NO: 109769 - DNA, 60 bp, Artificial
  Synthetic oligonucleotide
gtgcaggtggttgttagaggaaaagtaccagatataataaggggagaaattacgcaactc

SEQ ID NO: 109770 - DNA, 60 bp, Artificial
  Synthetic oligonucleotide
taggactcgcagattcgatcgtttacacgctcccggttgcgcatccgaaaaagtgtattg

SEQ ID NO: 109771 - DNA, 60 bp, Artificial
  Synthetic oligonucleotide
gtcacttgattacgcactcgggaggtattacgacatacgattacagctctttggtgatac

SEQ ID NO: 109772 - DNA, 60 bp, Artificial
  Synthetic oligonucleotide
gcgaacaaatccatacccgtgtttgcgtggagcgctgatagcatccgaatgcgagttggg

SEQ ID NO: 109773 - DNA, 60 bp, Artificial
  Synthetic oligonucleotide
catgacggatgctaaatggatgaagtgggcaatcgatgataggatggacattcagccgct

SEQ ID NO: 109774 - DNA, 60 bp, Artificial
  Synthetic oligonucleotide
gttgatcgaaggcggatgggatcaggagcggttcaaactccacagtatcctcacggagcc

SEQ ID NO: 109775 - DNA, 60 bp, Artificial
  Synthetic oligonucleotide
tatttaacggtttactagtatttgagcaataaatcacgatctagcttattcaatataccc

SEQ ID NO: 109776 - DNA, 60 bp, Artificial
  Synthetic oligonucleotide
aatcctcaaagactaaattttccatatcatgatattatggtaactgattctgtgactaag

SEQ ID NO: 109777 - DNA, 60 bp, Artificial
  Synthetic oligonucleotide
gaacatcagttttcataattgacgcccctagagctatcgttccaattaatcctcaaagac

SEQ ID NO: 109778 - DNA, 60 bp, Artificial
  Synthetic oligonucleotide
gtgactaagttcatcgaatttacagttgcactgactccagatctacaattatttaacggt

SEQ ID NO: 109779 - DNA, 60 bp, Artificial
  Synthetic oligonucleotide
tgtgactaagttcatcgaatttacagttgcactgactccagatctacaattatttaacgg

SEQ ID NO: 109780 - DNA, 60 bp, Artificial
  Synthetic oligonucleotide
atgcgactacgtctgcactttccaccattaatattgcatcagctgaacaaacgctgaatg

SEQ ID NO: 109781 - DNA, 60 bp, Artificial
  Synthetic oligonucleotide
gagctgcaatgtctgcaatgattgcactaatgatactcccaacagatcaagaaaatatgg

SEQ ID NO: 109782 - DNA, 60 bp, Artificial
  Synthetic oligonucleotide
gtcttcttttggagctgcaatgtctgcaatgattgcactaatgatactcccaacagatca

SEQ ID NO: 109783 - DNA, 60 bp, Artificial
  Synthetic oligonucleotide
ggcacttaagcgctgcaagatggaagtgattgaaaagctcgagacaattagagaaacgtt

SEQ ID NO: 109784 - DNA, 60 bp, Artificial
  Synthetic oligonucleotide
caacagatcaagaaaatatggatgacgaagtgtttgatgttctatgcaatcttgtttaca

SEQ ID NO: 109785 - DNA, 60 bp, Artificial
  Synthetic oligonucleotide
cttgtttacaatgaattaatagcatgggctgctgatagacctgttttcgttaggagagct

SEQ ID NO: 109786 - DNA, 60 bp, Artificial
  Synthetic oligonucleotide
ggtggatgtggcgaatgataatagcaaaccaactcttatggataaagtattacaggtgtc

SEQ ID NO: 109787 - DNA, 60 bp, Artificial
  Synthetic oligonucleotide
cattcaatgagaatgatgtcaaaattatggagaacgaatgtctttagaacttctcttgaa

SEQ ID NO: 109788 - DNA, 60 bp, Artificial
  Synthetic oligonucleotide
gttaacccaacatgagaaaaaaagaacggttaaagaagtggaaaaagttgaagaagacat

SEQ ID NO: 109789 - DNA, 60 bp, Artificial
  Synthetic oligonucleotide
gcgactacgtctgcactttccaccattaatattgcatcagctgaacaaacgctgaatgcg

SEQ ID NO: 109790 - DNA, 60 bp, Artificial
  Synthetic oligonucleotide
gtgtgaattgtcagggcctttatatagatcacgtattgttcattcaatgagaatgatgtc

SEQ ID NO: 109791 - DNA, 60 bp, Artificial
  Synthetic oligonucleotide
ggataaagtattacaggtgtcaagtcagccaaataatccatattctgctgatgtattaca

SEQ ID NO: 109792 - DNA, 60 bp, Artificial
  Synthetic oligonucleotide
tgttgatacggattctgaggcatattcactatatgttccagaatctcagaaacttgatgt

SEQ ID NO: 109793 - DNA, 60 bp, Artificial
  Synthetic oligonucleotide
ttaatagcatgggctgctgatagacctgttttcgttaggagagctggagcaacaaacgca

SEQ ID NO: 109794 - DNA, 60 bp, Artificial
  Synthetic oligonucleotide
gtgacatcactaattatatgagatttgtattgttaagaagaccttggcttccactttaca

SEQ ID NO: 109795 - DNA, 60 bp, Artificial
  Synthetic oligonucleotide
atggataaagtattacaggtgtcaagtcagccaaataatccatattctgctgatgtatta

SEQ ID NO: 109796 - DNA, 60 bp, Artificial
  Synthetic oligonucleotide
catattactgcaacgtccagctggaattcaacaatttacaatagaagacttaaaacaagg

SEQ ID NO: 109797 - DNA, 60 bp, Artificial
  Synthetic oligonucleotide
atggcacaaattagagccagacaaccgattatagttaatggccctattcctttaagaatt

SEQ ID NO: 109798 - DNA, 60 bp, Artificial
  Synthetic oligonucleotide
gaagagataacatattactgcaacgtccagctggaattcaacaatttacaatagaagact

SEQ ID NO: 109799 - DNA, 60 bp, Artificial
  Synthetic oligonucleotide
tcccctacatctcaacatggagttggtaaaggtgcagtgcttcatccagttccacaaaat

SEQ ID NO: 109800 - DNA, 60 bp, Artificial
  Synthetic oligonucleotide
agtgcttcatccagttccacaaaattttggcagatcttctcaattcgtgagaagagataa

SEQ ID NO: 109801 - DNA, 60 bp, Artificial
  Synthetic oligonucleotide
gagacactcattcattcagagtaattcgtgaaatagctgtagctctccaagcggcatttg

SEQ ID NO: 109802 - DNA, 60 bp, Artificial
  Synthetic oligonucleotide
gcggcatttgataattcccctacatctcaacatggagttggtaaaggtgcagtgcttcat

SEQ ID NO: 109803 - DNA, 60 bp, Artificial
  Synthetic oligonucleotide
aagaagacatgaaggtggatgtggcgaatgataatagcaaaccaactcttatggataaag

SEQ ID NO: 109804 - DNA, 60 bp, Artificial
  Synthetic oligonucleotide
tagagccagacaaccgattatagttaatggccctattcctttaagaatttctgatgccgc

SEQ ID NO: 109805 - DNA, 60 bp, Artificial
  Synthetic oligonucleotide
ctagaacatcagttttcataattgacgcccctagagctatcgttccaattaatcctcaaa

SEQ ID NO: 109806 - DNA, 56 bp, Artificial
  Synthetic oligonucleotide
gcttcaatacaaaaaattccctcagcaactttgactgcaatgttttcagacagaca

SEQ ID NO: 109807 - DNA, 60 bp, Artificial
  Synthetic oligonucleotide
gagatgaacggcttagaattaaaattccgatgtctggctttctgtccttagttatgggca

SEQ ID NO: 109808 - DNA, 60 bp, Artificial
  Synthetic oligonucleotide
caacagaaatttgagagatgaacggcttagaattaaaattccgatgtctggctttctgtc

SEQ ID NO: 109809 - DNA, 60 bp, Artificial
  Synthetic oligonucleotide
ccactttacaactctagagatgtgcggagaaatgctcacgttctggttcctaatgttgat

SEQ ID NO: 109810 - DNA, 60 bp, Artificial
  Synthetic oligonucleotide
atatgagatttgtattgttaagaagaccttggcttccactttacaactctagagatgtgc

SEQ ID NO: 109811 - DNA, 60 bp, Artificial
  Synthetic oligonucleotide
tgaagcaatttcaattgaagattcagcatcagtggctataatgcggaatgatgctaatag

SEQ ID NO: 109812 - DNA, 60 bp, Artificial
  Synthetic oligonucleotide
gtcacaggttctaaattttgctgatgatgtaaggaaaatggattatgctgaagcaatttc

SEQ ID NO: 109813 - DNA, 60 bp, Artificial
  Synthetic oligonucleotide
tggtcacaggttctaaattttgctgatgatgtaaggaaaatggattatgctgaagcaatt

SEQ ID NO: 109814 - DNA, 60 bp, Artificial
  Synthetic oligonucleotide
gctttctgtccttagttatgggcataacgaaagctcctgatgcttttgattggtcacagg

SEQ ID NO: 109815 - DNA, 60 bp, Artificial
  Synthetic oligonucleotide
gtattatgatatggtaatggatcgcaccgatagaggattagatgctagaagagcagcaat

SEQ ID NO: 109816 - DNA, 60 bp, Artificial
  Synthetic oligonucleotide
ctgaggcatattcactatatgttccagaatctcagaaacttgatgtttcaccaattacta

SEQ ID NO: 109817 - DNA, 57 bp, Artificial
  Synthetic oligonucleotide
gagcagcaatgcaatttgataatgttatcgttgatgcacaaaacagaaccgttcaat

SEQ ID NO: 109818 - DNA, 60 bp, Artificial
  Synthetic oligonucleotide
ggtaatggatcgcaccgatagaggattagatgctagaagagcagcaatgcaatttgataa

SEQ ID NO: 109819 - DNA, 60 bp, Artificial
  Synthetic oligonucleotide
ttgctacgtatatctcaacagttcgctgagccaatgcaagatttggctccagttgtaaga

SEQ ID NO: 109820 - DNA, 60 bp, Artificial
  Synthetic oligonucleotide
ccatttgatttacaattgctacgtatatctcaacagttcgctgagccaatgcaagatttg

SEQ ID NO: 109821 - DNA, 60 bp, Artificial
  Synthetic oligonucleotide
gctccagttgtaagagagtatatgatgctaggagccgacggatatgtgttaacacagaag

SEQ ID NO: 109822 - DNA, 60 bp, Artificial
  Synthetic oligonucleotide
gcaagatttggctccagttgtaagagagtatatgatgctaggagccgacggatatgtgtt

SEQ ID NO: 109823 - DNA, 60 bp, Artificial
  Synthetic oligonucleotide
ttgatagaatgtgtgaattgtcagggcctttatatagatcacgtattgttcattcaatga

SEQ ID NO: 109824 - DNA, 55 bp, Artificial
  Synthetic oligonucleotide
gatatgtgttaacacagaagacaagattggatagagatcagcaattaatagctaa

SEQ ID NO: 109825 - DNA, 60 bp, Artificial
  Synthetic oligonucleotide
gtgtcgctgccatgctatccgggctgatccgaaggttcgaagaagaaaagatgaaacaca

SEQ ID NO: 109826 - DNA, 60 bp, Artificial
  Synthetic oligonucleotide
cgtaacatcatcctgcacgacctggcgtgtctgcatcatgctcggagtttggtcagctcc

SEQ ID NO: 109827 - DNA, 60 bp, Artificial
  Synthetic oligonucleotide
atcctgcacgacctggcgtgtctgcatcatgctcggagtttggtcagctccgttgcagag

SEQ ID NO: 109828 - DNA, 60 bp, Artificial
  Synthetic oligonucleotide
ggcgtctagcagcatcatacaaattgatttggttcgacgtcgagcttaaagttccagctg

SEQ ID NO: 109829 - DNA, 60 bp, Artificial
  Synthetic oligonucleotide
gcttaaagttccagctgatttatccgattcagataatgcacatctgtcggatactcaacc

SEQ ID NO: 109830 - DNA, 60 bp, Artificial
  Synthetic oligonucleotide
gaattactaattaaggtaattcgcgaagaaatattactggcggtttcacgattcgtggcc

SEQ ID NO: 109831 - DNA, 60 bp, Artificial
  Synthetic oligonucleotide
cattatcggcgtctagcagcatcatacaaattgatttggttcgacgtcgagcttaaagtt

SEQ ID NO: 109832 - DNA, 60 bp, Artificial
  Synthetic oligonucleotide
ccatctgctgatgcgggtgtgtctaatgagcagaaaattcgaagtcagatggaattacta

SEQ ID NO: 109833 - DNA, 60 bp, Artificial
  Synthetic oligonucleotide
cagatggaattactaattaaggtaattcgcgaagaaatattactggcggtttcacgattc

SEQ ID NO: 109834 - DNA, 59 bp, Artificial
  Synthetic oligonucleotide
tcatattgaggagtactatctcactaggatggaatctgtgtcctcactgctccatacct

SEQ ID NO: 109835 - DNA, 60 bp, Artificial
  Synthetic oligonucleotide
atttaccatctgctgatgcgggtgtgtctaatgagcagaaaattcgaagtcagatggaat

SEQ ID NO: 109836 - DNA, 60 bp, Artificial
  Synthetic oligonucleotide
ctgtgaatgaattcttctattctgaacagcttaaaagcacaatcaatatgtctgactcag

SEQ ID NO: 109837 - DNA, 60 bp, Artificial
  Synthetic oligonucleotide
tgtctgactcagttcatcatattgaggagtactatctcactaggatggaatctgtgtcct

SEQ ID NO: 109838 - DNA, 60 bp, Artificial
  Synthetic oligonucleotide
gcgattagaaggattggtgacgcgatttcctttttcatgaagtacacatctggaatcctt

SEQ ID NO: 109839 - DNA, 60 bp, Artificial
  Synthetic oligonucleotide
ctgtcttgatggctggaatactgcaggatggcgttgcgattagaaggattggtgacgcga

SEQ ID NO: 109840 - DNA, 60 bp, Artificial
  Synthetic oligonucleotide
ggtattttcctctctctgtcttgatggctggaatactgcaggatggcgttgcgattagaa

SEQ ID NO: 109841 - DNA, 60 bp, Artificial
  Synthetic oligonucleotide
taatagacatgctgagctgaatgctctgcatttaataagaaggaacgttggtcaatgctg

SEQ ID NO: 109842 - DNA, 60 bp, Artificial
  Synthetic oligonucleotide
tggaatccttcagaataatagacatgctgagctgaatgctctgcatttaataagaaggaa

SEQ ID NO: 109843 - DNA, 61 bp, Artificial
  Synthetic oligonucleotide
ccgttttgtggaagtaccataaagtccaatgttttagacgttacaaattaaactgatgtag

SEQ ID NO: 109844 - DNA, 60 bp, Artificial
  Synthetic oligonucleotide
cttccgttttgtggaagtaccataaagtccaatgttttagacgttacaaattaaactgat

SEQ ID NO: 109845 - DNA, 58 bp, Artificial
  Synthetic oligonucleotide
acttggatgatatatccgagtttagcgcataagtaaattctcaagatctccagatgag

SEQ ID NO: 109846 - DNA, 60 bp, Artificial
  Synthetic oligonucleotide
aagacgacctgacgcaaacttggatgatatatccgagtttagcgcataagtaaattctca

SEQ ID NO: 109847 - DNA, 60 bp, Artificial
  Synthetic oligonucleotide
tgctgtgaatgaattcttctattctgaacagcttaaaagcacaatcaatatgtctgactc

SEQ ID NO: 109848 - DNA, 60 bp, Artificial
  Synthetic oligonucleotide
ctgtctgatacatgtttcattacacctccagttgcagtagttgatgctgtgaatgaattc

SEQ ID NO: 109849 - DNA, 60 bp, Artificial
  Synthetic oligonucleotide
atactcaaccgtcatcaagtggcgttgctgcagtggagtcagtggatgctgggttcttat

SEQ ID NO: 109850 - DNA, 60 bp, Artificial
  Synthetic oligonucleotide
ctgatttatccgattcagataatgcacatctgtcggatactcaaccgtcatcaagtggcg

SEQ ID NO: 109851 - DNA, 60 bp, Artificial
  Synthetic oligonucleotide
attcacccttcactgatgtggagttaatctttagaaaagcttgctctgcaatgaaactgt

SEQ ID NO: 109852 - DNA, 60 bp, Artificial
  Synthetic oligonucleotide
ccaccagatttggggatttcactctccttggctcgtgtagtctagattcacccttcactg

SEQ ID NO: 109853 - DNA, 60 bp, Artificial
  Synthetic oligonucleotide
atgaaactgtctgatacatgtttcattacacctccagttgcagtagttgatgctgtgaat

SEQ ID NO: 109854 - DNA, 60 bp, Artificial
  Synthetic oligonucleotide
cacccttcactgatgtggagttaatctttagaaaagcttgctctgcaatgaaactgtctg

SEQ ID NO: 109855 - DNA, 60 bp, Artificial
  Synthetic oligonucleotide
gtcaatgctgggccccgactctcatgagttgttggattgcctgccattcgcatgctggtg

SEQ ID NO: 109856 - DNA, 60 bp, Artificial
  Synthetic oligonucleotide
taagaaggaacgttggtcaatgctgggccccgactctcatgagttgttggattgcctgcc

SEQ ID NO: 109857 - DNA, 60 bp, Artificial
  Synthetic oligonucleotide
ttcctccaccagatttggggatttcactctccttggctcgtgtagtctagattcaccctt

SEQ ID NO: 109858 - DNA, 60 bp, Artificial
  Synthetic oligonucleotide
attgcctgccattcgcatgctggtgtgatgcgatttttaatcgatatagcttcctccacc

SEQ ID NO: 109859 - DNA, 51 bp, Artificial
  Synthetic oligonucleotide
ttttggggccgtcatgttcccgaagacgtaacatcatcctgcacgacctgg

SEQ ID NO: 109860 - DNA, 60 bp, Artificial
  Synthetic oligonucleotide
gggttcttatcatcagaggtgggtgataataggtttttctcagtcccacaaagacgacct

SEQ ID NO: 109861 - DNA, 60 bp, Artificial
  Synthetic oligonucleotide
ttaaactgatgtagtactatgtgtttttggggccgtcatgttcccgaagacgtaacatca

SEQ ID NO: 109862 - DNA, 60 bp, Artificial
  Synthetic oligonucleotide
caagtggcgttgctgcagtggagtcagtggatgctgggttcttatcatcagaggtgggtg

SEQ ID NO: 109863 - DNA, 60 bp, Artificial
  Synthetic oligonucleotide
cctagagtagttggcttttgtaattcggctcacgctcagggtttgaacgtcttagttaga

SEQ ID NO: 109864 - DNA, 60 bp, Artificial
  Synthetic oligonucleotide
tggaaataacattaagactgaaggcttatttggttttagccctaaattatcatttgctca

SEQ ID NO: 109865 - DNA, 60 bp, Artificial
  Synthetic oligonucleotide
gactgaaggcttatttggttttagccctaaattatcatttgctcaacagaacggtagact

SEQ ID NO: 109866 - DNA, 60 bp, Artificial
  Synthetic oligonucleotide
ggaaactaagttatccgccggatctggaatctattcaatataagctggccacaagctatg

SEQ ID NO: 109867 - DNA, 60 bp, Artificial
  Synthetic oligonucleotide
acaagctatgatctaaattacaaacgcatgttcaatgaaaacatcacgttagaagaaact

SEQ ID NO: 109868 - DNA, 60 bp, Artificial
  Synthetic oligonucleotide
gaataccattgtcgtgacagtttagtgatacctttggcagctcttcctgtttcgagtcat

SEQ ID NO: 109869 - DNA, 60 bp, Artificial
  Synthetic oligonucleotide
tcctgtttcgagtcataatattagtagtgatttcactaacgtcgtagttactgacaattt

SEQ ID NO: 109870 - DNA, 57 bp, Artificial
  Synthetic oligonucleotide
catttgctcaacagaacggtagacttaagaacgaatatgttactaaagggttaataa

SEQ ID NO: 109871 - DNA, 60 bp, Artificial
  Synthetic oligonucleotide
tgaatccgaataattgtattagttatgatcctagagacctaagttacagtagtttaacaa

SEQ ID NO: 109872 - DNA, 60 bp, Artificial
  Synthetic oligonucleotide
gaacgtcttagttagaatagacatcaggtctgataaaccgaagatgtcgaagggcgagtt

SEQ ID NO: 109873 - DNA, 60 bp, Artificial
  Synthetic oligonucleotide
gaatagacatcaggtctgataaaccgaagatgtcgaagggcgagttgaactctgagtggg

SEQ ID NO: 109874 - DNA, 60 bp, Artificial
  Synthetic oligonucleotide
cactgaattaaataaaagactcagacgtgaagcgttagaagagtttgtaacacgtaatcc

SEQ ID NO: 109875 - DNA, 60 bp, Artificial
  Synthetic oligonucleotide
tagaagagtttgtaacacgtaatcccagctatgtcatgttcgacaatgaaacagcctatt

SEQ ID NO: 109876 - DNA, 60 bp, Artificial
  Synthetic oligonucleotide
gaaagtgaatctggaatgtaatccgcaacgggatttaagaggataatagcctgcgcgagg

SEQ ID NO: 109877 - DNA, 60 bp, Artificial
  Synthetic oligonucleotide
ctagagggaccccttggtagtaaccttggacacctgttaagcgccattttcaggacttgc

SEQ ID NO: 109878 - DNA, 60 bp, Artificial
  Synthetic oligonucleotide
agtcgagattggatgggctagctgtgaaatacggccgacggtatactgacgttgacgaga

SEQ ID NO: 109879 - DNA, 60 bp, Artificial
  Synthetic oligonucleotide
aatcatcgacagtgaaagtgaatctggaatgtaatccgcaacgggatttaagaggataat

SEQ ID NO: 109880 - DNA, 60 bp, Artificial
  Synthetic oligonucleotide
cacgacttttgatccaataagtgatttcaagcggcactgtgttcaacgctggaaactaag

SEQ ID NO: 109881 - DNA, 60 bp, Artificial
  Synthetic oligonucleotide
acccatatggtaaagttggtcaactttgctctaaaacgtgtatgtcgttcagttggaatt

SEQ ID NO: 109882 - DNA, 60 bp, Artificial
  Synthetic oligonucleotide
ggagtagaaccaaacggtttaaaagcattgagtaaatctagaaatgggttgaatatctac

SEQ ID NO: 109883 - DNA, 58 bp, Artificial
  Synthetic oligonucleotide
tcggatttcttgaagtaggtgaagagtctactgacagtaagacggcgtacctgagacg

SEQ ID NO: 109884 - DNA, 60 bp, Artificial
  Synthetic oligonucleotide
tcgctaattggtataagtcgagattggatgggctagctgtgaaatacggccgacggtata

SEQ ID NO: 109885 - DNA, 60 bp, Artificial
  Synthetic oligonucleotide
acagagaccacttttgattacgaatgaagagactaagtattttaggaacatcggatttct

SEQ ID NO: 109886 - DNA, 60 bp, Artificial
  Synthetic oligonucleotide
cgaacgtttgtactatgcacttggcgatgcttatgaagctggagttgaacagagaccact

SEQ ID NO: 109887 - DNA, 60 bp, Artificial
  Synthetic oligonucleotide
taatgaaaccgtccgtatcgtatgaacgtggatttggcagtcgtgtttggcatggatacc

SEQ ID NO: 109888 - DNA, 60 bp, Artificial
  Synthetic oligonucleotide
ccctatggattggtgagatacctacgagaaatagaaatcaatataatgaaaccgtccgta

SEQ ID NO: 109889 - DNA, 60 bp, Artificial
  Synthetic oligonucleotide
cacgtaatcccagctatgtcatgttcgacaatgaaacagcctattcgagtaccggacgga

SEQ ID NO: 109890 - DNA, 60 bp, Artificial
  Synthetic oligonucleotide
gacgtcattagccatagttgaccgtgttcacatagctcagttgctcgagttcgctaattg

SEQ ID NO: 109891 - DNA, 60 bp, Artificial
  Synthetic oligonucleotide
ggataccacagtcataggatggccgttgatgtagcagttaaagtgatgacgtcattagcc

SEQ ID NO: 109892 - DNA, 60 bp, Artificial
  Synthetic oligonucleotide
caataagtgatttcaagcggcactgtgttcaacgctggaaactaagttatccgccggatc

SEQ ID NO: 109893 - DNA, 60 bp, Artificial
  Synthetic oligonucleotide
ccgtccgtatcgtatgaacgtggatttggcagtcgtgtttggcatggataccacagtcat

SEQ ID NO: 109894 - DNA, 60 bp, Artificial
  Synthetic oligonucleotide
gcgagttgaactctgagtgggagtcgggtgtacaagctgataacgaactgaccgcaagcc

SEQ ID NO: 109895 - DNA, 60 bp, Artificial
  Synthetic oligonucleotide
agggcgagttgaactctgagtgggagtcgggtgtacaagctgataacgaactgaccgcaa

SEQ ID NO: 109896 - DNA, 50 bp, Artificial
  Synthetic oligonucleotide
caaaacttaggcctagttacatcgtagggaatgaagcaccatatctcaat

SEQ ID NO: 109897 - DNA, 60 bp, Artificial
  Synthetic oligonucleotide
taagaactatttattaaccttcccttacacatcgatagtgaacacacaatccacccgaat

SEQ ID NO: 109898 - DNA, 59 bp, Artificial
  Synthetic oligonucleotide
tgtacctgaacttaggagttaccattaagcaagctactgtttcgaataattcacttgct

SEQ ID NO: 109899 - DNA, 60 bp, Artificial
  Synthetic oligonucleotide
ccacccgaataacacacgggcgaacgtacgtagataatgcttttaatatgtttcatgaat

SEQ ID NO: 109900 - DNA, 60 bp, Artificial
  Synthetic oligonucleotide
aaccttcccttacacatcgatagtgaacacacaatccacccgaataacacacgggcgaac

SEQ ID NO: 109901 - DNA, 60 bp, Artificial
  Synthetic oligonucleotide
tttcatgaataccattgtcgtgacagtttagtgatacctttggcagctcttcctgtttcg

SEQ ID NO: 109902 - DNA, 60 bp, Artificial
  Synthetic oligonucleotide
cacgggcgaacgtacgtagataatgcttttaatatgtttcatgaataccattgtcgtgac

SEQ ID NO: 109903 - DNA, 60 bp, Artificial
  Synthetic oligonucleotide
ctgacaattttgacgtcataagaatgactcaacctatagaacaggtttcaacccatatgg

SEQ ID NO: 109904 - DNA, 60 bp, Artificial
  Synthetic oligonucleotide
gattacgaatgaagagactaagtattttaggaacatcggatttcttgaagtaggtgaaga

SEQ ID NO: 109905 - DNA, 60 bp, Artificial
  Synthetic oligonucleotide
gacatacctagagtagttggcttttgtaattcggctcacgctcagggtttgaacgtctta

SEQ ID NO: 109906 - DNA, 60 bp, Artificial
  Synthetic oligonucleotide
gccatagttgaccgtgttcacatagctcagttgctcgagttcgctaattggtataagtcg

SEQ ID NO: 109907 - DNA, 60 bp, Artificial
  Synthetic oligonucleotide
agtacctatacaaggtccgattaatagggctgttgcacaaaacgcctatgtgtgagggca

SEQ ID NO: 109908 - DNA, 60 bp, Artificial
  Synthetic oligonucleotide
gtacctatacaaggtccgattaatagggctgttgcacaaaacgcctatgtgtgagggcag

SEQ ID NO: 109909 - DNA, 52 bp, Artificial
  Synthetic oligonucleotide
gaaaatacaacatcagtggggattatgctaatgccacgagaacttttttggc

SEQ ID NO: 109910 - DNA, 60 bp, Artificial
  Synthetic oligonucleotide
gaaaatacaacatcagtggggattatgctaatgccacgagaacttttttggctatatcac

SEQ ID NO: 109911 - DNA, 60 bp, Artificial
  Synthetic oligonucleotide
ttacagcaggtggaagattcacgaatttaacacagaatatggcgagacagcttgatatag

SEQ ID NO: 109912 - DNA, 60 bp, Artificial
  Synthetic oligonucleotide
cagcaggtggaagattcacgaatttaacacagaatatggcgagacagcttgatatagcct

SEQ ID NO: 109913 - DNA, 60 bp, Artificial
  Synthetic oligonucleotide
cgcgggtacagtataatggtgtgatggttgacgctgaaattaaatactgtaaggggatgg

SEQ ID NO: 109914 - DNA, 60 bp, Artificial
  Synthetic oligonucleotide
aagaatccggaacctaaaggatacgtgctgaatgttccaggaccaggtgcatacagaatt

SEQ ID NO: 109915 - DNA, 60 bp, Artificial
  Synthetic oligonucleotide
cagcacgtatcctttaggttccggattcttgacaggtttaaaagctactactcttccaat

SEQ ID NO: 109916 - DNA, 60 bp, Artificial
  Synthetic oligonucleotide
ttaaaattggaagagtagtagcttttaaacctgtcaagaatccggaacctaaaggatacg

SEQ ID NO: 109917 - DNA, 60 bp, Artificial
  Synthetic oligonucleotide
tagcttgatgctgacgccacatggagtcgaagcgacaacggaaagatgggaagagtggaa

SEQ ID NO: 109918 - DNA, 60 bp, Artificial
  Synthetic oligonucleotide
ctgcccatcctgaattctgtatgcacctggtcctggaacattcagcacgtatcctttagg

SEQ ID NO: 109919 - DNA, 60 bp, Artificial
  Synthetic oligonucleotide
cggaacctaaaggatacgtgctgaatgttccaggaccaggtgcatacagaattcaggatg

SEQ ID NO: 109920 - DNA, 60 bp, Artificial
  Synthetic oligonucleotide
agttcatagcgtggcgccaagggaggagtcgcgctggatggatgatgatgaggcgaaggt

SEQ ID NO: 109921 - DNA, 60 bp, Artificial
  Synthetic oligonucleotide
gtcaagaatccggaacctaaaggatacgtgctgaatgttccaggaccaggtgcatacaga

SEQ ID NO: 109922 - DNA, 60 bp, Artificial
  Synthetic oligonucleotide
tagtagcttttaaacctgtcaagaatccggaacctaaaggatacgtgctgaatgttccag

SEQ ID NO: 109923 - DNA, 60 bp, Artificial
  Synthetic oligonucleotide
attcagcacgtatcctttaggttccggattcttgacaggtttaaaagctactactcttcc

SEQ ID NO: 109924 - DNA, 60 bp, Artificial
  Synthetic oligonucleotide
tggaagagtagtagcttttaaacctgtcaagaatccggaacctaaaggatacgtgctgaa

SEQ ID NO: 109925 - DNA, 60 bp, Artificial
  Synthetic oligonucleotide
atggagtcgaagcgacaacggaaagatgggaagagtggaaatttgagggtgttagcgtga

SEQ ID NO: 109926 - DNA, 60 bp, Artificial
  Synthetic oligonucleotide
cacatggagtcgaagcgacaacggaaagatgggaagagtggaaatttgagggtgttagcg

SEQ ID NO: 109927 - DNA, 60 bp, Artificial
  Synthetic oligonucleotide
gcgacaacggaaagatgggaagagtggaaatttgagggtgttagcgtgacgccaatggct

SEQ ID NO: 109928 - DNA, 60 bp, Artificial
  Synthetic oligonucleotide
cgaagcgacaacggaaagatgggaagagtggaaatttgagggtgttagcgtgacgccaat

SEQ ID NO: 109929 - DNA, 60 bp, Artificial
  Synthetic oligonucleotide
ttgatcttttgccgtaattcgcggatatcataatttgatctcatcacacctggcaaatcg

SEQ ID NO: 109930 - DNA, 60 bp, Artificial
  Synthetic oligonucleotide
caacggaaagatgggaagagtggaagtttgagggtgttagcgtgacgccaatggctacgc

SEQ ID NO: 109931 - DNA, 60 bp, Artificial
  Synthetic oligonucleotide
cccgcgtagccattggcgtcacgctaacaccctcaaacttccactcttcccatctttccg

SEQ ID NO: 109932 - DNA, 60 bp, Artificial
  Synthetic oligonucleotide
tcaagttcagagcgtggcgccaagggaggagtcgcgctggatggatgatgatgaggcgaa

SEQ ID NO: 109933 - DNA, 60 bp, Artificial
  Synthetic oligonucleotide
tcgcctcatcatcatccatccagcgcgactcctcccttggcgccacgctctgaacttgaa

SEQ ID NO: 109934 - DNA, 60 bp, Artificial
  Synthetic oligonucleotide
gcttcacgtagtttttccaacccgctagttcccggaattatctctttggcctcatcatcc

SEQ ID NO: 109935 - DNA, 60 bp, Artificial
  Synthetic oligonucleotide
tccaacccgctagttcccggaattatctctttggcctcatcatccaccttcgcctcatca

SEQ ID NO: 109936 - DNA, 60 bp, Artificial
  Synthetic oligonucleotide
ctcatcatccaccttcgcctcatcatcatccatccagcgcgactcctcccttggcgccac

SEQ ID NO: 109937 - DNA, 60 bp, Artificial
  Synthetic oligonucleotide
cttcccatctttccgttgtcgcttcgactccatgtggcgtcagcatcaagctaatgatat

SEQ ID NO: 109938 - DNA, 60 bp, Artificial
  Synthetic oligonucleotide
tgggcaggatatcattagcttgatgctgacgccacatggagtcgaagcgacaacggaaag

SEQ ID NO: 109939 - DNA, 60 bp, Artificial
  Synthetic oligonucleotide
gccgtactgtcaaattaaaattggaagagtagtagcttttaaacctgtcaagaatccgga

SEQ ID NO: 109940 - DNA, 60 bp, Artificial
  Synthetic oligonucleotide
ttgtcaaattaaaattggaagagtagtagcttttaaacctgtcaagaatccggaacctaa

SEQ ID NO: 109941 - DNA, 60 bp, Artificial
  Synthetic oligonucleotide
cgcagccgtactgtcaaattaaaattggaagagtagtagcttttaaacctgtcaagaatc

SEQ ID NO: 109942 - DNA, 60 bp, Artificial
  Synthetic oligonucleotide
agccgtactgtcaaattaaaattggaagagtagtagcttttaaacctgtcaagaatccgg

SEQ ID NO: 109943 - DNA, 60 bp, Artificial
  Synthetic oligonucleotide
ctaaaggatacgtgctgaatgttccaggaccaggtgcatacagaattcaggatgggcagg

SEQ ID NO: 109944 - DNA, 60 bp, Artificial
  Synthetic oligonucleotide
aaaggatacgtgctgaatgttccaggaccaggtgcatacagaattcaggatgggcaggat

SEQ ID NO: 109945 - DNA, 60 bp, Artificial
  Synthetic oligonucleotide
ggatacgtgctgaatgttccaggaccaggtgcatacagaattcaggatgggcaggatatc

SEQ ID NO: 109946 - DNA, 60 bp, Artificial
  Synthetic oligonucleotide
ctaatgatatcctgcccatcctgaattctgtatgcacctggtcctggaacattcagcacg

SEQ ID NO: 109947 - DNA, 60 bp, Artificial
  Synthetic oligonucleotide
tgcatacagaattcaggatgggcaggatatcattagcttgatgctgacgccacatggagt

SEQ ID NO: 109948 - DNA, 60 bp, Artificial
  Synthetic oligonucleotide
atacagaattcaggatgggcaggatatcattagcttgatgctgacgccacatggagtcga

SEQ ID NO: 109949 - DNA, 60 bp, Artificial
  Synthetic oligonucleotide
attcaggatgggcaggatatcattagcttgatgctgacgccacatggagtcgaagcgaca

SEQ ID NO: 109950 - DNA, 60 bp, Artificial
  Synthetic oligonucleotide
cgttgtcgcttcgactccatgtggcgtcagcatcaagctaatgatatcctgcccatcctg

SEQ ID NO: 109951 - DNA, 60 bp, Artificial
  Synthetic oligonucleotide
ggatgggcaggatatcattagcttgatgctgacgccacatggagtcgaagcgacaacgga

SEQ ID NO: 109952 - DNA, 60 bp, Artificial
  Synthetic oligonucleotide
tcgtatgattgttacgaagaagcttaagtggcagaatgtgccactgtattgctttgatga

SEQ ID NO: 109953 - DNA, 60 bp, Artificial
  Synthetic oligonucleotide
gttagcgtgacgccaatggctacgcgggtacagtataatggtgtgatggttgacgctgaa

SEQ ID NO: 109954 - DNA, 60 bp, Artificial
  Synthetic oligonucleotide
tgacgccaatggctacgcgggtacagtataatggtgtgatggttgacgctgaaattaaat

SEQ ID NO: 109955 - DNA, 60 bp, Artificial
  Synthetic oligonucleotide
ggtgttagcgtgacgccaatggctacgcgggtacagtataatggtgtgatggttgacgct

SEQ ID NO: 109956 - DNA, 60 bp, Artificial
  Synthetic oligonucleotide
gtgttagcgtgacgccaatggctacgcgggtacagtataatggtgtgatggttgacgctg

SEQ ID NO: 109957 - DNA, 60 bp, Artificial
  Synthetic oligonucleotide
aggcgaggatgcgagtgatgatgaacacccaaaaacccacataacgaaagagtacatcga

SEQ ID NO: 109958 - DNA, 60 bp, Artificial
  Synthetic oligonucleotide
cccatccccttacaatacttaatttcagcgtcaaccatcacaccattatactgtacccgc

SEQ ID NO: 109959 - DNA, 60 bp, Artificial
  Synthetic oligonucleotide
tacttaatttcagcgtcaaccatcacaccattatactgtacccgcgtagccattggcgtc

SEQ ID NO: 109960 - DNA, 60 bp, Artificial
  Synthetic oligonucleotide
atggctacgcgggtacagtataatggtgtgatggttgacgctgaaattaagtactgtaag

SEQ ID NO: 109961 - DNA, 60 bp, Artificial
  Synthetic oligonucleotide
cgggttggaaaaactacgtgaagcgagaagcaatgtttttaaagaggtggaagctgtaat

SEQ ID NO: 109962 - DNA, 60 bp, Artificial
  Synthetic oligonucleotide
ctgtacccgcgtagccattggcgtcacgctaacaccctcaaacttccactcttcccatct

SEQ ID NO: 109963 - DNA, 60 bp, Artificial
  Synthetic oligonucleotide
ttacgggcatagatttgagccatttgaaggtggccgacattcatccacacatcattgaaa

SEQ ID NO: 109964 - DNA, 57 bp, Artificial
  Synthetic oligonucleotide
ggggttaaaactaaaggaaattgttgataagcttacgggcatagatttgagccattt

SEQ ID NO: 109965 - DNA, 55 bp, Artificial
  Synthetic oligonucleotide
gcgcggaagtaattgagactgcgtcggaggaggtaccaatcttcggcgctggggc

SEQ ID NO: 109966 - DNA, 60 bp, Artificial
  Synthetic oligonucleotide
cgagcagcaagcgacacatgatgaagcgattcaagagatgctcgacttaagcgcggaagt

SEQ ID NO: 109967 - DNA, 60 bp, Artificial
  Synthetic oligonucleotide
aacccgcgcaatacagggggggttaaaactaaaggaaattgttgataagcttacgggcat

SEQ ID NO: 109968 - DNA, 54 bp, Artificial
  Synthetic oligonucleotide
cgcggaagtaattgagactgcgtcggaggaggtaccaatcttcggcgctggggc

SEQ ID NO: 109969 - DNA, 60 bp, Artificial
  Synthetic oligonucleotide
cggcgccagacccgttgagcccaggggagcagctcctttacaataaggtttctgaaatcg

SEQ ID NO: 109970 - DNA, 60 bp, Artificial
  Synthetic oligonucleotide
ggcggttattttaaatgttgcggggacattggaatcggcgccagacccgttgagcccagg

SEQ ID NO: 109971 - DNA, 60 bp, Artificial
  Synthetic oligonucleotide
ctggaaggtaacgaaattaagtacgtagaaaaagcgcttagcggtttgctggagataggg

SEQ ID NO: 109972 - DNA, 60 bp, Artificial
  Synthetic oligonucleotide
tctgaaatcgagaaaatggaaaaagaggatcgagtgattgaaacacacaatgcgaaaata

SEQ ID NO: 109973 - DNA, 60 bp, Artificial
  Synthetic oligonucleotide
tataagttggcggggaaaacgttacagagagtggtagaaagtgaagttggaagtgcagcg

SEQ ID NO: 109974 - DNA, 60 bp, Artificial
  Synthetic oligonucleotide
ctccgtgggcctctaaaatttcaacgccgcacgctaatgaacgcgcttctatatggtgtg

SEQ ID NO: 109975 - DNA, 60 bp, Artificial
  Synthetic oligonucleotide
caaaagtggatgtaattgacgagatgaacgtagaaacgcagcacgtaatcgatgccgttc

SEQ ID NO: 109976 - DNA, 59 bp, Artificial
  Synthetic oligonucleotide
gcgcttctatatggtgtgaaaatagcttgaaagcctcacggcgcggagaaaacacatac

SEQ ID NO: 109977 - DNA, 60 bp, Artificial
  Synthetic oligonucleotide
gttaatttttccagaagccatgggaaagttcacatcttttttgaagcgcgcgggcaatgc

SEQ ID NO: 109978 - DNA, 60 bp, Artificial
  Synthetic oligonucleotide
cgggcaatgcgaccaagagggcgctgacgtcggattcagcaaagaagatgtataagttgg

SEQ ID NO: 109979 - DNA, 60 bp, Artificial
  Synthetic oligonucleotide
gagggacatatattacatggaggggcaataaccgttgagggtagaggatttcgacaggcg

SEQ ID NO: 109980 - DNA, 60 bp, Artificial
  Synthetic oligonucleotide
tacttcagttgagggacatatattacatggaggggcaataaccgttgagggtagaggatt

SEQ ID NO: 109981 - DNA, 60 bp, Artificial
  Synthetic oligonucleotide
cggggaaaacgttacagagagtggtagaaagtgaagttggaagtgcagcgatcgatggcg

SEQ ID NO: 109982 - DNA, 60 bp, Artificial
  Synthetic oligonucleotide
tgattcaattaagcaggcggttattttaaatgttgcggggacattggaatcggcgccaga

SEQ ID NO: 109983 - DNA, 60 bp, Artificial
  Synthetic oligonucleotide
catgataacaaatatcatgttaggatcccaggtgcattgaagatacattcagagcacacg

SEQ ID NO: 109984 - DNA, 60 bp, Artificial
  Synthetic oligonucleotide
ccaacaaccccagagctccataaacgtaagctacaaaggagtatgggaactcatccgatc

SEQ ID NO: 109985 - DNA, 60 bp, Artificial
  Synthetic oligonucleotide
agctttttcattggatttgatctagaaattgaatatgtccattttgaagatacttcagtt

SEQ ID NO: 109986 - DNA, 60 bp, Artificial
  Synthetic oligonucleotide
catgttaggatcccaggtgcattgaagatacattcagagcacacgcctaagatacatata

SEQ ID NO: 109987 - DNA, 60 bp, Artificial
  Synthetic oligonucleotide
atcattgaaaaggcaatgctacgtgatactgtaacggacaaagatttggcgatggcaatt

SEQ ID NO: 109988 - DNA, 60 bp, Artificial
  Synthetic oligonucleotide
tgagccatttgaaggtggccgacattcatccacacatcattgaaaaggcaatgctacgtg

SEQ ID NO: 109989 - DNA, 60 bp, Artificial
  Synthetic oligonucleotide
gatggcaattaagtcaaaagtggatgtaattgacgagatgaacgtagaaacgcagcacgt

SEQ ID NO: 109990 - DNA, 60 bp, Artificial
  Synthetic oligonucleotide
acagctggtttctaacgcgatgagattagtttatgattccgagttacaaatgcattgtct

SEQ ID NO: 109991 - DNA, 60 bp, Artificial
  Synthetic oligonucleotide
gtagaggatttcgacaggcgtatactgagttcatgaatgcagcgtgggggatgccaacaa

SEQ ID NO: 109992 - DNA, 60 bp, Artificial
  Synthetic oligonucleotide
ctaacgcgatgagattagtttatgattccgagttacaaatgcattgtctccgtgggcctc

SEQ ID NO: 109993 - DNA, 60 bp, Artificial
  Synthetic oligonucleotide
caatgctacgtgatactgtaacggacaaagatttggcgatggcaattaagtcaaaagtgg

SEQ ID NO: 109994 - DNA, 60 bp, Artificial
  Synthetic oligonucleotide
atgccaacaaccccagagctccataaacgtaagctacaaaggagtatgggaactcatccg

SEQ ID NO: 109995 - DNA, 60 bp, Artificial
  Synthetic oligonucleotide
tgcattgtctccgtgggcctctaaaatttcaacgccgcacgctaatgaacgcgcttctat

SEQ ID NO: 109996 - DNA, 60 bp, Artificial
  Synthetic oligonucleotide
gcgaccaagagggcgctgacgtcggattcagcaaagaagatgtataagttggcggggaaa

SEQ ID NO: 109997 - DNA, 60 bp, Artificial
  Synthetic oligonucleotide
tagattcgtcatctttctattatagagtgtagggcctccctaaaagagaattgtatgatg

SEQ ID NO: 109998 - DNA, 60 bp, Artificial
  Synthetic oligonucleotide
tagattcgtcatctttctattatagagtgtagatatatcctaaaatagaactgtttgatg

SEQ ID NO: 109999 - DNA, 60 bp, Artificial
  Synthetic oligonucleotide
tagattcgtcatctttctattatagagtgtagatgcatcctaaaatagaactgtttgatg

SEQ ID NO: 110000 - DNA, 60 bp, Artificial
  Synthetic oligonucleotide
tagattcgtcatctttctattatagagtgtagggccatcctaaaaaagaattgtatgatg

SEQ ID NO: 110001 - DNA, 52 bp, Artificial
  Synthetic oligonucleotide
attcgcatcgtacgcagaagcgtttcgtgatgatgtaagattgaggcagatt

SEQ ID NO: 110002 - DNA, 60 bp, Artificial
  Synthetic oligonucleotide
gccatcggccccaataccaacagcaatgccgagagtcgcgttggatatattggacaaagc

SEQ ID NO: 110003 - DNA, 52 bp, Artificial
  Synthetic oligonucleotide
gctccaaggtcactatgtcgtgggattggcaggtcccggagtagtgattcct

SEQ ID NO: 110004 - DNA, 60 bp, Artificial
  Synthetic oligonucleotide
ccagatagagtgaagctccaaggtcactatgtcgtgggattggcaggtcccggagtagtg

SEQ ID NO: 110005 - DNA, 60 bp, Artificial
  Synthetic oligonucleotide
accagatagagtgaagctccaaggtcactatgtcgtgggattggcaggtcccggagtagt

SEQ ID NO: 110006 - DNA, 60 bp, Artificial
  Synthetic oligonucleotide
gctaaagtcacgcctgttgtcgtcactatggcttcctcactcagagctgcgatctccaag

SEQ ID NO: 110007 - DNA, 60 bp, Artificial
  Synthetic oligonucleotide
gctaaagtcacgcctgttgtcgtcactatggcttcctcactcagagctgcgatctcaaag

SEQ ID NO: 110008 - DNA, 60 bp, Artificial
  Synthetic oligonucleotide
cgcctgttgtcgtcactatggcttcctcactcagagctgcgatctcaaagatcaagaggg

SEQ ID NO: 110009 - DNA, 60 bp, Artificial
  Synthetic oligonucleotide
ggctattaaagctgtacaatggggaagtacaatctaatcttgtcagaatatttatcattt

SEQ ID NO: 110010 - DNA, 60 bp, Artificial
  Synthetic oligonucleotide
ccccaagggagtgctcccagtatcgagtgttgacgttgcgaatcgaatcgcggttgacaa

SEQ ID NO: 110011 - DNA, 60 bp, Artificial
  Synthetic oligonucleotide
ccagtatcgagtgttgacgttgcgaatcgaatcgcggtggacaaagggttcgacacgctt

SEQ ID NO: 110012 - DNA, 60 bp, Artificial
  Synthetic oligonucleotide
actgatgatgcgaagaaaaggtacaagatacgtttgcagaggtttagaacgcacgtacct

SEQ ID NO: 110013 - DNA, 60 bp, Artificial
  Synthetic oligonucleotide
tcgttgtaactgatgatgcgaagaaaaggtacaagatacgtttgcagaggtttagaacgc

SEQ ID NO: 110014 - DNA, 60 bp, Artificial
  Synthetic oligonucleotide
tgttgtaactgatgatgcgaagagaagatacaagatacgtttgcagaggtttagaacgca

SEQ ID NO: 110015 - DNA, 60 bp, Artificial
  Synthetic oligonucleotide
tagaattaaatccaatccctttagggatgcaagttatggctgacttcgtaaaccgtttca

SEQ ID NO: 110016 - DNA, 60 bp, Artificial
  Synthetic oligonucleotide
tagtggtgaatcgtctaatcgtcgagtgaagcgcgactcatacgcaggagtggtcaaacg

SEQ ID NO: 110017 - DNA, 60 bp, Artificial
  Synthetic oligonucleotide
ggtgaatcgtctaatcgtcgagtgaagcgcgactcatacgcaggagtggtcaaacgtggg

SEQ ID NO: 110018 - DNA, 60 bp, Artificial
  Synthetic oligonucleotide
cccaagatatgtttccatgggtgcaattatccaccactctagatataagggatgatcatt

SEQ ID NO: 110019 - DNA, 60 bp, Artificial
  Synthetic oligonucleotide
ggacacagaaactctttgcctcattacagctgactccggaaaggtgtacggcattttgaa

SEQ ID NO: 110020 - DNA, 60 bp, Artificial
  Synthetic oligonucleotide
ggggatccatggacacagaaactctttgcctcattacagctgactccggaaaggtgtacg

SEQ ID NO: 110021 - DNA, 60 bp, Artificial
  Synthetic oligonucleotide
gaagtacaaacgcaatgtttgtaagactactggattgttggtttgcttatttggcggagg

SEQ ID NO: 110022 - DNA, 60 bp, Artificial
  Synthetic oligonucleotide
gcattttgaaagctattttcggagatgagtccgaaattgttaaaaaactcatcgactttg

SEQ ID NO: 110023 - DNA, 60 bp, Artificial
  Synthetic oligonucleotide
aacgttcttgtgtggttgaagaccctcacctttgagccatcaaccatcgctctgattgct

SEQ ID NO: 110024 - DNA, 52 bp, Artificial
  Synthetic oligonucleotide
gttggtttgcttatttggcggaggacttgggctgtcccgcgaagccgataag

SEQ ID NO: 110025 - DNA, 60 bp, Artificial
  Synthetic oligonucleotide
actggattgttggtttgcttatttggcggaggacttgggctgtcccgcgaagctgataag

SEQ ID NO: 110026 - DNA, 60 bp, Artificial
  Synthetic oligonucleotide
ggatccatggacacagaaactctttgcctcattacagctgactccggaaaggtgtacggc

SEQ ID NO: 110027 - DNA, 60 bp, Artificial
  Synthetic oligonucleotide
gtataggtggtcaaaatgtcgatgctaataagatatcgtcattttggttcgctacttaca

SEQ ID NO: 110028 - DNA, 60 bp, Artificial
  Synthetic oligonucleotide
catactttctgttgagatgctcaagcgtgcacttagtataggtggtcaaaatgtcgatgc

SEQ ID NO: 110029 - DNA, 60 bp, Artificial
  Synthetic oligonucleotide
atgtcgatgctaataagatatcgtcattttggttcgctacttacactattttcacaaccg

SEQ ID NO: 110030 - DNA, 60 bp, Artificial
  Synthetic oligonucleotide
gcccatcatccgagatgatgtttacgtcggtcgtcgtaacgcctttgtcatcgtatccac

SEQ ID NO: 110031 - DNA, 60 bp, Artificial
  Synthetic oligonucleotide
agatgaccattaccagcccatcatccgagatgatgtttacgtcggtcgtcgtaacgcctt

SEQ ID NO: 110032 - DNA, 60 bp, Artificial
  Synthetic oligonucleotide
gcgtagctcatgaacttactcaagggaatgacgaacgcgagtctttgaataacgtccttg

SEQ ID NO: 110033 - DNA, 60 bp, Artificial
  Synthetic oligonucleotide
aaaggagatgaccattaccagcccatcatccgagatgatgtttacgtcggtcgtcgtaac

SEQ ID NO: 110034 - DNA, 60 bp, Artificial
  Synthetic oligonucleotide
cgcattgcattatgtacaccataagcctagggatggaaaggagatgaccattaccagccc

SEQ ID NO: 110035 - DNA, 60 bp, Artificial
  Synthetic oligonucleotide
acacgcttacgcattgcattatgtacaccataagcctagggatggaaaggagatgaccat

SEQ ID NO: 110036 - DNA, 60 bp, Artificial
  Synthetic oligonucleotide
tttgaacacgcttacgcattgcattatgtacaccataagcctagggatggaaaggagatg

SEQ ID NO: 110037 - DNA, 60 bp, Artificial
  Synthetic oligonucleotide
tcgcacatgagcgataagttcggtgttcttattaacatagttaagtttgaacacgcttac

SEQ ID NO: 110038 - DNA, 60 bp, Artificial
  Synthetic oligonucleotide
atagctcgcacatgagcgataagttcggtgttcttattaacatagttaagtttgaacacg

SEQ ID NO: 110039 - DNA, 60 bp, Artificial
  Synthetic oligonucleotide
atcgactttgacgtaagcataagagtggttcctcttaacttagggctgctcaatatcttt

SEQ ID NO: 110040 - DNA, 60 bp, Artificial
  Synthetic oligonucleotide
gggtaaatctcacaacatactttctgttgagatgctcaagcgtgcacttagtataggtgg

SEQ ID NO: 110041 - DNA, 60 bp, Artificial
  Synthetic oligonucleotide
tagggctgctcaatatctttcgggataatgctgctgacttagataatgcagatcttatga

SEQ ID NO: 110042 - DNA, 60 bp, Artificial
  Synthetic oligonucleotide
caatatctttcgggataatgctgctgacttagataacgcggatcttatgaaacgtaggtt

SEQ ID NO: 110043 - DNA, 51 bp, Artificial
  Synthetic oligonucleotide
ggtgtacggcattttgaaagctattttcggagatgagtccgaaattgttaa

SEQ ID NO: 110044 - DNA, 60 bp, Artificial
  Synthetic oligonucleotide
gatcttatgaaacgtaggttcggtaatacaatgggctcgcgcattgttgaagcttaccga

SEQ ID NO: 110045 - DNA, 60 bp, Artificial
  Synthetic oligonucleotide
cacagaaactctttgcctcattacagctgactccggaaaggtgtacggcattttgaaagc

SEQ ID NO: 110046 - DNA, 60 bp, Artificial
  Synthetic oligonucleotide
aaggtgtacggcattttgaaagctattttcggagatgagtccgaaattgttaaaaaactc

SEQ ID NO: 110047 - DNA, 60 bp, Artificial
  Synthetic oligonucleotide
ctttgacgtaagcataagagtggttcctcttaacttagggctgctcaatatctttcggga

SEQ ID NO: 110048 - DNA, 60 bp, Artificial
  Synthetic oligonucleotide
agcataagagtggttcctcttaacttagggctgctcaatatctttcgggataatgctgct

SEQ ID NO: 110049 - DNA, 60 bp, Artificial
  Synthetic oligonucleotide
taaaaaactcatcgactttgacgtaagcataagagtggttcctcttaacttagggctgct

SEQ ID NO: 110050 - DNA, 60 bp, Artificial
  Synthetic oligonucleotide
aacgtaggttcggtaatacaatgggctcgcgcattgttgaagcttaccgacgttcacaag

SEQ ID NO: 110051 - DNA, 60 bp, Artificial
  Synthetic oligonucleotide
agcttaccgacgttcacaagattcgaagtacaaacgcaacgtttgtaagactactggatt

SEQ ID NO: 110052 - DNA, 60 bp, Artificial
  Synthetic oligonucleotide
cgttcacaagattcgaagtacaaacgcaatgtttgtaagactactggattgttggtttgc

SEQ ID NO: 110053 - DNA, 60 bp, Artificial
  Synthetic oligonucleotide
aggttcggtaatacaatgggctcgcgcattgttgaagcttaccgacgttcacaagattcg

SEQ ID NO: 110054 - DNA, 60 bp, Artificial
  Synthetic oligonucleotide
ggttcggtaatacaatgggctcgcgcattgttgaagcttaccgacgttcacaagattcga

SEQ ID NO: 110055 - DNA, 60 bp, Artificial
  Synthetic oligonucleotide
tttggctagtcagtccaacggatgctcaagccactataacgataggaagcgtcatggaga

SEQ ID NO: 110056 - DNA, 60 bp, Artificial
  Synthetic oligonucleotide
tggcttcgaacttttgtccacatgttcccagacagtggatcattagttatacctgctgat

SEQ ID NO: 110057 - DNA, 60 bp, Artificial
  Synthetic oligonucleotide
tctttcgggataatgctgctgacttagataatgcagatcttatgaaacgtaggttcggta

SEQ ID NO: 110058 - DNA, 60 bp, Artificial
  Synthetic oligonucleotide
cgggataatgctgctgacttagataacgcggatcttatgaaacgtaggttcggtaataca

SEQ ID NO: 110059 - DNA, 60 bp, Artificial
  Synthetic oligonucleotide
ccatgggtgcaattatccaccactctagatataagggatgatcattacttccaagtgttg

SEQ ID NO: 110060 - DNA, 60 bp, Artificial
  Synthetic oligonucleotide
cgttcttgtgtggttgaagaccctcacctttgagccatcaaccatcgctctgattgctta

SEQ ID NO: 110061 - DNA, 58 bp, Artificial
  Synthetic oligonucleotide
gcttcgaacttttgtccacatgttcccagacagtggatcattagttatacctgctgat

SEQ ID NO: 110062 - DNA, 60 bp, Artificial
  Synthetic oligonucleotide
tctgattgcttatatttggctagtcagtccaacggatgctcaagccactataacgatagg

SEQ ID NO: 110063 - DNA, 60 bp, Artificial
  Synthetic oligonucleotide
ttactcaagggaatgacgaacgcgagtctttgaataacgtccttgtgtggttgaagaccc

SEQ ID NO: 110064 - DNA, 60 bp, Artificial
  Synthetic oligonucleotide
aacgtccttgtgtggttgaagaccctcacctttgagccatcaaccatcgctctgatcgct

SEQ ID NO: 110065 - DNA, 60 bp, Artificial
  Synthetic oligonucleotide
ctactggattgttggtttgcttatttggcggaggacttgggctgtcccgcgaagctgata

SEQ ID NO: 110066 - DNA, 60 bp, Artificial
  Synthetic oligonucleotide
cgtccttgtgtggttgaagaccctcacctttgagccatcaaccatcgctctgatcgctta

SEQ ID NO: 110067 - DNA, 60 bp, Artificial
  Synthetic oligonucleotide
ggagatgaccattaccagcccatcatccgagatgatgtttacgtcggtcgtcgtaacgcc

SEQ ID NO: 110068 - DNA, 56 bp, Artificial
  Synthetic oligonucleotide
gaaaatacaacatcagtggggattacgcaaatgccacgagaactttcttggctatt

SEQ ID NO: 110069 - DNA, 60 bp, Artificial
  Synthetic oligonucleotide
gaaaatacaacatcagtggggattacgcaaatgccacgagaacttttttggctatttcac

SEQ ID NO: 110070 - DNA, 60 bp, Artificial
  Synthetic oligonucleotide
gaaaatacaacatcagtggggattacgcaaatgccacgagaacttttttggctatctcac

SEQ ID NO: 110071 - DNA, 60 bp, Artificial
  Synthetic oligonucleotide
ctgaacatagagcaatgatacagaatgctttggatgggtcaattattgaaaacggaaacg

SEQ ID NO: 110072 - DNA, 60 bp, Artificial
  Synthetic oligonucleotide
ttgaatctgtttatgcgtcggagttatcagtaatgaaggtggatatgcgacatctttcgt

SEQ ID NO: 110073 - DNA, 60 bp, Artificial
  Synthetic oligonucleotide
ggagagagttgaagaactaagtctggtacgcgtggatgatacaatttcacaaccaccgag

SEQ ID NO: 110074 - DNA, 60 bp, Artificial
  Synthetic oligonucleotide
cgtgtggatgatacaatttcacaaccaccgaggtatgctccaagtgcgcctatgccctca

SEQ ID NO: 110075 - DNA, 60 bp, Artificial
  Synthetic oligonucleotide
cagtaggtagagtggcgccccaaggtttgcaccgcatggagtggttgatccagcgatgca

SEQ ID NO: 110076 - DNA, 60 bp, Artificial
  Synthetic oligonucleotide
tgcaaatttatcacagcaagaaacgtttttgacttcaacgctatgcttatattatcctac

SEQ ID NO: 110077 - DNA, 60 bp, Artificial
  Synthetic oligonucleotide
gctaccaagtgcatagatcggtcgcacatctacacagttggcgcagccagcttggtgccc

SEQ ID NO: 110078 - DNA, 55 bp, Artificial
  Synthetic oligonucleotide
tgggcaccaagctggctgcgccaactgtgtagatgtgcgaccaatctatgcactt

SEQ ID NO: 110079 - DNA, 60 bp, Artificial
  Synthetic oligonucleotide
tcgctcaagatgggcaccaagctggctgcgccaactgtgtagatgtgcgaccgatctatg

SEQ ID NO: 110080 - DNA, 60 bp, Artificial
  Synthetic oligonucleotide
tcgctcaagatgggcaccaagctggctgcgccaactgtgtagacgtgcgaccaatctatg

SEQ ID NO: 110081 - DNA, 60 bp, Artificial
  Synthetic oligonucleotide
cacccaatcgctcaagatgggcaccaagctggctgcgccaactgtgtagatgtgcgacca

SEQ ID NO: 110082 - DNA, 60 bp, Artificial
  Synthetic oligonucleotide
ggacatcacccaatcgctcaagatgggcaccaagctggctgcgccaactgtgtagatgtg

SEQ ID NO: 110083 - DNA, 60 bp, Artificial
  Synthetic oligonucleotide
ctccaaccgcacagcaacttaatgatgttaggaagatctatttagcgctaatgtttcctg

SEQ ID NO: 110084 - DNA, 60 bp, Artificial
  Synthetic oligonucleotide
cgagtagatacctactatgaagagatgtcgcaggttggagatgttataacggaagatgag

SEQ ID NO: 110085 - DNA, 60 bp, Artificial
  Synthetic oligonucleotide
ccgcacagcaacttaatgatgttaggaagatctatttagcgctaatgtttcctggacaga

SEQ ID NO: 110086 - DNA, 60 bp, Artificial
  Synthetic oligonucleotide
accgcacagcaacttaatgatgttaggaagatctatttagcgctaatgtttcctggacag

SEQ ID NO: 110087 - DNA, 60 bp, Artificial
  Synthetic oligonucleotide
ttagatcaagtataatctgtccaggaaacattagcgctaaatagatcttcctaacatcat

SEQ ID NO: 110088 - DNA, 60 bp, Artificial
  Synthetic oligonucleotide
tctgtccaggaaacattagcgctaaatagatcttcctaacatcattaagttgctgtgcgg

SEQ ID NO: 110089 - DNA, 60 bp, Artificial
  Synthetic oligonucleotide
acaaaggaaagatgagaatcatggacatcacccaatcgctcaagatgggcaccaagctgg

SEQ ID NO: 110090 - DNA, 60 bp, Artificial
  Synthetic oligonucleotide
gcgacaatcaagtatgctactgagaccacaattttctatctgatatataatgttgagttc

SEQ ID NO: 110091 - DNA, 60 bp, Artificial
  Synthetic oligonucleotide
aatgaggattatggacattacccaatcgctcaagatgggcaccaagctggctgcgccaac

SEQ ID NO: 110092 - DNA, 60 bp, Artificial
  Synthetic oligonucleotide
gttggcgcagccagcttggtgcccatcttgagcgattgggtgatgtccatgattctcatt

SEQ ID NO: 110093 - DNA, 60 bp, Artificial
  Synthetic oligonucleotide
atccaacatttatatcaagatatcgccaaattgcgtactatttctacaacccggatgcgg

SEQ ID NO: 110094 - DNA, 60 bp, Artificial
  Synthetic oligonucleotide
atccaacatttatatcaagatatcgccaaattgcatactatttctacaacccggatgcgg

SEQ ID NO: 110095 - DNA, 60 bp, Artificial
  Synthetic oligonucleotide
atccaacatttatatcaagatatcgccaaattgcatactatttctacaatccggatgcgg

SEQ ID NO: 110096 - DNA, 60 bp, Artificial
  Synthetic oligonucleotide
gagatcgagtttagaatggggtgtgatggtttacgattactctgagttagagcatgatcc

SEQ ID NO: 110097 - DNA, 60 bp, Artificial
  Synthetic oligonucleotide
aggactttcgattcgagatcgagtttagaatggggtgtgatggtttacgattactctgag

SEQ ID NO: 110098 - DNA, 56 bp, Artificial
  Synthetic oligonucleotide
gctggatcaatactggacggccctgaatctgatgattgattcatccgacttggtgc

SEQ ID NO: 110099 - DNA, 53 bp, Artificial
  Synthetic oligonucleotide
gatctagaccgtgtgcgtactgagggaggttcactagtggagttaaactggct

SEQ ID NO: 110100 - DNA, 54 bp, Artificial
  Synthetic oligonucleotide
tggtgcccaacttcatgatgagagacccatcacatgcattcaatggtgtgagac

SEQ ID NO: 110101 - DNA, 60 bp, Artificial
  Synthetic oligonucleotide
gctggatcaatactggacggccctgaatctgatgattgattcatccgacttggtgcccaa

SEQ ID NO: 110102 - DNA, 60 bp, Artificial
  Synthetic oligonucleotide
aacggtcatcagatcgtggacttgattaacaacgcttttgaaggtcgtgtatcaatctac

SEQ ID NO: 110103 - DNA, 60 bp, Artificial
  Synthetic oligonucleotide
cgcagatgcacgcgatgatgaatgacgtatcaccagaggatctagaccgtgtgcgtactg

SEQ ID NO: 110104 - DNA, 60 bp, Artificial
  Synthetic oligonucleotide
tgtcctttgttgcgcagatgcacgcgatgatgaatgacgtatcaccagaggatctagacc

SEQ ID NO: 110105 - DNA, 60 bp, Artificial
  Synthetic oligonucleotide
gacgccagcacgagacttcggtcattttggattatcccactactctagggcgactacccc

SEQ ID NO: 110106 - DNA, 60 bp, Artificial
  Synthetic oligonucleotide
gtaaaatgtatccattcatcaaaggaacggctaagttaaagacagtgcgcaagctagtgg

SEQ ID NO: 110107 - DNA, 60 bp, Artificial
  Synthetic oligonucleotide
ttactctgagttagagcatgatccatcgaagggccgtgcttacaggaaggaattggtgac

SEQ ID NO: 110108 - DNA, 60 bp, Artificial
  Synthetic oligonucleotide
aattggtgacgccagcacgagacttcggtcattttggattatcccactactctagggcga

SEQ ID NO: 110109 - DNA, 60 bp, Artificial
  Synthetic oligonucleotide
cagtcaatcatgcgtggggcgtcgagaagatcagatatgcgcttggaccaggtggcatga

SEQ ID NO: 110110 - DNA, 60 bp, Artificial
  Synthetic oligonucleotide
tgttctcagacaccaccaagttcggggatttggattatccggtgatgattggcgatccga

SEQ ID NO: 110111 - DNA, 60 bp, Artificial
  Synthetic oligonucleotide
tcatcaaaggaacggctaagttaaagacagtgcgcaagctagtggattcagtcaatcatg

SEQ ID NO: 110112 - DNA, 60 bp, Artificial
  Synthetic oligonucleotide
aagctagtggattcagtcaatcatgcgtggggcgtcgagaagatcagatatgcgcttgga

SEQ ID NO: 110113 - DNA, 60 bp, Artificial
  Synthetic oligonucleotide
tgatgcggtgaggatgagctttacggaattttcatcagtcccgctagatggtttcgaatt

SEQ ID NO: 110114 - DNA, 60 bp, Artificial
  Synthetic oligonucleotide
ggcttttaaacgaagtcttcgacatggaggttctgtactcattgtcaaaaactcttaaag

SEQ ID NO: 110115 - DNA, 50 bp, Artificial
  Synthetic oligonucleotide
ggcttttaaacgaagtcttcgacatggaggttctgtactcattgtcaaaa

SEQ ID NO: 110116 - DNA, 50 bp, Artificial
  Synthetic oligonucleotide
ggctttaaaacgaagtcttcgacatggaggttctgtactcattgtcaaaa

SEQ ID NO: 110117 - DNA, 60 bp, Artificial
  Synthetic oligonucleotide
gacgtgcactgactacagctactataactttgttacctgatgcggaaagattcagctttc

SEQ ID NO: 110118 - DNA, 60 bp, Artificial
  Synthetic oligonucleotide
cgtgcactgactacagctactataactttgttacctgatgcggaaagattcagctttcca

SEQ ID NO: 110119 - DNA, 60 bp, Artificial
  Synthetic oligonucleotide
aaactctgttagcgaatgtgaccgcggtgcgtcaagagtatgctataccagttggaccgg

SEQ ID NO: 110120 - DNA, 60 bp, Artificial
  Synthetic oligonucleotide
ttaccgcagtacgtcaagagtatgctataccagttggaccagtattcccaccaggcatga

SEQ ID NO: 110121 - DNA, 60 bp, Artificial
  Synthetic oligonucleotide
cgtgtctttacagtagcctctatcagaagcatgttgattaagtgaggaccagactaacca

SEQ ID NO: 110122 - DNA, 60 bp, Artificial
  Synthetic oligonucleotide
tctttacagtagcttccattagaagcatgttgattaagtgaggaccagactaaacatctg

SEQ ID NO: 110123 - DNA, 60 bp, Artificial
  Synthetic oligonucleotide
cagtagcttccattagaagcatgttgattaagtgaggaccagactaaacatctggtatcc

SEQ ID NO: 110124 - DNA, 60 bp, Artificial
  Synthetic oligonucleotide
cggatcatcatggaagccttcttactcgaaaaccgcaaacccaaaatcaccactctcgca

SEQ ID NO: 110125 - DNA, 60 bp, Artificial
  Synthetic oligonucleotide
gcaaaccccaaatcaccactctcgcatcaggaaagactctcaaaccagcgacacatcgtt

SEQ ID NO: 110126 - DNA, 60 bp, Artificial
  Synthetic oligonucleotide
caaacccaaaatcaccactctcgcatcaggaaagactctcaaaccagcgacgcatcgttt

SEQ ID NO: 110127 - DNA, 60 bp, Artificial
  Synthetic oligonucleotide
caaacccaaaatcactactctcgcatcaggaaagactctcaaaccagcgacgcaccgttt

SEQ ID NO: 110128 - DNA, 60 bp, Artificial
  Synthetic oligonucleotide
cggatcatcatggaagccttcttactcgaaaaccgcaaacccaaaatcactactctcgca

SEQ ID NO: 110129 - DNA, 60 bp, Artificial
  Synthetic oligonucleotide
acggatcatcatggaagccttcttactcgaaaaccgcaaaccccaaatcaccactctcgc

SEQ ID NO: 110130 - DNA, 60 bp, Artificial
  Synthetic oligonucleotide
ccactctcgcatcaggaaagactctcaaaccagcgacacatcgtttgaacttgccagcgt

SEQ ID NO: 110131 - DNA, 60 bp, Artificial
  Synthetic oligonucleotide
cactactctcgcatcaggaaagactctcaaaccagcgacgcaccgtttgaatttaccggc

SEQ ID NO: 110132 - DNA, 60 bp, Artificial
  Synthetic oligonucleotide
atctggaaaatacttacggatcatcatggaagccttcttactcgaaaaccgcaaacccca

SEQ ID NO: 110133 - DNA, 60 bp, Artificial
  Synthetic oligonucleotide
accaggaaaatactacggatcatcatggaagccttcttactcgaaaaccgcaaacccaaa

SEQ ID NO: 110134 - DNA, 60 bp, Artificial
  Synthetic oligonucleotide
caccactctcgcatcaggaaagactctcaaaccagcgacgcatcgtttaaatttgccagc

SEQ ID NO: 110135 - DNA, 60 bp, Artificial
  Synthetic oligonucleotide
tccgtacgaagccatttacgaatgcgcaatggggacgaggaaataccggagcgactagtg

SEQ ID NO: 110136 - DNA, 60 bp, Artificial
  Synthetic oligonucleotide
cgaactctacgatgttccgtacgaagccatttacgaatgcgcaatggggacgaggaaata

SEQ ID NO: 110137 - DNA, 60 bp, Artificial
  Synthetic oligonucleotide
atgtttgaaatggttcgatgcattatcaccctatgctatgcagaaaaggttcacttcgct

SEQ ID NO: 110138 - DNA, 60 bp, Artificial
  Synthetic oligonucleotide
gtttgaaatggttcgatgcattatcaccctatgctatgcagaaaaggttcacttcgctgg

SEQ ID NO: 110139 - DNA, 60 bp, Artificial
  Synthetic oligonucleotide
gtttgagatggttcgatgcattatcaccctatgctatgcagaaaaggttcacttcgctgg

SEQ ID NO: 110140 - DNA, 60 bp, Artificial
  Synthetic oligonucleotide
gcttgaaatggttcgatgcattatcaccctatgctatgcagaaaaggttcacttcgctgg

SEQ ID NO: 110141 - DNA, 60 bp, Artificial
  Synthetic oligonucleotide
gactagcttcatgttaggtcgttcaagactgtctggcccttatcaggttttggacgtgcg

SEQ ID NO: 110142 - DNA, 60 bp, Artificial
  Synthetic oligonucleotide
ttgatggattcaaaattggaaaatctcgaatgtcagcgacagaatttataaatacaatag

SEQ ID NO: 110143 - DNA, 60 bp, Artificial
  Synthetic oligonucleotide
aatacaatagatggaattgaaatacctaattcacatataatatacaaaggaatagatacc

SEQ ID NO: 110144 - DNA, 60 bp, Artificial
  Synthetic oligonucleotide
agtttaaaacgcacgagacacaatggacgattactacaccaacagatcaattgatggatt

SEQ ID NO: 110145 - DNA, 60 bp, Artificial
  Synthetic oligonucleotide
cgcacgagacacaatggacgattactacaccaacagatcaattgatggattcaaaattgg

SEQ ID NO: 110146 - DNA, 60 bp, Artificial
  Synthetic oligonucleotide
tgattttggtttgtttgtggattgaggcaaatgttcgactagcttcatgttaggtcgttc

SEQ ID NO: 110147 - DNA, 60 bp, Artificial
  Synthetic oligonucleotide
cgactagcttcatgttaggtcgttcaagactgtctggcccttatcaggttttggacgtgc

SEQ ID NO: 110148 - DNA, 60 bp, Artificial
  Synthetic oligonucleotide
gcgtatgcacactgacgttaacgtagattataagaagaatactgagctgtatgaacagct

SEQ ID NO: 110149 - DNA, 60 bp, Artificial
  Synthetic oligonucleotide
agaatactgagctgtatgaacagctccgtgagagaataacgttcgagagagaccagattg

SEQ ID NO: 110150 - DNA, 60 bp, Artificial
  Synthetic oligonucleotide
gagctgtatgaacagctccgtgagagaataacgttcgagagagaccagattgaaaattga

SEQ ID NO: 110151 - DNA, 60 bp, Artificial
  Synthetic oligonucleotide
gaccagattgaaaattgattttggtttgtttgtggattgaggcaaatgttcgactagctt

SEQ ID NO: 110152 - DNA, 60 bp, Artificial
  Synthetic oligonucleotide
tgaattgattgatgaggtaatagttaaagaaatgggaattgccaatagaataagatttaa

SEQ ID NO: 110153 - DNA, 60 bp, Artificial
  Synthetic oligonucleotide
taagatttaagcattcaacagtaaatccaaaatatagtaataagaaaacattaacgacga

SEQ ID NO: 110154 - DNA, 60 bp, Artificial
  Synthetic oligonucleotide
aatagataccccaaaaagtgaaataacgagaaaagcaccacgaatttatggtattaattt

SEQ ID NO: 110155 - DNA, 60 bp, Artificial
  Synthetic oligonucleotide
gtattaatttgggaaatgagataatgacgaatatagttacaccgctagctttaccagaca

SEQ ID NO: 110156 - DNA, 60 bp, Artificial
  Synthetic oligonucleotide
agatgaatttactgatttaaaagcattagcgcgagacatagcttcatggaattggatttc

SEQ ID NO: 110157 - DNA, 50 bp, Artificial
  Synthetic oligonucleotide
ttaacgacgacaaaacctattaaagagatatacgagatattgggaaccaa

SEQ ID NO: 110158 - DNA, 60 bp, Artificial
  Synthetic oligonucleotide
gactttaatcatcttcgtgatggagtaagagctaaaacatttacatacagtagaagtggc

SEQ ID NO: 110159 - DNA, 60 bp, Artificial
  Synthetic oligonucleotide
aatgagcgactttaatcatcttcgtgatggagtaagagctaaaacatttacatacagtag

SEQ ID NO: 110160 - DNA, 60 bp, Artificial
  Synthetic oligonucleotide
gattcaagggagattaaaacattaagaaacaaatcggagataaggataagaatgagcgac

SEQ ID NO: 110161 - DNA, 60 bp, Artificial
  Synthetic oligonucleotide
tgagggtgatgcaagaaggctatttattgagaaatatgaagatgagttaagatgtttaat

SEQ ID NO: 110162 - DNA, 60 bp, Artificial
  Synthetic oligonucleotide
gatgaatttactgatttaaaagcattagcgcgagacatagcttcatggaattggatttca

SEQ ID NO: 110163 - DNA, 60 bp, Artificial
  Synthetic oligonucleotide
aagagaagtaagtaagcgtatgcacactgacgttaacgtagattataagaagaatactga

SEQ ID NO: 110164 - DNA, 60 bp, Artificial
  Synthetic oligonucleotide
gcccaacgcgagacagatgtcgctgatgccatgcaggtaatggagaatttagctgtatgt

SEQ ID NO: 110165 - DNA, 59 bp, Artificial
  Synthetic oligonucleotide
ggaaaccaaaccatatatcagtcagtctggttgggtcactactgtgttatcagctgata

SEQ ID NO: 110166 - DNA, 60 bp, Artificial
  Synthetic oligonucleotide
ggaaaccaaaccatatatcagtcagtctggttgggtcactactgtgttatcagctgataa

SEQ ID NO: 110167 - DNA, 60 bp, Artificial
  Synthetic oligonucleotide
atgagataatgacgaatatagttacaccgctagctttaccagacaatgagttttcgcctt

SEQ ID NO: 110168 - DNA, 60 bp, Artificial
  Synthetic oligonucleotide
ggcaagcgccggttaatgtgaataacccaggtctaggacaaggtatgatcgagattgaag

SEQ ID NO: 110169 - DNA, 60 bp, Artificial
  Synthetic oligonucleotide
cgctatttcaaaatcaaaatgatcctgtaatgatttactttgtgtggagacgaattggga

SEQ ID NO: 110170 - DNA, 60 bp, Artificial
  Synthetic oligonucleotide
agcacatatattcaatgtttactcatataagaatcctttgtggcatggactacgagctgc

SEQ ID NO: 110171 - DNA, 60 bp, Artificial
  Synthetic oligonucleotide
gggcgtgactctgaacgtggggggtgtaaacatgagggctggtgtgataatagcttatga

SEQ ID NO: 110172 - DNA, 60 bp, Artificial
  Synthetic oligonucleotide
taaaaatccattatggcacggtctgcgggcggcaatacttaacagaacaacactaccgaa

SEQ ID NO: 110173 - DNA, 60 bp, Artificial
  Synthetic oligonucleotide
gctatttcaccacaatggacttgcagtcacctaaaaaggaattgtttattcaatgggatg

SEQ ID NO: 110174 - DNA, 60 bp, Artificial
  Synthetic oligonucleotide
gctatttcaccacaatggacttgcagccacctaaaaaggaattgtttattcaatgggatg

SEQ ID NO: 110175 - DNA, 60 bp, Artificial
  Synthetic oligonucleotide
gctatttcaccacaatggacttgtagtcatctaaaaaggaattgtttattcaatgggatg

SEQ ID NO: 110176 - DNA, 60 bp, Artificial
  Synthetic oligonucleotide
tcccgcacccgtgtttgccataccacctaaaccagcagattataatgtgcgtactctgag

SEQ ID NO: 110177 - DNA, 60 bp, Artificial
  Synthetic oligonucleotide
tggcgacctttatagactcagccgctataacgccaacgaatatgacacagcctgatgttt

SEQ ID NO: 110178 - DNA, 60 bp, Artificial
  Synthetic oligonucleotide
gagaagtctcttgtccaatgcagtcggtagtgaaactgctggatgatcagctgccagatg

SEQ ID NO: 110179 - DNA, 60 bp, Artificial
  Synthetic oligonucleotide
catcagccccacccttagaagagaagtcaaagttaaccgaacaagcgatggatctcgtga

SEQ ID NO: 110180 - DNA, 60 bp, Artificial
  Synthetic oligonucleotide
cagggtcagctggctatctcgcaactcgaaactggatatggtgtgcggatattcaacccc

SEQ ID NO: 110181 - DNA, 60 bp, Artificial
  Synthetic oligonucleotide
tgaaacttcatctaccgctgtaccatcgttaagtctgtcacctggaatgctgaatcctgg

SEQ ID NO: 110182 - DNA, 60 bp, Artificial
  Synthetic oligonucleotide
atctagggcaatgcaggctttcattggtgacccgagcacaatcatcacgcaggcggcgcc

SEQ ID NO: 110183 - DNA, 60 bp, Artificial
  Synthetic oligonucleotide
cgtcactggagatggcaatgtattcaaaccatcagctgaaacttcatctaccgctgtacc

SEQ ID NO: 110184 - DNA, 60 bp, Artificial
  Synthetic oligonucleotide
cccaaagggattctctctaaaatcgcatctagggcaatgcaggctttcattggtgacccg

SEQ ID NO: 110185 - DNA, 60 bp, Artificial
  Synthetic oligonucleotide
ccaacgaatatgacacagcctgatgtttgggacgctttgctgacgatgtctccgctatcc

SEQ ID NO: 110186 - DNA, 55 bp, Artificial
  Synthetic oligonucleotide
ggggactcgtgtagtgaatctggaccaaatcgctccgatgcggtttgtattagat

SEQ ID NO: 110187 - DNA, 60 bp, Artificial
  Synthetic oligonucleotide
tcagccgctattacgccaacgaatatgacacagcctgatgtttgggacgctttgctgacg

SEQ ID NO: 110188 - DNA, 60 bp, Artificial
  Synthetic oligonucleotide
cgttcagacgatcaacgtcactggagatggcaatgtatttaaaccatcagctgaaacttc

SEQ ID NO: 110189 - DNA, 58 bp, Artificial
  Synthetic oligonucleotide
catcacccggagatatttgttgagatagattccgtgttctcaaaagaagagcacgcta

SEQ ID NO: 110190 - DNA, 58 bp, Artificial
  Synthetic oligonucleotide
tacaactccatgtttaactcttacgttaagaaagctgcgaagagaggcgagtatgatg

SEQ ID NO: 110191 - DNA, 60 bp, Artificial
  Synthetic oligonucleotide
gcagttaaagacaacttaaggattgctcgtagtaatcgacgtaccaagtgaagcgtaccc

SEQ ID NO: 110192 - DNA, 60 bp, Artificial
  Synthetic oligonucleotide
cttaaggattgctcgtagtaatcgacgtaccaagtgaagcgtaccctagtcatatcgcgg

SEQ ID NO: 110193 - DNA, 60 bp, Artificial
  Synthetic oligonucleotide
tactttcacgtattgataacctattcctgaatttatttacaattcgggctgcagttaaag

SEQ ID NO: 110194 - DNA, 60 bp, Artificial
  Synthetic oligonucleotide
cacgtattgataacctattcctgaatttatttacaattcgggctgcagttaaagacaact

SEQ ID NO: 110195 - DNA, 60 bp, Artificial
  Synthetic oligonucleotide
ctaggcaacgtgctgatgccaaatccatgaatgtggataccgataaggtaagtgaggatg

SEQ ID NO: 110196 - DNA, 60 bp, Artificial
  Synthetic oligonucleotide
cgataaggtaagtgaggatgaattcatagggaaagttaaatccttatgactactttcacg

SEQ ID NO: 110197 - DNA, 60 bp, Artificial
  Synthetic oligonucleotide
gacgacattgaagtgtacatttataacactccaatcaacgtgtctaggcggagacgcggt

SEQ ID NO: 110198 - DNA, 60 bp, Artificial
  Synthetic oligonucleotide
gcaggtaaacctaggcaacgtgctgatgccaaatccatgaatgtggataccgataaggta

SEQ ID NO: 110199 - DNA, 60 bp, Artificial
  Synthetic oligonucleotide
cgctgatcgggatgactatcgctatcgtgtgccttggtctacttcatgaaagagtggttc

SEQ ID NO: 110200 - DNA, 54 bp, Artificial
  Synthetic oligonucleotide
cttcatgaaagagtggttcttaccagagcgctaaatgatgcgactaaagatttt

SEQ ID NO: 110201 - DNA, 60 bp, Artificial
  Synthetic oligonucleotide
ggtattttccgctgatcgggatgactatcgctatcgtgtgccttggtctacttcatgaaa

SEQ ID NO: 110202 - DNA, 60 bp, Artificial
  Synthetic oligonucleotide
cgcggtctcaggagtgaaagatccgcgtcctgataacgttgaagcaacacgctctttggg

SEQ ID NO: 110203 - DNA, 60 bp, Artificial
  Synthetic oligonucleotide
aagcaacacgctctttgggtagagcgtctatttctttgaggaaaatagtcccgactgata

SEQ ID NO: 110204 - DNA, 60 bp, Artificial
  Synthetic oligonucleotide
cttcatgaaagagtggttcttaccagagcgctaaatgatgcgactaaagatttttacaac

SEQ ID NO: 110205 - DNA, 60 bp, Artificial
  Synthetic oligonucleotide
tttttacaacgcggtctcaggagtgaaagatccgcgtcctgataacgttgaagcaacacg

SEQ ID NO: 110206 - DNA, 60 bp, Artificial
  Synthetic oligonucleotide
tgattctttggacagagtgctgatcactaaagcgatcaagtattttaccaattacgttta

SEQ ID NO: 110207 - DNA, 60 bp, Artificial
  Synthetic oligonucleotide
gacagagtgctgatcactaaagcgatcaagtattttaccaattacgtttataacattcag

SEQ ID NO: 110208 - DNA, 60 bp, Artificial
  Synthetic oligonucleotide
acaaaaatattgttgaactcgacatttgaagagttgctttctgtggagaacgagaaaccc

SEQ ID NO: 110209 - DNA, 60 bp, Artificial
  Synthetic oligonucleotide
ttgaatgatctatgcggtagtccaagcaataccgcacctaaaagtacctttgaaagcgtt

SEQ ID NO: 110210 - DNA, 60 bp, Artificial
  Synthetic oligonucleotide
cgagaaacccagatttaaatctgatgttatggcaactgcgtctccgcagttaagaggcat

SEQ ID NO: 110211 - DNA, 60 bp, Artificial
  Synthetic oligonucleotide
taaatctgatgttatggcaactgcgtctccgcagttaagaggcatagttttgccagtcgg

SEQ ID NO: 110212 - DNA, 60 bp, Artificial
  Synthetic oligonucleotide
taagaggcatagttttgccagtcggacatggtaaatcatatctctgtgagcatcacccgg

SEQ ID NO: 110213 - DNA, 60 bp, Artificial
  Synthetic oligonucleotide
tgccagtcggacatggtaaatcatatctctgtgagcatcacccggagatatttgttgaga

SEQ ID NO: 110214 - DNA, 60 bp, Artificial
  Synthetic oligonucleotide
caacacgctctttgggtagagcgtctatttctttgaggaaaatagtcccgactgataccg

SEQ ID NO: 110215 - DNA, 60 bp, Artificial
  Synthetic oligonucleotide
tgatgatgacgacattgaagtgtacatttataacactccaatcaacgtgtctaggcggag

SEQ ID NO: 110216 - DNA, 60 bp, Artificial
  Synthetic oligonucleotide
aatttagagaaagctggtatacaagtggtcgcatctgatgatgacgacattgaagtgtac

SEQ ID NO: 110217 - DNA, 60 bp, Artificial
  Synthetic oligonucleotide
gttgaactcgacatttgaagagttgctttctgtggagaacgagaaacccagatttaaatc

SEQ ID NO: 110218 - DNA, 58 bp, Artificial
  Synthetic oligonucleotide
tttattgcctaatggcatccgcttgctcggtatctattctttggatactgaagaaagc

SEQ ID NO: 110219 - DNA, 60 bp, Artificial
  Synthetic oligonucleotide
tttattgcctaatggcatccgcttgctcggtatctattctttggatactgaagaaagcgt

SEQ ID NO: 110220 - DNA, 60 bp, Artificial
  Synthetic oligonucleotide
gggaagagaggatcttttacgttcaaattggaaatcgattagtcgcgaggctacagtgaa

SEQ ID NO: 110221 - DNA, 60 bp, Artificial
  Synthetic oligonucleotide
atccttccgtaaagggaagagaggatcttttacgttcaaattggaaatcgattagtcgcg

SEQ ID NO: 110222 - DNA, 60 bp, Artificial
  Synthetic oligonucleotide
gccaagttcacttcgactgcgttgaagtcgagcgataagtgtaatgagagtagtgggctc

SEQ ID NO: 110223 - DNA, 60 bp, Artificial
  Synthetic oligonucleotide
catggccaagttcacttcgactgcgttgaagtcgagcgataagtgtaatgagagtagtgg

SEQ ID NO: 110224 - DNA, 60 bp, Artificial
  Synthetic oligonucleotide
ggatattcagtttctaatttagagaaagctggtatacaagtggtcgcatctgatgatgac

SEQ ID NO: 110225 - DNA, 60 bp, Artificial
  Synthetic oligonucleotide
agagtagtgggctcattaaaattagattcatcaatggatttccaaaatctggatattcag

SEQ ID NO: 110226 - DNA, 60 bp, Artificial
  Synthetic oligonucleotide
ccgcagtgaaagccatgtctgttggtgatgtgatggttagatgtgattctttggacagag

SEQ ID NO: 110227 - DNA, 60 bp, Artificial
  Synthetic oligonucleotide
tctgcatccgcagtgaaagccatgtctgttggtgatgtgatggttagatgtgattctttg

SEQ ID NO: 110228 - DNA, 60 bp, Artificial
  Synthetic oligonucleotide
agggagcatatcggcagaatgttattgcatctaatggcaatatcactaatctgctgattt

SEQ ID NO: 110229 - DNA, 60 bp, Artificial
  Synthetic oligonucleotide
gcgttatgccttcattgagcacgttatttggtactcccttcgtccagggagcatatcggc

SEQ ID NO: 110230 - DNA, 60 bp, Artificial
  Synthetic oligonucleotide
tgaaagcgttatgccttcattgagcacgttatttggtactcccttcgtccagggagcata

SEQ ID NO: 110231 - DNA, 60 bp, Artificial
  Synthetic oligonucleotide
ggtagtccaagcaataccgcacctaaaagtacctttgaaagcgttatgccttcattgagc

SEQ ID NO: 110232 - DNA, 60 bp, Artificial
  Synthetic oligonucleotide
cttaatacagcgatgataagtgaaacttcactcccatctgcatccgcagtgaaagccatg

SEQ ID NO: 110233 - DNA, 60 bp, Artificial
  Synthetic oligonucleotide
ccaaagtggtagatcttaatacagcgatgataagtgaaacttcactcccatctgcatccg

SEQ ID NO: 110234 - DNA, 55 bp, Artificial
  Synthetic oligonucleotide
ctgctgattttagtagttggcccaccttctggattctcgaagaagatagctgttg

SEQ ID NO: 110235 - DNA, 60 bp, Artificial
  Synthetic oligonucleotide
gcagaatgttattgcatctaatggcaatatcactaatctgctgattttagtagttggccc

SEQ ID NO: 110236 - DNA, 60 bp, Artificial
  Synthetic oligonucleotide
cggactataatttgcgaatgcgtagagacgcgcttttaggagagttagcacggcttgatg

SEQ ID NO: 110237 - DNA, 60 bp, Artificial
  Synthetic oligonucleotide
gggccacatggtagagatgacgaagcggagatggtgatatatgaagtagtgagacgcaac

SEQ ID NO: 110238 - DNA, 60 bp, Artificial
  Synthetic oligonucleotide
cccacacgaaatactgcaaaccagcatcaggacatccagcaggtgattaatgactcaata

SEQ ID NO: 110239 - DNA, 60 bp, Artificial
  Synthetic oligonucleotide
cagaaatgtcacgatcacccgcagatgcacaaagaacactaatgaatcacgcagacaaga

SEQ ID NO: 110240 - DNA, 60 bp, Artificial
  Synthetic oligonucleotide
acgaactaatcagccattattgcaacaggtgcgtcaatcatatgttaaagcacgtaagcg

SEQ ID NO: 110241 - DNA, 60 bp, Artificial
  Synthetic oligonucleotide
aggatttcttgacaaaagggtcggtgatgcgctgcacacaggtataacgagaccagaagc

SEQ ID NO: 110242 - DNA, 60 bp, Artificial
  Synthetic oligonucleotide
atggtgaagctacgagacatatcaacgatagccgtatctgaaagtacccacaattttgaa

SEQ ID NO: 110243 - DNA, 60 bp, Artificial
  Synthetic oligonucleotide
gtgaagctacgagacatatcaacgatagccgtatctgaaagtacccacaattttgaagtg

SEQ ID NO: 110244 - DNA, 60 bp, Artificial
  Synthetic oligonucleotide
gcgtctcctcactttagagacgagaaagcactatccgattgtttcgggcctcaaatgggt

SEQ ID NO: 110245 - DNA, 60 bp, Artificial
  Synthetic oligonucleotide
aagcactatccgattgcttcgggcctcagatgggtggggtagtgtacgactcatatgata

SEQ ID NO: 110246 - DNA, 60 bp, Artificial
  Synthetic oligonucleotide
tcactgaagatgttggatcattttggtaaaagtgaaagatatgaattgttggtgtacctg

SEQ ID NO: 110247 - DNA, 60 bp, Artificial
  Synthetic oligonucleotide
caaaagagagcatccaaagacaatcttcgtggaatcactgaagatgttggatcattttgg

SEQ ID NO: 110248 - DNA, 60 bp, Artificial
  Synthetic oligonucleotide
ggatcattttggtaaaagtgaaagatatgaattgttggtgtacctgagtgcagctgactt

SEQ ID NO: 110249 - DNA, 60 bp, Artificial
  Synthetic oligonucleotide
aagatgttggatcattttggtaaaagtgaaagatatgaattgttggtgtacctgagtgca

SEQ ID NO: 110250 - DNA, 51 bp, Artificial
  Synthetic oligonucleotide
ggtgtacctgagtgcagctgacttttgatacgtctacgagtcaagtacccc

SEQ ID NO: 110251 - DNA, 60 bp, Artificial
  Synthetic oligonucleotide
ggtgtacctgagtgcagctgacttttgatacgtctacgagtcaagtacccccgctggatg

SEQ ID NO: 110252 - DNA, 54 bp, Artificial
  Synthetic oligonucleotide
ccgctggatgtgttagtgcgtacggctggccgggccgtgtggagaatgattgat

SEQ ID NO: 110253 - DNA, 60 bp, Artificial
  Synthetic oligonucleotide
cctgagtgcagctgacttttgatacgtctacgagtcaagtacccccgctggatgtgttag

SEQ ID NO: 110254 - DNA, 61 bp, Artificial
  Synthetic oligonucleotide
catgccgcttactgcgtactatcaaaagtatatttgccaaggtttaagtataaacattttg

SEQ ID NO: 110255 - DNA, 60 bp, Artificial
  Synthetic oligonucleotide
gcactatccgattgcttcgggcctcagatgggtggggtagtgtacgactcatatgatagg

SEQ ID NO: 110256 - DNA, 60 bp, Artificial
  Synthetic oligonucleotide
gcactatccgattgtttcggacctcaaatgggtggggtagtgtacgactcatatgatagg

SEQ ID NO: 110257 - DNA, 60 bp, Artificial
  Synthetic oligonucleotide
aagcactatccgattgtttcggacctcaaatgggtggggtagtgtacgactcatatgata

SEQ ID NO: 110258 - DNA, 60 bp, Artificial
  Synthetic oligonucleotide
cagaagtgatggcttcgtagacaacttattagtaaggatgctaccgccatgtgaaggagc

SEQ ID NO: 110259 - DNA, 60 bp, Artificial
  Synthetic oligonucleotide
accgtcattattttggtcaaatagagatgatgagtctcatgactatatgaccattattca

SEQ ID NO: 110260 - DNA, 60 bp, Artificial
  Synthetic oligonucleotide
atttgccaaggtttaagtataaacattttgaaatctccagtcggctggtgacgattcatg

SEQ ID NO: 110261 - DNA, 60 bp, Artificial
  Synthetic oligonucleotide
catgccgcttactgcgtactatcaaaagtatatttgccaaggtttaagtataaacatttt

SEQ ID NO: 110262 - DNA, 60 bp, Artificial
  Synthetic oligonucleotide
gcgaaggagctagtttaactagtgaagccatcgatactggattgctttatacgagaaatg

SEQ ID NO: 110263 - DNA, 60 bp, Artificial
  Synthetic oligonucleotide
cagaagtgatggcttcgtagacaacttattagtaaggatgctacctccatgcgaaggagc

SEQ ID NO: 110264 - DNA, 60 bp, Artificial
  Synthetic oligonucleotide
ctcgtatctagttcccacccatggattacgagattagtcgctaatagggcgcgggatgac

SEQ ID NO: 110265 - DNA, 60 bp, Artificial
  Synthetic oligonucleotide
ctagttcccacccatggattacgagattagtcgctaatagggcgcgggatgacgtgcata

SEQ ID NO: 110266 - DNA, 56 bp, Artificial
  Synthetic oligonucleotide
acgagaaatgatggatatatggtttacaccgcctctatggttgaggaggatgtgaa

SEQ ID NO: 110267 - DNA, 60 bp, Artificial
  Synthetic oligonucleotide
tcgaatctcgtatctagttcccacccatggattacgagattagtcgctaatagggcgcgg

SEQ ID NO: 110268 - DNA, 60 bp, Artificial
  Synthetic oligonucleotide
ggagctagtttaactagtgaagccatcgatactggattgatttatacgagaaatgatgga

SEQ ID NO: 110269 - DNA, 50 bp, Artificial
  Synthetic oligonucleotide
acgagaaatgacggatatatggtttacaccgcctctatggttgaggagga

SEQ ID NO: 110270 - DNA, 60 bp, Artificial
  Synthetic oligonucleotide
gtgaaggagctagtttaactagtgaagccatcgatactggattgatttatacgagaaatg

SEQ ID NO: 110271 - DNA, 60 bp, Artificial
  Synthetic oligonucleotide
ggagctagtttaactagtgaagccatcgatactggattgctttatacgagaaatgacgga

SEQ ID NO: 110272 - DNA, 60 bp, Artificial
  Synthetic oligonucleotide
acaatctaaccaaaagagagcatccaaagacaatcttcgtggaatcactgaagatgttgg

SEQ ID NO: 110273 - DNA, 60 bp, Artificial
  Synthetic oligonucleotide
ataatctaaccaaaagagagcatccaaagacaatcttcgtggaatcactgaagatgttgg

SEQ ID NO: 110274 - DNA, 52 bp, Artificial
  Synthetic oligonucleotide
ggctattaaaggctcaatggcgtacaggaaacgtggagcgcgccgtgaggcg

SEQ ID NO: 110275 - DNA, 60 bp, Artificial
  Synthetic oligonucleotide
ggctattaaaggctcaatggcgtacaggaaacgtggagcgcgccgtgaggcgaacgtaaa

SEQ ID NO: 110276 - DNA, 51 bp, Artificial
  Synthetic oligonucleotide
ggctattaaaggctcaatggcgtacaggaaacgtggagcgcgccgtgaggc

SEQ ID NO: 110277 - DNA, 54 bp, Artificial
  Synthetic oligonucleotide
tcaatggctgctaatgttcagtatttgaatgccggtgttatctaccttccaaag

SEQ ID NO: 110278 - DNA, 60 bp, Artificial
  Synthetic oligonucleotide
ttcgcttgtagtcctgtccaccttaataaattacgactcgcccattggatgtctcctttt

SEQ ID NO: 110279 - DNA, 60 bp, Artificial
  Synthetic oligonucleotide
acctgctgcatctaaacatgaactgtccctcgctaatgctcaactcgtatgttctgacat

SEQ ID NO: 110280 - DNA, 57 bp, Artificial
  Synthetic oligonucleotide
aagaatggaaaagagtgtggttctttggaaccagaagaagacctggattcgcccctt

SEQ ID NO: 110281 - DNA, 60 bp, Artificial
  Synthetic oligonucleotide
ttcgtcaagaaagaatttggccgtgctaatggaggtaattcgcttgttcagaaaatgcgt

SEQ ID NO: 110282 - DNA, 60 bp, Artificial
  Synthetic oligonucleotide
gtctccttttttgctaaccaaaatgtctgtttcttttcaattgcaagttgagatttacga

SEQ ID NO: 110283 - DNA, 60 bp, Artificial
  Synthetic oligonucleotide
tgaaaaatactcatgccaatgttgattcaccgatgcgcgtttttggaagcaagaatggaa

SEQ ID NO: 110284 - DNA, 55 bp, Artificial
  Synthetic oligonucleotide
agatcaaactcaaaaaacagaatctacagaccaaaatgacagtaatgttcaagat

SEQ ID NO: 110285 - DNA, 60 bp, Artificial
  Synthetic oligonucleotide
agacatattctcaaatgcatcgagtcaaaccgctcaatcgtcgacgacttcaagtaccaa

SEQ ID NO: 110286 - DNA, 60 bp, Artificial
  Synthetic oligonucleotide
gaatttggccgtgctaatggaggtaattcgcttgttcagaaaatgcgtgcctcgaaagta

SEQ ID NO: 110287 - DNA, 60 bp, Artificial
  Synthetic oligonucleotide
caagtaccaaatctactagtgatcaagcaacgttcaaaaacactgtgtctaaacaaactg

SEQ ID NO: 110288 - DNA, 60 bp, Artificial
  Synthetic oligonucleotide
aaacaaactgactctcgaagtgcattcccggacattcaagaaaaacagctccctgctcct

SEQ ID NO: 110289 - DNA, 60 bp, Artificial
  Synthetic oligonucleotide
cctgctcctcctaattcattggatgatggtattagcgcgtcaatgggtttgccacctccg

SEQ ID NO: 110290 - DNA, 60 bp, Artificial
  Synthetic oligonucleotide
tgccacctccgaaaataatgactgttgatgaagttgaagctgcccttttcggaaccaaag

SEQ ID NO: 110291 - DNA, 54 bp, Artificial
  Synthetic oligonucleotide
tcgtaatcgtaaacaaagagatccaagtgtagtgaatactgataccttgaaagc

SEQ ID NO: 110292 - DNA, 60 bp, Artificial
  Synthetic oligonucleotide
ctacaacaccatctccctctgacgctgctagtaccaagtctgttgataatgatgctcttt

SEQ ID NO: 110293 - DNA, 60 bp, Artificial
  Synthetic oligonucleotide
accaacctaaccgacataattcagtgtaataaacctgtgattagtcacgattttgccctt

SEQ ID NO: 110294 - DNA, 60 bp, Artificial
  Synthetic oligonucleotide
cgattgtcgggtcctgtaatattttagatatgtaatattgttctcaccgggttgtcgcta

SEQ ID NO: 110295 - DNA, 60 bp, Artificial
  Synthetic oligonucleotide
accgggttgtcgctatgatatgatcttgtccataagcgataaaggacaccgtacttggca

SEQ ID NO: 110296 - DNA, 59 bp, Artificial
  Synthetic oligonucleotide
gtacttggcaaactaaggggttgcccgttgcggcgtattgatggaaacaacatgttgtc

SEQ ID NO: 110297 - DNA, 60 bp, Artificial
  Synthetic oligonucleotide
gaaacatttgaagaacttaagaaactcaaagatgttgaggataagaaacctgatgccatg

SEQ ID NO: 110298 - DNA, 55 bp, Artificial
  Synthetic oligonucleotide
aaaatgctaatggtagaacgttgccacctgtacctgaggaagtaccgatagggaa

SEQ ID NO: 110299 - DNA, 60 bp, Artificial
  Synthetic oligonucleotide
tgcatcgagtcaaaccgctcaatcgtcgacgacttcaagtaccaaatctactagtgatca

SEQ ID NO: 110300 - DNA, 60 bp, Artificial
  Synthetic oligonucleotide
ggaaccaaagaaaatggtagcgtcgctagtcctgttaaaaacgtccctattcatgaaaaa

SEQ ID NO: 110301 - DNA, 60 bp, Artificial
  Synthetic oligonucleotide
catcttcacatcgtctgaattcatccatcctcagaagttcgtcatgactgaatacgttca

SEQ ID NO: 110302 - DNA, 60 bp, Artificial
  Synthetic oligonucleotide
ctccctctgacgctgctagtaccaagtctgttgataatgatgctctttctactcctccaa

SEQ ID NO: 110303 - DNA, 60 bp, Artificial
  Synthetic oligonucleotide
ccgaaaacagtatcatctatgataacttctcccattattggttctgaccgcatcttcaca

SEQ ID NO: 110304 - DNA, 60 bp, Artificial
  Synthetic oligonucleotide
gctgctcccaatcccattgagacaacgtttcctgctgcccaaacccaaccagatcaaact

SEQ ID NO: 110305 - DNA, 60 bp, Artificial
  Synthetic oligonucleotide
agtatgctttccgtcaaagtttgcgaccttgtacacgtctatatagctctttctggaaag

SEQ ID NO: 110306 - DNA, 60 bp, Artificial
  Synthetic oligonucleotide
catggatttttcacaaaacgcatctgcagtccaaaattcgtgcccttcaaataacatacc

SEQ ID NO: 110307 - DNA, 60 bp, Artificial
  Synthetic oligonucleotide
tgtagtgatgttttgatgaatgagggtcatgtttactcactcatgttgtcatgtatatgc

SEQ ID NO: 110308 - DNA, 60 bp, Artificial
  Synthetic oligonucleotide
gatggtactcaaactgatacagaagaaagactcacccaaactactgctgctcccaatccc

SEQ ID NO: 110309 - DNA, 60 bp, Artificial
  Synthetic oligonucleotide
tcatgaaaaagcttcacccaaaaatgctaatggtagaacgttgccacctgtacctgagga

SEQ ID NO: 110310 - DNA, 60 bp, Artificial
  Synthetic oligonucleotide
atcgtcttcaacaggttacgtcggtgataatacaaaaactgaaccccttcctacaacacc

SEQ ID NO: 110311 - DNA, 60 bp, Artificial
  Synthetic oligonucleotide
caacagtcgtcctcatgcggatcctcaaacaatccatcgtcttcaacaggttacgtcggt

SEQ ID NO: 110312 - DNA, 60 bp, Artificial
  Synthetic oligonucleotide
ctgatttcatcttggatccacgctctattcgaaggcgagaagaaaactgcaactgaaaca

SEQ ID NO: 110313 - DNA, 60 bp, Artificial
  Synthetic oligonucleotide
aatacgttcaaaagtccattgcaaaattcgaaactcatggttcaattgatccgtttgcga

SEQ ID NO: 110314 - DNA, 60 bp, Artificial
  Synthetic oligonucleotide
tcagaaactactaaacaacagtcgtcctcatgcggatcctcaaacaatccatcgtcttca

SEQ ID NO: 110315 - DNA, 60 bp, Artificial
  Synthetic oligonucleotide
gtctgaattcatccatcctcagaagttcgtcatgactgaatacgttcaaaagtccattgc

SEQ ID NO: 110316 - DNA, 60 bp, Artificial
  Synthetic oligonucleotide
tacatccagaagtggttcctaaccttgattcagtttgtgagccccgcaatctcagtttgg

SEQ ID NO: 110317 - DNA, 60 bp, Artificial
  Synthetic oligonucleotide
ggttcctaaccttgattcagtttgtgagccccgcaatctcagtttggctttcggtctttc

SEQ ID NO: 110318 - DNA, 60 bp, Artificial
  Synthetic oligonucleotide
tcgtttgcttcttgagactgttcgagcgagattgataccgatgcatcttgtacatccaga

SEQ ID NO: 110319 - DNA, 60 bp, Artificial
  Synthetic oligonucleotide
gactgttcgagcgagattgataccgatgcatcttgtacatccagaagtggttcctaacct

SEQ ID NO: 110320 - DNA, 60 bp, Artificial
  Synthetic oligonucleotide
atctaatccatcctccgtttttgattttactgcatcatgccaatcttcaaaatctgactc

SEQ ID NO: 110321 - DNA, 54 bp, Artificial
  Synthetic oligonucleotide
ctgcttcgaccacatctgatcctaatcaagcgctgttctaccaacaattctctt

SEQ ID NO: 110322 - DNA, 60 bp, Artificial
  Synthetic oligonucleotide
gatgctctttctactcctccaaatggtaacgtggacgatcatcaagctaaatctaatcca

SEQ ID NO: 110323 - DNA, 60 bp, Artificial
  Synthetic oligonucleotide
ctactcctccaaatggtaacgtggacgatcatcaagctaaatctaatccatcctccgttt

SEQ ID NO: 110324 - DNA, 60 bp, Artificial
  Synthetic oligonucleotide
ctcagtttggctttcggtctttcaactttgtgttatgatcctaatcctaacactgggtgt

SEQ ID NO: 110325 - DNA, 60 bp, Artificial
  Synthetic oligonucleotide
cgatcttttatgttttgcatcttgttttatcttaattattaatatatgtttccatcgatt

SEQ ID NO: 110326 - DNA, 60 bp, Artificial
  Synthetic oligonucleotide
ccattgcaaaattcgaaactcatggttcaattgatccgtttgcgaagaaacccgattttg

SEQ ID NO: 110327 - DNA, 60 bp, Artificial
  Synthetic oligonucleotide
caattatacaagtcggtggctcagatgtgttagatattacagcggatccaactactacac

SEQ ID NO: 110328 - DNA, 60 bp, Artificial
  Synthetic oligonucleotide
caattatacaagtcgggggctccgatgtgttagatattacagcggatccaactactacac

SEQ ID NO: 110329 - DNA, 60 bp, Artificial
  Synthetic oligonucleotide
ataactgacgttgttgatggggtgaaccataaacttgatgtgactacaaatacctgtaca

SEQ ID NO: 110330 - DNA, 56 bp, Artificial
  Synthetic oligonucleotide
gatcactggctccctggataccgcatatgcaaatttatcacagcaagaaacgtttt

SEQ ID NO: 110331 - DNA, 60 bp, Artificial
  Synthetic oligonucleotide
gatcactggctccctggataccgcatatgcaaatttatcacagcaagaaacgtttttgac

SEQ ID NO: 110332 - DNA, 60 bp, Artificial
  Synthetic oligonucleotide
ggaattgtaagaagttaggaccaagagaaaatgtagcaattatacaagtcggtggctcag

SEQ ID NO: 110333 - DNA, 60 bp, Artificial
  Synthetic oligonucleotide
caattaggaattgtaagaagttaggaccaagagaaaatgtagcaattatacaagtcgggg

SEQ ID NO: 110334 - DNA, 60 bp, Artificial
  Synthetic oligonucleotide
tacctgtacaattaggaattgtaagaagttaggaccaagagaaaatgtagcaattataca

SEQ ID NO: 110335 - DNA, 60 bp, Artificial
  Synthetic oligonucleotide
ataactgacgttgttgatggtgtgaaccataaacttgatgtgactacaaatacctgtaca

SEQ ID NO: 110336 - DNA, 60 bp, Artificial
  Synthetic oligonucleotide
ccaggttaataattttgccttgcagccaatggaaaatccaaaactgatctccagacaact

SEQ ID NO: 110337 - DNA, 60 bp, Artificial
  Synthetic oligonucleotide
cctcggttttcaagaacagtgtctgacgtactgcgccaggttaataattttgccttgcag

SEQ ID NO: 110338 - DNA, 60 bp, Artificial
  Synthetic oligonucleotide
gcaacatatattaaacctcggttttcaagaacagtgtctgacgtactgcgccaggttaat

SEQ ID NO: 110339 - DNA, 50 bp, Artificial
  Synthetic oligonucleotide
accggcatgcatacatgctgcaaaagaattggtttgactcagatgtagcg

SEQ ID NO: 110340 - DNA, 60 bp, Artificial
  Synthetic oligonucleotide
ccgtggcgtcagtgggatttctgaatgacccaagaaccccgcttcaggctatgtcatgtg

SEQ ID NO: 110341 - DNA, 60 bp, Artificial
  Synthetic oligonucleotide
tgaaccaaatttccgtggcgtcagtgggatttctgaatgacccaagaaccccgcttcagg

SEQ ID NO: 110342 - DNA, 60 bp, Artificial
  Synthetic oligonucleotide
cactgattgaatgcatttcggagtatgggaccaaatgttcctttgatactttccaaggac

SEQ ID NO: 110343 - DNA, 60 bp, Artificial
  Synthetic oligonucleotide
gcactgattgaatgcatttcggagtatgggaccaaatgttcctttgatactttccaagga

SEQ ID NO: 110344 - DNA, 58 bp, Artificial
  Synthetic oligonucleotide
acgatgtcgcgccaagcttggatcgagactagtgcactgattgaatgcatttcggagt

SEQ ID NO: 110345 - DNA, 60 bp, Artificial
  Synthetic oligonucleotide
ccagacaacttggagttctgaaggcttatgatataccgtattcgacaccaatcaatccaa

SEQ ID NO: 110346 - DNA, 60 bp, Artificial
  Synthetic oligonucleotide
tgccttgcagccaatggaaaatccaaaactgatctccagacaacttggagttctgaaggc

SEQ ID NO: 110347 - DNA, 60 bp, Artificial
  Synthetic oligonucleotide
ggtatttttgtaccaacacgatgtcgcgccaagcttggatcgagactagtgcactgattg

SEQ ID NO: 110348 - DNA, 56 bp, Artificial
  Synthetic oligonucleotide
aaatgctgaaaccggagtgccagtaacaggcgggtcgtgtggtcacaaaaaatgat

SEQ ID NO: 110349 - DNA, 60 bp, Artificial
  Synthetic oligonucleotide
gaggtacgcttcgcgctggattgaagggagtaggaggaaatgctgaaaccggagtgccag

SEQ ID NO: 110350 - DNA, 60 bp, Artificial
  Synthetic oligonucleotide
ccgacacactaactactagcaatagaccatctctaggtgttagattaatatagcaacgag

SEQ ID NO: 110351 - DNA, 60 bp, Artificial
  Synthetic oligonucleotide
ctggtacaggttttcggaacgcgccagaactattctgacgtttaaccaacccctgctgcc

SEQ ID NO: 110352 - DNA, 60 bp, Artificial
  Synthetic oligonucleotide
tgcttttgtatcaccctggtacaggttttcggaacgcgccagaactattctgacgtttaa

SEQ ID NO: 110353 - DNA, 58 bp, Artificial
  Synthetic oligonucleotide
ttttagtcagtcgatgaacactttgactgagaatttgattaggcaatatatgccagct

SEQ ID NO: 110354 - DNA, 60 bp, Artificial
  Synthetic oligonucleotide
tcgagattcgaacgaggtacgcttcgcgctggattgaagggagtaggaggaaatgctgaa

SEQ ID NO: 110355 - DNA, 60 bp, Artificial
  Synthetic oligonucleotide
cgtgctggcccacacaccatatactttgcgataatttcatcagtggactgtcgagattcg

SEQ ID NO: 110356 - DNA, 60 bp, Artificial
  Synthetic oligonucleotide
gtgatgacagcaatcgactcaagagttgaggagtatctcaacgtgctggcccacacacca

SEQ ID NO: 110357 - DNA, 60 bp, Artificial
  Synthetic oligonucleotide
tagcaacgagtgatgacagcaatcgactcaagagttgaggagtatctcaacgtgctggcc

SEQ ID NO: 110358 - DNA, 60 bp, Artificial
  Synthetic oligonucleotide
ctttggaactagatctctaaatcctattgctccaggcaattttcagattaatgtaccacc

SEQ ID NO: 110359 - DNA, 60 bp, Artificial
  Synthetic oligonucleotide
caattttcagattaatgtaccaccatggtattcagacctgaatgtagttgacgctaggat

SEQ ID NO: 110360 - DNA, 60 bp, Artificial
  Synthetic oligonucleotide
tgtaccaccatggtattcagacctgaatgtagttgacgctaggatttatttcactaatag

SEQ ID NO: 110361 - DNA, 60 bp, Artificial
  Synthetic oligonucleotide
caggtgaacgcggttaatggtaacgacccagtcgcaaccattactgtgccgaccgacaac

SEQ ID NO: 110362 - DNA, 60 bp, Artificial
  Synthetic oligonucleotide
ggagttctgaaggcttatgatataccgtattcgacaccaatcaatccaatggacgtagct

SEQ ID NO: 110363 - DNA, 60 bp, Artificial
  Synthetic oligonucleotide
ctacacccttgattcaaggggcacagaacgtgaccttcatcgtctctgagtccgataaga

SEQ ID NO: 110364 - DNA, 60 bp, Artificial
  Synthetic oligonucleotide
caaggggcacagaacgtgaccttcatcgtctctgagtccgataagattatctttggaact

SEQ ID NO: 110365 - DNA, 60 bp, Artificial
  Synthetic oligonucleotide
tccgataagattatctttggaactagatctctaaatcctattgctccaggcaattttcag

SEQ ID NO: 110366 - DNA, 59 bp, Artificial
  Synthetic oligonucleotide
atggtaacgacccagtcgcaaccattactgtgccgaccgacaacaaccccttcattgtc

SEQ ID NO: 110367 - DNA, 60 bp, Artificial
  Synthetic oligonucleotide
gaccgacaacaaccccttcattgtcgatagtgactcagtcgtatcactgtcgctatcggg

SEQ ID NO: 110368 - DNA, 52 bp, Artificial
  Synthetic oligonucleotide
ttttggaaccattccgaatcagattgcgcgcttcaggtcaaactgaaatttt

SEQ ID NO: 110369 - DNA, 60 bp, Artificial
  Synthetic oligonucleotide
tcaggtcaaactgaaatttttagtcagtcgatgaacactttgactgagaatttgattagg

SEQ ID NO: 110370 - DNA, 50 bp, Artificial
  Synthetic oligonucleotide
aaatgctgaaaccggagtgccagtaacaggcgggtcgtgtggtcacaaaa

SEQ ID NO: 110371 - DNA, 60 bp, Artificial
  Synthetic oligonucleotide
caaccccttcattgtcgatagtgactcagtcgtatcactgtcgctatcgggtggagccat

SEQ ID NO: 110372 - DNA, 51 bp, Artificial
  Synthetic oligonucleotide
cgctatcgggtggagccattaacgtaactaccgcagtcaacttaactgggt

SEQ ID NO: 110373 - DNA, 60 bp, Artificial
  Synthetic oligonucleotide
cgctatcgggtggagccattaacgtaactaccgcagtcaacttaactgggtatgcgatag

SEQ ID NO: 110374 - DNA, 60 bp, Artificial
  Synthetic oligonucleotide
tatgcgatagcaattgagggtaagtttaacatgcaaatgaacgctagcccgtcttattat

SEQ ID NO: 110375 - DNA, 60 bp, Artificial
  Synthetic oligonucleotide
gcgatagcaattgagggtaagtttaacatgcaaatgaacgctagcccgtcttattatacc

SEQ ID NO: 110376 - DNA, 60 bp, Artificial
  Synthetic oligonucleotide
gtcttattataccttgagttcactaacaattcagacgagtgtaatcgatgacttcggatt

SEQ ID NO: 110377 - DNA, 60 bp, Artificial
  Synthetic oligonucleotide
ccttgagttcactaacaattcagacgagtgtaatcgatgacttcggattgtccgcatttt

SEQ ID NO: 110378 - DNA, 60 bp, Artificial
  Synthetic oligonucleotide
acttcggattgtccgcatttttggaaccattccgaatcagattgcgcgcttcaggtcaaa

SEQ ID NO: 110379 - DNA, 60 bp, Artificial
  Synthetic oligonucleotide
gggaacgttgcgactcgcgatgttgatgtattcatcggtgcatgttccgaaccagtttac

SEQ ID NO: 110380 - DNA, 60 bp, Artificial
  Synthetic oligonucleotide
ggatgttcctcggagttcgattgctaaccttattatgaacatagcgacgtgtttacctac

SEQ ID NO: 110381 - DNA, 60 bp, Artificial
  Synthetic oligonucleotide
ccggaaaagttctattcgactattattaagaaagttagatttatacgcgggaagggatcc

SEQ ID NO: 110382 - DNA, 60 bp, Artificial
  Synthetic oligonucleotide
gtcaattattgaaaacggaaacgttgcgactcgcgatgttgatgtattcatcggtgcatg

SEQ ID NO: 110383 - DNA, 60 bp, Artificial
  Synthetic oligonucleotide
cggaaacgttgcgactcgcgatgttgatgtatttatcggtgcatgctccgagccggttta

SEQ ID NO: 110384 - DNA, 60 bp, Artificial
  Synthetic oligonucleotide
cggaaacgttgcgactcgcgatgttgatgtattcatcggtgcatgctccgaaccggttta

SEQ ID NO: 110385 - DNA, 60 bp, Artificial
  Synthetic oligonucleotide
aagtttttaagcctggaactgacacattcctacaggaacgagcgtaagagaatggcagac

SEQ ID NO: 110386 - DNA, 60 bp, Artificial
  Synthetic oligonucleotide
accagtttttccaccaggtatgaattggactgatttgatcactaactattcaccatctag

SEQ ID NO: 110387 - DNA, 60 bp, Artificial
  Synthetic oligonucleotide
actcttaaagatgctagagacaaaattgtcgaaggcacattatactccaacgtgagtgat

SEQ ID NO: 110388 - DNA, 60 bp, Artificial
  Synthetic oligonucleotide
actcttaaagatgctagagacaaaattgtcgaaggcacattatactccaatgtaagtgat

SEQ ID NO: 110389 - DNA, 60 bp, Artificial
  Synthetic oligonucleotide
cttaaggatgctagagacaaaattgtcgaaggcactttatactctaatgttagtgatcta

SEQ ID NO: 110390 - DNA, 60 bp, Artificial
  Synthetic oligonucleotide
ctcttaaagatgctagagacaaaattgtcgaaggcacattatactccaatgtaagtgatc

SEQ ID NO: 110391 - DNA, 60 bp, Artificial
  Synthetic oligonucleotide
gagtgttggagaatggtcacgtgagtgtctacggcgatggagatgtcaagtgtaatttat

SEQ ID NO: 110392 - DNA, 60 bp, Artificial
  Synthetic oligonucleotide
atctaatgtaccgctataattatttttctttaggccgggagacgggagattctatatata

SEQ ID NO: 110393 - DNA, 60 bp, Artificial
  Synthetic oligonucleotide
agaaagtatctaatgtgccgctataattatttttctttaggccgggagacgggggattct

SEQ ID NO: 110394 - DNA, 60 bp, Artificial
  Synthetic oligonucleotide
aggtcgtagttctgagcgaagaggagatccgtgtggtgaaacataggatgataaagaaag

SEQ ID NO: 110395 - DNA, 60 bp, Artificial
  Synthetic oligonucleotide
gatttttaatgaggagatcgctatcacggtagagaaacgcgacttgattaaatatgatga

SEQ ID NO: 110396 - DNA, 60 bp, Artificial
  Synthetic oligonucleotide
aaagacgctgaccacaagtataaacccagatcaattcgacttaaagaagaagatttttaa

SEQ ID NO: 110397 - DNA, 60 bp, Artificial
  Synthetic oligonucleotide
agtgaactcaatgcgcacagcaggtagaaccgcaactatcacctatgatctatctagaca

SEQ ID NO: 110398 - DNA, 60 bp, Artificial
  Synthetic oligonucleotide
aacaaaattccgtctcagtttacccctgactatatcttacgcacagccctctaccgaaat

SEQ ID NO: 110399 - DNA, 60 bp, Artificial
  Synthetic oligonucleotide
tcaaggaaaccgaaatgatgagacccgtcctatgtatgattgggaaggagcagtatagca

SEQ ID NO: 110400 - DNA, 60 bp, Artificial
  Synthetic oligonucleotide
ggaaaccgaaatgatgagacccgtcctatgtatgattgggaaggagcagtatagcatgcc

SEQ ID NO: 110401 - DNA, 60 bp, Artificial
  Synthetic oligonucleotide
tcgcgggaacatggttaaactgggtgaagcattgcaaacgattggaaacggcgagattaa

SEQ ID NO: 110402 - DNA, 60 bp, Artificial
  Synthetic oligonucleotide
cgcgggaacatggttaaactgggtgaagcattgcaaacgattggaaacggcgagattaat

SEQ ID NO: 110403 - DNA, 60 bp, Artificial
  Synthetic oligonucleotide
aattgaaattcttggtgttatatgatttgttccaggggaagaagcctatcgttgatgcgt

SEQ ID NO: 110404 - DNA, 60 bp, Artificial
  Synthetic oligonucleotide
ggtgttatatgatttgttccaggggaagaagcctatcgttgatgcgtacgatattctcct

SEQ ID NO: 110405 - DNA, 60 bp, Artificial
  Synthetic oligonucleotide
gttgatgcgtacgatattctccttaacggtttagatctaaaacagatgttaacaatcgga

SEQ ID NO: 110406 - DNA, 60 bp, Artificial
  Synthetic oligonucleotide
attctccttaacggtttagatctaaaacagatgttaacaatcggaaaatggtcgtcagca

SEQ ID NO: 110407 - DNA, 60 bp, Artificial
  Synthetic oligonucleotide
aacaatcggaaaatggtcgtcagcaatgctaaaatcacaatttgtggcagtcaaggaaac

SEQ ID NO: 110408 - DNA, 60 bp, Artificial
  Synthetic oligonucleotide
gtcgtcagcaatgctaaaatcacaatttgtggcagtcaaggaaaccgaaatgatgagacc

SEQ ID NO: 110409 - DNA, 60 bp, Artificial
  Synthetic oligonucleotide
gctagtcacagattttaacgaccttatactcgaggtgaactcttgtcgcgggaacatggt

SEQ ID NO: 110410 - DNA, 60 bp, Artificial
  Synthetic oligonucleotide
gatgagctagtcacagattttaacgaccttatactcgaggtgaactcttgtcgcgggaac

SEQ ID NO: 110411 - DNA, 55 bp, Artificial
  Synthetic oligonucleotide
ctaccgaaatcatcatgcagccctggtttatcaaagcaaagaacgaccaacaaaa

SEQ ID NO: 110412 - DNA, 60 bp, Artificial
  Synthetic oligonucleotide
cagtttacccctgactatatcttacgcacagccctctaccgaaatcatcatgcagccctg

SEQ ID NO: 110413 - DNA, 60 bp, Artificial
  Synthetic oligonucleotide
atagtttgcgaattagggaaagaggattacagttacattgttatggggaagaatggaatg

SEQ ID NO: 110414 - DNA, 60 bp, Artificial
  Synthetic oligonucleotide
ctaccgaaatcatcatgcagccctggtttatcaaagcaaagaacgaccaacaaaaatcta

SEQ ID NO: 110415 - DNA, 60 bp, Artificial
  Synthetic oligonucleotide
gcgcagattccagatgatgagaactactagcagcgttctgaaccgtgatcatgtccgagt

SEQ ID NO: 110416 - DNA, 60 bp, Artificial
  Synthetic oligonucleotide
gggaaagaggattacagttacattgttatggggaagaatggaatggcgaaggaggcatta

SEQ ID NO: 110417 - DNA, 60 bp, Artificial
  Synthetic oligonucleotide
ccgagtaatcaaaacgatatcatttgacgattttgcagttgagcatgatgagctagtcac

SEQ ID NO: 110418 - DNA, 60 bp, Artificial
  Synthetic oligonucleotide
atgtccgagtaatcaaaacgatatcatttgacgattttgcagttgagcatgatgagctag

SEQ ID NO: 110419 - DNA, 60 bp, Artificial
  Synthetic oligonucleotide
caactaaatgcgaccgatgcgcgagagttataatcctaggtacaccaacacttgtcctga

SEQ ID NO: 110420 - DNA, 60 bp, Artificial
  Synthetic oligonucleotide
ttcatgtatatcaatcaactaaatgcgaccgatgcgcgagagttataatcctaggtacac

SEQ ID NO: 110421 - DNA, 60 bp, Artificial
  Synthetic oligonucleotide
gggttcgtctctcctgttcacaactccgatgactttggaaggttggaccacagttactac

SEQ ID NO: 110422 - DNA, 60 bp, Artificial
  Synthetic oligonucleotide
agggttcgtctctcctgttcacaactccgatgactttggaaggttggaccacagttacta

SEQ ID NO: 110423 - DNA, 60 bp, Artificial
  Synthetic oligonucleotide
ggaccattgatgggtgagtgtttcggagagtctagctgttgatgtagacgacggagtgat

SEQ ID NO: 110424 - DNA, 60 bp, Artificial
  Synthetic oligonucleotide
ttattggaccattgatgggtgagtgtttcggagagtctagctgttgatgtagacgacgga

SEQ ID NO: 110425 - DNA, 60 bp, Artificial
  Synthetic oligonucleotide
caactacaacaacagcttaaacggagaagtgagcgtgtgggtatacgcatactactcgga

SEQ ID NO: 110426 - DNA, 60 bp, Artificial
  Synthetic oligonucleotide
cttgaacggagaagtgagcgtgtgggtatacgcatactactcagacgggtctgtactcgt

SEQ ID NO: 110427 - DNA, 58 bp, Artificial
  Synthetic oligonucleotide
cttaaacggacaagtgagcgtgtgggtatacgcatactactcggatggatcagtgctc

SEQ ID NO: 110428 - DNA, 60 bp, Artificial
  Synthetic oligonucleotide
cttaaacggagaagtgagcgtgtgggtatacgcatactactcagacggatcagtgctcgt

SEQ ID NO: 110429 - DNA, 60 bp, Artificial
  Synthetic oligonucleotide
ggacgcgaacaaagactattcaatagcgaacaatacaactataacaacagcttgaacgga

SEQ ID NO: 110430 - DNA, 60 bp, Artificial
  Synthetic oligonucleotide
ggacgcgaacaaagactattcaatagcgaacaatacaactacaacaacagcttaaacgga

SEQ ID NO: 110431 - DNA, 60 bp, Artificial
  Synthetic oligonucleotide
cttaaacggagaagtgagcgtgtgggtatacgcatactactcggatggatcagtgctcgt

SEQ ID NO: 110432 - DNA, 60 bp, Artificial
  Synthetic oligonucleotide
cctattgatagctatccccagaatttccatcacattggcttccaacacaattcttgcctc

SEQ ID NO: 110433 - DNA, 60 bp, Artificial
  Synthetic oligonucleotide
gcgagcatgtgctacgcttcaagaggcaagaattgtgttggaagccaatgtgatggaaat

SEQ ID NO: 110434 - DNA, 60 bp, Artificial
  Synthetic oligonucleotide
agatggacactatcgccgcaagagcactcactgtgatgcgagcatgtgctacgcttcaag

SEQ ID NO: 110435 - DNA, 60 bp, Artificial
  Synthetic oligonucleotide
cttgcctcttgaagcgtagcacatgctcgcatcacagtgagtgctcttgcagcgatagtg

SEQ ID NO: 110436 - DNA, 60 bp, Artificial
  Synthetic oligonucleotide
cagtccattgtacctattgatagctatccccagaatttccatcacattggcttccaacac

SEQ ID NO: 110437 - DNA, 60 bp, Artificial
  Synthetic oligonucleotide
atgcgagcatgtgctacgcttcaagaggcaagaattgtgttggaagccaatgtgatggaa

SEQ ID NO: 110438 - DNA, 60 bp, Artificial
  Synthetic oligonucleotide
cttccaacacaattcttgcctcttgaagcgtagcacatgctcgcatcacagtgagtgctc

SEQ ID NO: 110439 - DNA, 60 bp, Artificial
  Synthetic oligonucleotide
agatgtcgcaggtgggtgacgttatcacggaagatgaaccggagaagttctattcgacga

SEQ ID NO: 110440 - DNA, 60 bp, Artificial
  Synthetic oligonucleotide
agcagtaagaatggttgcaggcgttgtaggtcatctgcttttcacggcgggaggacggtt

SEQ ID NO: 110441 - DNA, 60 bp, Artificial
  Synthetic oligonucleotide
gttttagatgtaagttggatatcgctttggtttgcctttaatcggtcgtttgagccaacg

SEQ ID NO: 110442 - DNA, 60 bp, Artificial
  Synthetic oligonucleotide
ccagcagtaagaatggttgcaggcgtcgtaggtcatctgcttttcacggcgggaggacga

SEQ ID NO: 110443 - DNA, 60 bp, Artificial
  Synthetic oligonucleotide
cgcaggtgggtgacgttatcacggaagatgaaccggagaagttctattcgacgatcatca

SEQ ID NO: 110444 - DNA, 60 bp, Artificial
  Synthetic oligonucleotide
aacaaaggtgaaatattagcacttactttcagtgatgaatacatcaaatcaaaactatta

SEQ ID NO: 110445 - DNA, 60 bp, Artificial
  Synthetic oligonucleotide
ataattcagtagctactaatgttgcaaaatcggctgttgcagcaacaatcgctagtggta

SEQ ID NO: 110446 - DNA, 60 bp, Artificial
  Synthetic oligonucleotide
gtggtacagttgagcaattaagatactgtcaacttggttcattaggtggtgatctaccag

SEQ ID NO: 110447 - DNA, 60 bp, Artificial
  Synthetic oligonucleotide
acttaattcgtagtccagatgaagctccaccaacagataacagtttattgaacaaaggtg

SEQ ID NO: 110448 - DNA, 60 bp, Artificial
  Synthetic oligonucleotide
cccaattcgtacggttatcattgcaatgggtcgttcgccacctatttgctaagagaatca

SEQ ID NO: 110449 - DNA, 60 bp, Artificial
  Synthetic oligonucleotide
gctagtggtacagttgagcaattaagatactgtcaacttggttcattaggtggtgatcta

SEQ ID NO: 110450 - DNA, 60 bp, Artificial
  Synthetic oligonucleotide
ctaccagatagatcatcaactttaatggtactatatgagtgtgatgtcgcaggttcaacc

SEQ ID NO: 110451 - DNA, 58 bp, Artificial
  Synthetic oligonucleotide
caaataccgatttagttccaatgcctggtattaacctaagcattactacttcagatgt

SEQ ID NO: 110452 - DNA, 60 bp, Artificial
  Synthetic oligonucleotide
aaaggaacataggactaataaagcgaattcaagaaacttaattcgtagtccagatgaagc

SEQ ID NO: 110453 - DNA, 60 bp, Artificial
  Synthetic oligonucleotide
aacaatgtcgagtttaaaggaacataggactaataaagcgaattcaagaaacttaattcg

SEQ ID NO: 110454 - DNA, 60 bp, Artificial
  Synthetic oligonucleotide
gtccagatgaagctccaccaacagataacagtttattgaacaaaggtgaaatattagcac

SEQ ID NO: 110455 - DNA, 60 bp, Artificial
  Synthetic oligonucleotide
taattccggttaaacttagacatatcgatcgttttgggaggtctcaccagcctctcaatc

SEQ ID NO: 110456 - DNA, 60 bp, Artificial
  Synthetic oligonucleotide
ggtccgaaactgcaaggtttacctcctccatcacttccacccaattcgtacggttatcat

SEQ ID NO: 110457 - DNA, 60 bp, Artificial
  Synthetic oligonucleotide
cacccaattcgtacggttatcattgcaatgggtcgttcgccacctatttgctaagagaat

SEQ ID NO: 110458 - DNA, 60 bp, Artificial
  Synthetic oligonucleotide
cgtgagcatacaacattaataaatgatttatttgcgctaactaacattcctaattccggt

SEQ ID NO: 110459 - DNA, 60 bp, Artificial
  Synthetic oligonucleotide
ttaaaccaccgttcaataccaaagtattatttttctgttgtgtacgtgatcgtgagcata

SEQ ID NO: 110460 - DNA, 55 bp, Artificial
  Synthetic oligonucleotide
gttgcaaaatcggctgttgcagcaacaatcgctagtggtacagttgagcaattaa

SEQ ID NO: 110461 - DNA, 60 bp, Artificial
  Synthetic oligonucleotide
aaaactattacttggtccgaaactgcaaggtttacctcctccatcacttccacccaattc

SEQ ID NO: 110462 - DNA, 60 bp, Artificial
  Synthetic oligonucleotide
ccggttaaacttagacatatcgatcgttttgggaggtctcaccagcctctcaatctttcg

SEQ ID NO: 110463 - DNA, 60 bp, Artificial
  Synthetic oligonucleotide
tggtgatctaccagatagatcatcaactttaatggtactatatgagtgtgatgtcgcagg

SEQ ID NO: 110464 - DNA, 60 bp, Artificial
  Synthetic oligonucleotide
ttgggacgttcctcggagttcgattgctaaccttattatgaacatagcgacgtgtttacc

SEQ ID NO: 110465 - DNA, 60 bp, Artificial
  Synthetic oligonucleotide
cagctgatcaatttcttaaggatggatgattttgcgaagcattttaacaggtatgcttcg

SEQ ID NO: 110466 - DNA, 60 bp, Artificial
  Synthetic oligonucleotide
cttgccgacctcaactatacattgagtgtaatcactttaatgaatgacacattacattct

SEQ ID NO: 110467 - DNA, 60 bp, Artificial
  Synthetic oligonucleotide
atacaaagtgatcaagtattgtatagtcacaattattaatactcttttaaaattggcagg

SEQ ID NO: 110468 - DNA, 60 bp, Artificial
  Synthetic oligonucleotide
gttataaataacacgcacttcaggatggctaactattcactaccatggcttaccaatccc

SEQ ID NO: 110469 - DNA, 60 bp, Artificial
  Synthetic oligonucleotide
ggaacgtggatatcagagagcgaaggctgacggattgatcgtcaatactatcttgtaccc

SEQ ID NO: 110470 - DNA, 60 bp, Artificial
  Synthetic oligonucleotide
tgatttcacaaaggcggaacgtggatatcagagagcgaaggctgacggattgatcgtcaa

SEQ ID NO: 110471 - DNA, 60 bp, Artificial
  Synthetic oligonucleotide
cgggctctgacttcacgaaggcggaacgtggatatcagagagcgaaggctgacggattga

SEQ ID NO: 110472 - DNA, 60 bp, Artificial
  Synthetic oligonucleotide
gattcgggctctgacttcacgaaggcggaacgtggatatcagagagcgaaggctgacgga

SEQ ID NO: 110473 - DNA, 60 bp, Artificial
  Synthetic oligonucleotide
cacttcaggatggctaactattcactaccatggcttatcaaccccgtcgctttgaacggc

SEQ ID NO: 110474 - DNA, 60 bp, Artificial
  Synthetic oligonucleotide
cacttcaggatggctaactattcactaccatggcttaccaatcccgtcgcattaaacggc

SEQ ID NO: 110475 - DNA, 60 bp, Artificial
  Synthetic oligonucleotide
gttataaataacacgcacttcaggatggctaactattcactaccatggcttatcaacccc

SEQ ID NO: 110476 - DNA, 60 bp, Artificial
  Synthetic oligonucleotide
gccttgaaccagcagatagatatgataaagaaggaagtgatgaagaaacaatcttataat

SEQ ID NO: 110477 - DNA, 58 bp, Artificial
  Synthetic oligonucleotide
agagaaaagtgccgctagtacttcaactacagtaaagaaggttaaaattcatttctcc

SEQ ID NO: 110478 - DNA, 60 bp, Artificial
  Synthetic oligonucleotide
cattcgttgacccgacttcatgatagactgcaaaccgtagaaactagcactttacccaac

SEQ ID NO: 110479 - DNA, 60 bp, Artificial
  Synthetic oligonucleotide
ggatccagcagtaagaatggttgcaggcgttgtaggccatctgcttttcacggcgggagg

SEQ ID NO: 110480 - DNA, 60 bp, Artificial
  Synthetic oligonucleotide
ctgcgccctacgtacatgctcagcgttacatacggtattgtggcattgattcgcgagagt

SEQ ID NO: 110481 - DNA, 60 bp, Artificial
  Synthetic oligonucleotide
gaccgtctcacttctggaaggcagtattaaatgatagccccgaagcagtcaaggccgtga

SEQ ID NO: 110482 - DNA, 60 bp, Artificial
  Synthetic oligonucleotide
gagtgatcgggagcgttctgatgaatttattaatggagtaaacactttagcgtctatatg

SEQ ID NO: 110483 - DNA, 60 bp, Artificial
  Synthetic oligonucleotide
cgatccagaaacttcgagtattcacggcaagcaaggatgggcgcgagcttcctgaaattg

SEQ ID NO: 110484 - DNA, 60 bp, Artificial
  Synthetic oligonucleotide
aggtaactcagaggattgatgacggaagtatacaattatatgttaaagtgagtgatcggg

SEQ ID NO: 110485 - DNA, 60 bp, Artificial
  Synthetic oligonucleotide
ttgaagctgctttccgtcgtagtccgtctaagacattagtgttttcgatttacattagag

SEQ ID NO: 110486 - DNA, 60 bp, Artificial
  Synthetic oligonucleotide
attaaaaaaccccaaacttcagtgtaccctactttccccctcgaacagcttttaaacgac

SEQ ID NO: 110487 - DNA, 60 bp, Artificial
  Synthetic oligonucleotide
gttttgaggatattgacaaaattttagatgcggtaagtgagaaaatggacgatcagactg

SEQ ID NO: 110488 - DNA, 60 bp, Artificial
  Synthetic oligonucleotide
cccttaaagataattcgatccagaaacttcgagtattcacggcaagcaaggatgggcgcg

SEQ ID NO: 110489 - DNA, 60 bp, Artificial
  Synthetic oligonucleotide
tttaaacgactctacaatgacctcaccacagacctttttgcacgccacttcccttaaaga

SEQ ID NO: 110490 - DNA, 60 bp, Artificial
  Synthetic oligonucleotide
ccttttcgttatgaattaaaacaaatggtcccggctcattttgactcaccctgtttttat

SEQ ID NO: 110491 - DNA, 60 bp, Artificial
  Synthetic oligonucleotide
cgaagagatggttgtgcgctttgaaacattacagtatattgcgagtcgtaacggaagtgt

SEQ ID NO: 110492 - DNA, 60 bp, Artificial
  Synthetic oligonucleotide
tacattagagataacgaagagatggttgtgcgctttgaaacattacagtatattgcgagt

SEQ ID NO: 110493 - DNA, 60 bp, Artificial
  Synthetic oligonucleotide
gatgggcgcgagcttcctgaaattgaaagattagttaagcaaggtactggaaaacctgtt

SEQ ID NO: 110494 - DNA, 60 bp, Artificial
  Synthetic oligonucleotide
acaagattggtagagaggtaactcagaggattgatgacggaagtatacaattatatgtta

SEQ ID NO: 110495 - DNA, 60 bp, Artificial
  Synthetic oligonucleotide
gtgcgattgatgacgtgctaaatgagcttaaaatgaaatttcctattactccttttcgtt

SEQ ID NO: 110496 - DNA, 60 bp, Artificial
  Synthetic oligonucleotide
cacaatttaatagtttgattactaacgcagcatggaacaagattggtagagaggtaactc

SEQ ID NO: 110497 - DNA, 60 bp, Artificial
  Synthetic oligonucleotide
aagatggtgagagttttgaggatattgacaaaattttagatgcggtaagtgagaaaatgg

SEQ ID NO: 110498 - DNA, 59 bp, Artificial
  Synthetic oligonucleotide
agtaaacactttagcgtctatatgttttgccgaaatcttatacgtagatgatgcttaca

SEQ ID NO: 110499 - DNA, 60 bp, Artificial
  Synthetic oligonucleotide
aaatgtcttttctacacaatttaatagtttgattactaacgcagcatggaacaagattgg

SEQ ID NO: 110500 - DNA, 60 bp, Artificial
  Synthetic oligonucleotide
gaccctttctgaatattgtacaacccataaccgcgtggattatgtaataacgaaacgttc

SEQ ID NO: 110501 - DNA, 59 bp, Artificial
  Synthetic oligonucleotide
atggctgtagtgttttgtgaatgtgctcgagggcgagcgctctgggaggggtgaatagc

SEQ ID NO: 110502 - DNA, 61 bp, Artificial
  Synthetic oligonucleotide
gttttaccatctaaaactatcaatgcactgctcgaagaaagtgaaagatttaatacaagcg

SEQ ID NO: 110503 - DNA, 60 bp, Artificial
  Synthetic oligonucleotide
taagccgattttgttaatgcatcaatatagagaggatgaattgatttctggtgacgacgt

SEQ ID NO: 110504 - DNA, 60 bp, Artificial
  Synthetic oligonucleotide
gttctatgttttaccatctaaaactatcaatgcactgctcgaagaaagtgaaagatttaa

SEQ ID NO: 110505 - DNA, 60 bp, Artificial
  Synthetic oligonucleotide
ttaaattcgacgagcgcgagtataaaatacatgtgcaggagcctgacgtaacatcgatct

SEQ ID NO: 110506 - DNA, 60 bp, Artificial
  Synthetic oligonucleotide
cgacgagcgcgagtataaaatacatgtgcaggagcctgacgtaacatcgatctcaagtgc

SEQ ID NO: 110507 - DNA, 60 bp, Artificial
  Synthetic oligonucleotide
tattgcgagtcgtaacggaagtgtatgttttaaatgtgacattgatgatgttaaattcga

SEQ ID NO: 110508 - DNA, 60 bp, Artificial
  Synthetic oligonucleotide
cgtaacggaagtgtatgttttaaatgtgacattgatgatgttaaattcgacgagcgcgag

SEQ ID NO: 110509 - DNA, 65 bp, Artificial
  Synthetic oligonucleotide
gcgactggaagtaaatacaccctaaacaatgagtgtgaaaatttgtatgtaaatgtcttttctac

SEQ ID NO: 110510 - DNA, 60 bp, Artificial
  Synthetic oligonucleotide
acatcgatctcaagtgcaaaacgcgataatgttaatgctaagcagtttaatttgtatatt

SEQ ID NO: 110511 - DNA, 60 bp, Artificial
  Synthetic oligonucleotide
gtgcaaaacgcgataatgttaatgctaagcagtttaatttgtatattggtttggaacgcg

SEQ ID NO: 110512 - DNA, 60 bp, Artificial
  Synthetic oligonucleotide
ctgtttttatcagacccttgcgacccagttacctgatagattcgaaaatgcacagcaagc

SEQ ID NO: 110513 - DNA, 57 bp, Artificial
  Synthetic oligonucleotide
ttttatcagacccttgcgacccagttacctgatagattcgaaaatgcacagcaagct

SEQ ID NO: 110514 - DNA, 60 bp, Artificial
  Synthetic oligonucleotide
gattctttctcaagataggacagacgaagacgttcgtatgattttgaagggtggtttccc

SEQ ID NO: 110515 - DNA, 60 bp, Artificial
  Synthetic oligonucleotide
caagataggacagacgaagacgttcgtatgattttgaagggtggtttcccgtttgttttg

SEQ ID NO: 110516 - DNA, 60 bp, Artificial
  Synthetic oligonucleotide
gtggtttcccgtttgttttgattaccgacataattagacatttagatgtatgtcgtagat

SEQ ID NO: 110517 - DNA, 60 bp, Artificial
  Synthetic oligonucleotide
ggtgttgattactttatagaatttggcgaaggacaacttttctcttttaaatatattgtg

SEQ ID NO: 110518 - DNA, 60 bp, Artificial
  Synthetic oligonucleotide
atagaatttggcgaaggacaacttttctcttttaaatatattgtgccgactgcggaaacc

SEQ ID NO: 110519 - DNA, 60 bp, Artificial
  Synthetic oligonucleotide
tcggcagttcctctccctcaaagattaccgaaagcggataagcaactagaacaatcaccc

SEQ ID NO: 110520 - DNA, 60 bp, Artificial
  Synthetic oligonucleotide
cggcagttcctctccctcaaagattaccgaaagcggataagcaactagaacaatcaccca

SEQ ID NO: 110521 - DNA, 60 bp, Artificial
  Synthetic oligonucleotide
ctgaagatgatgttagtattatcgaattgaaggatcttgagatatctaatttaaaactcg

SEQ ID NO: 110522 - DNA, 60 bp, Artificial
  Synthetic oligonucleotide
ctgctttccgtcgtagtccgtctaagacattagtgttttcgatttacattagagataacg

SEQ ID NO: 110523 - DNA, 65 bp, Artificial
  Synthetic oligonucleotide
gcagcagacaaaacagatttctgaattaaccttcaagctaattgatgctgataagtataatcaac

SEQ ID NO: 110524 - DNA, 52 bp, Artificial
  Synthetic oligonucleotide
ttaaaactcgaaatcgctagattgacttcggataacgcaaatttatctttga

SEQ ID NO: 110525 - DNA, 60 bp, Artificial
  Synthetic oligonucleotide
taataatcaaaatggctcagtagatctacctagtgttgatattattcctatatcgactga

SEQ ID NO: 110526 - DNA, 60 bp, Artificial
  Synthetic oligonucleotide
tatcgactgactctttagcgtttggtgataatgtgcatgaatatttaagtcgagctcatg

SEQ ID NO: 110527 - DNA, 60 bp, Artificial
  Synthetic oligonucleotide
ctcagtagatctacctagtgttgatattattcctatatcgactgactctttagcgtttgg

SEQ ID NO: 110528 - DNA, 61 bp, Artificial
  Synthetic oligonucleotide
cgagctcatgatataatgtgcgaacagtatgttgaatttatcgttaataccggattaaatg

SEQ ID NO: 110529 - DNA, 60 bp, Artificial
  Synthetic oligonucleotide
cgactgactctttagcgtttggtgataatgtgcatgaatatttaagtcgagctcatgata

SEQ ID NO: 110530 - DNA, 60 bp, Artificial
  Synthetic oligonucleotide
cggattaaatgataagccgattttgttaatgcatcaatatagagaggatgaattgatttc

SEQ ID NO: 110531 - DNA, 60 bp, Artificial
  Synthetic oligonucleotide
ttatatgttaaagtgagtgatcgggagcgttctgatgaatttattaatggagtaaacact

SEQ ID NO: 110532 - DNA, 60 bp, Artificial
  Synthetic oligonucleotide
ggaaggtgacccttgatgttgacaatatgtcaacggaagcgctcatacaaaagctgtcaa

SEQ ID NO: 110533 - DNA, 60 bp, Artificial
  Synthetic oligonucleotide
gaaggtgacccttgatgttgacaatatgtcaacggaagcgctcatacaaaagctgtcaac

SEQ ID NO: 110534 - DNA, 60 bp, Artificial
  Synthetic oligonucleotide
gctctcctcctttaagggacggaaagtaactcttgatgttgacaatatgtcaacggaagc

SEQ ID NO: 110535 - DNA, 60 bp, Artificial
  Synthetic oligonucleotide
cctcctttaagggacggaaagtaactcttgatgttgacaatatgtcaacggaagcgctca

SEQ ID NO: 110536 - DNA, 60 bp, Artificial
  Synthetic oligonucleotide
atactcccatcaaggaattattctcgatgggctctggtaagcgtgagccgttggcgttgg

SEQ ID NO: 110537 - DNA, 60 bp, Artificial
  Synthetic oligonucleotide
tcccattaaggaattattctcgatgggctctggtaaacgtgagccgttggcgctggaatt

SEQ ID NO: 110538 - DNA, 60 bp, Artificial
  Synthetic oligonucleotide
atccagaagcctgacagacgaggtttctaaactgtataaattgaatcggggcaacgtcaa

SEQ ID NO: 110539 - DNA, 60 bp, Artificial
  Synthetic oligonucleotide
gcaacgtcaaagaaccccgaaagtatgctactgaacgtatgtctacgcagtctaaacctg

SEQ ID NO: 110540 - DNA, 60 bp, Artificial
  Synthetic oligonucleotide
gcaacgtcaaagaaccccgaaagtatgctactgaacgtatgtctacacagtccaaacctg

SEQ ID NO: 110541 - DNA, 60 bp, Artificial
  Synthetic oligonucleotide
cccgaaagtatgctactgaacgtatgtctacacagtccaaacctgtggcgttgcaggttc

SEQ ID NO: 110542 - DNA, 60 bp, Artificial
  Synthetic oligonucleotide
cccgaaagtatgctactgaacgtatgtctacgcagtctaaacctgtggcgttgcaggttc

SEQ ID NO: 110543 - DNA, 60 bp, Artificial
  Synthetic oligonucleotide
aagtataatgccgtctctatctgcgttatttaatacccctttcatccagggggcttttcg

SEQ ID NO: 110544 - DNA, 60 bp, Artificial
  Synthetic oligonucleotide
cctttcatccagggggcttttcggcaccggatcatatcaagtatgggacctgaaatttca

SEQ ID NO: 110545 - DNA, 59 bp, Artificial
  Synthetic oligonucleotide
ggggcttttcggcaccggatcatatcaagtatgggacctgaaatttcatacttagttat

SEQ ID NO: 110546 - DNA, 60 bp, Artificial
  Synthetic oligonucleotide
gacccggacgcgtatgagaagctctattctgaaacgatctctaagcacgtctctgacgga

SEQ ID NO: 110547 - DNA, 60 bp, Artificial
  Synthetic oligonucleotide
ctatcatcccgctatcctgctgtttttattaatgaaagtgagcccttctctgatgaagag

SEQ ID NO: 110548 - DNA, 60 bp, Artificial
  Synthetic oligonucleotide
gaaacgatctctaagcacgtctctgacggatcgtatgggaatagggtaattatttctcat

SEQ ID NO: 110549 - DNA, 60 bp, Artificial
  Synthetic oligonucleotide
cgtatgagaagctctattctgaaacgatctctaagcacgtctctgacggatcgtatggga

SEQ ID NO: 110550 - DNA, 60 bp, Artificial
  Synthetic oligonucleotide
gttcttcctaaaggacatgaaggagataccctatcatcccgctatcctgctgtttttatt

SEQ ID NO: 110551 - DNA, 56 bp, Artificial
  Synthetic oligonucleotide
gttcttcctaaaggacatgaaggagataccctatcatcccgctatcctgctgtttt

SEQ ID NO: 110552 - DNA, 60 bp, Artificial
  Synthetic oligonucleotide
cccaaagggcatgagggagataccctatcatcccgctatcctgctgtttttattaatgaa

SEQ ID NO: 110553 - DNA, 50 bp, Artificial
  Synthetic oligonucleotide
cccaaagggcatgagggagataccctatcatcccgctatcctgctgtttt

SEQ ID NO: 110554 - DNA, 60 bp, Artificial
  Synthetic oligonucleotide
tctctaagcacgtctctgacggatcgtatgggaatagggtaattatttctcataaaatgt

SEQ ID NO: 110555 - DNA, 60 bp, Artificial
  Synthetic oligonucleotide
atctctaagcacgtctctgacggatcgtatgggaatagggtaattatttctcataaaatg

SEQ ID NO: 110556 - DNA, 60 bp, Artificial
  Synthetic oligonucleotide
cgtgcattatctgattctgaaattgatgatcgcgtagaacagcttgaagttgacgtcgaa

SEQ ID NO: 110557 - DNA, 60 bp, Artificial
  Synthetic oligonucleotide
cgtacgttatctgattctgaaattgatgatcgcgtagaacagcttgaagttgacgtcgaa

SEQ ID NO: 110558 - DNA, 60 bp, Artificial
  Synthetic oligonucleotide
atctttaatcgtgcattatctgattctgaaattgatgatcgcgtagaacagcttgaagtt

SEQ ID NO: 110559 - DNA, 60 bp, Artificial
  Synthetic oligonucleotide
gagcgataatacatatgacgttgctgatagcggcaatcatcgccctgttgacatcggttt

SEQ ID NO: 110560 - DNA, 60 bp, Artificial
  Synthetic oligonucleotide
tcagtaggtagagtggcgccccaaggtttgcatcatgtggagtggttgatcccatggtgc

SEQ ID NO: 110561 - DNA, 60 bp, Artificial
  Synthetic oligonucleotide
aggatgagtttcactgagttctcgtcagtcccgcttgatggtttcgagttaccattaacc

SEQ ID NO: 110562 - DNA, 60 bp, Artificial
  Synthetic oligonucleotide
gtctgcgcgaaaagtgagaggagtttgaatcaacaaattgatatggttaagaaagaggtc

SEQ ID NO: 110563 - DNA, 60 bp, Artificial
  Synthetic oligonucleotide
tatgccctcatcaatgccaactgttgctcttgaaatcctggacaaagcgatgtcaaacac

SEQ ID NO: 110564 - DNA, 60 bp, Artificial
  Synthetic oligonucleotide
ttcaagagtctgaatccgatgctgggggtggtgaatctgggagcaacattcttgatgatg

SEQ ID NO: 110565 - DNA, 60 bp, Artificial
  Synthetic oligonucleotide
aactgaataatgcgacaaccgagatacctccatggttcaagagtctgaatccgatgctgg

SEQ ID NO: 110566 - DNA, 60 bp, Artificial
  Synthetic oligonucleotide
tgagtgtggccttcaaactgaataatgcgacaaccgagatacctccatggttcaagagtc

SEQ ID NO: 110567 - DNA, 60 bp, Artificial
  Synthetic oligonucleotide
caatttcacaaccaccgaggtatgctccaagtgcgcctatgccctcatcaatgccaactg

SEQ ID NO: 110568 - DNA, 60 bp, Artificial
  Synthetic oligonucleotide
aagaaaagatgaaacataatcaggaccgagttgaagagttaagcctggtccgtgtggatg

SEQ ID NO: 110569 - DNA, 60 bp, Artificial
  Synthetic oligonucleotide
acagattttaccaaaattgaaaagtgatcttgggagtctaaagaagaaaagagcgataat

SEQ ID NO: 110570 - DNA, 60 bp, Artificial
  Synthetic oligonucleotide
tgtggagtggttgatcccatggtgcagattcctactgctgtccaacgggggagggtgtgc

SEQ ID NO: 110571 - DNA, 60 bp, Artificial
  Synthetic oligonucleotide
gccaactgttgctcttgaaatcctggacaaagcgatgtcaaacacaacgggtgcaacgca

SEQ ID NO: 110572 - DNA, 60 bp, Artificial
  Synthetic oligonucleotide
tgttctgggaccgtgcgctattaaggtcattgatcgagatgtaacatgttcattcatgat

SEQ ID NO: 110573 - DNA, 60 bp, Artificial
  Synthetic oligonucleotide
tgggaccgtgcgctattaaggtcattgatcgagatgtaacatgttcattcatgataactg

SEQ ID NO: 110574 - DNA, 60 bp, Artificial
  Synthetic oligonucleotide
ctacatcgactacttcagttgggaagattgcaaaagcattcggtacgcagtatctcgcgg

SEQ ID NO: 110575 - DNA, 60 bp, Artificial
  Synthetic oligonucleotide
gcattcggtacgcagtatctcgcggtgaaggtcggaacgacaacgcattttgaaggagtc

SEQ ID NO: 110576 - DNA, 60 bp, Artificial
  Synthetic oligonucleotide
ggtgctggaaattttgaacgtggacccaggatcgcgacgcgtacctttgtattctactgt

SEQ ID NO: 110577 - DNA, 60 bp, Artificial
  Synthetic oligonucleotide
ttgtattctactgtactacatcgactacttcagttgggaagattgcaaaagcattcggta

SEQ ID NO: 110578 - DNA, 60 bp, Artificial
  Synthetic oligonucleotide
ggcgaaatcatggaagcgaagaaagattcttttcaattgcagaatcaaggtgctggaaat

SEQ ID NO: 110579 - DNA, 60 bp, Artificial
  Synthetic oligonucleotide
tcaaggtgctggaaattttgaacgtggacccaggatcgcgacgcgtacctttgtattcta

SEQ ID NO: 110580 - DNA, 60 bp, Artificial
  Synthetic oligonucleotide
cattcatgataactgaaaccggattagaagcttcgatgaacagatgggctaagtataaat

SEQ ID NO: 110581 - DNA, 60 bp, Artificial
  Synthetic oligonucleotide
ctgaaaccggattagaagcttcgatgaacagatgggctaagtataaatttgaaacggttg

SEQ ID NO: 110582 - DNA, 60 bp, Artificial
  Synthetic oligonucleotide
tccagtgaaccagaagcgatggatgcgagtcagatggcaagattaatgagggagaaactt

SEQ ID NO: 110583 - DNA, 60 bp, Artificial
  Synthetic oligonucleotide
gctacccctcgatcgcgctgatccagtaaagctcggcgctttcgagaagctcgcaacgac

SEQ ID NO: 110584 - DNA, 60 bp, Artificial
  Synthetic oligonucleotide
cctcgatcgcgctgatccagtaaagctcggcgctttcgagaagctcgcaacgacgttctc

SEQ ID NO: 110585 - DNA, 60 bp, Artificial
  Synthetic oligonucleotide
cagtgaaccagaagcgatggatgcgagtcagatggcaagattaatgagggagaaacttac

SEQ ID NO: 110586 - DNA, 60 bp, Artificial
  Synthetic oligonucleotide
ggagaaacttactattgataccacttctggttttgaggatcgcactgaatcgacatttct

SEQ ID NO: 110587 - DNA, 60 bp, Artificial
  Synthetic oligonucleotide
tgataccacttctggttttgaggatcgcactgaatcgacatttctcgccgaaaagatcag

SEQ ID NO: 110588 - DNA, 60 bp, Artificial
  Synthetic oligonucleotide
cgacatttctcgccgaaaagatcagagaacgccagttgctttctccagtggctagccctt

SEQ ID NO: 110589 - DNA, 60 bp, Artificial
  Synthetic oligonucleotide
cgccgaaaagatcagagaacgccagttgctttctccagtggctagcccttcaattacagc

SEQ ID NO: 110590 - DNA, 60 bp, Artificial
  Synthetic oligonucleotide
gctagcccttcaattacagcagaagtagaattgtcacggaagaaaattgactcagtggga

SEQ ID NO: 110591 - DNA, 60 bp, Artificial
  Synthetic oligonucleotide
ttcgaattggctaatgcaattgcttcagacagtagtttgcccactgagctgctacccctc

SEQ ID NO: 110592 - DNA, 60 bp, Artificial
  Synthetic oligonucleotide
gcaattgcttcagacagtagtttgcccactgagctgctacccctcgatcgcgctgatcca

SEQ ID NO: 110593 - DNA, 60 bp, Artificial
  Synthetic oligonucleotide
cttaaaggcgaaatcatggaagcgaagaaagattcttttcaattgcagaatcaaggtgct

SEQ ID NO: 110594 - DNA, 60 bp, Artificial
  Synthetic oligonucleotide
gttaaaaatctggttgtatctactcttgaatgaacgtgcataaagctgatcttaaaggcg

SEQ ID NO: 110595 - DNA, 60 bp, Artificial
  Synthetic oligonucleotide
tggtaggtgctgcaattatagctagagagatggctttttgcattttaatttatagagtac

SEQ ID NO: 110596 - DNA, 58 bp, Artificial
  Synthetic oligonucleotide
gagaccaatgtaggtaaacgcactcacaaagttattcaagccgccagattagagatac

SEQ ID NO: 110597 - DNA, 51 bp, Artificial
  Synthetic oligonucleotide
tcgcaacgacgttctcattcagtaaggttggaaaactacctattttcaata

SEQ ID NO: 110598 - DNA, 60 bp, Artificial
  Synthetic oligonucleotide
gaatattcttacgctggatatgaagaagtaaccaaagccgctttggttatatctggaggt

SEQ ID NO: 110599 - DNA, 60 bp, Artificial
  Synthetic oligonucleotide
gtatctactcttgaatgaacgtgcataaagctgatcttaaaggcgaaatcatggaagcga

SEQ ID NO: 110600 - DNA, 60 bp, Artificial
  Synthetic oligonucleotide
cgccacggacaccgaaaggaccttttcagctctcacgccagtccagtgaaccagaagcga

SEQ ID NO: 110601 - DNA, 60 bp, Artificial
  Synthetic oligonucleotide
tgacatgatcggctcggcgttgcgtgaatgcggtgcgtcgcgatccgagggtcgtttatt

SEQ ID NO: 110602 - DNA, 60 bp, Artificial
  Synthetic oligonucleotide
aaataacacgtgacatgatcggctcggcgttgcgtgaatgcggtgcgtcgcgatccgagg

SEQ ID NO: 110603 - DNA, 60 bp, Artificial
  Synthetic oligonucleotide
ggactcagaccaagtgcaggaacaacgtgaaaaactcaagatcggcagagaaataacacg

SEQ ID NO: 110604 - DNA, 59 bp, Artificial
  Synthetic oligonucleotide
aagtataaatttgaaacggttgaaacctcaagccgcttttgtaaaattaacattggtgg

SEQ ID NO: 110605 - DNA, 60 bp, Artificial
  Synthetic oligonucleotide
aacctaaagcgccacggacaccgaaaggaccttttcagctctcacgccagtccagtgaac

SEQ ID NO: 110606 - DNA, 60 bp, Artificial
  Synthetic oligonucleotide
gcaaccggtaaaacgagtgacaaatcgtgtgcaaggacgtctcgaagaaaaacctaaagc

SEQ ID NO: 110607 - DNA, 51 bp, Artificial
  Synthetic oligonucleotide
gcaaccggtaaaacgagtgacaaatcgtgtgcaaggacgtctcgaagaaaa

SEQ ID NO: 110608 - DNA, 60 bp, Artificial
  Synthetic oligonucleotide
cgatccgagggtcgtttattcggcttgagatctgatgttactgcgaagttgcaaccggta

SEQ ID NO: 110609 - DNA, 60 bp, Artificial
  Synthetic oligonucleotide
tctacaggacagactaaacttacatgataatttcgaatcgttgtgggatacaataacgac

SEQ ID NO: 110610 - DNA, 60 bp, Artificial
  Synthetic oligonucleotide
gcccgttgattataaaagatcaattcagcgtggaatattattactgtcaaacaggcttgg

SEQ ID NO: 110611 - DNA, 60 bp, Artificial
  Synthetic oligonucleotide
agtttttaacaggtataaattcacaagcagctaatgactgtttcaaaaccctgattgcag

SEQ ID NO: 110612 - DNA, 60 bp, Artificial
  Synthetic oligonucleotide
tatgaccaggttctcactgaaatgccggattacttattattaaaagatatggcagttgag

SEQ ID NO: 110613 - DNA, 60 bp, Artificial
  Synthetic oligonucleotide
tacaaactatatgtcattgatttcaggtatgtggctactaactgtagtgccaaacgatat

SEQ ID NO: 110614 - DNA, 60 bp, Artificial
  Synthetic oligonucleotide
gcagcaatgctaagtcagcgaactatgtcgcttgatttcgtgactacaaactatatgtca

SEQ ID NO: 110615 - DNA, 60 bp, Artificial
  Synthetic oligonucleotide
gcttggtcaactagttgatttgactaggttattagcttacaattatgagacactaatggc

SEQ ID NO: 110616 - DNA, 60 bp, Artificial
  Synthetic oligonucleotide
tgttcaaactttaacaacggagaaattacagttaacttcagttacatcgctgtgcatgct

SEQ ID NO: 110617 - DNA, 60 bp, Artificial
  Synthetic oligonucleotide
cgttgtgggatacaataacgacctcaaactatattttggcaagatcagtagtaccagatt

SEQ ID NO: 110618 - DNA, 60 bp, Artificial
  Synthetic oligonucleotide
aattatccatcaatattacacccgatagactacgctttcaatgaatatttcctacaacac

SEQ ID NO: 110619 - DNA, 60 bp, Artificial
  Synthetic oligonucleotide
attacacccgatagactacgctttcaatgaatatttcctacaacaccagttggttgaacc

SEQ ID NO: 110620 - DNA, 65 bp, Artificial
  Synthetic oligonucleotide
gctgcattttgttaataacaatcagtttagacaagtagttattgatggtgtgttaaatcaggtgc

SEQ ID NO: 110621 - DNA, 60 bp, Artificial
  Synthetic oligonucleotide
tggtgtgttaaatcaggtgctgaacgataatattaggaatgggcatgttattaatcaatt

SEQ ID NO: 110622 - DNA, 59 bp, Artificial
  Synthetic oligonucleotide
aaaatcgacaaaagaggaatctaagcagttacttgaagtgttgaaaacgaaagaagagc

SEQ ID NO: 110623 - DNA, 60 bp, Artificial
  Synthetic oligonucleotide
tattttctcaatctgtatgaccaggttctcactgaaatgccggattacttattattaaaa

SEQ ID NO: 110624 - DNA, 60 bp, Artificial
  Synthetic oligonucleotide
ggaggccttaatgcagctatcacgacaacagtttccaacgatgcccgttgattataaaag

SEQ ID NO: 110625 - DNA, 53 bp, Artificial
  Synthetic oligonucleotide
ctggcaaagttgtcgattctgaaacggcaagtatttgtgatgccatatttcaa

SEQ ID NO: 110626 - DNA, 60 bp, Artificial
  Synthetic oligonucleotide
gtggcgctggttggagctcttccatttattaccgattcatcagtcatatcattaatagca

SEQ ID NO: 110627 - DNA, 60 bp, Artificial
  Synthetic oligonucleotide
tcatcagtcatatcattaatagcaaagcttgatgctacagtttttgcccaaatagttaaa

SEQ ID NO: 110628 - DNA, 60 bp, Artificial
  Synthetic oligonucleotide
ttaaaaccgatactgtataaaataaactcagattcaaatgatttttatctggttgctaat

SEQ ID NO: 110629 - DNA, 60 bp, Artificial
  Synthetic oligonucleotide
ggttgctaattatgactgggtgcctacttcaaccacaaaagtgtataagcaagttccaca

SEQ ID NO: 110630 - DNA, 60 bp, Artificial
  Synthetic oligonucleotide
gtagtaccagatttaaaggaattggtctcaactgaagcgcagattcaaaaaatgtcacaa

SEQ ID NO: 110631 - DNA, 60 bp, Artificial
  Synthetic oligonucleotide
cacattttcgacgtggctagagttccagacgatcaaatgtatagactaagagatagattg

SEQ ID NO: 110632 - DNA, 60 bp, Artificial
  Synthetic oligonucleotide
tttttgaagagattacacattttcgacgtggctagagttccagacgatcaaatgtataga

SEQ ID NO: 110633 - DNA, 60 bp, Artificial
  Synthetic oligonucleotide
gatcaaaatagtaaaacacaactatcagataaagtactttcaaagaaagaagaaatcata

SEQ ID NO: 110634 - DNA, 61 bp, Artificial
  Synthetic oligonucleotide
cgaacgtaaacaataatgatcgaatgcaagagaaggatgttgaaaagcaagatcaaaatag

SEQ ID NO: 110635 - DNA, 59 bp, Artificial
  Synthetic oligonucleotide
caactagccatagtgaatacgatagtatatccagcgtttgggatgcaacgaatgcatta

SEQ ID NO: 110636 - DNA, 60 bp, Artificial
  Synthetic oligonucleotide
tcactcaaattataatgaaagaatcaatgatgcagtagccatcataactgcagctaacag

SEQ ID NO: 110637 - DNA, 60 bp, Artificial
  Synthetic oligonucleotide
caggtgctgaacgataatattaggaatgggcatgttattaatcaattaatggaggcctta

SEQ ID NO: 110638 - DNA, 60 bp, Artificial
  Synthetic oligonucleotide
tgtgcatgctcattggaaatgcgactgttatacctagtccacaaacgttgtttcattatt

SEQ ID NO: 110639 - DNA, 60 bp, Artificial
  Synthetic oligonucleotide
aacggagaaattacagttaacttcagttacatcgctgtgcatgctcattggaaatgcgac

SEQ ID NO: 110640 - DNA, 60 bp, Artificial
  Synthetic oligonucleotide
aatgtcacaagatttacagttagaagcgttaacaatacaatcagagacacagtttttaac

SEQ ID NO: 110641 - DNA, 61 bp, Artificial
  Synthetic oligonucleotide
gtatagactaagagatagattgcggttattaccagtagaagtaagacgattagacattttc

SEQ ID NO: 110642 - DNA, 60 bp, Artificial
  Synthetic oligonucleotide
taaattcacaagcagctaatgactgtttcaaaaccctgattgcagcaatgctaagtcagc

SEQ ID NO: 110643 - DNA, 60 bp, Artificial
  Synthetic oligonucleotide
ttaatcaattaatggaggccttaatgcagctatcacgacaacagtttccaacgatgcccg

SEQ ID NO: 110644 - DNA, 60 bp, Artificial
  Synthetic oligonucleotide
gctagaaatctggatgggttccagcagataaatttagaggaattaatgagaacgggtgac

SEQ ID NO: 110645 - DNA, 60 bp, Artificial
  Synthetic oligonucleotide
tataagacctaatcttctacaggacagactaaacttacatgataatttcgaatcgttgtg

SEQ ID NO: 110646 - DNA, 60 bp, Artificial
  Synthetic oligonucleotide
cctaacgcggcataatttccgaaccggcatgctccaagggatcagagaggctatggctcc

SEQ ID NO: 110647 - DNA, 60 bp, Artificial
  Synthetic oligonucleotide
ctaacgcggcataatttccgaaccggcatgctccaagggatcagagaggctatggctccc

SEQ ID NO: 110648 - DNA, 60 bp, Artificial
  Synthetic oligonucleotide
ggttggaatggatacggtgcacatccagcagctcttaatatcgttatgacggaagagatg

SEQ ID NO: 110649 - DNA, 59 bp, Artificial
  Synthetic oligonucleotide
gaatgggtacggtgcacatccagcagctcttaatatcgttatgacggaagagatgtatg

SEQ ID NO: 110650 - DNA, 60 bp, Artificial
  Synthetic oligonucleotide
gattagatgagagcgagcgagacaaaggtagtttcaaggtccccaagggagtgcttccag

SEQ ID NO: 110651 - DNA, 60 bp, Artificial
  Synthetic oligonucleotide
atgcgatgtatcgcgacagaaagtttgattcgaacgatgaggatgggtttacgctaatac

SEQ ID NO: 110652 - DNA, 60 bp, Artificial
  Synthetic oligonucleotide
cagaagatgatgattggcccacgagttagctcacgggtgcggaattcttatgttgatcga

SEQ ID NO: 110653 - DNA, 60 bp, Artificial
  Synthetic oligonucleotide
cagaagatgatgattggcccacgagttagctcacgagtgcggaattcttatgttgatcga

SEQ ID NO: 110654 - DNA, 60 bp, Artificial
  Synthetic oligonucleotide
gaggttgagtggaaatacgtgtttgacggccaaacgttccaaagttacgcttttgaggtg

SEQ ID NO: 110655 - DNA, 60 bp, Artificial
  Synthetic oligonucleotide
tggaaatacgtgtttgacggccaaacgttccaaagttacgcttttgaggtgtacgtgaac

SEQ ID NO: 110656 - DNA, 60 bp, Artificial
  Synthetic oligonucleotide
cacctgacgcggcataatttccgaaccggcatgctccaagggatcagagaggctatggct

SEQ ID NO: 110657 - DNA, 60 bp, Artificial
  Synthetic oligonucleotide
cacctaacgcggcataatttccgaaccggcatgctccaagggatcagagaggctatggct

SEQ ID NO: 110658 - DNA, 60 bp, Artificial
  Synthetic oligonucleotide
tttgatgcgtatatacgattagatgagagcgagcgagacaaaggtagtttcaaagtcccc

SEQ ID NO: 110659 - DNA, 60 bp, Artificial
  Synthetic oligonucleotide
acgcgtatatacgattagatgagagcgagcgagacaaaggtagtttcaaggtccccaagg

SEQ ID NO: 110660 - DNA, 60 bp, Artificial
  Synthetic oligonucleotide
gttatacgttagaacaaatcatagattttggatatggagaggggagggtagcgaatacgt

SEQ ID NO: 110661 - DNA, 60 bp, Artificial
  Synthetic oligonucleotide
ggctccctatagggatttgcgatatgaaggttatacgttagaacaaatcatagattttgg

SEQ ID NO: 110662 - DNA, 60 bp, Artificial
  Synthetic oligonucleotide
ggctatggctccctatagggatttgcgatatgaaggttatacgttagaacaaatcataga

SEQ ID NO: 110663 - DNA, 60 bp, Artificial
  Synthetic oligonucleotide
gaggctatggctccctatagggatttgcgatatgaaggttatacgttagaacaaatcata

SEQ ID NO: 110664 - DNA, 60 bp, Artificial
  Synthetic oligonucleotide
agattttggatatggagaggggagggtagcgaatacgttgtggaacggaaagcgaagact

SEQ ID NO: 110665 - DNA, 60 bp, Artificial
  Synthetic oligonucleotide
atcatagattttggatatggagaggggagggtagcgaatacgttgtggaacggaaagcga

SEQ ID NO: 110666 - DNA, 60 bp, Artificial
  Synthetic oligonucleotide
aaatcatagattttggatatggagaggggagggtagcgaatacgttgtggaacggaaagc

SEQ ID NO: 110667 - DNA, 60 bp, Artificial
  Synthetic oligonucleotide
gttatacgttagaacaaatcatagattttggatatggagaggggagggtagcaaatacgt

SEQ ID NO: 110668 - DNA, 60 bp, Artificial
  Synthetic oligonucleotide
gcggtgaggatgagttttacagagttctcgtcaatcccgctggacggtttcgaaatgcca

SEQ ID NO: 110669 - DNA, 60 bp, Artificial
  Synthetic oligonucleotide
aatgacgcggtgaggatgagttttacagagttctcgtcaatcccgctagatggtttcgaa

SEQ ID NO: 110670 - DNA, 60 bp, Artificial
  Synthetic oligonucleotide
gcggtgaggatgagttttacagagttctcgtcaatcccgctggatggcttcgaaatgcca

SEQ ID NO: 110671 - DNA, 60 bp, Artificial
  Synthetic oligonucleotide
tgcggtgaggatgagttttacagagttctcgtcaatcccgctggacggtttcgaaatgcc

SEQ ID NO: 110672 - DNA, 52 bp, Artificial
  Synthetic oligonucleotide
ttgactgacggatcgtatatagtatgtgccagttacttcaagatcctgctta

SEQ ID NO: 110673 - DNA, 60 bp, Artificial
  Synthetic oligonucleotide
gcattgacggccagtggtcgaacgacgcgcgtgatcccgaactattgactgacggatcgt

SEQ ID NO: 110674 - DNA, 60 bp, Artificial
  Synthetic oligonucleotide
gtgcccgcattgacggccagtggtcgaacgacgcgcgtgatcccgaactattgactgacg

SEQ ID NO: 110675 - DNA, 60 bp, Artificial
  Synthetic oligonucleotide
caagggggcccgagccatctgggcgcacgctatgatgaatcagagttgtgacaagttgag

SEQ ID NO: 110676 - DNA, 60 bp, Artificial
  Synthetic oligonucleotide
ggcccgagccatctgggcgcacgctatgatgaatcagagttgtgacaagttgagcactgc

SEQ ID NO: 110677 - DNA, 57 bp, Artificial
  Synthetic oligonucleotide
gttccaatactgtaccgacccgctatggagatgatcgaacccgtcgtgtccaagggg

SEQ ID NO: 110678 - DNA, 60 bp, Artificial
  Synthetic oligonucleotide
gttccaatactgtaccgacccgctatggagatgatcgaacccgtcgtgtccaagggggcc

SEQ ID NO: 110679 - DNA, 60 bp, Artificial
  Synthetic oligonucleotide
actcatatcacccatcagtgtcatgattctctcgcgtctcggcagatgggtcgttccctg

SEQ ID NO: 110680 - DNA, 60 bp, Artificial
  Synthetic oligonucleotide
gtgagaagttagcccgagttcagctcgccatccccagtggacctccggacgttatcgttc

SEQ ID NO: 110681 - DNA, 60 bp, Artificial
  Synthetic oligonucleotide
atggccggggccggcaaagtcaataaggttatgagtctcgaccgcatctgcggtgccgtt

SEQ ID NO: 110682 - DNA, 60 bp, Artificial
  Synthetic oligonucleotide
ggccggggccggcaaagtcaataaggttatgagtctcgaccgcatctgcggtgccgttaa

SEQ ID NO: 110683 - DNA, 60 bp, Artificial
  Synthetic oligonucleotide
cagtgtcatgattctctcgcgtctcggcagatgggtcgttccctggcatccaacttgctc

SEQ ID NO: 110684 - DNA, 60 bp, Artificial
  Synthetic oligonucleotide
gatgggttcctcgcactacgcagtcgggattcactctccaagatgttgtcaggtgccggg

SEQ ID NO: 110685 - DNA, 60 bp, Artificial
  Synthetic oligonucleotide
ttgcctgaagggctgtactccggagctgttggtgttggaggatgaggactaggtctcccg

SEQ ID NO: 110686 - DNA, 60 bp, Artificial
  Synthetic oligonucleotide
gcactgcatgtagacaacgtgcgtatgggcgtggtggcctcaatatcgccaatctatccc

SEQ ID NO: 110687 - DNA, 60 bp, Artificial
  Synthetic oligonucleotide
aggtctcccggtagtcagggaccgcccaacccaggactgtggtgtaggtgtgaccaattc

SEQ ID NO: 110688 - DNA, 60 bp, Artificial
  Synthetic oligonucleotide
aatatcgccaatctatccctatcatgcgcaaatcgcagcagcgctactcgttgcctgaag

SEQ ID NO: 110689 - DNA, 60 bp, Artificial
  Synthetic oligonucleotide
acaagttgagcactgcatgtagacaacgtgcgtatgggcgtggtggcctcaatatcgcca

SEQ ID NO: 110690 - DNA, 60 bp, Artificial
  Synthetic oligonucleotide
tctcccggtagtcagggaccgcccaacccaggactgtggtgtaggtgtgaccaattcatc

SEQ ID NO: 110691 - DNA, 60 bp, Artificial
  Synthetic oligonucleotide
gagattaccggtgagaagttagcccgagttcagctcgccatccccagtggacctccggac

SEQ ID NO: 110692 - DNA, 60 bp, Artificial
  Synthetic oligonucleotide
tccctatcatgcgcaaatcgcagcagcgctactcgttgcctgaagggctgtactccggag

SEQ ID NO: 110693 - DNA, 60 bp, Artificial
  Synthetic oligonucleotide
cgaattagctgaaagaggaattcgagtgcgatttactgaacaattcaaagacggggaatc

SEQ ID NO: 110694 - DNA, 60 bp, Artificial
  Synthetic oligonucleotide
tcttagtaaatcagatagattagaacaagttgatgccttgcgggagctgaagcagaagca

SEQ ID NO: 110695 - DNA, 60 bp, Artificial
  Synthetic oligonucleotide
cagatagattagaacaagttgatgccttgcgggagctgaagcagaagcacagaaaagatg

SEQ ID NO: 110696 - DNA, 60 bp, Artificial
  Synthetic oligonucleotide
gctgaaagaggaattcgagtgcgatttactgaacaattcaaagacggggaatcaaaagac

SEQ ID NO: 110697 - DNA, 60 bp, Artificial
  Synthetic oligonucleotide
gggggtgggactgtaatcttcttagataaaaatctacagaatgaatttaatcttagtaaa

SEQ ID NO: 110698 - DNA, 50 bp, Artificial
  Synthetic oligonucleotide
aaaagttgtggttgatgacgacgtctctgatcctagctccaggtgacgtc

SEQ ID NO: 110699 - DNA, 60 bp, Artificial
  Synthetic oligonucleotide
tcattagaaaagattcttggggaaaggaagattgtatcaaaacagcaagataaggttgtg

SEQ ID NO: 110700 - DNA, 60 bp, Artificial
  Synthetic oligonucleotide
taatggcttactatcatgatggaaaggaggatgctggcgaacaatttattcatttaattg

SEQ ID NO: 110701 - DNA, 55 bp, Artificial
  Synthetic oligonucleotide
gttaaaaaagttgtggttgatgacgacgtctctgatcctagctccaggtgacgtc

SEQ ID NO: 110702 - DNA, 60 bp, Artificial
  Synthetic oligonucleotide
catttaattgatcatatgtaggattggcacggttcgcatgctcccgcaacatcaacatac

SEQ ID NO: 110703 - DNA, 60 bp, Artificial
  Synthetic oligonucleotide
aaaagcatatttcacttgcccaactggtgatgtcacatggaaagaagttgcgaaggcagc

SEQ ID NO: 110704 - DNA, 60 bp, Artificial
  Synthetic oligonucleotide
gaaaagatgtacaaattcgaaccatttctacaattgcgtcattagaaaagattcttgggg

SEQ ID NO: 110705 - DNA, 60 bp, Artificial
  Synthetic oligonucleotide
agcagaagcacagaaaagatgtacaaattcgaaccatttctacaattgcgtcattagaaa

SEQ ID NO: 110706 - DNA, 60 bp, Artificial
  Synthetic oligonucleotide
ggcttactatcatgatggaaaggaggatgctggcgaacaatttattcatttaattgatca

SEQ ID NO: 110707 - DNA, 60 bp, Artificial
  Synthetic oligonucleotide
cttggggaaaggaagattgtatcaaaacagcaagataaggttgtgccgataactgggatc

SEQ ID NO: 110708 - DNA, 60 bp, Artificial
  Synthetic oligonucleotide
ggctgagcagacggagagattgagagatctgcggcgaaaagagaagagtggggcgcatgc

SEQ ID NO: 110709 - DNA, 60 bp, Artificial
  Synthetic oligonucleotide
gggttgacatcatccatagccatgtagggaatgggaagaagtttattggtgcagatttcg

SEQ ID NO: 110710 - DNA, 60 bp, Artificial
  Synthetic oligonucleotide
tgcagatttcgataaaattgtcgaggcggtacgtaaagttgattcaatcgtgtctgagtt

SEQ ID NO: 110711 - DNA, 60 bp, Artificial
  Synthetic oligonucleotide
cgacattggtaaagaggttgttggattcgtgcgcaaaggggttgacatcatccatagcca

SEQ ID NO: 110712 - DNA, 60 bp, Artificial
  Synthetic oligonucleotide
cagcgacctcgctaccgtttctgaagatgctgatggactattcgacgttataggtggcgt

SEQ ID NO: 110713 - DNA, 60 bp, Artificial
  Synthetic oligonucleotide
ttacaggcataatcgacattggtaaagaggttgttggattcgtgcgcaaaggggttgaca

SEQ ID NO: 110714 - DNA, 60 bp, Artificial
  Synthetic oligonucleotide
aacccacgtcattgcatggttgacgctgatgaatacgtcaattatctgatcagcgacctc

SEQ ID NO: 110715 - DNA, 60 bp, Artificial
  Synthetic oligonucleotide
cagacctattcgaaccgacggattaaccatacgcgcacttacatcagatgtccaaacagc

SEQ ID NO: 110716 - DNA, 60 bp, Artificial
  Synthetic oligonucleotide
gatgtccaaacagctttcacaactcgatccagacacagcggtatgcttgatcacattcag

SEQ ID NO: 110717 - DNA, 60 bp, Artificial
  Synthetic oligonucleotide
aacagagggtgagataaccatgtttgttggtgacgcaaaaacagaagtgggccagttctt

SEQ ID NO: 110718 - DNA, 60 bp, Artificial
  Synthetic oligonucleotide
gaacaacgcctctgattcgatgcgtttgcgaatggtcgatcatgtgaatctcgaagggca

SEQ ID NO: 110719 - DNA, 60 bp, Artificial
  Synthetic oligonucleotide
cgcccttcctccaactcagcactggattcaagcttggaacaacgcctctgattcgatgcg

SEQ ID NO: 110720 - DNA, 60 bp, Artificial
  Synthetic oligonucleotide
tcgaagggcataatgttggcttagttgttgatgagggacaatctcgtggttcgaagaaga

SEQ ID NO: 110721 - DNA, 60 bp, Artificial
  Synthetic oligonucleotide
tcgaagaagaatatgattcctattccaaccctacttaacgactctgtttcaaccgtatcg

SEQ ID NO: 110722 - DNA, 60 bp, Artificial
  Synthetic oligonucleotide
ccgtatcggttcgtggggtaacacatcgacgcatgcgggagctcgcggctaggattatga

SEQ ID NO: 110723 - DNA, 60 bp, Artificial
  Synthetic oligonucleotide
gtcgacgtacgttacgggcgcactacaagttctgaatccgagtgtattccatgacgtcag

SEQ ID NO: 110724 - DNA, 54 bp, Artificial
  Synthetic oligonucleotide
cctcatcaagggcatagtgcactcctcgctccggcgacagaatatgggaatggt

SEQ ID NO: 110725 - DNA, 60 bp, Artificial
  Synthetic oligonucleotide
ggacaacgctcgcgtttccctggctcccccaacacgttacgactggcggacctcatcaag

SEQ ID NO: 110726 - DNA, 60 bp, Artificial
  Synthetic oligonucleotide
gtgtgtctgatgagattcggtggaacattctcggtatccgtggtggcgtgtttcccagcg

SEQ ID NO: 110727 - DNA, 60 bp, Artificial
  Synthetic oligonucleotide
cactatggcttgtgtgtctgatgagattcggtggaacattctcggtatccgtggtggcgt

SEQ ID NO: 110728 - DNA, 60 bp, Artificial
  Synthetic oligonucleotide
acagctgcagtgtgcgttgtcgcggcaagtcgagcgaatgtcgtctcagtcactatggct

SEQ ID NO: 110729 - DNA, 60 bp, Artificial
  Synthetic oligonucleotide
agatggagcggtgttttctacgggtggtcaggggtgtacagctgcagtgtgcgttgtcgc

SEQ ID NO: 110730 - DNA, 60 bp, Artificial
  Synthetic oligonucleotide
gccagttcttgcgagatggagcggtgttttctacgggtggtcaggggtgtacagctgcag

SEQ ID NO: 110731 - DNA, 60 bp, Artificial
  Synthetic oligonucleotide
actcagaatggtcacgcccttcctccaactcagcactggattcaagcttggaacaacgcc

SEQ ID NO: 110732 - DNA, 60 bp, Artificial
  Synthetic oligonucleotide
caagttactcttgcggttctgcagactttgagtgtctcgcttccagcacaagcggacgtt

SEQ ID NO: 110733 - DNA, 60 bp, Artificial
  Synthetic oligonucleotide
gtcatcattcaaacctggttcagtgcccaccgctcccatgcaaaccgagttctatgatgg

SEQ ID NO: 110734 - DNA, 60 bp, Artificial
  Synthetic oligonucleotide
acaattttaagacgaacgactcgctacaatggctacgcttgcaccacgatctcgcagacc

SEQ ID NO: 110735 - DNA, 60 bp, Artificial
  Synthetic oligonucleotide
tgtctgagttttcgtcatcattcaaacctggttcagtgcccaccgctcccatgcaaaccg

SEQ ID NO: 110736 - DNA, 60 bp, Artificial
  Synthetic oligonucleotide
cgctaatggcattctcagcaaagttcaaaagtttggagatagcgcctatcttgctccagc

SEQ ID NO: 110737 - DNA, 60 bp, Artificial
  Synthetic oligonucleotide
acgactcgctacaatggctacgcttgcaccacgatctcgcagacctattcgaaccgacgg

SEQ ID NO: 110738 - DNA, 60 bp, Artificial
  Synthetic oligonucleotide
ttgctccagctgtgcctgaatcggttccggttaatgtaggagttttactcgcgatggtcg

SEQ ID NO: 110739 - DNA, 60 bp, Artificial
  Synthetic oligonucleotide
cagcaaagttcaaaagtttggagatagcgcctatcttgctccagctgtgcctgaatcggt

SEQ ID NO: 110740 - DNA, 60 bp, Artificial
  Synthetic oligonucleotide
gcgatggtcgaacaagttactcttgcggttctgcagactttgagtgtctcgcttccagca

SEQ ID NO: 110741 - DNA, 60 bp, Artificial
  Synthetic oligonucleotide
cgagaatattaagcggttgatggacgtacacgaggtcgattaggacgatttcctggtgcc

SEQ ID NO: 110742 - DNA, 60 bp, Artificial
  Synthetic oligonucleotide
ccaaccagcagtcaagatcaggttgagatattgtacattccaaggtattgcgttaggata

SEQ ID NO: 110743 - DNA, 60 bp, Artificial
  Synthetic oligonucleotide
ccgctggtgtgtatggcgtcaggcgtattaacgggacgaacgagaccgtcttttatcgac

SEQ ID NO: 110744 - DNA, 60 bp, Artificial
  Synthetic oligonucleotide
cgttaggataaagacagatgccgaacatgatcgcgccgaggaagattttaccgctggtgt

SEQ ID NO: 110745 - DNA, 60 bp, Artificial
  Synthetic oligonucleotide
agatgccgaacatgatcgcgccgaggaagattttaccgctggtgtgtatggcgtcaggcg

SEQ ID NO: 110746 - DNA, 60 bp, Artificial
  Synthetic oligonucleotide
ggttgatagtgtcagattgctcaaggattccggcattccaaccagcagtcaagatcaggt

SEQ ID NO: 110747 - DNA, 60 bp, Artificial
  Synthetic oligonucleotide
ggttgatggacgtacacgaggtcgattaggacgatttcctggtgccgcggtgtgatggcc

SEQ ID NO: 110748 - DNA, 60 bp, Artificial
  Synthetic oligonucleotide
gagctgtactgggttactcaataaggcgggcatcagcgttgggacagctggcaatgttat

SEQ ID NO: 110749 - DNA, 60 bp, Artificial
  Synthetic oligonucleotide
gcaatgttattatggttgatagtgtcagattgctcaaggattccggcattccaaccagca

SEQ ID NO: 110750 - DNA, 60 bp, Artificial
  Synthetic oligonucleotide
cgacgatgattgcttccctcggtcgtaacgatctcgaacgtgccagatatttgggtctac

SEQ ID NO: 110751 - DNA, 60 bp, Artificial
  Synthetic oligonucleotide
gttcagctctgtgatgtgtcaccggtcgaaatagagttcaccccaccctacgagaatatt

SEQ ID NO: 110752 - DNA, 60 bp, Artificial
  Synthetic oligonucleotide
gtgtcaccggtcgaaatagagttcaccccaccctacgagaatattaagcggttgatggac

SEQ ID NO: 110753 - DNA, 60 bp, Artificial
  Synthetic oligonucleotide
gattgaaaaacacgaccacgtcgctccatttctgttgcagtgtctttctaaaacttccca

SEQ ID NO: 110754 - DNA, 60 bp, Artificial
  Synthetic oligonucleotide
cacgaccacgtcgctccatttctgttgcagtgtctttctaaaacttcccagtggatgtct

SEQ ID NO: 110755 - DNA, 60 bp, Artificial
  Synthetic oligonucleotide
ctgccagttctaggaagcattgttactccgtctgcagtaggaacagagggtgagataacc

SEQ ID NO: 110756 - DNA, 60 bp, Artificial
  Synthetic oligonucleotide
cccagtggatgtctttgagcgacgagaatcctttgttgtcgattgtcgatacgacgatga

SEQ ID NO: 110757 - DNA, 60 bp, Artificial
  Synthetic oligonucleotide
gtgtattccatgacgtcagattccatctatcgtatccgcttattactgcaacattattcg

SEQ ID NO: 110758 - DNA, 60 bp, Artificial
  Synthetic oligonucleotide
tgggcgaaggatccttcgactgtaccattcgttcatccgcagggggtgtctggattgtgg

SEQ ID NO: 110759 - DNA, 60 bp, Artificial
  Synthetic oligonucleotide
tacgagacgtgaaagaaccttaatcctctacgactatgcgttagtcgtgttggacgctgg

SEQ ID NO: 110760 - DNA, 60 bp, Artificial
  Synthetic oligonucleotide
gatcattaattgacagttaacacgttgacatctagtctcttgcagattttgtatgcgtca

SEQ ID NO: 110761 - DNA, 60 bp, Artificial
  Synthetic oligonucleotide
caccatatattccattacgagacgtgaaagaaccttaatcctctacgactatgcgttagt

SEQ ID NO: 110762 - DNA, 60 bp, Artificial
  Synthetic oligonucleotide
attccattacgagacgtggaagaaccttaatcctctacgactatgcgttagtcgtattgg

SEQ ID NO: 110763 - DNA, 60 bp, Artificial
  Synthetic oligonucleotide
cgtcctaatcaaggaggatggttgacgtaggcgttgtggcggcgctggggaaaataaatg

SEQ ID NO: 110764 - DNA, 60 bp, Artificial
  Synthetic oligonucleotide
gatcattaattgacagttaacacgttgacatctagtcttttgcagattttgtatacgtca

SEQ ID NO: 110765 - DNA, 60 bp, Artificial
  Synthetic oligonucleotide
tccgtcctaatcaaggaggatggttgacgtaggcgttgtggcggcgctggggaaaataaa

SEQ ID NO: 110766 - DNA, 60 bp, Artificial
  Synthetic oligonucleotide
ttgagtcatcatgtttacatcttctgcagccaagactggaaggagacgtgcaagcactgc

SEQ ID NO: 110767 - DNA, 60 bp, Artificial
  Synthetic oligonucleotide
ctggaaggagacgtgcaagcactgcgaaaaaatctgaagacgaactcgtagttgaccgag

SEQ ID NO: 110768 - DNA, 60 bp, Artificial
  Synthetic oligonucleotide
gttgaccgagttccaaacctaattgacggaagcatttcatctggaccaatctccacagga

SEQ ID NO: 110769 - DNA, 60 bp, Artificial
  Synthetic oligonucleotide
gttgaccgagttccaaacctaattgacggaagcatttcatctggaccaatctctacagga

SEQ ID NO: 110770 - DNA, 60 bp, Artificial
  Synthetic oligonucleotide
cgagttccaaacctaattgacggaagcatttcatctggaccaatctccacaggaccagac

SEQ ID NO: 110771 - DNA, 60 bp, Artificial
  Synthetic oligonucleotide
cgagttccaaacctaattgacggaagcatttcatctggaccaatctctacaggaccagac

SEQ ID NO: 110772 - DNA, 58 bp, Artificial
  Synthetic oligonucleotide
gtcctgaatgtgttaccccaaaccatacagatatcggcacatcactcggccaagttac

SEQ ID NO: 110773 - DNA, 60 bp, Artificial
  Synthetic oligonucleotide
aatgaaagaggaggttctcgacctagtcaagaaagaggagatagctttgtagctatcaaa

SEQ ID NO: 110774 - DNA, 60 bp, Artificial
  Synthetic oligonucleotide
ggaggttctcgacctagtcaagaaagaggagatagctttgtagctatcaaatatccgtcc

SEQ ID NO: 110775 - DNA, 60 bp, Artificial
  Synthetic oligonucleotide
agctatcaaatatccgtccatgttgaccacattagcagtaatgctaaattatgatattca

SEQ ID NO: 110776 - DNA, 60 bp, Artificial
  Synthetic oligonucleotide
agagctgaacgatccgaatgttctagttgaacgtgctgtatttgatgccatgcagtacag

SEQ ID NO: 110777 - DNA, 60 bp, Artificial
  Synthetic oligonucleotide
aaagagctgaacgacccgaacgttctagttgaacgtgctgtatttgatgccatgcagtat

SEQ ID NO: 110778 - DNA, 60 bp, Artificial
  Synthetic oligonucleotide
tccatggatacgcaagtctgatgcgtctggcggaagagccatggtcagatggagtatcat

SEQ ID NO: 110779 - DNA, 60 bp, Artificial
  Synthetic oligonucleotide
gctgaacgacccgaacgttctagttgaacgtgctgtatttgatgccatgcagtatagcag

SEQ ID NO: 110780 - DNA, 60 bp, Artificial
  Synthetic oligonucleotide
atgatattcataatttgtatgaatttatgatggcagtcttgaatgtcactaaagagctga

SEQ ID NO: 110781 - DNA, 60 bp, Artificial
  Synthetic oligonucleotide
gctatcaaatatccgtccatgttgaccacattagcagtaatgctaaattatgatattcac

SEQ ID NO: 110782 - DNA, 60 bp, Artificial
  Synthetic oligonucleotide
aaagagctgaacgatccgaatgttctagttgaacgtgctgtatttgatgccatgcagtac

SEQ ID NO: 110783 - DNA, 60 bp, Artificial
  Synthetic oligonucleotide
atgatattcacaatttgtatgaatttatgatggcagtcttaaacgtcactaaagagctga

SEQ ID NO: 110784 - DNA, 60 bp, Artificial
  Synthetic oligonucleotide
ggtattttttcccttttgagtcatcatgtttacatcttctgcagccaagactggaaggag

SEQ ID NO: 110785 - DNA, 60 bp, Artificial
  Synthetic oligonucleotide
caccatatattccattacgagacgtggaagaaccttaatcctctacgactatgcgttagt

SEQ ID NO: 110786 - DNA, 60 bp, Artificial
  Synthetic oligonucleotide
ccatggatacgcaagtctgatgcgtctggcggaagagccatggtcagatggagtatcatc

SEQ ID NO: 110787 - DNA, 60 bp, Artificial
  Synthetic oligonucleotide
gttggttactgtaacattatctgccttgacgagagctcagaattatggacttaacttacc

SEQ ID NO: 110788 - DNA, 60 bp, Artificial
  Synthetic oligonucleotide
cattgtcacagatgtttctcaccaaaggttggccgacaggatcggtctattttaaagagt

SEQ ID NO: 110789 - DNA, 60 bp, Artificial
  Synthetic oligonucleotide
cacagatgtttctcaccaaaggttggccgacaggatcggtctattttaaagagtattcca

SEQ ID NO: 110790 - DNA, 60 bp, Artificial
  Synthetic oligonucleotide
tttaaagagtattccaatattgttgatttttccgttgacccacaattgtattgtgattat

SEQ ID NO: 110791 - DNA, 60 bp, Artificial
  Synthetic oligonucleotide
tataccacaattctaatctatctgatatcggttattctactgaactacattttgaaatca

SEQ ID NO: 110792 - DNA, 64 bp, Artificial
  Synthetic oligonucleotide
cacaattctaatctatctgatatcggttattctactgaactacattttgaaatcagtgactcgg

SEQ ID NO: 110793 - DNA, 60 bp, Artificial
  Synthetic oligonucleotide
cgttggttactgtaacattatctgccttgacgagagctcagaattatggacttaacttac

SEQ ID NO: 110794 - DNA, 60 bp, Artificial
  Synthetic oligonucleotide
tagattcatcctctttctattatagagtatgaagacatcctaaaatagaattgtatgatg

SEQ ID NO: 110795 - DNA, 60 bp, Artificial
  Synthetic oligonucleotide
cccacccttagaagagaagtcaaagttaaccgaacaagcgatggatctcgtgaccgcggc

SEQ ID NO: 110796 - DNA, 60 bp, Artificial
  Synthetic oligonucleotide
ccacaatggaggagttcgtcattcctgtgttttctgagagggagatcccttacgccctga

SEQ ID NO: 110797 - DNA, 60 bp, Artificial
  Synthetic oligonucleotide
gttaaaagagtgttccacaatggaggagttcgtcattcctgtgttttctgagagggagat

SEQ ID NO: 110798 - DNA, 60 bp, Artificial
  Synthetic oligonucleotide
ggtcgcgtgaatttattcgattcagatttagccgttggagatcaaatcatccactggcaa

SEQ ID NO: 110799 - DNA, 60 bp, Artificial
  Synthetic oligonucleotide
agcttaacaggataaggacagaatggataaacgcgtcatatgatagaactcggattaggg

SEQ ID NO: 110800 - DNA, 60 bp, Artificial
  Synthetic oligonucleotide
cgacgaattgatgacaaaattactcaacgtttaggtcccttgacacggacctgtggcctc

SEQ ID NO: 110801 - DNA, 60 bp, Artificial
  Synthetic oligonucleotide
tgttcggaaacgacgaattgatgacaaaattactcaacgtttaggtcccttgacacggac

SEQ ID NO: 110802 - DNA, 60 bp, Artificial
  Synthetic oligonucleotide
gaggcgaagaggtattctcctttcgtttaccgcgttgagattttggaatgattcagaatt

SEQ ID NO: 110803 - DNA, 60 bp, Artificial
  Synthetic oligonucleotide
cgcaaatcaaagccagggcttctctgcatcgcttacggtgatgacgtcaatgtacagtgg

SEQ ID NO: 110804 - DNA, 60 bp, Artificial
  Synthetic oligonucleotide
gtattttggcgatatgtatttctcccccgagtactacccggcaacttttattaaacgtga

SEQ ID NO: 110805 - DNA, 60 bp, Artificial
  Synthetic oligonucleotide
atccgagttgacagagatgaaaaaagtattggaaaaatccagattcagccgtattttggc

SEQ ID NO: 110806 - DNA, 60 bp, Artificial
  Synthetic oligonucleotide
gtgagggagcataccccattttgccgcactatgttacagacgtcattaaatatggcatgg

SEQ ID NO: 110807 - DNA, 60 bp, Artificial
  Synthetic oligonucleotide
tacgcttgattctttattcttgatttcgggtggcaactatacatttggaaataagttcct

SEQ ID NO: 110808 - DNA, 60 bp, Artificial
  Synthetic oligonucleotide
tgatgcatgagggctcactcggcttagtggtaattagcggaaagatgttagttaataaaa

SEQ ID NO: 110809 - DNA, 60 bp, Artificial
  Synthetic oligonucleotide
cggtgatgacgtcaatgtacagtgggttgaacatgagttaagagattttttgatgcatga

SEQ ID NO: 110810 - DNA, 60 bp, Artificial
  Synthetic oligonucleotide
catataagtatgagtcgttgctccttgggaaaaatagagggcaaaaagtgaatgattcca

SEQ ID NO: 110811 - DNA, 60 bp, Artificial
  Synthetic oligonucleotide
cgctctgtgtaactacgatcttgcacttacgaatttcggggtttcgaggcgtcaggactg

SEQ ID NO: 110812 - DNA, 60 bp, Artificial
  Synthetic oligonucleotide
ggtttcgaggcgtcaggactgttgctggatctcatcgtgtagtgccattgagctttcgat

SEQ ID NO: 110813 - DNA, 60 bp, Artificial
  Synthetic oligonucleotide
agctttcgatgagagccaacatcattatcgctatttttaggagaatcgaagacaagagat

SEQ ID NO: 110814 - DNA, 60 bp, Artificial
  Synthetic oligonucleotide
ggagctagaatgcgagggattgaagctagggctgggcgaattagggagggtgatggaaac

SEQ ID NO: 110815 - DNA, 60 bp, Artificial
  Synthetic oligonucleotide
gagaatttcgcgaaaatattatccggactcacacagcagcaagacctatatttccctacg

SEQ ID NO: 110816 - DNA, 60 bp, Artificial
  Synthetic oligonucleotide
tgaggattataaaccgatggctattggagagatggggattcatgcgtcgacatataagta

SEQ ID NO: 110817 - DNA, 60 bp, Artificial
  Synthetic oligonucleotide
attcgagcagtgatcaggtatggagccaaatacgctacgcgctcgggtatgcgagaggat

SEQ ID NO: 110818 - DNA, 60 bp, Artificial
  Synthetic oligonucleotide
tacgcgctcgggtatgcgagaggatacactgtcactccaggagttggatcgttattgcga

SEQ ID NO: 110819 - DNA, 60 bp, Artificial
  Synthetic oligonucleotide
gggtgatgcgttaatgatgaattttctacatagggtggttttcgagatggaaaacgtcga

SEQ ID NO: 110820 - DNA, 60 bp, Artificial
  Synthetic oligonucleotide
acaacggtgactagaacttcgcggattaatgattggttgctaaaagaaaagacacaagga

SEQ ID NO: 110821 - DNA, 60 bp, Artificial
  Synthetic oligonucleotide
tgatggaaacttgttagaatgcgcgcgcagatgggaaaaagcggcgtatgagaggattga

SEQ ID NO: 110822 - DNA, 57 bp, Artificial
  Synthetic oligonucleotide
agaggattgagaatgaaaaagcgttgcggtgcgtggcacatgaaacagatccaacgt

SEQ ID NO: 110823 - DNA, 60 bp, Artificial
  Synthetic oligonucleotide
ccgacaacgcagagttgaagactttagcggaacgaatggaagaggaggagctgactgagg

SEQ ID NO: 110824 - DNA, 60 bp, Artificial
  Synthetic oligonucleotide
ctgactgaggatattattcgagcagtgatcaggtatggagccaaatacgctacgcgctcg

SEQ ID NO: 110825 - DNA, 60 bp, Artificial
  Synthetic oligonucleotide
gttgctaaaagaaaagacacaaggagttgtgaagaccgctgaggcgttttccgacaacgc

SEQ ID NO: 110826 - DNA, 60 bp, Artificial
  Synthetic oligonucleotide
ttgaatattaaagacaaaaaaacaatcgctattcgtcgagcgacgatgcattcggacttc

SEQ ID NO: 110827 - DNA, 57 bp, Artificial
  Synthetic oligonucleotide
cacgtacgataattagaaatcagtggattaaagggatgcctcgaatggatttcaaaa

SEQ ID NO: 110828 - DNA, 60 bp, Artificial
  Synthetic oligonucleotide
gagtctttaccaatctcagtagatacgatcagaggttatattggagctagaatgcgaggg

SEQ ID NO: 110829 - DNA, 60 bp, Artificial
  Synthetic oligonucleotide
cgatggctattggagagatggggattcatgcgtcgacatataagtatgagtcgttgctcc

SEQ ID NO: 110830 - DNA, 60 bp, Artificial
  Synthetic oligonucleotide
gttaaattcaccatggcttccgaatttggcattttgatttgtgataaattgaaggaaaat

SEQ ID NO: 110831 - DNA, 60 bp, Artificial
  Synthetic oligonucleotide
tgaccacgtggattggctcaaattgtggaggggtgcgggattacgttgtgcaattgcttc

SEQ ID NO: 110832 - DNA, 60 bp, Artificial
  Synthetic oligonucleotide
cggtggttctttgactactatgcgacattaccgctcgaaaggagaggagagcctcggttg

SEQ ID NO: 110833 - DNA, 60 bp, Artificial
  Synthetic oligonucleotide
cgaagctgatggcaaaagctgaatagcggagtgacttccgctcatggtgattcaacttac

SEQ ID NO: 110834 - DNA, 60 bp, Artificial
  Synthetic oligonucleotide
gatgggagtgtcgacaagtggctggcttccttatgttgaacgcatttgttccgagtctga

SEQ ID NO: 110835 - DNA, 60 bp, Artificial
  Synthetic oligonucleotide
actgaagagaatcgaaaagtcgcgcagtttgattttgaggattataaaccgatggctatt

SEQ ID NO: 110836 - DNA, 60 bp, Artificial
  Synthetic oligonucleotide
ccgagtctgatatgcgcaggcgattgaatgcagatgaactagagttaaaacggtggttct

SEQ ID NO: 110837 - DNA, 60 bp, Artificial
  Synthetic oligonucleotide
tttgatgtcgggtatgaacaaactggttggtgcgctgagatgttatgcttactgcttgat

SEQ ID NO: 110838 - DNA, 60 bp, Artificial
  Synthetic oligonucleotide
aacgtcgatgtggattatgggaagaagtggcatccgctactagtatcgtcagagaagggg

SEQ ID NO: 110839 - DNA, 60 bp, Artificial
  Synthetic oligonucleotide
cgggagtgggaaaagtaggtgtacacgaagaggacggtgtgttaggatatgagtgggagg

SEQ ID NO: 110840 - DNA, 60 bp, Artificial
  Synthetic oligonucleotide
gggcggcaagaggtgaagaagtgttgagtaattatggagatgttctctcagatgaggttg

SEQ ID NO: 110841 - DNA, 58 bp, Artificial
  Synthetic oligonucleotide
tatcaaaagaatccggcggaagtgttttatagcgcaggctatgatacagatcaaaatg

SEQ ID NO: 110842 - DNA, 60 bp, Artificial
  Synthetic oligonucleotide
ggacttctcatcgaatgaagagtacggatataaatttgtatttggatgggcggcaagagg

SEQ ID NO: 110843 - DNA, 60 bp, Artificial
  Synthetic oligonucleotide
ttgtgcgaaatagagaatacgatgtcaatcagtgattttgtttataagcaaataagatgt

SEQ ID NO: 110844 - DNA, 60 bp, Artificial
  Synthetic oligonucleotide
gctactagtatcgtcagagaaggggcttagagtgatcgcggttgatgtttttaactcaat

SEQ ID NO: 110845 - DNA, 60 bp, Artificial
  Synthetic oligonucleotide
cgaatcaccagacgtggaaggatcacattaaagaagtgactgatcaaatgaatcgtgcgc

SEQ ID NO: 110846 - DNA, 60 bp, Artificial
  Synthetic oligonucleotide
gttcaaatcgatggtgttagcatactcacgagtgaaaaatatggtaccgttggtcattgg

SEQ ID NO: 110847 - DNA, 60 bp, Artificial
  Synthetic oligonucleotide
gtgcgcaacaaggcaacaataataagcctctaaaggttcaaatcgatggtgttagcatac

SEQ ID NO: 110848 - DNA, 60 bp, Artificial
  Synthetic oligonucleotide
tgacgttattattacgggagtgggaaaagtaggtgtacacgaagaggacggtgtgttagg

SEQ ID NO: 110849 - DNA, 60 bp, Artificial
  Synthetic oligonucleotide
ttcaaaaaagagatgaaaatcactcgaggtccgattgcgaactggtcgttttttatgtct

SEQ ID NO: 110850 - DNA, 60 bp, Artificial
  Synthetic oligonucleotide
attaaatagccaaaatttgatgtcgggtatgaacaaactggttggtgcgctgagatgtta

SEQ ID NO: 110851 - DNA, 60 bp, Artificial
  Synthetic oligonucleotide
tggtcattgggtcgattgggttgttgatttgattatgttggcgcaggtgaaaatgttaat

SEQ ID NO: 110852 - DNA, 54 bp, Artificial
  Synthetic oligonucleotide
ttaaacatgactttgcttcagtgaggtacattcgtgacgctatggcatgtacta

SEQ ID NO: 110853 - DNA, 60 bp, Artificial
  Synthetic oligonucleotide
ttgcagaagtatgatgagattccagatctatcgcataattgccctttatggtgttttaga

SEQ ID NO: 110854 - DNA, 52 bp, Artificial
  Synthetic oligonucleotide
agaatcgctgaatctcaagctcgacagattaaggctccattggagaagtttg

SEQ ID NO: 110855 - DNA, 51 bp, Artificial
  Synthetic oligonucleotide
acgtacctaattgttctattgttgaattgctggagccacatgagactctga

SEQ ID NO: 110856 - DNA, 60 bp, Artificial
  Synthetic oligonucleotide
cccgttctgcagaagtatgatgagattccagatctatcgcataattgcccattatggtgc

SEQ ID NO: 110857 - DNA, 60 bp, Artificial
  Synthetic oligonucleotide
tcccgttctgcagaagtatgatgagattccagatctatcgcataattgcccattatggtg

SEQ ID NO: 110858 - DNA, 50 bp, Artificial
  Synthetic oligonucleotide
gaaggacggtcagcgtgagtctaccatgggtcgtggtgcgtcaactcatc

SEQ ID NO: 110859 - DNA, 60 bp, Artificial
  Synthetic oligonucleotide
tgacttggatgcgacaggaaggacggtcagcgtgagtctaccatgggtcgtggtgcgtca

SEQ ID NO: 110860 - DNA, 60 bp, Artificial
  Synthetic oligonucleotide
tgacttggatgcggcaagaaggacggtcagcgtgagtctaccatgggtcgtggtgcgtca

SEQ ID NO: 110861 - DNA, 60 bp, Artificial
  Synthetic oligonucleotide
gggtgctgataagaaagcattaacagcgcagttattaatggtggggcttcaggagtcaga

SEQ ID NO: 110862 - DNA, 60 bp, Artificial
  Synthetic oligonucleotide
gaggcgtatctgctcgtgaaatggcgaatgtgcgaggcccgcgaaccgtcggttgatttg

SEQ ID NO: 110863 - DNA, 60 bp, Artificial
  Synthetic oligonucleotide
gcgtatctgctcgtgaaatggcgaatgtgcgaggcccgcgaaccgtcggttgatttgcga

SEQ ID NO: 110864 - DNA, 60 bp, Artificial
  Synthetic oligonucleotide
cctgctcgtgaaatggcgaatgtgcgaggcccgcgaaccgtcggttgatttgcgattacc

SEQ ID NO: 110865 - DNA, 60 bp, Artificial
  Synthetic oligonucleotide
cagcggtggatacgttattcatgggctctatgctgtgctttctcacgtcaaagaacaatg

SEQ ID NO: 110866 - DNA, 60 bp, Artificial
  Synthetic oligonucleotide
acctgctcgtgaaatggcgaatgtgcgaggcccgcgaaccgtcggttgatttgcgattac

SEQ ID NO: 110867 - DNA, 60 bp, Artificial
  Synthetic oligonucleotide
ggcagcggtggatacgttattcatgggctctatgctgtgctttctcacgtcaaagaacaa

SEQ ID NO: 110868 - DNA, 60 bp, Artificial
  Synthetic oligonucleotide
gcagcggtggatacgttattcatgggctctatgctgtgctttctcacgtcaaagaacaat

SEQ ID NO: 110869 - DNA, 60 bp, Artificial
  Synthetic oligonucleotide
caggtgcagaggcggccacgatccattatgccattaaatgtgccccagcagcaggtttcg

SEQ ID NO: 110870 - DNA, 60 bp, Artificial
  Synthetic oligonucleotide
tggcagcggtggatacgttattcatgggctctatgctgtgctttctcacgtcaaagaaca

SEQ ID NO: 110871 - DNA, 60 bp, Artificial
  Synthetic oligonucleotide
gcgaaatcaggtgcagaggcggccacgatccattatgccattaaatgtaccccaacagca

SEQ ID NO: 110872 - DNA, 60 bp, Artificial
  Synthetic oligonucleotide
aaccaggtgcagaggcggccacgatccattatgcccttaaatgtgccccaacagcaggtt

SEQ ID NO: 110873 - DNA, 60 bp, Artificial
  Synthetic oligonucleotide
ctcaatacgtgacagctaggggtggatctggcgcagcactccgcgaatctttgtatgcaa

SEQ ID NO: 110874 - DNA, 60 bp, Artificial
  Synthetic oligonucleotide
ctcaatacgtgacagctaggggtggatctggcgcagcactccgcgaatctttgtatgcga

SEQ ID NO: 110875 - DNA, 60 bp, Artificial
  Synthetic oligonucleotide
gctggttaactgacatctatcacagaacaccaacgcagaggttaatatggcttggtctgc

SEQ ID NO: 110876 - DNA, 60 bp, Artificial
  Synthetic oligonucleotide
aacgtacataccatcgtgggtttagctgaaaggaatacatcaataccggaatctgtagaa

SEQ ID NO: 110877 - DNA, 60 bp, Artificial
  Synthetic oligonucleotide
cgacaaatcttgattgtaaacgatccaacacatgagttcgacatccacgaaacaggctgg

SEQ ID NO: 110878 - DNA, 60 bp, Artificial
  Synthetic oligonucleotide
ggcatggacattcttagtgttttgagtgaagtggattcaggtatgtggagggattgtctc

SEQ ID NO: 110879 - DNA, 60 bp, Artificial
  Synthetic oligonucleotide
caggtatgtggagggattgtctcttggctcttgactttagagaagatatcattcaaccgt

SEQ ID NO: 110880 - DNA, 60 bp, Artificial
  Synthetic oligonucleotide
ccagcatggtatccgtttgccttgcgaataaatcaagctttgaatgatggtctaaatctg

SEQ ID NO: 110881 - DNA, 60 bp, Artificial
  Synthetic oligonucleotide
cggtaatgttgaggagtgttcttttgacagtaggttcatcaataacatcaagtttcccag

SEQ ID NO: 110882 - DNA, 60 bp, Artificial
  Synthetic oligonucleotide
acatattcatgacgatgttaatccgcttcgcacaggccaaaccgttaatggacttgatga

SEQ ID NO: 110883 - DNA, 60 bp, Artificial
  Synthetic oligonucleotide
ggcttggtctgctcatcaatcgaaaactacgtcctgaggacaatctatcactgttgacag

SEQ ID NO: 110884 - DNA, 60 bp, Artificial
  Synthetic oligonucleotide
gggttcattatgcaagacgtcttcctagatagtttcgcttcggaaaagaatagcttcagg

SEQ ID NO: 110885 - DNA, 60 bp, Artificial
  Synthetic oligonucleotide
agatgttggttggagctccagaaataagaggcatggccaggtttatgcatagatttgata

SEQ ID NO: 110886 - DNA, 60 bp, Artificial
  Synthetic oligonucleotide
ggatacacaggtactcatgctgctactgctttagtcaaccagtttaaaggtacttcggac

SEQ ID NO: 110887 - DNA, 60 bp, Artificial
  Synthetic oligonucleotide
ccgccgtcatcaacccaactaatatgttgaagggtaaggtcaaccgtatgatattagcta

SEQ ID NO: 110888 - DNA, 60 bp, Artificial
  Synthetic oligonucleotide
cgaaaacacgaaagaagtcgttgagagcttacgcacaatgggaatgcccaagaacgctcg

SEQ ID NO: 110889 - DNA, 60 bp, Artificial
  Synthetic oligonucleotide
gtgggtcctagtatagtatggagccgttctgacattgaatcaactaacttcagtctgagt

SEQ ID NO: 110890 - DNA, 60 bp, Artificial
  Synthetic oligonucleotide
gaaggtgctctctatatcatgccggatccaatatttcggtcacacatgttgaggtcacca

SEQ ID NO: 110891 - DNA, 60 bp, Artificial
  Synthetic oligonucleotide
attctggtggtaagaagttcattgatgatttgaccaattcagccactgatgatctggtca

SEQ ID NO: 110892 - DNA, 60 bp, Artificial
  Synthetic oligonucleotide
aagaggttgagattagtggtgagacattcaagttaagggaagagatggtgaggcgggtcg

SEQ ID NO: 110893 - DNA, 60 bp, Artificial
  Synthetic oligonucleotide
gctcgaagttctcaaggttagatgaagagggatttgaatgtctcactgaaggtgctctct

SEQ ID NO: 110894 - DNA, 60 bp, Artificial
  Synthetic oligonucleotide
cgttataagatgttggctgattgatactataccagaagaggttgagattagtggtgagac

SEQ ID NO: 110895 - DNA, 60 bp, Artificial
  Synthetic oligonucleotide
gtattccaagccaaagtatcattatgtaagttggttcatacggtcgtacaatggtgttaa

SEQ ID NO: 110896 - DNA, 60 bp, Artificial
  Synthetic oligonucleotide
gccgacacctttgtattattgaaagacgatcttgggattgagaaacctgacgttataaga

SEQ ID NO: 110897 - DNA, 60 bp, Artificial
  Synthetic oligonucleotide
ggttctggatacggttaaagaacctgtaatacaaataatgaacgatactatgtctctggt

SEQ ID NO: 110898 - DNA, 60 bp, Artificial
  Synthetic oligonucleotide
tgaggttgatttcacaaacattgcaatcaagcagtggttgaattacttcgtacgaaagcg

SEQ ID NO: 110899 - DNA, 60 bp, Artificial
  Synthetic oligonucleotide
tgatgttagtcttgatactcgtatagctaataaacgtcaactgcagaatctaatccccga

SEQ ID NO: 110900 - DNA, 60 bp, Artificial
  Synthetic oligonucleotide
gtggtgagacattcaagttaagggaagagatggtgaggcgggtcgcagacgaggctccct

SEQ ID NO: 110901 - DNA, 60 bp, Artificial
  Synthetic oligonucleotide
cgctcatagctcataaacggttcgaggtggcccttagtcatcaacgatgtagctcgaagt

SEQ ID NO: 110902 - DNA, 60 bp, Artificial
  Synthetic oligonucleotide
tcaggggtcaaatcgggtgagttaactacccaattacgtaacacagctacgaataaaggt

SEQ ID NO: 110903 - DNA, 60 bp, Artificial
  Synthetic oligonucleotide
gcttatggacacaatggattacgatggcaagttcgcagaatatatggaaactgaatttct

SEQ ID NO: 110904 - DNA, 60 bp, Artificial
  Synthetic oligonucleotide
gacgtttcgccgataaattcacaggtgacgaggtaaatgatgttaaagggcggttagacc

SEQ ID NO: 110905 - DNA, 60 bp, Artificial
  Synthetic oligonucleotide
ccactgaagtataagtctaaagggatcgtggctgaagcttcaggggtcaaatcgggtgag

SEQ ID NO: 110906 - DNA, 60 bp, Artificial
  Synthetic oligonucleotide
gtcacatcaacctctctgtatgataatacctcaaggacttatgacgtatctgactctaac

SEQ ID NO: 110907 - DNA, 60 bp, Artificial
  Synthetic oligonucleotide
ggcaagatatggacatatggttagtgtgtctcacgagccactcgtggttgacggagatac

SEQ ID NO: 110908 - DNA, 60 bp, Artificial
  Synthetic oligonucleotide
gctcgtgatgtagctcaagagaaccacatggaattgtcagctaaaaggactgtagttgga

SEQ ID NO: 110909 - DNA, 60 bp, Artificial
  Synthetic oligonucleotide
ggactgtagttggaaactgtgtcactgaacacattaagatatttgttgctcgagggttca

SEQ ID NO: 110910 - DNA, 60 bp, Artificial
  Synthetic oligonucleotide
acggagtaagaacgccaatataataactaaccctgagaattttctaaacttcagtgctga

SEQ ID NO: 110911 - DNA, 60 bp, Artificial
  Synthetic oligonucleotide
cttcagtgctgacgcattggatgaggttgtgaatgcaggctctcgattagttagaggaac

SEQ ID NO: 110912 - DNA, 60 bp, Artificial
  Synthetic oligonucleotide
ggtatcaaggacatatcagctactccggacatactgttcaaaggaggaacttcttcagct

SEQ ID NO: 110913 - DNA, 60 bp, Artificial
  Synthetic oligonucleotide
ggtacgagtggttctaagaagttggttctgacgaggatatcacacaagttacggagtaag

SEQ ID NO: 110914 - DNA, 60 bp, Artificial
  Synthetic oligonucleotide
ggttacattcattccaactctgggaaatctgtttgctataggtgggcctgagatgttggt

SEQ ID NO: 110915 - DNA, 60 bp, Artificial
  Synthetic oligonucleotide
ctaattctctgtgcaccgttctacccgctgttcgactcttaagtaatagaccgaagaacg

SEQ ID NO: 110916 - DNA, 60 bp, Artificial
  Synthetic oligonucleotide
tgacgtcatggccccattcatgtgcgctactactaatgacccgagttacttcgctgcggc

SEQ ID NO: 110917 - DNA, 60 bp, Artificial
  Synthetic oligonucleotide
tgacagatccagatcttaaagctttggtcgagtactcaccagcatggtatccgtttgcct

SEQ ID NO: 110918 - DNA, 60 bp, Artificial
  Synthetic oligonucleotide
tggtcgtatttcagacgcccacgctgatggagtacgacgtttcgccgataaattcacagg

SEQ ID NO: 110919 - DNA, 60 bp, Artificial
  Synthetic oligonucleotide
gttatttttgtaagattatccttttcagccatgttgcgatttcaagatgataattctatt

SEQ ID NO: 110920 - DNA, 60 bp, Artificial
  Synthetic oligonucleotide
gattggatgggctagcagtgaagtacggtcgacggtatactgacgttgacgagaccgatc

SEQ ID NO: 110921 - DNA, 60 bp, Artificial
  Synthetic oligonucleotide
gttatttttgtaagattatccttttcagccatgttgcgatttcaagatgacaattctatt

SEQ ID NO: 110922 - DNA, 60 bp, Artificial
  Synthetic oligonucleotide
agctagagggaccccttggtagtaaccttggacacctgttaagcgccattttcaggactt

SEQ ID NO: 110923 - DNA, 60 bp, Artificial
  Synthetic oligonucleotide
atactgacgttgacgagaccgatcacattctaactctgaattgaatcatcgacaatcaat

SEQ ID NO: 110924 - DNA, 60 bp, Artificial
  Synthetic oligonucleotide
cgacggtatactgacgttgacgagaccgatcacattctgactctgaattgaatcatcgac

SEQ ID NO: 110925 - DNA, 55 bp, Artificial
  Synthetic oligonucleotide
ttcaccgcgccgggcctgaccaacctggtgtgacgtgggacaggcttcattcatc

SEQ ID NO: 110926 - DNA, 60 bp, Artificial
  Synthetic oligonucleotide
gcgcaaataactaacatgcttttgaataatcaaccagtagcattggttggagcacttcca

SEQ ID NO: 110927 - DNA, 60 bp, Artificial
  Synthetic oligonucleotide
tgactatgcgcaaataactaacatgcttttgaataatcaaccagtagcattggttggagc

SEQ ID NO: 110928 - DNA, 60 bp, Artificial
  Synthetic oligonucleotide
agaggaattaatgagaacgggtgactatgcacaaataactaacatgcttttgaataatca

SEQ ID NO: 110929 - DNA, 60 bp, Artificial
  Synthetic oligonucleotide
gaacgggtgactatgcacaaataactaacatgcttttgaataatcaaccagtggcgctgg

SEQ ID NO: 110930 - DNA, 60 bp, Artificial
  Synthetic oligonucleotide
gatgctgagaaatggtactcgattatgtatccaacgcgcatgggaacgccgaatgtatcc

SEQ ID NO: 110931 - DNA, 60 bp, Artificial
  Synthetic oligonucleotide
ccgatgctgagaaatggtactcgattatgtatccaacgcgcatgggaacgccgaatgtat

SEQ ID NO: 110932 - DNA, 60 bp, Artificial
  Synthetic oligonucleotide
ctatccaatcaccgtttccagaggcggcagtgtctaggattgtggtgcatacgagatggg

SEQ ID NO: 110933 - DNA, 60 bp, Artificial
  Synthetic oligonucleotide
cgcggtggacaagggattcgacacgcttatcgcggcaacggatggaagcgatttggcttt

SEQ ID NO: 110934 - DNA, 60 bp, Artificial
  Synthetic oligonucleotide
gggaaatctcacggtcactagtaacgtcgtgttattaaccttcgatttaagtgacataac

SEQ ID NO: 110935 - DNA, 60 bp, Artificial
  Synthetic oligonucleotide
ccaaccggaggtgatggtacagcgaacattcgttccttgaccgtgcgtaccggcatcgac

SEQ ID NO: 110936 - DNA, 60 bp, Artificial
  Synthetic oligonucleotide
attactttcccaaccggaggtgatggtacagcgaacattcgttccttgaccgtgcgtacc

SEQ ID NO: 110937 - DNA, 60 bp, Artificial
  Synthetic oligonucleotide
gttaacgctcactgtcatggaagacgcactgattatatgatgtcgtccacgggaaatctc

SEQ ID NO: 110938 - DNA, 60 bp, Artificial
  Synthetic oligonucleotide
tttctttaacatcatactcggcggaggctcaactaatgcaatttcagtggatggcacggg

SEQ ID NO: 110939 - DNA, 60 bp, Artificial
  Synthetic oligonucleotide
tgcgactcatgcgtaccaagctatggggtgtactcgagctcacgtgtcttcacaattact

SEQ ID NO: 110940 - DNA, 60 bp, Artificial
  Synthetic oligonucleotide
gcgtcgttccctgtggacgtatcattcacccgcgattctgcgactcatgcgtaccaagcg

SEQ ID NO: 110941 - DNA, 58 bp, Artificial
  Synthetic oligonucleotide
tctaccgcgagtcatggtctatctttttcgcctccgcttagtgtcgctgacggcgtgg

SEQ ID NO: 110942 - DNA, 60 bp, Artificial
  Synthetic oligonucleotide
ccaagctgcgtcgttccctgtggacgtatcattcacccgcgattctgcgactcatgcgta

SEQ ID NO: 110943 - DNA, 60 bp, Artificial
  Synthetic oligonucleotide
cgaacggtttagctattacagatctgcaggatcgtgttaaatcattggagtctaccgcga

SEQ ID NO: 110944 - DNA, 60 bp, Artificial
  Synthetic oligonucleotide
ccaatttgaagagtgatatctcgtcgaacggtttagctattacagatctgcaggatcgtg

SEQ ID NO: 110945 - DNA, 60 bp, Artificial
  Synthetic oligonucleotide
ccaagcgtatggggtgtactcgagctcacgtgtcttcacaattactttcccaaccggagg

SEQ ID NO: 110946 - DNA, 60 bp, Artificial
  Synthetic oligonucleotide
ctcatgcgtaccaagcgtatggggtgtactcgagctcacgtgtcttcacaattactttcc

SEQ ID NO: 110947 - DNA, 60 bp, Artificial
  Synthetic oligonucleotide
gtctccattctgtctacaaatgtgactgacttaacgaacagatcctctgcgcacgcggcg

SEQ ID NO: 110948 - DNA, 60 bp, Artificial
  Synthetic oligonucleotide
tgaccaatctagaagcgtctacggagttattacatcgctccatttccgatatatccgcta

SEQ ID NO: 110949 - DNA, 60 bp, Artificial
  Synthetic oligonucleotide
acagatctgcaggatcgtgttaaatcatgggagtctaccgcgagtcatggtctatctttt

SEQ ID NO: 110950 - DNA, 60 bp, Artificial
  Synthetic oligonucleotide
gtcatggcgatttgatgccgatctatgaacggctgaccaatctagaagcgtctacggagt

SEQ ID NO: 110951 - DNA, 60 bp, Artificial
  Synthetic oligonucleotide
gcgtctacggagttattacatcgctccatttccgatatatccactactgtctcaaatatt

SEQ ID NO: 110952 - DNA, 60 bp, Artificial
  Synthetic oligonucleotide
aagcgtctacggagttattacatcgctccatttccgatatatccactactgtctcaaata

SEQ ID NO: 110953 - DNA, 60 bp, Artificial
  Synthetic oligonucleotide
ctagaagcgtctacggagttattacatcgctccatttccgatatatccgctactgtctca

SEQ ID NO: 110954 - DNA, 60 bp, Artificial
  Synthetic oligonucleotide
actgctaatttagacggtttgaggaccactgttactgcacttcaggattccgtctccatt

SEQ ID NO: 110955 - DNA, 60 bp, Artificial
  Synthetic oligonucleotide
gcgtcgttccctgtggacgtatcattcacccgcgattctgcgactcatgcgtaccaagct

SEQ ID NO: 110956 - DNA, 60 bp, Artificial
  Synthetic oligonucleotide
ccggaggtgatggtacagcgaacattcgttccttgaccgtgcgtaccggcatcgacacct

SEQ ID NO: 110957 - DNA, 60 bp, Artificial
  Synthetic oligonucleotide
tcagacctagcacgtcttgttcccagtgcgggattccaagctgcgtcgttccctgtggac

SEQ ID NO: 110958 - DNA, 60 bp, Artificial
  Synthetic oligonucleotide
ggattccaagctgcgtcgttccctgtggacgtatcattcacccgcgattctgcgactcat

SEQ ID NO: 110959 - DNA, 60 bp, Artificial
  Synthetic oligonucleotide
atctcacggtcactagtaacgtcgtgttattaaccttcgatttaagtgacataacgcata

SEQ ID NO: 110960 - DNA, 60 bp, Artificial
  Synthetic oligonucleotide
cacgcggcgatactatcttcacttcagactacggttgacggaaactccactgccatctcc

SEQ ID NO: 110961 - DNA, 60 bp, Artificial
  Synthetic oligonucleotide
ggttgacggaaactccactgccatctccaatttgaagagtgatgtatcgtcgaacggttt

SEQ ID NO: 110962 - DNA, 60 bp, Artificial
  Synthetic oligonucleotide
cacgcggcgatactatcttcacttcaaactacggttgacggaaactccactgccatctcc

SEQ ID NO: 110963 - DNA, 60 bp, Artificial
  Synthetic oligonucleotide
cacgcggcgatactatcttcacttcaggctacggttgacggaaactccactgccatctcc

SEQ ID NO: 110964 - DNA, 60 bp, Artificial
  Synthetic oligonucleotide
cgctcactgtcatggaagacgcactgattatatgatgtcgtccacgggaaatctcacggt

SEQ ID NO: 110965 - DNA, 60 bp, Artificial
  Synthetic oligonucleotide
cacaattactttcccaaccggaggtgatggtacagcgaacattcgttccttgaccgtgcg

SEQ ID NO: 110966 - DNA, 60 bp, Artificial
  Synthetic oligonucleotide
gacggaaactccactgccatctccaatttgaagagtgatgtatcgtcgaacggtttagct

SEQ ID NO: 110967 - DNA, 60 bp, Artificial
  Synthetic oligonucleotide
actgccatctccaatttgaagagtgatatctcgtcgaacggtttagctattacagatctg

SEQ ID NO: 110968 - DNA, 60 bp, Artificial
  Synthetic oligonucleotide
cacggtcactagtaacgtcgtgttattaaccttcgatttaagtgacataacgcatatccc

SEQ ID NO: 110969 - DNA, 60 bp, Artificial
  Synthetic oligonucleotide
gtgacataacgcatatcccatcagacctagcacgtcttgttcccagtgcgggattccaag

SEQ ID NO: 110970 - DNA, 60 bp, Artificial
  Synthetic oligonucleotide
ataacgcatatcccatcagacctagcacgtcttgttcccagtgcgggattccaagctgcg

SEQ ID NO: 110971 - DNA, 60 bp, Artificial
  Synthetic oligonucleotide
tcccatcagacctagcacgtcttgttcccagtgcgggattccaagctgcgtcgttccctg

SEQ ID NO: 110972 - DNA, 60 bp, Artificial
  Synthetic oligonucleotide
tacagatctgcaggatcgtgttaaatcatgggagtctaccgcgagtcatggtctatcttt

SEQ ID NO: 110973 - DNA, 60 bp, Artificial
  Synthetic oligonucleotide
ccaagctatggggtgtactcgagctcacgtgtcttcacaattactttcccaaccggaggt

SEQ ID NO: 110974 - DNA, 60 bp, Artificial
  Synthetic oligonucleotide
gctattacagatctgcaggatcgtgttaaatcattggagtctaccgcgagtcatggtcta

SEQ ID NO: 110975 - DNA, 60 bp, Artificial
  Synthetic oligonucleotide
gctcactgtcatggaagacgcactgattatatgatgtcgtccacgggaaatctcacggtc

SEQ ID NO: 110976 - DNA, 60 bp, Artificial
  Synthetic oligonucleotide
ggtttgaggaccactgttactgcacttcaggattccgtctccattctgtctacaaatgtg

SEQ ID NO: 110977 - DNA, 60 bp, Artificial
  Synthetic oligonucleotide
ctgcacttcaggattccgtctccattctgtctacaaatgtgactgacttaacgaacacat

SEQ ID NO: 110978 - DNA, 60 bp, Artificial
  Synthetic oligonucleotide
ccgtctccattctgtctacaaatgtgactgacttaacgaacacatcctctgcgcacgcgg

SEQ ID NO: 110979 - DNA, 60 bp, Artificial
  Synthetic oligonucleotide
cgtctccattctgtctacaaatgtgactgacttaacgaacagatcctctgcgcacgcggc

SEQ ID NO: 110980 - DNA, 60 bp, Artificial
  Synthetic oligonucleotide
tataagtcatggcgatttgacgccgatctatgaacggctgaccaatctagaagcgtctac

SEQ ID NO: 110981 - DNA, 60 bp, Artificial
  Synthetic oligonucleotide
aagtcatggcgatttgacgccgatctatgaacggctgaccaatctagaagcgtctacgga

SEQ ID NO: 110982 - DNA, 60 bp, Artificial
  Synthetic oligonucleotide
tgcacgcggcgatactatcttcacttcaaactacggttgacggaaactccactgccatct

SEQ ID NO: 110983 - DNA, 60 bp, Artificial
  Synthetic oligonucleotide
cgcacgcggcgatactatcttcacttcaggctacggttgacggaaactccactgccatct

SEQ ID NO: 110984 - DNA, 61 bp, Artificial
  Synthetic oligonucleotide
ctgtacaaagagcgttacaacttttatcaaatagaacagctcaaatagcagatttaaccag

SEQ ID NO: 110985 - DNA, 60 bp, Artificial
  Synthetic oligonucleotide
agtgaacttattttcaacaatgttagtggctctatcatctcagcctttcgctacatatcc

SEQ ID NO: 110986 - DNA, 60 bp, Artificial
  Synthetic oligonucleotide
gctcagttttatctaccagaacaatagctgtagaattcataacctcaaactatatgtcac

SEQ ID NO: 110987 - DNA, 60 bp, Artificial
  Synthetic oligonucleotide
ataattggctcagttttatctaccagaacaatagctgtagaattcataacctcaaactat

SEQ ID NO: 110988 - DNA, 60 bp, Artificial
  Synthetic oligonucleotide
tgaggactccattcgaattagctgaaatgcaagtagctaatagatctattagacaatggt

SEQ ID NO: 110989 - DNA, 50 bp, Artificial
  Synthetic oligonucleotide
ctcaaactatatgtcactagcatcatgtatgtatttaatgactattatgc

SEQ ID NO: 110990 - DNA, 60 bp, Artificial
  Synthetic oligonucleotide
catcattgtaatacacttcaatttggtagacagataacggaagggataattcatctacga

SEQ ID NO: 110991 - DNA, 60 bp, Artificial
  Synthetic oligonucleotide
agacaatggttacatcattgtaatacacttcaatttggtagacagataacggaagggata

SEQ ID NO: 110992 - DNA, 60 bp, Artificial
  Synthetic oligonucleotide
tagtgaacttattttcaacaatgttagtggctctatcatctcagcctttcgctacatatc

SEQ ID NO: 110993 - DNA, 60 bp, Artificial
  Synthetic oligonucleotide
ggaagggataattcatctacgatttactaatgatatcatgacaggcaggatagtgaactt

SEQ ID NO: 110994 - DNA, 60 bp, Artificial
  Synthetic oligonucleotide
atgcaagaaacataaatgattgtatagtatcatcttgtgacgacctcaaactttgtggct

SEQ ID NO: 110995 - DNA, 60 bp, Artificial
  Synthetic oligonucleotide
tatgcaagaaacataaatgattgtatagtatcatcttgtgacgacctcaaactttgtggc

SEQ ID NO: 110996 - DNA, 60 bp, Artificial
  Synthetic oligonucleotide
cactacagttctgccgataaatgctgtctcttatgacggtgcaagaattatgcaagaaac

SEQ ID NO: 110997 - DNA, 60 bp, Artificial
  Synthetic oligonucleotide
accactacagttctgccgataaatgctgtctcttatgacggtgcaagaattatgcaagaa

SEQ ID NO: 110998 - DNA, 60 bp, Artificial
  Synthetic oligonucleotide
cagcaatttgatatacaacattcagtatcaatgctagagtcaaacttattttttgtggta

SEQ ID NO: 110999 - DNA, 60 bp, Artificial
  Synthetic oligonucleotide
ggacaccaacaacaactacagcagtatataaagctagatctcagcaatttgatatacaac

SEQ ID NO: 111000 - DNA, 60 bp, Artificial
  Synthetic oligonucleotide
ataataaatggacaccaacaacaactacagcagtatataaagctagatctcagcaatttg

SEQ ID NO: 111001 - DNA, 55 bp, Artificial
  Synthetic oligonucleotide
cgtttcagctagaagatttatacctgatttaactgaactggtggatgctgaaaag

SEQ ID NO: 111002 - DNA, 60 bp, Artificial
  Synthetic oligonucleotide
tgcacatttacaactagaggctattacggtacaggttgaatcacaatttttagcaggaat

SEQ ID NO: 111003 - DNA, 60 bp, Artificial
  Synthetic oligonucleotide
gatttgttccaccatacttaacacaggataggattggattacatgatggatttgaatcaa

SEQ ID NO: 111004 - DNA, 60 bp, Artificial
  Synthetic oligonucleotide
ttacatgatggatttgaatcaatatgggattcaaaaactcatgctgattacgtttcagct

SEQ ID NO: 111005 - DNA, 53 bp, Artificial
  Synthetic oligonucleotide
attgcagaattgattccaactcaattatatcatgatccaaattacgtttttaa

SEQ ID NO: 111006 - DNA, 60 bp, Artificial
  Synthetic oligonucleotide
taacaaattcaagatttgttccaccatacttaacacaggataggattggattacatgatg

SEQ ID NO: 111007 - DNA, 52 bp, Artificial
  Synthetic oligonucleotide
actgatagcctcattgttaaaaagttaactgaaatccaggaatcaagtgcta

SEQ ID NO: 111008 - DNA, 55 bp, Artificial
  Synthetic oligonucleotide
ttactccagttaaaagttatttatatgatataaatggtgagaaaaaattatcgac

SEQ ID NO: 111009 - DNA, 60 bp, Artificial
  Synthetic oligonucleotide
ggcttaaaaagatcagttgaggacaaatcgttcaagatgataagcagaaacaggcgcaga

SEQ ID NO: 111010 - DNA, 60 bp, Artificial
  Synthetic oligonucleotide
aaagatcagttgaggacaaatcgttcaagatgataagcagaaacaggcgcagaaataatc

SEQ ID NO: 111011 - DNA, 58 bp, Artificial
  Synthetic oligonucleotide
gatgctcctaagataccaccagatcagatgtatagattaagaaaccgattaagaaata

SEQ ID NO: 111012 - DNA, 60 bp, Artificial
  Synthetic oligonucleotide
gagatttaatcgaaaaaacatcagaacgtatatgccagggtgtgctgttatcttatacac

SEQ ID NO: 111013 - DNA, 60 bp, Artificial
  Synthetic oligonucleotide
aaacatcagaacgtatatgccagggtgtgctgttatcttatacaccaatgcctttaactt

SEQ ID NO: 111014 - DNA, 60 bp, Artificial
  Synthetic oligonucleotide
tcttatacaccaatgcctttaacttacgttgaagatgtcgggttaacaaatgtaattaat

SEQ ID NO: 111015 - DNA, 60 bp, Artificial
  Synthetic oligonucleotide
ctgtacaaagagcgttacaacttttatcaaatagaacagctcaaatagcagatttaacca

SEQ ID NO: 111016 - DNA, 60 bp, Artificial
  Synthetic oligonucleotide
ccacttctctaacttctttaatgatgttaatctctaataagacagttattccggaaccat

SEQ ID NO: 111017 - DNA, 60 bp, Artificial
  Synthetic oligonucleotide
ctctaacttctttaatgatgttaatctctaataagacagttattccggaaccatcgtctc

SEQ ID NO: 111018 - DNA, 60 bp, Artificial
  Synthetic oligonucleotide
ccggaaccatcgtctcttttttcatatttctctagtaacattaattttcttacaaattat

SEQ ID NO: 111019 - DNA, 60 bp, Artificial
  Synthetic oligonucleotide
caccaatgcctttaacttacgttgaagatgtcgggttaacaaatgtaattaatgacacta

SEQ ID NO: 111020 - DNA, 56 bp, Artificial
  Synthetic oligonucleotide
attgatgttttatctaaagtggacaccacagtgttcgcaagcattgtaaaagatag

SEQ ID NO: 111021 - DNA, 60 bp, Artificial
  Synthetic oligonucleotide
ctgctcggcgagtgaagcgcgactcatacgcaggagtggttaagcgtgggtatacacgct

SEQ ID NO: 111022 - DNA, 60 bp, Artificial
  Synthetic oligonucleotide
ttgcagtcacttaaaaaggaattgtttatttaatgggatgtgtgtcaaacaaaattttga

SEQ ID NO: 111023 - DNA, 60 bp, Artificial
  Synthetic oligonucleotide
gacagttttgttcacattgcacaaagcgtcaattccaacaatgaagatagcattgaagac

SEQ ID NO: 111024 - DNA, 60 bp, Artificial
  Synthetic oligonucleotide
catctgtcctgacagttttgttcacattgcacaaagcgtcaattccaacaatgaagatag

SEQ ID NO: 111025 - DNA, 60 bp, Artificial
  Synthetic oligonucleotide
ggaagcggcggagttctttacagtaagctccatcagacctgatggttggctaagaagcca

SEQ ID NO: 111026 - DNA, 60 bp, Artificial
  Synthetic oligonucleotide
agaggatccaggaatggcatattttccttatattgcatctgtcctgacagttttgttcac

SEQ ID NO: 111027 - DNA, 60 bp, Artificial
  Synthetic oligonucleotide
attacacacaatactagaggatccaggaatggcatattttccttatattgcatctgtcct

SEQ ID NO: 111028 - DNA, 60 bp, Artificial
  Synthetic oligonucleotide
tgttaaagaaatgagacgtcaattagagatgattgataaactaactacacgtgaaattga

SEQ ID NO: 111029 - DNA, 61 bp, Artificial
  Synthetic oligonucleotide
gaaatgagacgtcaattagagatgattgataaactaactacacgtgaaattgagcaagttg

SEQ ID NO: 111030 - DNA, 60 bp, Artificial
  Synthetic oligonucleotide
gtgaaattgagcaagttgaattacttaaacgcatctacgataaattgataatgctatcga

SEQ ID NO: 111031 - DNA, 60 bp, Artificial
  Synthetic oligonucleotide
gagcaagttgaattacttaaacgcatctacgataaattgataatgctatcgattggcgag

SEQ ID NO: 111032 - DNA, 60 bp, Artificial
  Synthetic oligonucleotide
atgctatcgattggcgagatagacatgacaaaagaaattaatcaaaagaatgtgagaacg

SEQ ID NO: 111033 - DNA, 60 bp, Artificial
  Synthetic oligonucleotide
gcgagatagacatgacaaaagaaattaatcaaaagaatgtgagaacgctagaagagtggg

SEQ ID NO: 111034 - DNA, 60 bp, Artificial
  Synthetic oligonucleotide
tgtgagaacgctagaagagtgggagagtggaaaaaatccttatgaaccaaaagaagtgac

SEQ ID NO: 111035 - DNA, 60 bp, Artificial
  Synthetic oligonucleotide
aagaagtgactgcagcaatgtaagaggttgagctgccgtcgactgtcttcggaagcggcg

SEQ ID NO: 111036 - DNA, 60 bp, Artificial
  Synthetic oligonucleotide
tcttttttcacacaaccaaagtttcgcaccaattacccgattggcgtatgaatcaagagt

SEQ ID NO: 111037 - DNA, 60 bp, Artificial
  Synthetic oligonucleotide
cacacaaccaaagtttcgcaccaattacccgattggcgtatgaatcaagagtgtccgcga

SEQ ID NO: 111038 - DNA, 60 bp, Artificial
  Synthetic oligonucleotide
accaatcaaagagggtcaaattgtgaatccaacatttatatcgagatatcgccaaattgc

SEQ ID NO: 111039 - DNA, 60 bp, Artificial
  Synthetic oligonucleotide
cgtactaaaagcctatcagcgggagtgaagactgcagtgagtaagctgagctcatctgag

SEQ ID NO: 111040 - DNA, 60 bp, Artificial
  Synthetic oligonucleotide
gcgtactaaaagtctctcagcgggagtgaagactgcagtgagtaagctgagctcttctga

SEQ ID NO: 111041 - DNA, 60 bp, Artificial
  Synthetic oligonucleotide
tctgcgtactaaaagcctatcagcgggagtgaagactgcagtgagtaagctgagctcatc

SEQ ID NO: 111042 - DNA, 60 bp, Artificial
  Synthetic oligonucleotide
ctgcgtactaaaagtctatcagcgggagtgaagactgcagtgagtaagctgagctcatct

SEQ ID NO: 111043 - DNA, 60 bp, Artificial
  Synthetic oligonucleotide
gacgatgatgctggaccagatgaatattccccaaattctgtaccaattcaaggtcagctc

SEQ ID NO: 111044 - DNA, 60 bp, Artificial
  Synthetic oligonucleotide
tagtctgcgtactaaaagtctctcagcgggagtgaagactgcagtgagtaagctgagctc

SEQ ID NO: 111045 - DNA, 60 bp, Artificial
  Synthetic oligonucleotide
accaacttcaccaaagctgagatggcacttgaattcaatcgtgagttccttgacaagatg

SEQ ID NO: 111046 - DNA, 60 bp, Artificial
  Synthetic oligonucleotide
agattgatgatgatgctggaccagatgaatattcccccaattctgtaccaattcaaggtc

SEQ ID NO: 111047 - DNA, 60 bp, Artificial
  Synthetic oligonucleotide
attaccaacttcactaaagctgagatggcgcttgaattcaatcgtgagttccttgacaag

SEQ ID NO: 111048 - DNA, 60 bp, Artificial
  Synthetic oligonucleotide
agttcgaatcacaacgatatatggaaggttaagatttgcacaaaaatgactttgcgacga

SEQ ID NO: 111049 - DNA, 60 bp, Artificial
  Synthetic oligonucleotide
cactagctacgatgaacaacagtacagtatattatatcaaccaattagcacccataaagc

SEQ ID NO: 111050 - DNA, 60 bp, Artificial
  Synthetic oligonucleotide
tgagaaagaatctgaacagtatttaccattctcatctggaggttcaggtattaaagctgg

SEQ ID NO: 111051 - DNA, 56 bp, Artificial
  Synthetic oligonucleotide
ctggaggttcaggtattaaagctgggacattaagtagaagtcgtagcacagtgggg

SEQ ID NO: 111052 - DNA, 60 bp, Artificial
  Synthetic oligonucleotide
taagataggtggagggacgacttatacgttgcctaacacaaaaatcagttgtactaacgt

SEQ ID NO: 111053 - DNA, 60 bp, Artificial
  Synthetic oligonucleotide
gtactaacgtttctgggtataaaaataacactattggtagatcatgggcttgtgctgaat

SEQ ID NO: 111054 - DNA, 50 bp, Artificial
  Synthetic oligonucleotide
tgtgctgaattatatattgcattactccgtaattatgatgcaggtcataa

SEQ ID NO: 111055 - DNA, 60 bp, Artificial
  Synthetic oligonucleotide
aaatcgtgaactaattgagaaagaatctgaacagtatttaccattctcatctggaggttc

SEQ ID NO: 111056 - DNA, 60 bp, Artificial
  Synthetic oligonucleotide
aaggacgtagctttagatcagtgcatgtcaattgggcttcaaatgatgttttagagcgat

SEQ ID NO: 111057 - DNA, 60 bp, Artificial
  Synthetic oligonucleotide
ggacgtagctttagatcagtgcatgtcaattgggcttcaaatgatgttttagagcgatca

SEQ ID NO: 111058 - DNA, 60 bp, Artificial
  Synthetic oligonucleotide
ggttattactatatctcacggtttggatcgccttctggtgcttatactaataagataggt

SEQ ID NO: 111059 - DNA, 60 bp, Artificial
  Synthetic oligonucleotide
ctcacggtttggatcgccttctggtgcttatactaataagataggtggagggacgactta

SEQ ID NO: 111060 - DNA, 60 bp, Artificial
  Synthetic oligonucleotide
cagtcgacagattacgtattacacatgagagatttatcaattgttggaaaggacgtagct

SEQ ID NO: 111061 - DNA, 60 bp, Artificial
  Synthetic oligonucleotide
tacagtcgacagattacgtattacacatgagagatttatcaattgttggaaaggacgtag

SEQ ID NO: 111062 - DNA, 60 bp, Artificial
  Synthetic oligonucleotide
atgtcgccgctttgagtttaaacatgctacgtatatatgatacttacaaaagtaaatttg

SEQ ID NO: 111063 - DNA, 60 bp, Artificial
  Synthetic oligonucleotide
gcgtcgatttgaaccaaatcttgtgggaagtgttcatgggagatggtgatgtcgccgctt

SEQ ID NO: 111064 - DNA, 60 bp, Artificial
  Synthetic oligonucleotide
atgaacatttttggaattatcggtaaagctttatttaaagatcagtatattacagtcgac

SEQ ID NO: 111065 - DNA, 60 bp, Artificial
  Synthetic oligonucleotide
agtaaatttgcaatagtaaatagatttggtatttacgaatatttacctgaaggtcatgac

SEQ ID NO: 111066 - DNA, 60 bp, Artificial
  Synthetic oligonucleotide
gacccccctgtattcattgacgagcaatacggatgtgatcattttactcaaagcgtcgat

SEQ ID NO: 111067 - DNA, 60 bp, Artificial
  Synthetic oligonucleotide
cgatgaacaacagtacagtatattatatcaaccaattagcacccataaagcaccggtacg

SEQ ID NO: 111068 - DNA, 60 bp, Artificial
  Synthetic oligonucleotide
aagcgtcgatttgaaccaaatcttgtgggaagtgttcatgggagatggtgatgtcgccgc

SEQ ID NO: 111069 - DNA, 60 bp, Artificial
  Synthetic oligonucleotide
cccctgtattcattgacgagcaatacggatgtgatcattttactcaaagcgtcgatttga

SEQ ID NO: 111070 - DNA, 50 bp, Artificial
  Synthetic oligonucleotide
cggctcttaatggcttctatatataatcgctacgttgtgatactgttgtc

SEQ ID NO: 111071 - DNA, 60 bp, Artificial
  Synthetic oligonucleotide
ggggctactcctgacttacgtaagattttaaggcctagggaccaaggacgtattgtaaaa

SEQ ID NO: 111072 - DNA, 60 bp, Artificial
  Synthetic oligonucleotide
gtgggggctactcctgacttacgtaagattttaaggcctagggaccaaggacgtattgta

SEQ ID NO: 111073 - DNA, 60 bp, Artificial
  Synthetic oligonucleotide
ctggaggttcaggtattaaagctgggacattaagtagaagtcgtagcacagtgggggcta

SEQ ID NO: 111074 - DNA, 60 bp, Artificial
  Synthetic oligonucleotide
gaaaggtgtggaaagatacgggtgttgccggggaatagaagttagggtcgatccttcctt

SEQ ID NO: 111075 - DNA, 60 bp, Artificial
  Synthetic oligonucleotide
atggttaaatgaaaggtgtggaaagatacgggtgttgccggggaatagaagttagggtcg

SEQ ID NO: 111076 - DNA, 60 bp, Artificial
  Synthetic oligonucleotide
gcgtatgaatcgcacgggtgccttgctaccaaagcctaatggttaaatgaaaggtgtgga

SEQ ID NO: 111077 - DNA, 60 bp, Artificial
  Synthetic oligonucleotide
gtactcctaactgcgtatgaatcgcacgggtgccttgctaccaaagcctaatggttaaat

SEQ ID NO: 111078 - DNA, 60 bp, Artificial
  Synthetic oligonucleotide
ccgtcgcgtttgaatctggtgtccataaggactttgtgtacaatgtactcctaactgcgt

SEQ ID NO: 111079 - DNA, 60 bp, Artificial
  Synthetic oligonucleotide
gaacatccgtcgcgtttgaatctggtgtccataaggactttgtgtacaatgtactcctaa

SEQ ID NO: 111080 - DNA, 60 bp, Artificial
  Synthetic oligonucleotide
caagtcgtgctttcttcgtacgttcttcaacgtattagtgcaactggaacatccgtcgcg

SEQ ID NO: 111081 - DNA, 60 bp, Artificial
  Synthetic oligonucleotide
tacccaagtcgtgctttcttcgtacgttcttcaacgtattagtgcaactggaacatccgt

SEQ ID NO: 111082 - DNA, 60 bp, Artificial
  Synthetic oligonucleotide
ttggctgcaacaaaagttatcgcagtgtcagggctgacaacagactctcgtacccaagtc

SEQ ID NO: 111083 - DNA, 60 bp, Artificial
  Synthetic oligonucleotide
gttatcgcagtgtcagggctgacaacagactctcgtacccaagtcgtgctttcttcgtac

SEQ ID NO: 111084 - DNA, 60 bp, Artificial
  Synthetic oligonucleotide
cctcctggagtggcttcggcaactatcattccggaaggctcggtgaatttcaacagtggg

SEQ ID NO: 111085 - DNA, 60 bp, Artificial
  Synthetic oligonucleotide
cctggagtggcttcggcaactatcattccggaaggctcggtgaatttcaacagtgggctc

SEQ ID NO: 111086 - DNA, 60 bp, Artificial
  Synthetic oligonucleotide
ttgtaatcgcatcagcaatcgccgttgcttccaactctcctcaaaacgcgcctcctggag

SEQ ID NO: 111087 - DNA, 60 bp, Artificial
  Synthetic oligonucleotide
gcaatcgccgttgcttccaactctcctcaaaacgcgcctcctggagtggcttcggcaact

SEQ ID NO: 111088 - DNA, 60 bp, Artificial
  Synthetic oligonucleotide
ctctaccttgggtgaagtctctggcaattttagcactgatgcaggagacgttgtaatcgc

SEQ ID NO: 111089 - DNA, 60 bp, Artificial
  Synthetic oligonucleotide
agtctctggcaattttagcactgatgcaggagacgttgtaatcgcatcagcaatcgccgt

SEQ ID NO: 111090 - DNA, 60 bp, Artificial
  Synthetic oligonucleotide
gcaccactgcgtttttcgtacatcaaactacgaacggtatcacatctagtgacaacgctc

SEQ ID NO: 111091 - DNA, 60 bp, Artificial
  Synthetic oligonucleotide
tcgtacatcaaactacgaacggtatcacatctagtgacaacgctcatacggctattatca

SEQ ID NO: 111092 - DNA, 60 bp, Artificial
  Synthetic oligonucleotide
tatgcccacacatgtgcttcgtaaatttgaggacaccgtcgaagttggaagcaccactgc

SEQ ID NO: 111093 - DNA, 53 bp, Artificial
  Synthetic oligonucleotide
tatgcccacacatgtgcttcgtaaatttgaggacaccgtcgaagttggaagca

SEQ ID NO: 111094 - DNA, 64 bp, Artificial
  Synthetic oligonucleotide
cgatagtataacatctatcgcaaaactcctttatatcaatttcatacgatcaggatgaatggtc

SEQ ID NO: 111095 - DNA, 60 bp, Artificial
  Synthetic oligonucleotide
gaagaactttcgatagtataacatctatcgcaaaactcctttatatcaatttcatacgat

SEQ ID NO: 111096 - DNA, 60 bp, Artificial
  Synthetic oligonucleotide
ggatgaatggtctttctctttccgcgacaaaagtggagggcaacctatacgccacgcttg

SEQ ID NO: 111097 - DNA, 60 bp, Artificial
  Synthetic oligonucleotide
ttcatacgatcaggatgaatggtctttctctttccgcgacaaaagtggagggcaacctat

SEQ ID NO: 111098 - DNA, 60 bp, Artificial
  Synthetic oligonucleotide
gccacgcttgacagttttctgggcaaggcgccgcgtgatatgcccacacatgtgcttcgt

SEQ ID NO: 111099 - DNA, 60 bp, Artificial
  Synthetic oligonucleotide
ggcaacctatacgccacgcttgacagttttctgggcaaggcgccgcgtgatatgcccaca

SEQ ID NO: 111100 - DNA, 60 bp, Artificial
  Synthetic oligonucleotide
gctattggcgcaatggcgaacgtttggggagtgagacttgcagattcgctgtcgtcaccc

SEQ ID NO: 111101 - DNA, 60 bp, Artificial
  Synthetic oligonucleotide
gctattggcgcaatggcgaacgtttggggagtgagacttgcagactctttatcatcaccc

SEQ ID NO: 111102 - DNA, 60 bp, Artificial
  Synthetic oligonucleotide
gctattggcgcaatggcgaacgtttggggagtgagacttgcagattccttatcgtcaccc

SEQ ID NO: 111103 - DNA, 60 bp, Artificial
  Synthetic oligonucleotide
gttggacacattgaagatacatctagcttctttatgcttaggactcgcagattcgatcgt

SEQ ID NO: 111104 - DNA, 60 bp, Artificial
  Synthetic oligonucleotide
taaactctcggtcggaactagtgttcccaaactactttgacaaatggataaactctccta

SEQ ID NO: 111105 - DNA, 60 bp, Artificial
  Synthetic oligonucleotide
ctctcggtcggaactagtgttcccaaactactttgacaaatggataaactctcctatgtt

SEQ ID NO: 111106 - DNA, 60 bp, Artificial
  Synthetic oligonucleotide
gtacttcaaggcgctgcttatagtctgaaatcaaactatgatctaatcgcgaactcggag

SEQ ID NO: 111107 - DNA, 60 bp, Artificial
  Synthetic oligonucleotide
gcgtgaacttattcgattcagatttagccgttggagatcaggttattcactggcgatatg

SEQ ID NO: 111108 - DNA, 60 bp, Artificial
  Synthetic oligonucleotide
catcgttagcgcgcttaactataaaccaacgaggaatgatggtatagtggtgccgaggct

SEQ ID NO: 111109 - DNA, 60 bp, Artificial
  Synthetic oligonucleotide
ttccacgtacttcaaggcgctgcttatagtctgaaatcaaactatgatctaatcgcgaac

SEQ ID NO: 111110 - DNA, 60 bp, Artificial
  Synthetic oligonucleotide
gttaaaagagtgtcccacaatggaggagtttgtcattcctgtgttttctgagagggagat

SEQ ID NO: 111111 - DNA, 60 bp, Artificial
  Synthetic oligonucleotide
ctaaactagacatcgttagcgcgcttaactataaaccaacgaggaatgatggtatagtgg

SEQ ID NO: 111112 - DNA, 60 bp, Artificial
  Synthetic oligonucleotide
tacgttattcatgggctttatgctgtgctttctcacgccagaggacaatggttggtgaga

SEQ ID NO: 111113 - DNA, 60 bp, Artificial
  Synthetic oligonucleotide
cgttcatgacggattacagtggcaacgatggatacgttattcatgggctttatgctgtgc

SEQ ID NO: 111114 - DNA, 60 bp, Artificial
  Synthetic oligonucleotide
cgtgcatgacggattacaatggcagcggtggatacgttattcatgggctttatgctgtgc

SEQ ID NO: 111115 - DNA, 60 bp, Artificial
  Synthetic oligonucleotide
caccactttcacaatcgcaggtccgcaatatgatggagtacgtatcacaacgacttggtc

SEQ ID NO: 111116 - DNA, 60 bp, Artificial
  Synthetic oligonucleotide
caaaagatatgccagctacgagtgaaactcaactattaatgaaggcggtaatgtcacgtg

SEQ ID NO: 111117 - DNA, 60 bp, Artificial
  Synthetic oligonucleotide
gttggcaaattgtctccgtcaattactaatcattggtctgtgatgtatgcaagcatggct

SEQ ID NO: 111118 - DNA, 60 bp, Artificial
  Synthetic oligonucleotide
gatggcgcgaggcgaattcaaatatcaattgggagtgataaatgaggataaggatgaggt

SEQ ID NO: 111119 - DNA, 60 bp, Artificial
  Synthetic oligonucleotide
cgcaagtaccaaattaccgtggttagtgagagatctagcggaaatgatggcgcgaggcga

SEQ ID NO: 111120 - DNA, 59 bp, Artificial
  Synthetic oligonucleotide
ttttgctaagtggtatccagcggaatatgagatatttattaatacgtatggcgtgacat

SEQ ID NO: 111121 - DNA, 60 bp, Artificial
  Synthetic oligonucleotide
gcgcagcctaaagcagaggttaatggtgctatatcgccaagcatttctgcacaaatacag

SEQ ID NO: 111122 - DNA, 60 bp, Artificial
  Synthetic oligonucleotide
catgttatggaagatacgcgcattgcgatagcgcagcctaaagcggaggtcaatggtgcg

SEQ ID NO: 111123 - DNA, 60 bp, Artificial
  Synthetic oligonucleotide
ccagataataccgctgaatgttgaagctatagggccatcatatgaagacatacttaatcc

SEQ ID NO: 111124 - DNA, 60 bp, Artificial
  Synthetic oligonucleotide
cgcgaagtggatagtggacgttgaggatgttaagtatattagccagataataccgctgaa

SEQ ID NO: 111125 - DNA, 60 bp, Artificial
  Synthetic oligonucleotide
ccaggatggtttgatgcaaccagcacgtgatccgtacgaattacctgaagttggtcgaaa

SEQ ID NO: 111126 - DNA, 60 bp, Artificial
  Synthetic oligonucleotide
gaagaatgaaacctgggagcaagagcagtacgttaccaatgagttcccagcattatttgg

SEQ ID NO: 111127 - DNA, 60 bp, Artificial
  Synthetic oligonucleotide
gccagagcattatgacgccatattgggcggaattaaagtcgcgaagtggatagtggacgt

SEQ ID NO: 111128 - DNA, 60 bp, Artificial
  Synthetic oligonucleotide
cgtgatagactcgttagctggttcaatcacatggatagcagagttggcaaattgtctccg

SEQ ID NO: 111129 - DNA, 60 bp, Artificial
  Synthetic oligonucleotide
agacccaaatctccgtttgctgaacagctatttgccaccactttcacaatcgcaggtccg

SEQ ID NO: 111130 - DNA, 60 bp, Artificial
  Synthetic oligonucleotide
ccagctggaacagtccaagatagcgcagaatctgaagcgaaacttgttgttgcggcagct

SEQ ID NO: 111131 - DNA, 60 bp, Artificial
  Synthetic oligonucleotide
ccgctatggtaacgaacatcctcgcgagaaatgcgctgattattttagacaattttgaca

SEQ ID NO: 111132 - DNA, 60 bp, Artificial
  Synthetic oligonucleotide
ctgagcagatagctgaatatctcaatggtccacttcgtgtgattcgcgtcccgcctggta

SEQ ID NO: 111133 - DNA, 60 bp, Artificial
  Synthetic oligonucleotide
ctgctggttgtttccaaacaccttcgagtcgattaaaggttctgtgcagaacgtgttgtt

SEQ ID NO: 111134 - DNA, 60 bp, Artificial
  Synthetic oligonucleotide
tggtgattacagtagatacaagccacttaattatgcagtagtcggagtcggtggtcatcc

SEQ ID NO: 111135 - DNA, 60 bp, Artificial
  Synthetic oligonucleotide
gactttggaacgattacgagcataatagtaatctatgagcttatcatgttctgctggttg

SEQ ID NO: 111136 - DNA, 60 bp, Artificial
  Synthetic oligonucleotide
gaaaatgagtaatactataacgtatgcgacagagagtagcggcgatatccaatcaatatc

SEQ ID NO: 111137 - DNA, 60 bp, Artificial
  Synthetic oligonucleotide
ctagacttgaatgcgattagaaagcaaaactatgcgccttttgtttatacagattcgccg

SEQ ID NO: 111138 - DNA, 60 bp, Artificial
  Synthetic oligonucleotide
cgcaggtccgcaatatgatggagtacgtatcacaacgacttggtcagtccacgggtgact

SEQ ID NO: 111139 - DNA, 60 bp, Artificial
  Synthetic oligonucleotide
cgatgagacgctggtatggcagtacatggcgcgagaaatatctccaaacttaagtcttaa

SEQ ID NO: 111140 - DNA, 65 bp, Artificial
  Synthetic oligonucleotide
cacatgctaaatttcactgagaacttcaatggtgattatagtagatacaagccacttaattatgc

SEQ ID NO: 111141 - DNA, 60 bp, Artificial
  Synthetic oligonucleotide
cctggagcgcaatctcctcatccatgtgagatggacacgggaactctactgaatggcatt

SEQ ID NO: 111142 - DNA, 60 bp, Artificial
  Synthetic oligonucleotide
atgctgataacacacgcgcgctaaccgatccaatcacagacgcaatagtatctgagacct

SEQ ID NO: 111143 - DNA, 60 bp, Artificial
  Synthetic oligonucleotide
gtcgacagtgtcggttccaaaccatgtttatgagatgtttatgggtaagatcatgacatt

SEQ ID NO: 111144 - DNA, 60 bp, Artificial
  Synthetic oligonucleotide
ttacaatcaggagttgtttgaaaaggaatttggtttgtcttttaagcacgatgtgccagt

SEQ ID NO: 111145 - DNA, 60 bp, Artificial
  Synthetic oligonucleotide
gaggtcgatgcgagctttggtcaggactgagaatggtacgaatatacctggagcgcaatc

SEQ ID NO: 111146 - DNA, 60 bp, Artificial
  Synthetic oligonucleotide
tagcgcagttcagtgaaaggccaaaagtccatctaattataaaggataggaggaaagttt

SEQ ID NO: 111147 - DNA, 60 bp, Artificial
  Synthetic oligonucleotide
catagtcatctagcgttattttagttttatgttaggataggttggattggtccgattctc

SEQ ID NO: 111148 - DNA, 60 bp, Artificial
  Synthetic oligonucleotide
gcgacgactgaatttcgataaagctgtccagcggttcgatcgcgctattgaccctgatgc

SEQ ID NO: 111149 - DNA, 60 bp, Artificial
  Synthetic oligonucleotide
ttgaagcatttaggcgaaatgaagagggatagccgttttatagatatgcaattgcgacga

SEQ ID NO: 111150 - DNA, 60 bp, Artificial
  Synthetic oligonucleotide
ttgaccctgatgcattccaggatagtgaatttttcttaactgatggacagtatcgtaggc

SEQ ID NO: 111151 - DNA, 60 bp, Artificial
  Synthetic oligonucleotide
tggcgtcagaatattagagaaggagatgatagcatttgagccagatgaaattccgacgat

SEQ ID NO: 111152 - DNA, 60 bp, Artificial
  Synthetic oligonucleotide
agtgaaactcaactattaatgaaggcggtaatgtcacgtgttgctgaagccgatgagacg

SEQ ID NO: 111153 - DNA, 60 bp, Artificial
  Synthetic oligonucleotide
gcgtgcacgaagatatagtgtttccgagtggagttgaaaattacgagagtcacctagctg

SEQ ID NO: 111154 - DNA, 60 bp, Artificial
  Synthetic oligonucleotide
tcattactattcgcgagttccaagaaagaatgaaagagagattggtggttcatgaccttc

SEQ ID NO: 111155 - DNA, 60 bp, Artificial
  Synthetic oligonucleotide
caagccacttaattatgcagtagtcggagtcggcggtcatccagttccattgcgcgaagg

SEQ ID NO: 111156 - DNA, 58 bp, Artificial
  Synthetic oligonucleotide
ttccattgcgcgaaggaatatttgagtacagtgatggaattaattacgtaaacactcg

SEQ ID NO: 111157 - DNA, 60 bp, Artificial
  Synthetic oligonucleotide
ctggttagctgtacacaagtatatgttactagacagggtattcaaaaagctacgcgtgat

SEQ ID NO: 111158 - DNA, 60 bp, Artificial
  Synthetic oligonucleotide
atagcatcgtaaacgcctttgagtccgcacacagaaatatggtgcaagatctggttagct

SEQ ID NO: 111159 - DNA, 60 bp, Artificial
  Synthetic oligonucleotide
gagattgatactggagattaatacacgatacgttgaacgtagcaacgtgatcagattgac

SEQ ID NO: 111160 - DNA, 60 bp, Artificial
  Synthetic oligonucleotide
tccaggtcattacataccgcacaaacagagcgcgcatagcatcgtaaacgcctttgagtc

SEQ ID NO: 111161 - DNA, 60 bp, Artificial
  Synthetic oligonucleotide
ggtggttcatgaccttcccaatcctttagaagttgcggctaatacaacagctgagcagat

SEQ ID NO: 111162 - DNA, 60 bp, Artificial
  Synthetic oligonucleotide
tcgattgtcaagaaatccaggtcattacataccgcacaaacagagcgcgcatagcatcgt

SEQ ID NO: 111163 - DNA, 60 bp, Artificial
  Synthetic oligonucleotide
cctcagggattcatgcgcctagatacgcaagctgtcgccgctaaaatgcctcgattgtca

SEQ ID NO: 111164 - DNA, 60 bp, Artificial
  Synthetic oligonucleotide
ggcggtaatgtcacgtgttgctgaagccgatgagacgctggtatggcagtacatggcgcg

SEQ ID NO: 111165 - DNA, 60 bp, Artificial
  Synthetic oligonucleotide
atcgggagaatcaaataagccgatatcaatgggatcatcatgtactgtaaaagtgtgtcc

SEQ ID NO: 111166 - DNA, 60 bp, Artificial
  Synthetic oligonucleotide
cgggagaatcaaataagccgatatcaatgggatcatcatgtactgtaaaagtgtgtccac

SEQ ID NO: 111167 - DNA, 60 bp, Artificial
  Synthetic oligonucleotide
ggggaatacaatggatggacgtatcagaaggaactgtgatgaacgaggctgtcaacgctg

SEQ ID NO: 111168 - DNA, 60 bp, Artificial
  Synthetic oligonucleotide
tagagctgttgcgcaaaacgcctacatgtgagggcagttatggcacggcataacgctcac

SEQ ID NO: 111169 - DNA, 60 bp, Artificial
  Synthetic oligonucleotide
ttgcacaaaacgcctacatgtgagggcagttatggcacggcataacgctcacatgcgccc

SEQ ID NO: 111170 - DNA, 60 bp, Artificial
  Synthetic oligonucleotide
tagagctgttgcacaaaacgcctacatgtgagggcagttatggcacggcataacgctcac

SEQ ID NO: 111171 - DNA, 60 bp, Artificial
  Synthetic oligonucleotide
aacgcctatgtgtgagggcagttatggcacggcataacgctcacatgcgcccgtgtcgct

SEQ ID NO: 111172 - DNA, 50 bp, Artificial
  Synthetic oligonucleotide
tgtgagggcagttatggcacggcataacgctcacatgcgcccgtgtcgct

SEQ ID NO: 111173 - DNA, 53 bp, Artificial
  Synthetic oligonucleotide
ttgcgcaaaacgcctacatgtgagggcagttatggcacggcataacgctcaca

SEQ ID NO: 111174 - DNA, 60 bp, Artificial
  Synthetic oligonucleotide
ttgcacaaaacgcctatgtgtgagggcagttatggcacggcataacgctcacatgcgccc

SEQ ID NO: 111175 - DNA, 60 bp, Artificial
  Synthetic oligonucleotide
gaaactatataaacgtggattttcatatagagtaaacgattctttttctccaggtaacga

SEQ ID NO: 111176 - DNA, 60 bp, Artificial
  Synthetic oligonucleotide
tacttcaatgggattgcgaaatcaggtgcagaggcggccacgatccattatgccattaaa

SEQ ID NO: 111177 - DNA, 60 bp, Artificial
  Synthetic oligonucleotide
cagctaggggtggatctggcgcagcactccgcgaatctttgtatgcgatcaatgtgtcgt

SEQ ID NO: 111178 - DNA, 60 bp, Artificial
  Synthetic oligonucleotide
cagctaggggtggatctggcgcagcactccgagagtctttgtatgcgattaacgtgtcgt

SEQ ID NO: 111179 - DNA, 60 bp, Artificial
  Synthetic oligonucleotide
cagctaggggtggatctggcgcagcactccgcgaatctttgtatgcaatcaatgtgtcgt

SEQ ID NO: 111180 - DNA, 60 bp, Artificial
  Synthetic oligonucleotide
tcaatacgtaacagctaggggtggatctggcgcagcactccgagagtctttgtatgcgat

SEQ ID NO: 111181 - DNA, 60 bp, Artificial
  Synthetic oligonucleotide
cgttaagcatgactttgcttcagtgaggtacattcgtgacgccatggcatgtactagtgg

SEQ ID NO: 111182 - DNA, 60 bp, Artificial
  Synthetic oligonucleotide
cttacgttaagcatgactttgcttcagtgaggtacattcgtgacgccatggcatgtacta

SEQ ID NO: 111183 - DNA, 60 bp, Artificial
  Synthetic oligonucleotide
tagaggcgtatctgctcgtgaaatggcgaatgtgcgaggcccgtgagccgtcggtcgatt

SEQ ID NO: 111184 - DNA, 60 bp, Artificial
  Synthetic oligonucleotide
ggttgggcgacgattgatgttgagtatagagaacccgcaccctacgtacatgctcagcgt

SEQ ID NO: 111185 - DNA, 60 bp, Artificial
  Synthetic oligonucleotide
tggttgggcgacgatcgatgttgagtatagagaacccgcaccctacgtacatgctcagcg

SEQ ID NO: 111186 - DNA, 60 bp, Artificial
  Synthetic oligonucleotide
cccagagcctcagcttgatgacatcgaaagatttagacaggagggtttctattacactaa

SEQ ID NO: 111187 - DNA, 60 bp, Artificial
  Synthetic oligonucleotide
gcattggaagaagaagcttgggctgcggcgaatgattttgaagatttgatgctgactgat

SEQ ID NO: 111188 - DNA, 60 bp, Artificial
  Synthetic oligonucleotide
agaatggaaacgttgcgactcgcgatgttgatgtcttcatcggtgcatgctccgaaccag

SEQ ID NO: 111189 - DNA, 60 bp, Artificial
  Synthetic oligonucleotide
tgcttttcacggcgggaggaagatttactaacctaactcaaaatatggctcgtcagttgg

SEQ ID NO: 111190 - DNA, 60 bp, Artificial
  Synthetic oligonucleotide
tggttgggcgacgattgatgttgagtatagagaacccgcaccctacgtacatgctcagcg

SEQ ID NO: 111191 - DNA, 60 bp, Artificial
  Synthetic oligonucleotide
tggttgggcgacgatcgacgttgagtacagagaacccgcaccctacgtacatgctcagcg

SEQ ID NO: 111192 - DNA, 60 bp, Artificial
  Synthetic oligonucleotide
aaatcaaaagtgtgctgtgttaaattgaccgccatggatctagagcttccagtttccgca

SEQ ID NO: 111193 - DNA, 60 bp, Artificial
  Synthetic oligonucleotide
gctgtgttaaattgaccgccatggatctagagcttccagtttccgcaaagttactacacc

SEQ ID NO: 111194 - DNA, 60 bp, Artificial
  Synthetic oligonucleotide
tgatcaacattggattactaaaacgaatattgaagaatatctactaccgggttggaagct

SEQ ID NO: 111195 - DNA, 60 bp, Artificial
  Synthetic oligonucleotide
gattactaaaacgaatattgaagaatatctactaccgggttggaagctaacgtacgtagg

SEQ ID NO: 111196 - DNA, 60 bp, Artificial
  Synthetic oligonucleotide
atcaccatttaagattagaacgtctatgagtgattatatagtagccttatacgcactatc

SEQ ID NO: 111197 - DNA, 60 bp, Artificial
  Synthetic oligonucleotide
catttaagattagaacgtctatgagtgattatatagtagccttatacgcactatcgaacg

SEQ ID NO: 111198 - DNA, 60 bp, Artificial
  Synthetic oligonucleotide
ttttaccaaccgacttcgatacaactaatgctatagtaacttcatatgatgggtgcttgg

SEQ ID NO: 111199 - DNA, 60 bp, Artificial
  Synthetic oligonucleotide
ccaaccgacttcgatacaactaatgctatagtaacttcatatgatgggtgcttgggtatg

SEQ ID NO: 111200 - DNA, 53 bp, Artificial
  Synthetic oligonucleotide
gatcaattcgcaaaccatacaggtatttcaagaagatcacatcagattagatt

SEQ ID NO: 111201 - DNA, 60 bp, Artificial
  Synthetic oligonucleotide
tggaactaatgtagaaaattctgtttcgggtcatgtatataacgcactaatttattatag

SEQ ID NO: 111202 - DNA, 60 bp, Artificial
  Synthetic oligonucleotide
tcaggaattgcggctattgagattcagtctcttgaagaattgttcaccttaatcagatgc

SEQ ID NO: 111203 - DNA, 60 bp, Artificial
  Synthetic oligonucleotide
gtagtttatttgcatgattactcttattatactaacaacgaaatacgaactgatcaacat

SEQ ID NO: 111204 - DNA, 60 bp, Artificial
  Synthetic oligonucleotide
atcttacaacgcataatatcctatattttaattacagtgtaaaaacgcttgaaatattaa

SEQ ID NO: 111205 - DNA, 60 bp, Artificial
  Synthetic oligonucleotide
gaaatattaaataagtcaggaattgcggctattgagattcagtctcttgaagaattgttc

SEQ ID NO: 111206 - DNA, 60 bp, Artificial
  Synthetic oligonucleotide
atctgggatgtaaacaacgtcaaaagatttattccaaaaggagtgttatattcatttata

SEQ ID NO: 111207 - DNA, 60 bp, Artificial
  Synthetic oligonucleotide
aagaaaaattagaggggacactatgtttgatatgtctgagtgagctaaaaacttaacaca

SEQ ID NO: 111208 - DNA, 60 bp, Artificial
  Synthetic oligonucleotide
tattaagttgaaacaagaaagatggttaggaaaaagagtatctcaatttgatatcggaca

SEQ ID NO: 111209 - DNA, 60 bp, Artificial
  Synthetic oligonucleotide
attagtcaaaaaacataaacgcgtgataaatgttggacctagaaatgagtcaatgtttac

SEQ ID NO: 111210 - DNA, 60 bp, Artificial
  Synthetic oligonucleotide
ccaatagcacgactatcgaacagagtttttagagacaaattatttcctttattagtcaaa

SEQ ID NO: 111211 - DNA, 52 bp, Artificial
  Synthetic oligonucleotide
actgatgatgatataataatagagtacatttactctgaggcattagattttc

SEQ ID NO: 111212 - DNA, 60 bp, Artificial
  Synthetic oligonucleotide
aaccgatcggggtaacgttgattggaaggaatggagaaaaatagtcgaactacaaactat

SEQ ID NO: 111213 - DNA, 56 bp, Artificial
  Synthetic oligonucleotide
ctggatctacgacgtaaggcaatattctgaatttctatttgaaacatgggacccgc

SEQ ID NO: 111214 - DNA, 60 bp, Artificial
  Synthetic oligonucleotide
ccaattatatacatggtaggttcggctccttcatactggatctacgacgtaaggcaatat

SEQ ID NO: 111215 - DNA, 60 bp, Artificial
  Synthetic oligonucleotide
ctataccaagaaaaaccaattatatacatggtaggttcggctccttcatactggatctac

SEQ ID NO: 111216 - DNA, 60 bp, Artificial
  Synthetic oligonucleotide
caataatctcgatcttgcgtataaatatttagctaccggcaaatcaaaagtgtgctgtgt

SEQ ID NO: 111217 - DNA, 60 bp, Artificial
  Synthetic oligonucleotide
tacaaactatcaataatctcgatcttgcgtataaatatttagctaccggcaaatcaaaag

SEQ ID NO: 111218 - DNA, 60 bp, Artificial
  Synthetic oligonucleotide
taaattcgacaatattccttacacgtatgacgtaaaagttccacatttgacatttggtgt

SEQ ID NO: 111219 - DNA, 60 bp, Artificial
  Synthetic oligonucleotide
cgacaatattccttacacgtatgacgtaaaagttccacatttgacatttggtgtactata

SEQ ID NO: 111220 - DNA, 54 bp, Artificial
  Synthetic oligonucleotide
catttggtgtactatatatttcagataacatgattccagatgtagtaaaaatta

SEQ ID NO: 111221 - DNA, 60 bp, Artificial
  Synthetic oligonucleotide
gagctatttggaatggacgttacgacaagctatacttacatgctatctgatggaatatac

SEQ ID NO: 111222 - DNA, 60 bp, Artificial
  Synthetic oligonucleotide
tttattatagatacaattattcttttgacttgaagagatggatatatctgcattcaatag

SEQ ID NO: 111223 - DNA, 60 bp, Artificial
  Synthetic oligonucleotide
cattcaatagaaaaggtcgatattgaaggtggaaaatattacgaacacgctcccatagag

SEQ ID NO: 111224 - DNA, 60 bp, Artificial
  Synthetic oligonucleotide
gtcgatattgaaggtggaaaatattacgaacacgctcccatagagttaatatatgcttgc

SEQ ID NO: 111225 - DNA, 50 bp, Artificial
  Synthetic oligonucleotide
tcccatagagttaatatatgcttgcagatcagcgaaagaatttgccttgt

SEQ ID NO: 111226 - DNA, 60 bp, Artificial
  Synthetic oligonucleotide
gctatttggaatggacgttacgacaagctatacttacatgctatctgatggaatatacgt

SEQ ID NO: 111227 - DNA, 54 bp, Artificial
  Synthetic oligonucleotide
acactaagctttaggaataataagacagtaagaatagaaactactaaattaaga

SEQ ID NO: 111228 - DNA, 50 bp, Artificial
  Synthetic oligonucleotide
agtttccgcaaagttactacaccacccaacgacggagataaggtcagaat

SEQ ID NO: 111229 - DNA, 60 bp, Artificial
  Synthetic oligonucleotide
ggctggtgtgaacgtatctctaaggaatcagccgctaaatgtcagaccgttattgatgac

SEQ ID NO: 111230 - DNA, 60 bp, Artificial
  Synthetic oligonucleotide
ttaaacacggcgtgtctgatgggattgtaaatagaaagaatgttaagatatgtgttggtt

SEQ ID NO: 111231 - DNA, 60 bp, Artificial
  Synthetic oligonucleotide
cccacttatgatgaacacgatggcaggatggctgatcagaagcaatcggggttgattctg

SEQ ID NO: 111232 - DNA, 60 bp, Artificial
  Synthetic oligonucleotide
tatttcaagatttaccccacttatgatgaacacgatggcaggatggctgatcagaagcaa

SEQ ID NO: 111233 - DNA, 60 bp, Artificial
  Synthetic oligonucleotide
ttgcatcaatggccatgctaaagaagatgagctgctcgacgccgtacgtgttgcccccga

SEQ ID NO: 111234 - DNA, 60 bp, Artificial
  Synthetic oligonucleotide
gctgctgatatccagacgactcatgacgtccatttagcgccaggtgtaggtaacattgac

SEQ ID NO: 111235 - DNA, 60 bp, Artificial
  Synthetic oligonucleotide
ctgccttcattaactttgtgtctgcaatgctgaaaatgacagtgactcgtcagaactttg

SEQ ID NO: 111236 - DNA, 60 bp, Artificial
  Synthetic oligonucleotide
taacattgaccctgagatctataacgaagggaggttcatgtttatgcagcacaagccgtt

SEQ ID NO: 111237 - DNA, 60 bp, Artificial
  Synthetic oligonucleotide
ccagacgactcatgacgtccatttagcgccaggtgtaggtaacattgaccctgagatcta

SEQ ID NO: 111238 - DNA, 60 bp, Artificial
  Synthetic oligonucleotide
gtcgctgcgtattactccgtctcttctgtctgccactcccatagattcagttgacggcac

SEQ ID NO: 111239 - DNA, 60 bp, Artificial
  Synthetic oligonucleotide
cggcactactgacctgattgatttctccgttccaaccgatgagctgtaaatgatacgtga

SEQ ID NO: 111240 - DNA, 60 bp, Artificial
  Synthetic oligonucleotide
gtcaaatcggctcaatcatgtagtttggacatgtatctgagacaccacacttgcatcaat

SEQ ID NO: 111241 - DNA, 60 bp, Artificial
  Synthetic oligonucleotide
tcaatccagtcggatcctactccaatggcgctgcaacctttgctgtcccagttacgtgaa

SEQ ID NO: 111242 - DNA, 60 bp, Artificial
  Synthetic oligonucleotide
attatcatgcagaaatcaatccagtcggatcctactccaatggcgctgcaacctttgctg

SEQ ID NO: 111243 - DNA, 60 bp, Artificial
  Synthetic oligonucleotide
agactggacgtgatgccgatgcacacagggctttccaaagggtcctttctcagggctata

SEQ ID NO: 111244 - DNA, 60 bp, Artificial
  Synthetic oligonucleotide
gcggcagatcagtcgtattttactttggagactgcggattatttcaagatttaccccact

SEQ ID NO: 111245 - DNA, 60 bp, Artificial
  Synthetic oligonucleotide
aaatggagttaagtcgggctcagtccctgaacgcccaattggaggcggatgtcaaatcgg

SEQ ID NO: 111246 - DNA, 60 bp, Artificial
  Synthetic oligonucleotide
cccagttacgtgaactgtccggtgaagttactaggttacaaatggagttaagtcgggctc

SEQ ID NO: 111247 - DNA, 60 bp, Artificial
  Synthetic oligonucleotide
acctttgctgtcccagttacgtgaactgtccggtgaagttactaggttacaaatggagtt

SEQ ID NO: 111248 - DNA, 60 bp, Artificial
  Synthetic oligonucleotide
ttcagttgacggcactactgacctgattgatttctccgttccaaccgatgagctgtaaat

SEQ ID NO: 111249 - DNA, 60 bp, Artificial
  Synthetic oligonucleotide
cccagtctcaaaggctaaacgcgatatttcatctctcgccgccacccctggacttcgctc

SEQ ID NO: 111250 - DNA, 60 bp, Artificial
  Synthetic oligonucleotide
gaccgtggtcatggcttcattcaagggattttccgccaacactgtcccagtctcaaaggc

SEQ ID NO: 111251 - DNA, 60 bp, Artificial
  Synthetic oligonucleotide
ggctttcgttgcttcgccggaatcttttcaggcctccgacgttgcaaagcgcttcgccat

SEQ ID NO: 111252 - DNA, 60 bp, Artificial
  Synthetic oligonucleotide
cgacgttgcaaagcgcttcgccataaagccaggtatgagcctccaggatgcaatcactgc

SEQ ID NO: 111253 - DNA, 57 bp, Artificial
  Synthetic oligonucleotide
catgtctcaatcacgcgagttcctaacgaaggcaattgagcaggggtccatgtctat

SEQ ID NO: 111254 - DNA, 60 bp, Artificial
  Synthetic oligonucleotide
cttgaacaagcgatggctttcgttgcttcgccggaatcttttcaggcctccgacgttgca

SEQ ID NO: 111255 - DNA, 60 bp, Artificial
  Synthetic oligonucleotide
actttccgttctgaacagcgcatgtcgtatgacgctacgttcattgatgaagactggacg

SEQ ID NO: 111256 - DNA, 60 bp, Artificial
  Synthetic oligonucleotide
cagcgcatgtcgtatgacgctacgttcattgatgaagactggacgtgatgccgatgcaca

SEQ ID NO: 111257 - DNA, 60 bp, Artificial
  Synthetic oligonucleotide
cggagctgcgtgaatcagctgaaaactatgagaagcagatcgcagagctagtgagtacta

SEQ ID NO: 111258 - DNA, 60 bp, Artificial
  Synthetic oligonucleotide
gtgagtactattactcaagaccagatcacgtatcagcaagagctgcaagctctggtggcg

SEQ ID NO: 111259 - DNA, 60 bp, Artificial
  Synthetic oligonucleotide
cgttattgatgacttgactcagatgaatggcaaacaagcacgagagataacggagctgcg

SEQ ID NO: 111260 - DNA, 60 bp, Artificial
  Synthetic oligonucleotide
gatgacgaccacgtagttgctagattcactaagatattcatagaggatgtggctcctggg

SEQ ID NO: 111261 - DNA, 60 bp, Artificial
  Synthetic oligonucleotide
ggctcctgggcatcatgccgctcaaaggtcgggtcagcgctctgtactcgatgaccttta

SEQ ID NO: 111262 - DNA, 60 bp, Artificial
  Synthetic oligonucleotide
ttgcccccgacgtgagaagagaaattatggaaaaggggagtgaagtgagaaagggctggt

SEQ ID NO: 111263 - DNA, 60 bp, Artificial
  Synthetic oligonucleotide
ccccgacgtgagaagagaaattatggaaaaggggagtgaagtgagaaagggctggtgtga

SEQ ID NO: 111264 - DNA, 60 bp, Artificial
  Synthetic oligonucleotide
aatggagtgtccttatgcgccttgctgatggacgagaaactttccgttctgaacagcgca

SEQ ID NO: 111265 - DNA, 60 bp, Artificial
  Synthetic oligonucleotide
cagaagcaatcggggttgattctgtgtactaaagatgaggtgttggctgagcagaccatt

SEQ ID NO: 111266 - DNA, 60 bp, Artificial
  Synthetic oligonucleotide
cttgactcagatgaatggcaaacaagcacgagagataacggagctgcgtgaatcagctga

SEQ ID NO: 111267 - DNA, 60 bp, Artificial
  Synthetic oligonucleotide
catgacggggtatctgccaggcggtctgttacatgatactcttggcgggattgtcatctg

SEQ ID NO: 111268 - DNA, 60 bp, Artificial
  Synthetic oligonucleotide
cagcgtttatggaatctataatgggatgaagctgatcagactgatttgtatgatttgtgt

SEQ ID NO: 111269 - DNA, 60 bp, Artificial
  Synthetic oligonucleotide
tttgtatgatttgtgtatatagtggtatcaatattccaggacgtccctactttgtttatg

SEQ ID NO: 111270 - DNA, 60 bp, Artificial
  Synthetic oligonucleotide
cctatgataggcttcggatttgatgctattatgaagagtagagctgaacgagcatcccag

SEQ ID NO: 111271 - DNA, 60 bp, Artificial
  Synthetic oligonucleotide
agagctgaacgagcatcccagatgtcgattggggcgaaaggaaatgcgggaaaggaggtt

SEQ ID NO: 111272 - DNA, 60 bp, Artificial
  Synthetic oligonucleotide
tcccagatgtcgattggggcgaaaggaaatgcgggaaaggaggttggattgccgctgcgc

SEQ ID NO: 111273 - DNA, 60 bp, Artificial
  Synthetic oligonucleotide
ggttctgagagaatgccggcgtgtttaggatgtggaagattgtacccacaacagatcctc

SEQ ID NO: 111274 - DNA, 60 bp, Artificial
  Synthetic oligonucleotide
gccggcgtgtttaggatgtggaagattgtacccacaacagatcctcgcgaaactgtgcgc

SEQ ID NO: 111275 - DNA, 60 bp, Artificial
  Synthetic oligonucleotide
gccatatcttggtgttttagcatgtgatctaccttatggttctgagagaatgccggcgtg

SEQ ID NO: 111276 - DNA, 60 bp, Artificial
  Synthetic oligonucleotide
cgcaccaaagtcactctcatgatctcacgcggcgttgaagttttacgaccgaagaagggt

SEQ ID NO: 111277 - DNA, 60 bp, Artificial
  Synthetic oligonucleotide
ctcatgatctcacgcggcgttgaagttttacgaccgaagaagggtgtgtttgagccctga

SEQ ID NO: 111278 - DNA, 60 bp, Artificial
  Synthetic oligonucleotide
acagatcctcgcgaaactgtgcgctcaagtcagatgtccagcctggccttctacatcgga

SEQ ID NO: 111279 - DNA, 60 bp, Artificial
  Synthetic oligonucleotide
cccggaggcaaggagtcgctgttttattgacccagagcgacaaatcgaggaggaggagag

SEQ ID NO: 111280 - DNA, 60 bp, Artificial
  Synthetic oligonucleotide
ggaggaggagagatatcgcgcagctaaagaggcttatctgaagaggatgaataccccgct

SEQ ID NO: 111281 - DNA, 60 bp, Artificial
  Synthetic oligonucleotide
tgagccctgagaaagctgtgagcctcatgcgggacggatttcgtaatggctgagtccttg

SEQ ID NO: 111282 - DNA, 60 bp, Artificial
  Synthetic oligonucleotide
ccccgcttgagtggtggcaagaggaagtcttgacgctaactgacggagagagagagccaa

SEQ ID NO: 111283 - DNA, 60 bp, Artificial
  Synthetic oligonucleotide
tgaagaggatgaataccccgcttgagtggtggcaagaggaagtcttgacgctaactgacg

SEQ ID NO: 111284 - DNA, 60 bp, Artificial
  Synthetic oligonucleotide
actgctccctcggattatcagacagaacgctcactgtggagacaacccaactgaaaagtt

SEQ ID NO: 111285 - DNA, 60 bp, Artificial
  Synthetic oligonucleotide
ctaactgacggagagagagagccaaaactggatgagtttttctttcgtacactgctccct

SEQ ID NO: 111286 - DNA, 60 bp, Artificial
  Synthetic oligonucleotide
gcgagcaaatttgagtcgaagaaagagacgtttgactatagacctaacaccagctcgagt

SEQ ID NO: 111287 - DNA, 60 bp, Artificial
  Synthetic oligonucleotide
gcttcaacagacagcagcagagagaattgagcaagacgcaggaattaagatgacggctcg

SEQ ID NO: 111288 - DNA, 51 bp, Artificial
  Synthetic oligonucleotide
tgtgttttctcagccatgtgatgtcagtcggtacccatcggacgcaacaaa

SEQ ID NO: 111289 - DNA, 60 bp, Artificial
  Synthetic oligonucleotide
ggtcagcggagacgatgtcacggaaatcagtcgtccaacatcaagtagcgctgtcgagat

SEQ ID NO: 111290 - DNA, 60 bp, Artificial
  Synthetic oligonucleotide
cggagaagaagttggtcagcggagacgatgtcacggaaatcagtcgtccaacatcaagta

SEQ ID NO: 111291 - DNA, 60 bp, Artificial
  Synthetic oligonucleotide
tcgaagaaagagacgtttgactatagacctaacaccagctcgagtcggatcgttcttacc

SEQ ID NO: 111292 - DNA, 52 bp, Artificial
  Synthetic oligonucleotide
tcgggttgttctgcacatgttaaggatgtggttactgcgtttgatagaggtg

SEQ ID NO: 111293 - DNA, 60 bp, Artificial
  Synthetic oligonucleotide
gtgatcatgccaattggagaggatggcgatcgtttttgcacgctttaggcatatgtaacc

SEQ ID NO: 111294 - DNA, 60 bp, Artificial
  Synthetic oligonucleotide
aggcgttttctatgcgtctgatttggccaactatccgttcgagattaacagacatgataa

SEQ ID NO: 111295 - DNA, 60 bp, Artificial
  Synthetic oligonucleotide
aagatcaagcctggtgagataatcgaccgttctagagcaccgagatgtaaggctaaagag

SEQ ID NO: 111296 - DNA, 60 bp, Artificial
  Synthetic oligonucleotide
tatctgtcagcatttaagatcaagcctggtgagataatcgaccgttctagagcaccgaga

SEQ ID NO: 111297 - DNA, 60 bp, Artificial
  Synthetic oligonucleotide
gtgatccatcttggcaagcttgaacgatgcgtgcgtcaatttaataattatctgtcagca

SEQ ID NO: 111298 - DNA, 60 bp, Artificial
  Synthetic oligonucleotide
caggtgcgcgaacggtgtcgcggttaacaagtactcatggtgtgatccatcttggcaagc

SEQ ID NO: 111299 - DNA, 60 bp, Artificial
  Synthetic oligonucleotide
ggagaaggcatattgttaacacccggaatgtttgaggagtatttcacaggtgcgcgaacg

SEQ ID NO: 111300 - DNA, 60 bp, Artificial
  Synthetic oligonucleotide
ggtcattccgtcggcggcgatctatgattgtggtatgagcaaagtgaatcctgagaacgc

SEQ ID NO: 111301 - DNA, 60 bp, Artificial
  Synthetic oligonucleotide
gaacgctaaagtgaagacccgagggaataagttactactaccttgtggaatgttggagca

SEQ ID NO: 111302 - DNA, 60 bp, Artificial
  Synthetic oligonucleotide
gccgccatttcttcaatttggcctcagatgatgtgtcattacatggcaagcgaggataga

SEQ ID NO: 111303 - DNA, 60 bp, Artificial
  Synthetic oligonucleotide
caggattgttccatgttggtgagattgactttcaagccgccatttcttcaatttggcctc

SEQ ID NO: 111304 - DNA, 60 bp, Artificial
  Synthetic oligonucleotide
atttggcctcagatgatgtgtcattacatggcaagcgaggatagagaggataagcaggac

SEQ ID NO: 111305 - DNA, 60 bp, Artificial
  Synthetic oligonucleotide
gttggagcattgtcgcgctactagtctgaccaagcacagatgtctattgccatatcttgg

SEQ ID NO: 111306 - DNA, 60 bp, Artificial
  Synthetic oligonucleotide
actaccttgtggaatgttggagcattgtcgcgctactagtctgaccaagcacagatgtct

SEQ ID NO: 111307 - DNA, 60 bp, Artificial
  Synthetic oligonucleotide
ggatttcgtaatggctgagtccttgcgcggttcgtgacgtatggggggtagcccagtaga

SEQ ID NO: 111308 - DNA, 60 bp, Artificial
  Synthetic oligonucleotide
tgcccttgcatctttgtttaaaacagctctgcgcgtatatgactatgggcgtcggatacc

SEQ ID NO: 111309 - DNA, 60 bp, Artificial
  Synthetic oligonucleotide
gtttaaaacagctctgcgcgtatatgactatgggcgtcggataccttggatgcacctctc

SEQ ID NO: 111310 - DNA, 60 bp, Artificial
  Synthetic oligonucleotide
gattttgttggctctgagattaaatgtcttccttgtcatgcaaccgacgctgcccttgca

SEQ ID NO: 111311 - DNA, 60 bp, Artificial
  Synthetic oligonucleotide
caaaatatcgcccgaaccactgacttgtgttgtacgtatcgattttgttggctctgagat

SEQ ID NO: 111312 - DNA, 60 bp, Artificial
  Synthetic oligonucleotide
tgcaatggccggcgttaatgtatgcttagtcaatgtaagtgatgaagagattgagctaat

SEQ ID NO: 111313 - DNA, 60 bp, Artificial
  Synthetic oligonucleotide
gataaaactctcgaagcaaacacattcccccacgcgaccaccgtaaaaccaatggacaag

SEQ ID NO: 111314 - DNA, 60 bp, Artificial
  Synthetic oligonucleotide
aatggacaagttcgctgagatcagaaagagacttaaacagaaacacaatgaatggcttca

SEQ ID NO: 111315 - DNA, 60 bp, Artificial
  Synthetic oligonucleotide
gaagaagggtgtgtttgagccctgagaaagctgtgagcctcatgcgggacggatttcgta

SEQ ID NO: 111316 - DNA, 60 bp, Artificial
  Synthetic oligonucleotide
gcgttgaataacgattatccggagttgtacctggtaccagagaatggagacccggaggca

SEQ ID NO: 111317 - DNA, 60 bp, Artificial
  Synthetic oligonucleotide
ttggacgtgtctacgtcacggaattcgtccaacatatattcagaagtcgctcccgaatcc

SEQ ID NO: 111318 - DNA, 60 bp, Artificial
  Synthetic oligonucleotide
gaacagatgaagtacatggctgtcgatcgtatgttgccgcccaatcttgacaaatctctt

SEQ ID NO: 111319 - DNA, 60 bp, Artificial
  Synthetic oligonucleotide
ggaataggagtaaagatacctcggtgtctcatcttctcgcacttctcccacagccttacg

SEQ ID NO: 111320 - DNA, 60 bp, Artificial
  Synthetic oligonucleotide
cgacaataaggttacgccttccggtgctcttcagaggtggcactctcgcgaggaggtctt

SEQ ID NO: 111321 - DNA, 57 bp, Artificial
  Synthetic oligonucleotide
ggtggcactctcgcgaggaggtcttattggcagcggagatatgcgagtcttatgcgg

SEQ ID NO: 111322 - DNA, 60 bp, Artificial
  Synthetic oligonucleotide
gtacatggctgtcgatcgtatgttgccgcccaatcttgacaaatctcttttcttcgacaa

SEQ ID NO: 111323 - DNA, 60 bp, Artificial
  Synthetic oligonucleotide
caaatctcttttcttcgacaataaggttacgccttccggtgctcttcagaggtggcactc

SEQ ID NO: 111324 - DNA, 60 bp, Artificial
  Synthetic oligonucleotide
ttactcttcagacgtttacaatggggttggctatttcgctaattcgacttataatgatct

SEQ ID NO: 111325 - DNA, 60 bp, Artificial
  Synthetic oligonucleotide
ctttaagtctttttcagttcaggctaaccaactaaacatgtttcagaattcgaagttatc

SEQ ID NO: 111326 - DNA, 60 bp, Artificial
  Synthetic oligonucleotide
aagcattcacctgacatcatcggtacgcttaagtcagctataaatttggtattcaaaatc

SEQ ID NO: 111327 - DNA, 60 bp, Artificial
  Synthetic oligonucleotide
catcatcggtacgcttaagtcagctataaatttggtattcaaaatctgatgttctgcagc

SEQ ID NO: 111328 - DNA, 60 bp, Artificial
  Synthetic oligonucleotide
aaaaggttggtttggtcttggacagtgcgattaaaatgtctaaggatctgatcacctttt

SEQ ID NO: 111329 - DNA, 60 bp, Artificial
  Synthetic oligonucleotide
ggtcttggacagtgcgattaaaatgtctaaggatctgatcaccttttcgaatccaacggg

SEQ ID NO: 111330 - DNA, 60 bp, Artificial
  Synthetic oligonucleotide
ccaacgggacgtcgttggagagactatggatatagtcaatcagagttgtatgatgctgga

SEQ ID NO: 111331 - DNA, 60 bp, Artificial
  Synthetic oligonucleotide
aatccgaaagaacgcgtgcttaaatttttaagtgacgctaacaacggtaaagccatggtg

SEQ ID NO: 111332 - DNA, 60 bp, Artificial
  Synthetic oligonucleotide
agccatggtggtgtttggagcacctaatacgtatcggctggcctatgctaaaaaggttgg

SEQ ID NO: 111333 - DNA, 60 bp, Artificial
  Synthetic oligonucleotide
ctggcatttgatcctaaaataactagcgattggactgatgctatggcgaaggctacgggt

SEQ ID NO: 111334 - DNA, 60 bp, Artificial
  Synthetic oligonucleotide
tacgatttgcagataccgttcacctctagtggtattctgccttagccacactgaactggc

SEQ ID NO: 111335 - DNA, 60 bp, Artificial
  Synthetic oligonucleotide
ttttatacattggcgcctatccagctacccacctactaagcttacagcttaatggatgga

SEQ ID NO: 111336 - DNA, 60 bp, Artificial
  Synthetic oligonucleotide
caacccaactgcttggaaggatgcaaatagttgtatttgtcaccgtggataagtctgtcg

SEQ ID NO: 111337 - DNA, 60 bp, Artificial
  Synthetic oligonucleotide
ggataagtctgtcgtatccacgcaagtaatgaaaagcactgcctgggcttctcgaggctc

SEQ ID NO: 111338 - DNA, 60 bp, Artificial
  Synthetic oligonucleotide
atccacgcaagtaatgaaaagcactgcctgggcttctcgaggctcatttgtcgaactccg

SEQ ID NO: 111339 - DNA, 60 bp, Artificial
  Synthetic oligonucleotide
ctcgaggctcatttgtcgaactccgcaatcagtcggttgattcgtcaactttggtgaata

SEQ ID NO: 111340 - DNA, 60 bp, Artificial
  Synthetic oligonucleotide
gctcatttgtcgaactccgcaatcagtcggttgattcgtcaactttggtgaataagctcg

SEQ ID NO: 111341 - DNA, 60 bp, Artificial
  Synthetic oligonucleotide
ttggtgaataagctcgagaatttggtatcgtttgctcctttgtacaacgtgcccaaatgt

SEQ ID NO: 111342 - DNA, 60 bp, Artificial
  Synthetic oligonucleotide
gctcgagaatttggtatcgtttgctcctttgtacaacgtgcccaaatgtggtccagatta

SEQ ID NO: 111343 - DNA, 60 bp, Artificial
  Synthetic oligonucleotide
ctatgagaagtttcaagccgagaagcaagcttattttgaatggctaattgataggacgtc

SEQ ID NO: 111344 - DNA, 60 bp, Artificial
  Synthetic oligonucleotide
aacgagctagtactgaaaagtaaagtgaagtatgtgatgcataatcctcaaatcaagctt

SEQ ID NO: 111345 - DNA, 60 bp, Artificial
  Synthetic oligonucleotide
aatcaagcttttgtgcttggatacgtttatgttatccacttcaatgaatattttatacat

SEQ ID NO: 111346 - DNA, 60 bp, Artificial
  Synthetic oligonucleotide
atgctgatgcaagacattcgcctttcaccagctgcgttagttaaatgtttcaccactcta

SEQ ID NO: 111347 - DNA, 60 bp, Artificial
  Synthetic oligonucleotide
cacagtgctcagtcactttgaagtccctcatgaatgtgggccactggtatttgaggcgtc

SEQ ID NO: 111348 - DNA, 60 bp, Artificial
  Synthetic oligonucleotide
ccgggtgggaaaggtccatttggactcatcttacccgtaatcaacgagctagtactgaaa

SEQ ID NO: 111349 - DNA, 60 bp, Artificial
  Synthetic oligonucleotide
gaggcgtcaactgacgtgaacgtatcagggcatctactttcgttggccatcgctgctcac

SEQ ID NO: 111350 - DNA, 60 bp, Artificial
  Synthetic oligonucleotide
actggtatttgaggcgtcaactgacgtgaacgtatcagggcatctactttcgttggccat

SEQ ID NO: 111351 - DNA, 60 bp, Artificial
  Synthetic oligonucleotide
ctcatggtacattcctaaatggtatgtgcacaagaggatgctgatgcaagacattcgcct

SEQ ID NO: 111352 - DNA, 60 bp, Artificial
  Synthetic oligonucleotide
gcaagacattcgcctttcaccagctgcgttagttaaatgtttcaccactctaatacgcaa

SEQ ID NO: 111353 - DNA, 60 bp, Artificial
  Synthetic oligonucleotide
cactacggttggcgatgctttgaaaatggatttggatggtggcagagctgtcatcgcgtc

SEQ ID NO: 111354 - DNA, 60 bp, Artificial
  Synthetic oligonucleotide
tgcatgatcactacggttggcgatgctttgaaaatggatttggatggtggcagagctgtc

SEQ ID NO: 111355 - DNA, 60 bp, Artificial
  Synthetic oligonucleotide
ctgtttcggatcagatcaatacgcaaaagtttatgcattgcatgatcactacggttggcg

SEQ ID NO: 111356 - DNA, 60 bp, Artificial
  Synthetic oligonucleotide
gcccaaatgtggtccagattattatggccccactgtgtactctgaactattatctttggc

SEQ ID NO: 111357 - DNA, 60 bp, Artificial
  Synthetic oligonucleotide
gccttacggtgctagtattcgtgagatgagggcattcttccacaagaaaggagccagcga

SEQ ID NO: 111358 - DNA, 60 bp, Artificial
  Synthetic oligonucleotide
ggcaactaatgctcgcactcattggtatgccaccattgattattctatgttcaccaggtc

SEQ ID NO: 111359 - DNA, 60 bp, Artificial
  Synthetic oligonucleotide
atacctcggtgtctcatcttctcgcacttctcccacagccttacggtgctagtattcgtg

SEQ ID NO: 111360 - DNA, 60 bp, Artificial
  Synthetic oligonucleotide
cgttggccatcgctgctcacttcgtcgcatcacccatgattctgtgggctgaacagatga

SEQ ID NO: 111361 - DNA, 58 bp, Artificial
  Synthetic oligonucleotide
cgtcaattgacgttcgtttaatttctatgaagtggaataggagtaaagatacctcggt

SEQ ID NO: 111362 - DNA, 60 bp, Artificial
  Synthetic oligonucleotide
tcacggaattcgtccaacatatattcagaagtcgctcccgaatccgggtgggaaaggtcc

SEQ ID NO: 111363 - DNA, 60 bp, Artificial
  Synthetic oligonucleotide
aatggatggacgattctggcatttgatcctaaaataactagcgattggactgatgctatg

SEQ ID NO: 111364 - DNA, 60 bp, Artificial
  Synthetic oligonucleotide
ttacggctatgtctgtttcggatcagatcaatacgcaaaagtttatgcattgcatgatca

SEQ ID NO: 111365 - DNA, 60 bp, Artificial
  Synthetic oligonucleotide
aacccggactattgcatacctaatttctctcaaacggtgaatgagagaacgataattgat

SEQ ID NO: 111366 - DNA, 60 bp, Artificial
  Synthetic oligonucleotide
cccatagataaaaggatagtgtcaattgttggctacaatccaccttatgtttggacgtgt

SEQ ID NO: 111367 - DNA, 60 bp, Artificial
  Synthetic oligonucleotide
gtatttgatgataagcatgagcaggagatagtcctacctattcatcctgcttgctttgtg

SEQ ID NO: 111368 - DNA, 60 bp, Artificial
  Synthetic oligonucleotide
agcggacctggaaggttcaatgctatcgtcgaatcaactactgaagtaggcaactttcgt

SEQ ID NO: 111369 - DNA, 60 bp, Artificial
  Synthetic oligonucleotide
aagcggaccaggaaggttcaaagctatcgtcgaatcaactactgaagtaggcaactttcg

SEQ ID NO: 111370 - DNA, 60 bp, Artificial
  Synthetic oligonucleotide
aagcggacctggaagattcaaagctatcgtcgaatcaactactgaagtaggcaactttcg

SEQ ID NO: 111371 - DNA, 60 bp, Artificial
  Synthetic oligonucleotide
atgaaggatcatatttgggtggggatgtctttgcttcgcggttgggggacaaaaacatct

SEQ ID NO: 111372 - DNA, 60 bp, Artificial
  Synthetic oligonucleotide
cgagaaaattggtgatgtgtataggactacgatcctatatacagggataaatgaaggatc

SEQ ID NO: 111373 - DNA, 60 bp, Artificial
  Synthetic oligonucleotide
gtgtagttgattggacggtgtctggaatgtccaggtacgagatttatgccgctgccggtg

SEQ ID NO: 111374 - DNA, 60 bp, Artificial
  Synthetic oligonucleotide
gaagtcctaccgatgcatgctcgagttgagattactcaaaccgagaaaattggtgatgtg

SEQ ID NO: 111375 - DNA, 59 bp, Artificial
  Synthetic oligonucleotide
ttgatgataagcatgagcaggagatagtcctacctattcaccctgcttgctttgtgtca

SEQ ID NO: 111376 - DNA, 60 bp, Artificial
  Synthetic oligonucleotide
agctatcgtcgaatcaactactgaagtaggcaactttcgtgtagttgattggacggtgtc

SEQ ID NO: 111377 - DNA, 60 bp, Artificial
  Synthetic oligonucleotide
ccgcaatgggctggttacggtccggaatctcacaaatatgcttactaatatggagcgcga

SEQ ID NO: 111378 - DNA, 60 bp, Artificial
  Synthetic oligonucleotide
gcggaccaggaaggttcaaagctatcgtcgaatcaactactgaagtaggcaactttcgtg

SEQ ID NO: 111379 - DNA, 60 bp, Artificial
  Synthetic oligonucleotide
gcggacctggaagattcaaagctatcgtcgaatcaactactgaagtaggcaactttcgcg

SEQ ID NO: 111380 - DNA, 60 bp, Artificial
  Synthetic oligonucleotide
atggtagcttcgttttgaagcatcatgatgtcctgcttctgcctgggcaacttgacgctt

SEQ ID NO: 111381 - DNA, 60 bp, Artificial
  Synthetic oligonucleotide
cgttttgaagcatcatgatgtcctgcttctgcctgggcaacttgacgcttttgaggagct

SEQ ID NO: 111382 - DNA, 60 bp, Artificial
  Synthetic oligonucleotide
gtgtagttgattggacggtgtctggaatgtccaggtacgagatttatgctgctgccggtg

SEQ ID NO: 111383 - DNA, 60 bp, Artificial
  Synthetic oligonucleotide
ccgaaacatgaacttaatgataaatgtacctggacttatgaacccccagaaagtaacggt

SEQ ID NO: 111384 - DNA, 60 bp, Artificial
  Synthetic oligonucleotide
cactagtcttgcaggtcactgccaagttgactacagcgagggatcgcctcaagacaagag

SEQ ID NO: 111385 - DNA, 60 bp, Artificial
  Synthetic oligonucleotide
attaagcactagtcttgcaggtcactgccaagttgactacagcgagggatcgcctcaaga

SEQ ID NO: 111386 - DNA, 60 bp, Artificial
  Synthetic oligonucleotide
ttcttccgtagtatacgccgacggagatgaactgtattcagtgcacgttaggcacgcaac

SEQ ID NO: 111387 - DNA, 60 bp, Artificial
  Synthetic oligonucleotide
gaacttagcaaattgaagactacggatgccgaccgtgccgcagtcttagcagcttaccaa

SEQ ID NO: 111388 - DNA, 60 bp, Artificial
  Synthetic oligonucleotide
gaacttagcaaactgaagactacggatgccgaccgtgccgcagtcttagcagcttaccaa

SEQ ID NO: 111389 - DNA, 60 bp, Artificial
  Synthetic oligonucleotide
tttgatgataagcatgagcaggagatagtcctacctattcatcccgcttgctttgtgtcg

SEQ ID NO: 111390 - DNA, 60 bp, Artificial
  Synthetic oligonucleotide
ggcaaactctctgactggctcaacaaaactgtgagcaaggtggagaataacgctgccaac

SEQ ID NO: 111391 - DNA, 60 bp, Artificial
  Synthetic oligonucleotide
ccgcaatggactggttacggtccggaatctcacaaatatgcttactaatatggagcgcga

SEQ ID NO: 111392 - DNA, 60 bp, Artificial
  Synthetic oligonucleotide
cgctgccaacttctttgagaggaatttggttaaaagtcttgcgaataaggaagtcctacc

SEQ ID NO: 111393 - DNA, 60 bp, Artificial
  Synthetic oligonucleotide
tggagaataacgctgccaacttctttgagaggaatttggttaaaagtcttgcgaataagg

SEQ ID NO: 111394 - DNA, 60 bp, Artificial
  Synthetic oligonucleotide
ctagcgaataaggaggtcctaccaatgcatgctcgagttgagattactcaaaccgagaaa

SEQ ID NO: 111395 - DNA, 60 bp, Artificial
  Synthetic oligonucleotide
gctgccaacttctttgagaggaatttggttaaaagtcttgcgaataaggaagtcctacca

SEQ ID NO: 111396 - DNA, 60 bp, Artificial
  Synthetic oligonucleotide
gcaactttcgcgtagttgattggacggtgtctggaatgtccaggtacgagatttatgctg

SEQ ID NO: 111397 - DNA, 60 bp, Artificial
  Synthetic oligonucleotide
gaataaggaagtcctaccaatgcatgctcgagttgagattactcaaaccgagaaaattgg

SEQ ID NO: 111398 - DNA, 60 bp, Artificial
  Synthetic oligonucleotide
gcgaataaggaagtcctaccgatgcatgctcgagttgagattactcaaaccgagaaaatt

SEQ ID NO: 111399 - DNA, 60 bp, Artificial
  Synthetic oligonucleotide
gaacttagcaaactaaagactacggatgccgaccgtgccgcagtcttagcagcttatcaa

SEQ ID NO: 111400 - DNA, 60 bp, Artificial
  Synthetic oligonucleotide
cggtccggaatctcacaaatatgcttactaatatggagcgcgatgatcagttgatcattg

SEQ ID NO: 111401 - DNA, 55 bp, Artificial
  Synthetic oligonucleotide
agcgtatatcctatcttacctttcatgattacaggagatcagtctatgatggttg

SEQ ID NO: 111402 - DNA, 60 bp, Artificial
  Synthetic oligonucleotide
aagactacggatgccgaccgtgccgcagtcttagcagcttaccaaacttcggtccttaac

SEQ ID NO: 111403 - DNA, 60 bp, Artificial
  Synthetic oligonucleotide
taactggttatgtgggtgccagcgtatatcctatcttacctttcatgattacaggagatc

SEQ ID NO: 111404 - DNA, 60 bp, Artificial
  Synthetic oligonucleotide
gcaaactaaagactacggatgccgaccgtgccgcagtcttagcagcttatcaaacttcgg

SEQ ID NO: 111405 - DNA, 60 bp, Artificial
  Synthetic oligonucleotide
ctgaagactacggatgccgaccgtgccgcagtcttagcagcttaccaaacttcggtcctt

SEQ ID NO: 111406 - DNA, 60 bp, Artificial
  Synthetic oligonucleotide
gggtgccagcgtatatcctatcttacctttcatgattacaggagatcagtccatgatggt

SEQ ID NO: 111407 - DNA, 60 bp, Artificial
  Synthetic oligonucleotide
tatgaacttaatgataaatgtacctggacttatgaacccccagaaagtaacggttgacta

SEQ ID NO: 111408 - DNA, 60 bp, Artificial
  Synthetic oligonucleotide
gtaccaagtggctcattcatcaaggtgagctacttcacaagccctttgaaaaaccctact

SEQ ID NO: 111409 - DNA, 60 bp, Artificial
  Synthetic oligonucleotide
ggttcattcatcaaggtgagctacttcacaagccctttgaagaatcctactgtggacact

SEQ ID NO: 111410 - DNA, 60 bp, Artificial
  Synthetic oligonucleotide
gcttggacaaggcaaactctctgactggctcaacaaaactgtgagcaaggtggagaataa

SEQ ID NO: 111411 - DNA, 60 bp, Artificial
  Synthetic oligonucleotide
aacttaatgataaatgtacctggacttatgaacccccagaaagtaacggttgactatgtc

SEQ ID NO: 111412 - DNA, 60 bp, Artificial
  Synthetic oligonucleotide
gtctggaaccaattgtttgaagcttatatcaagcgtggatatcaccagtcagcttccctc

SEQ ID NO: 111413 - DNA, 60 bp, Artificial
  Synthetic oligonucleotide
atatgtcatcagtggactggcaccagtccacaagccagactgtggggaattatgtctata

SEQ ID NO: 111414 - DNA, 60 bp, Artificial
  Synthetic oligonucleotide
tatccgcaatgggctggttacggtccggaatctcacaaatatgcttactaatatggagcg

SEQ ID NO: 111415 - DNA, 58 bp, Artificial
  Synthetic oligonucleotide
attactcggacaaggcaaactctccgactggctcaacaaaactgtgagcaaggtggag

SEQ ID NO: 111416 - DNA, 60 bp, Artificial
  Synthetic oligonucleotide
tgtatttgatgataagcatgagcaggagatagtcctacctattcatcccgcttgctttgt

SEQ ID NO: 111417 - DNA, 60 bp, Artificial
  Synthetic oligonucleotide
cctactgggcgacgactggcaaaaacttacaatatactagagaatttaatcaccctaccc

SEQ ID NO: 111418 - DNA, 60 bp, Artificial
  Synthetic oligonucleotide
gatgctcaagcgtccggcttactacaacattttcttgcttcctactgggcgacgactggc

SEQ ID NO: 111419 - DNA, 60 bp, Artificial
  Synthetic oligonucleotide
catcatgaaagatatggtatgaaagttaggttgacctaccgatctgaaagcgagcgaacg

SEQ ID NO: 111420 - DNA, 60 bp, Artificial
  Synthetic oligonucleotide
gatagactttctcatcatgaaagatatggtatgaaagttaggttgacctaccgatctgaa

SEQ ID NO: 111421 - DNA, 60 bp, Artificial
  Synthetic oligonucleotide
ttatatctcatggtaagaaagcttcgaccgttcatttctgtacacgtgagtcatacaaag

SEQ ID NO: 111422 - DNA, 60 bp, Artificial
  Synthetic oligonucleotide
ccgatctgaaagcgagcgaacgaaacttgaagagaaaatcactgatttagttatatctca

SEQ ID NO: 111423 - DNA, 60 bp, Artificial
  Synthetic oligonucleotide
tcatacaaagggagagttcgtgctaaccaaattttaattttgttggagcctgagggttta

SEQ ID NO: 111424 - DNA, 60 bp, Artificial
  Synthetic oligonucleotide
agaaagcttcgaccgttcatttctgtacacgtgagtcatacaaagggagagttcgtgcta

SEQ ID NO: 111425 - DNA, 60 bp, Artificial
  Synthetic oligonucleotide
tgagggtttaggcgaagttgagggtttgaccgttcgagcggaaggcaattggatgtcttt

SEQ ID NO: 111426 - DNA, 60 bp, Artificial
  Synthetic oligonucleotide
gttcgtgctaaccaaattttaattttgttggagcctgagggtttaggcgaagttgagggt

SEQ ID NO: 111427 - DNA, 60 bp, Artificial
  Synthetic oligonucleotide
caatggctgtaggaacgatggatacaccgagtaggtatgccataactattgtgtccggaa

SEQ ID NO: 111428 - DNA, 60 bp, Artificial
  Synthetic oligonucleotide
tcttatcaatggctgtaggaacgatggatacaccgagtaggtatgccataactattgtgt

SEQ ID NO: 111429 - DNA, 60 bp, Artificial
  Synthetic oligonucleotide
caggctggtcgattgcattgggagttgtacgctgcatttcaggagttttatgatcgaacg

SEQ ID NO: 111430 - DNA, 60 bp, Artificial
  Synthetic oligonucleotide
tcagcaacaggctggtcgattgcattgggagttgtacgctgcatttcaggagttttatga

SEQ ID NO: 111431 - DNA, 60 bp, Artificial
  Synthetic oligonucleotide
ggttctagaggccttcgcccttatgcccagcgatgtcagcaacaggctggtcgattgcat

SEQ ID NO: 111432 - DNA, 60 bp, Artificial
  Synthetic oligonucleotide
ttatgtgaagtttttggttctagaggccttcgcccttatgcccagcgatgtcagcaacag

SEQ ID NO: 111433 - DNA, 60 bp, Artificial
  Synthetic oligonucleotide
agttttatgatcgaacgatacgagtcatcactccggataagtttcgattcgcttattttg

SEQ ID NO: 111434 - DNA, 60 bp, Artificial
  Synthetic oligonucleotide
ctgcagccggcacgtttggtattgttgggtcggaaaggaggcggtaaatcaaggttgtcg

SEQ ID NO: 111435 - DNA, 60 bp, Artificial
  Synthetic oligonucleotide
tactgcagccggcacgtttggtattgttgggtcggaaaggaggcggtaaatcaaggttgt

SEQ ID NO: 111436 - DNA, 53 bp, Artificial
  Synthetic oligonucleotide
tatactactccggggccaaggtttgtcagttaatgctgagcttcatctgcatg

SEQ ID NO: 111437 - DNA, 58 bp, Artificial
  Synthetic oligonucleotide
aatcagaatggtgcgcggaaagtctctttagggtggttagtacacgccttgaacgagt

SEQ ID NO: 111438 - DNA, 60 bp, Artificial
  Synthetic oligonucleotide
cgatacgagtcatcactccggataagtttcgattcgcttattttgcagagttagagcgtg

SEQ ID NO: 111439 - DNA, 60 bp, Artificial
  Synthetic oligonucleotide
tcacttgcctgctgtgggcgtctattcgggtgaagacttcagtaagcaattcttatcaat

SEQ ID NO: 111440 - DNA, 60 bp, Artificial
  Synthetic oligonucleotide
gcctgctgtgggcgtctattcgggtgaagacttcagtaagcaattcttatcaatggctgt

SEQ ID NO: 111441 - DNA, 60 bp, Artificial
  Synthetic oligonucleotide
gacattttgagatgctcaagcgtccggcttactacaacattttcttgcttcctactgggc

SEQ ID NO: 111442 - DNA, 60 bp, Artificial
  Synthetic oligonucleotide
gggtttaggcgaagttgagggtttgaccgttcgagcggaaggcaattggatgtctttagt

SEQ ID NO: 111443 - DNA, 60 bp, Artificial
  Synthetic oligonucleotide
ctctacacttacctgttttggtttcgtggacccagctagaggttgtcgttttaatctgct

SEQ ID NO: 111444 - DNA, 60 bp, Artificial
  Synthetic oligonucleotide
cacttacctgttttggtttcgtggacccagctagaggttgtcgttttaatctgctaccgt

SEQ ID NO: 111445 - DNA, 60 bp, Artificial
  Synthetic oligonucleotide
ttgctgagtcacatactctgtacgctgtccggacttggcctggatgtgagaaatacttgg

SEQ ID NO: 111446 - DNA, 60 bp, Artificial
  Synthetic oligonucleotide
ctctgtacgctgtccggacttggcctggatgtgagaaatacttgggagctttggaggcgt

SEQ ID NO: 111447 - DNA, 51 bp, Artificial
  Synthetic oligonucleotide
caggatttcattatttgtattatttggtttctttcaccatgaaaacgtccc

SEQ ID NO: 111448 - DNA, 60 bp, Artificial
  Synthetic oligonucleotide
aaggaggcattggctacagtgaaagtgttcagtttcgtcgttgggcgagatcacttgcct

SEQ ID NO: 111449 - DNA, 60 bp, Artificial
  Synthetic oligonucleotide
gctacagtgaaagtgttcagtttcgtcgttgggcgagatcacttgcctgctgtgggcgtc

SEQ ID NO: 111450 - DNA, 60 bp, Artificial
  Synthetic oligonucleotide
gttgagtactcgcacgacttgtttcaggtccgtagaattcaaacgaaacaagccctcgga

SEQ ID NO: 111451 - DNA, 60 bp, Artificial
  Synthetic oligonucleotide
aagccctcggaattttctatcaaggggaattttactatcgtccggctttagtcccgaaga

SEQ ID NO: 111452 - DNA, 60 bp, Artificial
  Synthetic oligonucleotide
ggaaccgtcatatcaggaattctttatgcagtgtctggaagagcggcgcattgtaatcaa

SEQ ID NO: 111453 - DNA, 60 bp, Artificial
  Synthetic oligonucleotide
tgtactcactcaatacaaaggcccgatgagagagatgccgtgctcggattgttagcggtg

SEQ ID NO: 111454 - DNA, 55 bp, Artificial
  Synthetic oligonucleotide
gtactgctcccattggatttgctgctccgactgattcgatgtgcgatagtggtag

SEQ ID NO: 111455 - DNA, 60 bp, Artificial
  Synthetic oligonucleotide
agcagcggaatttcctcgtcttaaagctcgcactgaatattggaatccctatcccaaccc

SEQ ID NO: 111456 - DNA, 60 bp, Artificial
  Synthetic oligonucleotide
caagctgcgataccatggtgtcggatttggacgtgacattggaatgcctctcgcttatct

SEQ ID NO: 111457 - DNA, 60 bp, Artificial
  Synthetic oligonucleotide
gcgtcaggatccaaaagtaagtttatttggcctatttcgtccattgaccaaaacgtcgtc

SEQ ID NO: 111458 - DNA, 60 bp, Artificial
  Synthetic oligonucleotide
ctgccccgccagtgagtaaggataccccgactcaacaagcatctgttagtttgcccaacc

SEQ ID NO: 111459 - DNA, 60 bp, Artificial
  Synthetic oligonucleotide
agcgcacgttataggaattgataggtatagagaggataatgtcaaacgagcgttgctagc

SEQ ID NO: 111460 - DNA, 60 bp, Artificial
  Synthetic oligonucleotide
catgattatgacggacgtttagatactccttttcccaatcaaatgatgttggtgtctgca

SEQ ID NO: 111461 - DNA, 60 bp, Artificial
  Synthetic oligonucleotide
gcaatcagacgaatcggagaggatgtttggacgcatgctatcaccacagcaggaattgtc

SEQ ID NO: 111462 - DNA, 60 bp, Artificial
  Synthetic oligonucleotide
accacagcaggaattgtcttatcttttagttggtgctgcattaagccaggacgtttacaa

SEQ ID NO: 111463 - DNA, 60 bp, Artificial
  Synthetic oligonucleotide
acgttttcttggggtggtacgtggtcttgacacgaggggcgtattgaaactggtcttggc

SEQ ID NO: 111464 - DNA, 60 bp, Artificial
  Synthetic oligonucleotide
cggcctgcttacgctctcgattcttactagtagtggacgttttcttggggtggtacgtgg

SEQ ID NO: 111465 - DNA, 60 bp, Artificial
  Synthetic oligonucleotide
tcttgcgtgctaatcttgacgcctttatgatgtttggaacggtgatgccgtcgctatctg

SEQ ID NO: 111466 - DNA, 60 bp, Artificial
  Synthetic oligonucleotide
cttgacgacaggcgccggtgttttgaaggatcccagggttatcagtctcactaacggcgt

SEQ ID NO: 111467 - DNA, 60 bp, Artificial
  Synthetic oligonucleotide
caacgattaatcgctccaatcggcgaacatcgggaacatgttaaagctcaagcagcggaa

SEQ ID NO: 111468 - DNA, 60 bp, Artificial
  Synthetic oligonucleotide
cgtccattgaccaaaacgtcgtcgttcgagcgttaggtgccagtggaagtactgctccca

SEQ ID NO: 111469 - DNA, 60 bp, Artificial
  Synthetic oligonucleotide
ttggaatccctatcccaaccctggcgcgcaacacgtcgaacagacgatattcaaagctcg

SEQ ID NO: 111470 - DNA, 60 bp, Artificial
  Synthetic oligonucleotide
cgctggtgaaagatctcaatcagactggtcagctggtaagtaagactttaatggccggag

SEQ ID NO: 111471 - DNA, 60 bp, Artificial
  Synthetic oligonucleotide
tgatgagcgtctgttattggttaaagaagctaagcctcagactcttcgtttttatgccag

SEQ ID NO: 111472 - DNA, 60 bp, Artificial
  Synthetic oligonucleotide
gagcagcacgctattgacattttcccttacaactgtccggttgataagattgtgccagcg

SEQ ID NO: 111473 - DNA, 60 bp, Artificial
  Synthetic oligonucleotide
cgcatgacacgtcattggtaaagttgaatgaaatcgaagtcgttactggaggtagtcgcg

SEQ ID NO: 111474 - DNA, 60 bp, Artificial
  Synthetic oligonucleotide
ggcgccaacttgaaattcgtttacggagtacccatggccgacatcatcttttccaagctg

SEQ ID NO: 111475 - DNA, 60 bp, Artificial
  Synthetic oligonucleotide
gtcgaagcaccaaacaacgcactaccattggatctccgagactatgtcgaagttgagtac

SEQ ID NO: 111476 - DNA, 60 bp, Artificial
  Synthetic oligonucleotide
tttgctctatcgaatagtgagtggtcgcagtttgttacgagggttggatatgatggtact

SEQ ID NO: 111477 - DNA, 60 bp, Artificial
  Synthetic oligonucleotide
gactcggtttgactgccatcgccgacagctctagcgaatatagccgtctgcgcaaaggtt

SEQ ID NO: 111478 - DNA, 60 bp, Artificial
  Synthetic oligonucleotide
gccgtctgcgcaaaggtttatatctagcacggtgcgaagttgatgtcgaagcaccaaaca

SEQ ID NO: 111479 - DNA, 60 bp, Artificial
  Synthetic oligonucleotide
attagaggtgatttacaattgattccagagggactgatgccgcgatttagactcggtttg

SEQ ID NO: 111480 - DNA, 60 bp, Artificial
  Synthetic oligonucleotide
cgaaggtgcgttatgttgaaaacgaattgacgattatcgctcccactccacaagatcctc

SEQ ID NO: 111481 - DNA, 60 bp, Artificial
  Synthetic oligonucleotide
cggtgatgccgtcgctatctgacagtttggcgaaaatacctgcagacgctggaaatcaac

SEQ ID NO: 111482 - DNA, 60 bp, Artificial
  Synthetic oligonucleotide
ccactttgaacctgaaaagaacgttgatgacaaaggcaatgtaactggttctgccccgcc

SEQ ID NO: 111483 - DNA, 60 bp, Artificial
  Synthetic oligonucleotide
cgctggaaatcaacagattataagcttgattcgtgaacgacagtccgtctcaggatttga

SEQ ID NO: 111484 - DNA, 60 bp, Artificial
  Synthetic oligonucleotide
gcccaaccaagaagagccaacacaacagactttggtcactacagagcttccaactaaacc

SEQ ID NO: 111485 - DNA, 60 bp, Artificial
  Synthetic oligonucleotide
ggtaattcaattcccatcactgacgaagattattggagtaatgccagaagaccagctctc

SEQ ID NO: 111486 - DNA, 60 bp, Artificial
  Synthetic oligonucleotide
cagactgcgatgcaagggagtggctttaatgttggtagaaatagagatgtgttcagacag

SEQ ID NO: 111487 - DNA, 60 bp, Artificial
  Synthetic oligonucleotide
gagaacgcgatggaatatttagctatgcaagtgactcctcctctaatttggccctgtgtt

SEQ ID NO: 111488 - DNA, 60 bp, Artificial
  Synthetic oligonucleotide
gataaatcttcccttgaccacgagtattacgcacacttcgtaagtccccccctgcatcat

SEQ ID NO: 111489 - DNA, 60 bp, Artificial
  Synthetic oligonucleotide
aggagttgctgtcgggatcactatcttcaacagagttccggaatttgatatcgtgcatcc

SEQ ID NO: 111490 - DNA, 60 bp, Artificial
  Synthetic oligonucleotide
gaggacctacactctgaaccatgtcaaatcttcccaaacctgccagccactttgaacctg

SEQ ID NO: 111491 - DNA, 60 bp, Artificial
  Synthetic oligonucleotide
gatacgataattgccatgtgtgctaacgcctgtgttccttttagtattgctgcgggaatt

SEQ ID NO: 111492 - DNA, 60 bp, Artificial
  Synthetic oligonucleotide
gtaatgccagaagaccagctctcttcaccaccgacctctcccaattcagactcttaggac

SEQ ID NO: 111493 - DNA, 60 bp, Artificial
  Synthetic oligonucleotide
ggtgtctgcaagccaaagtccccacgaccacaagataccgatcgaactaagaaggaaggg

SEQ ID NO: 111494 - DNA, 60 bp, Artificial
  Synthetic oligonucleotide
cggctcgatttgcgtctgaacttagttatagccgcccaatgtcgtttgtgcaaggtaaga

SEQ ID NO: 111495 - DNA, 60 bp, Artificial
  Synthetic oligonucleotide
cgcgcttcattttgccttacgtacaaacgttaacctggtagtcacgaaagataactcggc

SEQ ID NO: 111496 - DNA, 60 bp, Artificial
  Synthetic oligonucleotide
ggataccgctctagaaggaaaatacactcaaggtgtgacctacaaatatggacgtgagcg

SEQ ID NO: 111497 - DNA, 60 bp, Artificial
  Synthetic oligonucleotide
ataacttacctgaatatcgacaatgtcacagcccaagctcttggaataacagcgcacgtt

SEQ ID NO: 111498 - DNA, 60 bp, Artificial
  Synthetic oligonucleotide
ctctgagtcttatgctgacggcggaatgaaggaaattaaggagttgctgtcgggatcact

SEQ ID NO: 111499 - DNA, 60 bp, Artificial
  Synthetic oligonucleotide
ggacgctagtattgggtctacaatttccttcacatcaattcgatgaggacatgactaacg

SEQ ID NO: 111500 - DNA, 60 bp, Artificial
  Synthetic oligonucleotide
gtatgagggttggattgccggctatgcacccgcctatttttgcacccggagatcgtgaaa

SEQ ID NO: 111501 - DNA, 60 bp, Artificial
  Synthetic oligonucleotide
atcaccacaatggcatgcattgcgtgcgaccttatgtatgagggttggattgccggctat

SEQ ID NO: 111502 - DNA, 60 bp, Artificial
  Synthetic oligonucleotide
ctctgatggctttattgttatattcggcactagcggacgcatgtgacgcattgaagcctg

SEQ ID NO: 111503 - DNA, 60 bp, Artificial
  Synthetic oligonucleotide
gatcgtgaaactctgatggctttattgttatattcggcactagcggacgcatgtgacgca

SEQ ID NO: 111504 - DNA, 60 bp, Artificial
  Synthetic oligonucleotide
gcctgattttgatatgattggagttgctggggttgcaccacagaatagagcaggcgtggc

SEQ ID NO: 111505 - DNA, 60 bp, Artificial
  Synthetic oligonucleotide
atgtgacgcattgaagcctgattttgatatgattggagttgctggggttgcaccacagaa

SEQ ID NO: 111506 - DNA, 60 bp, Artificial
  Synthetic oligonucleotide
catggcatcgttcacaatgcatcagtcacactagatagggtatttagtgttagcacgtcc

SEQ ID NO: 111507 - DNA, 60 bp, Artificial
  Synthetic oligonucleotide
caccacagaatagagcaggcgtggcgcaagcgtacagatgagcgatgttgcatggcatcg

SEQ ID NO: 111508 - DNA, 60 bp, Artificial
  Synthetic oligonucleotide
acatcaagcaatacgattgaaacatcaatccagcaaggaacaatagttcagatgggagga

SEQ ID NO: 111509 - DNA, 60 bp, Artificial
  Synthetic oligonucleotide
gcgccaggaagatattatgtacctgcaggacggtcgagatccgcagtaacatcaagcaat

SEQ ID NO: 111510 - DNA, 60 bp, Artificial
  Synthetic oligonucleotide
aagcgccaggaagatattatgtacctgcaggacggtcgagatccgcagtaacatcaagca

SEQ ID NO: 111511 - DNA, 60 bp, Artificial
  Synthetic oligonucleotide
ccaagtaggatgtacttaccaccatatatagcagcgcgtgacatgcaagcgccaggaaga

SEQ ID NO: 111512 - DNA, 60 bp, Artificial
  Synthetic oligonucleotide
tacaccaagtaggatgtacttaccaccatatatagcagcgcgtgacatgcaagcgccagg

SEQ ID NO: 111513 - DNA, 60 bp, Artificial
  Synthetic oligonucleotide
cggcaatgacaagagttgtacgaattacaggtatgctgaatacatatacaccaagtagga

SEQ ID NO: 111514 - DNA, 60 bp, Artificial
  Synthetic oligonucleotide
acgtcggcaatgacaagagttgtacgaattacaggtatgctgaatacatatacaccaagt

SEQ ID NO: 111515 - DNA, 60 bp, Artificial
  Synthetic oligonucleotide
ggacccaggagttatggagttattaggtatcgctctaaatagatataatgctatgtcatt

SEQ ID NO: 111516 - DNA, 60 bp, Artificial
  Synthetic oligonucleotide
gatgggaggaaccttggccccacggcggggtgatgcaatgatgatgtattttatttggca

SEQ ID NO: 111517 - DNA, 60 bp, Artificial
  Synthetic oligonucleotide
attgaaacatcaatccagcaaggaacaatagttcagatgggaggaaccttggccccacgg

SEQ ID NO: 111518 - DNA, 60 bp, Artificial
  Synthetic oligonucleotide
gatcgaacgccaacacttgtacccgaaacatatgaaatgatgaatagatgctactcatat

SEQ ID NO: 111519 - DNA, 60 bp, Artificial
  Synthetic oligonucleotide
atgctactcatatatatcaccacaatggcatgcattgcgtgcgaccttatgtatgagggt

SEQ ID NO: 111520 - DNA, 60 bp, Artificial
  Synthetic oligonucleotide
gggattcaatggttaggtttgaagtattatggtatacaacttttgatcgaacgccaacac

SEQ ID NO: 111521 - DNA, 60 bp, Artificial
  Synthetic oligonucleotide
tttgatcgaacgccaacacttgtacccgaaacatatgaaatgatgaatagatgctactca

SEQ ID NO: 111522 - DNA, 60 bp, Artificial
  Synthetic oligonucleotide
ctgggatcacagtaactgttgatggggtggagattgctgcagggaatatcgctgtctggg

SEQ ID NO: 111523 - DNA, 60 bp, Artificial
  Synthetic oligonucleotide
caagtaatagggattcaatggttaggtttgaagtattatggtatacaacttttgatcgaa

SEQ ID NO: 111524 - DNA, 60 bp, Artificial
  Synthetic oligonucleotide
ggcaaccgatacgcgtgttctctggggcaaacggcgtaacgcaagaatctggtgctggga

SEQ ID NO: 111525 - DNA, 60 bp, Artificial
  Synthetic oligonucleotide
gaatctggtgctgggatcacagtaactgttgatggggtggagattgctgcagggaatatc

SEQ ID NO: 111526 - DNA, 60 bp, Artificial
  Synthetic oligonucleotide
ccttggccccacggcggggtgatgcaatgatgatgtattttatttggcaaccgatacgcg

SEQ ID NO: 111527 - DNA, 60 bp, Artificial
  Synthetic oligonucleotide
ttatttggcaaccgatacgcgtgttctctggggcaaacggcgtaacgcaagaatctggtg

SEQ ID NO: 111528 - DNA, 60 bp, Artificial
  Synthetic oligonucleotide
cattatcagttattgaagcatgtacaactttagtggattcaagggtgagcatggacccag

SEQ ID NO: 111529 - DNA, 60 bp, Artificial
  Synthetic oligonucleotide
gaagcatgtacaactttagtggattcaagggtgagcatggacccaggagttatggagtta

SEQ ID NO: 111530 - DNA, 60 bp, Artificial
  Synthetic oligonucleotide
atggacccaggagttatggagttattaggtatcgctctaaatagatataatgctatgtca

SEQ ID NO: 111531 - DNA, 60 bp, Artificial
  Synthetic oligonucleotide
gctcacgcagatggaagtacgactttgatgatgaacgtaaaattatgctagagcagttgg

SEQ ID NO: 111532 - DNA, 60 bp, Artificial
  Synthetic oligonucleotide
accattgctcacgcagatggaagtacgactttgatgatgaacgtaaaattatgctagagc

SEQ ID NO: 111533 - DNA, 60 bp, Artificial
  Synthetic oligonucleotide
tatgtgagaaacgtaacctatcacataagcacttagatgatgaaataagatcgcaggttc

SEQ ID NO: 111534 - DNA, 60 bp, Artificial
  Synthetic oligonucleotide
ctcatgttctaattccccgattaatgattttgttgaccattgctcacgcagatggaagta

SEQ ID NO: 111535 - DNA, 60 bp, Artificial
  Synthetic oligonucleotide
acacacggtagatcgtattctgataacacagttaatatatatgatgagtgttcagatgag

SEQ ID NO: 111536 - DNA, 60 bp, Artificial
  Synthetic oligonucleotide
cggtagatcgtattctgataacacagttaatatatatgatgagtgttcagatgaggcacc

SEQ ID NO: 111537 - DNA, 60 bp, Artificial
  Synthetic oligonucleotide
gcgtatagctgaaatagcagcctcgaatcaacatattaactttctgctccgtatcgatat

SEQ ID NO: 111538 - DNA, 60 bp, Artificial
  Synthetic oligonucleotide
acggagcttataattctaagtgggaagatatggtacagtatgacaatgaattgacggctg

SEQ ID NO: 111539 - DNA, 60 bp, Artificial
  Synthetic oligonucleotide
ttaaaactttatttggcaaaccatacaatacttatttaatggatatgactttggggttag

SEQ ID NO: 111540 - DNA, 60 bp, Artificial
  Synthetic oligonucleotide
ggcaaaccatacaatacttatttaatggatatgactttggggttaggtgtgatgaataag

SEQ ID NO: 111541 - DNA, 60 bp, Artificial
  Synthetic oligonucleotide
catttaataagggcgatggctggatctgcttctatcgatgacggtcgtcttaaaaatcag

SEQ ID NO: 111542 - DNA, 60 bp, Artificial
  Synthetic oligonucleotide
taaaaatcagttgagcacacagggacttttaatgacgcatgaaaggtactttttaatagg

SEQ ID NO: 111543 - DNA, 52 bp, Artificial
  Synthetic oligonucleotide
gatagaccccagggatgtccattcaagtgtagtcgatatcgtcagacatgag

SEQ ID NO: 111544 - DNA, 60 bp, Artificial
  Synthetic oligonucleotide
ggcagacattatgcgtatagctgaaatagcagcctcgaatcaacatattaactttctgct

SEQ ID NO: 111545 - DNA, 60 bp, Artificial
  Synthetic oligonucleotide
atgctagagcagttggtgatgaggtataaacgtaattacatgagaatgtttgataagatt

SEQ ID NO: 111546 - DNA, 60 bp, Artificial
  Synthetic oligonucleotide
catcgccgaggcacgttaagctagttgataatgacgttatatatagtgggcatttaataa

SEQ ID NO: 111547 - DNA, 60 bp, Artificial
  Synthetic oligonucleotide
tactcattggttcagttctagggttaccttatggaatcaaaagatatattatggagatcg

SEQ ID NO: 111548 - DNA, 60 bp, Artificial
  Synthetic oligonucleotide
ggttcagttctagggttaccttatggaatcaaaagatatattatggagatcgaatcaaac

SEQ ID NO: 111549 - DNA, 60 bp, Artificial
  Synthetic oligonucleotide
ccgaggcacgttaagctagttgataatgacgttatatatagtgggcatttaataagggcg

SEQ ID NO: 111550 - DNA, 55 bp, Artificial
  Synthetic oligonucleotide
catttaataagggcgatggctggatctgcttctatcgatgacggtcgtcttaaaa

SEQ ID NO: 111551 - DNA, 60 bp, Artificial
  Synthetic oligonucleotide
tgatggttacatatactcatgttctaattccccgattaatgattttgttgaccattgctc

SEQ ID NO: 111552 - DNA, 60 bp, Artificial
  Synthetic oligonucleotide
ttgacggctgaactaatcaattcaatgccaatgaatgtaaccatatcagctaagctcagg

SEQ ID NO: 111553 - DNA, 60 bp, Artificial
  Synthetic oligonucleotide
cggagcttataattctaagtgggaagatatggtacagtatgacaatgaattgacggctga

SEQ ID NO: 111554 - DNA, 60 bp, Artificial
  Synthetic oligonucleotide
taagctcaggccaagttataatactaataacgttatgcccatcttaacaagaaaattcag

SEQ ID NO: 111555 - DNA, 60 bp, Artificial
  Synthetic oligonucleotide
ctgaactaatcaattcaatgccaatgaatgtaaccatatcagctaagctcaggccaagtt

SEQ ID NO: 111556 - DNA, 60 bp, Artificial
  Synthetic oligonucleotide
gaaaattcagagttgtacccttaccttacttgaagaagagtactgctgaatttcacctat

SEQ ID NO: 111557 - DNA, 60 bp, Artificial
  Synthetic oligonucleotide
gctcaggccaagttataatactaataacgttatgcccatcttaacaagaaaattcagagt

SEQ ID NO: 111558 - DNA, 60 bp, Artificial
  Synthetic oligonucleotide
tttcacctatttgtgccacgtcatgatctgctaaacggaactgaaatagatgatgtaagt

SEQ ID NO: 111559 - DNA, 60 bp, Artificial
  Synthetic oligonucleotide
tacccttaccttacttgaagaagagtactgctgaatttcacctatttgtgccacgtcatg

SEQ ID NO: 111560 - DNA, 60 bp, Artificial
  Synthetic oligonucleotide
tgatgtaagttatgaaaccttaattaatatgtcttatgaagtttgtgcacttaaaacttt

SEQ ID NO: 111561 - DNA, 60 bp, Artificial
  Synthetic oligonucleotide
gtgccacgtcatgatctgctaaacggaactgaaatagatgatgtaagttatgaaacctta

SEQ ID NO: 111562 - DNA, 60 bp, Artificial
  Synthetic oligonucleotide
ccttatttcagaaagtaggttattttaaaattggaaccgaaagagcgaacaggacggctg

SEQ ID NO: 111563 - DNA, 58 bp, Artificial
  Synthetic oligonucleotide
ttggttattccgttagtgaagatggaacactacctaaaacttacaataatatgaatga

SEQ ID NO: 111564 - DNA, 60 bp, Artificial
  Synthetic oligonucleotide
gtagaaaatttcaagattgtttaattttaaagcgtttgttagttatgtcttttgtagagg

SEQ ID NO: 111565 - DNA, 60 bp, Artificial
  Synthetic oligonucleotide
aagtatagtaattacctacttgtagatgagcgaagtttaatttcgtagtcattttcgact

SEQ ID NO: 111566 - DNA, 56 bp, Artificial
  Synthetic oligonucleotide
atctggtagtcgcgtttggcatggttttcacagccactatttggctgttgacagtg

SEQ ID NO: 111567 - DNA, 60 bp, Artificial
  Synthetic oligonucleotide
aacatactcaatcccaaggctgggtatgagcgaaaatctggtagtcgcgtttggcatggt

SEQ ID NO: 111568 - DNA, 60 bp, Artificial
  Synthetic oligonucleotide
atggagatcgaatcaaacatactcaatcccaaggctgggtatgagcgaaaatctggtagt

SEQ ID NO: 111569 - DNA, 60 bp, Artificial
  Synthetic oligonucleotide
atacaaacgttataaatgcaggcaatcgagactaacgcgcgattcactatgactgggttg

SEQ ID NO: 111570 - DNA, 60 bp, Artificial
  Synthetic oligonucleotide
attttcgacttaatgatacaaacgttataaatgcaggcaatcgagactaacgcgcgattc

SEQ ID NO: 111571 - DNA, 60 bp, Artificial
  Synthetic oligonucleotide
gtgagaaacgtaacctatcacataagcacttagatgatgaaataagatcgcaggttctag

SEQ ID NO: 111572 - DNA, 60 bp, Artificial
  Synthetic oligonucleotide
cctacttgtagatgagcgaagtttaatttcgtagtcattttcgacttaatgatacaaacg

SEQ ID NO: 111573 - DNA, 53 bp, Artificial
  Synthetic oligonucleotide
ttggggttaggtgtgatgaataagtttgttaaaccgatgtctaacagcatagc

SEQ ID NO: 111574 - DNA, 60 bp, Artificial
  Synthetic oligonucleotide
atataacagtgaggagttcaagtttatacgtgattatctgtatacttatccttattcgag

SEQ ID NO: 111575 - DNA, 60 bp, Artificial
  Synthetic oligonucleotide
gcaactactccaattcttgggaaaatgccggctgtgttctctggcatgttgactggaaac

SEQ ID NO: 111576 - DNA, 60 bp, Artificial
  Synthetic oligonucleotide
tctggcatgttgactggaaactgtaagatgtatccattcatcaaaggaacggcgaagttg

SEQ ID NO: 111577 - DNA, 60 bp, Artificial
  Synthetic oligonucleotide
ggaaactgtaagatgtatccattcatcaaaggaacggcgaagttgaaaacggtacgcaag

SEQ ID NO: 111578 - DNA, 60 bp, Artificial
  Synthetic oligonucleotide
ggcgaagttgaaaacggtacgcaagctggttgatgcagtaaatcacgcttggggcgttga

SEQ ID NO: 111579 - DNA, 60 bp, Artificial
  Synthetic oligonucleotide
cttgagcacgacccgctaaaaggccgcgcttatagaagagagttggttacaccaccccga

SEQ ID NO: 111580 - DNA, 60 bp, Artificial
  Synthetic oligonucleotide
aagagagttggttacaccaccccgagatttcggtcactttggactgtctcattattctag

SEQ ID NO: 111581 - DNA, 60 bp, Artificial
  Synthetic oligonucleotide
caccaccccgagatttcggtcactttggactgtctcattattctagagcaactactccaa

SEQ ID NO: 111582 - DNA, 60 bp, Artificial
  Synthetic oligonucleotide
attattctagagcaactactccaattcttgggaaaatgccggctgtgttctctggcatgt

SEQ ID NO: 111583 - DNA, 60 bp, Artificial
  Synthetic oligonucleotide
ggtacgcaagctggttgatgcagtaaatcacgcttggggcgttgagaagatcaggtatgc

SEQ ID NO: 111584 - DNA, 60 bp, Artificial
  Synthetic oligonucleotide
ggggcgttgagaagatcaggtatgcacttggtccaggtggcatgacaggctggtacaacc

SEQ ID NO: 111585 - DNA, 60 bp, Artificial
  Synthetic oligonucleotide
ccgaactatgcaacaggcacctatagtcttgactccagctgctctcacgatgttcccaga

SEQ ID NO: 111586 - DNA, 60 bp, Artificial
  Synthetic oligonucleotide
gggcgttgagaagatcaggtatgcacttggtccaggtggcatgacaggctggtacaaccg

SEQ ID NO: 111587 - DNA, 60 bp, Artificial
  Synthetic oligonucleotide
tggtacaaccgaactatgcaacaggcacctatagtcttgactccagctgctctcacgatg

SEQ ID NO: 111588 - DNA, 60 bp, Artificial
  Synthetic oligonucleotide
cgtggatttgattaataacgcttttgaaggccgtgtatcaatctacagcgcacaggaggg

SEQ ID NO: 111589 - DNA, 60 bp, Artificial
  Synthetic oligonucleotide
aatggtcatcaggtcgtggatttgattaataacgcttttgaaggccgtgtatcaatctac

SEQ ID NO: 111590 - DNA, 60 bp, Artificial
  Synthetic oligonucleotide
tcccgagaactttcgactcaagatcgagcttggagtggggcgttatggtatatgactatt

SEQ ID NO: 111591 - DNA, 60 bp, Artificial
  Synthetic oligonucleotide
cggtgtaaagttggaaggtgatgcccggcagactcaattcccgagaactttcgactcaag

SEQ ID NO: 111592 - DNA, 60 bp, Artificial
  Synthetic oligonucleotide
gcatgcattcaacggtgtaaagttggaaggtgatgcccggcagactcaattcccgagaac

SEQ ID NO: 111593 - DNA, 60 bp, Artificial
  Synthetic oligonucleotide
ctcgtcggacttagtgccaaacttcatgatgagagatccctcgcatgcattcaacggtgt

SEQ ID NO: 111594 - DNA, 60 bp, Artificial
  Synthetic oligonucleotide
atgattgactcgtcggacttagtgccaaacttcatgatgagagatccctcgcatgcattc

SEQ ID NO: 111595 - DNA, 60 bp, Artificial
  Synthetic oligonucleotide
caaagttggaccagtgctggacggcctcaattcttatgattgactcgtcggacttagtgc

SEQ ID NO: 111596 - DNA, 60 bp, Artificial
  Synthetic oligonucleotide
tggaagatcttgacacaaagttggaccagtgctggacggcctcaattcttatgattgact

SEQ ID NO: 111597 - DNA, 60 bp, Artificial
  Synthetic oligonucleotide
caatacactcgaattggacggatcccttgcaggtagtggaagatcttgacacaaagttgg

SEQ ID NO: 111598 - DNA, 60 bp, Artificial
  Synthetic oligonucleotide
tatgactattctgaacttgagcacgacccgctaaaaggccgcgcttatagaagagagttg

SEQ ID NO: 111599 - DNA, 60 bp, Artificial
  Synthetic oligonucleotide
cccgagaactttcgactcaagatcgagcttggagtggggcgttatggtatatgactattc

SEQ ID NO: 111600 - DNA, 60 bp, Artificial
  Synthetic oligonucleotide
gcggagggaggttccttggtggagctgaactggcttcaggttgaccctgattcaatgttc

SEQ ID NO: 111601 - DNA, 60 bp, Artificial
  Synthetic oligonucleotide
ttcaatgttcagatcaatacactcgaattggacggatcccttgcaggtagtggaagatct

SEQ ID NO: 111602 - DNA, 60 bp, Artificial
  Synthetic oligonucleotide
tgtaaccaacagattcgccaacaggattacgttgatgtgcagttcgccgaccgtgtgact

SEQ ID NO: 111603 - DNA, 60 bp, Artificial
  Synthetic oligonucleotide
cgccaacaggattacgttgatgtgcagttcgccgaccgtgtgactgctcattggaagaga

SEQ ID NO: 111604 - DNA, 60 bp, Artificial
  Synthetic oligonucleotide
atcaatctacagcgcacaggagggatgggacaagacaatctcagcacagccagatatgat

SEQ ID NO: 111605 - DNA, 60 bp, Artificial
  Synthetic oligonucleotide
acaggagggatgggacaagacaatctcagcacagccagatatgatggtgtgtggtggcgc

SEQ ID NO: 111606 - DNA, 60 bp, Artificial
  Synthetic oligonucleotide
tgcatgcgatgatgaacgatgtatcaccagaggatctcgaccgagtacgtgcggagggag

SEQ ID NO: 111607 - DNA, 60 bp, Artificial
  Synthetic oligonucleotide
acgatgtatcaccagaggatctcgaccgagtacgtgcggagggaggttccttggtggagc

SEQ ID NO: 111608 - DNA, 60 bp, Artificial
  Synthetic oligonucleotide
ccgtgtgactgctcattggaagagaggtatgctgtctttcgttgctcagatgcatgcgat

SEQ ID NO: 111609 - DNA, 60 bp, Artificial
  Synthetic oligonucleotide
cgtgtgactgctcattggaagagaggtatgctgtctttcgttgctcagatgcatgcgatg

SEQ ID NO: 111610 - DNA, 60 bp, Artificial
  Synthetic oligonucleotide
ggtgcatatattgttaagcatactatcaaattgaagcaggagaagtggttaggtaaaagg

SEQ ID NO: 111611 - DNA, 60 bp, Artificial
  Synthetic oligonucleotide
caattttcaaatggtgcatatattgttaagcatactatcaaattgaagcaggagaagtgg

SEQ ID NO: 111612 - DNA, 60 bp, Artificial
  Synthetic oligonucleotide
ggccaagaaatgaatctatgttcacattcttaaattttccaactattaaacaattttcaa

SEQ ID NO: 111613 - DNA, 60 bp, Artificial
  Synthetic oligonucleotide
ggaaattaacacatgtaggctataacggaaaaaatacacgaggtcactataatttctcat

SEQ ID NO: 111614 - DNA, 60 bp, Artificial
  Synthetic oligonucleotide
ccaacggatttcgaacttaaagattcggtaattacatcatatgatggttgtttaggcatg

SEQ ID NO: 111615 - DNA, 60 bp, Artificial
  Synthetic oligonucleotide
ggacgtttctaccaacggatttcgaacttaaagattcggtaattacatcatatgatggtt

SEQ ID NO: 111616 - DNA, 60 bp, Artificial
  Synthetic oligonucleotide
ggacctagaattgccaataacagcaaaactacttcatcatccaactactgaaattagatc

SEQ ID NO: 111617 - DNA, 60 bp, Artificial
  Synthetic oligonucleotide
tggacctagaattgccaataacagcaaaactacttcatcatccaactactgaaattagat

SEQ ID NO: 111618 - DNA, 60 bp, Artificial
  Synthetic oligonucleotide
caggtatagcagcaattgaagtacagtctccagatgaattatttgcgttaataagatgta

SEQ ID NO: 111619 - DNA, 60 bp, Artificial
  Synthetic oligonucleotide
tcagtattggataactaaaactgatataattaactatctattacctggatggaaattaac

SEQ ID NO: 111620 - DNA, 54 bp, Artificial
  Synthetic oligonucleotide
ttacaagatgacttaacagtattgagatacgctaatgaaattgagagatacata

SEQ ID NO: 111621 - DNA, 59 bp, Artificial
  Synthetic oligonucleotide
ctcagtttcaggacatgtctacaatgcattgatttattacagatataattatgcatttg

SEQ ID NO: 111622 - DNA, 60 bp, Artificial
  Synthetic oligonucleotide
atgttttatagaaatcatgttacgtttggacaatcacgaatgtttattccacacattaca

SEQ ID NO: 111623 - DNA, 60 bp, Artificial
  Synthetic oligonucleotide
catgttacgtttggacaatcacgaatgtttattccacacattacacttagctttagtaac

SEQ ID NO: 111624 - DNA, 60 bp, Artificial
  Synthetic oligonucleotide
gtataccttatgaatacgatgtcaaagttccacatttgacgttaggagtactatttatat

SEQ ID NO: 111625 - DNA, 60 bp, Artificial
  Synthetic oligonucleotide
cagagttatttaaaatggaaattagtactagctatacttatatgctatctgataatacat

SEQ ID NO: 111626 - DNA, 60 bp, Artificial
  Synthetic oligonucleotide
caaagctcagaatcaattcaatttatttaagaaagattaaaggtgaaaccgtatttgata

SEQ ID NO: 111627 - DNA, 55 bp, Artificial
  Synthetic oligonucleotide
gtatttgatatgtctgagtgagctagaaacttaacacactagtcacgatgtgacc

SEQ ID NO: 111628 - DNA, 60 bp, Artificial
  Synthetic oligonucleotide
acacattacacttagctttagtaacaaacagacggttagaatagaaagtacaaagctcag

SEQ ID NO: 111629 - DNA, 60 bp, Artificial
  Synthetic oligonucleotide
cacattacacttagctttagtaacaaacagacggttagaatagaaagtacaaagctcaga

SEQ ID NO: 111630 - DNA, 60 bp, Artificial
  Synthetic oligonucleotide
gattaaagatttatctttagtagaaggaatacaaatgaagctacagaatctagaggagaa

SEQ ID NO: 111631 - DNA, 60 bp, Artificial
  Synthetic oligonucleotide
gcgatgagatttaaagtaccaactacgcagcagccggtaatacaaatatactcagctccc

SEQ ID NO: 111632 - DNA, 60 bp, Artificial
  Synthetic oligonucleotide
catttgtattccttctactaaagataaatctttaatctcttctttagtcggtgcttctaa

SEQ ID NO: 111633 - DNA, 60 bp, Artificial
  Synthetic oligonucleotide
tacagaaggagtcgtcagaaagatcaaaagacgaaagcatgatggtcaaagaatatcggc

SEQ ID NO: 111634 - DNA, 60 bp, Artificial
  Synthetic oligonucleotide
gactggaaaaagcattacagaaggagtcgtcagaaagatcaaaagacgaaagcatgatgg

SEQ ID NO: 111635 - DNA, 60 bp, Artificial
  Synthetic oligonucleotide
tcctgtatgtgtaggacctcattacgattctcctctagattctgtagcttcatttgtatt

SEQ ID NO: 111636 - DNA, 52 bp, Artificial
  Synthetic oligonucleotide
gcttgtcacgttcgtcacctatctctttatgatcttctatcatcgcctcacg

SEQ ID NO: 111637 - DNA, 60 bp, Artificial
  Synthetic oligonucleotide
ctttagtagaaggaatacaaatgaagctacagaatctagaggagaatcgtaatgaggtcc

SEQ ID NO: 111638 - DNA, 60 bp, Artificial
  Synthetic oligonucleotide
gtgtaggacctcattacgattctcctctagattctgtagcttcatttgtattccttctac

SEQ ID NO: 111639 - DNA, 60 bp, Artificial
  Synthetic oligonucleotide
tgctatttcctgtatcgcttcctcctgtatgcctgtcgattcaacctcaatggcatcctt

SEQ ID NO: 111640 - DNA, 60 bp, Artificial
  Synthetic oligonucleotide
ctgtatcgcttcctcctgtatgcctgtcgattcaacctcaatggcatccttcaatgcttc

SEQ ID NO: 111641 - DNA, 60 bp, Artificial
  Synthetic oligonucleotide
ggttgaatcgacaggcatacaggaggaagcgatacaggaaatagcagggatgagcgctga

SEQ ID NO: 111642 - DNA, 60 bp, Artificial
  Synthetic oligonucleotide
cattgaggttgaatcgacaggcatacaggaggaagcgatacaggaaatagcagggatgag

SEQ ID NO: 111643 - DNA, 60 bp, Artificial
  Synthetic oligonucleotide
tggcatccttcaatgcttcaatcttctgccgatattctttgaccatcatgctttcgtctt

SEQ ID NO: 111644 - DNA, 60 bp, Artificial
  Synthetic oligonucleotide
gaatatcggcagaagattgaagcattgaaggatgccattgaggttgaatcgacaggcata

SEQ ID NO: 111645 - DNA, 60 bp, Artificial
  Synthetic oligonucleotide
ttcaactccctccttatactcactgactgcgaatttatacacttcatctaaatccgcacc

SEQ ID NO: 111646 - DNA, 60 bp, Artificial
  Synthetic oligonucleotide
aatccgcaccaaaccggcgtataatctgttcgttatgctttgtccgcaccacttcacctt

SEQ ID NO: 111647 - DNA, 60 bp, Artificial
  Synthetic oligonucleotide
tgctttgtccgcaccacttcacctttcatttcatcttctaattccttaatttttctctgt

SEQ ID NO: 111648 - DNA, 60 bp, Artificial
  Synthetic oligonucleotide
gggaacaagggatacagagaaaaattaaggaattagaagatgaaatgaaaggtgaagtgg

SEQ ID NO: 111649 - DNA, 60 bp, Artificial
  Synthetic oligonucleotide
gggatttcatctcccgcccctaacacattcaataggactgctctctttacggtttcacca

SEQ ID NO: 111650 - DNA, 60 bp, Artificial
  Synthetic oligonucleotide
cgtatggtgaaaccgtaaagagagcagtcctattgaatgtgttaggggcgggagatgaaa

SEQ ID NO: 111651 - DNA, 60 bp, Artificial
  Synthetic oligonucleotide
ccgcccctaacacattcaataggactgctctctttacggtttcaccatacgattcacccg

SEQ ID NO: 111652 - DNA, 60 bp, Artificial
  Synthetic oligonucleotide
ccagggcagtgttgaatcggtattaacgggtgaatcgtatggtgaaaccgtaaagagagc

SEQ ID NO: 111653 - DNA, 60 bp, Artificial
  Synthetic oligonucleotide
ggtttcaccatacgattcacccgttaataccgattgaacactgccctggattagtccatc

SEQ ID NO: 111654 - DNA, 60 bp, Artificial
  Synthetic oligonucleotide
aattgatggactaatccagggcagtgttgaatcggtattaacgggtgaatcgtatggtga

SEQ ID NO: 111655 - DNA, 60 bp, Artificial
  Synthetic oligonucleotide
ttcacccgttaataccgattgaacactgccctggattagtccatcaattgctgccgagcc

SEQ ID NO: 111656 - DNA, 60 bp, Artificial
  Synthetic oligonucleotide
agcatgatggtcaaagaatatcggcagaagattgaagcattgaaggatgccattgaggtt

SEQ ID NO: 111657 - DNA, 52 bp, Artificial
  Synthetic oligonucleotide
tcgtttcaattcaccaaactccgctttcgtcagttcaccataagatgttaac

SEQ ID NO: 111658 - DNA, 60 bp, Artificial
  Synthetic oligonucleotide
cagggatgagcgctgatattttggagagtgcagcggaggaagtgcccttgtttggagggg

SEQ ID NO: 111659 - DNA, 60 bp, Artificial
  Synthetic oligonucleotide
ttagtccatcaattgctgccgagccgatatcgctctccgcgaatcgtactgccgtatccc

SEQ ID NO: 111660 - DNA, 60 bp, Artificial
  Synthetic oligonucleotide
ctcagctccctgggattcggacgatgtgtttatgttccattgtatatcacatcaccattt

SEQ ID NO: 111661 - DNA, 60 bp, Artificial
  Synthetic oligonucleotide
gtccatcaattgctgccgagccgatatcgctctccgcgaatcgtactgccgtatccccga

SEQ ID NO: 111662 - DNA, 60 bp, Artificial
  Synthetic oligonucleotide
ctttcgtcttttgatctttctgacgactccttctgtaatgctttttccagtcgtttcaat

SEQ ID NO: 111663 - DNA, 60 bp, Artificial
  Synthetic oligonucleotide
gcggtatttgacgttagcgctccccccacctttttaccaaacttactcagttgtttaatg

SEQ ID NO: 111664 - DNA, 60 bp, Artificial
  Synthetic oligonucleotide
gttaaaaagtggtgcgtagcttgcataatgggcaagttcattaaacaactgagtaagttt

SEQ ID NO: 111665 - DNA, 60 bp, Artificial
  Synthetic oligonucleotide
agtggtgcgtagcttgcataatgggcaagttcattaaacaactgagtaagtttggtaaaa

SEQ ID NO: 111666 - DNA, 60 bp, Artificial
  Synthetic oligonucleotide
gtgcttctaatattgcttctaatgttttcggttgtattttcggcgtacgcaagtgtgata

SEQ ID NO: 111667 - DNA, 60 bp, Artificial
  Synthetic oligonucleotide
ggtgatgtgatatacaatggaacataaacacatcgtccgaatcccagggagctgagtata

SEQ ID NO: 111668 - DNA, 60 bp, Artificial
  Synthetic oligonucleotide
gtaccaactacgcagcagccggtaatacaaatatactcagctccctgggattcggacgat

SEQ ID NO: 111669 - DNA, 60 bp, Artificial
  Synthetic oligonucleotide
gaactgatccttttcttcaactccctccttatactcactgactgcgaatttatacacttc

SEQ ID NO: 111670 - DNA, 60 bp, Artificial
  Synthetic oligonucleotide
ttattaacgcattaagtggtatagatctatcacacttgcgtacgccgaaaatacaaccga

SEQ ID NO: 111671 - DNA, 60 bp, Artificial
  Synthetic oligonucleotide
gttaacatcttatggtgaactgacgaaagcggagtttggtgaattgaaacgactggaaaa

SEQ ID NO: 111672 - DNA, 60 bp, Artificial
  Synthetic oligonucleotide
ctccttctattgcacgcgcggtcgctatgctcgttgccaccccccctccaaacaagggca

SEQ ID NO: 111673 - DNA, 60 bp, Artificial
  Synthetic oligonucleotide
tatacacttcatctaaatccgcaccaaaccggcgtataatctgttcgttatgctttgtcc

SEQ ID NO: 111674 - DNA, 60 bp, Artificial
  Synthetic oligonucleotide
atacaaccgaaaacattagaagcaatattagaagcaccgactaaagaagagattaaagat

SEQ ID NO: 111675 - DNA, 60 bp, Artificial
  Synthetic oligonucleotide
gtggtatagatctatcacacttgcgtacgccgaaaatacaaccgaaaacattagaagcaa

SEQ ID NO: 111676 - DNA, 60 bp, Artificial
  Synthetic oligonucleotide
gtgaagtggtgcggacaaagcataacgaacagattatacgccggtttggtgcggatttag

SEQ ID NO: 111677 - DNA, 60 bp, Artificial
  Synthetic oligonucleotide
aacaagggcacttcctccgctgcactctccaaaatatcagcgctcatccctgctatttcc

SEQ ID NO: 111678 - DNA, 60 bp, Artificial
  Synthetic oligonucleotide
atcaccatttaaacgaatcctcctttttagggtttgatcttgaattagaatatgtgcatt

SEQ ID NO: 111679 - DNA, 60 bp, Artificial
  Synthetic oligonucleotide
cccagggagctgagtatatttgtattaccggctgctgcgtagttggtactttaaatctca

SEQ ID NO: 111680 - DNA, 60 bp, Artificial
  Synthetic oligonucleotide
cgcgtcgtacccaataagggcaaatggtttggaaagaaggccgtctcacagaatgatcgc

SEQ ID NO: 111681 - DNA, 60 bp, Artificial
  Synthetic oligonucleotide
ctcacagaatgatcgcatggcatggatcgttgctaacttcgttctcgctcccgtatgccc

SEQ ID NO: 111682 - DNA, 60 bp, Artificial
  Synthetic oligonucleotide
gttagacgaggttttgaacgcatgcggccaacagcagggtatgttttctatgatcaacaa

SEQ ID NO: 111683 - DNA, 60 bp, Artificial
  Synthetic oligonucleotide
gaacgcatgcggccaacagcagggtatgttttctatgatcaacaaacggctcgactacgt

SEQ ID NO: 111684 - DNA, 60 bp, Artificial
  Synthetic oligonucleotide
ctcatggcacccaatatgttgttgaagtcgttgagggtcagtctgatgaaaacgtttttt

SEQ ID NO: 111685 - DNA, 60 bp, Artificial
  Synthetic oligonucleotide
tgatgcggtctcaggtgtgggaatgtgggtgattggatggacacgcgatggtgattatca

SEQ ID NO: 111686 - DNA, 60 bp, Artificial
  Synthetic oligonucleotide
gagtttgcccgtagtctccatcgcctgatgccggttgtcaaggagcataagttagacgag

SEQ ID NO: 111687 - DNA, 60 bp, Artificial
  Synthetic oligonucleotide
gcgtcatcggaagacactcgtcgcgtcacctacgatacccaagctataacgcatcaaatc

SEQ ID NO: 111688 - DNA, 60 bp, Artificial
  Synthetic oligonucleotide
gtccatcgggatttgagcgtgttgcgtgtgctaacaaccttcgcgtcgtacccaataagg

SEQ ID NO: 111689 - DNA, 60 bp, Artificial
  Synthetic oligonucleotide
aaccttcgcgtcgtacccaataagggcaaatggtttggaaagaaggccgtctcacagaat

SEQ ID NO: 111690 - DNA, 60 bp, Artificial
  Synthetic oligonucleotide
gctactcagatgctataccgattgttaacgttacgacagaagatgggactgagcgaccta

SEQ ID NO: 111691 - DNA, 60 bp, Artificial
  Synthetic oligonucleotide
tatgagagacattcttgaagttgttcgtggatctaaaaattcgtatgcttggcgtgaggt

SEQ ID NO: 111692 - DNA, 53 bp, Artificial
  Synthetic oligonucleotide
acgcattcaatggggtttcgaaatccgagcacgcgcgcatgggttacttggcg

SEQ ID NO: 111693 - DNA, 60 bp, Artificial
  Synthetic oligonucleotide
acgcgcaagcacgtcgactatcatggctgggtcatttgggcgcgattttactggtttctt

SEQ ID NO: 111694 - DNA, 60 bp, Artificial
  Synthetic oligonucleotide
gactatcatggctgggtcatttgggcgcgattttactggtttcttctgtccagcctgcgg

SEQ ID NO: 111695 - DNA, 60 bp, Artificial
  Synthetic oligonucleotide
cgccgttgatcggatcgtgtctttgaacttcgagtatgatgatggtatatatccgaccgt

SEQ ID NO: 111696 - DNA, 60 bp, Artificial
  Synthetic oligonucleotide
atatatccgaccgttctcggtagtgtccagcaagggtacgtgggaggaatcgacgatgtg

SEQ ID NO: 111697 - DNA, 60 bp, Artificial
  Synthetic oligonucleotide
ttctcggtagtgtccagcaagggtacgtgggaggaatcgacgatgtggatcgccccagca

SEQ ID NO: 111698 - DNA, 60 bp, Artificial
  Synthetic oligonucleotide
cgacgatgtggatcgccccagcacgcagcctgtacgtcgtggcaatttgatccgttgccc

SEQ ID NO: 111699 - DNA, 60 bp, Artificial
  Synthetic oligonucleotide
ccccagcacgcagcctgtacgtcgtggcaatttgatccgttgccccgagggtgtgttcgt

SEQ ID NO: 111700 - DNA, 60 bp, Artificial
  Synthetic oligonucleotide
tccgttgccccgagggtgtgttcgtcaatcaaccccgcaagttggtgatggccatgatcg

SEQ ID NO: 111701 - DNA, 60 bp, Artificial
  Synthetic oligonucleotide
gcggtcgtcatgctcgagagtatatgtacatgccgacgtacacacatcttgttgatacct

SEQ ID NO: 111702 - DNA, 60 bp, Artificial
  Synthetic oligonucleotide
gcggtctcaggtgtgggaatgtgggtgattggatggacacgcgatggtgattatcaacta

SEQ ID NO: 111703 - DNA, 60 bp, Artificial
  Synthetic oligonucleotide
ggtgagtattgcggtcgtcatgctcgagagtatatgtacatgccgacgtacacacatctt

SEQ ID NO: 111704 - DNA, 60 bp, Artificial
  Synthetic oligonucleotide
ggcgtgaggtcagaaagtcgcttttggatcagtacgcttcgtccatcgatgagtttgccc

SEQ ID NO: 111705 - DNA, 60 bp, Artificial
  Synthetic oligonucleotide
agtcgcttttggatcagtacgcttcgtccatcgatgagtttgcccgtagtctccatcgcc

SEQ ID NO: 111706 - DNA, 60 bp, Artificial
  Synthetic oligonucleotide
gtgattatcaactaagtccatcgggatttgagcgtgttgcgtgtgctaacaaccttcgcg

SEQ ID NO: 111707 - DNA, 60 bp, Artificial
  Synthetic oligonucleotide
gcccgtagtctccatcgcctgatgccggttgtcaaggagcataagttagacgaggttttg

SEQ ID NO: 111708 - DNA, 60 bp, Artificial
  Synthetic oligonucleotide
tacgacgaattcggaaccatttctttgacatctccccacaaaagtacttcgatcgaatgc

SEQ ID NO: 111709 - DNA, 57 bp, Artificial
  Synthetic oligonucleotide
acaattttaaaagaacgcccgccttaccttgaagccttcaacacaatgcctgcgcgt

SEQ ID NO: 111710 - DNA, 60 bp, Artificial
  Synthetic oligonucleotide
cggaaccatttctttgacatctccccacaaaagtacttcgatcgaatgctactcagatgc

SEQ ID NO: 111711 - DNA, 60 bp, Artificial
  Synthetic oligonucleotide
gatcgaatgctactcagatgctataccgattgttaacgttacgacagaagatgggactga

SEQ ID NO: 111712 - DNA, 60 bp, Artificial
  Synthetic oligonucleotide
cggcaagattgatgcgggaacggtgcgctggtcatttgagtcgttttcgaacacatcccc

SEQ ID NO: 111713 - DNA, 60 bp, Artificial
  Synthetic oligonucleotide
catggcgttgttgcaccaaaggacaccattcagcacagcatgcaacacgacttctcggcc

SEQ ID NO: 111714 - DNA, 60 bp, Artificial
  Synthetic oligonucleotide
ccgtatgccctaattatgttccaacttcagtcatgccacccaccacctctgtcggcaaga

SEQ ID NO: 111715 - DNA, 60 bp, Artificial
  Synthetic oligonucleotide
gcaacacgacttctcggccttaccctttggtctatcctacgagctgtataccgacgcgcc

SEQ ID NO: 111716 - DNA, 60 bp, Artificial
  Synthetic oligonucleotide
tcgactacgtcaatcaacagctcgctcaacttcaagcgtcatcggaagacactcgtcgcg

SEQ ID NO: 111717 - DNA, 60 bp, Artificial
  Synthetic oligonucleotide
tgatcaacaaacggctcgactacgtcaatcaacagctcgctcaacttcaagcgtcatcgg

SEQ ID NO: 111718 - DNA, 57 bp, Artificial
  Synthetic oligonucleotide
cccctctcctatccgcaacaacatggagtcattgctacaaggactaggcattccgga

SEQ ID NO: 111719 - DNA, 60 bp, Artificial
  Synthetic oligonucleotide
gaacacatcccccgattccccctctcctatccgcaacaacatggagtcattgctacaagg

SEQ ID NO: 111720 - DNA, 60 bp, Artificial
  Synthetic oligonucleotide
gccatgatcggaggcatgagaatcgcttgagcaagagagaaaggatgcattaacgaagtg

SEQ ID NO: 111721 - DNA, 60 bp, Artificial
  Synthetic oligonucleotide
cccgagggtgtgttcgtcaatcaaccccgcaagttggtgatggccatgatcggaggcatg

SEQ ID NO: 111722 - DNA, 60 bp, Artificial
  Synthetic oligonucleotide
taacgaagtggtggagtttgctggcgctggacaaggtggacatgagacgtggtgggccgt

SEQ ID NO: 111723 - DNA, 60 bp, Artificial
  Synthetic oligonucleotide
cggaggcatgagaatcgcttgagcaagagagaaaggatgcattaacgaagtggtggagtt

SEQ ID NO: 111724 - DNA, 60 bp, Artificial
  Synthetic oligonucleotide
tgggccaactccaaacacgaccgtgggcattgtgtacgcagcacacccagccccatacta

SEQ ID NO: 111725 - DNA, 60 bp, Artificial
  Synthetic oligonucleotide
ccgacgcgcctaagttgggtcacatttataagaccatgggaccacgtgggccaactccaa

SEQ ID NO: 111726 - DNA, 60 bp, Artificial
  Synthetic oligonucleotide
cgcatggcatggatcgttgctaacttcgttctcgctcccgtatgccctaattatgttcca

SEQ ID NO: 111727 - DNA, 60 bp, Artificial
  Synthetic oligonucleotide
gcattccggacgttttggaagggttgacacgcctcggtgagtattgcggtcgtcatgctc

SEQ ID NO: 111728 - DNA, 60 bp, Artificial
  Synthetic oligonucleotide
tttaacatacaatcatggcgttgttgcaccaaaggacaccattcagcacagcatgcaaca

SEQ ID NO: 111729 - DNA, 60 bp, Artificial
  Synthetic oligonucleotide
tgctacaaggactaggcattccggacgttttggaagggttgacacgcctcggtgagtatt

SEQ ID NO: 111730 - DNA, 60 bp, Artificial
  Synthetic oligonucleotide
cttttagacatggcataatttcaaaacatggagggaagaaaacttccttaatcattttag

SEQ ID NO: 111731 - DNA, 60 bp, Artificial
  Synthetic oligonucleotide
ctcaagggacacgcctcaacaaattcacgacgcgatcttagatgtgatatcagacactaa

SEQ ID NO: 111732 - DNA, 60 bp, Artificial
  Synthetic oligonucleotide
aaatattactcaagggacacgcctcaacaaattcacgacgcgatcttagatgtgatatca

SEQ ID NO: 111733 - DNA, 60 bp, Artificial
  Synthetic oligonucleotide
taatttcaaaacatggagggaagaaaacttccttaatcattttagttgttgcaccgccga

SEQ ID NO: 111734 - DNA, 60 bp, Artificial
  Synthetic oligonucleotide
catttcaagttaataagccagaattggatgggactgaatcaaatggtattaaatattact

SEQ ID NO: 111735 - DNA, 60 bp, Artificial
  Synthetic oligonucleotide
agccagaattggatgggactgaatcaaatggtattaaatattactcaagggacacgcctc

SEQ ID NO: 111736 - DNA, 52 bp, Artificial
  Synthetic oligonucleotide
cctcaatgttatctagagcggagaaagctaatagaaaatcatctagggcgaa

SEQ ID NO: 111737 - DNA, 60 bp, Artificial
  Synthetic oligonucleotide
tgtgatatcagacactaataagtctttactgatgaacagtaaaccaattggacgaacagg

SEQ ID NO: 111738 - DNA, 50 bp, Artificial
  Synthetic oligonucleotide
ttactgatgaacagtaaaccaattggacgaacaggcaaggaagcaattgc

SEQ ID NO: 111739 - DNA, 60 bp, Artificial
  Synthetic oligonucleotide
ggattctgttatcgcaagaaagatagtcccttcgtctacagttattcttgacggttatgg

SEQ ID NO: 111740 - DNA, 60 bp, Artificial
  Synthetic oligonucleotide
gttatcgcaagaaagatagtcccttcgtctacagttattcttgacggttatggcgaatcg

SEQ ID NO: 111741 - DNA, 60 bp, Artificial
  Synthetic oligonucleotide
acggttatggcgaatcgtttatccgtgaaaatccaaacgccacgttgatggacattgtca

SEQ ID NO: 111742 - DNA, 60 bp, Artificial
  Synthetic oligonucleotide
cggttatggcgaatcgtttatccgtgaaaatccaaacgccacgttgatggacattgtcac

SEQ ID NO: 111743 - DNA, 60 bp, Artificial
  Synthetic oligonucleotide
gacattgtcactagttcaaacaacacggcaccaaaaacaacatatcaaagtataatgcca

SEQ ID NO: 111744 - DNA, 60 bp, Artificial
  Synthetic oligonucleotide
tataatgccatcaatgtcggctcttttaggtgttccttacgtccagggagcttttagaca

SEQ ID NO: 111745 - DNA, 60 bp, Artificial
  Synthetic oligonucleotide
gccatcaatgtcggctcttttaggtgttccttacgtccagggagcttttagacatggcat

SEQ ID NO: 111746 - DNA, 60 bp, Artificial
  Synthetic oligonucleotide
aggtgattatggtaataatgtagttatcatagaaaatccaccacatagcgatgttagggg

SEQ ID NO: 111747 - DNA, 60 bp, Artificial
  Synthetic oligonucleotide
tatcattgcaggtgattatggtaataatgtagttatcatagaaaatccaccacatagcga

SEQ ID NO: 111748 - DNA, 60 bp, Artificial
  Synthetic oligonucleotide
acaattagaaatcaagttatcgagatgggagaaggtactaaacctgatgccctgatcagc

SEQ ID NO: 111749 - DNA, 60 bp, Artificial
  Synthetic oligonucleotide
agagttagtgaatctacaattagaaatcaagttatcgagatgggagaaggtactaaacct

SEQ ID NO: 111750 - DNA, 60 bp, Artificial
  Synthetic oligonucleotide
ctaattattggatggtcgatgaagtacttcaaaggatatgtggacggatataagtctggt

SEQ ID NO: 111751 - DNA, 60 bp, Artificial
  Synthetic oligonucleotide
aattcattggattcactaattattggatggtcgatgaagtacttcaaaggatatgtggac

SEQ ID NO: 111752 - DNA, 60 bp, Artificial
  Synthetic oligonucleotide
gtgtttacatccgatgagcaggaaaagtatcgcaaagacaaggacgaagaattcttcaag

SEQ ID NO: 111753 - DNA, 60 bp, Artificial
  Synthetic oligonucleotide
ctgaatcagtgtttacatccgatgagcaggaaaagtatcgcaaagacaaggacgaagaat

SEQ ID NO: 111754 - DNA, 60 bp, Artificial
  Synthetic oligonucleotide
acctgatgccctgatcagcactcatggtgatgtattcatagattctgaatcagtgtttac

SEQ ID NO: 111755 - DNA, 60 bp, Artificial
  Synthetic oligonucleotide
tactaaacctgatgccctgatcagcactcatggtgatgtattcatagattctgaatcagt

SEQ ID NO: 111756 - DNA, 60 bp, Artificial
  Synthetic oligonucleotide
tcccgctggatggatttgacataccaccggaactcaccagatagagtgaagctccaagat

SEQ ID NO: 111757 - DNA, 60 bp, Artificial
  Synthetic oligonucleotide
gtcggatggatcctcgcctacgtgaagaagtagtacggctgataatcgcattaacgagtg

SEQ ID NO: 111758 - DNA, 60 bp, Artificial
  Synthetic oligonucleotide
gacatccccgaatttgaggtatccgatagctgatgttagcggcggtatcggaatgagtcc

SEQ ID NO: 111759 - DNA, 60 bp, Artificial
  Synthetic oligonucleotide
gcgcctcagtatatgagtaagaatctgtgggtggagcagtggcaggatggagtacttcgg

SEQ ID NO: 111760 - DNA, 60 bp, Artificial
  Synthetic oligonucleotide
ttcgagtgttacccagttgggtgctcgagtgggacaacttgagacaggacttgcagagct

SEQ ID NO: 111761 - DNA, 60 bp, Artificial
  Synthetic oligonucleotide
accatgggattaaatgatggactcacgttgtcagggaataatctcgccatccgattgcca

SEQ ID NO: 111762 - DNA, 60 bp, Artificial
  Synthetic oligonucleotide
acaagcggatttcgaatctaggatatccacattagagcgcacggcggtcactagcgcggg

SEQ ID NO: 111763 - DNA, 60 bp, Artificial
  Synthetic oligonucleotide
ccgattgccaggaaatacgggtctgaatattcaaaatggtggacttcagtttcgatttaa

SEQ ID NO: 111764 - DNA, 60 bp, Artificial
  Synthetic oligonucleotide
gatggactcacgttgtcagggaataatctcgccatccgattgccaggaaatacgggtctg

SEQ ID NO: 111765 - DNA, 60 bp, Artificial
  Synthetic oligonucleotide
ggcgcaactgagcaaagttacgtggcgtcggcagtgactcccttgagattaaacagtagc

SEQ ID NO: 111766 - DNA, 60 bp, Artificial
  Synthetic oligonucleotide
ctcaaggataggcgcaactgagcaaagttacgtggcgtcggcagtgactcccttgagatt

SEQ ID NO: 111767 - DNA, 60 bp, Artificial
  Synthetic oligonucleotide
gacagttcaacacttgaaattaattctagtggacagctaactgttagatcgacatccccg

SEQ ID NO: 111768 - DNA, 60 bp, Artificial
  Synthetic oligonucleotide
ctaatagacagttcaacacttgaaattaattctagtggacagctaactgttagatcgaca

SEQ ID NO: 111769 - DNA, 60 bp, Artificial
  Synthetic oligonucleotide
agattggaaagctctatcggagccctccaaacagttgtcaatggacttgattcgagtgtt

SEQ ID NO: 111770 - DNA, 60 bp, Artificial
  Synthetic oligonucleotide
ttgcatcagtcagtgatgctcaacttgcaatctccagattggaaagctctatcggagccc

SEQ ID NO: 111771 - DNA, 60 bp, Artificial
  Synthetic oligonucleotide
aagtggcctgccatgaccgtttcgtacccgcgtagtttcacgtgaggatcagaccacccc

SEQ ID NO: 111772 - DNA, 60 bp, Artificial
  Synthetic oligonucleotide
cggcgctcgagaagacgtctcaaatacactctgatactatcctccggatcacccagggac

SEQ ID NO: 111773 - DNA, 60 bp, Artificial
  Synthetic oligonucleotide
caagggtctcggcgctcgagaagacgtctcaaatacactctgatactatcctccggatca

SEQ ID NO: 111774 - DNA, 60 bp, Artificial
  Synthetic oligonucleotide
cgagtgataatggagcatcactgtcaaaagggcttgaatcaagggtctcggcgctcgaga

SEQ ID NO: 111775 - DNA, 60 bp, Artificial
  Synthetic oligonucleotide
aatcgcattaacgagtgataatggagcatcactgtcaaaagggcttgaatcaagggtctc

SEQ ID NO: 111776 - DNA, 60 bp, Artificial
  Synthetic oligonucleotide
gtacgcctcagtatatgagtaagaatctgtgggtggagcagtggcaggatggagtacttc

SEQ ID NO: 111777 - DNA, 60 bp, Artificial
  Synthetic oligonucleotide
gtgcgcctcagtatatgagtaagaatctgtgggtggagcagtggcaggatggagtacttc

SEQ ID NO: 111778 - DNA, 60 bp, Artificial
  Synthetic oligonucleotide
gtggtcacatatggagcacagactgtagctatagggttgtcgtcgggtggtacgcctcag

SEQ ID NO: 111779 - DNA, 60 bp, Artificial
  Synthetic oligonucleotide
gtggtcacatatggagcacagactgtagctatagggttgtcgtcgggtggtgcgcctcag

SEQ ID NO: 111780 - DNA, 50 bp, Artificial
  Synthetic oligonucleotide
ggggtggctcaattacgcactcaaacagtaagtggcctgccatgaccgtt

SEQ ID NO: 111781 - DNA, 60 bp, Artificial
  Synthetic oligonucleotide
ggagtacttcggttacgtgttgaggggggtggctcaattacgcactcaaacagtaagtgg

SEQ ID NO: 111782 - DNA, 60 bp, Artificial
  Synthetic oligonucleotide
tgagtaagaatctgtgggtggagcagtggcaggatggagtacttcggttacgtgttgagg

SEQ ID NO: 111783 - DNA, 60 bp, Artificial
  Synthetic oligonucleotide
atcggagccctccaaacagttgtcaatggacttgattcgagtgttacccagttgggtgct

SEQ ID NO: 111784 - DNA, 60 bp, Artificial
  Synthetic oligonucleotide
gtcgggatgacttggttgcatcagtcagtgatgctcaacttgcaatctccagattggaaa

SEQ ID NO: 111785 - DNA, 60 bp, Artificial
  Synthetic oligonucleotide
cagtaagtggcctgccatgaccgtttcgtacccgcgtagtttcacgtgaggatcagacca

SEQ ID NO: 111786 - DNA, 60 bp, Artificial
  Synthetic oligonucleotide
acgagtaacatccatacaagcggatttcgaatctaggataaccacgttagagcgcacggc

SEQ ID NO: 111787 - DNA, 60 bp, Artificial
  Synthetic oligonucleotide
acaagcggatttcgaatctaggataaccacgttagagcgcacggcggtcactagcgcggg

SEQ ID NO: 111788 - DNA, 60 bp, Artificial
  Synthetic oligonucleotide
acgagtaacatccatacaagcggatttcgaatctaggatatccacattagagcgcacggc

SEQ ID NO: 111789 - DNA, 60 bp, Artificial
  Synthetic oligonucleotide
ggatcattgaccaccgagctatcaactctgacgttacgagtaacatccatacaagcggat

SEQ ID NO: 111790 - DNA, 60 bp, Artificial
  Synthetic oligonucleotide
gcagagctacgcgttgatcacgacaatctcgttgcgagagtggatactgcagaacgtaac

SEQ ID NO: 111791 - DNA, 60 bp, Artificial
  Synthetic oligonucleotide
gcagaacgtaacattggatcattgaccaccgagctatcaactctgacgttacgagtaaca

SEQ ID NO: 111792 - DNA, 60 bp, Artificial
  Synthetic oligonucleotide
cccagttgggtgctcgagtgggacaacttgagacaggacttgcagagctacgcgttgatc

SEQ ID NO: 111793 - DNA, 60 bp, Artificial
  Synthetic oligonucleotide
ttgcagagctacgcgttgatcacgacaatctcgttgcgagagtggatactgcagaacgta

SEQ ID NO: 111794 - DNA, 60 bp, Artificial
  Synthetic oligonucleotide
cgtggtcacatatggagcacagactgtagctatagggttgtcgtcgggtggtgcgcctca

SEQ ID NO: 111795 - DNA, 60 bp, Artificial
  Synthetic oligonucleotide
cgtggtcacatatggagcacagactgtagctatagggttgtcgtcgggtggtacgcctca

SEQ ID NO: 111796 - DNA, 60 bp, Artificial
  Synthetic oligonucleotide
gctattggtcggatggatcctcgcctacgtgaagaagtagtacggctgataatcgcatta

SEQ ID NO: 111797 - DNA, 60 bp, Artificial
  Synthetic oligonucleotide
tagatcgacatccccgaatttgaggtatccgatagctgatgttagcggcggtatcggaat

SEQ ID NO: 111798 - DNA, 60 bp, Artificial
  Synthetic oligonucleotide
gtatcggaatgagtccaaattataggtttaggcagagcatgtggataggaattgtctcct

SEQ ID NO: 111799 - DNA, 60 bp, Artificial
  Synthetic oligonucleotide
caaattataggtttaggcagagcatgtggataggaattgtctcctattctggtagtgggc

SEQ ID NO: 111800 - DNA, 60 bp, Artificial
  Synthetic oligonucleotide
attgtctcctattctggtagtgggctgaattggagggtacaggtgaactccgacattttt

SEQ ID NO: 111801 - DNA, 60 bp, Artificial
  Synthetic oligonucleotide
gtttctctatagctgacggtggagatctatcgttgaactttgttaccggattgttaccac

SEQ ID NO: 111802 - DNA, 60 bp, Artificial
  Synthetic oligonucleotide
acggtggagatctatcgttgaactttgttaccggattgttaccaccgttacttacaggag

SEQ ID NO: 111803 - DNA, 60 bp, Artificial
  Synthetic oligonucleotide
ttgttaccaccgttacttacaggagacactgagcccgcttttcataatgacgtggtcaca

SEQ ID NO: 111804 - DNA, 60 bp, Artificial
  Synthetic oligonucleotide
cttacaggagacactgagcccgcttttcataatgacgtggtcacatatggagcacagact

SEQ ID NO: 111805 - DNA, 60 bp, Artificial
  Synthetic oligonucleotide
ccgagacgatctatcaataatcggaaccaccggcctgaagggtaatccttctgaagctgt

SEQ ID NO: 111806 - DNA, 60 bp, Artificial
  Synthetic oligonucleotide
caaccgagacgatctatcaataatcggaaccaccggcctgaagggtaatccttctgaagc

SEQ ID NO: 111807 - DNA, 60 bp, Artificial
  Synthetic oligonucleotide
ctatctgggatctgattgcttgtaaagatatgcgtttcaacttgggtggaatgaatatgg

SEQ ID NO: 111808 - DNA, 60 bp, Artificial
  Synthetic oligonucleotide
gggatctgattgcttgtaaagatatgcgtttcaacttgggtggaatgaatatggctaagc

SEQ ID NO: 111809 - DNA, 60 bp, Artificial
  Synthetic oligonucleotide
gattgttcaaagtgcaagatgtatttactcaaggtacacctcgcgttgtcaggaaagatc

SEQ ID NO: 111810 - DNA, 60 bp, Artificial
  Synthetic oligonucleotide
aagatgtatttactcaaggtacacctcgcgttgtcaggaaagatctgattggcttggtcc

SEQ ID NO: 111811 - DNA, 60 bp, Artificial
  Synthetic oligonucleotide
cagagtgaatggtggacgaatgcttatctcgagaccggctttgggttcaggattgttcaa

SEQ ID NO: 111812 - DNA, 60 bp, Artificial
  Synthetic oligonucleotide
gtggacgaatgcttatctcgagaccggctttgggttcaggattgttcaaagtgcaagatg

SEQ ID NO: 111813 - DNA, 60 bp, Artificial
  Synthetic oligonucleotide
tggggtgggtagttactgtggatcagttgatgcttggacacgttcgttgactatctggga

SEQ ID NO: 111814 - DNA, 60 bp, Artificial
  Synthetic oligonucleotide
gggtgggtagttactgtggatcagttgatgcttggacacgttcgttgactatctgggatc

SEQ ID NO: 111815 - DNA, 60 bp, Artificial
  Synthetic oligonucleotide
aggaaagatctgattggcttggtccactcggtggctacctatctcatgtctggggtgggt

SEQ ID NO: 111816 - DNA, 60 bp, Artificial
  Synthetic oligonucleotide
ggcttggtccactcggtggctacctatctcatgtctggggtgggtagttactgtggatca

SEQ ID NO: 111817 - DNA, 60 bp, Artificial
  Synthetic oligonucleotide
gccagacaatttcaccgttatttgtaatgcatatccaactcttaagctcaccgatgatac

SEQ ID NO: 111818 - DNA, 60 bp, Artificial
  Synthetic oligonucleotide
tagataggccagacaatttcaccgttatttgtaatgcatatccaactcttaagctcaccg

SEQ ID NO: 111819 - DNA, 60 bp, Artificial
  Synthetic oligonucleotide
gctcaccgatgatacttggaatccatacgacgtaagttcattcatcagcaaccgagacga

SEQ ID NO: 111820 - DNA, 60 bp, Artificial
  Synthetic oligonucleotide
aagctcaccgatgatacttggaatccatacgacgtaagttcattcatcagcaaccgagac

SEQ ID NO: 111821 - DNA, 60 bp, Artificial
  Synthetic oligonucleotide
ctagttgagtcgtttcaaatcgggtatctcacactcgagcaagtgcgacgacttggcatc

SEQ ID NO: 111822 - DNA, 60 bp, Artificial
  Synthetic oligonucleotide
atgaatatggctaagctagttgagtcgtttcaaatcgggtatctcacactcgagcaagtg

SEQ ID NO: 111823 - DNA, 60 bp, Artificial
  Synthetic oligonucleotide
cgagcaagtgcgacgacttggcatcgtaatcaagctattgtgtcacaaaatagataggcc

SEQ ID NO: 111824 - DNA, 52 bp, Artificial
  Synthetic oligonucleotide
cgagcaagtgcgacgacttggcatcgtaatcaagctattgtgtcacaaaata

SEQ ID NO: 111825 - DNA, 60 bp, Artificial
  Synthetic oligonucleotide
gtcatgacatggacctcgcgatttcgttgttcagaactctcacttagttggtgcaggcgc

SEQ ID NO: 111826 - DNA, 60 bp, Artificial
  Synthetic oligonucleotide
cacttcaatgggctacatcctcccaatatcacgtaatttcgtcatgacatggacctcgcg

SEQ ID NO: 111827 - DNA, 60 bp, Artificial
  Synthetic oligonucleotide
ctcgcgatttcgttgttcagaactctcacttagttggtgcaggcgctacggcatgactgc

SEQ ID NO: 111828 - DNA, 60 bp, Artificial
  Synthetic oligonucleotide
ttcacttgaataccatttggttggaagcgtgtcaaactgaatttgggatgacggagcccg

SEQ ID NO: 111829 - DNA, 60 bp, Artificial
  Synthetic oligonucleotide
cttctgaagctgttcacttgaataccatttggttggaagcgtgtcaaactgaatttggga

SEQ ID NO: 111830 - DNA, 60 bp, Artificial
  Synthetic oligonucleotide
tcacattgtacacttcaatgggctacatcctcccaatatcacgtaatttcgtcatgacat

SEQ ID NO: 111831 - DNA, 60 bp, Artificial
  Synthetic oligonucleotide
aaagttgtaaatggttattcacttaagaatcaacgaaatagtacatataatcacattgta

SEQ ID NO: 111832 - DNA, 60 bp, Artificial
  Synthetic oligonucleotide
cggaattagacggtatactccaagatgctttgactcacagagtgaatggtggacgaatgc

SEQ ID NO: 111833 - DNA, 60 bp, Artificial
  Synthetic oligonucleotide
tactgcaaagagacggaattagacggtatactccaagatgctttgactcacagagtgaat

SEQ ID NO: 111834 - DNA, 60 bp, Artificial
  Synthetic oligonucleotide
cgcttctggtgaggagttggacatatctgaattagctgatctaatactgaatgagtggtt

SEQ ID NO: 111835 - DNA, 52 bp, Artificial
  Synthetic oligonucleotide
cgcttctggtgaggagttggacatatctgaattagctgatctaatactgaat

SEQ ID NO: 111836 - DNA, 60 bp, Artificial
  Synthetic oligonucleotide
gttcgcttctggtgaggagttggacatatctgaattagctgatctaatactgaatgagtg

SEQ ID NO: 111837 - DNA, 55 bp, Artificial
  Synthetic oligonucleotide
gttcgcttctggtgaggagttggacatatctgaattagctgatctaatactgaat

SEQ ID NO: 111838 - DNA, 60 bp, Artificial
  Synthetic oligonucleotide
gattcgcttctggtgagaagttggacatatctgaattagctgatctaatactgaatgagt

SEQ ID NO: 111839 - DNA, 56 bp, Artificial
  Synthetic oligonucleotide
gattcgcttctggtgagaagttggacatatctgaattagctgatctaatactgaat

SEQ ID NO: 111840 - DNA, 60 bp, Artificial
  Synthetic oligonucleotide
gcctcgatatatccttgtaaccgattgtatatgcgatatactgattccgaacaagcaccc

SEQ ID NO: 111841 - DNA, 60 bp, Artificial
  Synthetic oligonucleotide
ccccaggcgctcaagccacgtcaccgctgcgcgcaattcttccaattgaacggcctcgat

SEQ ID NO: 111842 - DNA, 60 bp, Artificial
  Synthetic oligonucleotide
ccgtatctcaaaggagatgagttatcaagtgacagtggacctttactttcaatcttcgct

SEQ ID NO: 111843 - DNA, 60 bp, Artificial
  Synthetic oligonucleotide
ctggtctatacggcaatattgaaaactggagagccgcattctacagagagcgattgccaa

SEQ ID NO: 111844 - DNA, 60 bp, Artificial
  Synthetic oligonucleotide
gaaaactggagagccgcattctacagagagcgattgccaaaaagaatgtcacactcaact

SEQ ID NO: 111845 - DNA, 60 bp, Artificial
  Synthetic oligonucleotide
cgaactatgataagagattctggtctatacggcaatattgaaaactggagagccgcattc

SEQ ID NO: 111846 - DNA, 60 bp, Artificial
  Synthetic oligonucleotide
gattctggtctatacggcaatattgaaaactggagagccgcattctacagagagcgattg

SEQ ID NO: 111847 - DNA, 60 bp, Artificial
  Synthetic oligonucleotide
ataatttagaacgcgaggtgctaaaaattagagctgaaggattttgtcagggatatacta

SEQ ID NO: 111848 - DNA, 51 bp, Artificial
  Synthetic oligonucleotide
tctgtaataaattcggtttacagtgtgaaatcgataattccattcatgtta

SEQ ID NO: 111849 - DNA, 60 bp, Artificial
  Synthetic oligonucleotide
agagcgattgccaaaaagaatgtcacactcaactgtatcaattcaattagataatttaga

SEQ ID NO: 111850 - DNA, 60 bp, Artificial
  Synthetic oligonucleotide
acactcaactgtatcaattcaattagataatttagaacgcgaggtgctaaaaattagagc

SEQ ID NO: 111851 - DNA, 60 bp, Artificial
  Synthetic oligonucleotide
ggaaaacggaagggcaggaaaaatagaagaattgaagtttcatttggtgctccaggacat

SEQ ID NO: 111852 - DNA, 56 bp, Artificial
  Synthetic oligonucleotide
aaaatagaagaattgaagtttcatttggtgctccaggacatgacttgaccgaacaa

SEQ ID NO: 111853 - DNA, 60 bp, Artificial
  Synthetic oligonucleotide
ggaacttgtttgtgatgcactggctaccttaacccgcaacacatatggtgacaacgatga

SEQ ID NO: 111854 - DNA, 60 bp, Artificial
  Synthetic oligonucleotide
gctccgatagagtcggaaatggcggaacttgtttgtgatgcactggctaccttaacccgc

SEQ ID NO: 111855 - DNA, 60 bp, Artificial
  Synthetic oligonucleotide
cttgctccgatagagtcggaaatggcggaacttgtttgtgatgcactggctaccttaacc

SEQ ID NO: 111856 - DNA, 60 bp, Artificial
  Synthetic oligonucleotide
taagacgagcttgctccgatagagtcggaaatggcggaacttgtttgtgatgcactggct

SEQ ID NO: 111857 - DNA, 60 bp, Artificial
  Synthetic oligonucleotide
acaacgatgaatcagctaaattttgcagaatgtttcgaactatgataagagattctggtc

SEQ ID NO: 111858 - DNA, 60 bp, Artificial
  Synthetic oligonucleotide
cccgcaacacatatggtgacaacgatgaatcagctaaattttgcagaatgtttcgaacta

SEQ ID NO: 111859 - DNA, 60 bp, Artificial
  Synthetic oligonucleotide
taccttaacccgcaacacatatggtgacaacgatgaatcagctaaattttgcagaatgtt

SEQ ID NO: 111860 - DNA, 60 bp, Artificial
  Synthetic oligonucleotide
gtttgtgatgcactggctaccttaacccgcaacacatatggtgacaacgatgaatcagct

SEQ ID NO: 111861 - DNA, 60 bp, Artificial
  Synthetic oligonucleotide
gcagaatgtttcgaactatgataagagattctggtctatacggcaatattgaaaactgga

SEQ ID NO: 111862 - DNA, 60 bp, Artificial
  Synthetic oligonucleotide
gaatcagctaaattttgcagaatgtttcgaactatgataagagattctggtctatacggc

SEQ ID NO: 111863 - DNA, 60 bp, Artificial
  Synthetic oligonucleotide
gaatgtaaatgaaatacaatcaattaagtacaattgaatatacttaaatcacaaataatc

SEQ ID NO: 111864 - DNA, 60 bp, Artificial
  Synthetic oligonucleotide
tccaggacatgacttgaccgaacaaattagtactttaagtgatgttgaatgaatgtaaat

SEQ ID NO: 111865 - DNA, 60 bp, Artificial
  Synthetic oligonucleotide
gctgggacgatggctgctggaaccgaaagacgggtggagaatagcgaatcacgagtaagt

SEQ ID NO: 111866 - DNA, 60 bp, Artificial
  Synthetic oligonucleotide
ggaagtggaacggacgaaataactagacgtgagagaagtgcatttggagcagcaacacaa

SEQ ID NO: 111867 - DNA, 60 bp, Artificial
  Synthetic oligonucleotide
tgcaatattttcaatggttgtatttggagtaatggcggtaaatgaggcggaaagcgaaat

SEQ ID NO: 111868 - DNA, 60 bp, Artificial
  Synthetic oligonucleotide
atgacggttacatataagtataggatatggttggcagttgaaattatacttgcaatattt

SEQ ID NO: 111869 - DNA, 61 bp, Artificial
  Synthetic oligonucleotide
gcaacacaagcattaaatgaagaagaaaacaccagaaggcttaaagtatatatgaacgaac

SEQ ID NO: 111870 - DNA, 60 bp, Artificial
  Synthetic oligonucleotide
agcaacacaagcattaaatgaagaagaaaacaccagaaggcttaaagtatatatgaacga

SEQ ID NO: 111871 - DNA, 60 bp, Artificial
  Synthetic oligonucleotide
gtggaacggacgaaataactagacgtgagagaagtgcatttggagcagcaacacaagcat

SEQ ID NO: 111872 - DNA, 60 bp, Artificial
  Synthetic oligonucleotide
aaagcgaaattaattcatggttacagaacaaattaggtgtaaaggttggactctcagcgg

SEQ ID NO: 111873 - DNA, 60 bp, Artificial
  Synthetic oligonucleotide
caaagacaacagcgttagaggtattgtcaagtgcattaggaaacggaagtggaacggacg

SEQ ID NO: 111874 - DNA, 60 bp, Artificial
  Synthetic oligonucleotide
tgaatgcaaagacaacagcgttagaggtattgtcaagtgcattaggaaacggaagtggaa

SEQ ID NO: 111875 - DNA, 60 bp, Artificial
  Synthetic oligonucleotide
ctcagcggtaagtcttggttgtacattcgcgttgttgtttgcaagccggagtgccggtgc

SEQ ID NO: 111876 - DNA, 58 bp, Artificial
  Synthetic oligonucleotide
gagtgccggtgcattaaaagagacggttaaaaggatgaaacgtgaaattacaaaaagg

SEQ ID NO: 111877 - DNA, 60 bp, Artificial
  Synthetic oligonucleotide
catggttacagaacaaattaggtgtaaaggttggactctcagcggtaagtcttggttgta

SEQ ID NO: 111878 - DNA, 56 bp, Artificial
  Synthetic oligonucleotide
cacgagtaagtaatcatttgaacgccgcatggatcaatgcacctggcacaaccaat

SEQ ID NO: 111879 - DNA, 60 bp, Artificial
  Synthetic oligonucleotide
ctggtacgtctcaaagaaggttaacgctgaatgtatgcaatattcgcatgagattaaaga

SEQ ID NO: 111880 - DNA, 60 bp, Artificial
  Synthetic oligonucleotide
actggtacgtctcaaagaaggttaacgctgaatgtatgcaatattcgcatgagattaaag

SEQ ID NO: 111881 - DNA, 60 bp, Artificial
  Synthetic oligonucleotide
ctctcagcggtaagtcttggttgtacattcgcgttgttgtttgcaagccggagtgccggt

SEQ ID NO: 111882 - DNA, 60 bp, Artificial
  Synthetic oligonucleotide
tgctgggacgatggctgctggaaccgaaagacgggtggagaatagcgaatcacgagtaag

SEQ ID NO: 111883 - DNA, 55 bp, Artificial
  Synthetic oligonucleotide
gagtgccggtgcattaaaagagacggttaaaaggatgaaacgtgaaattacaaaa

SEQ ID NO: 111884 - DNA, 60 bp, Artificial
  Synthetic oligonucleotide
ggttgtatttggagtaatggcggtaaatgaggcggaaagcgaaattaattcatggttaca

SEQ ID NO: 111885 - DNA, 60 bp, Artificial
  Synthetic oligonucleotide
gcctggtaacaccggattaaacatccagaatggtgggcttcaatttagatttaatactag

SEQ ID NO: 111886 - DNA, 60 bp, Artificial
  Synthetic oligonucleotide
gtttgcctggtaacaccggattaaacatccagaatggtgggcttcaatttagatttaata

SEQ ID NO: 111887 - DNA, 60 bp, Artificial
  Synthetic oligonucleotide
gtcaacaattgaacaaagttatgtggcatcagcagtcactccgctgcgcttaactactgc

SEQ ID NO: 111888 - DNA, 60 bp, Artificial
  Synthetic oligonucleotide
ataaattcaagagtgtcaacaattgaacaaagttatgtggcatcagcagtcactccgctg

SEQ ID NO: 111889 - DNA, 60 bp, Artificial
  Synthetic oligonucleotide
gccgtgacgagtgcggccgctccgttatcgatctctaataatcggatgacgatgggtctg

SEQ ID NO: 111890 - DNA, 60 bp, Artificial
  Synthetic oligonucleotide
ggcgaattttgagggtaggattgcaacgcttgagagaacagccgtgacgagtgcggccgc

SEQ ID NO: 111891 - DNA, 60 bp, Artificial
  Synthetic oligonucleotide
gaacgatgggttggcactatctggtaacaatttaaccatccgtttgcctggtaacaccgg

SEQ ID NO: 111892 - DNA, 60 bp, Artificial
  Synthetic oligonucleotide
gatgggtctgaacgatgggttggcactatctggtaacaatttaaccatccgtttgcctgg

SEQ ID NO: 111893 - DNA, 60 bp, Artificial
  Synthetic oligonucleotide
ccagcaacgctagggatcaatagtagtggacaattagcagtcaaatccttaacgccaagc

SEQ ID NO: 111894 - DNA, 60 bp, Artificial
  Synthetic oligonucleotide
ttgacccagcaacgctagggatcaatagtagtggacaattagcagtcaaatccttaacgc

SEQ ID NO: 111895 - DNA, 60 bp, Artificial
  Synthetic oligonucleotide
caagtagcaagtggcctgcaatgaccatttcctatccacgcagcttcacgtgaggatcgg

SEQ ID NO: 111896 - DNA, 60 bp, Artificial
  Synthetic oligonucleotide
gctcaataacgcattcaagtagcaagtggcctgcaatgaccatttcctatccacgcagct

SEQ ID NO: 111897 - DNA, 50 bp, Artificial
  Synthetic oligonucleotide
gagggaccaatggcaggatggggttttgagacttagggtagagggtgggg

SEQ ID NO: 111898 - DNA, 60 bp, Artificial
  Synthetic oligonucleotide
gagggaccaatggcaggatggggttttgagacttagggtagagggtgggggctcaataac

SEQ ID NO: 111899 - DNA, 60 bp, Artificial
  Synthetic oligonucleotide
catactggtgctcgaactgttggcattggactttcggctggtggcgcgtaccagtatgtt

SEQ ID NO: 111900 - DNA, 60 bp, Artificial
  Synthetic oligonucleotide
gtagttacatactggtgctcgaactgttggcattggactttcggctggtggcgcgtacca

SEQ ID NO: 111901 - DNA, 60 bp, Artificial
  Synthetic oligonucleotide
cccatgttaacaggagatactgaaccagcctttcatagtgacgtagttacatactggtgc

SEQ ID NO: 111902 - DNA, 60 bp, Artificial
  Synthetic oligonucleotide
tattgccacccatgttaacaggagatactgaaccagcctttcatagtgacgtagttacat

SEQ ID NO: 111903 - DNA, 54 bp, Artificial
  Synthetic oligonucleotide
ccacgcagcttcacgtgaggatcggacatcctctcggcacaggggtcattcatc

SEQ ID NO: 111904 - DNA, 60 bp, Artificial
  Synthetic oligonucleotide
ctttgcgattgctgatggtggtgacttgtcattgaacttcgttactggattattgccacc

SEQ ID NO: 111905 - DNA, 60 bp, Artificial
  Synthetic oligonucleotide
gcgattgctgatggtggtgacttgtcattgaacttcgttactggattattgccacccatg

SEQ ID NO: 111906 - DNA, 60 bp, Artificial
  Synthetic oligonucleotide
cgggatgagtccgacatatagattcaggcaaagtatgtggattggcatcatatcgtatgc

SEQ ID NO: 111907 - DNA, 60 bp, Artificial
  Synthetic oligonucleotide
cgacatatagattcaggcaaagtatgtggattggcatcatatcgtatgccgggagcggcc

SEQ ID NO: 111908 - DNA, 60 bp, Artificial
  Synthetic oligonucleotide
tccttaacgccaagcttaagatatccgatagcggatgtgagtgggagtatcgggatgagt

SEQ ID NO: 111909 - DNA, 60 bp, Artificial
  Synthetic oligonucleotide
cgccaagcttaagatatccgatagcggatgtgagtgggagtatcgggatgagtccgacat

SEQ ID NO: 111910 - DNA, 60 bp, Artificial
  Synthetic oligonucleotide
atcttcatagtagatgattatattcatatatgtctgccaggttttgatggctttgcgatt

SEQ ID NO: 111911 - DNA, 60 bp, Artificial
  Synthetic oligonucleotide
gattatattcatatatgtctgccaggttttgatggctttgcgattgctgatggtggtgac

SEQ ID NO: 111912 - DNA, 60 bp, Artificial
  Synthetic oligonucleotide
tatcgtatgccgggagcggcctaagttggcgaattcaagtcaactctgacatcttcatag

SEQ ID NO: 111913 - DNA, 60 bp, Artificial
  Synthetic oligonucleotide
cgtatgccgggagcggcctaagttggcgaattcaagtcaactctgacatcttcatagtag

SEQ ID NO: 111914 - DNA, 60 bp, Artificial
  Synthetic oligonucleotide
gctatttgtcttatggatcctctggttcgtgaagaagtgactagactgatattagcttta

SEQ ID NO: 111915 - DNA, 60 bp, Artificial
  Synthetic oligonucleotide
ggatcctctggttcgtgaagaagtgactagactgatattagctttaacgggagacaatgg

SEQ ID NO: 111916 - DNA, 53 bp, Artificial
  Synthetic oligonucleotide
atcctctctcttgagcaaagtagggacgcctttggtcacatcagtcagtgatg

SEQ ID NO: 111917 - DNA, 60 bp, Artificial
  Synthetic oligonucleotide
agactggaatcgtctgtctcaagcctgcaaggatctgttaatggacttgatcagagtctt

SEQ ID NO: 111918 - DNA, 60 bp, Artificial
  Synthetic oligonucleotide
ctgtctcaagcctgcaaggatctgttaatggacttgatcagagtcttacccagttgggtg

SEQ ID NO: 111919 - DNA, 60 bp, Artificial
  Synthetic oligonucleotide
tcagagtcttacccagttgggtgatagagtgggattgcttgaaggaggacttacaggatt

SEQ ID NO: 111920 - DNA, 60 bp, Artificial
  Synthetic oligonucleotide
gtcttacccagttgggtgatagagtgggattgcttgaaggaggacttacaggattacgca

SEQ ID NO: 111921 - DNA, 60 bp, Artificial
  Synthetic oligonucleotide
ctactatggaggcgaattttgagggtaggattgcaacgcttgagagaacagccgtgacga

SEQ ID NO: 111922 - DNA, 51 bp, Artificial
  Synthetic oligonucleotide
gtacaattttaagatattgggttttaatatgatggatataagtaatataaa

SEQ ID NO: 111923 - DNA, 60 bp, Artificial
  Synthetic oligonucleotide
ttaggaccctatcaattatttttcacgtatcaacaaatgtttgacttgattcaaactatt

SEQ ID NO: 111924 - DNA, 60 bp, Artificial
  Synthetic oligonucleotide
gtctccttattcaatgtatacactaccgcttatgcgttcttctgctgagagattaattca

SEQ ID NO: 111925 - DNA, 60 bp, Artificial
  Synthetic oligonucleotide
aatccttcatggaataacacgttttttaattggaatacagctcttagaaatccatcgaca

SEQ ID NO: 111926 - DNA, 60 bp, Artificial
  Synthetic oligonucleotide
ttcaatgtatacactaccgcttatgcgttcttctgctgagagattaattcaagaagacgg

SEQ ID NO: 111927 - DNA, 52 bp, Artificial
  Synthetic oligonucleotide
gttttagatcctaaagttctatttgatcgttttattagaccaaatttgatta

SEQ ID NO: 111928 - DNA, 66 bp, Artificial
  Synthetic oligonucleotide
gacttagtacagctcatcgtaaacaattgaaaaccttacagaaacaagttttagatcctaaagttc

SEQ ID NO: 111929 - DNA, 60 bp, Artificial
  Synthetic oligonucleotide
atctccagtactggagacttagatgttactcctttaacttcatcagacgaaaaacgaaaa

SEQ ID NO: 111930 - DNA, 60 bp, Artificial
  Synthetic oligonucleotide
aatttttattttggattacatattgtgttgacgaatttccgatgtatactatctccagta

SEQ ID NO: 111931 - DNA, 60 bp, Artificial
  Synthetic oligonucleotide
tacgaacaaagccaggtacatcgcatgcaccaagaaaaatactcgaagttaatccttcat

SEQ ID NO: 111932 - DNA, 60 bp, Artificial
  Synthetic oligonucleotide
aatcaacgaaccaatattcctaacaaaacagaaagtacgaacaaagccaggtacatcgca

SEQ ID NO: 111933 - DNA, 60 bp, Artificial
  Synthetic oligonucleotide
attcataaatactgtaatcaacgaaccaatattcctaacaaaacagaaagtacgaacaaa

SEQ ID NO: 111934 - DNA, 60 bp, Artificial
  Synthetic oligonucleotide
agcggacaaataacagatatcagaaaaaatcaattcataccaacgtctaaattcataaat

SEQ ID NO: 111935 - DNA, 60 bp, Artificial
  Synthetic oligonucleotide
tttacaaatcattagcgttagacggtaaagatcatcgcccagaaggaatatttgatccta

SEQ ID NO: 111936 - DNA, 60 bp, Artificial
  Synthetic oligonucleotide
ccaggtgctagagaggttttaattttaagtgatgctcagcgtatgaaagcatggaaaata

SEQ ID NO: 111937 - DNA, 55 bp, Artificial
  Synthetic oligonucleotide
aatttagaagctattccacctaatttacttgaattggcgaataatgtaacaatgc

SEQ ID NO: 111938 - DNA, 65 bp, Artificial
  Synthetic oligonucleotide
ctgaagaaaatgcattttgatagagccgtattggacacttcattaactatatacgatattggttg

SEQ ID NO: 111939 - DNA, 60 bp, Artificial
  Synthetic oligonucleotide
cattaactatatacgatattggttgcagagattttgaatgcgcatatttagcagtaatgg

SEQ ID NO: 111940 - DNA, 60 bp, Artificial
  Synthetic oligonucleotide
cgatattggttgcagagattttgaatgcgcatatttagcagtaatggatgaagatactat

SEQ ID NO: 111941 - DNA, 53 bp, Artificial
  Synthetic oligonucleotide
tgagcgtagagaagttaacagaacagaactttataggttagcaactttaggac

SEQ ID NO: 111942 - DNA, 61 bp, Artificial
  Synthetic oligonucleotide
gtaatggatgaagatactattttaccttacgttggcattgataagagtacgattttagacg

SEQ ID NO: 111943 - DNA, 60 bp, Artificial
  Synthetic oligonucleotide
atttagtgttgacgtcacagttaatgaattttcagatgtattatccacttttatgaattt

SEQ ID NO: 111944 - DNA, 60 bp, Artificial
  Synthetic oligonucleotide
gctcttaaaaatgaagcgtatgttgatactttgacaatatttggtgctactaacatacaa

SEQ ID NO: 111945 - DNA, 60 bp, Artificial
  Synthetic oligonucleotide
tgaagcgtatgttgatactttgacaatatttggtgctactaacatacaacgaattgggtt

SEQ ID NO: 111946 - DNA, 60 bp, Artificial
  Synthetic oligonucleotide
tagtaatatctgatatggaccaaagcaccggtacgacagttgaggctatttcagcgttgt

SEQ ID NO: 111947 - DNA, 60 bp, Artificial
  Synthetic oligonucleotide
ctgatatggaccaaagcaccggtacgacagttgaggctatttcagcgttgtgtgttagtc

SEQ ID NO: 111948 - DNA, 60 bp, Artificial
  Synthetic oligonucleotide
tttatttcttggagctaaaaatgaaccagttggtgacatgttacgcagattatctcatgg

SEQ ID NO: 111949 - DNA, 58 bp, Artificial
  Synthetic oligonucleotide
aaaatgaaccagttggtgacatgttacgcagattatctcatggtttatggagtgtaca

SEQ ID NO: 111950 - DNA, 60 bp, Artificial
  Synthetic oligonucleotide
ggaactaatagattggaacgtagaggttattacttaactatgttttgtccatttttcgaa

SEQ ID NO: 111951 - DNA, 60 bp, Artificial
  Synthetic oligonucleotide
gctatgtgacttataataccactattcctaacgagtacaaaagacgaaacttaggaccct

SEQ ID NO: 111952 - DNA, 60 bp, Artificial
  Synthetic oligonucleotide
tcagcgttgtgtgttagtcaattaaagaagtgtattgaatgttttaatagacgattagtt

SEQ ID NO: 111953 - DNA, 60 bp, Artificial
  Synthetic oligonucleotide
caagattatgctggacaaaatttatactttaatatgaaaatcgttagaagttgctggtca

SEQ ID NO: 111954 - DNA, 60 bp, Artificial
  Synthetic oligonucleotide
gctttgagatatctagtcagatttgatgaattaatttataccaacggcaaaggtagaaaa

SEQ ID NO: 111955 - DNA, 60 bp, Artificial
  Synthetic oligonucleotide
aaatgtaattggttgcgatttgcattattggacactttggcctttatctaatacatatac

SEQ ID NO: 111956 - DNA, 60 bp, Artificial
  Synthetic oligonucleotide
cgatttgcattattggacactttggcctttatctaatacatataccgttcaaggatcagg

SEQ ID NO: 111957 - DNA, 60 bp, Artificial
  Synthetic oligonucleotide
ttgtacgagggatttgcgaattcacaaatgagttagttgcagcacattactatcctactt

SEQ ID NO: 111958 - DNA, 60 bp, Artificial
  Synthetic oligonucleotide
cttctaaaaaatcacatgaccaagagacaaatcaagtgctaattaacgcagaaattttga

SEQ ID NO: 111959 - DNA, 60 bp, Artificial
  Synthetic oligonucleotide
atgaccaagagacaaatcaagtgctaattaacgcagaaattttgaaccgtaaattgcctc

SEQ ID NO: 111960 - DNA, 60 bp, Artificial
  Synthetic oligonucleotide
gaaattttgaaccgtaaattgcctcagtttattaaacagaaatttggatatattgataaa

SEQ ID NO: 111961 - DNA, 60 bp, Artificial
  Synthetic oligonucleotide
tattgataaacgaaaaggtggatatgtaaatcagtttggcttttgggctttactttactc

SEQ ID NO: 111962 - DNA, 60 bp, Artificial
  Synthetic oligonucleotide
ggtgatcttccctatccgtttaacaggcgagttgtaacgtcaaaatcctgaaatcagcag

SEQ ID NO: 111963 - DNA, 60 bp, Artificial
  Synthetic oligonucleotide
tgcgtggtgatcttccctatccgtttaacaggcgagttgtaacgtcaaaatcctgaaatc

SEQ ID NO: 111964 - DNA, 60 bp, Artificial
  Synthetic oligonucleotide
ggtaatgcgataaacttagatagtatttattttgctccgatattcaacatggtacagcct

SEQ ID NO: 111965 - DNA, 60 bp, Artificial
  Synthetic oligonucleotide
gtgcatactgtaattttgtcagcaagtgatataagttttagttgtgtaatgcatggtaat

SEQ ID NO: 111966 - DNA, 60 bp, Artificial
  Synthetic oligonucleotide
attataactttatgcttgagtggttaaccaaaatgtcgcaaaaattcgaagtgcatactg

SEQ ID NO: 111967 - DNA, 60 bp, Artificial
  Synthetic oligonucleotide
ttcttttggtaggtatcatggttttggtacggtagattataactttatgcttgagtggtt

SEQ ID NO: 111968 - DNA, 60 bp, Artificial
  Synthetic oligonucleotide
taaagagaataaattttcttttggtaggtatcatggttttggtacggtagattataactt

SEQ ID NO: 111969 - DNA, 60 bp, Artificial
  Synthetic oligonucleotide
ttacctgtactgaaagatcatggttttgttgatataagctcgaaagatgttaaagagaat

SEQ ID NO: 111970 - DNA, 60 bp, Artificial
  Synthetic oligonucleotide
atggaaaatactgaagaaaatgcattttgatagagccgtattggacacttcattaactat

SEQ ID NO: 111971 - DNA, 60 bp, Artificial
  Synthetic oligonucleotide
tccatcgacagttttgccctctttcatctatgaaagaacagaatcgtctacttctaaaaa

SEQ ID NO: 111972 - DNA, 60 bp, Artificial
  Synthetic oligonucleotide
tcatgcgcgccgctcaagcagtaactgcagtagtgtgcggtccggatatgattcaagtgt

SEQ ID NO: 111973 - DNA, 50 bp, Artificial
  Synthetic oligonucleotide
gggccagcgcgtcagccttatggtttcttccttgaaactgaggaaacctt

SEQ ID NO: 111974 - DNA, 60 bp, Artificial
  Synthetic oligonucleotide
gtgctaacgaggtcgggcgcatcgtcactcctcgtaaagtgagtccattgtacctattga

SEQ ID NO: 111975 - DNA, 60 bp, Artificial
  Synthetic oligonucleotide
tcatttctttgtgctaacgaggtcgggcgcatcgtcactcctcgtaaagtgagtccattg

SEQ ID NO: 111976 - DNA, 60 bp, Artificial
  Synthetic oligonucleotide
atcaataggtacaatggactcactttacgaggagtgacgatgcgcccgacctcgttagca

SEQ ID NO: 111977 - DNA, 51 bp, Artificial
  Synthetic oligonucleotide
aaggtttcctcagtttcaaggaagaaaccataaggctgacgcgctggcccc

SEQ ID NO: 111978 - DNA, 60 bp, Artificial
  Synthetic oligonucleotide
ggtacaatggactcactttacgaggagtgacgatgcgcccgacctcgttagcacaaagaa

SEQ ID NO: 111979 - DNA, 60 bp, Artificial
  Synthetic oligonucleotide
ctcctctcgctccagcattaagtgacacttgaatcatatccggaccgcacactactgcag

SEQ ID NO: 111980 - DNA, 60 bp, Artificial
  Synthetic oligonucleotide
gcgcgccgctcaagcagtaactgcagtagtgtgcggtccggatatgattcaagtgtcact

SEQ ID NO: 111981 - DNA, 60 bp, Artificial
  Synthetic oligonucleotide
gtgagcggccctggcatcggatttacgccgtgaatcgcaaactctggccttaaaacagtg

SEQ ID NO: 111982 - DNA, 50 bp, Artificial
  Synthetic oligonucleotide
ttgtaaaaggtatttccggtgttgctagtacaccaatcgtagccatatgt

SEQ ID NO: 111983 - DNA, 60 bp, Artificial
  Synthetic oligonucleotide
atctacacttgctgatgtttacactgttttaaggccagagtttgcgattcacggcgtaaa

SEQ ID NO: 111984 - DNA, 60 bp, Artificial
  Synthetic oligonucleotide
tgtttacactgttttaaggccagagtttgcgattcacggcgtaaatccgatgccagggcc

SEQ ID NO: 111985 - DNA, 60 bp, Artificial
  Synthetic oligonucleotide
cggattatgcacatgcagcgcggcctgtccatcccacgctataatgcgtcccgccctcat

SEQ ID NO: 111986 - DNA, 60 bp, Artificial
  Synthetic oligonucleotide
gctgtaaacattgaaaatctcagcagtcaaagcggggtactggtttaaagttttatccat

SEQ ID NO: 111987 - DNA, 60 bp, Artificial
  Synthetic oligonucleotide
aatgctggagcgagaggagatgtacaacagatatttcagggtcgtaatgatcccatgatg

SEQ ID NO: 111988 - DNA, 60 bp, Artificial
  Synthetic oligonucleotide
atcatcatgggatcattacgaccctgaaatatctgttgtacatctcctctcgctccagca

SEQ ID NO: 111989 - DNA, 60 bp, Artificial
  Synthetic oligonucleotide
ttgtacatctcctctcgctccagcattaagtgacacttgaatcatatccggaccgcacac

SEQ ID NO: 111990 - DNA, 60 bp, Artificial
  Synthetic oligonucleotide
attcaagtgtcacttaatgctggagcgagaggagatgtacaacagatatttcagggtcgt

SEQ ID NO: 111991 - DNA, 60 bp, Artificial
  Synthetic oligonucleotide
aaggtatcgtaacctcggaactgacttgggtctgtctgatatgcacgcatcaagtttcgc

SEQ ID NO: 111992 - DNA, 60 bp, Artificial
  Synthetic oligonucleotide
cgcaaggtgcctgatgagttgttcacagctataagtaatgttacatatgagatggttagg

SEQ ID NO: 111993 - DNA, 60 bp, Artificial
  Synthetic oligonucleotide
gtctgcctgatcgcaagatcgaaggagtcagtgagctgagtagcccttatcgtgcagcag

SEQ ID NO: 111994 - DNA, 60 bp, Artificial
  Synthetic oligonucleotide
ctgagtagcccttatcgtgcagcagatgttggtatgaggagagtacacaagtgcattgga

SEQ ID NO: 111995 - DNA, 60 bp, Artificial
  Synthetic oligonucleotide
cttgtcgacagaataatatccactctgtccaacagagagaagttgatcatgaataatgct

SEQ ID NO: 111996 - DNA, 60 bp, Artificial
  Synthetic oligonucleotide
ggatttaaaagttcatgtgaggatggatacatatggcagtatcaagcgtgatcttaaata

SEQ ID NO: 111997 - DNA, 60 bp, Artificial
  Synthetic oligonucleotide
tatgatggctaatcttccattcatggagggtgtagtgtacaggcatggttcacagaagta

SEQ ID NO: 111998 - DNA, 60 bp, Artificial
  Synthetic oligonucleotide
gtgcattggactgtcaagacgtaatttgaaatttccttcagttacagagcgtctgagtag

SEQ ID NO: 111999 - DNA, 60 bp, Artificial
  Synthetic oligonucleotide
gatggttagggagagcttccagccactggagagatcgatgttggacaagagaaccaggct

SEQ ID NO: 112000 - DNA, 60 bp, Artificial
  Synthetic oligonucleotide
gaaccaggctattacgactgtataacgccggcacctcagcttcatcatccgcgccacctg

SEQ ID NO: 112001 - DNA, 60 bp, Artificial
  Synthetic oligonucleotide
tatataagaagggacataggactcaagtgccaatatacttaggctcactcgtaacgcgag

SEQ ID NO: 112002 - DNA, 60 bp, Artificial
  Synthetic oligonucleotide
gctaatatgactaagacgtcaagccctgtaaatttaattgattcactgataggtaatgct

SEQ ID NO: 112003 - DNA, 60 bp, Artificial
  Synthetic oligonucleotide
gaaggttggagtgtgccaagcagtaagcctatcccctatgacccaaattattctaagtgc

SEQ ID NO: 112004 - DNA, 60 bp, Artificial
  Synthetic oligonucleotide
tgattcactgataggtaatgctatcataagcttgacaggatttgctggctcagagaaggt

SEQ ID NO: 112005 - DNA, 60 bp, Artificial
  Synthetic oligonucleotide
gtggcgtgaatggttaagctattttctacatggtgatcattttaaaccagataggggatc

SEQ ID NO: 112006 - DNA, 60 bp, Artificial
  Synthetic oligonucleotide
tgcccaatgtaatcagggcatgggacataagcactataccccagtttgttgatggcttcc

SEQ ID NO: 112007 - DNA, 60 bp, Artificial
  Synthetic oligonucleotide
aaaacagctaacatattgactcacccccaaaattattacatgtatgattggcatgacaac

SEQ ID NO: 112008 - DNA, 60 bp, Artificial
  Synthetic oligonucleotide
caggctattacgactgtataacgccggcacctcagcttcatcatccgcgccacctggtgc

SEQ ID NO: 112009 - DNA, 60 bp, Artificial
  Synthetic oligonucleotide
aatgtgatcctacggactgcagatagaaaaccatttacattgagagatatggaaggctat

SEQ ID NO: 112010 - DNA, 60 bp, Artificial
  Synthetic oligonucleotide
gaggtagcacagatcaacattgtaggtgatgatgtgaatgtgatcctacggactgcagat

SEQ ID NO: 112011 - DNA, 60 bp, Artificial
  Synthetic oligonucleotide
gattcaggccaatagaggtagcacagatcaacattgtaggtgatgatgtgaatgtgatcc

SEQ ID NO: 112012 - DNA, 60 bp, Artificial
  Synthetic oligonucleotide
tctggtgagctaacaacccagttttcaaaccatgtcactaaccttgccgctcttcgtcaa

SEQ ID NO: 112013 - DNA, 60 bp, Artificial
  Synthetic oligonucleotide
tcgatcattccacagttgcggttgatgcagttaggtctggtgagctaacaacccagtttt

SEQ ID NO: 112014 - DNA, 60 bp, Artificial
  Synthetic oligonucleotide
attgcctatgtccagcatactgtatctgtggtctgagtcgatcaagagctcatataagta

SEQ ID NO: 112015 - DNA, 60 bp, Artificial
  Synthetic oligonucleotide
ggaaggctatcataatcacacatttgagaaagcagctgagtatgagttcagtatatctaa

SEQ ID NO: 112016 - DNA, 60 bp, Artificial
  Synthetic oligonucleotide
cagcagatagccccttcatcttaagtaacgtgaatggtgcagatggatacaccgtgattg

SEQ ID NO: 112017 - DNA, 60 bp, Artificial
  Synthetic oligonucleotide
agtgtctggcaacttctagttctcgttcactgtgtgcacaagcgttggactactctacat

SEQ ID NO: 112018 - DNA, 60 bp, Artificial
  Synthetic oligonucleotide
gcgttgatgtaccacaatcgcattaggttgatgcccatgtctgcaactgcacttgatgct

SEQ ID NO: 112019 - DNA, 60 bp, Artificial
  Synthetic oligonucleotide
ggggatcatatgataactttggttcattgctaggacataagagattagaggttgcgttga

SEQ ID NO: 112020 - DNA, 60 bp, Artificial
  Synthetic oligonucleotide
gtatggtatggcggaacctctagggtacaaccgaggttggggttacacaggagtaacaac

SEQ ID NO: 112021 - DNA, 60 bp, Artificial
  Synthetic oligonucleotide
gctatgaatgagggagccaagttcttgatgaaggatcctacataccatactgcagtgatg

SEQ ID NO: 112022 - DNA, 60 bp, Artificial
  Synthetic oligonucleotide
cgagttggagatgtctctaataaccccatagcaagagcgaattcgagcaccagcacctac

SEQ ID NO: 112023 - DNA, 60 bp, Artificial
  Synthetic oligonucleotide
cacagaagtatcactttcacccatcaccttgtcacctgttaggctccgggagtccagaga

SEQ ID NO: 112024 - DNA, 60 bp, Artificial
  Synthetic oligonucleotide
tgacactgtatcacgcacatatgatgtgtcggaggctagcatgaatgaacgagttggaga

SEQ ID NO: 112025 - DNA, 60 bp, Artificial
  Synthetic oligonucleotide
agttagaaagcatctaagtgaggagctcggtgacaacatcatatcacctgtctggagtga

SEQ ID NO: 112026 - DNA, 60 bp, Artificial
  Synthetic oligonucleotide
ggagcaagatttggtctatctctacacgcaagtgttgagtaagcattcacgcatactgtt

SEQ ID NO: 112027 - DNA, 60 bp, Artificial
  Synthetic oligonucleotide
cgagcaccagcacctactacagatttcgtggtatgttgcactgcctttatggagcaagat

SEQ ID NO: 112028 - DNA, 60 bp, Artificial
  Synthetic oligonucleotide
atacctaagacttattttggaatagatgatgtggaggatttgcatgtcgatgaggcaggt

SEQ ID NO: 112029 - DNA, 60 bp, Artificial
  Synthetic oligonucleotide
ggatttgcatgtcgatgaggcaggtatttctaatatacataataacataactctaggaac

SEQ ID NO: 112030 - DNA, 60 bp, Artificial
  Synthetic oligonucleotide
gatggtcacaaagcacaacaagctaacgcctgaaggacatcgggaatatcttgtcgacag

SEQ ID NO: 112031 - DNA, 60 bp, Artificial
  Synthetic oligonucleotide
cctgtctggagtgaggtattctatcgagatgaagttggatatgagatggtcacaaagcac

SEQ ID NO: 112032 - DNA, 60 bp, Artificial
  Synthetic oligonucleotide
agaactggattctctaatttaggtatgaatgaggtggttggctcaagtttccttgatgcc

SEQ ID NO: 112033 - DNA, 60 bp, Artificial
  Synthetic oligonucleotide
ggagccacttctcaataaggtcagtaaatggtatgatgaaggttggagtgtgccaagcag

SEQ ID NO: 112034 - DNA, 60 bp, Artificial
  Synthetic oligonucleotide
ctagttctcgttcactgtgtgcacaagcgttggactactctacatgggacaggcagcagg

SEQ ID NO: 112035 - DNA, 60 bp, Artificial
  Synthetic oligonucleotide
tactctacatgggacaggcagcagggtggcaggatagctgaagcgaaggctcatggtata

SEQ ID NO: 112036 - DNA, 60 bp, Artificial
  Synthetic oligonucleotide
caaccacaacagaatcatcaattctggatcgcgtgaagttaggggtggccgtgctactcg

SEQ ID NO: 112037 - DNA, 60 bp, Artificial
  Synthetic oligonucleotide
cgccttcaaattacatgctgctgatactaggggctttgaacacagtgagggatatgggta

SEQ ID NO: 112038 - DNA, 60 bp, Artificial
  Synthetic oligonucleotide
catgctgctgatactaggggctttgaacacagtgagggatatgggtagtcatagaactgg

SEQ ID NO: 112039 - DNA, 60 bp, Artificial
  Synthetic oligonucleotide
cccaacactaacaccaatctgagtgatgtgcataatttgctagaattgcctatgtccagc

SEQ ID NO: 112040 - DNA, 55 bp, Artificial
  Synthetic oligonucleotide
ctgatatgcacgcatcaagtttcgctcagcggttgccagctctgttgactcaata

SEQ ID NO: 112041 - DNA, 60 bp, Artificial
  Synthetic oligonucleotide
agagagcaatgattgcggcaacggatgcggaagagccaataagggcattccgattgattg

SEQ ID NO: 112042 - DNA, 60 bp, Artificial
  Synthetic oligonucleotide
cggcaacggatgcggaagagccaataagggcattccgattgattgagttggctaaagagg

SEQ ID NO: 112043 - DNA, 60 bp, Artificial
  Synthetic oligonucleotide
cgattgattgagttggctaaagaggcaatgtatgatcgagaaactgtttggctacaatgc

SEQ ID NO: 112044 - DNA, 60 bp, Artificial
  Synthetic oligonucleotide
tatctgagagttggatttttggaagagatcagatatgtgcagcaactattcgggaaggtt

SEQ ID NO: 112045 - DNA, 59 bp, Artificial
  Synthetic oligonucleotide
ttttggaagagatcagatatgtgcagcaactattcgggaaggttccaaccggcgagttt

SEQ ID NO: 112046 - DNA, 60 bp, Artificial
  Synthetic oligonucleotide
aacgtgatttcccgacgcgtgatcgcaacatcgtggaagcacgtgtgaagaggtctggtg

SEQ ID NO: 112047 - DNA, 60 bp, Artificial
  Synthetic oligonucleotide
gtgatttcccgacgcgtgatcgcaacatcgtggaagcacgtgtgaagaggtctggtgatg

SEQ ID NO: 112048 - DNA, 60 bp, Artificial
  Synthetic oligonucleotide
aggtctggtgatgaaaattggcaaagttggctattaccaatggttctggtacgagaaggg

SEQ ID NO: 112049 - DNA, 60 bp, Artificial
  Synthetic oligonucleotide
ggtctggtgatgaaaattggcaaagttggctattaccaatggttctggtacgagaagggc

SEQ ID NO: 112050 - DNA, 60 bp, Artificial
  Synthetic oligonucleotide
atcggttgctcacctttcaggaccgtgacgatcgaagaacatgtaggtaatgagccgatc

SEQ ID NO: 112051 - DNA, 60 bp, Artificial
  Synthetic oligonucleotide
ttggggatcattactacacgacaagctgctacaccggagccgaagcgctagttacgacag

SEQ ID NO: 112052 - DNA, 60 bp, Artificial
  Synthetic oligonucleotide
ggggatcattactacacgacaagctgctacaccggagccgaagcgctagttacgacagct

SEQ ID NO: 112053 - DNA, 60 bp, Artificial
  Synthetic oligonucleotide
gagtgtttatgctggggcgcatactactgagatgggagcttacgaaagcgcaacgcagtg

SEQ ID NO: 112054 - DNA, 60 bp, Artificial
  Synthetic oligonucleotide
ccgcaaaagtggaatgatggaggaagccgcgaagcaacctgctctgattaattcgggaag

SEQ ID NO: 112055 - DNA, 60 bp, Artificial
  Synthetic oligonucleotide
gactaccgcaaaagtggaatgatggaggaagccgcgaagcaacctgctctgattaattcg

SEQ ID NO: 112056 - DNA, 60 bp, Artificial
  Synthetic oligonucleotide
tcagattgcgtattacttttacaacccggatgcagctgatgattggatagatccaaatct

SEQ ID NO: 112057 - DNA, 55 bp, Artificial
  Synthetic oligonucleotide
cgctattccctacatctatgttcccataagacaaggccaaattgtgaacccaacg

SEQ ID NO: 112058 - DNA, 60 bp, Artificial
  Synthetic oligonucleotide
atccaaatctatttggagttagaggacagcaccaccagatcaaacgagaagttgagagac

SEQ ID NO: 112059 - DNA, 60 bp, Artificial
  Synthetic oligonucleotide
cttttacaacccggatgcagctgatgattggatagatccaaatctatttggagttagagg

SEQ ID NO: 112060 - DNA, 60 bp, Artificial
  Synthetic oligonucleotide
gttgagagacaaatcaacgcttgcccttacaccggatacaaagggggaattttccaagtg

SEQ ID NO: 112061 - DNA, 60 bp, Artificial
  Synthetic oligonucleotide
gagttagaggacagcaccaccagatcaaacgagaagttgagagacaaatcaacgcttgcc

SEQ ID NO: 112062 - DNA, 60 bp, Artificial
  Synthetic oligonucleotide
atgatttcgcaaaacattttaataggtatgcctcgatggctatacaacaatatctgagag

SEQ ID NO: 112063 - DNA, 60 bp, Artificial
  Synthetic oligonucleotide
tttccaagtgatgtatttgccaattcagctgataaatttcttaagaatggatgatttcgc

SEQ ID NO: 112064 - DNA, 60 bp, Artificial
  Synthetic oligonucleotide
tcctcgtgcagatgggacggtgcctgattggaacaatctaggcagttttctagacatcat

SEQ ID NO: 112065 - DNA, 60 bp, Artificial
  Synthetic oligonucleotide
ctcagactcttctgtttcgtctgttatggatatgctcctcgtgcagatgggacggtgcct

SEQ ID NO: 112066 - DNA, 60 bp, Artificial
  Synthetic oligonucleotide
caacgcagtgcgctactcagactcttctgtttcgtctgttatggatatgctcctcgtgca

SEQ ID NO: 112067 - DNA, 60 bp, Artificial
  Synthetic oligonucleotide
gctggggcgcatactactgagatgggagcttacgaaagcgcaacgcagtgcgctactcag

SEQ ID NO: 112068 - DNA, 60 bp, Artificial
  Synthetic oligonucleotide
attagctgttagcttttagagtctttcatttttcatttttctattttctcttagcactct

SEQ ID NO: 112069 - DNA, 60 bp, Artificial
  Synthetic oligonucleotide
gtttgagacggttagatgtattattaccttgtgctatgctgagaaagttcacttcgctgg

SEQ ID NO: 112070 - DNA, 60 bp, Artificial
  Synthetic oligonucleotide
gcttacgctacaatgtttgagacggttagatgtattattaccttgtgctatgctgagaaa

SEQ ID NO: 112071 - DNA, 54 bp, Artificial
  Synthetic oligonucleotide
gcctgattggaacaatctaggcagttttctagacatcattttaaaaggaccgga

SEQ ID NO: 112072 - DNA, 60 bp, Artificial
  Synthetic oligonucleotide
atcccagtcgtcagcttcccgcacctctacgtcatatactgattaacgctactattgctg

SEQ ID NO: 112073 - DNA, 60 bp, Artificial
  Synthetic oligonucleotide
ggtgatttgcttcgtaagttttcagctacgtcatactcaattgatacatctgtgatacca

SEQ ID NO: 112074 - DNA, 60 bp, Artificial
  Synthetic oligonucleotide
tgtgacgttaccggcgctttgcgatcaacacgttgtctatgcgattcagtgagtgacgtg

SEQ ID NO: 112075 - DNA, 60 bp, Artificial
  Synthetic oligonucleotide
ccatatgttttcctacccatgtatcgttacctacttcatattatgaccggaagtgccttc

SEQ ID NO: 112076 - DNA, 60 bp, Artificial
  Synthetic oligonucleotide
cagccgtcattgatccattaagattgttggactcaagtagaactggtgtgctcgcgacta

SEQ ID NO: 112077 - DNA, 60 bp, Artificial
  Synthetic oligonucleotide
gcaacttggacagattatcgtggtattgcacattggagtggttcagccgtcattgatcca

SEQ ID NO: 112078 - DNA, 60 bp, Artificial
  Synthetic oligonucleotide
cctgttacgagtgaactggaacgtaattggatatattgagctatctacccttggtgagcc

SEQ ID NO: 112079 - DNA, 60 bp, Artificial
  Synthetic oligonucleotide
gcctgtctgtctcagtgcattatcaaccatatctaattatgctcgtgttgcaacttggac

SEQ ID NO: 112080 - DNA, 60 bp, Artificial
  Synthetic oligonucleotide
ttatcattactcgtacaactccaattgcctttgtcaactctgtcgattcaacgccttccc

SEQ ID NO: 112081 - DNA, 60 bp, Artificial
  Synthetic oligonucleotide
gcgcatgactgctgagtattcatttgtgtgtcagaaatcagatttgcctgtctgtctcag

SEQ ID NO: 112082 - DNA, 60 bp, Artificial
  Synthetic oligonucleotide
ccgtgaactacgcacaatttctagtcaatcaactgtctacggatatgacctcacagtgaa

SEQ ID NO: 112083 - DNA, 60 bp, Artificial
  Synthetic oligonucleotide
acttggcaattctatctccctaacactcgatccaaagcttaccgactctgaacgtttgga

SEQ ID NO: 112084 - DNA, 60 bp, Artificial
  Synthetic oligonucleotide
cacagtgaatgatccactttactatgatcttgaacctctacttggcaattctatctccct

SEQ ID NO: 112085 - DNA, 60 bp, Artificial
  Synthetic oligonucleotide
aacgtttggatgcagtttaccttgatattaacaatagattagctaactgtcatggtgatt

SEQ ID NO: 112086 - DNA, 60 bp, Artificial
  Synthetic oligonucleotide
gggctacatcatctgatatgaccaattacacgcatatcccatctgattcatattaccacc

SEQ ID NO: 112087 - DNA, 60 bp, Artificial
  Synthetic oligonucleotide
cgcgactaacgtcccaattgaaccattaatcgctccttcacatggtgttccgagacttga

SEQ ID NO: 112088 - DNA, 53 bp, Artificial
  Synthetic oligonucleotide
ttggactgcaagtcgaactagtgaaagaacacgtcatgttattgatgttggtg

SEQ ID NO: 112089 - DNA, 60 bp, Artificial
  Synthetic oligonucleotide
ttactcttcatttttaccgtgatacaactgacccattactccctgtcgcgaacataggac

SEQ ID NO: 112090 - DNA, 60 bp, Artificial
  Synthetic oligonucleotide
catctgattcatattaccaccaattcattgtcacctgcttgcgatcattctgtggattac

SEQ ID NO: 112091 - DNA, 60 bp, Artificial
  Synthetic oligonucleotide
accccttgagatccctaaatgtcgtgttccacgtcttgtcagtctccaagtgattaatta

SEQ ID NO: 112092 - DNA, 60 bp, Artificial
  Synthetic oligonucleotide
gtacctagctaagcgcacatttttacatgttaacgataagactgcaactcacacgtcagt

SEQ ID NO: 112093 - DNA, 60 bp, Artificial
  Synthetic oligonucleotide
cgtcagtgcgtcgctgtgaattattacgcttaaactttccattggaccaaagttttgctc

SEQ ID NO: 112094 - DNA, 60 bp, Artificial
  Synthetic oligonucleotide
agacagagactctacaattcccttacgccatgaagtgattcctgcacttagtaccgtaat

SEQ ID NO: 112095 - DNA, 60 bp, Artificial
  Synthetic oligonucleotide
cacgttcaagactgcatcaaacatcagccgctgaaatcctagacttagcaatgcgtttcg

SEQ ID NO: 112096 - DNA, 60 bp, Artificial
  Synthetic oligonucleotide
caatgcgtttcggatatgctccttcttatgaggcgattgtgacgttaccggcgctttgcg

SEQ ID NO: 112097 - DNA, 60 bp, Artificial
  Synthetic oligonucleotide
tatggagaacgctgcttaccttacgcgtacctaccctagcccgtatccgttaccaacacg

SEQ ID NO: 112098 - DNA, 60 bp, Artificial
  Synthetic oligonucleotide
ccattcttaataacgcacgttcaagactgcatcaaacatcagccgctgaaatcctagact

SEQ ID NO: 112099 - DNA, 60 bp, Artificial
  Synthetic oligonucleotide
ttctcatgttttcatttctgcattgaatcgacctgctgcacatgtcaacgccctggaaca

SEQ ID NO: 112100 - DNA, 60 bp, Artificial
  Synthetic oligonucleotide
gtgtcaactcagacgtctggctcgagcgcaagcactttatattcaagttatgtgaatcac

SEQ ID NO: 112101 - DNA, 60 bp, Artificial
  Synthetic oligonucleotide
gcattatggatacactcggtataattgatcctcaagatgtctttttagtgttttctcatg

SEQ ID NO: 112102 - DNA, 53 bp, Artificial
  Synthetic oligonucleotide
cgtggcttatttccgcatgcgatgtatactgttattgacccagcccctgcacc

SEQ ID NO: 112103 - DNA, 60 bp, Artificial
  Synthetic oligonucleotide
gaaccgtgggactttaatgatttccagggttcacttgatcgcattatggatacactcggt

SEQ ID NO: 112104 - DNA, 60 bp, Artificial
  Synthetic oligonucleotide
gcatgttcgtgaattcattcgctttggacgttatttaccccttgagatccctaaatgtcg

SEQ ID NO: 112105 - DNA, 60 bp, Artificial
  Synthetic oligonucleotide
accgtgatacaactgacccattactccctgtcgcgaacataggacattgggtgacacgcc

SEQ ID NO: 112106 - DNA, 60 bp, Artificial
  Synthetic oligonucleotide
gggtgacacgccatcaaatgaaacgatatgcgtacacagacagagactctacaattccct

SEQ ID NO: 112107 - DNA, 60 bp, Artificial
  Synthetic oligonucleotide
gaaacgaactatacaatatcaggagtacgatccctcagttggaacatgggctacatcatc

SEQ ID NO: 112108 - DNA, 60 bp, Artificial
  Synthetic oligonucleotide
cttccaacgaacgtggtgatgctaggattttaactggctgggttgtgattcggattgctg

SEQ ID NO: 112109 - DNA, 60 bp, Artificial
  Synthetic oligonucleotide
cccgtatccgtgaacctgctggttatcatccaagaccatccattgttgtacctcactact

SEQ ID NO: 112110 - DNA, 61 bp, Artificial
  Synthetic oligonucleotide
gacattttgagattttgtgatggtggtattattcattttgatatccccgatgctacatttc

SEQ ID NO: 112111 - DNA, 60 bp, Artificial
  Synthetic oligonucleotide
accaccaattcattgtcacctgcttgcgatcattctgtggattacgtgacttacctagag

SEQ ID NO: 112112 - DNA, 60 bp, Artificial
  Synthetic oligonucleotide
tgttgtgttccttcctacctcgaatgaatcgcttcgtgatgctactattgcccgtatccg

SEQ ID NO: 112113 - DNA, 60 bp, Artificial
  Synthetic oligonucleotide
gacttacctagagaaaactcagctagatatccttatgttgtactattatacggacttgca

SEQ ID NO: 112114 - DNA, 60 bp, Artificial
  Synthetic oligonucleotide
actattgctgatgtgccatatgatatgcaaggaaaatttgtgccatataatgttgtgttc

SEQ ID NO: 112115 - DNA, 60 bp, Artificial
  Synthetic oligonucleotide
cctcactactttgttttccgttctactactgatgctttatgtcgatttatgtacctagct

SEQ ID NO: 112116 - DNA, 60 bp, Artificial
  Synthetic oligonucleotide
aattcccttacgccatgaagtgattcctgcacttagtaccgtaatgtcgcgcatgactgc

SEQ ID NO: 112117 - DNA, 60 bp, Artificial
  Synthetic oligonucleotide
atcgcttcttacctctgctcaacatttattcgctttgttgaataaaattaatcccagtcg

SEQ ID NO: 112118 - DNA, 60 bp, Artificial
  Synthetic oligonucleotide
tgctcaacatttattcgctttgttgaataaaattaatcccagtcgtcagcttcccgcacc

SEQ ID NO: 112119 - DNA, 60 bp, Artificial
  Synthetic oligonucleotide
cctacctcgaatgaatcgcttcgtgatgctactattgcccgtatccgtgaacctgctggt

SEQ ID NO: 112120 - DNA, 60 bp, Artificial
  Synthetic oligonucleotide
ctcactaccgcaaagatgtttgaccgccagtaccccaccgttcatgatctatacatacct

SEQ ID NO: 112121 - DNA, 60 bp, Artificial
  Synthetic oligonucleotide
cgtcgtgtcaaagtattatcttactttgcttcgcaatctccgttttcacttactcttcat

SEQ ID NO: 112122 - DNA, 60 bp, Artificial
  Synthetic oligonucleotide
cgttaatggcagcaaattatccaaatcgtgttagtatgcatgtatttgataccatgattg

SEQ ID NO: 112123 - DNA, 61 bp, Artificial
  Synthetic oligonucleotide
ctactcaacgagttattgacaacagaatgacagctaataaatataaaacgttaatggcagc

SEQ ID NO: 112124 - DNA, 52 bp, Artificial
  Synthetic oligonucleotide
atgtcaaccagaaacctatttggtcaaaacgacattggcgttagacttacga

SEQ ID NO: 112125 - DNA, 60 bp, Artificial
  Synthetic oligonucleotide
gataccatgattgatgatttattatttgtttattgtccaactgaagatgattggaaattt

SEQ ID NO: 112126 - DNA, 60 bp, Artificial
  Synthetic oligonucleotide
tcctagactcgcttggtggaatagtcatagatttggacgcactttgtttaacttaatgta

SEQ ID NO: 112127 - DNA, 60 bp, Artificial
  Synthetic oligonucleotide
tatttagacattttagtattgcttgaagtactttttgcatttatcatcactcctagactc

SEQ ID NO: 112128 - DNA, 60 bp, Artificial
  Synthetic oligonucleotide
ctgagtttggcgtgtttgttaaacatcagaatgcatcgtgggttaaagtaaatatttcag

SEQ ID NO: 112129 - DNA, 60 bp, Artificial
  Synthetic oligonucleotide
gccacacaatatcttagttacctaacttcaaacgttcccacttatactacaacatttgga

SEQ ID NO: 112130 - DNA, 60 bp, Artificial
  Synthetic oligonucleotide
gcacgatacaagccaagactgccttaacagttgaagcaataatgaacattcaaggccacc

SEQ ID NO: 112131 - DNA, 60 bp, Artificial
  Synthetic oligonucleotide
caggaaggtatcactaattcacaaagaccagaagatataacttataaagatggaagcacg

SEQ ID NO: 112132 - DNA, 60 bp, Artificial
  Synthetic oligonucleotide
tccacacctaaagtcgacccaaaacttgttgaaaaccaggaaggtatcactaattcacaa

SEQ ID NO: 112133 - DNA, 60 bp, Artificial
  Synthetic oligonucleotide
gaatcaaagaatgaatccacacctaaagtcgacccaaaacttgttgaaaaccaggaaggt

SEQ ID NO: 112134 - DNA, 60 bp, Artificial
  Synthetic oligonucleotide
caccgtacctttggactcacccaggagagaggacaaaatgaattcggaggataatcggaa

SEQ ID NO: 112135 - DNA, 60 bp, Artificial
  Synthetic oligonucleotide
tctaccatgttcagcagatgattatcgtcaagcaagtatgattaacgcagttaatacacg

SEQ ID NO: 112136 - DNA, 60 bp, Artificial
  Synthetic oligonucleotide
cgaacgttatttcgaacacgagaatgctttctatactatggactcggatccacgtgttta

SEQ ID NO: 112137 - DNA, 60 bp, Artificial
  Synthetic oligonucleotide
gagtttcgtctctgatttaagttacccatcagattgtttatcctctaaattcgacgcgtc

SEQ ID NO: 112138 - DNA, 60 bp, Artificial
  Synthetic oligonucleotide
gccacttcattgtttcagtaaaatatacacttatattgcgttaggagttcacggagtttg

SEQ ID NO: 112139 - DNA, 61 bp, Artificial
  Synthetic oligonucleotide
gcgaatgaggatttaatcaatttgctaaaaggaaaaggaattactataccattaacgccac

SEQ ID NO: 112140 - DNA, 60 bp, Artificial
  Synthetic oligonucleotide
aatggtagagcagtattaaatgagatcactagaacatttaattgtccagtcgaacgttat

SEQ ID NO: 112141 - DNA, 60 bp, Artificial
  Synthetic oligonucleotide
acattcttgagacagtgcgagaacgattatcaactttttggacgacgagtaatggtagag

SEQ ID NO: 112142 - DNA, 60 bp, Artificial
  Synthetic oligonucleotide
taccttttaatggtcaggaaattaccgatctagccttaaaaattgttggtcacagtaaac

SEQ ID NO: 112143 - DNA, 60 bp, Artificial
  Synthetic oligonucleotide
gagttcacggagtttgtcgtaatgatacagttactaccactggcagttttctttctcgtg

SEQ ID NO: 112144 - DNA, 58 bp, Artificial
  Synthetic oligonucleotide
aaatatttcagttgatcaatatgatttaaacgatttgttagatggtattgttttcagt

SEQ ID NO: 112145 - DNA, 60 bp, Artificial
  Synthetic oligonucleotide
tgactacgataagaatcgcttcaaacaatttaggtttattaatgcactacactgtcgctc

SEQ ID NO: 112146 - DNA, 60 bp, Artificial
  Synthetic oligonucleotide
agtctttcttgttcgtatgtgacggttttgatcgtaataacccatggcgtagaccaagaa

SEQ ID NO: 112147 - DNA, 51 bp, Artificial
  Synthetic oligonucleotide
ttaatacacgagtaaatgcaatcggcgcacgagttcaccttgtaaccaaaa

SEQ ID NO: 112148 - DNA, 66 bp, Artificial
  Synthetic oligonucleotide
ggttatagtaatattgatcagttcacagcatatttagtcaatcaagctactcaacgagttattgac

SEQ ID NO: 112149 - DNA, 60 bp, Artificial
  Synthetic oligonucleotide
ctaattgctcctttgggagaatatgttaatctaactcgtaaaacagcagcaaagtatcca

SEQ ID NO: 112150 - DNA, 60 bp, Artificial
  Synthetic oligonucleotide
cgtaaaacagcagcaaagtatccattttttgaaacaactgttcgaggatatctaccatgt

SEQ ID NO: 112151 - DNA, 60 bp, Artificial
  Synthetic oligonucleotide
tgcgaggttgtcgtacaaagccactttctatagaatacgaaaatacagctatttcaaaga

SEQ ID NO: 112152 - DNA, 60 bp, Artificial
  Synthetic oligonucleotide
atttcaaagaaacttgcaggtaaaaagatactttataatgacagagcgcacataatattt

SEQ ID NO: 112153 - DNA, 60 bp, Artificial
  Synthetic oligonucleotide
cataatatttaatggaatatatcatgcagttactccatttatgaataaaatcaatgatat

SEQ ID NO: 112154 - DNA, 66 bp, Artificial
  Synthetic oligonucleotide
ggaataactgattgctcagactttactttagttccattctatagaactatggattatactgatgac

SEQ ID NO: 112155 - DNA, 60 bp, Artificial
  Synthetic oligonucleotide
agaactatggattatactgatgacagtgcccaacaatttccatcattattctgttttaat

SEQ ID NO: 112156 - DNA, 60 bp, Artificial
  Synthetic oligonucleotide
cgtatgtgacggttttgatcgtaataacccatggcgtagaccaagaatgatttcgtatag

SEQ ID NO: 112157 - DNA, 58 bp, Artificial
  Synthetic oligonucleotide
ttttagaaattgccgctaattgtaatcttgtaatgcgaggttgtcgtacaaagccact

SEQ ID NO: 112158 - DNA, 60 bp, Artificial
  Synthetic oligonucleotide
acttatctaggtcccaagacagaagtaagattaccagtccttgacattagagtttcgtct

SEQ ID NO: 112159 - DNA, 60 bp, Artificial
  Synthetic oligonucleotide
agtccttgacattagagtttcgtctctgatttaagttacccatcagattgtttatcctct

SEQ ID NO: 112160 - DNA, 60 bp, Artificial
  Synthetic oligonucleotide
caagaatgatttcgtatagtggttacaatgtttggcagcgtacaaataatgcgaatgagg

SEQ ID NO: 112161 - DNA, 60 bp, Artificial
  Synthetic oligonucleotide
cgacgcgtctaacatcttgtaagtcaatatctggaggtagctcgtaaccggtgaaatcag

SEQ ID NO: 112162 - DNA, 60 bp, Artificial
  Synthetic oligonucleotide
caccaggttcattattcaaaaccgtactgatgagttgcttgacagatacatttatcttag

SEQ ID NO: 112163 - DNA, 60 bp, Artificial
  Synthetic oligonucleotide
gatgggcggtatatttcggattcccaaccaagcaatcgacaaattgacggctattgacaa

SEQ ID NO: 112164 - DNA, 60 bp, Artificial
  Synthetic oligonucleotide
acacgagaatgctttctatactatggactcggatccacgtgtttatcaccctacacttta

SEQ ID NO: 112165 - DNA, 60 bp, Artificial
  Synthetic oligonucleotide
ttaaaagtaatttctcacgttacattcgatgatgagctacctttgtttcgacaagttgaa

SEQ ID NO: 112166 - DNA, 60 bp, Artificial
  Synthetic oligonucleotide
cacgttacattcgatgatgagctacctttgtttcgacaagttgaaggattagcattcggt

SEQ ID NO: 112167 - DNA, 60 bp, Artificial
  Synthetic oligonucleotide
cagcgttcaacttaaatttgaaaaagataatgttaatcatgagtatatcaatccgttgtc

SEQ ID NO: 112168 - DNA, 60 bp, Artificial
  Synthetic oligonucleotide
atccgttgtcagaaaagattccaaaaatcaagtttgtattgaaacgattaggtaatatga

SEQ ID NO: 112169 - DNA, 60 bp, Artificial
  Synthetic oligonucleotide
ggtaatatgaacgaacatttcgtaattttcatgaaaagaatgattgacactaaacgtcat

SEQ ID NO: 112170 - DNA, 60 bp, Artificial
  Synthetic oligonucleotide
ctggaaagattttaagatcactgaggaaaacctattttctaaattcgttgagaaccgtga

SEQ ID NO: 112171 - DNA, 60 bp, Artificial
  Synthetic oligonucleotide
cgttgagaaccgtgatttgaacaacattcagttggacttctatgacaccaggttcattat

SEQ ID NO: 112172 - DNA, 60 bp, Artificial
  Synthetic oligonucleotide
gttttagaaagcacgccggtaaccgccatggagaccaaaccaattcatccaaccattgcg

SEQ ID NO: 112173 - DNA, 60 bp, Artificial
  Synthetic oligonucleotide
aaccattgcgactcagttctgtgattcacttgtccgcggccatctatccggtgcccatat

SEQ ID NO: 112174 - DNA, 60 bp, Artificial
  Synthetic oligonucleotide
cgccggtaaccgccatggagaccaaaccaattcatccaaccattgcgactcagttctgtg

SEQ ID NO: 112175 - DNA, 55 bp, Artificial
  Synthetic oligonucleotide
gtgcccatatcgacggtcagtggtccaccaccatcgccgacccagagctactcac

SEQ ID NO: 112176 - DNA, 60 bp, Artificial
  Synthetic oligonucleotide
gttctgtgattcacttgtccgcggccatctatccggtgcccatatcgacggtcagtggtc

SEQ ID NO: 112177 - DNA, 60 bp, Artificial
  Synthetic oligonucleotide
gatgaggattaggtctcccagtggctcgggactgcccaacccattgccgtggcgcaatgg

SEQ ID NO: 112178 - DNA, 60 bp, Artificial
  Synthetic oligonucleotide
gcctgcaagcagcgcgcgtacggccgtgggggtctgaacctggcgaacctctctctaact

SEQ ID NO: 112179 - DNA, 57 bp, Artificial
  Synthetic oligonucleotide
cctgtcgtctctaaaggtgcacgtgccatttgggcgcacgcgattctaaatcagagc

SEQ ID NO: 112180 - DNA, 57 bp, Artificial
  Synthetic oligonucleotide
tggtgagaagctcgctcgtgtcgctagagctgcagccgacggggcgcccgacgtcat

SEQ ID NO: 112181 - DNA, 60 bp, Artificial
  Synthetic oligonucleotide
aaaggcgagatcgggaaaggtcgctaaggtgatgagcctcgaccgcatctgcgggtctgt

SEQ ID NO: 112182 - DNA, 60 bp, Artificial
  Synthetic oligonucleotide
agccactattcgaaaggcgagatcgggaaaggtcgctaaggtgatgagcctcgaccgcat

SEQ ID NO: 112183 - DNA, 60 bp, Artificial
  Synthetic oligonucleotide
tcccagtggctcgggactgcccaacccattgccgtggcgcaatggcgtgtgatattcatc

SEQ ID NO: 112184 - DNA, 60 bp, Artificial
  Synthetic oligonucleotide
tccaggacggattcctcgcgttgcgtggtcgcgactcattgtcaaaagcattgtctgggg

SEQ ID NO: 112185 - DNA, 60 bp, Artificial
  Synthetic oligonucleotide
gacggattcctcgcgttgcgtggtcgcgactcattgtcaaaagcattgtctggggctggc

SEQ ID NO: 112186 - DNA, 60 bp, Artificial
  Synthetic oligonucleotide
tagtctcgctggcaatttgctgcgcatccaggataccattcaaagaaccgtccaggacgg

SEQ ID NO: 112187 - DNA, 60 bp, Artificial
  Synthetic oligonucleotide
gtctcgctggcaatttgctgcgcatccaggataccattcaaagaaccgtccaggacggat

SEQ ID NO: 112188 - DNA, 60 bp, Artificial
  Synthetic oligonucleotide
cacgtgactcacgagtgccatgattcgcacggggcaagacgtactggacgtagtctcgct

SEQ ID NO: 112189 - DNA, 60 bp, Artificial
  Synthetic oligonucleotide
tgccatgattcgcacggggcaagacgtactggacgtagtctcgctggcaatttgctgcgc

SEQ ID NO: 112190 - DNA, 60 bp, Artificial
  Synthetic oligonucleotide
tttgtgcttgctgtttcaaggtgctcctcaactggcccggacccgccatccacgtgactc

SEQ ID NO: 112191 - DNA, 60 bp, Artificial
  Synthetic oligonucleotide
ttgtgcttgctgtttcaaggtgctcctcaactggcccggacccgccatccacgtgactca

SEQ ID NO: 112192 - DNA, 60 bp, Artificial
  Synthetic oligonucleotide
ttgtctggggctggcaatcagatgaccgaggaggcgttcagtgatatgaaagccactatt

SEQ ID NO: 112193 - DNA, 60 bp, Artificial
  Synthetic oligonucleotide
gtctggggctggcaatcagatgaccgaggaggcgttcagtgatatgaaagccactattcg

SEQ ID NO: 112194 - DNA, 60 bp, Artificial
  Synthetic oligonucleotide
cttacacaatggaatcagcgaatgagattgcgagaatgagcggagagacagggacgtggg

SEQ ID NO: 112195 - DNA, 60 bp, Artificial
  Synthetic oligonucleotide
ggcacggtctgcgggcggcaatacttaacagaacaacactaccgaataatatcccaccaa

SEQ ID NO: 112196 - DNA, 60 bp, Artificial
  Synthetic oligonucleotide
tttcttaacagcagctgaagttacgcaacatggacggtttaggcagcgcgcgggacaaaa

SEQ ID NO: 112197 - DNA, 60 bp, Artificial
  Synthetic oligonucleotide
gctgaagttacgcaacatggacggtttaggcagcgcgcgggacaaaatatcacaactgcg

SEQ ID NO: 112198 - DNA, 56 bp, Artificial
  Synthetic oligonucleotide
gtcgttgttatggatagcgtgccatccatccgcgcgtcttcctaaattcaacttac

SEQ ID NO: 112199 - DNA, 60 bp, Artificial
  Synthetic oligonucleotide
tggaatagctatcaatagatataatgggctaaccttgagatcagtaaccatgcggccgac

SEQ ID NO: 112200 - DNA, 60 bp, Artificial
  Synthetic oligonucleotide
tggcgttgtaccaatacaaggtccaataaacagagctgttgcccaaaacgcctatgtgtg

SEQ ID NO: 112201 - DNA, 60 bp, Artificial
  Synthetic oligonucleotide
ttcggtggagatggacactatcgcagcaagagctctgagggttatcaaggcttgtaacac

SEQ ID NO: 112202 - DNA, 60 bp, Artificial
  Synthetic oligonucleotide
cggagagacagggacgtggggaccagatcgccaaccgttcggttatttcttaacagcagc

SEQ ID NO: 112203 - DNA, 60 bp, Artificial
  Synthetic oligonucleotide
cgggtatgatagaaatagaggtaatttactacttgagtttagataaaacaatgacccagt

SEQ ID NO: 112204 - DNA, 60 bp, Artificial
  Synthetic oligonucleotide
aaacgtatctccagattacatacaaaatttagcgacaattggggttttagcgacgcctga

SEQ ID NO: 112205 - DNA, 60 bp, Artificial
  Synthetic oligonucleotide
gcttagatatgacactggctgcggcgaatttgaatatcggaaacgtatctccagattaca

SEQ ID NO: 112206 - DNA, 60 bp, Artificial
  Synthetic oligonucleotide
attacattctataattcaggatcctggaatagcgtattttccatatattgcatctgtgct

SEQ ID NO: 112207 - DNA, 60 bp, Artificial
  Synthetic oligonucleotide
atcaaaacgctagatgaatgggagagcggaaaaaatccatatgaaccgttagaagtgact

SEQ ID NO: 112208 - DNA, 60 bp, Artificial
  Synthetic oligonucleotide
catctgtgctaacagttttattcacattacataaagcttcaattccaaccatgaaaatag

SEQ ID NO: 112209 - DNA, 60 bp, Artificial
  Synthetic oligonucleotide
tcaggatcctggaatagcgtattttccatatattgcatctgtgctaacagttttattcac

SEQ ID NO: 112210 - DNA, 60 bp, Artificial
  Synthetic oligonucleotide
cactcgttttccttgtccgacgtccgacgtaccgtgtgctcgagatgttctttgattccc

SEQ ID NO: 112211 - DNA, 60 bp, Artificial
  Synthetic oligonucleotide
ggagggaatcttgcgttgcatatctggagagctgtcactcgttttccttgtccgacgtcc

SEQ ID NO: 112212 - DNA, 60 bp, Artificial
  Synthetic oligonucleotide
ccacggctttgggtagagcttcgtcggttttgtattcggttcaagcgcacttagttcacg

SEQ ID NO: 112213 - DNA, 60 bp, Artificial
  Synthetic oligonucleotide
atgtcggcgcgatagctcatgttggtcggatatggaagtggttagatcacaatggacaca

SEQ ID NO: 112214 - DNA, 60 bp, Artificial
  Synthetic oligonucleotide
gaacctcttctggacaatgagcttggtgttagcatcgcctgtcagattcttgaggctcca

SEQ ID NO: 112215 - DNA, 57 bp, Artificial
  Synthetic oligonucleotide
cagtattagatggctatagacaactattttctgaccttgctaccaccatcgacgtag

SEQ ID NO: 112216 - DNA, 60 bp, Artificial
  Synthetic oligonucleotide
cagccagtaacacacaacgaggtattgccatgactcgagaaacgcgcgttgttgaatgtt

SEQ ID NO: 112217 - DNA, 60 bp, Artificial
  Synthetic oligonucleotide
acgtgctcgtgatgatcccgctgccccggaaaacagaattatttccgctgcgtttgaggc

SEQ ID NO: 112218 - DNA, 60 bp, Artificial
  Synthetic oligonucleotide
acggactaatgtatcgtgctcacgatttgtgaatgtactagcttctgcgtctcttgttgg

SEQ ID NO: 112219 - DNA, 60 bp, Artificial
  Synthetic oligonucleotide
agagagcgtcgtaacgtacgtcgactccatctgccagagagaacttttgcgcgaacatta

SEQ ID NO: 112220 - DNA, 60 bp, Artificial
  Synthetic oligonucleotide
tgttacgtcgatggcatggagtcagacgaagacgagactcttctatggttggagggaatc

SEQ ID NO: 112221 - DNA, 60 bp, Artificial
  Synthetic oligonucleotide
ccacgcttatgtctcccctactgacgctgatggatttaatgagcttggaggttcggtgat

SEQ ID NO: 112222 - DNA, 60 bp, Artificial
  Synthetic oligonucleotide
ccagcgttcgatggcatggattggtgacgttgtgctattaaaccacgcttatgtctcccc

SEQ ID NO: 112223 - DNA, 60 bp, Artificial
  Synthetic oligonucleotide
cggcgagtggttcagtgcgtcttacgtgcgtcaatactccattctctgtccagcgttcga

SEQ ID NO: 112224 - DNA, 60 bp, Artificial
  Synthetic oligonucleotide
tctccatcctcgttaccgcgcaactgacgtcccagggactagcacaaacggcgagtggtt

SEQ ID NO: 112225 - DNA, 60 bp, Artificial
  Synthetic oligonucleotide
ttaacgctgcaattttctccatcctcgttaccgcgcaactgacgtcccagggactagcac

SEQ ID NO: 112226 - DNA, 60 bp, Artificial
  Synthetic oligonucleotide
gtcacacttaactgattggcgtaggtatcgtgaaatatcttgggggcagaataaatggat

SEQ ID NO: 112227 - DNA, 60 bp, Artificial
  Synthetic oligonucleotide
ataaatggatttcgcctaagtatccgtcacccccacaatcgattgcggtgtcccaattta

SEQ ID NO: 112228 - DNA, 60 bp, Artificial
  Synthetic oligonucleotide
gttttatcggtacgcacctttgtcccccttgaggaagtgttgacgcccaaacgtgctcgt

SEQ ID NO: 112229 - DNA, 60 bp, Artificial
  Synthetic oligonucleotide
gtcgatggttggaccgtgatgcatcccagcctccacgacgtcagaaatgccaattttggt

SEQ ID NO: 112230 - DNA, 60 bp, Artificial
  Synthetic oligonucleotide
gcagtttcgcatgttaaagtacaacatcgacagccttcgagacctgatctgtgtgaagat

SEQ ID NO: 112231 - DNA, 60 bp, Artificial
  Synthetic oligonucleotide
gccaattttggttttgctcacgttccatcttatgaggctcgactcatcctgcctgcggtt

SEQ ID NO: 112232 - DNA, 60 bp, Artificial
  Synthetic oligonucleotide
tcctgcctgcggttatattgtcgactgtctgggcggtctcgttctagtcacgggttccgg

SEQ ID NO: 112233 - DNA, 60 bp, Artificial
  Synthetic oligonucleotide
tcttcttggcacaaatatgttccacgatcgcatcatcttttgcggcctcaacgctacttg

SEQ ID NO: 112234 - DNA, 60 bp, Artificial
  Synthetic oligonucleotide
cggcttaacacgcgcagactggtacgtcaacgtccgatgtgttgtcgacattggaggacg

SEQ ID NO: 112235 - DNA, 60 bp, Artificial
  Synthetic oligonucleotide
cctcgtgtgtgtgatgctcttgcttacttatcggcatggacggcaacttggatggtcggc

SEQ ID NO: 112236 - DNA, 60 bp, Artificial
  Synthetic oligonucleotide
gactgaatcttctcgactgggtgatgagctggcaattcggacagtagacgcgccggtgct

SEQ ID NO: 112237 - DNA, 60 bp, Artificial
  Synthetic oligonucleotide
gcgttatagtgctcatggccgcgtaggatattgtagatggactgaatcttctcgactggg

SEQ ID NO: 112238 - DNA, 60 bp, Artificial
  Synthetic oligonucleotide
cgccggtgctgaaggtgtcccgaaccgccccagatatgccaaacgaagtccgacctcgtg

SEQ ID NO: 112239 - DNA, 60 bp, Artificial
  Synthetic oligonucleotide
tctcttggtctttacagggtaaatatgtggcatacaacgtgcacttcctcgaatcacgtg

SEQ ID NO: 112240 - DNA, 60 bp, Artificial
  Synthetic oligonucleotide
catgtggctatcatcctcgtcagaatttcggtttactacattacttctcttttcaggacg

SEQ ID NO: 112241 - DNA, 60 bp, Artificial
  Synthetic oligonucleotide
cggtctcttgatcttgcaattcgacgtcagtctcgaccatgtggctatcatcctcgtcag

SEQ ID NO: 112242 - DNA, 60 bp, Artificial
  Synthetic oligonucleotide
ggaccggctgcagaatacatgtctagtgtggtcacttcaagacgcaacgttcttcctcag

SEQ ID NO: 112243 - DNA, 60 bp, Artificial
  Synthetic oligonucleotide
gcgaacattatgtcgagttgtttcaccgtaacctttggggtccctttaaatactacgaga

SEQ ID NO: 112244 - DNA, 60 bp, Artificial
  Synthetic oligonucleotide
tcttttgcggcctcaacgctacttgcttgtcaatatcgacctccactctctctcttggtc

SEQ ID NO: 112245 - DNA, 60 bp, Artificial
  Synthetic oligonucleotide
tttctaccgctataagctccacgcgctacccttcaacctcacgtcctcctgttctctccg

SEQ ID NO: 112246 - DNA, 60 bp, Artificial
  Synthetic oligonucleotide
aagctccacgcgctacccttcaacctcacgtcctcctgttctctccgtgccattgggtga

SEQ ID NO: 112247 - DNA, 60 bp, Artificial
  Synthetic oligonucleotide
gccattgggtgactctcctcatgctaacgctcagaatgtaggcttcaaaggaccggctgc

SEQ ID NO: 112248 - DNA, 60 bp, Artificial
  Synthetic oligonucleotide
cgagatgatctcaactggtgcttctacactgcctgttggtgagatgttgaacattgtccc

SEQ ID NO: 112249 - DNA, 60 bp, Artificial
  Synthetic oligonucleotide
cttcgagatccacttcccgtttcgatgtacagacgctacgttactagacttaacgttgta

SEQ ID NO: 112250 - DNA, 60 bp, Artificial
  Synthetic oligonucleotide
ctgacatggacaagcgtcaaactttcctatctctcagaacagccagtaacacacaacgag

SEQ ID NO: 112251 - DNA, 60 bp, Artificial
  Synthetic oligonucleotide
gtaccaagctcgcggacgaactggtgacccccttgatttcgactttgtcaatccagacat

SEQ ID NO: 112252 - DNA, 60 bp, Artificial
  Synthetic oligonucleotide
cgttgatcctggtaacgttgtgggagaggctaggcagtaccaagctcgcggacgaactgg

SEQ ID NO: 112253 - DNA, 60 bp, Artificial
  Synthetic oligonucleotide
gtcgacattggaggacgtgatggcaggatgtcaggcccttgggttgataaacgatatgta

SEQ ID NO: 112254 - DNA, 60 bp, Artificial
  Synthetic oligonucleotide
ctcagcttgcggcgataacggcgatacgacagcggctggtaggtccaaaagttgttgtgc

SEQ ID NO: 112255 - DNA, 60 bp, Artificial
  Synthetic oligonucleotide
cttttcccacgtaatcatcaacgcgtgtcgcactccaactgctcagcttgcggcgataac

SEQ ID NO: 112256 - DNA, 60 bp, Artificial
  Synthetic oligonucleotide
gacggtcatgtttctcttttcccacgtaatcatcaacgcgtgtcgcactccaactgctca

SEQ ID NO: 112257 - DNA, 60 bp, Artificial
  Synthetic oligonucleotide
ggaactctttagcttgaacgccccgtctactctccagtcacagttcttaccgctgagcac

SEQ ID NO: 112258 - DNA, 60 bp, Artificial
  Synthetic oligonucleotide
ccgaagtttcatttagtcacccgcctttagatgatttgctgtttcttggcgttttatcgg

SEQ ID NO: 112259 - DNA, 60 bp, Artificial
  Synthetic oligonucleotide
ccaaaagttgttgtgcataattgtggggaaattgagcgtgggcaaacgttgtcacactta

SEQ ID NO: 112260 - DNA, 60 bp, Artificial
  Synthetic oligonucleotide
tttttatcgacctacaaaagtcattatgaacaaggttgtggaatgattatgcttgcagct

SEQ ID NO: 112261 - DNA, 60 bp, Artificial
  Synthetic oligonucleotide
ttagatatattgctgctaattccgctaaattaactactggaactgatgaatttttatcga

SEQ ID NO: 112262 - DNA, 60 bp, Artificial
  Synthetic oligonucleotide
aaacacgcgttaatcctaacagacagtttactaagccatccgtggccttagctggtttga

SEQ ID NO: 112263 - DNA, 60 bp, Artificial
  Synthetic oligonucleotide
aagattgatttatagatcggttgttgcatattatgccgtcaacaagtcaccgccaccgag

SEQ ID NO: 112264 - DNA, 60 bp, Artificial
  Synthetic oligonucleotide
tttttggtaaattgaaaacacgcgttaatcctaacagacagtttactaagccatccgtgg

SEQ ID NO: 112265 - DNA, 59 bp, Artificial
  Synthetic oligonucleotide
catgctgacaataaacaggttaattattccatatgggctgaacgagtgccaataacatt

SEQ ID NO: 112266 - DNA, 52 bp, Artificial
  Synthetic oligonucleotide
ccgtcaacaagtcaccgccaccgagtattattttgatgttatcacaggacaa

SEQ ID NO: 112267 - DNA, 60 bp, Artificial
  Synthetic oligonucleotide
tgaactgcgtgatttaagattgatttatagatcggttgttgcatattatgccgtcaacaa

SEQ ID NO: 112268 - DNA, 60 bp, Artificial
  Synthetic oligonucleotide
catgtttcttatatgtatatttatgttccttgtttaacgtatcatcatgactacacgaat

SEQ ID NO: 112269 - DNA, 60 bp, Artificial
  Synthetic oligonucleotide
agataaacagatagattttaatgagaagaaagtagagtcaattattccgcggaataattt

SEQ ID NO: 112270 - DNA, 60 bp, Artificial
  Synthetic oligonucleotide
tcggaagattcgaaattacaccaaggaaaaagaatattacaagcgctggaacggataatg

SEQ ID NO: 112271 - DNA, 60 bp, Artificial
  Synthetic oligonucleotide
gcttgcagcttatggcaagtataaatatattaactttgacggtacgtttctttttggtaa

SEQ ID NO: 112272 - DNA, 60 bp, Artificial
  Synthetic oligonucleotide
cgacctacaaaagtcattatgaacaaggttgtggaatgattatgcttgcagcttatggca

SEQ ID NO: 112273 - DNA, 57 bp, Artificial
  Synthetic oligonucleotide
atatcttccaggcttgtgatttgggtaatcgacttcctattagtggttactgttgtc

SEQ ID NO: 112274 - DNA, 60 bp, Artificial
  Synthetic oligonucleotide
gcgagccatcgctgaagccatctatcctggtattaatgcgacatatcttccaggcttgtg

SEQ ID NO: 112275 - DNA, 60 bp, Artificial
  Synthetic oligonucleotide
gccactgagcgagccatcgctgaagccatctatcctggtattaatgcgacatatcttcca

SEQ ID NO: 112276 - DNA, 55 bp, Artificial
  Synthetic oligonucleotide
aaaatgacacacgatgttggattagttgatgccactgagcgagccatcgctgaag

SEQ ID NO: 112277 - DNA, 60 bp, Artificial
  Synthetic oligonucleotide
atagtatattaagatatgcaaaaatgacacacgatgttggattagttgatgccactgagc

SEQ ID NO: 112278 - DNA, 60 bp, Artificial
  Synthetic oligonucleotide
cggtttttacttattatatgtatttggatacacaatgtatttcaagggtggagatgaagc

SEQ ID NO: 112279 - DNA, 60 bp, Artificial
  Synthetic oligonucleotide
gtagaagaaaggtgatccgaatgtctctaggtttcatctttggaatatttactaacatat

SEQ ID NO: 112280 - DNA, 60 bp, Artificial
  Synthetic oligonucleotide
gcatgggcgagggaggacgatcaatacaatcaggctcatccaaactcaacaatgttccgt

SEQ ID NO: 112281 - DNA, 60 bp, Artificial
  Synthetic oligonucleotide
gtgccgattaatgatgaactgtcttcacacctcctccgagctggcaattctccatggcag

SEQ ID NO: 112282 - DNA, 60 bp, Artificial
  Synthetic oligonucleotide
cagaccgaactcagcagtttaagagggataaacttgaagcatgggcgagggaggacgatc

SEQ ID NO: 112283 - DNA, 60 bp, Artificial
  Synthetic oligonucleotide
aagtcgaggcgttagcagaccgaactcagcagtttaagagggataaacttgaagcatggg

SEQ ID NO: 112284 - DNA, 60 bp, Artificial
  Synthetic oligonucleotide
tctgctcaacttgacgggatttggcccgatttcgtacgttcgggtagatgaagatatgtg

SEQ ID NO: 112285 - DNA, 60 bp, Artificial
  Synthetic oligonucleotide
aagcatagagtgtatcagcaattgagtgccgtaactctgctcaacttgacgggatttggc

SEQ ID NO: 112286 - DNA, 60 bp, Artificial
  Synthetic oligonucleotide
ccccttattgataacaactcagtacccgcggtatcacgtaacattcatggttggactggc

SEQ ID NO: 112287 - DNA, 60 bp, Artificial
  Synthetic oligonucleotide
ggcaattctccatggcagttgactcagtttttagactggataagtcttgggagaggacta

SEQ ID NO: 112288 - DNA, 60 bp, Artificial
  Synthetic oligonucleotide
aggcccaggcggatcgagtgtacgactgtgatgattacccgttcttagcacgcgacccta

SEQ ID NO: 112289 - DNA, 50 bp, Artificial
  Synthetic oligonucleotide
ttttgcgcctggtgtggtccgctcccacgcttgatggattagttgtagcc

SEQ ID NO: 112290 - DNA, 60 bp, Artificial
  Synthetic oligonucleotide
cgcgaccctagatttaagcatagagtgtatcagcaattgagtgccgtaactctgctcaac

SEQ ID NO: 112291 - DNA, 60 bp, Artificial
  Synthetic oligonucleotide
ggcccaggcggatcgagtgtacgactgtgatgattacccgttcttagcacgcgaccctag

SEQ ID NO: 112292 - DNA, 60 bp, Artificial
  Synthetic oligonucleotide
accagatgagttgtcttttaagtggcactcttcagattccttttcgtccaaaccatcgat

SEQ ID NO: 112293 - DNA, 60 bp, Artificial
  Synthetic oligonucleotide
gagaggactagctacatcagcacttgttcctactgctggctcaagatattaccagatgag

SEQ ID NO: 112294 - DNA, 60 bp, Artificial
  Synthetic oligonucleotide
aaccatcgatggggggatattagatttttgcgcctggtgtggtccgctcccacgcttgat

SEQ ID NO: 112295 - DNA, 60 bp, Artificial
  Synthetic oligonucleotide
gatgagttgtcttttaagtggcactcttcagattccttttcgtccaaaccatcgatgggg

SEQ ID NO: 112296 - DNA, 60 bp, Artificial
  Synthetic oligonucleotide
ggctttcaagtaaggcgaatggtgactgagttctgtgataggctaagacgtgacggtgtt

SEQ ID NO: 112297 - DNA, 60 bp, Artificial
  Synthetic oligonucleotide
tggctttcaagtaaggcgaatggtgactgagttctgtgataggctaagacgtgacggtgt

SEQ ID NO: 112298 - DNA, 60 bp, Artificial
  Synthetic oligonucleotide
aattgccccttattgataacaactcagtacccgcggtatcacgtaacattcatggttgga

SEQ ID NO: 112299 - DNA, 60 bp, Artificial
  Synthetic oligonucleotide
atatcgaacattttatttccaatgcaaccgacggggtgatgctgctgaagtgtggattct

SEQ ID NO: 112300 - DNA, 60 bp, Artificial
  Synthetic oligonucleotide
tttccaatgcaaccgacggggtgatgctgctgaagtgtggattctctcctgctcgttgaa

SEQ ID NO: 112301 - DNA, 60 bp, Artificial
  Synthetic oligonucleotide
caacttgacgggatttggcccgatttcgtacgttcgggtagatgaagatatgtggagtgg

SEQ ID NO: 112302 - DNA, 60 bp, Artificial
  Synthetic oligonucleotide
acgtatgctaggatgacccagattatactatccctattctggttgtcttacgtcggtgtg

SEQ ID NO: 112303 - DNA, 60 bp, Artificial
  Synthetic oligonucleotide
aatcgcagtttattcgttatgccaacgagcccagattggaatatggatgttaacctgatc

SEQ ID NO: 112304 - DNA, 60 bp, Artificial
  Synthetic oligonucleotide
gttatgccaacgagcccagattggaatatggatgttaacctgatcttaagctcgacgttg

SEQ ID NO: 112305 - DNA, 60 bp, Artificial
  Synthetic oligonucleotide
tgtggattctctcctgctcgttgaaccagtccgcacaaattagaccgggtaatcgcagtt

SEQ ID NO: 112306 - DNA, 60 bp, Artificial
  Synthetic oligonucleotide
gtggattctctcctgctcgttgaaccagtccgcacaaattagaccgggtaatcgcagttt

SEQ ID NO: 112307 - DNA, 60 bp, Artificial
  Synthetic oligonucleotide
taacctgatcttaagctcgacgttgacaggatgcttatgttcgggttcacaattgcccct

SEQ ID NO: 112308 - DNA, 60 bp, Artificial
  Synthetic oligonucleotide
cctgatcttaagctcgacgttgacaggatgcttatgttcgggttcacaattgccccttat

SEQ ID NO: 112309 - DNA, 60 bp, Artificial
  Synthetic oligonucleotide
tgcaaaatgtgccgattaatgatgaactgtcttcacacctcctccgagctggcaattctc

SEQ ID NO: 112310 - DNA, 60 bp, Artificial
  Synthetic oligonucleotide
gaagcatgggcgagggaggacgatcaatacaatcaggctcatccaaactcaacaatgttc

SEQ ID NO: 112311 - DNA, 60 bp, Artificial
  Synthetic oligonucleotide
gcacactacctaacattacacaattgaaagagcatatcaagaatttctttcagaatgagc

SEQ ID NO: 112312 - DNA, 60 bp, Artificial
  Synthetic oligonucleotide
tttcagaatgagcaacaacctatttttcaaactttaattaacaatgaaattggtgatgaa

SEQ ID NO: 112313 - DNA, 60 bp, Artificial
  Synthetic oligonucleotide
tggtgatgaattcattggtgtgaatacctttggacttagtctattcgcaacctcgaaatc

SEQ ID NO: 112314 - DNA, 60 bp, Artificial
  Synthetic oligonucleotide
cattggtgtgaatacctttggacttagtctattcgcaacctcgaaatcagatgctgaaca

SEQ ID NO: 112315 - DNA, 60 bp, Artificial
  Synthetic oligonucleotide
cctcgaaatcagatgctgaacaaattgaacgcgtacaaatcgaaactttaacagaaggta

SEQ ID NO: 112316 - DNA, 60 bp, Artificial
  Synthetic oligonucleotide
gaagttcccgcacaacttggaattctaactgatgatgtcaaggtattaattaacacaggt

SEQ ID NO: 112317 - DNA, 60 bp, Artificial
  Synthetic oligonucleotide
taacacaggtaaacttagaattgacggtggttatgattacaattgtccttcaagtactac

SEQ ID NO: 112318 - DNA, 60 bp, Artificial
  Synthetic oligonucleotide
cttagaattgacggtggttatgattacaattgtccttcaagtactacagatgttactcac

SEQ ID NO: 112319 - DNA, 60 bp, Artificial
  Synthetic oligonucleotide
caagtactacagatgttactcactacggtggttacgaccgattttcgcgtgatgtattcg

SEQ ID NO: 112320 - DNA, 60 bp, Artificial
  Synthetic oligonucleotide
ctacagatgttactcactacggtggttacgaccgattttcgcgtgatgtattcgaactac

SEQ ID NO: 112321 - DNA, 60 bp, Artificial
  Synthetic oligonucleotide
caatgtgactgcatcattagcgcgactagatcagtgcttagggtcttcggttcattatcg

SEQ ID NO: 112322 - DNA, 60 bp, Artificial
  Synthetic oligonucleotide
tacaaaagttgtatgtaacaaagttgttagatgaccaatgtgactgcatcattagcgcga

SEQ ID NO: 112323 - DNA, 60 bp, Artificial
  Synthetic oligonucleotide
attagcgcgactagatcagtgcttagggtcttcggttcattatcgacgccgagtgacgac

SEQ ID NO: 112324 - DNA, 60 bp, Artificial
  Synthetic oligonucleotide
gcagtttacaaaaccgaccctagtaataacgttatgaattcagtaattattagtcgagca

SEQ ID NO: 112325 - DNA, 60 bp, Artificial
  Synthetic oligonucleotide
taattcaagcagtttacaaaaccgaccctagtaataacgttatgaattcagtaattatta

SEQ ID NO: 112326 - DNA, 60 bp, Artificial
  Synthetic oligonucleotide
ccataatgaaacaaatacaaaagttgtatgtaacaaagttgttagatgaccaatgtgact

SEQ ID NO: 112327 - DNA, 60 bp, Artificial
  Synthetic oligonucleotide
gtaattattagtcgagcaaacaatttaattaaatctgatcgggataggcttactaaaaag

SEQ ID NO: 112328 - DNA, 60 bp, Artificial
  Synthetic oligonucleotide
ccgatcttatccataatggtgtaccacagagactttccgatacaataatattaaacgaca

SEQ ID NO: 112329 - DNA, 60 bp, Artificial
  Synthetic oligonucleotide
taaaaaagatttacttaaacgcctccacgatagacttgcaacagtagagacatgcacact

SEQ ID NO: 112330 - DNA, 60 bp, Artificial
  Synthetic oligonucleotide
atcaaagccccgcacgtagcatcttcttcgacgaccgtcaatctatacattaaaaaagat

SEQ ID NO: 112331 - DNA, 55 bp, Artificial
  Synthetic oligonucleotide
atcaaagccccgcacgtagcatcttcttcgacgaccgtcaatctatacattaaaa

SEQ ID NO: 112332 - DNA, 60 bp, Artificial
  Synthetic oligonucleotide
cttatccataatggtgtaccacagagactttccgatacaataatattaaacgacaggccc

SEQ ID NO: 112333 - DNA, 60 bp, Artificial
  Synthetic oligonucleotide
catgcacactacctaacattacacaattgaaagagcatatcaagaatttctttcagaatg

SEQ ID NO: 112334 - DNA, 60 bp, Artificial
  Synthetic oligonucleotide
taaacgcctccacgatagacttgcaacagtagagacatgcacactacctaacattacaca

SEQ ID NO: 112335 - DNA, 60 bp, Artificial
  Synthetic oligonucleotide
gacttgacgctgacaaatctttgcttgaacaaacttggagcggtgtcgcttcattcgttg

SEQ ID NO: 112336 - DNA, 60 bp, Artificial
  Synthetic oligonucleotide
agtattcaattccgaagaacggaacaagtcgaaatggcgaagaatagttcggatattata

SEQ ID NO: 112337 - DNA, 60 bp, Artificial
  Synthetic oligonucleotide
gatgtattcgaactacttaacttattttttaacattagtttgagcattattccagttgcg

SEQ ID NO: 112338 - DNA, 60 bp, Artificial
  Synthetic oligonucleotide
cgacttgacgctgacaaatctttgcttgaacaaacttggagcggtgtcgcttcattcgtt

SEQ ID NO: 112339 - DNA, 60 bp, Artificial
  Synthetic oligonucleotide
caatggtcacgaaagagaagtgtacgtattaacgaacaaaggtgatatgacgttagacca

SEQ ID NO: 112340 - DNA, 60 bp, Artificial
  Synthetic oligonucleotide
gacgttagaccaatatcgtaaaatcggcgacgtacttaattcaatttggaaacgtggtaa

SEQ ID NO: 112341 - DNA, 60 bp, Artificial
  Synthetic oligonucleotide
cgaagaacggaacaagtcgaaatggcgaagaatagttcggatattataaagaaggttaag

SEQ ID NO: 112342 - DNA, 60 bp, Artificial
  Synthetic oligonucleotide
tacaatggtcacgaaagagaagtgtacgtattaacgaacaaaggtgatatgacgttagac

SEQ ID NO: 112343 - DNA, 60 bp, Artificial
  Synthetic oligonucleotide
tcgtaaaatcggcgacgtacttaattcaatttggaaacgtggtaagactatagctgctca

SEQ ID NO: 112344 - DNA, 54 bp, Artificial
  Synthetic oligonucleotide
aacgtggtaagactatagctgctcagtactttgattacattagactaggcgtcg

SEQ ID NO: 112345 - DNA, 60 bp, Artificial
  Synthetic oligonucleotide
ctaatcgagctagcgatggcacagtcgtcgggcgttgaagataatatgttaaatggtcga

SEQ ID NO: 112346 - DNA, 60 bp, Artificial
  Synthetic oligonucleotide
gatggattgcgcattccctctcaaatatcgccagatcttggtcaattggcgttcgatctc

SEQ ID NO: 112347 - DNA, 60 bp, Artificial
  Synthetic oligonucleotide
catttgtcagaaagggaaaatttcttcgttggtatcgcgcagcgtcaagaacttgagagc

SEQ ID NO: 112348 - DNA, 60 bp, Artificial
  Synthetic oligonucleotide
gagagcgagtctgatgaatggcgagctacgcgtctataaaggaagcagactttgggctct

SEQ ID NO: 112349 - DNA, 60 bp, Artificial
  Synthetic oligonucleotide
tcttggtcaattggcgttcgatctcgtgtttaatagttccgtaaggcagactgtttggtt

SEQ ID NO: 112350 - DNA, 60 bp, Artificial
  Synthetic oligonucleotide
agactttgggctctaagagcgatgttgttctcagataaactcaggtacaaaagcgatggt

SEQ ID NO: 112351 - DNA, 60 bp, Artificial
  Synthetic oligonucleotide
gcgatggtcaagtaatcgatccatacgagagccacagaggtaaaataacagttagattaa

SEQ ID NO: 112352 - DNA, 60 bp, Artificial
  Synthetic oligonucleotide
tctatactatcagaagcgtgtcaggttcagatatcagtgagtggctcaacgtcgcgagac

SEQ ID NO: 112353 - DNA, 60 bp, Artificial
  Synthetic oligonucleotide
attagctgcggttggatggtacttaccattactcgtctatactatcagaagcgtgtcagg

SEQ ID NO: 112354 - DNA, 60 bp, Artificial
  Synthetic oligonucleotide
ttgcgtgtcatgggtgacgattttcggagctgcaatgcgcgaatgtctttattggatcgt

SEQ ID NO: 112355 - DNA, 60 bp, Artificial
  Synthetic oligonucleotide
cgattagttgagggcgttggaattgttacattagacgttgacttgcaaatattagctgcg

SEQ ID NO: 112356 - DNA, 60 bp, Artificial
  Synthetic oligonucleotide
gtggatctgtaactccaacacaatcgccatctccaagtccttctcctagtgccgcggcta

SEQ ID NO: 112357 - DNA, 60 bp, Artificial
  Synthetic oligonucleotide
agaaagcacatgaagcgtggtcggtttattgcggagtattaaacgatacgatcagacaca

SEQ ID NO: 112358 - DNA, 60 bp, Artificial
  Synthetic oligonucleotide
caagacgaagcaatcatgcgctgagtatctgatccagaaagcacatgaagcgtggtcggt

SEQ ID NO: 112359 - DNA, 60 bp, Artificial
  Synthetic oligonucleotide
tcaaaatgtgtgacgaagcacgacaccgagctgttcgctaatcctggaagtatcgttgcc

SEQ ID NO: 112360 - DNA, 60 bp, Artificial
  Synthetic oligonucleotide
cgcccatgctagctttctgtcaaggactatcttacgcgttctatatcacgaagccagcta

SEQ ID NO: 112361 - DNA, 55 bp, Artificial
  Synthetic oligonucleotide
cccggaagtttcactcaggagttgagtccttgaaccccagcattcaatcaaaaga

SEQ ID NO: 112362 - DNA, 60 bp, Artificial
  Synthetic oligonucleotide
tgatgtgtggtcaaaattcattcacgagtgaggtttttgtttacattggacgagctggtg

SEQ ID NO: 112363 - DNA, 60 bp, Artificial
  Synthetic oligonucleotide
ccatgtgccgcggttaagccttctgcgtttctagagcgcatgaagaagtacaaaggggtg

SEQ ID NO: 112364 - DNA, 60 bp, Artificial
  Synthetic oligonucleotide
gcgtagatatcgtcatatgaaagctccattaatcaccataccgcaagttgtgcacagtgt

SEQ ID NO: 112365 - DNA, 59 bp, Artificial
  Synthetic oligonucleotide
atattgtcggaatgccttcgaaagctagggcagctttgaccaggcgaaccgatgaacat

SEQ ID NO: 112366 - DNA, 60 bp, Artificial
  Synthetic oligonucleotide
gccagctatacctgatgaaggcatagatcaatttatgttagacgatatgcccgatgatgg

SEQ ID NO: 112367 - DNA, 60 bp, Artificial
  Synthetic oligonucleotide
gagcggaatatagtcggtacgagttttggtatgtacaaagggatacctcgcatagatgct

SEQ ID NO: 112368 - DNA, 60 bp, Artificial
  Synthetic oligonucleotide
gacgtatgtatccaaagctgtcagtgattggattcggtatggatgcagttggtgagaatg

SEQ ID NO: 112369 - DNA, 60 bp, Artificial
  Synthetic oligonucleotide
ggtgagggttatgttggtgttccggaacagttttggacgatccatgcaacttcaaaagcc

SEQ ID NO: 112370 - DNA, 60 bp, Artificial
  Synthetic oligonucleotide
ccgacggtaccagggcaaccatctcagacgcctgtcaatcccaaccaatcaaccgagctc

SEQ ID NO: 112371 - DNA, 60 bp, Artificial
  Synthetic oligonucleotide
cccaaccaatcaaccgagctccagagcgttgcgaagccgggcatcgttaggtaggagtag

SEQ ID NO: 112372 - DNA, 60 bp, Artificial
  Synthetic oligonucleotide
ggtaggagtagttcattcgtgagaacctgcggccaacaggggaacgggaggagatagaga

SEQ ID NO: 112373 - DNA, 60 bp, Artificial
  Synthetic oligonucleotide
tagcgcgagccattggttcgtttgttcctagtttgccaacttccggtactagagatacga

SEQ ID NO: 112374 - DNA, 60 bp, Artificial
  Synthetic oligonucleotide
cctaaggttgagaatttcagagtggttggaacacgtataggcgcgttgagcagagctaat

SEQ ID NO: 112375 - DNA, 60 bp, Artificial
  Synthetic oligonucleotide
aaggagctagcgagactggaacagttaaatggtttgatgtgcctttaggacctaaggttg

SEQ ID NO: 112376 - DNA, 60 bp, Artificial
  Synthetic oligonucleotide
ccaggatgtggccaagggttaagaaatacacctgcgacttaacagatttatacaacggcg

SEQ ID NO: 112377 - DNA, 60 bp, Artificial
  Synthetic oligonucleotide
ggtgaactatccatcctcgcatcttttgaatgagattaaacaagccctactttcgcgggg

SEQ ID NO: 112378 - DNA, 60 bp, Artificial
  Synthetic oligonucleotide
caagccctactttcgcggggattttctagaattgtccttcctgtagtgatgtgtggtcaa

SEQ ID NO: 112379 - DNA, 60 bp, Artificial
  Synthetic oligonucleotide
cacgccaatgattttcccgctttcgacttttatactaaggacgttggaactatggtcact

SEQ ID NO: 112380 - DNA, 60 bp, Artificial
  Synthetic oligonucleotide
cccttaccgtcagaagtttcagccgtactggacgcaccaatcaactattcctatcggtac

SEQ ID NO: 112381 - DNA, 60 bp, Artificial
  Synthetic oligonucleotide
tgtttagtcttgcaagacagtacagcgctacgactaggatttgctcagcagatggattgc

SEQ ID NO: 112382 - DNA, 60 bp, Artificial
  Synthetic oligonucleotide
ttaagccctaccctcgtcaacgacagtgtttacgtggctaatttcgtgattatggcccct

SEQ ID NO: 112383 - DNA, 59 bp, Artificial
  Synthetic oligonucleotide
tccaattattgcagcaagaaaaggaattaacaggtgacgagataagattggcgcttagg

SEQ ID NO: 112384 - DNA, 60 bp, Artificial
  Synthetic oligonucleotide
gacgagataagattggcgcttaggcagatgcaaggatcaattaagttacctataaatgac

SEQ ID NO: 112385 - DNA, 60 bp, Artificial
  Synthetic oligonucleotide
ccggtattctctaatttttgcgtggatagcatacgcgggatgtctagactcagctttttg

SEQ ID NO: 112386 - DNA, 60 bp, Artificial
  Synthetic oligonucleotide
gtcgagtcgtgatcgctggagctattaacgagccattagttgggtgtttaagacgtatgt

SEQ ID NO: 112387 - DNA, 60 bp, Artificial
  Synthetic oligonucleotide
cctatacgattctaggttcttggccgatatagctctttcgtccctgccacctgagggatt

SEQ ID NO: 112388 - DNA, 60 bp, Artificial
  Synthetic oligonucleotide
tggtgagaatgaacgtttaactgtcgagggcgcctcacaaaggaatttagcgtgtgatat

SEQ ID NO: 112389 - DNA, 60 bp, Artificial
  Synthetic oligonucleotide
ctgtgaagcatgctcttgctttctcgagctggagtgattacgttctgatgaaggtgaact

SEQ ID NO: 112390 - DNA, 60 bp, Artificial
  Synthetic oligonucleotide
aaggggtgttatcataccatgtgtatcccttgggttacgatcgtgttcttaagacttgcg

SEQ ID NO: 112391 - DNA, 60 bp, Artificial
  Synthetic oligonucleotide
ggacgaacggcatagtcatttcagacgaacgtatgatgctcgatcccttaccgtcagaag

SEQ ID NO: 112392 - DNA, 60 bp, Artificial
  Synthetic oligonucleotide
ccagtgtcaaattgacatgctacgacgagtactacgctaaccctcaggatctagcgacgc

SEQ ID NO: 112393 - DNA, 60 bp, Artificial
  Synthetic oligonucleotide
gttatcccctttgcaagtaagatcagatcgtgaagtaagtcgagtcgtgatcgctggagc

SEQ ID NO: 112394 - DNA, 60 bp, Artificial
  Synthetic oligonucleotide
tatggcccctaccgaaggttccgaatctcctagcgctacggagcagcttgatagaataga

SEQ ID NO: 112395 - DNA, 60 bp, Artificial
  Synthetic oligonucleotide
ttacgcttgcgtgcgaattagcttcggagaagatagccaatgctctactgactggagtga

SEQ ID NO: 112396 - DNA, 60 bp, Artificial
  Synthetic oligonucleotide
cgcgtagatgtgtttttacgcttgcgtgcgaattagcttcggagaagatagccaatgctc

SEQ ID NO: 112397 - DNA, 60 bp, Artificial
  Synthetic oligonucleotide
cgatgatgtagctgaagaagttgcgaacatcaaccttgacgatccgtctacgcgtagatg

SEQ ID NO: 112398 - DNA, 60 bp, Artificial
  Synthetic oligonucleotide
cgagtgaataacgcagtcggattaatgcaagagtacgcaattaagctcagtgaatcggct

SEQ ID NO: 112399 - DNA, 60 bp, Artificial
  Synthetic oligonucleotide
atcggaccatcgaagaaagttgctcgcagcattgctgctaacaaaataatcgatgatgta

SEQ ID NO: 112400 - DNA, 60 bp, Artificial
  Synthetic oligonucleotide
cgaagtttcaccatcgtagctacatttagggacaagaaatacgaaggaatcggaccatcg

SEQ ID NO: 112401 - DNA, 60 bp, Artificial
  Synthetic oligonucleotide
accgaagtttcaccatcgtagctacatttagggacaagaaatacgaaggaatcggaccat

SEQ ID NO: 112402 - DNA, 53 bp, Artificial
  Synthetic oligonucleotide
tgaatcggctccttcgtatgaagacgtcggttttgagggtccacctcacaacc

SEQ ID NO: 112403 - DNA, 60 bp, Artificial
  Synthetic oligonucleotide
tgattgagctgtgggatatgagaaaatatgataaaagcggattcgatacaatgatcaaac

SEQ ID NO: 112404 - DNA, 60 bp, Artificial
  Synthetic oligonucleotide
gtgggatatgagaaaatatgataaaagcggattcgatacaatgatcaaacacatgaggag

SEQ ID NO: 112405 - DNA, 60 bp, Artificial
  Synthetic oligonucleotide
cctggttaaactttgtcgcaatacaacctatgattacggagctgacctattgattgagct

SEQ ID NO: 112406 - DNA, 60 bp, Artificial
  Synthetic oligonucleotide
gtcgcaatacaacctatgattacggagctgacctattgattgagctgtgggatatgagaa

SEQ ID NO: 112407 - DNA, 60 bp, Artificial
  Synthetic oligonucleotide
cgcagtcggattaatgcaagagtacgcaattaagctcagtgaatcggctccttcgtatga

SEQ ID NO: 112408 - DNA, 60 bp, Artificial
  Synthetic oligonucleotide
tgaatcggctccttcgtatgaagacgtcggttttgagggtccacctcacaaccgaagttt

SEQ ID NO: 112409 - DNA, 60 bp, Artificial
  Synthetic oligonucleotide
ctactgactggagtgatttcccagatcggtggggcggttgacctggttaaactttgtcgc

SEQ ID NO: 112410 - DNA, 60 bp, Artificial
  Synthetic oligonucleotide
gccaatgctctactgactggagtgatttcccagatcggtggggcggttgacctggttaaa

SEQ ID NO: 112411 - DNA, 54 bp, Artificial
  Synthetic oligonucleotide
gctcgcagcattgctgctaacaaaataatcgatgatgtagctgaagaagttgcg

SEQ ID NO: 112412 - DNA, 60 bp, Artificial
  Synthetic oligonucleotide
atgatcaaacacatgaggagatggttcaccgctgccggtgtctatcccactgttaatgaa

SEQ ID NO: 112413 - DNA, 60 bp, Artificial
  Synthetic oligonucleotide
tgtggacgcgctttgaatgcgccacatcgtgaggggtaagcacacagtatcaccacatac

SEQ ID NO: 112414 - DNA, 60 bp, Artificial
  Synthetic oligonucleotide
tcacccccacaattttgtggacgcgctttgaatgcgccacatcgtgaggggtaagcacac

SEQ ID NO: 112415 - DNA, 60 bp, Artificial
  Synthetic oligonucleotide
aggagatggttcaccgctgccggtgtctatcccactgttaatgaagaaactatcacgatc

SEQ ID NO: 112416 - DNA, 60 bp, Artificial
  Synthetic oligonucleotide
agatgcccctgatgataaaaccgttcatctattggatcgcgacgacgatcacgttgttgc

SEQ ID NO: 112417 - DNA, 60 bp, Artificial
  Synthetic oligonucleotide
tgccaaatgccaaactgttattgatgacttgactcagatgaatggaaagcaggcacgaga

SEQ ID NO: 112418 - DNA, 60 bp, Artificial
  Synthetic oligonucleotide
gcttgcttcaaccagcgtatctgtccgaactgaagaggcaaaggttgccgatgaagagct

SEQ ID NO: 112419 - DNA, 60 bp, Artificial
  Synthetic oligonucleotide
acgttgttgctagatttactaaggtgtttatagaagatgtggcccccgggcatcatgctg

SEQ ID NO: 112420 - DNA, 60 bp, Artificial
  Synthetic oligonucleotide
ggcactattactcaaaaccagatgacgtatcagcaagagctacaagctttggtagcgaag

SEQ ID NO: 112421 - DNA, 60 bp, Artificial
  Synthetic oligonucleotide
aaccagatgacgtatcagcaagagctacaagctttggtagcgaagaatgtggaactggat

SEQ ID NO: 112422 - DNA, 60 bp, Artificial
  Synthetic oligonucleotide
ctcagtccctgaatgctcagttggaagcggatgctaagtcagctcaagcatgtagtctgg

SEQ ID NO: 112423 - DNA, 60 bp, Artificial
  Synthetic oligonucleotide
aggggcgaagtgagaaggggctggtgcgaacgtatctctaaggaagcggctgccaaatgc

SEQ ID NO: 112424 - DNA, 60 bp, Artificial
  Synthetic oligonucleotide
gtggtttcaatcacttctgctgctctgaagtgggtagttaaacacggtgtgtccgacggg

SEQ ID NO: 112425 - DNA, 60 bp, Artificial
  Synthetic oligonucleotide
attgagcaagggtctatgtctataccttatcagcatgtgaatgttccaaaagttgatcgt

SEQ ID NO: 112426 - DNA, 60 bp, Artificial
  Synthetic oligonucleotide
cctgctgatggatgaaaaactttccgtgctgaacagcgcatgtcgtatgacgctgcgttc

SEQ ID NO: 112427 - DNA, 60 bp, Artificial
  Synthetic oligonucleotide
gtttgttgcttcacctgaatctttccaggcttctgatgtcgcaaaacgctttgctataaa

SEQ ID NO: 112428 - DNA, 50 bp, Artificial
  Synthetic oligonucleotide
ctaaatcattgcgtattactccctcccttctatcagccactcctatcgat

SEQ ID NO: 112429 - DNA, 58 bp, Artificial
  Synthetic oligonucleotide
ttctatctctggagtgatttcaccggcgcacgcttatctattggattgtctacctcag

SEQ ID NO: 112430 - DNA, 60 bp, Artificial
  Synthetic oligonucleotide
ccgggcatgagccttcaggatgccatcactgccttcatcaactttgtgtccgcgatgctg

SEQ ID NO: 112431 - DNA, 57 bp, Artificial
  Synthetic oligonucleotide
aactttgtgtccgcgatgctgaaaatgacggtgactcgtcaaaattttgatgtcatc

SEQ ID NO: 112432 - DNA, 60 bp, Artificial
  Synthetic oligonucleotide
gcgtatctgtccgaactgaagaggcaaaggttgccgatgaagagctgatgctgttcgggc

SEQ ID NO: 112433 - DNA, 60 bp, Artificial
  Synthetic oligonucleotide
tgttccagtttccaaggccaaacgtgatatatcatctcttgccgctactcctggaattcg

SEQ ID NO: 112434 - DNA, 60 bp, Artificial
  Synthetic oligonucleotide
tgacctgattgatttctccgttccaactgatgagctgtaaatgagctgtgacgcagtgtt

SEQ ID NO: 112435 - DNA, 60 bp, Artificial
  Synthetic oligonucleotide
ctccgttccaactgatgagctgtaaatgagctgtgacgcagtgttgccctaatcccttaa

SEQ ID NO: 112436 - DNA, 60 bp, Artificial
  Synthetic oligonucleotide
gtccattcagtcagatcctaccccaatggcgctgcaaccactgttatctcagttgcgtga

SEQ ID NO: 112437 - DNA, 60 bp, Artificial
  Synthetic oligonucleotide
attatcatgcagaagtccattcagtcagatcctaccccaatggcgctgcaaccactgtta

SEQ ID NO: 112438 - DNA, 60 bp, Artificial
  Synthetic oligonucleotide
gggattaaactacagttggacgcatctagacagtgtcatgagtgtcccgtgttgcagcag

SEQ ID NO: 112439 - DNA, 60 bp, Artificial
  Synthetic oligonucleotide
cccttcacggaagttagcatatggtgaggtgctttttctagagcgatccagtgacatggt

SEQ ID NO: 112440 - DNA, 60 bp, Artificial
  Synthetic oligonucleotide
cacgttggagactgcggattatttcaagatctacccaacatatgatgagcatgatagcag

SEQ ID NO: 112441 - DNA, 60 bp, Artificial
  Synthetic oligonucleotide
tttcagcgagtgctctctcagggatacgcatcattaatgtgctattatcacccttcacgg

SEQ ID NO: 112442 - DNA, 60 bp, Artificial
  Synthetic oligonucleotide
tgaaaactggacgtgatgctgatgcacatagggcttttcagcgagtgctctctcagggat

SEQ ID NO: 112443 - DNA, 60 bp, Artificial
  Synthetic oligonucleotide
cgctgcgttcactaatgaaaactggacgtgatgctgatgcacatagggcttttcagcgag

SEQ ID NO: 112444 - DNA, 60 bp, Artificial
  Synthetic oligonucleotide
gacgttcatttggcaccaggcgtcggtaatatcgatcctgagatctacaatgagggacgg

SEQ ID NO: 112445 - DNA, 60 bp, Artificial
  Synthetic oligonucleotide
gagggacggttcatgtttatgcagcacaaaccactcgcggcagatcagtcgtatttcacg

SEQ ID NO: 112446 - DNA, 60 bp, Artificial
  Synthetic oligonucleotide
gagctgatgctgttcgggctagatcatagagggccacagcagcttgatatttctaatgct

SEQ ID NO: 112447 - DNA, 60 bp, Artificial
  Synthetic oligonucleotide
aaagggataatgaaagctgcagatattcaggcaactcatgacgttcatttggcaccaggc

SEQ ID NO: 112448 - DNA, 51 bp, Artificial
  Synthetic oligonucleotide
aggcacgagagataacagaattacgcgagtcagccgagaattatgagaagc

SEQ ID NO: 112449 - DNA, 54 bp, Artificial
  Synthetic oligonucleotide
ctggaattcgctcacaacccttcactccgtctgtagacatgtctcaatcgcgtg

SEQ ID NO: 112450 - DNA, 60 bp, Artificial
  Synthetic oligonucleotide
ggccaaacgtgatatatcatctcttgccgctactcctggaattcgctcacaacccttcac

SEQ ID NO: 112451 - DNA, 60 bp, Artificial
  Synthetic oligonucleotide
tttgaccctttgtacactctatctacgcataatggagtgtctttgtgcgccctgctgatg

SEQ ID NO: 112452 - DNA, 60 bp, Artificial
  Synthetic oligonucleotide
acatgcatcttgaaagagatgagatgtacggatatgtaaatatagctagaaatttagacg

SEQ ID NO: 112453 - DNA, 60 bp, Artificial
  Synthetic oligonucleotide
aattcacaagcagccaacgattgctttaaaactttaattgcagcaatgttaagtcaacgt

SEQ ID NO: 112454 - DNA, 60 bp, Artificial
  Synthetic oligonucleotide
atagattaagggacagattacgcttattgccagtagaaatcagaagattggatatcttta

SEQ ID NO: 112455 - DNA, 60 bp, Artificial
  Synthetic oligonucleotide
aatattgaaaaaactagaggatattaaaccagaactagcgaaaaaacagactaagctatt

SEQ ID NO: 112456 - DNA, 60 bp, Artificial
  Synthetic oligonucleotide
agaaaattagaggatattaaaccagaactagcgaaaaaacagactaagctatttagaata

SEQ ID NO: 112457 - DNA, 51 bp, Artificial
  Synthetic oligonucleotide
ctaagctatttagaatatttgaaccgaaacaactaccgatttatagagcaa

SEQ ID NO: 112458 - DNA, 60 bp, Artificial
  Synthetic oligonucleotide
gcagagatgagacagcgtgtgcaagctgatagaaatgttgtcaactatccatcaatattg

SEQ ID NO: 112459 - DNA, 60 bp, Artificial
  Synthetic oligonucleotide
aaatgttgtcaattatccatcaatattacatccaatagattatgcatttaatgaatactt

SEQ ID NO: 112460 - DNA, 60 bp, Artificial
  Synthetic oligonucleotide
gattaagggacagattacgcttattgccagtagaaatcagaagattggatatctttaacc

SEQ ID NO: 112461 - DNA, 60 bp, Artificial
  Synthetic oligonucleotide
tttaattgcagcaatgttaagtcaacgtactatgtcattggactttgtaactactaatta

SEQ ID NO: 112462 - DNA, 60 bp, Artificial
  Synthetic oligonucleotide
tgcattatagaaacggggatccacaaacaccgtttcagatagcagaacagcaaattcaaa

SEQ ID NO: 112463 - DNA, 60 bp, Artificial
  Synthetic oligonucleotide
ttttgatgtatctagagttccggacgaccaaatgtatagattaagggacagattacgctt

SEQ ID NO: 112464 - DNA, 56 bp, Artificial
  Synthetic oligonucleotide
tatagattaagggatagattacgcttattgccagtagaaatcagaagattggatat

SEQ ID NO: 112465 - DNA, 60 bp, Artificial
  Synthetic oligonucleotide
aaagagattatatatttttgatgtatctagagttccggacgaccaaatgtatagattaag

SEQ ID NO: 112466 - DNA, 60 bp, Artificial
  Synthetic oligonucleotide
tggttggagcacttccatttattactgattcatcagttatatcactaatagcaaaacttg

SEQ ID NO: 112467 - DNA, 60 bp, Artificial
  Synthetic oligonucleotide
agactaaacctatatcagaaaaaaatgaaggcaattgttgaggattttttaaagagatta

SEQ ID NO: 112468 - DNA, 60 bp, Artificial
  Synthetic oligonucleotide
taaaaagattatacatttttgatgtatctagagttccggacgaccaaatgtatagattaa

SEQ ID NO: 112469 - DNA, 59 bp, Artificial
  Synthetic oligonucleotide
ttttgatgtatctagagttccggacgaccaaatgtatagattaagggatagattacgct

SEQ ID NO: 112470 - DNA, 60 bp, Artificial
  Synthetic oligonucleotide
tttggtagctaactatgattgggtgccaacttcgactacaaaagtatacaaacaggttcc

SEQ ID NO: 112471 - DNA, 60 bp, Artificial
  Synthetic oligonucleotide
tttggtagctaactatgattgggtgccaacttcgactacgaaagtatacaaacaggtccc

SEQ ID NO: 112472 - DNA, 60 bp, Artificial
  Synthetic oligonucleotide
gttgcgtttgacaacatgcgcatcatgaacgaattgtagacgccaaccccactgtggaga

SEQ ID NO: 112473 - DNA, 60 bp, Artificial
  Synthetic oligonucleotide
gcattcgtgtcagctgatacagtagaacctataaatgcggttgcgtttgacaacatgcgc

SEQ ID NO: 112474 - DNA, 60 bp, Artificial
  Synthetic oligonucleotide
tgcatttgacaatatgcgcatcatgaacgaattgtagacgccaaccccactgtggagata

SEQ ID NO: 112475 - DNA, 60 bp, Artificial
  Synthetic oligonucleotide
ggttgcgtttgacaacatgcgcatcatgaacgaattgtagacgccaaccccactgtggag

SEQ ID NO: 112476 - DNA, 60 bp, Artificial
  Synthetic oligonucleotide
ctgtcgcgacaacaatttccaaccatgccagttgattataagagatcaatccaacgtgga

SEQ ID NO: 112477 - DNA, 60 bp, Artificial
  Synthetic oligonucleotide
tttatttggtagctaactatgattgggtgccaacttcgactacaaaagtatacaaacagg

SEQ ID NO: 112478 - DNA, 60 bp, Artificial
  Synthetic oligonucleotide
ctaatgcaactgtcgcgacaacaatttccaaccatgccagttgattataagagatcaatc

SEQ ID NO: 112479 - DNA, 60 bp, Artificial
  Synthetic oligonucleotide
cggggatccacaaacaccgtttcagatagcagaacagcaaattcaaaatttccaagtcgc

SEQ ID NO: 112480 - DNA, 60 bp, Artificial
  Synthetic oligonucleotide
tagttgatttaactagattattagcttacaattacgagacattaatggcatgtattacaa

SEQ ID NO: 112481 - DNA, 60 bp, Artificial
  Synthetic oligonucleotide
gaggtcaattcaacgtggaatattactgttatctaacagacttggtcagttagttgattt

SEQ ID NO: 112482 - DNA, 60 bp, Artificial
  Synthetic oligonucleotide
gagatcaatccaacgtggaatattactgttatctaacagacttggtcagttagttgattt

SEQ ID NO: 112483 - DNA, 60 bp, Artificial
  Synthetic oligonucleotide
gtcgcgacaacaatttccaaccatgccagttgattataagaggtcaattcaacgtggaat

SEQ ID NO: 112484 - DNA, 60 bp, Artificial
  Synthetic oligonucleotide
gaaagagatgagatgtacggatatgtaaatatagctagaaatttagacggattccaacag

SEQ ID NO: 112485 - DNA, 65 bp, Artificial
  Synthetic oligonucleotide
gcatcttgaaagagatgagatgtacggatatgtaaatatagctagaaatttagaaggattccaac

SEQ ID NO: 112486 - DNA, 60 bp, Artificial
  Synthetic oligonucleotide
cagactaaacctatatcagaaaaaaatgaaggctattgttgaggatttcttaaaaagatt

SEQ ID NO: 112487 - DNA, 60 bp, Artificial
  Synthetic oligonucleotide
agcattggttggagcacttccatttattactgattcatcagtcatatcactaatagcaaa

SEQ ID NO: 112488 - DNA, 60 bp, Artificial
  Synthetic oligonucleotide
gcaaaacttgacgctacagtgttcgctcaaatagttaaattacgaaaagttgatacttta

SEQ ID NO: 112489 - DNA, 60 bp, Artificial
  Synthetic oligonucleotide
taatagcaaaacttgacgctacagtgttcgctcaaatagtcaaattacgaaaagttgata

SEQ ID NO: 112490 - DNA, 60 bp, Artificial
  Synthetic oligonucleotide
cttgacgctacagtgttcgctcaaatagtcaaattacgaaaagttgatactttaaaacca

SEQ ID NO: 112491 - DNA, 65 bp, Artificial
  Synthetic oligonucleotide
gcaaaacttgacgctacagtgttcgctcaaatagttaaattacgaaaagttgatactttaaaacc

SEQ ID NO: 112492 - DNA, 60 bp, Artificial
  Synthetic oligonucleotide
atttggtagctaactatgattgggtgccaacttcgactacgaaagtatacaaacaggtcc

SEQ ID NO: 112493 - DNA, 60 bp, Artificial
  Synthetic oligonucleotide
ttaatgcagttgtcgcgacaacaatttccaaccatgccagttgattataagaggtcaatt

SEQ ID NO: 112494 - DNA, 60 bp, Artificial
  Synthetic oligonucleotide
acctacgtacactgacagatgcgcaggagtttgcgataggaaacggacaattatggtgag

SEQ ID NO: 112495 - DNA, 60 bp, Artificial
  Synthetic oligonucleotide
caatcagacctacgtacactgacagatgcgcaggagtttgcgataggaaacggacaatta

SEQ ID NO: 112496 - DNA, 60 bp, Artificial
  Synthetic oligonucleotide
gcaatattacgagggttatacgcgtacgcgcacgataaacttggatgcgtatatcgtgcc

SEQ ID NO: 112497 - DNA, 60 bp, Artificial
  Synthetic oligonucleotide
gcaatgaagaaacagcaatattacgagggttatacgcgtacgcgcacgataaacttggat

SEQ ID NO: 112498 - DNA, 60 bp, Artificial
  Synthetic oligonucleotide
gcggttttgctgatgacaggttgcgatattgtcgaacgcgctatctggagcaatgaagaa

SEQ ID NO: 112499 - DNA, 60 bp, Artificial
  Synthetic oligonucleotide
agcggttttgctgatgacaggttgcgatattgtcgaacgcgctatctggagcaatgaaga

SEQ ID NO: 112500 - DNA, 60 bp, Artificial
  Synthetic oligonucleotide
ttgcgagatcagcgccaaggtaaggaggtactgaatataagagggactcgaggtcaaccg

SEQ ID NO: 112501 - DNA, 60 bp, Artificial
  Synthetic oligonucleotide
gggatgcaagcaaggtttcgaagaaccatagcgacgaatttgcgagatcagcgccaaggt

SEQ ID NO: 112502 - DNA, 60 bp, Artificial
  Synthetic oligonucleotide
gaaacgaacaagggatgcaagcaaggtttcgaagaaccatagcgacgaatttgcgagatc

SEQ ID NO: 112503 - DNA, 60 bp, Artificial
  Synthetic oligonucleotide
tcgggtgaagatgaggacgatatattagtacatgagattgatgatagactatatacggcg

SEQ ID NO: 112504 - DNA, 60 bp, Artificial
  Synthetic oligonucleotide
tacaacgtgaggaaaatgatagcgtttacaaatggattataacggaatgggataaaaacg

SEQ ID NO: 112505 - DNA, 54 bp, Artificial
  Synthetic oligonucleotide
ttcacaaaggatgcatatgtggatgaggcgggatttttagtactaccagagtat

SEQ ID NO: 112506 - DNA, 60 bp, Artificial
  Synthetic oligonucleotide
cgcagattataaaggaggaagtccggttagagtcttttgatttcacaaaggatgcatatg

SEQ ID NO: 112507 - DNA, 60 bp, Artificial
  Synthetic oligonucleotide
tcaagagtgagcataacgtcatcaagtaatgatgatccctgggacaaaaaaaccgcagat

SEQ ID NO: 112508 - DNA, 60 bp, Artificial
  Synthetic oligonucleotide
atatacggcgatgattgatcgtattttaataaacgggtggatcgagaaagaaggattgtc

SEQ ID NO: 112509 - DNA, 60 bp, Artificial
  Synthetic oligonucleotide
cgggtgaagatgaggacgatatattagtacatgagattgatgatagactatatacggcga

SEQ ID NO: 112510 - DNA, 60 bp, Artificial
  Synthetic oligonucleotide
aaggattgtcgcagattataaaggaggaagtccggttagagtcttttgatttcacaaagg

SEQ ID NO: 112511 - DNA, 60 bp, Artificial
  Synthetic oligonucleotide
cggcgatgattgatcgtattttaataaacgggtggatcgagaaagaaggattgtcgcaga

SEQ ID NO: 112512 - DNA, 60 bp, Artificial
  Synthetic oligonucleotide
atggaggaaggttcgaaatcaggtgtcgtcacttggaccgtgactacaccatgccactac

SEQ ID NO: 112513 - DNA, 60 bp, Artificial
  Synthetic oligonucleotide
gagtacgaatcgttaacccaagaagctgagaagaaagtatttatcaattcattactacag

SEQ ID NO: 112514 - DNA, 59 bp, Artificial
  Synthetic oligonucleotide
atgcaaatcctgataatatcatgagtgatagtgaaggttacttgaaattggttgaccca

SEQ ID NO: 112515 - DNA, 60 bp, Artificial
  Synthetic oligonucleotide
ggcatactacgattaaagaatgacgttaacggccacaagtatggaattattctagaaagg

SEQ ID NO: 112516 - DNA, 60 bp, Artificial
  Synthetic oligonucleotide
gccacactactgtcgcccaaggtaatgtggtaaggcgttgggggttggcgctccctatac

SEQ ID NO: 112517 - DNA, 60 bp, Artificial
  Synthetic oligonucleotide
gtattaaaattcagcaattgtccaatttaggaaacattctgtttaagagttgacaaggtc

SEQ ID NO: 112518 - DNA, 60 bp, Artificial
  Synthetic oligonucleotide
gatgcctgagctatcagtgcttaatgatttaacttactatgatactggtgaagtgagaga

SEQ ID NO: 112519 - DNA, 60 bp, Artificial
  Synthetic oligonucleotide
cattgatgtctacaactccgatcactggaagctaatgttaaatcatcgaccaatgatgcc

SEQ ID NO: 112520 - DNA, 60 bp, Artificial
  Synthetic oligonucleotide
ctccgatcactggaagctaatgttaaatcatcgaccaatgatgcctgagctatcagtgct

SEQ ID NO: 112521 - DNA, 60 bp, Artificial
  Synthetic oligonucleotide
atggaattattctagaaaggtgttacaagccaaaaatcaatttctcaaatttcgttacag

SEQ ID NO: 112522 - DNA, 60 bp, Artificial
  Synthetic oligonucleotide
caatgatgcctgagctatcagtgcttaatgatttaacttactatgatactggtgaagtga

SEQ ID NO: 112523 - DNA, 60 bp, Artificial
  Synthetic oligonucleotide
aaagatgcatggcatactacgattaaagaatgacgttaacggccacaagtatggaattat

SEQ ID NO: 112524 - DNA, 60 bp, Artificial
  Synthetic oligonucleotide
gactttcaacatttaaacggtaactcaactctactcattggtaaaacgaagatcggaccg

SEQ ID NO: 112525 - DNA, 60 bp, Artificial
  Synthetic oligonucleotide
aatgactttcaacatttaaacggtaactcaactctactcattggtaaaacgaagatcgga

SEQ ID NO: 112526 - DNA, 60 bp, Artificial
  Synthetic oligonucleotide
gtgtgggctttgattatgtaagtagtggttttaagctaattgctaatgttaatgactttc

SEQ ID NO: 112527 - DNA, 60 bp, Artificial
  Synthetic oligonucleotide
ggaggaaggttcgaaatcaggtgtcgtcacttggaccgtgactacaccatgccactacca

SEQ ID NO: 112528 - DNA, 61 bp, Artificial
  Synthetic oligonucleotide
gcaattgtccaatttaggaaacattctgtttaagagttgacaaggtctcaatgaataatgg

SEQ ID NO: 112529 - DNA, 60 bp, Artificial
  Synthetic oligonucleotide
taatacaacaacggaggcgatacaaacgtatattaaacccttttgtgcggctttcggaat

SEQ ID NO: 112530 - DNA, 60 bp, Artificial
  Synthetic oligonucleotide
cataatacaacaacggaggcgatacaaacgtatattaaacccttttgtgcggctttcgga

SEQ ID NO: 112531 - DNA, 60 bp, Artificial
  Synthetic oligonucleotide
taatacgacaacggaggcgatacaaacgtatattaaacccttttgtgcggctttcggaat

SEQ ID NO: 112532 - DNA, 60 bp, Artificial
  Synthetic oligonucleotide
acggaggcgatacaaacgtatattaaacccttttgtgcggctttcggaataataaattta

SEQ ID NO: 112533 - DNA, 60 bp, Artificial
  Synthetic oligonucleotide
taatacaacgacggaggcgatacaaacgtatattaaacccttttgtgcggctttcgggat

SEQ ID NO: 112534 - DNA, 60 bp, Artificial
  Synthetic oligonucleotide
aatacaacaacggaggcgatacaaacgtatattaaacccttttgtgcggctttcggaata

SEQ ID NO: 112535 - DNA, 58 bp, Artificial
  Synthetic oligonucleotide
ttggacatatctgaattagctgatctaatactgaatgagtggttatgtaatccaatgg

SEQ ID NO: 112536 - DNA, 58 bp, Artificial
  Synthetic oligonucleotide
ttggacatatctgaattagctgatggaatactgaatgagtggttatgtaatccaatgg

SEQ ID NO: 112537 - DNA, 60 bp, Artificial
  Synthetic oligonucleotide
tgggtccctaaatatacttattgatgcgtctcctcactttagagacgagaaagcactatc

SEQ ID NO: 112538 - DNA, 60 bp, Artificial
  Synthetic oligonucleotide
gtgaagctacgagacatatcaacgatagccgtatctaaaagtacccacaattttgaagtg

SEQ ID NO: 112539 - DNA, 60 bp, Artificial
  Synthetic oligonucleotide
tgggtccctaaatatacttattgatgcgtctcctcattttagagacgagaaagcactatc

SEQ ID NO: 112540 - DNA, 60 bp, Artificial
  Synthetic oligonucleotide
attattttggtcaaatagagatgatgaatctcatgattatatgaccattattcaaatgat

SEQ ID NO: 112541 - DNA, 60 bp, Artificial
  Synthetic oligonucleotide
atggtgaagctacgagacatatcaacgatagccgtatctaaaagtacccacaattttgaa

SEQ ID NO: 112542 - DNA, 60 bp, Artificial
  Synthetic oligonucleotide
ttcaaatgatggttcaagtattttcaaacgccatgacaaaatatgcgacatcacatctaa

SEQ ID NO: 112543 - DNA, 60 bp, Artificial
  Synthetic oligonucleotide
ccattattcaaatgatggttcaagtattttcaaacgccatgacaaagtatgcgacatcac

SEQ ID NO: 112544 - DNA, 60 bp, Artificial
  Synthetic oligonucleotide
tgatggttcaagtattttcaaacgccatgacaaagtatgcgacatcacacctaatcaatg

SEQ ID NO: 112545 - DNA, 60 bp, Artificial
  Synthetic oligonucleotide
tgatggttcaagtattttcaaacgccatgacaaaatatgcgacatcacatctaatcaatg

SEQ ID NO: 112546 - DNA, 60 bp, Artificial
  Synthetic oligonucleotide
attattaaccgtgcgcttgatgctgagatctgttaggctattgtctcatatagggctctc

SEQ ID NO: 112547 - DNA, 60 bp, Artificial
  Synthetic oligonucleotide
ccgtgcgcttgatgctgagatctgttaggctattgtctcatatagggctctcacgaactc

SEQ ID NO: 112548 - DNA, 60 bp, Artificial
  Synthetic oligonucleotide
tgctgagatctgttgggctattgtctcatatagggctctcacgaactcttaagagcttgt

SEQ ID NO: 112549 - DNA, 60 bp, Artificial
  Synthetic oligonucleotide
catgcgtacgcgaaatccgtcatcacgcacattattaaccgtgcgcttgatgctgagatc

SEQ ID NO: 112550 - DNA, 60 bp, Artificial
  Synthetic oligonucleotide
cgcgaaatccgtcatcacgcacattattaaccgtgcgcttgatgctgagatctgttgggc

SEQ ID NO: 112551 - DNA, 60 bp, Artificial
  Synthetic oligonucleotide
cggggtgttggcgacgccagaaataccatatacgatggaatccgcgaacgaaattgctcg

SEQ ID NO: 112552 - DNA, 60 bp, Artificial
  Synthetic oligonucleotide
acgatcggggtgttggcgacgccagaaataccatatacgatggaatccgcgaacgaaatt

SEQ ID NO: 112553 - DNA, 60 bp, Artificial
  Synthetic oligonucleotide
gtcaatttacagtgctcagcaaggatgggacaaaacaatctcagcacagccggacatgat

SEQ ID NO: 112554 - DNA, 60 bp, Artificial
  Synthetic oligonucleotide
tcagcaaggatgggacaaaacaatctcagcacagccggacatgatggtgtgtggtggcgc

SEQ ID NO: 112555 - DNA, 60 bp, Artificial
  Synthetic oligonucleotide
agtgtctaggattgtggtgcatacgagatgggcatctaacgttgatttcgaccgagactc

SEQ ID NO: 112556 - DNA, 60 bp, Artificial
  Synthetic oligonucleotide
gctaaagtgaccgtggtcatggcttcattcaagggattctccgccaacactgtaccagtc

SEQ ID NO: 112557 - DNA, 60 bp, Artificial
  Synthetic oligonucleotide
gcaccgttaaagtgtgtccattaaatactcagacattaggaattgaatgtcaaacgacga

SEQ ID NO: 112558 - DNA, 59 bp, Artificial
  Synthetic oligonucleotide
ttctatactgtagttgattacattaatcagatagtgcaagtaatgtccaaaagatcgag

SEQ ID NO: 112559 - DNA, 60 bp, Artificial
  Synthetic oligonucleotide
gcaccgttaaagtgtgtccattaaatactcagacattaggaattggatgtcaaacgacga

SEQ ID NO: 112560 - DNA, 60 bp, Artificial
  Synthetic oligonucleotide
ttctatactgtagttgattacattaatcagatagtgcaagtaatgttctatagattgaga

SEQ ID NO: 112561 - DNA, 60 bp, Artificial
  Synthetic oligonucleotide
gggttcaacgcgcccgttaaaagtgtgtccattaaatactcagacattaggaattggatg

SEQ ID NO: 112562 - DNA, 60 bp, Artificial
  Synthetic oligonucleotide
tcgtcatctttctattatagagtgtagggcctccctaaaagagaattgtatgatgtgacc

SEQ ID NO: 112563 - DNA, 60 bp, Artificial
  Synthetic oligonucleotide
caaacaaaattttgagagagcaatgatcgcggcaactgatgcggaggagccggcgaaagc

SEQ ID NO: 112564 - DNA, 60 bp, Artificial
  Synthetic oligonucleotide
taaacaaaattttgagagagcaatgatcgcggcaactgatgcggaggagccggcgaaggc

SEQ ID NO: 112565 - DNA, 60 bp, Artificial
  Synthetic oligonucleotide
ataactagaccagttgacgttatagatatgacgaaggaatttaatcagaaaaatatcaaa

SEQ ID NO: 112566 - DNA, 60 bp, Artificial
  Synthetic oligonucleotide
ggctattaaagctatacaatggggaagtataatctaatcttgtcagaatatttatcattc

SEQ ID NO: 112567 - DNA, 51 bp, Artificial
  Synthetic oligonucleotide
ctgtttgagctacaacctgaacctgcttgactagattgcgcggcgatttat

SEQ ID NO: 112568 - DNA, 60 bp, Artificial
  Synthetic oligonucleotide
tctcatgtttgtgaacgtatgaatactaatgaagtcgttggaatagcagacaaggcaaca

SEQ ID NO: 112569 - DNA, 60 bp, Artificial
  Synthetic oligonucleotide
tacgttctcatgtttgtgaacgtatgaatactaatgaagtggtcggcattgcaaacaagg

SEQ ID NO: 112570 - DNA, 60 bp, Artificial
  Synthetic oligonucleotide
ttttatattggctgcggaaatctaagaactctactaaaatttcgacataaagatgagacg

SEQ ID NO: 112571 - DNA, 60 bp, Artificial
  Synthetic oligonucleotide
ggctgcggaaatctaagaactctactaaaatttcgacataaagatgagacgcggttcaac

SEQ ID NO: 112572 - DNA, 60 bp, Artificial
  Synthetic oligonucleotide
agatgagacgcggttcaacagagttacatggatttgtattgacccgattgtaccagaatc

SEQ ID NO: 112573 - DNA, 60 bp, Artificial
  Synthetic oligonucleotide
gcggttcaacagagttacatggatttgtattgacccgattgtaccagaatcgccagcacc

SEQ ID NO: 112574 - DNA, 60 bp, Artificial
  Synthetic oligonucleotide
taccagaatcgccagcaccaaatataatttgctatccaaatatgataacacatggaggtc

SEQ ID NO: 112575 - DNA, 60 bp, Artificial
  Synthetic oligonucleotide
gccagcaccaaatataatttgctatccaaatatgataacacatggaggtcaattacgtgc

SEQ ID NO: 112576 - DNA, 60 bp, Artificial
  Synthetic oligonucleotide
ttaatttgggatgtaagaagtgacagaggttcattatcaggagacgaatgggattcgatt

SEQ ID NO: 112577 - DNA, 60 bp, Artificial
  Synthetic oligonucleotide
gggatgtaagaagtgacagaggttcattatcaggagacgaatgggattcgattactcgga

SEQ ID NO: 112578 - DNA, 60 bp, Artificial
  Synthetic oligonucleotide
ggattcgattactcggaaggaagatgagttgggggtgtatatagcattagcgaatcggga

SEQ ID NO: 112579 - DNA, 60 bp, Artificial
  Synthetic oligonucleotide
cgattacaatgtttgaattaagaaacattttagttttagacggtttttcgactgttgaca

SEQ ID NO: 112580 - DNA, 60 bp, Artificial
  Synthetic oligonucleotide
ttatggtggattaaaatgattaaagaatggtcaatactaccagaagctcagaaacttttc

SEQ ID NO: 112581 - DNA, 60 bp, Artificial
  Synthetic oligonucleotide
atgattaaagaatggtcaatactaccagaagctcagaaacttttcgccattgctgaagca

SEQ ID NO: 112582 - DNA, 60 bp, Artificial
  Synthetic oligonucleotide
gagactaaattcagatcaggtacatcgtagaccagacattttaaaacgattgggactaga

SEQ ID NO: 112583 - DNA, 50 bp, Artificial
  Synthetic oligonucleotide
attttaaaacgattgggactagatgtatcaggacatttatttgtcagttt

SEQ ID NO: 112584 - DNA, 60 bp, Artificial
  Synthetic oligonucleotide
ctaggagatgaaggatttaaagtctcatatgatccatcatgggcagcgaaattcggaatc

SEQ ID NO: 112585 - DNA, 60 bp, Artificial
  Synthetic oligonucleotide
attcgacaatgttgagactaaattcagatcaggtacatcgtagaccagacattttaaaac

SEQ ID NO: 112586 - DNA, 60 bp, Artificial
  Synthetic oligonucleotide
ttgcggttgaatttcatggtagtgaagcggaaacactaatggtgacagacccaaaacgac

SEQ ID NO: 112587 - DNA, 51 bp, Artificial
  Synthetic oligonucleotide
aattgggatagacagagtgtatttaagaaagaaatttggggatatattaag

SEQ ID NO: 112588 - DNA, 60 bp, Artificial
  Synthetic oligonucleotide
aagaaaacgcaaatgaaccatggcatagacctgaggatttacgagcagctttatcattaa

SEQ ID NO: 112589 - DNA, 60 bp, Artificial
  Synthetic oligonucleotide
gaaccatggcatagacctgaggatttacgagcagctttatcattaattagtactatggac

SEQ ID NO: 112590 - DNA, 60 bp, Artificial
  Synthetic oligonucleotide
gttaaaaatgtcgactacacatgcagtgatctatctcgcaaaaggcttcggaccgcaatt

SEQ ID NO: 112591 - DNA, 60 bp, Artificial
  Synthetic oligonucleotide
gaaacttttcgccattgctgaagcacatgcagaaatagttgaatggagagaagaaaacgc

SEQ ID NO: 112592 - DNA, 60 bp, Artificial
  Synthetic oligonucleotide
cgccattgctgaagcacatgcagaaatagttgaatggagagaagaaaacgcaaatgaacc

SEQ ID NO: 112593 - DNA, 60 bp, Artificial
  Synthetic oligonucleotide
ctacagtctggatcggaccagaattaagaagtggatacgatgattttacttatccaacac

SEQ ID NO: 112594 - DNA, 60 bp, Artificial
  Synthetic oligonucleotide
atggtgatagatgggaatgggtatatattattcttaatttggaagggtgtcctaggagat

SEQ ID NO: 112595 - DNA, 60 bp, Artificial
  Synthetic oligonucleotide
tattcaaacagattttaatgcaccttattcggacgacaatcatacagatgagaaactcgt

SEQ ID NO: 112596 - DNA, 60 bp, Artificial
  Synthetic oligonucleotide
gtatttggattacctgaattaccgccagcgttaggtattcaaacagattttaatgcacct

SEQ ID NO: 112597 - DNA, 60 bp, Artificial
  Synthetic oligonucleotide
ccaaaacgacataaagtatttggattacctgaattaccgccagcgttaggtattcaaaca

SEQ ID NO: 112598 - DNA, 60 bp, Artificial
  Synthetic oligonucleotide
gcggttgaatttcatggtagtgaagcggaaacactaatggtgacagacccaaaacgacat

SEQ ID NO: 112599 - DNA, 60 bp, Artificial
  Synthetic oligonucleotide
cctaggagatgaaggatttaaagtctcatatgatccatcatgggcagcgaaattcggaat

SEQ ID NO: 112600 - DNA, 60 bp, Artificial
  Synthetic oligonucleotide
gatagatgggaatgggtatatattattcttaatttggaagggtgtcctaggagatgaagg

SEQ ID NO: 112601 - DNA, 60 bp, Artificial
  Synthetic oligonucleotide
tacgcaacaggtccgttacaaaaatggtcaatacgtcaattgagaggattaggatttata

SEQ ID NO: 112602 - DNA, 60 bp, Artificial
  Synthetic oligonucleotide
cgactacacatgcagtgatctatctcgcaaaaggcttcggaccgcaattaaaggatgtct

SEQ ID NO: 112603 - DNA, 60 bp, Artificial
  Synthetic oligonucleotide
cgctggatggatatgctgcgatagctgaacaatgtgttcacataaggcactgtagaagac

SEQ ID NO: 112604 - DNA, 60 bp, Artificial
  Synthetic oligonucleotide
cactcgctggatggatatgctgcgatagctgaacaatgtgttcacataaggcactgtaga

SEQ ID NO: 112605 - DNA, 60 bp, Artificial
  Synthetic oligonucleotide
actatggacatgcctttattgcgtaaatctgattacactcgctggatggatatgctgcga

SEQ ID NO: 112606 - DNA, 60 bp, Artificial
  Synthetic oligonucleotide
ttacttatccaacacaaactttaatgattaaatactgtaagaaagaaaagatggtgatag

SEQ ID NO: 112607 - DNA, 60 bp, Artificial
  Synthetic oligonucleotide
tgacagatcacacataccgaaagcaagaacactagaaattaagcatgttgactgttgttc

SEQ ID NO: 112608 - DNA, 60 bp, Artificial
  Synthetic oligonucleotide
actgttgacagatcacacataccgaaagcaagaacactagaaattaagcatgttgactgt

SEQ ID NO: 112609 - DNA, 60 bp, Artificial
  Synthetic oligonucleotide
agaaactcgtgtcattgttagattattttgtatatagtgtagatattatgttttatattg

SEQ ID NO: 112610 - DNA, 60 bp, Artificial
  Synthetic oligonucleotide
cagattttaatgcaccttattcggacgacaatcatacagatgagaaactcgtgtcattgt

SEQ ID NO: 112611 - DNA, 60 bp, Artificial
  Synthetic oligonucleotide
cgcggtagaaagcttaagaaagcgattttagagtatttgcatataacaaggtcaaacggg

SEQ ID NO: 112612 - DNA, 60 bp, Artificial
  Synthetic oligonucleotide
cttatctacagtctggatcggaccagaattaagaagtggatacgatgattttacttatcc

SEQ ID NO: 112613 - DNA, 60 bp, Artificial
  Synthetic oligonucleotide
cacgcggtagaaagcttaagaaagcgattttagagtatttgcatataacaaggtcaaacg

SEQ ID NO: 112614 - DNA, 60 bp, Artificial
  Synthetic oligonucleotide
ttatcattaattagtactatggacatgcctttattgcgtaaatctgattacactcgctgg

SEQ ID NO: 112615 - DNA, 60 bp, Artificial
  Synthetic oligonucleotide
catcgcccaagcgttggtccctcgtcgccgatcatctcgcagaactctatcccactcgta

SEQ ID NO: 112616 - DNA, 60 bp, Artificial
  Synthetic oligonucleotide
ctcaggccttcgatccatcgcccaagcgttggtccctcgtcgccgatcatctcgcagaac

SEQ ID NO: 112617 - DNA, 60 bp, Artificial
  Synthetic oligonucleotide
tgtctcggcaccggtctaatcctgtggcgcatacactcaggccttcgatccatcgcccaa

SEQ ID NO: 112618 - DNA, 60 bp, Artificial
  Synthetic oligonucleotide
tcactgatttggaactgtctcggcaccggtctaatcctgtggcgcatacactcaggcctt

SEQ ID NO: 112619 - DNA, 51 bp, Artificial
  Synthetic oligonucleotide
cagtgattctagtgactctagctatatcactgatttggaactgtctcggca

SEQ ID NO: 112620 - DNA, 60 bp, Artificial
  Synthetic oligonucleotide
gccacgtgtacgtcgcactagcctcagtgattctagtgactctagctatatcactgattt

SEQ ID NO: 112621 - DNA, 60 bp, Artificial
  Synthetic oligonucleotide
cctcagccgaaggttggacgtgctcggagattcctggtcaaccccaaaacactcattgcg

SEQ ID NO: 112622 - DNA, 60 bp, Artificial
  Synthetic oligonucleotide
cgttttccaagcctcagccgaaggttggacgtgctcggagattcctggtcaaccccaaaa

SEQ ID NO: 112623 - DNA, 60 bp, Artificial
  Synthetic oligonucleotide
tgtccgaagatcagatggcgaagatccccgccgccgacacccccgtggaccttctgaacg

SEQ ID NO: 112624 - DNA, 60 bp, Artificial
  Synthetic oligonucleotide
gctgtaattccacctccttcatccgcaccatgctccgtctgtccgaagatcagatggcga

SEQ ID NO: 112625 - DNA, 60 bp, Artificial
  Synthetic oligonucleotide
gggtgggatatactgatgcttaacgcgctccccaccccgctagtcatatcgctgatgcgt

SEQ ID NO: 112626 - DNA, 60 bp, Artificial
  Synthetic oligonucleotide
cttctgaacgctgttgggtgggatatactgatgcttaacgcgctccccaccccgctagtc

SEQ ID NO: 112627 - DNA, 60 bp, Artificial
  Synthetic oligonucleotide
gattgggacaagttttgggacctgatctggcgttgtgcccagactcgtggtgcgcgaatc

SEQ ID NO: 112628 - DNA, 60 bp, Artificial
  Synthetic oligonucleotide
gcgccctgtccacctggaggctgaatgacactggtcgtgattgggacaagttttgggacc

SEQ ID NO: 112629 - DNA, 60 bp, Artificial
  Synthetic oligonucleotide
cgcagaactctatcccactcgtaccaatcagaagtagaccgagtgtaactgatggagtcg

SEQ ID NO: 112630 - DNA, 60 bp, Artificial
  Synthetic oligonucleotide
ctcgcagaactctatcccactcgtaccaatcagaagtagaccgagtgtaactgatggagt

SEQ ID NO: 112631 - DNA, 60 bp, Artificial
  Synthetic oligonucleotide
cctctgggtctcggtctcaacccatgccagttttggactcatccattcactgtcctgtgc

SEQ ID NO: 112632 - DNA, 60 bp, Artificial
  Synthetic oligonucleotide
cccgctagtcatatcgctgatgcgtcctccccccaatgcgtccgtcatcgtgttagaatg

SEQ ID NO: 112633 - DNA, 60 bp, Artificial
  Synthetic oligonucleotide
acggtactgcaggtcgacagatcttgctgtatcaaaactagcctcaccgccacatccgaa

SEQ ID NO: 112634 - DNA, 60 bp, Artificial
  Synthetic oligonucleotide
gacagatcttgctgtatcaaaactagcctcaccgccacatccgaagccacttcctgggcc

SEQ ID NO: 112635 - DNA, 60 bp, Artificial
  Synthetic oligonucleotide
gttgttgctgtgtctgttgtgcaggcggattctatcttgttcaatctggacgttttccaa

SEQ ID NO: 112636 - DNA, 60 bp, Artificial
  Synthetic oligonucleotide
gttgtgcaggcggattctatcttgttcaatctggacgttttccaagcctcagccgaaggt

SEQ ID NO: 112637 - DNA, 60 bp, Artificial
  Synthetic oligonucleotide
gttttatgtcaatcatcctggggaacaccatctcaaacaccgttcagtacacggtactgc

SEQ ID NO: 112638 - DNA, 60 bp, Artificial
  Synthetic oligonucleotide
catcctggggaacaccatctcaaacaccgttcagtacacggtactgcaggtcgacagatc

SEQ ID NO: 112639 - DNA, 60 bp, Artificial
  Synthetic oligonucleotide
gttcagcaacatgtcaccatatgcatattcggctgacagtgacccgggcgccctgtccac

SEQ ID NO: 112640 - DNA, 60 bp, Artificial
  Synthetic oligonucleotide
acagtgacccgggcgccctgtccacctggaggctgaatgacactggtcgtgattgggaca

SEQ ID NO: 112641 - DNA, 60 bp, Artificial
  Synthetic oligonucleotide
gcgtctggccagcctcaactcccaactggcattctcgcaaagtgatccatgtgttcagca

SEQ ID NO: 112642 - DNA, 60 bp, Artificial
  Synthetic oligonucleotide
caaagtgatccatgtgttcagcaacatgtcaccatatgcatattcggctgacagtgaccc

SEQ ID NO: 112643 - DNA, 60 bp, Artificial
  Synthetic oligonucleotide
gtgaccccgttccgttagtttatgacgggcgcttgacgccgattacaggcccacaccatc

SEQ ID NO: 112644 - DNA, 60 bp, Artificial
  Synthetic oligonucleotide
ttctccccttttagcgtctggccagcctcaactcccaactggcattctcgcaaagtgatc

SEQ ID NO: 112645 - DNA, 60 bp, Artificial
  Synthetic oligonucleotide
ccttcatctgacttcatccccgaagtctccccaccacggacaatttaacggtgaccccgt

SEQ ID NO: 112646 - DNA, 60 bp, Artificial
  Synthetic oligonucleotide
catctgacttcatccccgaagtctccccaccacggacaatttaacggtgaccccgttccg

SEQ ID NO: 112647 - DNA, 60 bp, Artificial
  Synthetic oligonucleotide
cttcaacatgcacatctcagcggatctggagactacccgacctgccaaccccttcatctg

SEQ ID NO: 112648 - DNA, 60 bp, Artificial
  Synthetic oligonucleotide
ctcagcggatctggagactacccgacctgccaaccccttcatctgacttcatccccgaag

SEQ ID NO: 112649 - DNA, 60 bp, Artificial
  Synthetic oligonucleotide
tgcgcgaatctgctgtaattccacctccttcatccgcaccatgctccgtctgtccgaaga

SEQ ID NO: 112650 - DNA, 60 bp, Artificial
  Synthetic oligonucleotide
tgggacctgatctggcgttgtgcccagactcgtggtgcgcgaatctgctgtaattccacc

SEQ ID NO: 112651 - DNA, 60 bp, Artificial
  Synthetic oligonucleotide
ctcaacccatgccagttttggactcatccattcactgtcctgtgctatctgcgctggcgg

SEQ ID NO: 112652 - DNA, 60 bp, Artificial
  Synthetic oligonucleotide
tgtcctgtgctatctgcgctggcggttgttggggggcgacgactaggatggcatccgtgg

SEQ ID NO: 112653 - DNA, 60 bp, Artificial
  Synthetic oligonucleotide
gcatccgtggcagttgaggcctgggcctcggggatttagtcccctgtcgccggtgtgact

SEQ ID NO: 112654 - DNA, 60 bp, Artificial
  Synthetic oligonucleotide
cagttgaggcctgggcctcggggatttagtcccctgtcgccggtgtgactgatattcatc

SEQ ID NO: 112655 - DNA, 60 bp, Artificial
  Synthetic oligonucleotide
ccaccaggtatgaattggactgatttaattactaactattcaccatctagagaggataat

SEQ ID NO: 112656 - DNA, 60 bp, Artificial
  Synthetic oligonucleotide
ggtatgaattggactgatttgatcactaactattcaccatctagagaggataatttgcaa

SEQ ID NO: 112657 - DNA, 60 bp, Artificial
  Synthetic oligonucleotide
ccaccaggtatgaattggactgatttgatcactaactattcaccatctagagaggataac

SEQ ID NO: 112658 - DNA, 60 bp, Artificial
  Synthetic oligonucleotide
cggtggctcagatgtgttagatattacagcggatccaactactacaccacaaactgaacg

SEQ ID NO: 112659 - DNA, 60 bp, Artificial
  Synthetic oligonucleotide
cggtggctcagatgtgttagatattacagcggatccaactactgcaccacaaactgaacg

SEQ ID NO: 112660 - DNA, 60 bp, Artificial
  Synthetic oligonucleotide
gtcggtggctcagatgtgttagatattacagcggatccaactactacaccacaaactgaa

SEQ ID NO: 112661 - DNA, 60 bp, Artificial
  Synthetic oligonucleotide
gtcggtggctcagatgtgttagatattacagcggatccaactactgcaccacaaactgaa

SEQ ID NO: 112662 - DNA, 60 bp, Artificial
  Synthetic oligonucleotide
ggggctccgatgtgttagatattacagcggatccaactactacaccacaaactgaacgta

SEQ ID NO: 112663 - DNA, 60 bp, Artificial
  Synthetic oligonucleotide
aatcaaagagggtcaaattgtgaatccaacatttatatcaagatatcgccaaattgcata

SEQ ID NO: 112664 - DNA, 60 bp, Artificial
  Synthetic oligonucleotide
atgagatcccagacctatcgcacaattgccctttatggtgttttagagaaatctgtcgtc

SEQ ID NO: 112665 - DNA, 60 bp, Artificial
  Synthetic oligonucleotide
tgagataccagatctatcgcataactgccctttatggtgttttagagaaatctgccgtca

SEQ ID NO: 112666 - DNA, 60 bp, Artificial
  Synthetic oligonucleotide
gcataattgccctttatggtgttttagagaaatctgtcgtcatatatctggtccattacc

SEQ ID NO: 112667 - DNA, 60 bp, Artificial
  Synthetic oligonucleotide
caatttcttgaggatggatgattttgcgaagcattttaacaggtatgcttcgatggcgat

SEQ ID NO: 112668 - DNA, 60 bp, Artificial
  Synthetic oligonucleotide
ggaaagatacactatctcagctggccttacccaaggaagggccgacaggttcagtttatt

SEQ ID NO: 112669 - DNA, 60 bp, Artificial
  Synthetic oligonucleotide
atggaaagatacactatctcagctggccttacccaaggaagggccgacaggttcagttta

SEQ ID NO: 112670 - DNA, 60 bp, Artificial
  Synthetic oligonucleotide
tgcatatcaatgggttcaacgcgcccgttaaaagtgtgtccattaaatactcagacatta

SEQ ID NO: 112671 - DNA, 60 bp, Artificial
  Synthetic oligonucleotide
gttcagtttattttaatggatattcagacgttctagaattttccatcgaaccaaagttat

SEQ ID NO: 112672 - DNA, 60 bp, Artificial
  Synthetic oligonucleotide
ccatgtgagaggttgagttaccgttgtctgtcttcggaagcggcggaactcttcaccgca

SEQ ID NO: 112673 - DNA, 60 bp, Artificial
  Synthetic oligonucleotide
cattttatgctaatttctatctttcattgactaacacaaacggagttgactctccatacc

SEQ ID NO: 112674 - DNA, 60 bp, Artificial
  Synthetic oligonucleotide
aaggaatgtgaaacctacatcttgatgaaagatgataacggtattcgtgaccctgacata

SEQ ID NO: 112675 - DNA, 60 bp, Artificial
  Synthetic oligonucleotide
gcatagagttatcggtttgtcatacagaaatacattatcaactagtccaacttccaatgt

SEQ ID NO: 112676 - DNA, 60 bp, Artificial
  Synthetic oligonucleotide
cgattaactggttagatctgctgaactcttattagccttcgaactcttgaatgccttgga

SEQ ID NO: 112677 - DNA, 60 bp, Artificial
  Synthetic oligonucleotide
cgtgaagaagggaaagttgaatcgattagctttatcgtattgtggttacactgggtcgca

SEQ ID NO: 112678 - DNA, 60 bp, Artificial
  Synthetic oligonucleotide
atcgagcagaatggcaataaagtacacagtttatggcttgatcacttcaaacgtaaaaat

SEQ ID NO: 112679 - DNA, 60 bp, Artificial
  Synthetic oligonucleotide
gtggttacactgggtcgcattcagcaacagctatggttaagcagttcaatggtacgaagg

SEQ ID NO: 112680 - DNA, 60 bp, Artificial
  Synthetic oligonucleotide
ggtggacggctcaccattgacacctgaaattgcaaaactatatgtgagttgtatgcagga

SEQ ID NO: 112681 - DNA, 60 bp, Artificial
  Synthetic oligonucleotide
atggtacgaaggatttagatcctaactgtgacccaatgttcgtcgatatagttaaagaca

SEQ ID NO: 112682 - DNA, 53 bp, Artificial
  Synthetic oligonucleotide
aaactcgcaataccacgaccaatatttcacattcaactgtggcattagatgat

SEQ ID NO: 112683 - DNA, 60 bp, Artificial
  Synthetic oligonucleotide
gtgaaagtgctggtgttaagtcgggcgaattgacaacacaaactcgcaataccacgacca

SEQ ID NO: 112684 - DNA, 60 bp, Artificial
  Synthetic oligonucleotide
tgctccagcttacttaactggcaacgacatacttggtgttttatcggattacccatatca

SEQ ID NO: 112685 - DNA, 60 bp, Artificial
  Synthetic oligonucleotide
gcagatggagtgcgctcaatgaaagttcattattctatgggacacgatgctttggtcgat

SEQ ID NO: 112686 - DNA, 60 bp, Artificial
  Synthetic oligonucleotide
agttgatgatgtgctggttgaggaatcgttgaaagatttgcgtaatgagggtctatacaa

SEQ ID NO: 112687 - DNA, 60 bp, Artificial
  Synthetic oligonucleotide
ggctgatataacacgtaggatgattgatgctgatataacgcctgaaaacgtgaagaaggg

SEQ ID NO: 112688 - DNA, 60 bp, Artificial
  Synthetic oligonucleotide
ttcagattgaagctatgaagcatgttatatatatggctagacgtggtgtggctgtactcg

SEQ ID NO: 112689 - DNA, 60 bp, Artificial
  Synthetic oligonucleotide
aacatccagcttgtcaaacagtaatagacgtggttttcagattgaagctatgaagcatgt

SEQ ID NO: 112690 - DNA, 60 bp, Artificial
  Synthetic oligonucleotide
gctgtactcgccaacacacatccaacaaaaattggaaatactgtatactatgactactaa

SEQ ID NO: 112691 - DNA, 60 bp, Artificial
  Synthetic oligonucleotide
tggtactcctgaaatatgtttgagagcccctgagatacgatcatttggtagatatttacc

SEQ ID NO: 112692 - DNA, 60 bp, Artificial
  Synthetic oligonucleotide
actagtccaacttccaatgtagataggatccttagaaataatccgggatctgctccagct

SEQ ID NO: 112693 - DNA, 60 bp, Artificial
  Synthetic oligonucleotide
catattattcaagggtggtacatcatctgccagtagtacaaacgaacatgctactgttaa

SEQ ID NO: 112694 - DNA, 60 bp, Artificial
  Synthetic oligonucleotide
ctttaagggttacttggctctcgatgtatttctggacagtgtgacctcagagaaaaatag

SEQ ID NO: 112695 - DNA, 60 bp, Artificial
  Synthetic oligonucleotide
ggcaacaacgttgcagagcatattaagatttgggtctttaagggttacttggctctcgat

SEQ ID NO: 112696 - DNA, 60 bp, Artificial
  Synthetic oligonucleotide
gtgctggttgaggaatcgttgaaagatttgcgtaatgagggtctatacaagatggctgat

SEQ ID NO: 112697 - DNA, 60 bp, Artificial
  Synthetic oligonucleotide
caggatcatgctgacaggaatcatctggagatttcagcgaaacgtacaatcgtaggcaac

SEQ ID NO: 112698 - DNA, 60 bp, Artificial
  Synthetic oligonucleotide
agggctggcaattatacatttattcctactccgaaaattatatgtgcatatggtactcct

SEQ ID NO: 112699 - DNA, 60 bp, Artificial
  Synthetic oligonucleotide
ttgtatgatatggctatgacactaatgattagatattgcagcgtgcaagcgtgtatgaca

SEQ ID NO: 112700 - DNA, 54 bp, Artificial
  Synthetic oligonucleotide
cctcaattggctgtgacttccagtgatgacgtctcaaaggtttgtgttgcaaag

SEQ ID NO: 112701 - DNA, 53 bp, Artificial
  Synthetic oligonucleotide
gttaagaagtttaatctaagaaaggagatgataaaaagaatacaggatgaagc

SEQ ID NO: 112702 - DNA, 60 bp, Artificial
  Synthetic oligonucleotide
tgtattgcagcgttatctggatgagggaaatgtgattgcacctgctgatattctcaagtt

SEQ ID NO: 112703 - DNA, 60 bp, Artificial
  Synthetic oligonucleotide
gcatgcgtacttagcagataaggatttgaataccgcaaatctattcgataatacttcccg

SEQ ID NO: 112704 - DNA, 60 bp, Artificial
  Synthetic oligonucleotide
gaatggcttaaatacataatgatcgatccagtttatagatcatataaaaatagaggtgct

SEQ ID NO: 112705 - DNA, 60 bp, Artificial
  Synthetic oligonucleotide
tagaggtgcttttggtaatctgaatcaacatgtgtttgcaaggactaagagtgagggatt

SEQ ID NO: 112706 - DNA, 60 bp, Artificial
  Synthetic oligonucleotide
gaagatttcttcgggttcaatggaccaaatgtggttgtgtcaaagtctttgttagctgcc

SEQ ID NO: 112707 - DNA, 60 bp, Artificial
  Synthetic oligonucleotide
ggaaggttgcagcttttgaattggatgatgagtctaaagaagtgatgactgaatggctta

SEQ ID NO: 112708 - DNA, 60 bp, Artificial
  Synthetic oligonucleotide
gttaaagacaacatgaaagtttacatgcaggagggcttacagaagtaccctcatgggtca

SEQ ID NO: 112709 - DNA, 60 bp, Artificial
  Synthetic oligonucleotide
tgaagcatgttatatatatggctagacgtggtgtggctgtactcgccaacacacatccaa

SEQ ID NO: 112710 - DNA, 60 bp, Artificial
  Synthetic oligonucleotide
ggtaatctgaatcaacatgtgtttgcaaggactaagagtgagggattgtcatggtctctt

SEQ ID NO: 112711 - DNA, 60 bp, Artificial
  Synthetic oligonucleotide
gagggattgtcatggtctcttattgacattggtacgacaaattttgaattaaagccgact

SEQ ID NO: 112712 - DNA, 60 bp, Artificial
  Synthetic oligonucleotide
cggtaggttcagatacaggtcggagttatatcgggaacgtgatgtaaattcgtcgacagt

SEQ ID NO: 112713 - DNA, 58 bp, Artificial
  Synthetic oligonucleotide
gatgtaaattcgtcgacagtattcaagacagcaacagctggacagtatagagtggtga

SEQ ID NO: 112714 - DNA, 60 bp, Artificial
  Synthetic oligonucleotide
agtcagtgacttagacgtagttgtcaacgctggttcaagattggtgagagggactagagc

SEQ ID NO: 112715 - DNA, 60 bp, Artificial
  Synthetic oligonucleotide
tttatgcagcttcattgatgacagtgcttccggctgttaggttattaagttcaagggcta

SEQ ID NO: 112716 - DNA, 60 bp, Artificial
  Synthetic oligonucleotide
ctattcgataatacttcccgtacttacgatatctctgatcgtacgtatcctaagtttgtt

SEQ ID NO: 112717 - DNA, 60 bp, Artificial
  Synthetic oligonucleotide
gggacacgatgctttggtcgatttagatttgaatgatgcttcatttgcggatttgttaga

SEQ ID NO: 112718 - DNA, 60 bp, Artificial
  Synthetic oligonucleotide
aactggcaacgacatacttggtgttttatcggattacccatatcaaaactggcgtacagt

SEQ ID NO: 112719 - DNA, 60 bp, Artificial
  Synthetic oligonucleotide
cggctacgtcgcctaatcgatttcgactatagttggattgattatgcggttgtattgcag

SEQ ID NO: 112720 - DNA, 60 bp, Artificial
  Synthetic oligonucleotide
cggtaaacgtgttaaattaggtacattgttaaactggactaaagctgaacgtttggacac

SEQ ID NO: 112721 - DNA, 60 bp, Artificial
  Synthetic oligonucleotide
cgcaatttagtgatttgccatttcacactaccttatacaaggaagttaacggtaaacgtg

SEQ ID NO: 112722 - DNA, 60 bp, Artificial
  Synthetic oligonucleotide
gaaactagctggctcatacgttaagaaattcaacttagttgatgatgtgctggttgagga

SEQ ID NO: 112723 - DNA, 60 bp, Artificial
  Synthetic oligonucleotide
gacctacgagaaccgcattggaatagtgtacgagttcagctgctccgtgactaccgcatc

SEQ ID NO: 112724 - DNA, 60 bp, Artificial
  Synthetic oligonucleotide
gtcatggcacaactgttgttcaggaaaacgacccaagactttagagattgctttggactc

SEQ ID NO: 112725 - DNA, 60 bp, Artificial
  Synthetic oligonucleotide
ttcagcggtcatacaggtctgttaatgcgatgatttatcatcagggtatgacgaatttca

SEQ ID NO: 112726 - DNA, 60 bp, Artificial
  Synthetic oligonucleotide
ggagagagggtgtcgattggaaacggtcgtgcggtttgggatgttacgcaaacagtagag

SEQ ID NO: 112727 - DNA, 60 bp, Artificial
  Synthetic oligonucleotide
ggtgtctgatattggtggacgtaatggcgagctttcggggtgggtcgtacaagatgcggc

SEQ ID NO: 112728 - DNA, 60 bp, Artificial
  Synthetic oligonucleotide
gactgaggggccagctgaggatgttttcattctacccgcaatgtatgagtctgtgcgaca

SEQ ID NO: 112729 - DNA, 56 bp, Artificial
  Synthetic oligonucleotide
aacagtagagcggaacgttgctagctatttacaacgcattggacggcagaacgctc

SEQ ID NO: 112730 - DNA, 60 bp, Artificial
  Synthetic oligonucleotide
cgtgcattttggtgcgtcgtgcgatcctatggagcattatttggttgtcgttactcggcc

SEQ ID NO: 112731 - DNA, 60 bp, Artificial
  Synthetic oligonucleotide
ctccgtgactaccgcatcttgtattttggagatttattgcctgatgatggagatattacg

SEQ ID NO: 112732 - DNA, 60 bp, Artificial
  Synthetic oligonucleotide
gtttgagacgatgcttcaagcgatgctaagagattcgtttcccgctgggtgtcatgcgca

SEQ ID NO: 112733 - DNA, 60 bp, Artificial
  Synthetic oligonucleotide
tttgagtggatgcggcgagtgctgttaactaaccgacatgatgaagtgctggtgtctgat

SEQ ID NO: 112734 - DNA, 60 bp, Artificial
  Synthetic oligonucleotide
ggtatggagagactggtgctgatttacagcgaattttaagatcgtcagggttaacaagat

SEQ ID NO: 112735 - DNA, 60 bp, Artificial
  Synthetic oligonucleotide
atgagtctgtgcgacatgagacaccttcagaggctcatggaatgcaatgtggtggcgtga

SEQ ID NO: 112736 - DNA, 60 bp, Artificial
  Synthetic oligonucleotide
cagctattatgtgcgcagagagatatatgtataaggtacggcaggcgtacaagagggtcg

SEQ ID NO: 112737 - DNA, 60 bp, Artificial
  Synthetic oligonucleotide
ggactcaaacacgaaatactttccgcaatttacaatgataaaagcactttctctagcgaa

SEQ ID NO: 112738 - DNA, 60 bp, Artificial
  Synthetic oligonucleotide
ccgaggaaggacgaaagatcaaaattcagggtaagtattatcctactcccacccgagcgg

SEQ ID NO: 112739 - DNA, 60 bp, Artificial
  Synthetic oligonucleotide
acatgatgaagtgctggtgtctgatattggtggacgtaatggcgagctttcggggtgggt

SEQ ID NO: 112740 - DNA, 60 bp, Artificial
  Synthetic oligonucleotide
atattgtggggcggctagaggtttcattttaaacggatttggcagattaatctggcctat

SEQ ID NO: 112741 - DNA, 60 bp, Artificial
  Synthetic oligonucleotide
cgatacttacttatcattttcgtttggctgggtggtttgaacttgatgttccgggagatg

SEQ ID NO: 112742 - DNA, 60 bp, Artificial
  Synthetic oligonucleotide
ccgggagatgatgttggtagagggctccaattaatgggtagcattaataaggtagtgcat

SEQ ID NO: 112743 - DNA, 60 bp, Artificial
  Synthetic oligonucleotide
gtttgtcggctgacttagatgtagatagagttttacgtaatatgcgacatgacggtgagg

SEQ ID NO: 112744 - DNA, 60 bp, Artificial
  Synthetic oligonucleotide
ggtagtgcatgtgagttgtttcttacagaatggtagacgatattttcgtttgtcggctga

SEQ ID NO: 112745 - DNA, 60 bp, Artificial
  Synthetic oligonucleotide
ttatgctaggccatacgagcggggggcgcaatttcttaatttgctgaatgaaacgatggc

SEQ ID NO: 112746 - DNA, 60 bp, Artificial
  Synthetic oligonucleotide
aatatgcgacatgacggtgaggttttaatggctgctgagttgtttgttgctgacgcggtt

SEQ ID NO: 112747 - DNA, 60 bp, Artificial
  Synthetic oligonucleotide
gacgcggttttgatttgtgaggggttagtagttggtgagatgtaccgacttcagcggtca

SEQ ID NO: 112748 - DNA, 60 bp, Artificial
  Synthetic oligonucleotide
ttgcattatctcagattgaggcaagcagttcgggagtaccgatatgatgagttaacgatt

SEQ ID NO: 112749 - DNA, 55 bp, Artificial
  Synthetic oligonucleotide
tctttttttgaacatcgtggggggcctccagatttattgtgcagcgttatggtgg

SEQ ID NO: 112750 - DNA, 60 bp, Artificial
  Synthetic oligonucleotide
ttgatgtgcctgtgagtgggttgtgtcacttggttttacgaatccttacttctttttttg

SEQ ID NO: 112751 - DNA, 60 bp, Artificial
  Synthetic oligonucleotide
ttcacgcgtgagttagttgctgcaggccgcgctaaagaggctggagctctcggtgtagtg

SEQ ID NO: 112752 - DNA, 60 bp, Artificial
  Synthetic oligonucleotide
ggcacaaattcgacatgttgtgtcaggacaaggcgtgtggtggcggagcgtcgagcggaa

SEQ ID NO: 112753 - DNA, 60 bp, Artificial
  Synthetic oligonucleotide
tggcggagcgtcgagcggaatcgtcaattggcttgttcgattcatcctggtaaaattgta

SEQ ID NO: 112754 - DNA, 60 bp, Artificial
  Synthetic oligonucleotide
tttacgtcttagatgctggaaaggtgtgagggatacctggataaagttgcggttgggata

SEQ ID NO: 112755 - DNA, 60 bp, Artificial
  Synthetic oligonucleotide
aattcgcgacggtacagttgcaatatcatttggtcctgggatttactctcgcatgtttcc

SEQ ID NO: 112756 - DNA, 60 bp, Artificial
  Synthetic oligonucleotide
ggttgggatatgaagatgggggggttaacgactctcgtatgagtgaggctctgatcgtaa

SEQ ID NO: 112757 - DNA, 60 bp, Artificial
  Synthetic oligonucleotide
tgcgatatcctgacacaggtcgtggcgcaacggacgtggtgctggcaaacggaagattgg

SEQ ID NO: 112758 - DNA, 60 bp, Artificial
  Synthetic oligonucleotide
agagacgcgagggacattagagaatggcagcgatctgcagctattatgtgcgcagagaga

SEQ ID NO: 112759 - DNA, 60 bp, Artificial
  Synthetic oligonucleotide
tctggcctatctattgtcgacacgtcgtagttcttgcaacagcgccgtgatcgcgtagcc

SEQ ID NO: 112760 - DNA, 60 bp, Artificial
  Synthetic oligonucleotide
ggtggttgattacgaggaaggtccgattagggttgcgatacgtgttcggttactgaatgt

SEQ ID NO: 112761 - DNA, 56 bp, Artificial
  Synthetic oligonucleotide
tgagtcatggatgcgtttacagttccctaacaacgtgtatccttctgtcctatgtg

SEQ ID NO: 112762 - DNA, 60 bp, Artificial
  Synthetic oligonucleotide
taactgcagtttatgcagagtttcaagcatgggctgggaaagtgtttattcgggatcggc

SEQ ID NO: 112763 - DNA, 60 bp, Artificial
  Synthetic oligonucleotide
cgagttttgcgacctcgtgcattttggtgcgtcgtgcgatcctatggagcattatttggt

SEQ ID NO: 112764 - DNA, 60 bp, Artificial
  Synthetic oligonucleotide
gactcgttagtgcaagcgggtgacgctctgttaatgtcggtcgacgagggcgagttttgc

SEQ ID NO: 112765 - DNA, 60 bp, Artificial
  Synthetic oligonucleotide
ggtgaggttttaatggctgctgagttgtttgttgctgacgcggttttgatttgtgagggg

SEQ ID NO: 112766 - DNA, 60 bp, Artificial
  Synthetic oligonucleotide
attatttggttgtcgttactcggccccctggtgacgatcctgaatatgaacctcttgaag

SEQ ID NO: 112767 - DNA, 60 bp, Artificial
  Synthetic oligonucleotide
gtcgacacgtcgtagttcttgcaacagcgccgtgatcgcgtagcctccgcgaattgcagt

SEQ ID NO: 112768 - DNA, 60 bp, Artificial
  Synthetic oligonucleotide
cgtgttcggttactgaatgttcattacgcgagagaacttgggatgaaagcgaatgatgta

SEQ ID NO: 112769 - DNA, 60 bp, Artificial
  Synthetic oligonucleotide
gcgaatgatgtaattgtaaggattcccacctctgaccgtgctagatgggtccagacgagg

SEQ ID NO: 112770 - DNA, 60 bp, Artificial
  Synthetic oligonucleotide
catggagagagtaatacctagtacgtgggagtctgaggtggttgatgcacgaggaatgtt

SEQ ID NO: 112771 - DNA, 60 bp, Artificial
  Synthetic oligonucleotide
tattgggggtgcggaaaggttgagaaacgtcaacatttatatcagacgcgtgaggtgcga

SEQ ID NO: 112772 - DNA, 60 bp, Artificial
  Synthetic oligonucleotide
tgaggtgcgacgcgggcatttatatagccagtctcgtttcttacgtaaaatttccgagga

SEQ ID NO: 112773 - DNA, 60 bp, Artificial
  Synthetic oligonucleotide
ccgtcaaggtgtggctctacaacaaatggcttttgcggagttggaattagcgagaggagc

SEQ ID NO: 112774 - DNA, 60 bp, Artificial
  Synthetic oligonucleotide
aggccctcctgtaccgtcaaggtgtggctctacaacaaatggcttttgcggagttggaat

SEQ ID NO: 112775 - DNA, 60 bp, Artificial
  Synthetic oligonucleotide
gcggcgaaaacgcgaattatgatcttgtaactcagacgttcattccgagtgatgcttttc

SEQ ID NO: 112776 - DNA, 60 bp, Artificial
  Synthetic oligonucleotide
tcgcggcgaaaacgcgaattatgatcttgtaactcagacgttcattccgagtgatgcttt

SEQ ID NO: 112777 - DNA, 60 bp, Artificial
  Synthetic oligonucleotide
aggataactttaagacggaagcacttaagaagttgttgctaagtgtccaaaaccatacgg

SEQ ID NO: 112778 - DNA, 60 bp, Artificial
  Synthetic oligonucleotide
gtgatgcttttcttaaggataactttaagacggaagcacttaagaagttgttgctaagtg

SEQ ID NO: 112779 - DNA, 60 bp, Artificial
  Synthetic oligonucleotide
gtccaaaaccatacgggactagacgctggattgcaaggtgatagttcgaaagcgacttac

SEQ ID NO: 112780 - DNA, 60 bp, Artificial
  Synthetic oligonucleotide
ttgctaagtgtccaaaaccatacgggactagacgctggattgcaaggtgatagttcgaaa

SEQ ID NO: 112781 - DNA, 60 bp, Artificial
  Synthetic oligonucleotide
cttacaacattggcctaggacaatatctcgaggatgaggccctcctgtaccgtcaaggtg

SEQ ID NO: 112782 - DNA, 60 bp, Artificial
  Synthetic oligonucleotide
tagttcgaaagcgacttacaacattggcctaggacaatatctcgaggatgaggccctcct

SEQ ID NO: 112783 - DNA, 60 bp, Artificial
  Synthetic oligonucleotide
cttctcaccctcatggacattcggcctcttcacgggtggcaccccgaaaactgcgagacc

SEQ ID NO: 112784 - DNA, 60 bp, Artificial
  Synthetic oligonucleotide
tctcaccctcatggacattcggcctcttcacgggtggcaccccgaaaactgcgagaccat

SEQ ID NO: 112785 - DNA, 60 bp, Artificial
  Synthetic oligonucleotide
gagttggaattagcgagaggagcagagaaagaggcgtttccatcaaccttcgatctaagc

SEQ ID NO: 112786 - DNA, 60 bp, Artificial
  Synthetic oligonucleotide
gcgagaggagcagagaaagaggcgtttccatcaaccttcgatctaagcaatagaccggct

SEQ ID NO: 112787 - DNA, 60 bp, Artificial
  Synthetic oligonucleotide
cgatctaagcaatagaccggcttgcaacttgatccttaagcgaacgtgtaagtggtatca

SEQ ID NO: 112788 - DNA, 60 bp, Artificial
  Synthetic oligonucleotide
accggcttgcaacttgatccttaagcgaacgtgtaagtggtatcaacaaacgtttaaggc

SEQ ID NO: 112789 - DNA, 60 bp, Artificial
  Synthetic oligonucleotide
cgaagagtttgtgggtggatgactttgccgaggctaattggaacacaggtaatttgtctt

SEQ ID NO: 112790 - DNA, 60 bp, Artificial
  Synthetic oligonucleotide
gtgggtggatgactttgccgaggctaattggaacacaggtaatttgtcttttggcttttc

SEQ ID NO: 112791 - DNA, 60 bp, Artificial
  Synthetic oligonucleotide
aatttgtcttttggcttttcaaccacattaaatgtaattgagagatggcgtttgaccaga

SEQ ID NO: 112792 - DNA, 60 bp, Artificial
  Synthetic oligonucleotide
tttgaccagattttatgttcatatgtactcatctgtgcatatatattctcagaaggcctc

SEQ ID NO: 112793 - DNA, 60 bp, Artificial
  Synthetic oligonucleotide
agagattcggtatctcgatttctatctgatgatcgagtaagagaagcggtgatggtgcga

SEQ ID NO: 112794 - DNA, 60 bp, Artificial
  Synthetic oligonucleotide
gcccagactttcgcggaccgattggcctttgactcgcatctatttgtcaatcgcggcgaa

SEQ ID NO: 112795 - DNA, 60 bp, Artificial
  Synthetic oligonucleotide
atgaagcgctcggaaccaacagacccagctcagggaagcgagcaatgcaaccagccgtca

SEQ ID NO: 112796 - DNA, 60 bp, Artificial
  Synthetic oligonucleotide
aagcgagcaatgcaaccagccgtcagtaaaccagctttactggaaaccgtattcacactc

SEQ ID NO: 112797 - DNA, 60 bp, Artificial
  Synthetic oligonucleotide
gccagagatccttttacagctcctgctacaggtacgtacggaaccatatatgcctccaga

SEQ ID NO: 112798 - DNA, 60 bp, Artificial
  Synthetic oligonucleotide
atgaactatcgagatatgaagcgctcggaaccaacagacccagctcagggaagcgagcaa

SEQ ID NO: 112799 - DNA, 60 bp, Artificial
  Synthetic oligonucleotide
cactcgatatatggtacagaaggacgaacaaccagaacatcggcaatttaagagattcgg

SEQ ID NO: 112800 - DNA, 60 bp, Artificial
  Synthetic oligonucleotide
atttaagagattcggtatctcgatttctatctgatgatcgagtaagagaagcggtgatgg

SEQ ID NO: 112801 - DNA, 51 bp, Artificial
  Synthetic oligonucleotide
agtaaaccagctttactggaaaccgtattcacactcgatatatggtacaga

SEQ ID NO: 112802 - DNA, 60 bp, Artificial
  Synthetic oligonucleotide
attcacactcgatatatggtacagaaggacgaacaaccagaacatcggcaatttaagaga

SEQ ID NO: 112803 - DNA, 60 bp, Artificial
  Synthetic oligonucleotide
tgcctttgccagagatccttttacagctcctgctacaggtacgtacggaaccatatatgc

SEQ ID NO: 112804 - DNA, 60 bp, Artificial
  Synthetic oligonucleotide
cgcctgtcgtcgtcactatggcttcctcactcagagctgcgatctccaagatcaagaggg

SEQ ID NO: 112805 - DNA, 60 bp, Artificial
  Synthetic oligonucleotide
aacgccgtaaacacatactgcgattcggtatacagggcgggagtaccgttaaattggaaa

SEQ ID NO: 112806 - DNA, 60 bp, Artificial
  Synthetic oligonucleotide
caggaatacttgaaaacgtgttgtcaaatgcgtattccaacgccgtaaacacatactgcg

SEQ ID NO: 112807 - DNA, 60 bp, Artificial
  Synthetic oligonucleotide
ggatctttacgaccagaataatttcttgaagtcaccagctcagtgggtgaggaatagcgc

SEQ ID NO: 112808 - DNA, 60 bp, Artificial
  Synthetic oligonucleotide
gaggaatagcgctagtaattcagcattgctagcaaaatttagagatagtgttagtaatat

SEQ ID NO: 112809 - DNA, 60 bp, Artificial
  Synthetic oligonucleotide
gaattaccgcctgaagaagtgactcaggtatcagttcctgcgagagaaacttcgtacggc

SEQ ID NO: 112810 - DNA, 60 bp, Artificial
  Synthetic oligonucleotide
gagtagtgatagaccccaaagacatgatgtttgtcatatttggagtgtgtccacgttacg

SEQ ID NO: 112811 - DNA, 60 bp, Artificial
  Synthetic oligonucleotide
ttacagaatgatgtaataccatcactaacgaatacacttgaatggagtagcgttgaccgg

SEQ ID NO: 112812 - DNA, 60 bp, Artificial
  Synthetic oligonucleotide
ggagaatttcgatgttaattacgttcaaacgggtaaccacgaggtgctaattgacccgtt

SEQ ID NO: 112813 - DNA, 60 bp, Artificial
  Synthetic oligonucleotide
cgttgcagacggcaggatatggaacctagtaagtaggtattatagggaattaccgcctga

SEQ ID NO: 112814 - DNA, 60 bp, Artificial
  Synthetic oligonucleotide
tccacccgtgtttaccataccaattgacatcatgctaaatgatttgggtgaatgcacttc

SEQ ID NO: 112815 - DNA, 60 bp, Artificial
  Synthetic oligonucleotide
taaatgatttgggtgaatgcacttcgacaaaaacgagaatgcgatcatttaaagtagatg

SEQ ID NO: 112816 - DNA, 60 bp, Artificial
  Synthetic oligonucleotide
taaacaatgccttagcttatttcttgttaagatacatttgtcctcagccagtttatacca

SEQ ID NO: 112817 - DNA, 60 bp, Artificial
  Synthetic oligonucleotide
cataggtaagccatatccacccgtgtttaccataccaattgacatcatgctaaatgattt

SEQ ID NO: 112818 - DNA, 60 bp, Artificial
  Synthetic oligonucleotide
tggattatgtgaatctggagcatgtgggatccattcaagacttacaagtaatgttcaatg

SEQ ID NO: 112819 - DNA, 60 bp, Artificial
  Synthetic oligonucleotide
acttgaatggagtagcgttgaccgggatattctggcggctatatattcgaatttgttcgt

SEQ ID NO: 112820 - DNA, 60 bp, Artificial
  Synthetic oligonucleotide
ctttaaatgctttacaggagcgcaagtcataatacctttggattatgtgaatctggagca

SEQ ID NO: 112821 - DNA, 60 bp, Artificial
  Synthetic oligonucleotide
agtggtttgaatgttagaaatgtgctactgactgaaagcacctctaccttcactccaatt

SEQ ID NO: 112822 - DNA, 60 bp, Artificial
  Synthetic oligonucleotide
gaatctgtggtcagcagagtaccacttcccgttagctttaagccaattagtgaaataact

SEQ ID NO: 112823 - DNA, 60 bp, Artificial
  Synthetic oligonucleotide
gagggtcgaccactagtatagtggagcatccacagacatcattcatgattaagctacgtg

SEQ ID NO: 112824 - DNA, 60 bp, Artificial
  Synthetic oligonucleotide
cgcttcgtcaattatatcagaggtcccaaccctcgacgttatgattgataacgcgcaagt

SEQ ID NO: 112825 - DNA, 60 bp, Artificial
  Synthetic oligonucleotide
ttaggtaaatacgcttcgtcaattatatcagaggtcccaaccctcgacgttatgattgat

SEQ ID NO: 112826 - DNA, 60 bp, Artificial
  Synthetic oligonucleotide
acagaaatatgaatacctatgcggataggttgcctcgggatatcgaggtctatgctgcta

SEQ ID NO: 112827 - DNA, 60 bp, Artificial
  Synthetic oligonucleotide
tatgattgataacgcgcaagttacagttatagatatgtctaaatttgatgacagaaatat

SEQ ID NO: 112828 - DNA, 60 bp, Artificial
  Synthetic oligonucleotide
tgttcaaagagacttgagtgaaatggtgtcaattgttctgtcgaagaagatagacgttac

SEQ ID NO: 112829 - DNA, 60 bp, Artificial
  Synthetic oligonucleotide
ctctaaggaggcgtgggagcgtttcatcgcaaggcaaattggtgaagagttaccacctct

SEQ ID NO: 112830 - DNA, 60 bp, Artificial
  Synthetic oligonucleotide
gaggtcaactacattctctaaggaggcgtgggagcgtttcatcgcaaggcaaattggtga

SEQ ID NO: 112831 - DNA, 60 bp, Artificial
  Synthetic oligonucleotide
tatttggagtgtgtccacgttacgttcttatgggagattcaatacctgacttttttgctg

SEQ ID NO: 112832 - DNA, 60 bp, Artificial
  Synthetic oligonucleotide
ccacatggggaatgtaccaacaagattcttcaggatggaagatgttcaaagagacttgag

SEQ ID NO: 112833 - DNA, 60 bp, Artificial
  Synthetic oligonucleotide
tcaaatgagttcgtaaggtctaatgagcgtggagaagctgagccgcatttcactgatgtg

SEQ ID NO: 112834 - DNA, 60 bp, Artificial
  Synthetic oligonucleotide
ggaacaaatgatgtctattatgcctatcgttgatcatttttatgttgttcgaaatagtgg

SEQ ID NO: 112835 - DNA, 60 bp, Artificial
  Synthetic oligonucleotide
taattacgttcaaacgggtaaccacgaggtgctaattgacccgttaccaaacgtactgcc

SEQ ID NO: 112836 - DNA, 60 bp, Artificial
  Synthetic oligonucleotide
gcgttgaccgggatattctggcggctatatattcgaatttgttcgttgcagacggcagga

SEQ ID NO: 112837 - DNA, 60 bp, Artificial
  Synthetic oligonucleotide
gagttcgtaaggtctaatgagcgtggagaagctgagccgcatttcactgatgtggaagcg

SEQ ID NO: 112838 - DNA, 60 bp, Artificial
  Synthetic oligonucleotide
tgagtgtggttgctaagaacatccaatgcgtgccttgtccggggaggggcaatcgtgacc

SEQ ID NO: 112839 - DNA, 60 bp, Artificial
  Synthetic oligonucleotide
ttgacccgttaccaaacgtactgcccatataaaatactaacacatctacttgagtgtggt

SEQ ID NO: 112840 - DNA, 60 bp, Artificial
  Synthetic oligonucleotide
gtggtatagctgctcgtggatctgttaaccccattttagcggctactactctaaacttga

SEQ ID NO: 112841 - DNA, 60 bp, Artificial
  Synthetic oligonucleotide
aatcagataaacacgactatgatcatacgggactggtcagagttagtaagattggtgatg

SEQ ID NO: 112842 - DNA, 60 bp, Artificial
  Synthetic oligonucleotide
actactctaaacttgaatcagataaacacgactatgatcatacgggactggtcagagtta

SEQ ID NO: 112843 - DNA, 60 bp, Artificial
  Synthetic oligonucleotide
gattggtgatgacgcaacaacgagtagatttaaatacatcacatagcttatttgaggctg

SEQ ID NO: 112844 - DNA, 60 bp, Artificial
  Synthetic oligonucleotide
gtcagagttagtaagattggtgatgacgcaacaacgagtagatttaaatacatcacatag

SEQ ID NO: 112845 - DNA, 60 bp, Artificial
  Synthetic oligonucleotide
ttgaggctgagttctacaagctgagcgagatagcgtcaaatgagttcgtaaggtctaatg

SEQ ID NO: 112846 - DNA, 60 bp, Artificial
  Synthetic oligonucleotide
catcacatagcttatttgaggctgagttctacaagctgagcgagatagcgtcaaatgagt

SEQ ID NO: 112847 - DNA, 60 bp, Artificial
  Synthetic oligonucleotide
gtggaattatccctatacaatatggcacttcagatgctggatctgcaatactgccaccct

SEQ ID NO: 112848 - DNA, 60 bp, Artificial
  Synthetic oligonucleotide
ctcctccctttttagtcgtcaacgaccaaattgggttagagatgctcagcgctggagatg

SEQ ID NO: 112849 - DNA, 60 bp, Artificial
  Synthetic oligonucleotide
tcgtcaacgaccaaattgggttagagatgctcagcgctggagatggggagttacttccgc

SEQ ID NO: 112850 - DNA, 60 bp, Artificial
  Synthetic oligonucleotide
tagttaatgcatcatcaactgtttctaactcagcgtccagcgccatcgctaatatgaacg

SEQ ID NO: 112851 - DNA, 60 bp, Artificial
  Synthetic oligonucleotide
gctgctaagcaagacattttgaaacagtacgttagaacatcagttaatgagacgccaata

SEQ ID NO: 112852 - DNA, 60 bp, Artificial
  Synthetic oligonucleotide
caactgtttctaactcagcgtccagcgccatcgctaatatgaacgttgctggagttgaga

SEQ ID NO: 112853 - DNA, 60 bp, Artificial
  Synthetic oligonucleotide
gcaggcgattacaccaccgagtgcgatcgcagcaatgtcaagagtacggataaacaatgc

SEQ ID NO: 112854 - DNA, 59 bp, Artificial
  Synthetic oligonucleotide
gaacaaggagagttctccaaaccaactaaattaaacaaagtaatgcatgaggatttaac

SEQ ID NO: 112855 - DNA, 60 bp, Artificial
  Synthetic oligonucleotide
gacggttggcattccattctacgatcctgtcgcggtggcaaagttcgcaactacttacgc

SEQ ID NO: 112856 - DNA, 60 bp, Artificial
  Synthetic oligonucleotide
cacagcaggtagaaccgccactatcacttatgatctatccagacacgaatttgctgcgaa

SEQ ID NO: 112857 - DNA, 60 bp, Artificial
  Synthetic oligonucleotide
gaagcgcgcgaaatttgactcatgggaaggatcactaatttcgttatctcgcgacgtcgt

SEQ ID NO: 112858 - DNA, 60 bp, Artificial
  Synthetic oligonucleotide
ctacaattgacgtttacaaaatggaatgcgacacaagctacgaccaggtctatgccggat

SEQ ID NO: 112859 - DNA, 60 bp, Artificial
  Synthetic oligonucleotide
ttgctgcgaaatttctacaattgacgtttacaaaatggaatgcgacacaagctacgacca

SEQ ID NO: 112860 - DNA, 60 bp, Artificial
  Synthetic oligonucleotide
tataacaacgagacggttggcattccattctacgatcctgtcgcggtggcaaagttcgca

SEQ ID NO: 112861 - DNA, 60 bp, Artificial
  Synthetic oligonucleotide
tatatagaggatgcaatcacgcaagcattattcggtatcagtgcgcaaaatgtgaacgcc

SEQ ID NO: 112862 - DNA, 60 bp, Artificial
  Synthetic oligonucleotide
ggcttatcacccatcgcactggctcagaagaagcatgagatgatgttacacacacatgag

SEQ ID NO: 112863 - DNA, 60 bp, Artificial
  Synthetic oligonucleotide
gttttaaaggcttatcacccatcgcactggctcagaagaagcatgagatgatgttacaca

SEQ ID NO: 112864 - DNA, 60 bp, Artificial
  Synthetic oligonucleotide
gaagaagcatgagatgatgttacacacacatgagatacactcaatggacatagatggcag

SEQ ID NO: 112865 - DNA, 60 bp, Artificial
  Synthetic oligonucleotide
tttacaaaatggaatgcgacacaagctacgaccaggtctatgccggatatgcgcacacca

SEQ ID NO: 112866 - DNA, 60 bp, Artificial
  Synthetic oligonucleotide
agaaggagacgcgttgaacacgtttaaaacaaggaatcgtgatgcgtttaggatgatgct

SEQ ID NO: 112867 - DNA, 60 bp, Artificial
  Synthetic oligonucleotide
agatctatgctcattagaaggagacgcgttgaacacgtttaaaacaaggaatcgtgatgc

SEQ ID NO: 112868 - DNA, 60 bp, Artificial
  Synthetic oligonucleotide
taaaacaaggaatcgtgatgcgtttaggatgatgctattcatcatgtccaccgcggttgc

SEQ ID NO: 112869 - DNA, 60 bp, Artificial
  Synthetic oligonucleotide
aatggacatagatggcagtatcaaaaatatggttgagcgtgagacggtgaacaagatgaa

SEQ ID NO: 112870 - DNA, 60 bp, Artificial
  Synthetic oligonucleotide
gctacatgacagagagttttaaaggcttatcacccatcgcactggctcagaagaagcatg

SEQ ID NO: 112871 - DNA, 60 bp, Artificial
  Synthetic oligonucleotide
ccagacacgaatttgccgcgaaatttctacaattgacgtttacaaaatggaatgcgacac

SEQ ID NO: 112872 - DNA, 60 bp, Artificial
  Synthetic oligonucleotide
aaatatggttgaacgtgagacggtgaacaagatgaacgagatagatgctatgaatacgat

SEQ ID NO: 112873 - DNA, 60 bp, Artificial
  Synthetic oligonucleotide
gttgaacgtgagacggtgaacaagatgaacgagatagatgctatgaatacgatgtcctgg

SEQ ID NO: 112874 - DNA, 60 bp, Artificial
  Synthetic oligonucleotide
acatggaacgcatcagatgagcgcagacccagaacagactcaacttatctcacaggagac

SEQ ID NO: 112875 - DNA, 60 bp, Artificial
  Synthetic oligonucleotide
gaacgcatcagatgagcgcagacccagaacagactcaacttatctcacaggagacagctg

SEQ ID NO: 112876 - DNA, 60 bp, Artificial
  Synthetic oligonucleotide
agacccagaacagactcaacttatctcacaggagacagctgtaattacacaccgagcaag

SEQ ID NO: 112877 - DNA, 60 bp, Artificial
  Synthetic oligonucleotide
ctcaacttatctcacaggagacagctgtaattacacaccgagcaagctcagacgcagacg

SEQ ID NO: 112878 - DNA, 60 bp, Artificial
  Synthetic oligonucleotide
caggagacagctgtaattacacaccgagcaagctcagacgcagacgagaatgagtatggc

SEQ ID NO: 112879 - DNA, 60 bp, Artificial
  Synthetic oligonucleotide
cttatgatctatccagacacgaatttgccgcgaaatttctacaattgacgtttacaaaat

SEQ ID NO: 112880 - DNA, 60 bp, Artificial
  Synthetic oligonucleotide
tattcatcatgtccaccgcggttgcggcgaatgtggtcaatagaaaagttactaaacgtg

SEQ ID NO: 112881 - DNA, 60 bp, Artificial
  Synthetic oligonucleotide
ccaccgcggttgcggcgaatgtggtcaatagaaaagttactaaacgtgtggaccgtgtga

SEQ ID NO: 112882 - DNA, 60 bp, Artificial
  Synthetic oligonucleotide
gcgaatgtggtcaatagaaaagttactaaacgtgtggaccgtgtgatagagtacattgga

SEQ ID NO: 112883 - DNA, 60 bp, Artificial
  Synthetic oligonucleotide
acgtgcctggaaatgtatatatagaggatgcaatcacgcaagcattattcggtatcagtg

SEQ ID NO: 112884 - DNA, 60 bp, Artificial
  Synthetic oligonucleotide
gacacaatcgctacatgacagagagttttaaaggcttatcacccatcgcactggctcaga

SEQ ID NO: 112885 - DNA, 60 bp, Artificial
  Synthetic oligonucleotide
tgttaagaaagctattccgacgcctgaaactcacttacctagtgctcgaaacgtgcctgg

SEQ ID NO: 112886 - DNA, 60 bp, Artificial
  Synthetic oligonucleotide
actaaacgtgtggaccgtgtgatagagtacattgggagtaactcaatgcgcacagcaggt

SEQ ID NO: 112887 - DNA, 60 bp, Artificial
  Synthetic oligonucleotide
gtacattggagtaaactcaatgcgcacagcaggtagaaccgccactatcacttatgatct

SEQ ID NO: 112888 - DNA, 60 bp, Artificial
  Synthetic oligonucleotide
gctacgaccaggtctatgccggatatgcgcacaccacgaacaagcgttacctcagcaggt

SEQ ID NO: 112889 - DNA, 60 bp, Artificial
  Synthetic oligonucleotide
caggtctatgccggatatgcgcacaccacgaacaagcgttacctcagcaggtgaaagcgc

SEQ ID NO: 112890 - DNA, 60 bp, Artificial
  Synthetic oligonucleotide
gcgacacaagctacgaccaggtctatgccggatatgcgcacaccacgaacaagcgttacc

SEQ ID NO: 112891 - DNA, 60 bp, Artificial
  Synthetic oligonucleotide
agaaaagttactaaacgtgtggaccgtgtgatagagtacattggagtaaactcaatgcgc

SEQ ID NO: 112892 - DNA, 60 bp, Artificial
  Synthetic oligonucleotide
ctcagcaggtgaaagcgcattagtgcgacacaatcgctacatgacagagagttttaaagg

SEQ ID NO: 112893 - DNA, 60 bp, Artificial
  Synthetic oligonucleotide
cgcattagtgcgacacaatcgctacatgacagagagttttaaaggcttatcacccatcgc

SEQ ID NO: 112894 - DNA, 60 bp, Artificial
  Synthetic oligonucleotide
cgcacaccacgaacaagcgttacctcagcaggtgaaagcgcattagtgcgacacaatcgc

SEQ ID NO: 112895 - DNA, 60 bp, Artificial
  Synthetic oligonucleotide
cgtgatgcgtttaggatgatgctattcatcatgtccaccgcggttgcggcgaatgtggtc

SEQ ID NO: 112896 - DNA, 60 bp, Artificial
  Synthetic oligonucleotide
cgagcgttggggggagtgacgagatctgcgctgcccgggtacgggagttcggagtgacca

SEQ ID NO: 112897 - DNA, 60 bp, Artificial
  Synthetic oligonucleotide
ctcaatgcgcacagcaggtagaaccgccactatcacttatgatctatccagacacgaatt

SEQ ID NO: 112898 - DNA, 60 bp, Artificial
  Synthetic oligonucleotide
atgttacacacacatgagatacactcaatggacatagatggcagtatcaaaaatatggtt

SEQ ID NO: 112899 - DNA, 60 bp, Artificial
  Synthetic oligonucleotide
cgacaattggcgttctactaagattgagttctctaaacgaattcatcacatactgcaaag

SEQ ID NO: 112900 - DNA, 60 bp, Artificial
  Synthetic oligonucleotide
cgacaattggcgttctactaagattgagttctctaaacgaattcatcacattttgcaaag

SEQ ID NO: 112901 - DNA, 60 bp, Artificial
  Synthetic oligonucleotide
ggcgttctactaagattgagttctctaaacgaattcatcacattttgcaaagagacggaa

SEQ ID NO: 112902 - DNA, 60 bp, Artificial
  Synthetic oligonucleotide
ggcgttctactaagattgagttctctaaacgaattcatcacatactgcaaagagacggaa

SEQ ID NO: 112903 - DNA, 60 bp, Artificial
  Synthetic oligonucleotide
cttgattcgttgtttagaactcttacttagttggtgcaggcgctacggcatgactgcttg

SEQ ID NO: 112904 - DNA, 60 bp, Artificial
  Synthetic oligonucleotide
gtgcaggcgctacggcatgactgcttgtgatggtgactagccacgccagatcaagtaggg

SEQ ID NO: 112905 - DNA, 60 bp, Artificial
  Synthetic oligonucleotide
caggcgctacggcatgactgcttgtgatggtgactagccacgccagatcaagtagggatg

SEQ ID NO: 112906 - DNA, 60 bp, Artificial
  Synthetic oligonucleotide
ggcgctacggcatgactgcttgtgatggtgactagccacgccagatcaagtagggatggc

SEQ ID NO: 112907 - DNA, 60 bp, Artificial
  Synthetic oligonucleotide
gcggtgcggggtgcaactgctcgaggattaccgcaaaagtgggatgatggatgaggccgt

SEQ ID NO: 112908 - DNA, 60 bp, Artificial
  Synthetic oligonucleotide
atcgggagaatcaaataagtgcctatcaatgggatcatcatgtactgtgaaagtgtgtcc

SEQ ID NO: 112909 - DNA, 60 bp, Artificial
  Synthetic oligonucleotide
cagcaatcgggagaatcaaataagtggatatcaatgggatcatcatgtactgtgaaagtg

SEQ ID NO: 112910 - DNA, 60 bp, Artificial
  Synthetic oligonucleotide
cgggagaatcaaataagtgcctatcaatgggatcatcatgtactgtgaaagtgtgtccac

SEQ ID NO: 112911 - DNA, 60 bp, Artificial
  Synthetic oligonucleotide
gcacttgaattcaatcgtgagttccttgacaagctacgtgtgctctcagtgtcaccaaaa

SEQ ID NO: 112912 - DNA, 60 bp, Artificial
  Synthetic oligonucleotide
ctggactgccgcctcacagattggtcaagccacggtggttaactatgtccagctatatgc

SEQ ID NO: 112913 - DNA, 60 bp, Artificial
  Synthetic oligonucleotide
cgcaccaatatcacttgagaaaagacgtgcgcaaatatcagctttgctgactatgctgca

SEQ ID NO: 112914 - DNA, 60 bp, Artificial
  Synthetic oligonucleotide
tcatacgcaccaatatcacttgagaaaagacgtgcgcaaatatcagctttgctgactatg

SEQ ID NO: 112915 - DNA, 60 bp, Artificial
  Synthetic oligonucleotide
gctgatttatgcgaaacatactagagaatatgctgaattctactcacagtcaaatcagtt

SEQ ID NO: 112916 - DNA, 60 bp, Artificial
  Synthetic oligonucleotide
gtcaaacgacgtgagagaaacatacgcgcgaatgaatgctaaagttaaagccttagtatc

SEQ ID NO: 112917 - DNA, 58 bp, Artificial
  Synthetic oligonucleotide
cgtgagagaaacgtatgcgcgaatgaatgctaaagttaaagccttagtatctacagtg

SEQ ID NO: 112918 - DNA, 60 bp, Artificial
  Synthetic oligonucleotide
gacgtgagagaaacatacgcgcgaatgaatgctaaagttaaagccttagtatctacagtg

SEQ ID NO: 112919 - DNA, 60 bp, Artificial
  Synthetic oligonucleotide
ctttatcgagtcagaagtcgggaatagctgatgagatagctgcatcatcaacgtttaaaa

SEQ ID NO: 112920 - DNA, 60 bp, Artificial
  Synthetic oligonucleotide
catgtctctgtcgagtcagaagtcggggatagctgatgagatagctgcatcatcaacgtt

SEQ ID NO: 112921 - DNA, 52 bp, Artificial
  Synthetic oligonucleotide
tcgtggtcatttcatgtcgggttcagaaagcagaaaatgttggatgccgcac

SEQ ID NO: 112922 - DNA, 60 bp, Artificial
  Synthetic oligonucleotide
gatgctatcaactattcgactttaattcaccagatctagaaaagttgatcagaataccat

SEQ ID NO: 112923 - DNA, 60 bp, Artificial
  Synthetic oligonucleotide
gtgaatgtcgataaaccgataccattaggaagaagagatgtgccagggagacggactaga

SEQ ID NO: 112924 - DNA, 60 bp, Artificial
  Synthetic oligonucleotide
tttatcattcatatataattcacaatccgcagttcaaattccaatttactattcttccaa

SEQ ID NO: 112925 - DNA, 60 bp, Artificial
  Synthetic oligonucleotide
ttcgtggtcatttcatgtcgggttcagaaagcagaaaatgttggatgccgcactagatca

SEQ ID NO: 112926 - DNA, 60 bp, Artificial
  Synthetic oligonucleotide
ccgtcaattgaagagttatataaagtaatttcactacacgagaatgaaatacaactttat

SEQ ID NO: 112927 - DNA, 60 bp, Artificial
  Synthetic oligonucleotide
tatacaaagtaatttcactacacgagaatgaaatacaactatatctgatctcactaggca

SEQ ID NO: 112928 - DNA, 60 bp, Artificial
  Synthetic oligonucleotide
ggatgttatcagctattcgactttaattcaccagatctagaaaagctgatcagaataccg

SEQ ID NO: 112929 - DNA, 60 bp, Artificial
  Synthetic oligonucleotide
ttcgtgatgaacaaattggcaggatcggagatcattattatacaacaaattgttacactg

SEQ ID NO: 112930 - DNA, 60 bp, Artificial
  Synthetic oligonucleotide
cgatgaacagattggcaggatcggagatcattattatacaacaaattgttacactggagc

SEQ ID NO: 112931 - DNA, 60 bp, Artificial
  Synthetic oligonucleotide
gtggagattacgcaaatgccacgagaacttttttggctatttcaccacaatggacttgca

SEQ ID NO: 112932 - DNA, 60 bp, Artificial
  Synthetic oligonucleotide
gggcttatgctacgatgtttgaaatggttcgatgcattatcactctatgctatgcagaga

SEQ ID NO: 112933 - DNA, 60 bp, Artificial
  Synthetic oligonucleotide
aatattccaacgttctagaattttccatcgacccaaagctatactgtgattataatattg

SEQ ID NO: 112934 - DNA, 60 bp, Artificial
  Synthetic oligonucleotide
ccaacgttctagaattttccatcgacccaaagctatactgtgattataatattgtgctaa

SEQ ID NO: 112935 - DNA, 60 bp, Artificial
  Synthetic oligonucleotide
tggtggtggtaacagagcatgctattaccaacttcactaaagctgagatggcacttgaat

SEQ ID NO: 112936 - DNA, 60 bp, Artificial
  Synthetic oligonucleotide
gtggtggtaacagagcatgctattaccaacttcactaaagctgagatggcacttgaattc

SEQ ID NO: 112937 - DNA, 60 bp, Artificial
  Synthetic oligonucleotide
gccgctagtggtggtaacagagcatgctattaccaacttcactaaagccgagatggcact

SEQ ID NO: 112938 - DNA, 60 bp, Artificial
  Synthetic oligonucleotide
gctgttagatgatcagttgccagatgacagcctgatacggaggtatccaaaggaagctgc

SEQ ID NO: 112939 - DNA, 60 bp, Artificial
  Synthetic oligonucleotide
ccgatgcagtcggtagtgaagttgctggatgatcagttgccagatgacagcctgatacga

SEQ ID NO: 112940 - DNA, 60 bp, Artificial
  Synthetic oligonucleotide
gcagtcggtagtgaagctgttagatgatcagttgccagatgacagcctgatacggaggta

SEQ ID NO: 112941 - DNA, 60 bp, Artificial
  Synthetic oligonucleotide
gacaacttaataactagaccggttgacactatagatatgacgaaggaatttaatcagaag

SEQ ID NO: 112942 - DNA, 60 bp, Artificial
  Synthetic oligonucleotide
acaacttaataactagaccggttgacactatagatatgacgaaggaatttaatcagaaga

SEQ ID NO: 112943 - DNA, 60 bp, Artificial
  Synthetic oligonucleotide
ggcgatccgatgattcttggctaaacaccttcatcttcacagcgccgggcctgaccaacc

SEQ ID NO: 112944 - DNA, 60 bp, Artificial
  Synthetic oligonucleotide
caccccagtggacatgttcgcacctgagacggaattgcttatttgatggagtatgtgcca

SEQ ID NO: 112945 - DNA, 60 bp, Artificial
  Synthetic oligonucleotide
caccccagtggacttgctcgcatttgagacggaattgcttatttgatggagtatgtgcca

SEQ ID NO: 112946 - DNA, 60 bp, Artificial
  Synthetic oligonucleotide
agttgggaatttcccgtgagggagtggccgagcagacggagagattgagagatctgcggc

SEQ ID NO: 112947 - DNA, 60 bp, Artificial
  Synthetic oligonucleotide
cgatggctatacaacaatatctgagagttggttatgttgaggaggtcaggtatgtgcagc

SEQ ID NO: 112948 - DNA, 60 bp, Artificial
  Synthetic oligonucleotide
ggatggcgatgttgcatgtgcagagatccaaggcagtgtgcgcaactgtgttggaggcgc

SEQ ID NO: 112949 - DNA, 60 bp, Artificial
  Synthetic oligonucleotide
ctcgctatgcttgacacaatcccagtggttgattcaaaagttgctgaactaacaggaggc

SEQ ID NO: 112950 - DNA, 60 bp, Artificial
  Synthetic oligonucleotide
agagatggaagtgattatggcggtgcaggaaaatgcgacacaattaatgcgtagagcggc

SEQ ID NO: 112951 - DNA, 60 bp, Artificial
  Synthetic oligonucleotide
acagataatggctcacgcacaaacgcagataaattagtggctttagctttgcgagcactt

SEQ ID NO: 112952 - DNA, 50 bp, Artificial
  Synthetic oligonucleotide
agattattacgtcaaacaccctgcgtggtgcttcccgtcaaactgtctta

SEQ ID NO: 112953 - DNA, 52 bp, Artificial
  Synthetic oligonucleotide
aagtgaatcgtttttgaacatcaagagatatcgtaaattcaggacacgaatt

SEQ ID NO: 112954 - DNA, 60 bp, Artificial
  Synthetic oligonucleotide
aagttaatcacattttttaccagttggcgacttttgataactacccttttgacctactga

SEQ ID NO: 112955 - DNA, 56 bp, Artificial
  Synthetic oligonucleotide
ttttaccagttggcgacttttgataactacccttttgacctactgagattccagct

SEQ ID NO: 112956 - DNA, 60 bp, Artificial
  Synthetic oligonucleotide
ttctcatctccctaaccttgaacgtgactttaacgttgcatctatttatgtccgcgagaa

SEQ ID NO: 112957 - DNA, 60 bp, Artificial
  Synthetic oligonucleotide
ctcatctccctaaccttgaacgtgactttaacgttgcatctatttatgtccgcgagaatt

SEQ ID NO: 112958 - DNA, 60 bp, Artificial
  Synthetic oligonucleotide
ttcaatcatcggatatgaacatttcatcggaacaagagttccaaataaagaagttaatca

SEQ ID NO: 112959 - DNA, 60 bp, Artificial
  Synthetic oligonucleotide
ttcaatcatcggatatgaacatctcatcggaacaagagttccaaataaagaagttaatca

SEQ ID NO: 112960 - DNA, 60 bp, Artificial
  Synthetic oligonucleotide
aaaatccccctactcgatgacggcatcttcgaacttctgaactaccttattgatggaacc

SEQ ID NO: 112961 - DNA, 60 bp, Artificial
  Synthetic oligonucleotide
ccctactcgatgacggcatcttcgaacttttgaactaccttattgatggaaccaacttcg

SEQ ID NO: 112962 - DNA, 60 bp, Artificial
  Synthetic oligonucleotide
ccctactcgatgacggcatcttcgaacttctgaactaccttattgatggaaccaacttcg

SEQ ID NO: 112963 - DNA, 60 bp, Artificial
  Synthetic oligonucleotide
cgatgatggcatcttcgaacttctgaactaccttattgatggaaccaacttcgacaaaac

SEQ ID NO: 112964 - DNA, 59 bp, Artificial
  Synthetic oligonucleotide
acacaaattcatcaacttctcagtctactgaaaatcgtctttcaaccaagaaaatcccc

SEQ ID NO: 112965 - DNA, 60 bp, Artificial
  Synthetic oligonucleotide
acacagattcatcaacttctcaatctactgaaaatcgtctttcaaccaagaaaatccccc

SEQ ID NO: 112966 - DNA, 59 bp, Artificial
  Synthetic oligonucleotide
atacaaattcatcgacctctcaatctaccgaaaatcgtctttcaaccaagaaaatcccc

SEQ ID NO: 112967 - DNA, 60 bp, Artificial
  Synthetic oligonucleotide
atacaaattcatcgacctctcaatctaccgaaaatcgtctttcaaccaagaaaatccccc

SEQ ID NO: 112968 - DNA, 60 bp, Artificial
  Synthetic oligonucleotide
caatcatcggatatgaacatctcatcggaacaagagttccaaataaagaagttaatcaca

SEQ ID NO: 112969 - DNA, 60 bp, Artificial
  Synthetic oligonucleotide
atcggaacaagagttccaaataaagaagttaatcacattttttaccagctggcgactttt

SEQ ID NO: 112970 - DNA, 60 bp, Artificial
  Synthetic oligonucleotide
cttttaactgtccctttgaactagcaaaaattcaaattgaatcgatgaaacctattatgc

SEQ ID NO: 112971 - DNA, 60 bp, Artificial
  Synthetic oligonucleotide
gaatccccaatcttcagtaaatgttgatacttatacttttaactgtccctttgaactagc

SEQ ID NO: 112972 - DNA, 60 bp, Artificial
  Synthetic oligonucleotide
cacgacggttcactctttttcggtactcgtgatcaagcaacaggtcaaattaacgaaatt

SEQ ID NO: 112973 - DNA, 60 bp, Artificial
  Synthetic oligonucleotide
gttgtaatcctttgattagaggtatacttagtatcatttttaccatattattttactttc

SEQ ID NO: 112974 - DNA, 52 bp, Artificial
  Synthetic oligonucleotide
cacgacggttcactttttttcggtactcgtgatcaagcaacaggtcaaatta

SEQ ID NO: 112975 - DNA, 60 bp, Artificial
  Synthetic oligonucleotide
cacgacggttcactttttttcggtactcgtgatcaagcaacaggtcaaattaacgaaatt

SEQ ID NO: 112976 - DNA, 64 bp, Artificial
  Synthetic oligonucleotide
gacaggcaaatataagcgtgaaatctcctgattttactttgcttctagaatatactcttaaacc

SEQ ID NO: 112977 - DNA, 60 bp, Artificial
  Synthetic oligonucleotide
ggtagacaggcaaatataagcgtgaaatctcctgattttactttgcttctagaatatact

SEQ ID NO: 112978 - DNA, 60 bp, Artificial
  Synthetic oligonucleotide
gatagacaggcaaatataagcgtgaaatctcctgattttactttgcttctagaatatact

SEQ ID NO: 112979 - DNA, 60 bp, Artificial
  Synthetic oligonucleotide
ccgcgagaattttgagttatgcactgaaaacttagatttgaaagattatggtagacaggc

SEQ ID NO: 112980 - DNA, 60 bp, Artificial
  Synthetic oligonucleotide
ccgcgagaattttgaattatgcactgaaaacttagatttgaaagattatgatagacaggc

SEQ ID NO: 112981 - DNA, 60 bp, Artificial
  Synthetic oligonucleotide
ccgcgagaattttgagttatgcactgaaaacttagatttgaaagattatgatagacaggc

SEQ ID NO: 112982 - DNA, 60 bp, Artificial
  Synthetic oligonucleotide
tccgcgagaattttgaattatgcactgaaaacttagatttgaaagattatgatagacagg

SEQ ID NO: 112983 - DNA, 60 bp, Artificial
  Synthetic oligonucleotide
tccgcgagaattttgagttatgcactgaaaacttagatttgaaagattatggtagacagg

SEQ ID NO: 112984 - DNA, 60 bp, Artificial
  Synthetic oligonucleotide
tccgcgagaattttgagttatgcactgaaaacttagatttgaaagattatgatagacagg

SEQ ID NO: 112985 - DNA, 60 bp, Artificial
  Synthetic oligonucleotide
ctccctaaccttgaacgtgactttaacgttgcatctatttatgtccgcgagaattttgag

SEQ ID NO: 112986 - DNA, 60 bp, Artificial
  Synthetic oligonucleotide
acacaaattcatcaacttctcagtctactgaaaatcgtctttcaaccaagaaaatccccc

SEQ ID NO: 112987 - DNA, 60 bp, Artificial
  Synthetic oligonucleotide
acacaaattcatcgacttctcaatccactgaaaatcgtctttcaaccaagaaaatccccc

SEQ ID NO: 112988 - DNA, 59 bp, Artificial
  Synthetic oligonucleotide
acacaaattcatcgacttctcaatctactgaaaatcgtctttcaaccaagaaaatcccc

SEQ ID NO: 112989 - DNA, 59 bp, Artificial
  Synthetic oligonucleotide
acacaaattcatcgacttctcaatctaccgaaaatcgtctttcaaccaagaaaatcccc

SEQ ID NO: 112990 - DNA, 60 bp, Artificial
  Synthetic oligonucleotide
gcctggaactgacacattcctacaggaacgagcgtaagagaatggcagaccaagagcgga

SEQ ID NO: 112991 - DNA, 60 bp, Artificial
  Synthetic oligonucleotide
aagttttttagcctggaactgacacattcctacaggaacgagcgtaagagaatggcagac

SEQ ID NO: 112992 - DNA, 60 bp, Artificial
  Synthetic oligonucleotide
acacaaattcatcgacttctcaatctaccgaaaatcgtctttcaaccaagaaaatccccc

SEQ ID NO: 112993 - DNA, 59 bp, Artificial
  Synthetic oligonucleotide
acacagattcatcaacttctcaatctactgaaaatcgtctttcaaccaagaaaatcccc

SEQ ID NO: 112994 - DNA, 60 bp, Artificial
  Synthetic oligonucleotide
ttcctttaattttatgaatccccaatcttcagtaaatgttgatacttatacttttaactg

SEQ ID NO: 112995 - DNA, 60 bp, Artificial
  Synthetic oligonucleotide
acacaaattcatcgacttctcaatctactgaaaatcgtctttcaaccaagaaaatccccc

SEQ ID NO: 112996 - DNA, 59 bp, Artificial
  Synthetic oligonucleotide
acacaaattcatcgacttctcaatccactgaaaatcgtctttcaaccaagaaaatcccc

SEQ ID NO: 112997 - DNA, 60 bp, Artificial
  Synthetic oligonucleotide
cttttactttttatgttctgaaaattgaatatcactggttaatgaatcatttcctttaat

SEQ ID NO: 112998 - DNA, 60 bp, Artificial
  Synthetic oligonucleotide
tatgatcttgataattgcggctgtggtagcgttgataacgtcagccagtacgctgacgag

SEQ ID NO: 112999 - DNA, 60 bp, Artificial
  Synthetic oligonucleotide
cttgataattgcggctgtggtagcgttgataacgtcagccagtacgctgacgagtgactt

SEQ ID NO: 113000 - DNA, 56 bp, Artificial
  Synthetic oligonucleotide
cttgatcattgcagctgtggtagcgttgataacgtcagccagtacgctgacgagtg

SEQ ID NO: 113001 - DNA, 60 bp, Artificial
  Synthetic oligonucleotide
gataattgcggctgtggtagcgttgataacgtcagccagtacgctgacgagtgatttggg

SEQ ID NO: 113002 - DNA, 60 bp, Artificial
  Synthetic oligonucleotide
tgataattgcggctgtggtagcgttgataacgtcagccagtacgctgacgagtgacttgg

SEQ ID NO: 113003 - DNA, 60 bp, Artificial
  Synthetic oligonucleotide
gaatgatccaatcatgatatattttgtctggcggaggatcggaactttttcgaatgcagc

SEQ ID NO: 113004 - DNA, 60 bp, Artificial
  Synthetic oligonucleotide
gaatgatccaatcatgatatattttgtctggcggaggatcggaactttttcgaatgcggc

SEQ ID NO: 113005 - DNA, 60 bp, Artificial
  Synthetic oligonucleotide
gcgtatcatgattatatgcgtgatgttaaaatgggattggatgttaaattagaagctgac

SEQ ID NO: 113006 - DNA, 60 bp, Artificial
  Synthetic oligonucleotide
tagcgtatcatgattatatgcgtgatgttaaaatgggattggatgttaaattagaagctg

SEQ ID NO: 113007 - DNA, 60 bp, Artificial
  Synthetic oligonucleotide
ccgatttaagagatttatgtgaatacgtcttatcggttagctttgataaagggatgaacg

SEQ ID NO: 113008 - DNA, 60 bp, Artificial
  Synthetic oligonucleotide
agacacgttccgatttaagagatttatgtgaatacgtcttatcggttagctttgataaag

SEQ ID NO: 113009 - DNA, 60 bp, Artificial
  Synthetic oligonucleotide
tctaatgctaagaaactagaaattatcgttcgtaatgtttatgactataaagctgagaat

SEQ ID NO: 113010 - DNA, 52 bp, Artificial
  Synthetic oligonucleotide
tttgataaagggatgaacgtatttattcttgaccgtgataacatgataggca

SEQ ID NO: 113011 - DNA, 60 bp, Artificial
  Synthetic oligonucleotide
cacgaacacttgaaataactacactatgcgatgatatggaagttgatagccgttatgctg

SEQ ID NO: 113012 - DNA, 60 bp, Artificial
  Synthetic oligonucleotide
tacgtaccacgaacacttgaaataactacactatgcgatgatatggaagttgatagccgt

SEQ ID NO: 113013 - DNA, 60 bp, Artificial
  Synthetic oligonucleotide
gccgttatgctgaaggaagtaatgaaaagattcctttgagtttagtagcgtatcatgatt

SEQ ID NO: 113014 - DNA, 60 bp, Artificial
  Synthetic oligonucleotide
tgatagccgttatgctgaaggaagtaatgaaaagattcctttgagtttagtagcgtatca

SEQ ID NO: 113015 - DNA, 60 bp, Artificial
  Synthetic oligonucleotide
ttgttttatatatgataatatgcaaacattaccatgtggattcacgactactatcattaa

SEQ ID NO: 113016 - DNA, 60 bp, Artificial
  Synthetic oligonucleotide
tccattgattgtaaacttaaggtacgaaatgacatcttaatgccgaaagcttgttttata

SEQ ID NO: 113017 - DNA, 60 bp, Artificial
  Synthetic oligonucleotide
cgcaagaaatagtagagtaaaaggggctagattttgtgatgctagcgattccattgattg

SEQ ID NO: 113018 - DNA, 60 bp, Artificial
  Synthetic oligonucleotide
gcgcaagaaatagtagagtaaaaggggctagattttgtgatgctagcgattccattgatt

SEQ ID NO: 113019 - DNA, 60 bp, Artificial
  Synthetic oligonucleotide
gatcaatgttgttatcatgtgatactactctgcaattgttatcagacttagatataactc

SEQ ID NO: 113020 - DNA, 60 bp, Artificial
  Synthetic oligonucleotide
cttgcgtaagcagatccatgttgcatcaaattatggaaagatcaatgttgttatcatgtg

SEQ ID NO: 113021 - DNA, 60 bp, Artificial
  Synthetic oligonucleotide
caatatattgacttgcgtaagcagatccatgttgcatcaaattatggaaagatcaatgtt

SEQ ID NO: 113022 - DNA, 60 bp, Artificial
  Synthetic oligonucleotide
caactattggtcattctgtatatagtaatgttgtttctgcactattatcccaaagagata

SEQ ID NO: 113023 - DNA, 60 bp, Artificial
  Synthetic oligonucleotide
gtatacattggcgataaatgcgtctaaggagagagattagcgttaagtaaatattggagc

SEQ ID NO: 113024 - DNA, 60 bp, Artificial
  Synthetic oligonucleotide
ctatcattaatccgtgtatacattggcgataaatgcgtctaaggagagagattagcgtta

SEQ ID NO: 113025 - DNA, 60 bp, Artificial
  Synthetic oligonucleotide
tgtcttaactaaattcgtgtatgagatgaccgatactttatgttttgtttcagcacacgg

SEQ ID NO: 113026 - DNA, 60 bp, Artificial
  Synthetic oligonucleotide
ctaaattcgtgtatgagatgaccgatactttatgttttgtttcagcacacggaccaacta

SEQ ID NO: 113027 - DNA, 60 bp, Artificial
  Synthetic oligonucleotide
aaaacttatgctattgtcgtcccttcttatctaaatcatctagacgaagctgtcttaact

SEQ ID NO: 113028 - DNA, 60 bp, Artificial
  Synthetic oligonucleotide
gtcgtcccttcttatctaaatcatctagacgaagctgtcttaactaaattcgtgtatgag

SEQ ID NO: 113029 - DNA, 60 bp, Artificial
  Synthetic oligonucleotide
gagacgtgtcatattattgcacttggcactggtagcggcgatcctattggtcatactaca

SEQ ID NO: 113030 - DNA, 60 bp, Artificial
  Synthetic oligonucleotide
ctattggtcatactacaataagttgttatgtaggaattgatgatgatttgaaaacttatg

SEQ ID NO: 113031 - DNA, 56 bp, Artificial
  Synthetic oligonucleotide
catcacgttgtatacatttctaacagtgaaagcattccaagacgcttaactctgcc

SEQ ID NO: 113032 - DNA, 60 bp, Artificial
  Synthetic oligonucleotide
cttgattgagacgtgtcatattattgcacttggcactggtagcggcgatcctattggtca

SEQ ID NO: 113033 - DNA, 60 bp, Artificial
  Synthetic oligonucleotide
ttagaagctgacaatccagtacttaaggtgagaaatggttatattaggaaacaattccca

SEQ ID NO: 113034 - DNA, 60 bp, Artificial
  Synthetic oligonucleotide
tccagtacttaaggtgagaaatggttatattaggaaacaattcccagatgcgacggaggt

SEQ ID NO: 113035 - DNA, 60 bp, Artificial
  Synthetic oligonucleotide
cgaagttgtgtctaactatgagcattctttctctactttttatttctacgagacacgttc

SEQ ID NO: 113036 - DNA, 60 bp, Artificial
  Synthetic oligonucleotide
gaagtgatcgaagatgtgtttaataataggactaacgaagttgtgtctaactatgagcat

SEQ ID NO: 113037 - DNA, 60 bp, Artificial
  Synthetic oligonucleotide
aagactcaattagctagaagactgagggagcgcttagacaggcaacaaagacgtaaagat

SEQ ID NO: 113038 - DNA, 60 bp, Artificial
  Synthetic oligonucleotide
cgacccacgaaacccaaatgtaatacggaagaacccgaaaattgtctatgtgaactacac

SEQ ID NO: 113039 - DNA, 60 bp, Artificial
  Synthetic oligonucleotide
gtcaaaaccaaaatgcttgatgcacgaacctatatccttacgacccacgaaacccaaatg

SEQ ID NO: 113040 - DNA, 60 bp, Artificial
  Synthetic oligonucleotide
ttaaaaaacagtcaaaaccaaaatgcttgatgcacgaacctatatccttacgacccacga

SEQ ID NO: 113041 - DNA, 60 bp, Artificial
  Synthetic oligonucleotide
ggaaagagttattatgaagtgatcgaagatgtgtttaataataggactaacgaagttgtg

SEQ ID NO: 113042 - DNA, 60 bp, Artificial
  Synthetic oligonucleotide
tctgtaaaccatacattcacagactacgctctgagggaaagagttattatgaagtgatcg

SEQ ID NO: 113043 - DNA, 60 bp, Artificial
  Synthetic oligonucleotide
acgtaaagatgaaaatctgtaaaccatacattcacagactacgctctgagggaaagagtt

SEQ ID NO: 113044 - DNA, 60 bp, Artificial
  Synthetic oligonucleotide
gactcaattagctagaagactgagggagcgcttagacaggcaacaaagacgtaaagatga

SEQ ID NO: 113045 - DNA, 60 bp, Artificial
  Synthetic oligonucleotide
ttagagcatccttcagtgcgtatcaagcgtggttcaaggattggcgtgctaatcgcaaga

SEQ ID NO: 113046 - DNA, 60 bp, Artificial
  Synthetic oligonucleotide
ctattagagcatccttcagtgcgtatcaagcgtggttcaaggattggcgtgctaatcgca

SEQ ID NO: 113047 - DNA, 60 bp, Artificial
  Synthetic oligonucleotide
gagttaatttgtaatgctacccaattaaatttacccgctgcggcagtaagacgtatcacc

SEQ ID NO: 113048 - DNA, 60 bp, Artificial
  Synthetic oligonucleotide
atgtgaagagttaatttgtaatgctacccaattaaatttacccgctgcggcagtaagacg

SEQ ID NO: 113049 - DNA, 60 bp, Artificial
  Synthetic oligonucleotide
aatattagctataatcattgatgatcatgtgacagtaccacttttaccgcttaagaagct

SEQ ID NO: 113050 - DNA, 52 bp, Artificial
  Synthetic oligonucleotide
atggctaaactgcttaatattccatataatcttattatcattagagagggtg

SEQ ID NO: 113051 - DNA, 60 bp, Artificial
  Synthetic oligonucleotide
aagctattaacacatatattactccatatatcgatccaagaataatctttattgctcatc

SEQ ID NO: 113052 - DNA, 60 bp, Artificial
  Synthetic oligonucleotide
cattgatgatcatgtgacagtaccacttttaccgcttaagaagctttggaatatttctga

SEQ ID NO: 113053 - DNA, 57 bp, Artificial
  Synthetic oligonucleotide
acttgcgaatggtgaattgacacagtcagaacaaatttttattgctggaatatctcg

SEQ ID NO: 113054 - DNA, 57 bp, Artificial
  Synthetic oligonucleotide
attgctcatcgtaatcctacagattttatgtttatgcttcctaatataccataccta

SEQ ID NO: 113055 - DNA, 60 bp, Artificial
  Synthetic oligonucleotide
ccaattatgcgctaacgtatgtcgtttgatatgtcaaggcatgtagttctgactcttgtg

SEQ ID NO: 113056 - DNA, 60 bp, Artificial
  Synthetic oligonucleotide
aggtatcctaaccaattatgcgctaacgtatgtcgtttgatatgtcaaggcatgtagttc

SEQ ID NO: 113057 - DNA, 60 bp, Artificial
  Synthetic oligonucleotide
gaatagatgtggatttagttgcgttgagtgtcatagtaggtatcctaaccaattatgcgc

SEQ ID NO: 113058 - DNA, 60 bp, Artificial
  Synthetic oligonucleotide
agaagaataatatgaatagatgtggatttagttgcgttgagtgtcatagtaggtatccta

SEQ ID NO: 113059 - DNA, 60 bp, Artificial
  Synthetic oligonucleotide
tacagaacgaaatatacagagacatattgaaagacaatgtaaagaacctacgaccattaa

SEQ ID NO: 113060 - DNA, 61 bp, Artificial
  Synthetic oligonucleotide
cagaacgaaatatacagagacatattgaaagacaatgtaaagaacctacgaccattaacag

SEQ ID NO: 113061 - DNA, 60 bp, Artificial
  Synthetic oligonucleotide
cgcattaatttgccatgtggaacaagtgtacacgaatcaactgtagatctacataagcat

SEQ ID NO: 113062 - DNA, 60 bp, Artificial
  Synthetic oligonucleotide
agtttaaaaaccaacaacatattaatgagtgcaaatcttatatccaggaatacagaacga

SEQ ID NO: 113063 - DNA, 60 bp, Artificial
  Synthetic oligonucleotide
acataagcatgcatgcttactagagtattatcgattaggattgtataaagagaagaataa

SEQ ID NO: 113064 - DNA, 60 bp, Artificial
  Synthetic oligonucleotide
cgaccattaacagaataatatctgaagttgaaaagaaatttccagatttcgaaagagaag

SEQ ID NO: 113065 - DNA, 60 bp, Artificial
  Synthetic oligonucleotide
ggacttgtgaaggtaacacttcggccaataaacagtaatacacgatctgaggtatcgagc

SEQ ID NO: 113066 - DNA, 60 bp, Artificial
  Synthetic oligonucleotide
aagaaaactattacaatgtttaagtatacaacaacgtttcatgcttcgatgcagaaatcg

SEQ ID NO: 113067 - DNA, 60 bp, Artificial
  Synthetic oligonucleotide
cttgtgaatggtttgtatgagattaatatgtacgtgtgaggcctgggactgctaacccca

SEQ ID NO: 113068 - DNA, 60 bp, Artificial
  Synthetic oligonucleotide
atttgccatgtggaacaagtgtacacgaatcaactgtagatctacataagcatgcatgct

SEQ ID NO: 113069 - DNA, 60 bp, Artificial
  Synthetic oligonucleotide
acctattttatacgctgctaataaaacatttgttacgggtggtagtgaacgaagaattga

SEQ ID NO: 113070 - DNA, 60 bp, Artificial
  Synthetic oligonucleotide
gccatacttctatccagtcaattgaaatagaacatgataatgcggttccacttagtggtg

SEQ ID NO: 113071 - DNA, 60 bp, Artificial
  Synthetic oligonucleotide
aaacataatcaatatggaacaatttatcatatctctgatgtaaatatgctatgtgaagag

SEQ ID NO: 113072 - DNA, 60 bp, Artificial
  Synthetic oligonucleotide
ccgttcaaactttgaagagtctaagacgtaagagaggagttactagtcaagatggagctg

SEQ ID NO: 113073 - DNA, 60 bp, Artificial
  Synthetic oligonucleotide
gatgctacaaaatggccatacttctatccagtcaattgaaatagaacatgataatgcggt

SEQ ID NO: 113074 - DNA, 60 bp, Artificial
  Synthetic oligonucleotide
gagatgagggatattatacagtcgaaccaattgatgagtttgttaaaaccaaaaccgttc

SEQ ID NO: 113075 - DNA, 60 bp, Artificial
  Synthetic oligonucleotide
aaaaccgttcaaactttgaagagtctaagacgtaagagaggagttactagtcaagatgga

SEQ ID NO: 113076 - DNA, 60 bp, Artificial
  Synthetic oligonucleotide
gaaaattgaaaccgtgcctatggatgtgccagctattgttacacacagcactaatgttaa

SEQ ID NO: 113077 - DNA, 60 bp, Artificial
  Synthetic oligonucleotide
ccgtgcctatggatgtgccagctattgttacacacagcactaatgttaaactacttgagg

SEQ ID NO: 113078 - DNA, 60 bp, Artificial
  Synthetic oligonucleotide
ggtatcgagcaattatgcagatggaattcaaagaagaactttgcgacatgttttcacaaa

SEQ ID NO: 113079 - DNA, 60 bp, Artificial
  Synthetic oligonucleotide
tgcagatggaattcaaagaagaactttgcgacatgttttcacaaatttgggaccatattc

SEQ ID NO: 113080 - DNA, 60 bp, Artificial
  Synthetic oligonucleotide
cgtagtaatctaccattgaatctggacataatttcgttgtatagcaagtcgttatcggat

SEQ ID NO: 113081 - DNA, 60 bp, Artificial
  Synthetic oligonucleotide
ttgatgctacaaaacagtttaagatcaggtttattgaatttaattgtactaagaaaacta

SEQ ID NO: 113082 - DNA, 55 bp, Artificial
  Synthetic oligonucleotide
gtgaggcctgggactgctaaccccatggtagctgttgagttttttaatcctaagt

SEQ ID NO: 113083 - DNA, 60 bp, Artificial
  Synthetic oligonucleotide
cgcaacaatcacagatacgacggaatcattgatcaaccaaacattattggaaaaggtcgc

SEQ ID NO: 113084 - DNA, 60 bp, Artificial
  Synthetic oligonucleotide
agtttacatacagttattgaagttaagagtcaacaggaatgtcctaacattgaacaaaat

SEQ ID NO: 113085 - DNA, 60 bp, Artificial
  Synthetic oligonucleotide
tgaacaaaatacatctataaacgtaaataatctgttctttaacacaattatcaaatattt

SEQ ID NO: 113086 - DNA, 60 bp, Artificial
  Synthetic oligonucleotide
tacatgcaagtgtagaatttgtatctgagattcaaattacacgagagttttgtgatgtta

SEQ ID NO: 113087 - DNA, 60 bp, Artificial
  Synthetic oligonucleotide
tgtgatgttatacgtagtaatctaccattgaatctggacataatttcgttgtatagcaag

SEQ ID NO: 113088 - DNA, 60 bp, Artificial
  Synthetic oligonucleotide
catgtagttctgactcttgtgaatggtttgtatgagattaatatgtacgtgtgaggcctg

SEQ ID NO: 113089 - DNA, 60 bp, Artificial
  Synthetic oligonucleotide
cagatacgacggaatcattgatcaaccaaacattattggaaaaggtcgccccaattatcc

SEQ ID NO: 113090 - DNA, 60 bp, Artificial
  Synthetic oligonucleotide
aggtaaacctattttatacgctgctaataaaacatttgttacgggtggtagtgaacgaag

SEQ ID NO: 113091 - DNA, 61 bp, Artificial
  Synthetic oligonucleotide
ggttgatacttattatgaaagaatgtcagaagttggtgacaagatagatgaaaatgaaccg

SEQ ID NO: 113092 - DNA, 63 bp, Artificial
  Synthetic oligonucleotide
cgggttgatacttattatgaaagaatgtcagaagttggtgataaaatagatgagaatgaaccg

SEQ ID NO: 113093 - DNA, 60 bp, Artificial
  Synthetic oligonucleotide
acgggttgatacttattatgaaagaatgtcagaagttggtgataaaatagatgagaatga

SEQ ID NO: 113094 - DNA, 60 bp, Artificial
  Synthetic oligonucleotide
agatttttacgggttgatacttattatgaaagaatgtcagaagttggtgacaagatagat

SEQ ID NO: 113095 - DNA, 60 bp, Artificial
  Synthetic oligonucleotide
tggattggtctaccttcaatgcagaactcgatgaagttagttttggaagaggaggcgtgg

SEQ ID NO: 113096 - DNA, 60 bp, Artificial
  Synthetic oligonucleotide
tgcgatggatcggtctaccttcaatgcagaactcgatgaagttggttttagaagaagagg

SEQ ID NO: 113097 - DNA, 60 bp, Artificial
  Synthetic oligonucleotide
atattcgagatatgatgcgatggatcggtctaccttcaatgcagaactcgatgaagttgg

SEQ ID NO: 113098 - DNA, 60 bp, Artificial
  Synthetic oligonucleotide
ttatacgatattgtaacattgattccagagaattgatacacccggcgacgttcggtattg

SEQ ID NO: 113099 - DNA, 60 bp, Artificial
  Synthetic oligonucleotide
ggaggcgtgggcggtggcaaatgattttgaagaattgatgttaacggatcaagtgtacat

SEQ ID NO: 113100 - DNA, 60 bp, Artificial
  Synthetic oligonucleotide
gcgtcagagttatcagtgatgaaggtagacatgcgacatctttcgttgatgcagaggaga

SEQ ID NO: 113101 - DNA, 60 bp, Artificial
  Synthetic oligonucleotide
gcgtcggagttatcagtaatgaaggtggatatgcgacatctttcgttgatgcagaggaga

SEQ ID NO: 113102 - DNA, 60 bp, Artificial
  Synthetic oligonucleotide
gcgtcggaattatcagtaatgaaggtggatatgcgacatctttcgttgatgcagaggaga

SEQ ID NO: 113103 - DNA, 60 bp, Artificial
  Synthetic oligonucleotide
tagattcgtcggctttctattatagagtatagcgataccctaaaaaagaattgtatgatg

SEQ ID NO: 113104 - DNA, 60 bp, Artificial
  Synthetic oligonucleotide
gcaccgttaaagtgtgtccattaaatacgcagacattaggaattggatgtcaaacaacaa

SEQ ID NO: 113105 - DNA, 50 bp, Artificial
  Synthetic oligonucleotide
gcgattgcgcaaaattatggaataaatttgccaaccaccggatctatggg

SEQ ID NO: 113106 - DNA, 60 bp, Artificial
  Synthetic oligonucleotide
agaatttccgtttggctaggggaaagctccttttaatgtatggtatggaatataccacag

SEQ ID NO: 113107 - DNA, 60 bp, Artificial
  Synthetic oligonucleotide
aaggatatattgccgatgatcaaacaagctattcacgagttttactcctggcggaggggg

SEQ ID NO: 113108 - DNA, 60 bp, Artificial
  Synthetic oligonucleotide
gcggagggggttgatggatacatcaacacttgaagctaggaatgaatggaagcccgtgtc

SEQ ID NO: 113109 - DNA, 60 bp, Artificial
  Synthetic oligonucleotide
cctacggattgtggaatatgtatggttaagactcaactgaatcaagatgaacaaaagaga

SEQ ID NO: 113110 - DNA, 59 bp, Artificial
  Synthetic oligonucleotide
aaggatatattgccgatgatcaaacaagctattcacgagttttactcctggcggagggg

SEQ ID NO: 113111 - DNA, 60 bp, Artificial
  Synthetic oligonucleotide
cacccattgacaaggtggtaaaaggccgaaacattccattttcaatgcccggagaccgag

SEQ ID NO: 113112 - DNA, 60 bp, Artificial
  Synthetic oligonucleotide
gtacctacggattgtggaatatgtatggttaagactcaactgaatcaagatgaacaaaag

SEQ ID NO: 113113 - DNA, 60 bp, Artificial
  Synthetic oligonucleotide
aactatcacccattgacaaggtggtaaaaggccgaaacattccattttcaatgcccggag

SEQ ID NO: 113114 - DNA, 60 bp, Artificial
  Synthetic oligonucleotide
ggatacatcaacacttgaagctaggaatgaatggaagcccgtgtcacaattggattttag

SEQ ID NO: 113115 - DNA, 60 bp, Artificial
  Synthetic oligonucleotide
agcccgtgtcacaattggattttaggcggtgcaattcaaatttgattttctatatttcaa

SEQ ID NO: 113116 - DNA, 60 bp, Artificial
  Synthetic oligonucleotide
ctatatagctaatatcttatggtttcgggtattgtatggttagtgagttctaattttatg

SEQ ID NO: 113117 - DNA, 60 bp, Artificial
  Synthetic oligonucleotide
taattttatgaaatttcgcttcgaagacagctcccaatgcgatttcttggggacggtata

SEQ ID NO: 113118 - DNA, 66 bp, Artificial
  Synthetic oligonucleotide
gctaatatcttatggtttcgggtattgtatggttagtgagttctaattttatgaaatttcgcttcg

SEQ ID NO: 113119 - DNA, 60 bp, Artificial
  Synthetic oligonucleotide
tcgcttcgaagacagctcccaatgcgatttcttggggacggtatacaagggtttagtagt

SEQ ID NO: 113120 - DNA, 60 bp, Artificial
  Synthetic oligonucleotide
cagaaaagttcatctactagccccgagacagacagtgacatgtcagaattctttggagat

SEQ ID NO: 113121 - DNA, 60 bp, Artificial
  Synthetic oligonucleotide
cagaaaataagaaacagaaaagttcatctactagccccgagacagacagtgacatgtcag

SEQ ID NO: 113122 - DNA, 60 bp, Artificial
  Synthetic oligonucleotide
ccaccacaacttaatacaactatgaaagtacgccaaactttgtcagaaaataagaaacag

SEQ ID NO: 113123 - DNA, 60 bp, Artificial
  Synthetic oligonucleotide
atcaagaccaccacaacttaatacaactatgaaagtacgccaaactttgtcagaaaataa

SEQ ID NO: 113124 - DNA, 60 bp, Artificial
  Synthetic oligonucleotide
atcactcatgtgacaaaaacgaatatgatattctcatttaatatgcaagtatcaagacca

SEQ ID NO: 113125 - DNA, 60 bp, Artificial
  Synthetic oligonucleotide
attattgagattccaattgaatatttaactgtatcttacggtggatataatttcaacaat

SEQ ID NO: 113126 - DNA, 60 bp, Artificial
  Synthetic oligonucleotide
gcccgtgtcacaattggattttaggcggtgcaattcaaatttgattttctatatttcaat

SEQ ID NO: 113127 - DNA, 60 bp, Artificial
  Synthetic oligonucleotide
ggcttggtgacagacagcaatatttccatgcttcacgacaagatactagacactatcacc

SEQ ID NO: 113128 - DNA, 60 bp, Artificial
  Synthetic oligonucleotide
ctaaacctgtggcgttgcaggttcctgtctcgacaataattttagactataagaatgagg

SEQ ID NO: 113129 - DNA, 60 bp, Artificial
  Synthetic oligonucleotide
cgcgatctggtgagatagattcggcaaaggagcaatgggaagctttgtctggtaacggct

SEQ ID NO: 113130 - DNA, 60 bp, Artificial
  Synthetic oligonucleotide
tattaagcaaaacccgacttatagtgctatggatataattggaagtcctagtaatacggc

SEQ ID NO: 113131 - DNA, 60 bp, Artificial
  Synthetic oligonucleotide
ggacagactcggacgcttacgagaagctatattccgaaacgatctctaagcacgtctctg

SEQ ID NO: 113132 - DNA, 60 bp, Artificial
  Synthetic oligonucleotide
ttagttatggtcatcggaccaccaagtggttttatggatacgccaaacgtatcgtcagct

SEQ ID NO: 113133 - DNA, 55 bp, Artificial
  Synthetic oligonucleotide
cgtttatgatagatgtatggatttggatgggattttattatctcaagctcttcca

SEQ ID NO: 113134 - DNA, 60 bp, Artificial
  Synthetic oligonucleotide
caacgtgcaatcgaagggatcactccctccggctgtggctgcgtgcttgaatactcccat

SEQ ID NO: 113135 - DNA, 60 bp, Artificial
  Synthetic oligonucleotide
ggaattattctcgatgggctctggtaagcgtgagccgttggcgttggaatttagaaagga

SEQ ID NO: 113136 - DNA, 60 bp, Artificial
  Synthetic oligonucleotide
tgtttttattaatgaaagtgaaccgttttctgataaagagcgttccgagttgtccgaact

SEQ ID NO: 113137 - DNA, 60 bp, Artificial
  Synthetic oligonucleotide
attccttattgcagttaactaaaaatggaatatcagttgtcagtctggatgaattgactg

SEQ ID NO: 113138 - DNA, 60 bp, Artificial
  Synthetic oligonucleotide
atctgaaaatatagtggtttgtttcaaaaatggtttcccaaacaagaagcattccttatt

SEQ ID NO: 113139 - DNA, 60 bp, Artificial
  Synthetic oligonucleotide
ttgactgatgctggtatcctcgtggaatctacaggaccagacagggttcgtagatccccg

SEQ ID NO: 113140 - DNA, 60 bp, Artificial
  Synthetic oligonucleotide
tcgtagatccccgaaagttttggcgaataagctttcctcctttaagggacggaaggtgac

SEQ ID NO: 113141 - DNA, 60 bp, Artificial
  Synthetic oligonucleotide
aagctgtcaactttgtgactagcttttggtcattacgaccgccatctgcaccggaacatt

SEQ ID NO: 113142 - DNA, 60 bp, Artificial
  Synthetic oligonucleotide
cctgacagacgaggtttctaaattgtataaattgaaccggggcaacgtcaaagaaccccg

SEQ ID NO: 113143 - DNA, 60 bp, Artificial
  Synthetic oligonucleotide
ggtccgggtttcgcggaacctaacaaaacgacgattgaagttagttagggagtagtgaac

SEQ ID NO: 113144 - DNA, 60 bp, Artificial
  Synthetic oligonucleotide
tgaagttagttagggagtagtgaactttcaccaggtgtggccgtcattaggaaatgagct

SEQ ID NO: 113145 - DNA, 60 bp, Artificial
  Synthetic oligonucleotide
acccaccatacgtatgggctgctatgatgcacggtgtaacaataagatatatcgagaagg

SEQ ID NO: 113146 - DNA, 60 bp, Artificial
  Synthetic oligonucleotide
agcattagttggatttgcatcatatatgatgaagactttatctttgaattcttccatcgt

SEQ ID NO: 113147 - DNA, 60 bp, Artificial
  Synthetic oligonucleotide
cgagaaggagattccaaacccaaagggtaagggtcctatgggcttgattatgcctgagtt

SEQ ID NO: 113148 - DNA, 60 bp, Artificial
  Synthetic oligonucleotide
gtcatcaagaaacatcgtatacattggagcatatcctgctacgcatcttttggacatgaa

SEQ ID NO: 113149 - DNA, 60 bp, Artificial
  Synthetic oligonucleotide
gcctgagttaaatgggagagtattaacgaacaaggttaaatatgtattacataacccgca

SEQ ID NO: 113150 - DNA, 60 bp, Artificial
  Synthetic oligonucleotide
tggacatgaatttacgtggctggaatatttatgctgtagatccggagatcacacaacagt

SEQ ID NO: 113151 - DNA, 60 bp, Artificial
  Synthetic oligonucleotide
cgtatacattggagcatatcctgctacgcatcttttggacatgaatttacgtggctggaa

SEQ ID NO: 113152 - DNA, 60 bp, Artificial
  Synthetic oligonucleotide
taattttgctcagacgataaacaatcgaaccatcgtgaacatttttgaatcctgcaaata

SEQ ID NO: 113153 - DNA, 56 bp, Artificial
  Synthetic oligonucleotide
tctgcgtatcagtggagtcctacgcaaacgacagaagcgttcctacggttgcgtgg

SEQ ID NO: 113154 - DNA, 60 bp, Artificial
  Synthetic oligonucleotide
ccctttattgtgttctgcgtatcagtggagtcctacgcaaacgacagaagcgttcctacg

SEQ ID NO: 113155 - DNA, 60 bp, Artificial
  Synthetic oligonucleotide
cgttcctacggttgcgtggagtcggggatgaagctggtggcgtcagggggcaagcctgca

SEQ ID NO: 113156 - DNA, 60 bp, Artificial
  Synthetic oligonucleotide
gtcggtctaatgttaaataacttccattcgaaagctattgtagatgatctatgcaacaca

SEQ ID NO: 113157 - DNA, 60 bp, Artificial
  Synthetic oligonucleotide
attgcaggagaatatgtcggtctaatgttaaataacttccattcgaaagctattgtagat

SEQ ID NO: 113158 - DNA, 60 bp, Artificial
  Synthetic oligonucleotide
atgcaacacagtcttagcgacttttaggtagcataccctttattgtgttctgcgtatcag

SEQ ID NO: 113159 - DNA, 60 bp, Artificial
  Synthetic oligonucleotide
tattgtagatgatctatgcaacacagtcttagcgacttttaggtagcataccctttattg

SEQ ID NO: 113160 - DNA, 53 bp, Artificial
  Synthetic oligonucleotide
ttcatgtttgatgtttctgaaaacattaagattaatgagtttttcggtaacca

SEQ ID NO: 113161 - DNA, 50 bp, Artificial
  Synthetic oligonucleotide
agagtgatcaaaaagtgacattaattactatgaaatggaacacaaggaaa

SEQ ID NO: 113162 - DNA, 60 bp, Artificial
  Synthetic oligonucleotide
aagaattaccacttggagcgcaagtaggtactcagaaatttatgcatactatgatatccc

SEQ ID NO: 113163 - DNA, 60 bp, Artificial
  Synthetic oligonucleotide
gcgttactaccgcaaccatatggtggtaagctatatgaaatgagagctttctttcacaga

SEQ ID NO: 113164 - DNA, 60 bp, Artificial
  Synthetic oligonucleotide
tggctaaggaatactcaaattccatggctatgggaagtggcactatcactttcatgattg

SEQ ID NO: 113165 - DNA, 60 bp, Artificial
  Synthetic oligonucleotide
ggagcgcaagtaggtactcagaaatttatgcatactatgatatcccgtgtgcaagacgta

SEQ ID NO: 113166 - DNA, 60 bp, Artificial
  Synthetic oligonucleotide
cctgcaaatatcgttcacctttgatcatatgtgctttaaatgacgcagttttggctaagg

SEQ ID NO: 113167 - DNA, 60 bp, Artificial
  Synthetic oligonucleotide
gtctgtgatatctacagacgcattaactgcaatagcgtatgcatatcgtggagcaatgat

SEQ ID NO: 113168 - DNA, 60 bp, Artificial
  Synthetic oligonucleotide
ctacagacgcattaactgcaatagcgtatgcatatcgtggagcaatgattgaacttcgtc

SEQ ID NO: 113169 - DNA, 60 bp, Artificial
  Synthetic oligonucleotide
acattgttactgatggggaatcagctgtgcgttttcatagttgtacccatgtctgtgata

SEQ ID NO: 113170 - DNA, 60 bp, Artificial
  Synthetic oligonucleotide
actgatggggaatcagctgtgcgttttcatagttgtacccatgtctgtgatatctacaga

SEQ ID NO: 113171 - DNA, 60 bp, Artificial
  Synthetic oligonucleotide
aataagacatcctggtattcggtcattgattactcaatgtttacgcgaacagcattagtt

SEQ ID NO: 113172 - DNA, 60 bp, Artificial
  Synthetic oligonucleotide
ctggtattcggtcattgattactcaatgtttacgcgaacagcattagttggatttgcatc

SEQ ID NO: 113173 - DNA, 60 bp, Artificial
  Synthetic oligonucleotide
cccgtgtgcaagacgtaatgtcaattcaaccaaagaagggtgatgtcattattgcgtcat

SEQ ID NO: 113174 - DNA, 52 bp, Artificial
  Synthetic oligonucleotide
tgtcattattgcgtcatactcgttatcaaatgcatctaatcctaaaaagaag

SEQ ID NO: 113175 - DNA, 60 bp, Artificial
  Synthetic oligonucleotide
acctccagatgtcgatagaattctattcttcgataacaagattaagcgaaatacactcga

SEQ ID NO: 113176 - DNA, 60 bp, Artificial
  Synthetic oligonucleotide
cattagcagtggctgcgcatttcgttgcagttccggtaactatgtgggctaggcacataa

SEQ ID NO: 113177 - DNA, 60 bp, Artificial
  Synthetic oligonucleotide
gtaactatgtgggctaggcacataaaatatatgacggttgatagacaaaaacctccagat

SEQ ID NO: 113178 - DNA, 60 bp, Artificial
  Synthetic oligonucleotide
aacttcaattggagtcttagaatttaaagctggtgagaaagttaatatttctggacattt

SEQ ID NO: 113179 - DNA, 60 bp, Artificial
  Synthetic oligonucleotide
ctggacatttattatcattagcagtggctgcgcatttcgttgcagttccggtaactatgt

SEQ ID NO: 113180 - DNA, 54 bp, Artificial
  Synthetic oligonucleotide
tatgcattgagagggcatctggtggcaaagatgttctccgaaaataatatcgaa

SEQ ID NO: 113181 - DNA, 60 bp, Artificial
  Synthetic oligonucleotide
tcgggtaaatcgaatgaaacatttaccgttttaaaagactttaaatttccaacttcaatt

SEQ ID NO: 113182 - DNA, 60 bp, Artificial
  Synthetic oligonucleotide
atacactcgaaaagtggcatacaaagagtgaagttatattagcggcattgattgcaggag

SEQ ID NO: 113183 - DNA, 60 bp, Artificial
  Synthetic oligonucleotide
gtggcatacaaagagtgaagttatattagcggcattgattgcaggagaatatgtcggtct

SEQ ID NO: 113184 - DNA, 60 bp, Artificial
  Synthetic oligonucleotide
tacggaatttatgttatgtaccgcattcaacgtattatgcattgagagggcatctggtgg

SEQ ID NO: 113185 - DNA, 60 bp, Artificial
  Synthetic oligonucleotide
gctttacgactaaaatacggaatttatgttatgtaccgcattcaacgtattatgcattga

SEQ ID NO: 113186 - DNA, 60 bp, Artificial
  Synthetic oligonucleotide
agcatgcgatatgatagaagtgacgatagagcaaatggtttcatttatgtctacgtcatt

SEQ ID NO: 113187 - DNA, 60 bp, Artificial
  Synthetic oligonucleotide
atgatatcccgtgtgcaagacgtaatgtcaattcaaccaaagaagggtgatgtcattatt

SEQ ID NO: 113188 - DNA, 60 bp, Artificial
  Synthetic oligonucleotide
ccatcaggtaagaagtggactgattttggttatacaaattcagaattattagcatgcgat

SEQ ID NO: 113189 - DNA, 60 bp, Artificial
  Synthetic oligonucleotide
cggggctccaaaccttgaacgtgttaagtatatgcgtgaaagaggtgtgttgcccggaaa

SEQ ID NO: 113190 - DNA, 60 bp, Artificial
  Synthetic oligonucleotide
aattttcggggctccaaaccttgaacgtgttaagtatatgcgtgaaagaggtgtgttgcc

SEQ ID NO: 113191 - DNA, 60 bp, Artificial
  Synthetic oligonucleotide
tctataatgatttattctcatggtttataccaatttgggtatggaaccaaacgatgcaaa

SEQ ID NO: 113192 - DNA, 60 bp, Artificial
  Synthetic oligonucleotide
ttcatttatgtctacgtcatttagaggtactggttactattctaattctatctataatga

SEQ ID NO: 113193 - DNA, 60 bp, Artificial
  Synthetic oligonucleotide
gctatgcaggcgaaaaccacatctgaggaatatgtgattcctaattttgctcagacgata

SEQ ID NO: 113194 - DNA, 60 bp, Artificial
  Synthetic oligonucleotide
tcagaattattagcatgcgatatgatagaagtgacgatagagcaaatggtttcatttatg

SEQ ID NO: 113195 - DNA, 60 bp, Artificial
  Synthetic oligonucleotide
cttttctgctttgtctgttttggatatgcgccacgaaaagatggaacgataccagattgg

SEQ ID NO: 113196 - DNA, 60 bp, Artificial
  Synthetic oligonucleotide
gccacgaaaagatggaacgataccagattggaaagacttgggtacattcttggatacggt

SEQ ID NO: 113197 - DNA, 60 bp, Artificial
  Synthetic oligonucleotide
aagatggaacgataccagattggaaagacttgggtacattcttggatacggttctgaacg

SEQ ID NO: 113198 - DNA, 60 bp, Artificial
  Synthetic oligonucleotide
gaacgataccagattggaaagacttgggtacattcttggatacggttctgaacggaacgg

SEQ ID NO: 113199 - DNA, 60 bp, Artificial
  Synthetic oligonucleotide
gagccgatgtgttatgacgctcgcatatgccgagaaagcgaaggtcgtaaccttcaatgt

SEQ ID NO: 113200 - DNA, 60 bp, Artificial
  Synthetic oligonucleotide
ataactgagaggaatgatccacgtgccgcttataggttagcagagatggctcataatacg

SEQ ID NO: 113201 - DNA, 60 bp, Artificial
  Synthetic oligonucleotide
gacgctcgcatatgccgagaaagcgaaggtcgtaaccttcaatgttccagaatgcgatga

SEQ ID NO: 113202 - DNA, 60 bp, Artificial
  Synthetic oligonucleotide
ttaaatcacttatccaaattcaaaattctctgaaactcaattggctatccatctgaactt

SEQ ID NO: 113203 - DNA, 60 bp, Artificial
  Synthetic oligonucleotide
caaacagcactttgaggaggtgatgaatcgtataactgagaggaatgatccacacgccgc

SEQ ID NO: 113204 - DNA, 60 bp, Artificial
  Synthetic oligonucleotide
tcgatgggtgagagggactggagtgtgggagggtgatgaatggcaggagggggtttatct

SEQ ID NO: 113205 - DNA, 60 bp, Artificial
  Synthetic oligonucleotide
actgatccgcaccgcaatacagatccatcgatgggtgagagggactggagtgtgggaggg

SEQ ID NO: 113206 - DNA, 60 bp, Artificial
  Synthetic oligonucleotide
ggtgatgaatcgtataactgagaggaatgatccacatgccgcttataggttagcagagat

SEQ ID NO: 113207 - DNA, 60 bp, Artificial
  Synthetic oligonucleotide
aacagggatggaagcactgatccgcaccgcaatacagatccatcgatgggtgagagggac

SEQ ID NO: 113208 - DNA, 60 bp, Artificial
  Synthetic oligonucleotide
atggaagcactgatccgcaccgcaatacagatccatcgatgggtgagagggactggagtg

SEQ ID NO: 113209 - DNA, 60 bp, Artificial
  Synthetic oligonucleotide
atggagtatgtgccaaacagcactttgaggaggtgatgaatcgtataactgagaggaatg

SEQ ID NO: 113210 - DNA, 60 bp, Artificial
  Synthetic oligonucleotide
ccagacatatacccaatgcgaagacctagaatggaaatgtgccgtcgagtgatggaagcg

SEQ ID NO: 113211 - DNA, 60 bp, Artificial
  Synthetic oligonucleotide
gacgattgggttgctccagacatatatccaatgcgaagacctagaatggaaatgtgccgt

SEQ ID NO: 113212 - DNA, 60 bp, Artificial
  Synthetic oligonucleotide
tggaaaatgaaggatttgccaggataataaataggtatgcccaaatggcggttcagcaat

SEQ ID NO: 113213 - DNA, 60 bp, Artificial
  Synthetic oligonucleotide
caaattatgttcctaccaatacagatgctgccatacatggaaaatgaaggatttgccagg

SEQ ID NO: 113214 - DNA, 60 bp, Artificial
  Synthetic oligonucleotide
tggaccggtgtttcaaattatgttcctaccaatacagatgctgccatacatggaaaatga

SEQ ID NO: 113215 - DNA, 60 bp, Artificial
  Synthetic oligonucleotide
ttgccaggataataaataggtatgcccaaatggcggttcagcaatatctacgagtcggat

SEQ ID NO: 113216 - DNA, 60 bp, Artificial
  Synthetic oligonucleotide
gtgccaaacagcactttgaggaggtgatgaatcgtataactgagaggaatgatccacgtg

SEQ ID NO: 113217 - DNA, 60 bp, Artificial
  Synthetic oligonucleotide
gaatcgtataactgagaggaatgatccacatgccgcttataggttagcagagatggctca

SEQ ID NO: 113218 - DNA, 60 bp, Artificial
  Synthetic oligonucleotide
gctcgatctatcatgttcagacttttctgctttgtctgttttggatatgcgccacgaaaa

SEQ ID NO: 113219 - DNA, 60 bp, Artificial
  Synthetic oligonucleotide
gccagggtattactgcgttgggaattgtcatcgcaggctcgatctatcatgttcagactt

SEQ ID NO: 113220 - DNA, 60 bp, Artificial
  Synthetic oligonucleotide
gcggcacactatcgctggaaacaaggagtggcaaacatggttgttaccgatgatcctggt

SEQ ID NO: 113221 - DNA, 60 bp, Artificial
  Synthetic oligonucleotide
ctgttggctagggtattactgcgttgggaattgtcatcgcaggctcgatctatcatgttc

SEQ ID NO: 113222 - DNA, 60 bp, Artificial
  Synthetic oligonucleotide
gggtttatctgttagccagggtattactgcgttgggaattgtcatcgcaggctcgatcta

SEQ ID NO: 113223 - DNA, 60 bp, Artificial
  Synthetic oligonucleotide
atagtatgatgctcaggagatgggagaggaatggtagatcacaaacgctggttcagatgc

SEQ ID NO: 113224 - DNA, 60 bp, Artificial
  Synthetic oligonucleotide
tatttgatggagtatgtgccaaacagcactttgaggaggtgatgaatcgtataactgaga

SEQ ID NO: 113225 - DNA, 60 bp, Artificial
  Synthetic oligonucleotide
gttcagatgcggcacactatcgctggaaacaaggagtggcaaacatggttgttaccgatg

SEQ ID NO: 113226 - DNA, 60 bp, Artificial
  Synthetic oligonucleotide
gttcagcaatatctacgagtcggatacatcgaggaacgccggtatgtgactcagctgttt

SEQ ID NO: 113227 - DNA, 60 bp, Artificial
  Synthetic oligonucleotide
acgagtcggatacatcgaggaacgccggtatgtgactcagctgtttggagactgcccagc

SEQ ID NO: 113228 - DNA, 60 bp, Artificial
  Synthetic oligonucleotide
aatcatgttcagacttttctgctttgtctgttttggatatgcgccacgaaaagatggaac

SEQ ID NO: 113229 - DNA, 60 bp, Artificial
  Synthetic oligonucleotide
tgagagggactggagtgtgggagggtgatgaatggcaggagggggtttatctgttggcta

SEQ ID NO: 113230 - DNA, 60 bp, Artificial
  Synthetic oligonucleotide
gttcagacttttctgctttgtctgttttggatatgcgccacgaaaagatggaacgatacc

SEQ ID NO: 113231 - DNA, 55 bp, Artificial
  Synthetic oligonucleotide
ttccagttaattacggccaaatgatccagccaattagaataatgaggtttaggca

SEQ ID NO: 113232 - DNA, 60 bp, Artificial
  Synthetic oligonucleotide
catagcagagaagattcaaatatgcggccgagaacttttggataaatacagaaatagtga

SEQ ID NO: 113233 - DNA, 60 bp, Artificial
  Synthetic oligonucleotide
gatccacacgccgcttataggttagcagagatggctcacaatacgatgctggacagagag

SEQ ID NO: 113234 - DNA, 60 bp, Artificial
  Synthetic oligonucleotide
tagcagagatggctcataatacgatgctggacagagagaaagtgtggctgcagtgctata

SEQ ID NO: 113235 - DNA, 60 bp, Artificial
  Synthetic oligonucleotide
gagatggctcataatacgatgctggacagagagaaagtgtggctgcagtgctataaaagc

SEQ ID NO: 113236 - DNA, 58 bp, Artificial
  Synthetic oligonucleotide
tcataatacgatgctggacagagagaaggtgtggctgcagtgctataaaagcttttca

SEQ ID NO: 113237 - DNA, 60 bp, Artificial
  Synthetic oligonucleotide
cttgtgtccccgtctttgcattctcgttccgtctttggtcaaatgcaaacgaccaccacc

SEQ ID NO: 113238 - DNA, 60 bp, Artificial
  Synthetic oligonucleotide
ggtggctacactatcgcaacgtgatgctggccctgtaaagcttgcgaatgctgacccagc

SEQ ID NO: 113239 - DNA, 60 bp, Artificial
  Synthetic oligonucleotide
ggttgatgcatcatcacgtagtctcactcttccaaattgtcttgtgtccccgtctttgca

SEQ ID NO: 113240 - DNA, 60 bp, Artificial
  Synthetic oligonucleotide
ttgtcttgtgtccccgtctttgcattctcgttccgtctttggtcaaatgcaaacgaccac

SEQ ID NO: 113241 - DNA, 60 bp, Artificial
  Synthetic oligonucleotide
catcacgtgggtcatccagtgattgggagtggtaagagggcgtcacactacagaaatctg

SEQ ID NO: 113242 - DNA, 60 bp, Artificial
  Synthetic oligonucleotide
cttcgccttctcaccgctcattggtggagttgggattacgggacagtacgctcgtgagtc

SEQ ID NO: 113243 - DNA, 60 bp, Artificial
  Synthetic oligonucleotide
cagaaatctgtttatggaatcatggcgtgggtggtcaaagtcagctttcgcatgcgctac

SEQ ID NO: 113244 - DNA, 60 bp, Artificial
  Synthetic oligonucleotide
ggctacactatcgcaacgtgatgctggccctgtaatgcttgcgaatgctgacccagcgga

SEQ ID NO: 113245 - DNA, 60 bp, Artificial
  Synthetic oligonucleotide
cactatcgcaacgtgatgctggccctgtaaagcttgcgaatgctgacccagcggaaggtg

SEQ ID NO: 113246 - DNA, 60 bp, Artificial
  Synthetic oligonucleotide
gattgatgcatcatcacgtagtctcactcttccaaattgtcttgtgtccccgtctttgca

SEQ ID NO: 113247 - DNA, 60 bp, Artificial
  Synthetic oligonucleotide
tcatgctggagaatggttgatgcatcatcacgtagtctcactcttccaaattgtcttgtg

SEQ ID NO: 113248 - DNA, 60 bp, Artificial
  Synthetic oligonucleotide
cgcgtactgaatctatccgaagtgataagacggttgacccggacttttggacttacccgc

SEQ ID NO: 113249 - DNA, 60 bp, Artificial
  Synthetic oligonucleotide
gaaatcagtcaacgcatggtcgatgagccagagaacgatgaagtcgcgccccttgacatt

SEQ ID NO: 113250 - DNA, 60 bp, Artificial
  Synthetic oligonucleotide
ctgttgcgctggagtctattgctgatcactatgatgaaatcagtcaccgcatggtcgatg

SEQ ID NO: 113251 - DNA, 60 bp, Artificial
  Synthetic oligonucleotide
tgttggaccaatatgctgttgcgctggagtctattgctgatcactatgatgaaatcagtc

SEQ ID NO: 113252 - DNA, 60 bp, Artificial
  Synthetic oligonucleotide
ccttgacattgtaacgcgtactgaatctatccgaagtgataagacggttgacccggactt

SEQ ID NO: 113253 - DNA, 60 bp, Artificial
  Synthetic oligonucleotide
gcatggtcgatgagccagagaacgatgaagtcgcgccccttgacattgtaacgcgtactg

SEQ ID NO: 113254 - DNA, 60 bp, Artificial
  Synthetic oligonucleotide
ccgcatggtcgatgagccagagaacgatgaagtcgcgccccttgacattgtaacgcgtac

SEQ ID NO: 113255 - DNA, 60 bp, Artificial
  Synthetic oligonucleotide
gaaatcagtcaccgcatggtcgatgagccagagaacgatgaagtcgcgccccttgacatt

SEQ ID NO: 113256 - DNA, 60 bp, Artificial
  Synthetic oligonucleotide
actacagaaatctgtttatggaatcatggcgtgggtggtcaaagtcagctttcgcatgcg

SEQ ID NO: 113257 - DNA, 60 bp, Artificial
  Synthetic oligonucleotide
gaaggcgtcacactacagaaatctgtttatggaatcatggcgtgggtggtcaaagtcagc

SEQ ID NO: 113258 - DNA, 60 bp, Artificial
  Synthetic oligonucleotide
ttatggaatcatggcgtgggtggtcaaagtcagctttcgcatgcgctacaggaatggagc

SEQ ID NO: 113259 - DNA, 60 bp, Artificial
  Synthetic oligonucleotide
cactgttgtggagtgtggttggtaagtacctccgggtcaaaatgcacataggctcccacc

SEQ ID NO: 113260 - DNA, 60 bp, Artificial
  Synthetic oligonucleotide
ataccatcacgtgggtcatccagtgattgggagtggtaagagggcgtcacactacagaaa

SEQ ID NO: 113261 - DNA, 60 bp, Artificial
  Synthetic oligonucleotide
cctcagcgtgcaagccgcaatggaggtacgtgtgccaaactttcactcgttcgttgaagg

SEQ ID NO: 113262 - DNA, 60 bp, Artificial
  Synthetic oligonucleotide
gctttttgagtcctcagcgtgcaagccgcaatggaggtacgtgtgccaaactttcactcg

SEQ ID NO: 113263 - DNA, 60 bp, Artificial
  Synthetic oligonucleotide
ctttcactcgttcgttgaaggaataacatctagctatttgaagactcctgcttgctggaa

SEQ ID NO: 113264 - DNA, 60 bp, Artificial
  Synthetic oligonucleotide
cgaggttgctcagcagtctggcgccgtgctaacgtccctgcagaagactaccaagttcac

SEQ ID NO: 113265 - DNA, 60 bp, Artificial
  Synthetic oligonucleotide
ttcgcatgcgctacaggaatggagccagctgaatgtgaatctcgtctgaggggacatgct

SEQ ID NO: 113266 - DNA, 60 bp, Artificial
  Synthetic oligonucleotide
caaagtcagctttcgcatgcgctacaggaatggagccagctgaatgtgaatctcgtctga

SEQ ID NO: 113267 - DNA, 60 bp, Artificial
  Synthetic oligonucleotide
tcaccgctcattggtggagttgggattacgggacagtacgctcgtgagtcataccatcac

SEQ ID NO: 113268 - DNA, 60 bp, Artificial
  Synthetic oligonucleotide
cttgctggaatgcacagacagcctgggacactgtgacttttcacgtccctgatgtgatta

SEQ ID NO: 113269 - DNA, 60 bp, Artificial
  Synthetic oligonucleotide
ggagttgggattacgggacagtacgctcgtgagtcataccatcacgtgggtcatccagtg

SEQ ID NO: 113270 - DNA, 60 bp, Artificial
  Synthetic oligonucleotide
ctgacccagcggaaggtgtatactcattttggacgtcgcacttcgccttctcaccactca

SEQ ID NO: 113271 - DNA, 60 bp, Artificial
  Synthetic oligonucleotide
gcttgcgaatgctgacccagcggaaggtgtatattcattttggacgtcgcacttcgcctt

SEQ ID NO: 113272 - DNA, 60 bp, Artificial
  Synthetic oligonucleotide
acttcgccttctcaccgctcattggtggagttgggattacgggacagtacgctcgtgagt

SEQ ID NO: 113273 - DNA, 60 bp, Artificial
  Synthetic oligonucleotide
ctgacccagcggaaggtgtatattcattttggacgtcgcacttcgccttctcaccgctca

SEQ ID NO: 113274 - DNA, 60 bp, Artificial
  Synthetic oligonucleotide
acgacgaggttgctcagcagtctggcgccgtgctaacgtccctgcagaagactaccaagt

SEQ ID NO: 113275 - DNA, 60 bp, Artificial
  Synthetic oligonucleotide
cgtgagtcataccatcacgtgggtcatccagtgattgggagtggtaagaaggcgtcacac

SEQ ID NO: 113276 - DNA, 60 bp, Artificial
  Synthetic oligonucleotide
gctcgtgagtcataccatcacgtgggtcatccagtgattgggagtggtaagaaggcgtca

SEQ ID NO: 113277 - DNA, 60 bp, Artificial
  Synthetic oligonucleotide
cattagcgtgcaagccgcaatggaggtacgtgtgccaaactttcactcgttcgttgaagg

SEQ ID NO: 113278 - DNA, 60 bp, Artificial
  Synthetic oligonucleotide
gatgtgattagagttggcaatgcgtattgttgctctcaatgttgtggtgtactttattac

SEQ ID NO: 113279 - DNA, 60 bp, Artificial
  Synthetic oligonucleotide
ggcaatgcgtattgttgctctcaatgttgtggtgtactttattacgggactctgcccgcg

SEQ ID NO: 113280 - DNA, 60 bp, Artificial
  Synthetic oligonucleotide
tgaaggaataacatctagctatttgaagactcctgcttgctggaatgcacagacagcctg

SEQ ID NO: 113281 - DNA, 60 bp, Artificial
  Synthetic oligonucleotide
actaccaagttcactgttgtggagtgtggttggtaagtacctccgggtcaaaatgcacat

SEQ ID NO: 113282 - DNA, 60 bp, Artificial
  Synthetic oligonucleotide
gcatgcgctacaggaatggagccagctgaatgtgaatctcgtctgaggggacatgctcgc

SEQ ID NO: 113283 - DNA, 60 bp, Artificial
  Synthetic oligonucleotide
cagacagcctgggacactgtgacttttcacgtccctgatgtgattagagttggcaatgcg

SEQ ID NO: 113284 - DNA, 58 bp, Artificial
  Synthetic oligonucleotide
actttattacgggactctgcccgcggatggaaattacttccctcatcacaaatgccat

SEQ ID NO: 113285 - DNA, 60 bp, Artificial
  Synthetic oligonucleotide
cgataccccactgctccggtatgtgcgaattggcagaacgactgagcatctgttggacca

SEQ ID NO: 113286 - DNA, 54 bp, Artificial
  Synthetic oligonucleotide
aaatgcacataggctcccacctatgtgacggttagcgggactcgcctattcatc

SEQ ID NO: 113287 - DNA, 60 bp, Artificial
  Synthetic oligonucleotide
acatagcatgctcgcaaagcacgccgcgaggcacaatggtaccctaatcaacccacgtat

SEQ ID NO: 113288 - DNA, 60 bp, Artificial
  Synthetic oligonucleotide
acggcgcagttacaatgatggttaatttacccaaacgtgatttgggtttagatgttggag

SEQ ID NO: 113289 - DNA, 60 bp, Artificial
  Synthetic oligonucleotide
gtcactaaaggtacacctaaagcgcaaatagatacgttgaagatgaatggcttaacagtc

SEQ ID NO: 113290 - DNA, 53 bp, Artificial
  Synthetic oligonucleotide
ataacttatcgccaataaccagaagcatattcaataacacaggaagagaagat

SEQ ID NO: 113291 - DNA, 60 bp, Artificial
  Synthetic oligonucleotide
cccacgtatgtacgccgatatgattactttaggtaatacgaaggttacagtcactaaagg

SEQ ID NO: 113292 - DNA, 60 bp, Artificial
  Synthetic oligonucleotide
tcaacaattaagcctagctagtggtcaaattgttggacatctatcatcagacgcctatgg

SEQ ID NO: 113293 - DNA, 60 bp, Artificial
  Synthetic oligonucleotide
cgattaatgatactacacaagcaatgagagacaggcaacggagtggtgtagtacaactgt

SEQ ID NO: 113294 - DNA, 60 bp, Artificial
  Synthetic oligonucleotide
tgcgcaagatgccacgattgcacgtacagataccactatattgctgcgaacgattaatga

SEQ ID NO: 113295 - DNA, 60 bp, Artificial
  Synthetic oligonucleotide
tagataacgctaacacacattccgagcgtaatttctactacatggtctcgaccgggaaga

SEQ ID NO: 113296 - DNA, 60 bp, Artificial
  Synthetic oligonucleotide
cacacattccgagcgtaatttctactacatggtctcgaccgggaagaacacaccacgaac

SEQ ID NO: 113297 - DNA, 60 bp, Artificial
  Synthetic oligonucleotide
catggacaggtttatacggcgcagttacaatgatggttaatttacccaaacgtgatttgg

SEQ ID NO: 113298 - DNA, 60 bp, Artificial
  Synthetic oligonucleotide
gctcgcaaagcacgccgcgaggcacaatggtaccctaatcaacccacgtatgtacgccga

SEQ ID NO: 113299 - DNA, 60 bp, Artificial
  Synthetic oligonucleotide
tggagtaatcaccgatgcgatcccttcaggtatatcagcaaaatctacggtaatgagaat

SEQ ID NO: 113300 - DNA, 60 bp, Artificial
  Synthetic oligonucleotide
caccgatgcgatcccttcaggtatatcagcaaaatctacggtaatgagaatctctcccca

SEQ ID NO: 113301 - DNA, 60 bp, Artificial
  Synthetic oligonucleotide
cgtccatttgaactaacagcctcaaatttggccgtacctcagaaacataacttatcgcca

SEQ ID NO: 113302 - DNA, 60 bp, Artificial
  Synthetic oligonucleotide
cctaaagcgcaaatagatacgttgaagatgaatggcttaacagtcgtatccaagagcaga

SEQ ID NO: 113303 - DNA, 60 bp, Artificial
  Synthetic oligonucleotide
atatggttatggggagtatgtctttattaagtacgagggttgtttgattacatggacagg

SEQ ID NO: 113304 - DNA, 60 bp, Artificial
  Synthetic oligonucleotide
ggagtatgtctttattaagtacgagggttgtttgattacatggacaggtttatacggcgc

SEQ ID NO: 113305 - DNA, 60 bp, Artificial
  Synthetic oligonucleotide
cttaacagtcgtatccaagagcagacgtaataataagaagaagcctgtgtccgacacaac

SEQ ID NO: 113306 - DNA, 60 bp, Artificial
  Synthetic oligonucleotide
ccaagagcagacgtaataataagaagaagcctgtgtccgacacaacggcaagcactgacg

SEQ ID NO: 113307 - DNA, 60 bp, Artificial
  Synthetic oligonucleotide
taatgagaatctctccccataaaatgatgaatccaagcggtggcgcccttgctgtgctct

SEQ ID NO: 113308 - DNA, 60 bp, Artificial
  Synthetic oligonucleotide
gaatctctccccataaaatgatgaatccaagcggtggcgcccttgctgtgctctcaaagt

SEQ ID NO: 113309 - DNA, 60 bp, Artificial
  Synthetic oligonucleotide
ggcaagcactgacgaaactactgatgacgttgtcacgtacaaagcactaaccgagatgtc

SEQ ID NO: 113310 - DNA, 60 bp, Artificial
  Synthetic oligonucleotide
cggatgataacgagagttactacgagcagaaagcaagcgagctattgacatcgcacggta

SEQ ID NO: 113311 - DNA, 60 bp, Artificial
  Synthetic oligonucleotide
cagctaattacgtacacacaaccacacataatccctacctggcaaggcatcactgatttt

SEQ ID NO: 113312 - DNA, 60 bp, Artificial
  Synthetic oligonucleotide
cctggcaaggcatcactgattttagtgacacgtatttacgttcctactttaaacgtccat

SEQ ID NO: 113313 - DNA, 60 bp, Artificial
  Synthetic oligonucleotide
cgcacggtatcagtgagttatcacaatatgagctgttaagtgtgcgaaggaaagtcaaaa

SEQ ID NO: 113314 - DNA, 60 bp, Artificial
  Synthetic oligonucleotide
ctagctagtggtcaaattgttggacatctatcatcagacgcctatgggagatggttagcg

SEQ ID NO: 113315 - DNA, 60 bp, Artificial
  Synthetic oligonucleotide
gcactaaccgagatgtctacactcgtagagagctttcgtttgccatccggcttaacacta

SEQ ID NO: 113316 - DNA, 60 bp, Artificial
  Synthetic oligonucleotide
acgcctatgggagatggttagcgaagaataaagatgttgaagagccatcattcgagtatg

SEQ ID NO: 113317 - DNA, 60 bp, Artificial
  Synthetic oligonucleotide
cgagagttactacgagcagaaagcaagcgagctattgacatcgcacggtatcagtgagtt

SEQ ID NO: 113318 - DNA, 60 bp, Artificial
  Synthetic oligonucleotide
ccgacacaacggcaagcactgacgaaactactgatgacgttgtcacgtacaaagcactaa

SEQ ID NO: 113319 - DNA, 60 bp, Artificial
  Synthetic oligonucleotide
gctgtgctctcaaagtatatagaggcggtagtttctaccaatgtgatcaacgctacgtta

SEQ ID NO: 113320 - DNA, 60 bp, Artificial
  Synthetic oligonucleotide
cggactacattaatcagctaattacgtacacacaaccacacataatccctacctggcaag

SEQ ID NO: 113321 - DNA, 60 bp, Artificial
  Synthetic oligonucleotide
cggcttaacactaattgtatttgacgatgaaaagtaccaaagtctaattccggactacat

SEQ ID NO: 113322 - DNA, 60 bp, Artificial
  Synthetic oligonucleotide
ctactcaacagtcttgggttgatgtcattgagaagagcaattcggctaatgaaaaagaac

SEQ ID NO: 113323 - DNA, 60 bp, Artificial
  Synthetic oligonucleotide
agcaacgctaaaatctgcttttcttctactgaaatgtctggattaacctcattgcacaag

SEQ ID NO: 113324 - DNA, 60 bp, Artificial
  Synthetic oligonucleotide
gcgaatcatgttgttgtcgaacgaacctcccgtcttaatgaagttatcgatgaattagag

SEQ ID NO: 113325 - DNA, 60 bp, Artificial
  Synthetic oligonucleotide
gtttcgaattaccattaacctaagatcagtaggtagagtggcgccccgaggtctgcatcg

SEQ ID NO: 113326 - DNA, 60 bp, Artificial
  Synthetic oligonucleotide
atgtttcctggacagattatacttgatctaaaaattgatcctggtgagaggatggatccg

SEQ ID NO: 113327 - DNA, 60 bp, Artificial
  Synthetic oligonucleotide
ggtaaaaagctcttatcttagtcacatcatccagggttgcagctgggagagaatggtgtc

SEQ ID NO: 113328 - DNA, 60 bp, Artificial
  Synthetic oligonucleotide
gctcttatcttagtcacatcatccagggttgcagctgggagagaatggtgtcgatcaaag

SEQ ID NO: 113329 - DNA, 60 bp, Artificial
  Synthetic oligonucleotide
ggattccatctgataactgtcctgctttagatagatttaaaactaaaactgaaaaggagc

SEQ ID NO: 113330 - DNA, 60 bp, Artificial
  Synthetic oligonucleotide
actgaggaaggttggattccatctgataactgtcctgctttagatagatttaaaactaaa

SEQ ID NO: 113331 - DNA, 60 bp, Artificial
  Synthetic oligonucleotide
gagtcaggtgaagaggttgaaagtgctattgcaagcaagtatcctgatatattttgttct

SEQ ID NO: 113332 - DNA, 60 bp, Artificial
  Synthetic oligonucleotide
agacttactcaacttggaggtgtgcctgtgcgagatattcgcacatccacgactattcca

SEQ ID NO: 113333 - DNA, 60 bp, Artificial
  Synthetic oligonucleotide
agagtacatgaagatgggtttagaattttatcagcaacaatgctagctatagattctgat

SEQ ID NO: 113334 - DNA, 60 bp, Artificial
  Synthetic oligonucleotide
caggtgaagaggttgaaagtgctattgcaagcaagtatcctgatatattttgttctgctg

SEQ ID NO: 113335 - DNA, 59 bp, Artificial
  Synthetic oligonucleotide
gatgttatcagtaacattttgatcgaaaaaaactaagataatctttgattgatataccc

SEQ ID NO: 113336 - DNA, 60 bp, Artificial
  Synthetic oligonucleotide
gccaatggtctatggagttaaggctttgttaggtatatctaatagagactttatcatgaa

SEQ ID NO: 113337 - DNA, 60 bp, Artificial
  Synthetic oligonucleotide
gtgatccccgcacagacgttccactatgccggctcttgctataatcggtgactcactact

SEQ ID NO: 113338 - DNA, 60 bp, Artificial
  Synthetic oligonucleotide
tgctataatcggtgactcactactaactgcttctctcattgacaaatacgtaccaccaag

SEQ ID NO: 113339 - DNA, 60 bp, Artificial
  Synthetic oligonucleotide
gacattttgtttctgtgatccccgcacagacgttccactatgccggctcttgctataatc

SEQ ID NO: 113340 - DNA, 60 bp, Artificial
  Synthetic oligonucleotide
ggtgtattttgcgccaaaaccagtagttgagtgggtcattgagcaggagattgatttatc

SEQ ID NO: 113341 - DNA, 60 bp, Artificial
  Synthetic oligonucleotide
gcgccaaaaccagtagttgagtgggtcattgagcaggagattgatttatcgacagttgag

SEQ ID NO: 113342 - DNA, 60 bp, Artificial
  Synthetic oligonucleotide
tttcgtggccgaacggaagtcggttaccatgggaagacagagaatccaagagatcgtccg

SEQ ID NO: 113343 - DNA, 60 bp, Artificial
  Synthetic oligonucleotide
gacagagaatccaagagatcgtccgtcgtttttccctttgttaagtgcctgtgcagttga

SEQ ID NO: 113344 - DNA, 60 bp, Artificial
  Synthetic oligonucleotide
tctaacaatccaattaaatgggaaaggctgttagactcagttcgagatgtagccgaaagt

SEQ ID NO: 113345 - DNA, 60 bp, Artificial
  Synthetic oligonucleotide
aaatgggaaaggctgttagactcagttcgagatgtagccgaaagtcgacttaacgcaggt

SEQ ID NO: 113346 - DNA, 60 bp, Artificial
  Synthetic oligonucleotide
ttgatttatcgacagttgagttcgatgtaaggaacatgctcaaaatgttgtctaacaatc

SEQ ID NO: 113347 - DNA, 60 bp, Artificial
  Synthetic oligonucleotide
gatttatcgacagttgagttcgatgtaaggaacatgctcaaaatgttgtctaacaatcca

SEQ ID NO: 113348 - DNA, 58 bp, Artificial
  Synthetic oligonucleotide
agccgaaagtcgacttaacgcaggtggacaggaggtgggcgagtggagagcatggatt

SEQ ID NO: 113349 - DNA, 50 bp, Artificial
  Synthetic oligonucleotide
attgatggcagtttttctggaagtagaagcgcttggagctagactgctac

SEQ ID NO: 113350 - DNA, 60 bp, Artificial
  Synthetic oligonucleotide
tttgttttccgtcagtttcgtggccgaacggaagtcggttaccatgggaagacagagaat

SEQ ID NO: 113351 - DNA, 51 bp, Artificial
  Synthetic oligonucleotide
gaccacgggtgaaacttttaaagaaatcttagacattggaaaacgactggt

SEQ ID NO: 113352 - DNA, 60 bp, Artificial
  Synthetic oligonucleotide
catgcagtggccgttgtttacggaatgggctcgaaagaatgagatagatttgaccacggg

SEQ ID NO: 113353 - DNA, 60 bp, Artificial
  Synthetic oligonucleotide
gattccgcagataattggtattccagaggactctctcatgcagtggccgttgtttacgga

SEQ ID NO: 113354 - DNA, 52 bp, Artificial
  Synthetic oligonucleotide
tgaccacgggtgaaacttttaaagaaatcttagacattggaaaacgactggt

SEQ ID NO: 113355 - DNA, 60 bp, Artificial
  Synthetic oligonucleotide
gcagtggccgttgtttacggaatgggctcgaaagaatgagatagatttgaccacgggtga

SEQ ID NO: 113356 - DNA, 60 bp, Artificial
  Synthetic oligonucleotide
taccaccaagtagcaatgctcaggtttttggattcgttgcgcacacacattctgtcaaac

SEQ ID NO: 113357 - DNA, 60 bp, Artificial
  Synthetic oligonucleotide
cggtgactcactactaactgcttctctcattgacaaatacgtaccaccaagtagcaatgc

SEQ ID NO: 113358 - DNA, 60 bp, Artificial
  Synthetic oligonucleotide
tctgtcaaaccattgattccgcagataattggtattccagaggactctctcatgcagtgg

SEQ ID NO: 113359 - DNA, 50 bp, Artificial
  Synthetic oligonucleotide
ttttggattcgttgcgcacacacattctgtcaaaccattgattccgcaga

SEQ ID NO: 113360 - DNA, 60 bp, Artificial
  Synthetic oligonucleotide
gggagcggagcctttaaggcatagtgtgaacggggtcaaggcctggatacaaatgcagtc

SEQ ID NO: 113361 - DNA, 60 bp, Artificial
  Synthetic oligonucleotide
attgggagcggagcctttaaggcatagtgtgaacggggtcaaggcctggatacaaatgca

SEQ ID NO: 113362 - DNA, 60 bp, Artificial
  Synthetic oligonucleotide
gaacgcgcgtcctccacaaatgggcgggaattttacgattgggagcggagcctttaaggc

SEQ ID NO: 113363 - DNA, 60 bp, Artificial
  Synthetic oligonucleotide
atgcaatccgtttgaacgcgcgtcctccacaaatgggcgggaattttacgattgggagcg

SEQ ID NO: 113364 - DNA, 60 bp, Artificial
  Synthetic oligonucleotide
gagagtggcgccaatgaaacgagaggggcggaattatgcaatccgtttgaacgcgcgtcc

SEQ ID NO: 113365 - DNA, 60 bp, Artificial
  Synthetic oligonucleotide
gttaaaggtagggtggagagtggcgccaatgaaacgagaggggcggaattatgcaatccg

SEQ ID NO: 113366 - DNA, 60 bp, Artificial
  Synthetic oligonucleotide
ggtgctgttcctcatcttcagtctgtgaatagagagttaaaggtagggtggagagtggcg

SEQ ID NO: 113367 - DNA, 60 bp, Artificial
  Synthetic oligonucleotide
gttaagactgatccaggtgctgttcctcatcttcagtctgtgaatagagagttaaaggta

SEQ ID NO: 113368 - DNA, 60 bp, Artificial
  Synthetic oligonucleotide
caatgggatgtgtgttaaacaaaattttgagagagcgatgatcgcggcaactgacgcgga

SEQ ID NO: 113369 - DNA, 60 bp, Artificial
  Synthetic oligonucleotide
tggctgcgaagcttcaaaaaagaagaactattagatacacgagtacgggaggagatgtga

SEQ ID NO: 113370 - DNA, 60 bp, Artificial
  Synthetic oligonucleotide
agaagagtggggcacatgcaaaggctgctgagagagggaggcgtaaacaagggaagaagc

SEQ ID NO: 113371 - DNA, 60 bp, Artificial
  Synthetic oligonucleotide
atctgcgacgaaaagagaagagtggggcacatgcaaaggctgctgagagagggaggcgta

SEQ ID NO: 113372 - DNA, 60 bp, Artificial
  Synthetic oligonucleotide
gactaaagatgccagatgtgatagacgcatacacactgcagtgggatctggatcaagcgc

SEQ ID NO: 113373 - DNA, 60 bp, Artificial
  Synthetic oligonucleotide
cagagacagatccaaattaatttaactgattggacagagggcgagacgaacaaagagagt

SEQ ID NO: 113374 - DNA, 60 bp, Artificial
  Synthetic oligonucleotide
gagggcgagacgaacaaagagagtaaagcggaacgcaaagagggagacaaagcagaggaa

SEQ ID NO: 113375 - DNA, 60 bp, Artificial
  Synthetic oligonucleotide
tccgaggagttaaaacagagacagatccaaattaatttaactgattggacagagggcgag

SEQ ID NO: 113376 - DNA, 60 bp, Artificial
  Synthetic oligonucleotide
agagggcgagacgaacaaagagagtaaagcggaacgcaaagagggagacaaagcagagga

SEQ ID NO: 113377 - DNA, 52 bp, Artificial
  Synthetic oligonucleotide
aagcagaggaattaaaagatggtgagggacgcaatcggagagcagccagaag

SEQ ID NO: 113378 - DNA, 60 bp, Artificial
  Synthetic oligonucleotide
tctcttgaatgcctctcttattgataaatacacaccgccctcaagcaatgctcaaaacca

SEQ ID NO: 113379 - DNA, 60 bp, Artificial
  Synthetic oligonucleotide
cttgaatgcctctcttattgataaatacacaccgccctcaagcaatgctcaaaaccaagg

SEQ ID NO: 113380 - DNA, 60 bp, Artificial
  Synthetic oligonucleotide
tggagccgtgccgcatcttcaatttgttaacaatgagttgaaggtcgggtggaaggtcgc

SEQ ID NO: 113381 - DNA, 60 bp, Artificial
  Synthetic oligonucleotide
tccccgcacagacgttccactatgccggctcttgctataatcggtgatactctcttgaat

SEQ ID NO: 113382 - DNA, 60 bp, Artificial
  Synthetic oligonucleotide
ccccagataattggcatacccgaagatgctctcaagcagtggactttatttactgattgg

SEQ ID NO: 113383 - DNA, 60 bp, Artificial
  Synthetic oligonucleotide
ccagataattggcatacccgaagatgctctcaagcagtggactttatttactgattgggc

SEQ ID NO: 113384 - DNA, 60 bp, Artificial
  Synthetic oligonucleotide
ctcaaaaccaaggatttacaacatacgtgcactctgttaaacctctgattccccagataa

SEQ ID NO: 113385 - DNA, 60 bp, Artificial
  Synthetic oligonucleotide
ttacaacatacgtgcactctgttaaacctctgattccccagataattggcatacccgaag

SEQ ID NO: 113386 - DNA, 60 bp, Artificial
  Synthetic oligonucleotide
tactgattgggcaaaactaaatgacattgatttgaatgctgatgagacatttaaagagat

SEQ ID NO: 113387 - DNA, 64 bp, Artificial
  Synthetic oligonucleotide
gggcaaaactaaatgacattgatttgaatgctgatgagacatttaaagagattttgaccattgg

SEQ ID NO: 113388 - DNA, 60 bp, Artificial
  Synthetic oligonucleotide
ggaaggtcgcgccgatacgtcgtgatgggcgaaactactccattcgtctcaatgctcgta

SEQ ID NO: 113389 - DNA, 60 bp, Artificial
  Synthetic oligonucleotide
ggtcgcgccgatacgtcgtgatgggcgaaactactccattcgtctcaatgctcgtaatcc

SEQ ID NO: 113390 - DNA, 60 bp, Artificial
  Synthetic oligonucleotide
gccgtgccgcatcttcaatttgttaacaatgagttgaaggtcgggtggaaggtcgcgccg

SEQ ID NO: 113391 - DNA, 60 bp, Artificial
  Synthetic oligonucleotide
acgaggttggtgaatggcgcccctgggtgattggcctgttaatgatattcggtcagtcat

SEQ ID NO: 113392 - DNA, 60 bp, Artificial
  Synthetic oligonucleotide
ggcgcccctgggtgattggcctgttaatgatattcggtcagtcattgaagattggtggct

SEQ ID NO: 113393 - DNA, 60 bp, Artificial
  Synthetic oligonucleotide
ggtcagtcattgaagattggtggcttgatggctgttttgaagtggaggcagttggggccc

SEQ ID NO: 113394 - DNA, 60 bp, Artificial
  Synthetic oligonucleotide
attggtggcttgatggctgttttgaagtggaggcagttggggcccgtttgctacaggaac

SEQ ID NO: 113395 - DNA, 60 bp, Artificial
  Synthetic oligonucleotide
gttggggcccgtttgctacaggaacttatcgcgcgtatgaagagtgaccctggagccgtg

SEQ ID NO: 113396 - DNA, 60 bp, Artificial
  Synthetic oligonucleotide
gccaatgtagctgaaagtcggattacggcagatcgggacgaggttggtgaatggcgcccc

SEQ ID NO: 113397 - DNA, 60 bp, Artificial
  Synthetic oligonucleotide
gcttgagaaaatcgccaatgtagctgaaagtcggattacggcagatcgggacgaggttgg

SEQ ID NO: 113398 - DNA, 60 bp, Artificial
  Synthetic oligonucleotide
cagttaggcggtgcttttacgattgagagcggagcctttaaggtgtagtgtgaacggggc

SEQ ID NO: 113399 - DNA, 60 bp, Artificial
  Synthetic oligonucleotide
aatgctcgtaatcctcagttaggcggtgcttttacgattgagagcggagcctttaaggtg

SEQ ID NO: 113400 - DNA, 60 bp, Artificial
  Synthetic oligonucleotide
ggagcaggacaaattgagagtttgaaggatctcctttcacgccacttcgaggtctgggtc

SEQ ID NO: 113401 - DNA, 60 bp, Artificial
  Synthetic oligonucleotide
ccgctgttgggagcaggacaaattgagagtttgaaggatctcctttcacgccacttcgag

SEQ ID NO: 113402 - DNA, 60 bp, Artificial
  Synthetic oligonucleotide
gagatagatctggccacagtggagtttgatgttcgtaacatgctgaaaatgttgtccaac

SEQ ID NO: 113403 - DNA, 60 bp, Artificial
  Synthetic oligonucleotide
gatccgtcatgagatagatctggccacagtggagtttgatgttcgtaacatgctgaaaat

SEQ ID NO: 113404 - DNA, 60 bp, Artificial
  Synthetic oligonucleotide
ccattggtaagagattggtatcaggtgacatcacccagtttgtgtatcggcagtttcgtg

SEQ ID NO: 113405 - DNA, 60 bp, Artificial
  Synthetic oligonucleotide
ttaaagagattttgaccattggtaagagattggtatcaggtgacatcacccagtttgtgt

SEQ ID NO: 113406 - DNA, 60 bp, Artificial
  Synthetic oligonucleotide
atcggcagtttcgtggaaaattggaagttggatacttcgggaagacggacaatgttcgtg

SEQ ID NO: 113407 - DNA, 60 bp, Artificial
  Synthetic oligonucleotide
cagtttgtgtatcggcagtttcgtggaaaattggaagttggatacttcgggaagacggac

SEQ ID NO: 113408 - DNA, 60 bp, Artificial
  Synthetic oligonucleotide
cccgtttgctacaggaacttatcgcgcgtatgaagagtgaccctggagccgtgccgcatc

SEQ ID NO: 113409 - DNA, 60 bp, Artificial
  Synthetic oligonucleotide
gctatttcaccacaatggacttgcagtcatctaaaaaggaattgtttattcaatgggatg

SEQ ID NO: 113410 - DNA, 60 bp, Artificial
  Synthetic oligonucleotide
gacccgttacttcaagccactcaagtgttctggaccatatgcaatatttgaacgtcttcc

SEQ ID NO: 113411 - DNA, 60 bp, Artificial
  Synthetic oligonucleotide
ttttaaccgttctcaaaatgtaccagcaaattgacttcaacgcagttgattacagtgtgc

SEQ ID NO: 113412 - DNA, 60 bp, Artificial
  Synthetic oligonucleotide
accgttctcaaaatgtaccagcaaattgacttcaacgcagttgattacagtgtgctctac

SEQ ID NO: 113413 - DNA, 60 bp, Artificial
  Synthetic oligonucleotide
tacagtgtgctctacaatgcaggagagcagttggttcaacaaaccgccattgttggacca

SEQ ID NO: 113414 - DNA, 60 bp, Artificial
  Synthetic oligonucleotide
cagtgtgctctacaatgcaggagagcagttggttcaacaaaccgccattgttggaccacc

SEQ ID NO: 113415 - DNA, 60 bp, Artificial
  Synthetic oligonucleotide
gatactctctgccgtttaaaagtgaaacaaccaagctctcaccctctgataagagcgtac

SEQ ID NO: 113416 - DNA, 60 bp, Artificial
  Synthetic oligonucleotide
tcgtacgaacaattttactttccttaaagactgttaccatagggtactacatgatattcc

SEQ ID NO: 113417 - DNA, 60 bp, Artificial
  Synthetic oligonucleotide
ctaactgtgtggataagtttcaaatgcattgggacatgatgttaagatctggtaacgctg

SEQ ID NO: 113418 - DNA, 60 bp, Artificial
  Synthetic oligonucleotide
ctattagcacgaatcgatactctctgccgtttaaaagtgaaacaaccaagctctcaccct

SEQ ID NO: 113419 - DNA, 60 bp, Artificial
  Synthetic oligonucleotide
ccagttaacgatctccttaatcgtgccatcgaactttgtgccttattacacttttcaggt

SEQ ID NO: 113420 - DNA, 60 bp, Artificial
  Synthetic oligonucleotide
gatcacatgtttaatgaaaacgtatgccttaagacaagtagagatagtgttcggagaaaa

SEQ ID NO: 113421 - DNA, 60 bp, Artificial
  Synthetic oligonucleotide
tactttccttaaagactgttaccatagggtactacatgatattccagttaacgatctcct

SEQ ID NO: 113422 - DNA, 60 bp, Artificial
  Synthetic oligonucleotide
atgatattccagttaacgatctccttaatcgtgccatcgaactttgtgccttattacact

SEQ ID NO: 113423 - DNA, 60 bp, Artificial
  Synthetic oligonucleotide
gaacttacgtcacctagccggtaggaaatatgatcatgacattaactctaactcttatcc

SEQ ID NO: 113424 - DNA, 60 bp, Artificial
  Synthetic oligonucleotide
ctctaactcttatccatacaaagtggatatgctcgaaattgatacaaaagccaaagacca

SEQ ID NO: 113425 - DNA, 60 bp, Artificial
  Synthetic oligonucleotide
gtcgttgaccccaaggtgtcgaaccacggtcattaaccaaagattcggaataacatcaaa

SEQ ID NO: 113426 - DNA, 60 bp, Artificial
  Synthetic oligonucleotide
gaccccaaggtgtcgaaccacggtcattaaccaaagattcggaataacatcaaaacaggg

SEQ ID NO: 113427 - DNA, 60 bp, Artificial
  Synthetic oligonucleotide
gtgaacgtatgaatactaatgaagtggtcggcattgcaaacaaggcatctaactgtgtgg

SEQ ID NO: 113428 - DNA, 60 bp, Artificial
  Synthetic oligonucleotide
gggattgtacgtcagacccaccgggtccaaggatctgtcaaagacagaagactgctgtcg

SEQ ID NO: 113429 - DNA, 60 bp, Artificial
  Synthetic oligonucleotide
aagacagaagactgctgtcgtcaagcctttgccttaaacaatgaacgcacaagatgccat

SEQ ID NO: 113430 - DNA, 60 bp, Artificial
  Synthetic oligonucleotide
cagaagactgctgtcgtcaagcctttgccttaaacaatgaacgcacaagatgccataaac

SEQ ID NO: 113431 - DNA, 60 bp, Artificial
  Synthetic oligonucleotide
ccgatctaagagctgaagttgaacgacttaccgctgaaaataatatgttacgttctcatg

SEQ ID NO: 113432 - DNA, 60 bp, Artificial
  Synthetic oligonucleotide
ctccgatctaagagctgaagttgaacgacttaccgctgaaaataatatgttacgttctca

SEQ ID NO: 113433 - DNA, 60 bp, Artificial
  Synthetic oligonucleotide
cggacttcaacaagagaatcactctctcaagaaggagatctccgatctaagagctgaagt

SEQ ID NO: 113434 - DNA, 60 bp, Artificial
  Synthetic oligonucleotide
aacgtagatctcggacttcaacaagagaatcactctctcaagaaggagatctccgatcta

SEQ ID NO: 113435 - DNA, 60 bp, Artificial
  Synthetic oligonucleotide
ggtggctggttcatcatccggattttcatctaacggctgtttgaacgtagatctcggact

SEQ ID NO: 113436 - DNA, 60 bp, Artificial
  Synthetic oligonucleotide
ctgttgaggtggctggttcatcatccggattttcatctaacggctgtttgaacgtagatc

SEQ ID NO: 113437 - DNA, 60 bp, Artificial
  Synthetic oligonucleotide
ctaccaactatgaagcaatttattccacaccgctaatgccttacgttgctgttccggccg

SEQ ID NO: 113438 - DNA, 60 bp, Artificial
  Synthetic oligonucleotide
tgttggaccacctaccaactatgaagcaatttattccacaccgctaatgccttacgttgc

SEQ ID NO: 113439 - DNA, 55 bp, Artificial
  Synthetic oligonucleotide
tcaagtcaggatgtgagtctcagaccgcatgctttaagtccgcgaataacccgac

SEQ ID NO: 113440 - DNA, 60 bp, Artificial
  Synthetic oligonucleotide
gggaactatgctataacatcatactaaagctttgcaatcaagtcaggatgtgagtctcag

SEQ ID NO: 113441 - DNA, 60 bp, Artificial
  Synthetic oligonucleotide
taacatcaaaacagggaactatgctataacatcatactaaagctttgcaatcaagtcagg

SEQ ID NO: 113442 - DNA, 60 bp, Artificial
  Synthetic oligonucleotide
gcaaacaaggcatctaactgtgtggataagtttcaaatgcattgggacatgatgttaaga

SEQ ID NO: 113443 - DNA, 60 bp, Artificial
  Synthetic oligonucleotide
gctaagaacttacgtcacctagccggtaggaaatatgatcatgacattaactctaactct

SEQ ID NO: 113444 - DNA, 60 bp, Artificial
  Synthetic oligonucleotide
attatacacctaatgagccatctctcggttaacgttacaggaactaatctggcaagatac

SEQ ID NO: 113445 - DNA, 60 bp, Artificial
  Synthetic oligonucleotide
ccaaagaccatatttatggtaaacatgatattgatattaacgatttgacgattatacacc

SEQ ID NO: 113446 - DNA, 60 bp, Artificial
  Synthetic oligonucleotide
ggtgacgagacccgttacttcaagccactcaagtgttctggaccatatgcaatatttgaa

SEQ ID NO: 113447 - DNA, 60 bp, Artificial
  Synthetic oligonucleotide
gagccatctctcggttaacgttacaggaactaatctggcaagataccacgtcggtaactc

SEQ ID NO: 113448 - DNA, 60 bp, Artificial
  Synthetic oligonucleotide
aatatttgaacgtcttccatgtgaaaaggactaccgtgtcaacgggctccttcatcactt

SEQ ID NO: 113449 - DNA, 60 bp, Artificial
  Synthetic oligonucleotide
gaaaacgtatgccttaagacaagtagagatagtgttcggagaaaagggattgtacgtcag

SEQ ID NO: 113450 - DNA, 60 bp, Artificial
  Synthetic oligonucleotide
ttcatcactttggagtcgttccgattacattagtccgtgacatagccgagattgagccca

SEQ ID NO: 113451 - DNA, 60 bp, Artificial
  Synthetic oligonucleotide
cttccatgtgaaaaggactaccgtgtcaacgggctccttcatcactttggagtcgttccg

SEQ ID NO: 113452 - DNA, 60 bp, Artificial
  Synthetic oligonucleotide
attgagcccattatggaggactacttcattagtggcccagtcggaccgtcgatcacatgt

SEQ ID NO: 113453 - DNA, 60 bp, Artificial
  Synthetic oligonucleotide
ggagtcgttccgattacattagtccgtgacatagccgagattgagcccattatggaggac

SEQ ID NO: 113454 - DNA, 60 bp, Artificial
  Synthetic oligonucleotide
tcggagaaaagggattgtacgtcagacccaccgggtccaaggatctgtcaaagacagaag

SEQ ID NO: 113455 - DNA, 59 bp, Artificial
  Synthetic oligonucleotide
aagatgccataaacaacttaaaccagacaaacgtactaagaaatctacctccaaggata

SEQ ID NO: 113456 - DNA, 60 bp, Artificial
  Synthetic oligonucleotide
gagcccattatggaggactacttcattagtggcccagtcggaccgtcgatcacatgttta

SEQ ID NO: 113457 - DNA, 60 bp, Artificial
  Synthetic oligonucleotide
caacggaagcgctcatacaaaagctgtcaactttatgactagcttttgatcattacgacc

SEQ ID NO: 113458 - DNA, 60 bp, Artificial
  Synthetic oligonucleotide
tgaaatttcatacttagttatggtcatcggaccaccaagtggttttatggatacgccaat

SEQ ID NO: 113459 - DNA, 60 bp, Artificial
  Synthetic oligonucleotide
ggtcatcggaccaccaagtggttttatggatacgccaaacgtatcgtcagctcagtcatc

SEQ ID NO: 113460 - DNA, 60 bp, Artificial
  Synthetic oligonucleotide
ccggatcatatcaagtatgggacccgaaatttcatacttagttatggtcatcggaccacc

SEQ ID NO: 113461 - DNA, 60 bp, Artificial
  Synthetic oligonucleotide
gaagaaaaacagtggaaaagtagtgatcacattcatttacatgtctgacactaacgagga

SEQ ID NO: 113462 - DNA, 55 bp, Artificial
  Synthetic oligonucleotide
gacgtggtacaaaccctcgagaacgttgttcttgatggtgccatgcaaaattaag

SEQ ID NO: 113463 - DNA, 60 bp, Artificial
  Synthetic oligonucleotide
tccattcgctttgctcgaaatgagactgcggtcgcgtgggggcgcggctaatcgtatcgt

SEQ ID NO: 113464 - DNA, 60 bp, Artificial
  Synthetic oligonucleotide
gaggtatggtgatactctgatggagtataccgaaaccataccgagacctgaatgtggttt

SEQ ID NO: 113465 - DNA, 60 bp, Artificial
  Synthetic oligonucleotide
cttgtgtgttcgcaacgcaacccaaaagtttggttcttcgtatcagatgcacaggttgga

SEQ ID NO: 113466 - DNA, 60 bp, Artificial
  Synthetic oligonucleotide
gacatgtgcacaaatcttgtgtgttcgcaacgcaacccaaaagtttggttcttcgtatca

SEQ ID NO: 113467 - DNA, 60 bp, Artificial
  Synthetic oligonucleotide
gaataacgataaacctggcaagttaactcacattgaggctgcgattttggacatgtgcac

SEQ ID NO: 113468 - DNA, 60 bp, Artificial
  Synthetic oligonucleotide
ggaataacgataaacctggcaagttaactcacattgaggctgcgattttggacatgtgca

SEQ ID NO: 113469 - DNA, 60 bp, Artificial
  Synthetic oligonucleotide
cggcgcctttcccattataggtgacgagtacgacagtaacaagcaggatatggtcggctc

SEQ ID NO: 113470 - DNA, 60 bp, Artificial
  Synthetic oligonucleotide
gaaatactacggcgcctttcccattataggtgacgagtacgacagtaacaagcaggatat

SEQ ID NO: 113471 - DNA, 60 bp, Artificial
  Synthetic oligonucleotide
gccatctttaggacagtcattaaagctttgttatacaagaaatactacggcgcctttccc

SEQ ID NO: 113472 - DNA, 60 bp, Artificial
  Synthetic oligonucleotide
gcaggtgcaaatgccatctttaggacagtcattaaagctttgttatacaagaaatactac

SEQ ID NO: 113473 - DNA, 60 bp, Artificial
  Synthetic oligonucleotide
gacaagttttggggtttgattgatatgggaggtcattgtaatgcaggtgcaaatgccatc

SEQ ID NO: 113474 - DNA, 60 bp, Artificial
  Synthetic oligonucleotide
agtggaacgacaagttttggggtttgattgatatgggaggtcattgtaatgcaggtgcaa

SEQ ID NO: 113475 - DNA, 60 bp, Artificial
  Synthetic oligonucleotide
gcgcctgaccaacctgcgaattaccgcaacagcgggatcattgatctgtatgatgaggct

SEQ ID NO: 113476 - DNA, 60 bp, Artificial
  Synthetic oligonucleotide
tgatctgtatgatgaggctaaagactttttggactcaagcgcaacacctcagtggaacga

SEQ ID NO: 113477 - DNA, 60 bp, Artificial
  Synthetic oligonucleotide
gatggcttgagaaaggcgagcctttaatggcgcatgacgtggtacaaaccctcgagaacg

SEQ ID NO: 113478 - DNA, 60 bp, Artificial
  Synthetic oligonucleotide
atcgtatcgttagtagatggcttgagaaaggcgagcctttaatggcgcatgacgtggtac

SEQ ID NO: 113479 - DNA, 55 bp, Artificial
  Synthetic oligonucleotide
ttgtcgcaatggatgaggatcaatactatgaccaacttgaattgcgcgcgaatga

SEQ ID NO: 113480 - DNA, 60 bp, Artificial
  Synthetic oligonucleotide
aagtggctcaagtcttacaatgtgtacaaaacgccgaaactgatcatcaagtataccagc

SEQ ID NO: 113481 - DNA, 60 bp, Artificial
  Synthetic oligonucleotide
cttacaatgtgtacaaaacgccgaaactgatcatcaagtataccagcttgcgacgagtcc

SEQ ID NO: 113482 - DNA, 60 bp, Artificial
  Synthetic oligonucleotide
cttcgtatcagatgcacaggttggaaggttcatgcttgattttcaaaaacacatggaagt

SEQ ID NO: 113483 - DNA, 51 bp, Artificial
  Synthetic oligonucleotide
cttcactggccccattcctctcagagagaggaactatggacaaaacgaagg

SEQ ID NO: 113484 - DNA, 60 bp, Artificial
  Synthetic oligonucleotide
cccagtggaaggtggcttgtacgtaaagacctatgccccggagttcaagcatccagagaa

SEQ ID NO: 113485 - DNA, 60 bp, Artificial
  Synthetic oligonucleotide
acaccctcatggatcctaccacagactatcaccgcgttggtgcaagtcgtgtaaagaggt

SEQ ID NO: 113486 - DNA, 60 bp, Artificial
  Synthetic oligonucleotide
gtataccagcttgcgacgagtcctaaccaactttacttcaaaactagagttgcagttaag

SEQ ID NO: 113487 - DNA, 59 bp, Artificial
  Synthetic oligonucleotide
gtataccagcttgcgacgagtcctaaccaactttacttcaaaactagagttgcagttaa

SEQ ID NO: 113488 - DNA, 60 bp, Artificial
  Synthetic oligonucleotide
tgacgctgacaaaaacagagtagctcttgaagctaacataaatgcccaagttgtcgcaat

SEQ ID NO: 113489 - DNA, 60 bp, Artificial
  Synthetic oligonucleotide
cagagtagctcttgaagctaacataaatgcccaagttgtcgcaatggatgaggatcaata

SEQ ID NO: 113490 - DNA, 60 bp, Artificial
  Synthetic oligonucleotide
cctcatggatcctaccacagactatcaccgcgttggtgcaagtcgtgtaaagaggtatgg

SEQ ID NO: 113491 - DNA, 60 bp, Artificial
  Synthetic oligonucleotide
gtaaagaggtatggtgatactctgatggagtataccgaaaccataccgagacctgaatgt

SEQ ID NO: 113492 - DNA, 60 bp, Artificial
  Synthetic oligonucleotide
gtggaaaagtagtgatcacattcatttacatgtctgacactaacgaggagaatagggacg

SEQ ID NO: 113493 - DNA, 60 bp, Artificial
  Synthetic oligonucleotide
ctaacgaggagaatagggacgaaccgactgttgtgatcgttggtcctaatgacgcacaaa

SEQ ID NO: 113494 - DNA, 60 bp, Artificial
  Synthetic oligonucleotide
cgaggagaatagggacgaaccgactgttgtgatcgttggtcctaatgacgcacaaacaga

SEQ ID NO: 113495 - DNA, 60 bp, Artificial
  Synthetic oligonucleotide
gacgcacaaacagaaacaaccgattcgaccgttaatgtggaaacatccagtgacgctgac

SEQ ID NO: 113496 - DNA, 60 bp, Artificial
  Synthetic oligonucleotide
atctatgaagcgcctgaccaacctgcgaattaccgcaacagcgggatcattgatctgtat

SEQ ID NO: 113497 - DNA, 60 bp, Artificial
  Synthetic oligonucleotide
ccaggtacgaggagagagagcaaacgctgttcggctgtttggagagatttccgaacaaat

SEQ ID NO: 113498 - DNA, 60 bp, Artificial
  Synthetic oligonucleotide
gctcacgcacaaacgcagataaattagtggctttagctttgcgagcacttttagatagac

SEQ ID NO: 113499 - DNA, 60 bp, Artificial
  Synthetic oligonucleotide
gctcacgcacaaatgcagataaactagtggctttagctttgcgagcacttttagatagac

SEQ ID NO: 113500 - DNA, 60 bp, Artificial
  Synthetic oligonucleotide
gctgtatgatgtctatctccagagcgggacgagagaggaatttgaaggatttagacagag

SEQ ID NO: 113501 - DNA, 60 bp, Artificial
  Synthetic oligonucleotide
gcgagcacttttagatagacaaactatttggacttgtgtcatcaaaaatgcggattacgt

SEQ ID NO: 113502 - DNA, 60 bp, Artificial
  Synthetic oligonucleotide
taaatggaatatgtgcaagacaacactttaaagaatgctgtaatattgctacagataatg

SEQ ID NO: 113503 - DNA, 60 bp, Artificial
  Synthetic oligonucleotide
cgaacaaatagattgctcacatctcaaacgagattgctttgtaaatggaatatgtgcaag

SEQ ID NO: 113504 - DNA, 60 bp, Artificial
  Synthetic oligonucleotide
caagacaacactttaaagaatgctgtaatattgctacagataatggctcacgcacaaacg

SEQ ID NO: 113505 - DNA, 60 bp, Artificial
  Synthetic oligonucleotide
gtgcaagacaacactttaaagaatgctgtaatattgctacagataatggctcacgcacaa

SEQ ID NO: 113506 - DNA, 60 bp, Artificial
  Synthetic oligonucleotide
tctccagagcgggacgagagaggaatttgaaggatttagacagaggaatagaccgagtag

SEQ ID NO: 113507 - DNA, 60 bp, Artificial
  Synthetic oligonucleotide
tctccagagcgggacgagagaggaatttgaaggatttagacagaggaatagaccaagtag

SEQ ID NO: 113508 - DNA, 60 bp, Artificial
  Synthetic oligonucleotide
cagaagtgtcatacaacgaaggaagcgattactgtaactgcaattcagatccagaggtcg

SEQ ID NO: 113509 - DNA, 60 bp, Artificial
  Synthetic oligonucleotide
cagaagtgtcatacaacgaaggaagcgattactgtaactgcaattcagattcagaggtcg

SEQ ID NO: 113510 - DNA, 60 bp, Artificial
  Synthetic oligonucleotide
tcattgggtgattcagaagtgtcatacaacgaaggaagcgattactgtaactgcaattca

SEQ ID NO: 113511 - DNA, 58 bp, Artificial
  Synthetic oligonucleotide
tgtacatgcggacaatcacaaagtgccaaatgtcagagatttgatgatgaatgaagtc

SEQ ID NO: 113512 - DNA, 59 bp, Artificial
  Synthetic oligonucleotide
aacaggaggcacagatgtactttatacacgtgcgtatgtacatgcggacaatcacaaag

SEQ ID NO: 113513 - DNA, 60 bp, Artificial
  Synthetic oligonucleotide
aacaggaggcacagatgtactttatacacgtgcgtatgtacatgcggacaatcacaaagt

SEQ ID NO: 113514 - DNA, 60 bp, Artificial
  Synthetic oligonucleotide
ggacaattcctttacatctgatgcggacagcaaggttgggacatctgcaaccggaatcaa

SEQ ID NO: 113515 - DNA, 60 bp, Artificial
  Synthetic oligonucleotide
tggacaattcctttacatctgatgcggacagcaaggttgggacatctgcaaccggaatca

SEQ ID NO: 113516 - DNA, 60 bp, Artificial
  Synthetic oligonucleotide
ctgcaattcagattcagaggtcgatcagaggtgatgggcagtgggatactccgatgtttc

SEQ ID NO: 113517 - DNA, 60 bp, Artificial
  Synthetic oligonucleotide
ctgcaattcagatccagaggtcgatcagaggtgatgggcagtgggatactccgatgtttc

SEQ ID NO: 113518 - DNA, 60 bp, Artificial
  Synthetic oligonucleotide
gaatcaagggaatccagctccagttgccaagcttagccgatggggtcaatttggaatttg

SEQ ID NO: 113519 - DNA, 60 bp, Artificial
  Synthetic oligonucleotide
gaatcaagggaatccagctccagttgcgaagcttagccgatggggtcaatttggaatttg

SEQ ID NO: 113520 - DNA, 59 bp, Artificial
  Synthetic oligonucleotide
ttagacagaggaatagaccgagtagagttgtgatggatgatagctgctcaatgctctca

SEQ ID NO: 113521 - DNA, 59 bp, Artificial
  Synthetic oligonucleotide
ttagacagaggaatagaccaagtagagttgtgatggatgatagctgctcaatgctctca

SEQ ID NO: 113522 - DNA, 60 bp, Artificial
  Synthetic oligonucleotide
atagacggcctaaaggatctgattgaagggcgattgcccgtttgcccttatactggagcg

SEQ ID NO: 113523 - DNA, 60 bp, Artificial
  Synthetic oligonucleotide
atagatggtttaaaggatctgatcgaagggcgattgcccgtttgcccttatactggagcg

SEQ ID NO: 113524 - DNA, 60 bp, Artificial
  Synthetic oligonucleotide
caagggaatccagctccagttgccaagcttagccgatggggtcaatttggaatttgttac

SEQ ID NO: 113525 - DNA, 60 bp, Artificial
  Synthetic oligonucleotide
caagggaatccagctccagttgcgaagcttagccgatggggtcaatttggaatttgttac

SEQ ID NO: 113526 - DNA, 60 bp, Artificial
  Synthetic oligonucleotide
gttaaagaacctaggcggtttggcaacacacaaacatggataggttcttgacttatttcc

SEQ ID NO: 113527 - DNA, 60 bp, Artificial
  Synthetic oligonucleotide
gtatcgtgaagtatcgcttccttaacgatggatctttagattggaggacttggacaattc

SEQ ID NO: 113528 - DNA, 60 bp, Artificial
  Synthetic oligonucleotide
gcttccttaacgatggatctttagattggaggacttggacaattcctttacatctgatgc

SEQ ID NO: 113529 - DNA, 60 bp, Artificial
  Synthetic oligonucleotide
tcaatggctctgttaacacgattgattgtttattggttaacggatgtgacagagagaagc

SEQ ID NO: 113530 - DNA, 60 bp, Artificial
  Synthetic oligonucleotide
agagatttccgaacaaatagattgctcacatctcaaacgagattgctttgtaaatggaat

SEQ ID NO: 113531 - DNA, 60 bp, Artificial
  Synthetic oligonucleotide
gttaacggatgtgacagagagaagcgctatctttcggctgacttgtttcgcaatcttcgg

SEQ ID NO: 113532 - DNA, 60 bp, Artificial
  Synthetic oligonucleotide
agagagaagcgctatctttcggctgacttgtttcgcaatcttcggatgtaagccaacagc

SEQ ID NO: 113533 - DNA, 60 bp, Artificial
  Synthetic oligonucleotide
ccagaggtcgatcagaggtgatgggcagtgggatactccgatgtttcaccaatcaatggc

SEQ ID NO: 113534 - DNA, 60 bp, Artificial
  Synthetic oligonucleotide
agaggtcgatcagaggtgatgggcagtgggatactccgatgtttcaccaatcaatggctc

SEQ ID NO: 113535 - DNA, 60 bp, Artificial
  Synthetic oligonucleotide
ccgatgtttcaccaatcaatggctctgttaacacgattgattgtttattggttaacggat

SEQ ID NO: 113536 - DNA, 60 bp, Artificial
  Synthetic oligonucleotide
ccaatcaatggctctgttaacacgattgattgtttattggttaacggatgtgactgagag

SEQ ID NO: 113537 - DNA, 60 bp, Artificial
  Synthetic oligonucleotide
gttaacggatgtgactgagagaagtgctatctttcggctgacttgtttcgcaatcttcgg

SEQ ID NO: 113538 - DNA, 60 bp, Artificial
  Synthetic oligonucleotide
gttaaagaacctaggcggtttggcaacacacaaacatggataagttcttgacttatttcc

SEQ ID NO: 113539 - DNA, 60 bp, Artificial
  Synthetic oligonucleotide
tgagagaagtgctatctttcggctgacttgtttcgcaatcttcggatgtaagccaacggc

SEQ ID NO: 113540 - DNA, 60 bp, Artificial
  Synthetic oligonucleotide
gcggtttggcaacacacaaacatggataagttcttgacttatttccaggtacgaggagag

SEQ ID NO: 113541 - DNA, 60 bp, Artificial
  Synthetic oligonucleotide
gcggtttggcaacacacaaacatggataggttcttgacttatttccaggtacgaggagag

SEQ ID NO: 113542 - DNA, 60 bp, Artificial
  Synthetic oligonucleotide
acttatttccaggtacgaggagagagagcaaacgctgttcggctgtttggagagatttcc

SEQ ID NO: 113543 - DNA, 60 bp, Artificial
  Synthetic oligonucleotide
gttaagcaacctaagtgtgtacgcgttttctgtggttggaagagtggtgtatcgtcattt

SEQ ID NO: 113544 - DNA, 60 bp, Artificial
  Synthetic oligonucleotide
caatgaattacagtagaccaaatgcaatttcagcattaagtgcatcaggattcaggggtt

SEQ ID NO: 113545 - DNA, 60 bp, Artificial
  Synthetic oligonucleotide
tgtaagacatgtcaacaatgaattacagtagaccaaatgcaatttcagcattaagtgcat

SEQ ID NO: 113546 - DNA, 60 bp, Artificial
  Synthetic oligonucleotide
caggattcaggggttatgtgcctgacaactctgtcagttcggcactgatcccacgtcttg

SEQ ID NO: 113547 - DNA, 60 bp, Artificial
  Synthetic oligonucleotide
ttaagtgcatcaggattcaggggttatgtgcctgacaactctgtcagttcggcactgatc

SEQ ID NO: 113548 - DNA, 60 bp, Artificial
  Synthetic oligonucleotide
atggtaagcttgattctgatggctttggtgatacaatcatatctggaggaagaatagtgg

SEQ ID NO: 113549 - DNA, 60 bp, Artificial
  Synthetic oligonucleotide
gcactgatcccacgtcttgttgtcaccaatgaacgtgagcacgtcttggctggacggctc

SEQ ID NO: 113550 - DNA, 60 bp, Artificial
  Synthetic oligonucleotide
ggcactgatcccacgtcttgttgtcaccaatgaacgtgagcacgtcttggctggacggct

SEQ ID NO: 113551 - DNA, 60 bp, Artificial
  Synthetic oligonucleotide
attaggaatgcgggtagagaaacctgaagtggataacgcgtttagtaaccatttgcatga

SEQ ID NO: 113552 - DNA, 60 bp, Artificial
  Synthetic oligonucleotide
ggctcgacagcacatcaatcgtcggttatttcgaagaatattttgaattaggaatgcggg

SEQ ID NO: 113553 - DNA, 60 bp, Artificial
  Synthetic oligonucleotide
gttgatgtacgtggccaggttgtaagttcaagttcattagatgcattaccaacacagcca

SEQ ID NO: 113554 - DNA, 60 bp, Artificial
  Synthetic oligonucleotide
gccaggttgtaagttcaagttcattagatgcattaccaacacagccagtcgatttggtgg

SEQ ID NO: 113555 - DNA, 54 bp, Artificial
  Synthetic oligonucleotide
gatactcattgtatctataaactgcatccaactaacggatcagttgggctaatc

SEQ ID NO: 113556 - DNA, 60 bp, Artificial
  Synthetic oligonucleotide
ggagctggttcttcagttcatatggtacctgagggttttattactttagaaacgacaccg

SEQ ID NO: 113557 - DNA, 60 bp, Artificial
  Synthetic oligonucleotide
aacgacaccgactataattgaattaacaccagtcatgaagataggagcttatagtgtata

SEQ ID NO: 113558 - DNA, 60 bp, Artificial
  Synthetic oligonucleotide
cgacaccgactataattgaattaacaccagtcatgaagataggagcttatagtgtatatg

SEQ ID NO: 113559 - DNA, 60 bp, Artificial
  Synthetic oligonucleotide
atagtgtatatgaacatttgtttggcccattcgtaaataccggtacttacacctataatc

SEQ ID NO: 113560 - DNA, 60 bp, Artificial
  Synthetic oligonucleotide
gcgggtagagaaacctgaagtggataacgcgtttagtaaccatttgcatgatttgacggt

SEQ ID NO: 113561 - DNA, 52 bp, Artificial
  Synthetic oligonucleotide
atttgcatgatttgacggttgatacatcatatatagattggcacaagtatga

SEQ ID NO: 113562 - DNA, 60 bp, Artificial
  Synthetic oligonucleotide
cacacaatgaacgcaaatccgttttaatcaacgaagttaacgagacactgggagctggtt

SEQ ID NO: 113563 - DNA, 60 bp, Artificial
  Synthetic oligonucleotide
atgacttaatgggaaactaataagctagctttgaatgtttggcgtaatacattgtttaca

SEQ ID NO: 113564 - DNA, 53 bp, Artificial
  Synthetic oligonucleotide
tgctgatggtgttggagttgttcctgtttttggaccatctattgctaacggtg

SEQ ID NO: 113565 - DNA, 60 bp, Artificial
  Synthetic oligonucleotide
cacatctgaagctgtcaaagcatcaggtatacttaacgatttgaatgaaacttttaaagc

SEQ ID NO: 113566 - DNA, 60 bp, Artificial
  Synthetic oligonucleotide
agattgtagatagtgaacgagagaaagagatgactgtactcctaggtgcagtaaacgata

SEQ ID NO: 113567 - DNA, 60 bp, Artificial
  Synthetic oligonucleotide
gtgaacgagagaaagagatgactgtactcctaggtgcagtaaacgataattctcaagcca

SEQ ID NO: 113568 - DNA, 60 bp, Artificial
  Synthetic oligonucleotide
gtttgacaacgctacggaccgagcattacatgacttttcaactcagattaagattgtaga

SEQ ID NO: 113569 - DNA, 60 bp, Artificial
  Synthetic oligonucleotide
cgctacggaccgagcattacatgacttttcaactcagattaagattgtagatagtgaacg

SEQ ID NO: 113570 - DNA, 60 bp, Artificial
  Synthetic oligonucleotide
gttaaaagtgattatgaatcattagctaacaatttcgaagaacagattaagtttgacaac

SEQ ID NO: 113571 - DNA, 60 bp, Artificial
  Synthetic oligonucleotide
gaatcattagctaacaatttcgaagaacagattaagtttgacaacgctacggaccgagca

SEQ ID NO: 113572 - DNA, 60 bp, Artificial
  Synthetic oligonucleotide
aaccaataacgcagtcgatttagctgcgaaattgaaagttatgatcgattcagcgcgtcg

SEQ ID NO: 113573 - DNA, 60 bp, Artificial
  Synthetic oligonucleotide
cgcagtcgatttagctgcgaaattgaaagttatgatcgattcagcgcgtcgtaagaatga

SEQ ID NO: 113574 - DNA, 60 bp, Artificial
  Synthetic oligonucleotide
gtgtggttgttaagtcaacggtagagtggcctagagttattgatgcctatgatactcatt

SEQ ID NO: 113575 - DNA, 60 bp, Artificial
  Synthetic oligonucleotide
actaataagctagctttgaatgtttggcgtaatacattgtttacagaaatcggggtcacg

SEQ ID NO: 113576 - DNA, 60 bp, Artificial
  Synthetic oligonucleotide
ccagtcgatttggtggtcggtactaaaggctcgatgagcacaatacctggttctagcggc

SEQ ID NO: 113577 - DNA, 60 bp, Artificial
  Synthetic oligonucleotide
aacacagccagtcgatttggtggtcggtactaaaggctcgatgagcacaatacctggttc

SEQ ID NO: 113578 - DNA, 60 bp, Artificial
  Synthetic oligonucleotide
cctggttctagcggcttactggtggatagaaggctattacgtatttatgttaagcaacct

SEQ ID NO: 113579 - DNA, 60 bp, Artificial
  Synthetic oligonucleotide
tacctggttctagcggcttactggtggatagaaggctattacgtatttatgttaagcaac

SEQ ID NO: 113580 - DNA, 60 bp, Artificial
  Synthetic oligonucleotide
gcaacctaagtgtgtacgcgttttctgtggttggaagagtggtgtatcgtcatttagatt

SEQ ID NO: 113581 - DNA, 60 bp, Artificial
  Synthetic oligonucleotide
tgcaaagggtaattacaacaatcctatcgattaatcactgattaacgaatattatgcatt

SEQ ID NO: 113582 - DNA, 60 bp, Artificial
  Synthetic oligonucleotide
ttctcctaagacgatggaggaacagaaagcattcagtcatgaatttagcaggctacatag

SEQ ID NO: 113583 - DNA, 60 bp, Artificial
  Synthetic oligonucleotide
atcgtcatttagattttctcctaagacgatggaggaacagaaagcattcagtcatgaatt

SEQ ID NO: 113584 - DNA, 50 bp, Artificial
  Synthetic oligonucleotide
tacataggttcttagatcctaatgcagctttagccattactgaagggtcc

SEQ ID NO: 113585 - DNA, 60 bp, Artificial
  Synthetic oligonucleotide
gtcatgaatttagcaggctacataggttcttagatcctaatgcagctttagccattactg

SEQ ID NO: 113586 - DNA, 60 bp, Artificial
  Synthetic oligonucleotide
gtggttgttaagtcaacggtagagtggcctagagttattgatgcctatgatactcattgt

SEQ ID NO: 113587 - DNA, 60 bp, Artificial
  Synthetic oligonucleotide
cgcaaatccgttttaatcaacgaagttaacgagacactgggagctggttcttcagttcat

SEQ ID NO: 113588 - DNA, 60 bp, Artificial
  Synthetic oligonucleotide
aacaggctcgacagcacatcaatcgtcggttatttcgaagaatattttgaattaggaatg

SEQ ID NO: 113589 - DNA, 60 bp, Artificial
  Synthetic oligonucleotide
gcaggtgctaaacgtgttgttgatttccatctatcagtagatgctgcacatagcttagct

SEQ ID NO: 113590 - DNA, 60 bp, Artificial
  Synthetic oligonucleotide
agaatagtgggtattgcaggtgctaaacgtgttgttgatttccatctatcagtagatgct

SEQ ID NO: 113591 - DNA, 60 bp, Artificial
  Synthetic oligonucleotide
ctgatggctttggtgatacaatcatatctggaggaagaatagtgggtattgcaggtgcta

SEQ ID NO: 113592 - DNA, 60 bp, Artificial
  Synthetic oligonucleotide
ttccaccggcgaagtgtggctgggcgctttaatgattcatgatcccaagacgcgacagtt

SEQ ID NO: 113593 - DNA, 60 bp, Artificial
  Synthetic oligonucleotide
ggcaccaacggagaaagtggatattccgcagatgtctgcccctataccaggccgaccaca

SEQ ID NO: 113594 - DNA, 60 bp, Artificial
  Synthetic oligonucleotide
ggttggcactatcatgccagacggatcggtgctttataattctgggtgtgatgacgtcgc

SEQ ID NO: 113595 - DNA, 60 bp, Artificial
  Synthetic oligonucleotide
cctataccaggccgaccacaagtttctggatggtatccccccctggcaaaggttggcact

SEQ ID NO: 113596 - DNA, 58 bp, Artificial
  Synthetic oligonucleotide
attgatgcacgcccttggttatacaacgaacttcggtcggtttgtcgtcgctatggac

SEQ ID NO: 113597 - DNA, 60 bp, Artificial
  Synthetic oligonucleotide
gcctttcggtcggcgttgttggctcgtgcgaaccccagattgatgcacgcccttggttat

SEQ ID NO: 113598 - DNA, 60 bp, Artificial
  Synthetic oligonucleotide
gccgctgcagaagatgggaacccagccgaggccttctatcgtgaagtatcgacgtggcaa

SEQ ID NO: 113599 - DNA, 60 bp, Artificial
  Synthetic oligonucleotide
ggtgtgcttgcccgggccgctgcagaagatgggaacccagccgaggccttctatcgtgaa

SEQ ID NO: 113600 - DNA, 60 bp, Artificial
  Synthetic oligonucleotide
atgtctttgagtttgtggatggcgagcgatggactcttgaaatttgttcatatcgagatc

SEQ ID NO: 113601 - DNA, 60 bp, Artificial
  Synthetic oligonucleotide
ctatcgtgaagtatcgacgtggcaacctgatgaaaaagcgaaagtgatgcagcttgttac

SEQ ID NO: 113602 - DNA, 60 bp, Artificial
  Synthetic oligonucleotide
ctggactgaaatggactcgctgcgtgatgaagcgccccggacgggaccttactatcgata

SEQ ID NO: 113603 - DNA, 60 bp, Artificial
  Synthetic oligonucleotide
cccgttagaggacccacgtcatagtgaatgtgctctctggactgaaatggactcgctgcg

SEQ ID NO: 113604 - DNA, 60 bp, Artificial
  Synthetic oligonucleotide
gatctgtttggcggtggtcatgtgtgtccagaatgtcactctgtcttccagacggctggt

SEQ ID NO: 113605 - DNA, 60 bp, Artificial
  Synthetic oligonucleotide
ccgagcagcgatccctaaaggagtgatggctttgaataattgtgatctgtttggcggtgg

SEQ ID NO: 113606 - DNA, 60 bp, Artificial
  Synthetic oligonucleotide
tgaggttcctgaaaacgatgacgcattgaggctacttgaggaacttgcccgaagtcaatt

SEQ ID NO: 113607 - DNA, 60 bp, Artificial
  Synthetic oligonucleotide
tgtggattcgttatcccgttagaggacccacgtcatagtgaatgtgctctctggactgaa

SEQ ID NO: 113608 - DNA, 50 bp, Artificial
  Synthetic oligonucleotide
gttgcgcccatcgactacattaacggacctgtgaaaacgccgctctggga

SEQ ID NO: 113609 - DNA, 60 bp, Artificial
  Synthetic oligonucleotide
aaaacagttggagtttcttggcaatgcaacgctatacaatacaaggatgcttgaggcact

SEQ ID NO: 113610 - DNA, 60 bp, Artificial
  Synthetic oligonucleotide
gcactggttagcattcttgatccaaagaagtcaacaacgcaggatgttgcgcccatcgac

SEQ ID NO: 113611 - DNA, 60 bp, Artificial
  Synthetic oligonucleotide
tatcgagatcgagcctttcggtcggcgttgttggctcgtgcgaaccccagattgatgcac

SEQ ID NO: 113612 - DNA, 60 bp, Artificial
  Synthetic oligonucleotide
cgcgacagttcaagaagttgaaggacgttgcgcgtggccagaatgggggcgttagttatg

SEQ ID NO: 113613 - DNA, 60 bp, Artificial
  Synthetic oligonucleotide
gaagtcaagaaagtgcggcagttcatggtgcgatttccgttcggtaggatgtgtcctcac

SEQ ID NO: 113614 - DNA, 60 bp, Artificial
  Synthetic oligonucleotide
agcttgttacatggaagagacttgcaacgaactttggggtaaaggttgcaatgcgcgcgc

SEQ ID NO: 113615 - DNA, 60 bp, Artificial
  Synthetic oligonucleotide
atgacgtcgcctcctcagtagtgagtgagcctcctcacgagtgtaaccccgatgatggtg

SEQ ID NO: 113616 - DNA, 59 bp, Artificial
  Synthetic oligonucleotide
agtagtgagtgagcctcctcacgagtgtaaccccgatgatggtgggtctgtcaaggaca

SEQ ID NO: 113617 - DNA, 60 bp, Artificial
  Synthetic oligonucleotide
gatgatggtgggtctgtcaaggacagtaagctggagttagtatcagcaagtgaggttcct

SEQ ID NO: 113618 - DNA, 60 bp, Artificial
  Synthetic oligonucleotide
ttttcgcttactcctcagaggggctcgagcgttcccacgactatggctagaatgttacgt

SEQ ID NO: 113619 - DNA, 60 bp, Artificial
  Synthetic oligonucleotide
ctcagaggggctcgagcgttcccacgactatggctagaatgttacgtgatcggggagcac

SEQ ID NO: 113620 - DNA, 60 bp, Artificial
  Synthetic oligonucleotide
cgatgacgcattgaggctacttgaggaacttgcccgaagtcaattgccatcacgacagca

SEQ ID NO: 113621 - DNA, 60 bp, Artificial
  Synthetic oligonucleotide
gaagtcaattgccatcacgacagcaagttcacagcatgatcgtacctcagaggggtgctg

SEQ ID NO: 113622 - DNA, 60 bp, Artificial
  Synthetic oligonucleotide
cacgacagcaagttcacagcatgatcgtacctcagaggggtgctgctggaaaggtggtgg

SEQ ID NO: 113623 - DNA, 60 bp, Artificial
  Synthetic oligonucleotide
aggggtgctgctggaaaggtggtggttactccagattatatgaaagaggggtctaagatt

SEQ ID NO: 113624 - DNA, 60 bp, Artificial
  Synthetic oligonucleotide
gctggacctttgatggacgagcttgacttctactttgagcgtgagtggaggaacatacag

SEQ ID NO: 113625 - DNA, 60 bp, Artificial
  Synthetic oligonucleotide
ggacgagcttgacttctactttgagcgtgagtggaggaacatacaggggagagcattcca

SEQ ID NO: 113626 - DNA, 60 bp, Artificial
  Synthetic oligonucleotide
tgcgtcctgcagaaggtcgtccattatgtgttgagatggaatctcgaggcgctggacctt

SEQ ID NO: 113627 - DNA, 60 bp, Artificial
  Synthetic oligonucleotide
gtcctgatgatcttctcgaggccttgacagctttagggaaggggaccgccttttcgctta

SEQ ID NO: 113628 - DNA, 60 bp, Artificial
  Synthetic oligonucleotide
tcgaggccttgacagctttagggaaggggaccgccttttcgcttactcctcagaggggct

SEQ ID NO: 113629 - DNA, 60 bp, Artificial
  Synthetic oligonucleotide
gaacatacaggggagagcattccaaggtaaagtgccgaaatcgctgactcgtcctgatga

SEQ ID NO: 113630 - DNA, 60 bp, Artificial
  Synthetic oligonucleotide
gagcattccaaggtaaagtgccgaaatcgctgactcgtcctgatgatcttctcgaggcct

SEQ ID NO: 113631 - DNA, 60 bp, Artificial
  Synthetic oligonucleotide
gtgcacactcgaattggtcgttcgtgacgcgtccggaaacattgtcgactcttgctacgc

SEQ ID NO: 113632 - DNA, 60 bp, Artificial
  Synthetic oligonucleotide
tcaactccctgaagagtgcacactcgaattggtcgttcgtgacgcgtccggaaacattgt

SEQ ID NO: 113633 - DNA, 60 bp, Artificial
  Synthetic oligonucleotide
tcttgctacgctgagcttttccaactacgtgggaacgtcaaacatggggatagacaagcc

SEQ ID NO: 113634 - DNA, 60 bp, Artificial
  Synthetic oligonucleotide
gaaacattgtcgactcttgctacgctgagcttttccaactacgtgggaacgtcaaacatg

SEQ ID NO: 113635 - DNA, 60 bp, Artificial
  Synthetic oligonucleotide
gacaatttgtcctgaagactgagactgtgtctaacttctcgttgataatcaaccagctaa

SEQ ID NO: 113636 - DNA, 60 bp, Artificial
  Synthetic oligonucleotide
aacatgttcaccaacaaagctatccttgctgtttatcaactccctgaagagtgcacactc

SEQ ID NO: 113637 - DNA, 60 bp, Artificial
  Synthetic oligonucleotide
aaccagctaactctcaacatgttcaccaacaaagctatccttgctgtttatcaactccct

SEQ ID NO: 113638 - DNA, 60 bp, Artificial
  Synthetic oligonucleotide
gcaaccgtaccattcctacggtggacctggtgaggatcactatgtaccgatgggaaccat

SEQ ID NO: 113639 - DNA, 60 bp, Artificial
  Synthetic oligonucleotide
gccagacggatcggtgctttataattctgggtgtgatgacgtcgcctcctcagtagtgag

SEQ ID NO: 113640 - DNA, 60 bp, Artificial
  Synthetic oligonucleotide
cagcatgatcaggtatgttggagagcagggaacagatgacactcgtgcgttggtgattcg

SEQ ID NO: 113641 - DNA, 60 bp, Artificial
  Synthetic oligonucleotide
tggatggcgagcgatggactcttgaaatttgttcatatcgagatcgagcctttcggtcgg

SEQ ID NO: 113642 - DNA, 60 bp, Artificial
  Synthetic oligonucleotide
gcgttgacgccataagttacattcaaaatgatagaagtaatgacttgtgtatcgtttatg

SEQ ID NO: 113643 - DNA, 60 bp, Artificial
  Synthetic oligonucleotide
tgagattacaagcgatggatttaaactattcgcaaaatacagtgattctttcttatgtca

SEQ ID NO: 113644 - DNA, 60 bp, Artificial
  Synthetic oligonucleotide
tgggaattggatgtgatgccactgatacaacttcttggcttgatttagacgccggattac

SEQ ID NO: 113645 - DNA, 60 bp, Artificial
  Synthetic oligonucleotide
tagacaaaaatttactgggaattggatgtgatgccactgatacaacttcttggcttgatt

SEQ ID NO: 113646 - DNA, 60 bp, Artificial
  Synthetic oligonucleotide
atcttgggcttctgtttggaaagttgttaaaacagtcttacattttacttaccatatact

SEQ ID NO: 113647 - DNA, 50 bp, Artificial
  Synthetic oligonucleotide
gagcattcaccactaggttgagaaatcccgaatggtgagcaaatataccc

SEQ ID NO: 113648 - DNA, 60 bp, Artificial
  Synthetic oligonucleotide
gcgatggatttaaactattcgcaaaatacagtgattctttcttatgtcaacgactaatgg

SEQ ID NO: 113649 - DNA, 60 bp, Artificial
  Synthetic oligonucleotide
gacgccggattacctaccaatcacgcacttgatattcctgagattacaagcgatggattt

SEQ ID NO: 113650 - DNA, 60 bp, Artificial
  Synthetic oligonucleotide
tggcttgatttagacgccggattacctaccaatcacgcacttgatattcctgagattaca

SEQ ID NO: 113651 - DNA, 60 bp, Artificial
  Synthetic oligonucleotide
tacgcagaggtagacaatgtcccatctaatgatgtaatagaaagttcaagatcttgggct

SEQ ID NO: 113652 - DNA, 60 bp, Artificial
  Synthetic oligonucleotide
cgcagaggtagacaatgtcccatctaatgatgtaatagaaagttcaagatcttgggcttc

SEQ ID NO: 113653 - DNA, 60 bp, Artificial
  Synthetic oligonucleotide
ggcaggattggagatcattattatacaacaaattgttacactggagcggaggcgttggtt

SEQ ID NO: 113654 - DNA, 60 bp, Artificial
  Synthetic oligonucleotide
cggcaggattggagatcattattatacaacaaattgttacactggagcggaggcgttgat

SEQ ID NO: 113655 - DNA, 60 bp, Artificial
  Synthetic oligonucleotide
ggcaggattggagatcattattatacaacaaattgttacactggagcggaggcgttgatt

SEQ ID NO: 113656 - DNA, 60 bp, Artificial
  Synthetic oligonucleotide
tgacgcgccctcatgtacgaattgtggattggcgtatgaatcgagagtgtccgcgattag

SEQ ID NO: 113657 - DNA, 60 bp, Artificial
  Synthetic oligonucleotide
ggtcagcctcatgtacgaattgtggattggcgtatgaatcaagagtgtccgcgattagtt

SEQ ID NO: 113658 - DNA, 60 bp, Artificial
  Synthetic oligonucleotide
tgacgcgccctcatgtacgaattgtggattggcgtatgaatcaagagtgtccgcgattag

SEQ ID NO: 113659 - DNA, 60 bp, Artificial
  Synthetic oligonucleotide
gcctcatgtacgaattgtggattggcgtatgaatcaagagtgtccgcgattagttgttgc

SEQ ID NO: 113660 - DNA, 60 bp, Artificial
  Synthetic oligonucleotide
cagcagattggagaagctgcgtgaagcgagaagcaacgtttttaaggaggtggaagctgg

SEQ ID NO: 113661 - DNA, 56 bp, Artificial
  Synthetic oligonucleotide
tttgatgagtcatcgaaaaggtatgagttacagtgtgtgggtgcgtgtgagcgtgt

SEQ ID NO: 113662 - DNA, 60 bp, Artificial
  Synthetic oligonucleotide
gagaaggttgcaaagcagattaaattgaaggatgaacggttcatgagtctatcaagtgct

SEQ ID NO: 113663 - DNA, 60 bp, Artificial
  Synthetic oligonucleotide
aaggaatacattgagaaggttgcaaagcagattaaattgaaggatgaacggttcatgagt

SEQ ID NO: 113664 - DNA, 60 bp, Artificial
  Synthetic oligonucleotide
caagtgctatgcctcaagcgagcggtggatttgatcgtatgattgttacgaagaagctta

SEQ ID NO: 113665 - DNA, 60 bp, Artificial
  Synthetic oligonucleotide
gttcatgagtctatcaagtgctatgcctcaagcgagcggtggatttgatcgtatgattgt

SEQ ID NO: 113666 - DNA, 60 bp, Artificial
  Synthetic oligonucleotide
actggaatctagatgagaaagatgaagaggatagagatgagcgggaagatgaggagcagg

SEQ ID NO: 113667 - DNA, 60 bp, Artificial
  Synthetic oligonucleotide
tggaagctgggatcaactggaatctagatgagaaagatgaagaggatagagatgagcggg

SEQ ID NO: 113668 - DNA, 60 bp, Artificial
  Synthetic oligonucleotide
cgggaagatgaggagcaggtgaagaccctgagtgatgatgatgaacaaggtgaggatgcg

SEQ ID NO: 113669 - DNA, 60 bp, Artificial
  Synthetic oligonucleotide
gatgagcgggaagatgaggagcaggtgaagaccctgagtgatgatgatgaacaaggtgag

SEQ ID NO: 113670 - DNA, 60 bp, Artificial
  Synthetic oligonucleotide
tgttacgaagaagcttaaatggcagaatgtgccactatactgttttgatgagtcatcgaa

SEQ ID NO: 113671 - DNA, 60 bp, Artificial
  Synthetic oligonucleotide
gtatgattgttacgaagaagcttaaatggcagaatgtgccactatactgttttgatgagt

SEQ ID NO: 113672 - DNA, 60 bp, Artificial
  Synthetic oligonucleotide
cgtaaattacggttcgtcaagttacagtgattcaaatagccatttaaccatattcggtac

SEQ ID NO: 113673 - DNA, 60 bp, Artificial
  Synthetic oligonucleotide
ttcaatacctacatgaaaaagcatttaaccagttgttacagccaattagtattgtatttc

SEQ ID NO: 113674 - DNA, 54 bp, Artificial
  Synthetic oligonucleotide
aatgtttgatctaatgcaaacgatatcacctaatcttaatttaaaacctaacgt

SEQ ID NO: 113675 - DNA, 60 bp, Artificial
  Synthetic oligonucleotide
attgtatttctaggtgcaaagaatgaacccgtagcagatatgatttacaggttaactcat

SEQ ID NO: 113676 - DNA, 60 bp, Artificial
  Synthetic oligonucleotide
caattgaaagtattccaacaagttatcaagaatttgactcttactatcaatcaagattcg

SEQ ID NO: 113677 - DNA, 60 bp, Artificial
  Synthetic oligonucleotide
catttatttatatttgcaattatttggtagtttaccgtttgacagtggttcaattgaaag

SEQ ID NO: 113678 - DNA, 60 bp, Artificial
  Synthetic oligonucleotide
ggcacaaatagacttgaacgacgcggatattatctaacggtttacagtccattttatgaa

SEQ ID NO: 113679 - DNA, 60 bp, Artificial
  Synthetic oligonucleotide
tgacagcttacgatattggatgtcgcgactacgaatgcgcttacatgacggtcatggatg

SEQ ID NO: 113680 - DNA, 60 bp, Artificial
  Synthetic oligonucleotide
gttacatcaagacaaaggtacattagatattactttgacagcttacgatattggatgtcg

SEQ ID NO: 113681 - DNA, 60 bp, Artificial
  Synthetic oligonucleotide
gcggacaaatcacagatataaggaagaatcaattaatcccaacctcaaaattcaaacaca

SEQ ID NO: 113682 - DNA, 51 bp, Artificial
  Synthetic oligonucleotide
agtatcctctgataaattagaattcactactcctaattcatcttcatttaa

SEQ ID NO: 113683 - DNA, 60 bp, Artificial
  Synthetic oligonucleotide
tattttggacaacttatagcgtaaatacttcacctaaattttcagtaaacgcccaaggcg

SEQ ID NO: 113684 - DNA, 60 bp, Artificial
  Synthetic oligonucleotide
gagcagctgatttcttattttggacaacttatagcgtaaatacttcacctaaattttcag

SEQ ID NO: 113685 - DNA, 58 bp, Artificial
  Synthetic oligonucleotide
ctgctcagagaaagatttttaagtcattgcaaaaacaagttcttaatgccaaaagtat

SEQ ID NO: 113686 - DNA, 60 bp, Artificial
  Synthetic oligonucleotide
ccagcgtttgtagattagtcgattacccattaggtgaaccaatgccaattaataccttgg

SEQ ID NO: 113687 - DNA, 60 bp, Artificial
  Synthetic oligonucleotide
atgacgttaataataccagcgtttgtagattagtcgattacccattaggtgaaccaatgc

SEQ ID NO: 113688 - DNA, 51 bp, Artificial
  Synthetic oligonucleotide
atcctcaacgtgactatgttattccaggagtgcgcgatgttttagttttat

SEQ ID NO: 113689 - DNA, 60 bp, Artificial
  Synthetic oligonucleotide
atcataaaccagaaggtatttttaatcctcaacgtgactatgttattccaggagtgcgcg

SEQ ID NO: 113690 - DNA, 60 bp, Artificial
  Synthetic oligonucleotide
gaaaatattgaaagcgttacatcaagacaaaggtacattagatattactttgacagctta

SEQ ID NO: 113691 - DNA, 60 bp, Artificial
  Synthetic oligonucleotide
ggagtgcgcgatgttttagttttatcagatgcacaacgtatggtcggatggaaaatattg

SEQ ID NO: 113692 - DNA, 55 bp, Artificial
  Synthetic oligonucleotide
ttttgattggaatgctgccctacgtaacccgtggacaatactcccttcttcaacc

SEQ ID NO: 113693 - DNA, 60 bp, Artificial
  Synthetic oligonucleotide
ggaaatagctcatacaggacaattcatatcatacggtatcattcgcagcgcatggtcaaa

SEQ ID NO: 113694 - DNA, 60 bp, Artificial
  Synthetic oligonucleotide
gctcatacaggacaattcatatcatacggtatcattcgcagcgcatggtcaaaagttggc

SEQ ID NO: 113695 - DNA, 66 bp, Artificial
  Synthetic oligonucleotide
gatagatttgtcgaattatgttcaaaaggacatgtctttgcttacaattcatatttcatgggcttc

SEQ ID NO: 113696 - DNA, 60 bp, Artificial
  Synthetic oligonucleotide
cgttaagttcaataaccgcattacttcgcgaatacggtgtggaaatagctcatacaggac

SEQ ID NO: 113697 - DNA, 60 bp, Artificial
  Synthetic oligonucleotide
gtgcaaagaatgaacccgtagcagatatgatttacaggttaactcatggtaaatggagtg

SEQ ID NO: 113698 - DNA, 55 bp, Artificial
  Synthetic oligonucleotide
gttaactcatggtaaatggagtgttcaacgctatggtaatgatgctgagtggcca

SEQ ID NO: 113699 - DNA, 60 bp, Artificial
  Synthetic oligonucleotide
tggagggatgtgagaatttgttacatgcgtcgcctactgacctttcgacagaccgagtta

SEQ ID NO: 113700 - DNA, 60 bp, Artificial
  Synthetic oligonucleotide
gatgtgagaatttgttacatgcgtcgcctactgacctttcgacagaccgagttacgacgg

SEQ ID NO: 113701 - DNA, 55 bp, Artificial
  Synthetic oligonucleotide
catggtcaaaagttggcagtttagaaatatttcttattatagataaggttcgtac

SEQ ID NO: 113702 - DNA, 60 bp, Artificial
  Synthetic oligonucleotide
gcagcagttgaattccccagtgtattatcaactttccagaatttatctcaatgcgtaaat

SEQ ID NO: 113703 - DNA, 60 bp, Artificial
  Synthetic oligonucleotide
gacagcttacgatattggatgtcgcgactacgaatgcgcttacatgacggtcatggatga

SEQ ID NO: 113704 - DNA, 60 bp, Artificial
  Synthetic oligonucleotide
tggtaagtattcattattatcctactttcttctatgagcattatttgtattttgaatcag

SEQ ID NO: 113705 - DNA, 60 bp, Artificial
  Synthetic oligonucleotide
tcttggcacaaatagacttgaacgacgcggatattatctaacggtttacagtccatttta

SEQ ID NO: 113706 - DNA, 60 bp, Artificial
  Synthetic oligonucleotide
cacatgatagatttgtcgaattatgttcaaaaggacatgtctttgcttacaattcatatt

SEQ ID NO: 113707 - DNA, 60 bp, Artificial
  Synthetic oligonucleotide
gtattgatttaaagagtgaaggctatgtgaatcagtttggattttggtcattattatacc

SEQ ID NO: 113708 - DNA, 56 bp, Artificial
  Synthetic oligonucleotide
gttgccaagttttggtactttaggttttacttttgataaagtgcgtgtaattaaaa

SEQ ID NO: 113709 - DNA, 60 bp, Artificial
  Synthetic oligonucleotide
caatattggactttatggcctttgaacaatgaatttattcagtatgatattaaccgtcct

SEQ ID NO: 113710 - DNA, 60 bp, Artificial
  Synthetic oligonucleotide
gactttatggcctttgaacaatgaatttattcagtatgatattaaccgtcctaatcacgc

SEQ ID NO: 113711 - DNA, 60 bp, Artificial
  Synthetic oligonucleotide
caaggacgacacgacccacaccaaaagtactcttaaagtaagcccattatggtcaaacgc

SEQ ID NO: 113712 - DNA, 60 bp, Artificial
  Synthetic oligonucleotide
ttatttcatacgttaagttcaataaccgcattacttcgcgaatacggtgtggaaatagct

SEQ ID NO: 113713 - DNA, 60 bp, Artificial
  Synthetic oligonucleotide
ggtcaaacgccttttttgattggaatgctgccctacgtaacccgtggacaatactccctt

SEQ ID NO: 113714 - DNA, 60 bp, Artificial
  Synthetic oligonucleotide
ggacgacacgacccacaccaaaagtactcttaaagtaagcccattatggtcaaacgcctt

SEQ ID NO: 113715 - DNA, 60 bp, Artificial
  Synthetic oligonucleotide
atgcgtaaattacggttcgtcaagttacagtgattcaaatagccatttaaccatattcgg

SEQ ID NO: 113716 - DNA, 60 bp, Artificial
  Synthetic oligonucleotide
aagagttaacgtttgtagctgatcagttagttattaagggatttttgtttttaagctttt

SEQ ID NO: 113717 - DNA, 60 bp, Artificial
  Synthetic oligonucleotide
ccccagtgtattatcaactttccagaatttatctcaatgcgtaaattacggttcgtcaag

SEQ ID NO: 113718 - DNA, 54 bp, Artificial
  Synthetic oligonucleotide
ttaagcttttattcaatgcatgatgaattacgtccagtacttaaaaatcacggt

SEQ ID NO: 113719 - DNA, 60 bp, Artificial
  Synthetic oligonucleotide
ccatattcggtactacaaatatacaacgcattggtttatttatgagaaacaaacaattat

SEQ ID NO: 113720 - DNA, 60 bp, Artificial
  Synthetic oligonucleotide
tttatcagctaatgaggttagttttagttgtatgatgcacggttattcaacgaatttaga

SEQ ID NO: 113721 - DNA, 60 bp, Artificial
  Synthetic oligonucleotide
acagataatggctcacgcacaaatgcagataaactagtggctttagctttgcgagcactt

SEQ ID NO: 113722 - DNA, 60 bp, Artificial
  Synthetic oligonucleotide
agagatggaggtgattatggcggtgcaggaaaatgcaacacaattaatgcgtagagcggc

SEQ ID NO: 113723 - DNA, 60 bp, Artificial
  Synthetic oligonucleotide
gggatgatcttggaacattcatgaagaatgtcttggatggaagagatttgactgttttgg

SEQ ID NO: 113724 - DNA, 60 bp, Artificial
  Synthetic oligonucleotide
accggaatcaattttagtctttatgcataaaagcctacatgtcaggtatgctttatggtt

SEQ ID NO: 113725 - DNA, 60 bp, Artificial
  Synthetic oligonucleotide
cttaacaggataagaacagaatggataaatgcgtcatatgatagaactcggattagggcg

SEQ ID NO: 113726 - DNA, 60 bp, Artificial
  Synthetic oligonucleotide
aacaggataagaacagaatggataggcgcgtcatatgatagaactcggattagggcgctg

SEQ ID NO: 113727 - DNA, 60 bp, Artificial
  Synthetic oligonucleotide
acctaaattctcggtcggaactagtgttcccaaactactttgataaatggataaattctc

SEQ ID NO: 113728 - DNA, 60 bp, Artificial
  Synthetic oligonucleotide
ttaactataaaccaacgaggaatgatggtatagtggtgccgaggctattggatattaccc

SEQ ID NO: 113729 - DNA, 60 bp, Artificial
  Synthetic oligonucleotide
ttaactataaaccaacgaggaatgatggtatagtggtaccgaggctgttggatatcaccc

SEQ ID NO: 113730 - DNA, 60 bp, Artificial
  Synthetic oligonucleotide
ttaactataaaccaacgaggaatgatggtatagtggtaccaaggctgttggatatcaccc

SEQ ID NO: 113731 - DNA, 60 bp, Artificial
  Synthetic oligonucleotide
gatattaccctaaaggcttacgatgacagaaagtcggttaagaacgcacgcggcgtggat

SEQ ID NO: 113732 - DNA, 60 bp, Artificial
  Synthetic oligonucleotide
cagaaagtcggttaagaacgcacgcggcgtggattttatgacggatgctaagtggatgaa

SEQ ID NO: 113733 - DNA, 60 bp, Artificial
  Synthetic oligonucleotide
gatatcaccctaaaggcttacgatgacagaaagtcggttaagaacgcacgcggcgtggat

SEQ ID NO: 113734 - DNA, 60 bp, Artificial
  Synthetic oligonucleotide
gatatcaccctaaaagcttacgatgataggaagtcggttaagaacgcacgcggcgtggat

SEQ ID NO: 113735 - DNA, 60 bp, Artificial
  Synthetic oligonucleotide
caaggcgctgcttacagtttgaaatcaaactatgatctaatcgcgaactcggagagggag

SEQ ID NO: 113736 - DNA, 53 bp, Artificial
  Synthetic oligonucleotide
aggcgctgcttatagtctgaaatcaaactatgatctaatcgcgaactcggaga

SEQ ID NO: 113737 - DNA, 60 bp, Artificial
  Synthetic oligonucleotide
aactggtgcaacgcaaacacaaaaagcggagaaggctgcattcgcatcgtacgcggaagc

SEQ ID NO: 113738 - DNA, 60 bp, Artificial
  Synthetic oligonucleotide
cgattcagatttagccgttggagatcaggttattcactggcgatatgagataaccgaacc

SEQ ID NO: 113739 - DNA, 60 bp, Artificial
  Synthetic oligonucleotide
tcagatttagctgttggagatcaggttattcactggcgatatgagataaccgaaccagtc

SEQ ID NO: 113740 - DNA, 60 bp, Artificial
  Synthetic oligonucleotide
cgattcggatttagctgttggagatcaggttattcactggcgatatgagataaccgaacc

SEQ ID NO: 113741 - DNA, 60 bp, Artificial
  Synthetic oligonucleotide
ttcctaactttctcatgcgtttattcaaactacgagaagtaaagcgcatctgtgacttga

SEQ ID NO: 113742 - DNA, 60 bp, Artificial
  Synthetic oligonucleotide
ttcctaactttctcatgcgtttatccaaactacgagaagtaaagcgcatctgtgacttga

SEQ ID NO: 113743 - DNA, 60 bp, Artificial
  Synthetic oligonucleotide
cggaactagtgttcccaaactactttgataaatggataaattctcccatgtttaacgcca

SEQ ID NO: 113744 - DNA, 60 bp, Artificial
  Synthetic oligonucleotide
ttgacaaatggataaattctcccatgtttaacgctaggttgaggataactcatggagaga

SEQ ID NO: 113745 - DNA, 60 bp, Artificial
  Synthetic oligonucleotide
tttcctaattttctcatgcgtttgttcaaactacgagaagtaaagcgcatctgtgactta

SEQ ID NO: 113746 - DNA, 60 bp, Artificial
  Synthetic oligonucleotide
tcgttctaatcgtcgtaggagatgataagctcgacccgcaggtacgctcggagcaggtat

SEQ ID NO: 113747 - DNA, 60 bp, Artificial
  Synthetic oligonucleotide
cgtcgtaggagatgataagctcgacccgcaggtacgctcggagcaggtattgagtaagta

SEQ ID NO: 113748 - DNA, 50 bp, Artificial
  Synthetic oligonucleotide
atcgttagcgcgcttaactataaaccaacgagaaatgatggtatagtggt

SEQ ID NO: 113749 - DNA, 60 bp, Artificial
  Synthetic oligonucleotide
aatcgataccctttggcaatccagacggatgttaagattgtggacgtagatggttatcat

SEQ ID NO: 113750 - DNA, 60 bp, Artificial
  Synthetic oligonucleotide
gtgaatttattcgattcggatttagctgttggagatcaggttattcactggcgatatgag

SEQ ID NO: 113751 - DNA, 60 bp, Artificial
  Synthetic oligonucleotide
aatcgatatcctttggcaatccagacggatgttaagattgcggacgtggaaggttatcat

SEQ ID NO: 113752 - DNA, 60 bp, Artificial
  Synthetic oligonucleotide
cctttggcaatccagacggatgttaagattgcggacgtggaaggttatcataatttagtg

SEQ ID NO: 113753 - DNA, 60 bp, Artificial
  Synthetic oligonucleotide
tatggttgatgtgcctaaactagatatcgttagcgcgcttaactataaaccaacgagaaa

SEQ ID NO: 113754 - DNA, 60 bp, Artificial
  Synthetic oligonucleotide
cctttggcaatccagacggatgttaagattgcggacgtggaaggttatcataatttagcg

SEQ ID NO: 113755 - DNA, 60 bp, Artificial
  Synthetic oligonucleotide
ggtcgagtttggcgaacaaatccatacccatgtctgcgtggagcactgatagcatccgaa

SEQ ID NO: 113756 - DNA, 60 bp, Artificial
  Synthetic oligonucleotide
tcagaaaggtcgagtttggcgaacaaatccatacccatgtctgcgtggagcactgatagc

SEQ ID NO: 113757 - DNA, 60 bp, Artificial
  Synthetic oligonucleotide
cggatactcagaaaggtcgagtttggcgaacaaatccatacccatgtctgcgtggagcgc

SEQ ID NO: 113758 - DNA, 60 bp, Artificial
  Synthetic oligonucleotide
cgcgacggatactcagaaaggccgagtttggcgaacaaatccatacccatgtctgcgtgg

SEQ ID NO: 113759 - DNA, 60 bp, Artificial
  Synthetic oligonucleotide
ggagcgctgatagcatccgaatgtgagttaggagacgtatattatactctgcgtcacgtg

SEQ ID NO: 113760 - DNA, 60 bp, Artificial
  Synthetic oligonucleotide
gttctaatcgtcgttggagatgataagctcgacccgcaggtacgctcggagcaggtatta

SEQ ID NO: 113761 - DNA, 60 bp, Artificial
  Synthetic oligonucleotide
gtcgttggagatgataagctcgacccgcaggtacgctcggagcaggtattaagcaagtac

SEQ ID NO: 113762 - DNA, 60 bp, Artificial
  Synthetic oligonucleotide
tacccatgtctgcgtggagcactgatagcatccgaatgtgagttaggagacgtatattat

SEQ ID NO: 113763 - DNA, 60 bp, Artificial
  Synthetic oligonucleotide
catattgaagtataagtgcaaagttgttttggttagaatgcctggacatgtgttcggaaa

SEQ ID NO: 113764 - DNA, 60 bp, Artificial
  Synthetic oligonucleotide
agaacgcacgcggcgtggattttatgacggatgctaagtggatgaagtgggcgatcgatg

SEQ ID NO: 113765 - DNA, 60 bp, Artificial
  Synthetic oligonucleotide
gcaggtattaagcaagtactattattcacgcagacatatatgcggagttgtagctgtaag

SEQ ID NO: 113766 - DNA, 60 bp, Artificial
  Synthetic oligonucleotide
ggcgtggattttatgacggatgctaagtggatgaagtgggcgatcgatgataggatggac

SEQ ID NO: 113767 - DNA, 60 bp, Artificial
  Synthetic oligonucleotide
atcgtcgtaggagatgataagctcgacccgcaggtacgctcggagcaggtattgagtaag

SEQ ID NO: 113768 - DNA, 60 bp, Artificial
  Synthetic oligonucleotide
caatagctgcgacggatactcagaaaggtcgagtttggcgaacaaatccatacccatgtc

SEQ ID NO: 113769 - DNA, 60 bp, Artificial
  Synthetic oligonucleotide
cgatagccgcgacggatactcagaaaggccgagtttggcgaacaaatccatacccatgtc

SEQ ID NO: 113770 - DNA, 60 bp, Artificial
  Synthetic oligonucleotide
cactgatagcatccgaatgtgagttaggagacgtatattatactctgcgtcacgtgtatc

SEQ ID NO: 113771 - DNA, 60 bp, Artificial
  Synthetic oligonucleotide
tacccatgtctgcgtggagcgctgatagcatccgaatgtgagttaggagacgtatattat

SEQ ID NO: 113772 - DNA, 60 bp, Artificial
  Synthetic oligonucleotide
gaacgcacgcggcgtggattttatgacggatgctaagtggatgaagtgggcgatcgatga

SEQ ID NO: 113773 - DNA, 60 bp, Artificial
  Synthetic oligonucleotide
gcacgcggcgtggattttatgacggatgctaagtggatgaagtgggcgatcgatgatagg

SEQ ID NO: 113774 - DNA, 60 bp, Artificial
  Synthetic oligonucleotide
cggcgtggattttatgacggatgctaagtggatgaagtgggcgatcgatgataggatgga

SEQ ID NO: 113775 - DNA, 60 bp, Artificial
  Synthetic oligonucleotide
gcgttccacgtacttcaaggcgctgcttatagtctgaaatcaaactacgatctaatcgcg

SEQ ID NO: 113776 - DNA, 60 bp, Artificial
  Synthetic oligonucleotide
agtggatgaagtgggcgatcgatgataggatggacattcagccactcaagatcaccctag

SEQ ID NO: 113777 - DNA, 60 bp, Artificial
  Synthetic oligonucleotide
gattgaggcgttccacgtacttcaaggcgctgcttatagtctgaaatcaaactacgatct

SEQ ID NO: 113778 - DNA, 60 bp, Artificial
  Synthetic oligonucleotide
gattgaagcgttccacgtacttcaaggcgctgcttatagtctgaaatcaaactacgatct

SEQ ID NO: 113779 - DNA, 60 bp, Artificial
  Synthetic oligonucleotide
gttaaaagagtgtcccacaatggaggagtttgtcattcctgtgttttcagagagggagat

SEQ ID NO: 113780 - DNA, 60 bp, Artificial
  Synthetic oligonucleotide
ccgccggaactcaccagatagagtgaagctccaaggtcactatgtcgtgggattggcagg

SEQ ID NO: 113781 - DNA, 60 bp, Artificial
  Synthetic oligonucleotide
gacataccgccggaactcaccagatagagtgaagctccaaggtcactatgtcgtgggatt

SEQ ID NO: 113782 - DNA, 60 bp, Artificial
  Synthetic oligonucleotide
tcccgctggatggatttgacataccgccggaactcaccagatagagtgaagctccaaggt

SEQ ID NO: 113783 - DNA, 60 bp, Artificial
  Synthetic oligonucleotide
accaatcaaagagggtcaaattgtgaatccaacatttatatcaagatatcgccaaatcgc

SEQ ID NO: 113784 - DNA, 60 bp, Artificial
  Synthetic oligonucleotide
gcttgcctccactagtgtgtccaacaggactgaagaagcgaaggttgctgatgaggagct

SEQ ID NO: 113785 - DNA, 60 bp, Artificial
  Synthetic oligonucleotide
gcctccactagtgtgtccaacaggactgaagaagcgaaggttgctgatgaggagctgatg

SEQ ID NO: 113786 - DNA, 60 bp, Artificial
  Synthetic oligonucleotide
tattcaaagtcgttttaactaagatgcgcatatcatcgtgagctatttacatggccggct

SEQ ID NO: 113787 - DNA, 60 bp, Artificial
  Synthetic oligonucleotide
taactaagatgcgcatatcatcgtgagctatttacatggccggctttgctgtgtgccatg

SEQ ID NO: 113788 - DNA, 53 bp, Artificial
  Synthetic oligonucleotide
gttggtctttatgtagatatacctggagtaaccgtgactactagcgcatcatt

SEQ ID NO: 113789 - DNA, 60 bp, Artificial
  Synthetic oligonucleotide
cttgccttaaaatctagatgggctaaagtctgataaatgattatggtttgtattcaaagt

SEQ ID NO: 113790 - DNA, 60 bp, Artificial
  Synthetic oligonucleotide
tgaacagtcaaagactacgtattcatcgatttacgaaatcgggggaagccaccccccgag

SEQ ID NO: 113791 - DNA, 60 bp, Artificial
  Synthetic oligonucleotide
atggccggctttgctgtgtgccatgttcttggccggtgtatgcgttaatctgaacagtca

SEQ ID NO: 113792 - DNA, 60 bp, Artificial
  Synthetic oligonucleotide
gccggctttgctgtgtgccatgttcttggccggtgtatgcgttaatctgaacagtcaaag

SEQ ID NO: 113793 - DNA, 60 bp, Artificial
  Synthetic oligonucleotide
acgaccactagggtcgttggagattcaactttagctcttccttcgaatgttaaactaagt

SEQ ID NO: 113794 - DNA, 60 bp, Artificial
  Synthetic oligonucleotide
gggtcgttggagattcaactttagctcttccttcgaatgttaaactaagtaaaggtgagg

SEQ ID NO: 113795 - DNA, 60 bp, Artificial
  Synthetic oligonucleotide
taaactaagtaaaggtgaggttgaaaagatcgctgtaacgaagaaagaaatgttcgatga

SEQ ID NO: 113796 - DNA, 60 bp, Artificial
  Synthetic oligonucleotide
ggtgaggttgaaaagatcgctgtaacgaagaaagaaatgttcgatgagttagctcaatgt

SEQ ID NO: 113797 - DNA, 51 bp, Artificial
  Synthetic oligonucleotide
agagaacacacattcaacggtgatgccatccgattcgctgcctggttattc

SEQ ID NO: 113798 - DNA, 60 bp, Artificial
  Synthetic oligonucleotide
ctaatgaccgcaaataatgttgttgtcagaatgggtatgcaatattctacaaatttggct

SEQ ID NO: 113799 - DNA, 60 bp, Artificial
  Synthetic oligonucleotide
aatgttgttgtcagaatgggtatgcaatattctacaaatttggctggtaataacgtcgag

SEQ ID NO: 113800 - DNA, 60 bp, Artificial
  Synthetic oligonucleotide
aaatttggctggtaataacgtcgagattaattacgtgacatcaaatagtgtagttaaatt

SEQ ID NO: 113801 - DNA, 60 bp, Artificial
  Synthetic oligonucleotide
gtaaagtttgtgtcttgtttataacgtcactttcaactactgcttcagcagttaactcgt

SEQ ID NO: 113802 - DNA, 60 bp, Artificial
  Synthetic oligonucleotide
ggacacattcctgctggtgtacttgctgctccttattcaggaaagggaagtggacttttc

SEQ ID NO: 113803 - DNA, 60 bp, Artificial
  Synthetic oligonucleotide
tagttaaattaggacacattcctgctggtgtacttgctgctccttattcaggaaagggaa

SEQ ID NO: 113804 - DNA, 60 bp, Artificial
  Synthetic oligonucleotide
taacgtcgagattaattacgtgacatcaaatagtgtagttaaattaggacacattcctgc

SEQ ID NO: 113805 - DNA, 60 bp, Artificial
  Synthetic oligonucleotide
catgattaaactgactgctgaaactagttgtgcttcacttactgcaatgactaatttggt

SEQ ID NO: 113806 - DNA, 60 bp, Artificial
  Synthetic oligonucleotide
ttttaacatgattaaactgactgctgaaactagttgtgcttcacttactgcaatgactaa

SEQ ID NO: 113807 - DNA, 60 bp, Artificial
  Synthetic oligonucleotide
gttaactcgtttgcttattcttactgtaatgttccagtggagagttgggattttaacatg

SEQ ID NO: 113808 - DNA, 60 bp, Artificial
  Synthetic oligonucleotide
gtttgtgtcttgtttataacgtcactttcaactactgcttcagcagttaactcgtttgct

SEQ ID NO: 113809 - DNA, 60 bp, Artificial
  Synthetic oligonucleotide
ggttaatacattagtgcctgatgatagggttaggccggttggtctttatgtagatatacc

SEQ ID NO: 113810 - DNA, 60 bp, Artificial
  Synthetic oligonucleotide
caatgactaatttggttaatacattagtgcctgatgatagggttaggccggttggtcttt

SEQ ID NO: 113811 - DNA, 60 bp, Artificial
  Synthetic oligonucleotide
aatgggatcatcatgtaccgttaaagtgtgtccattaaatactcagacattaggaattgg

SEQ ID NO: 113812 - DNA, 60 bp, Artificial
  Synthetic oligonucleotide
gattgggttgctccagatatttacccaatgagaaggcctagaatggagatgtgccggcaa

SEQ ID NO: 113813 - DNA, 60 bp, Artificial
  Synthetic oligonucleotide
gcaacagggatcatgtttgaactcagccggtgtgtgatgacattagcttatgcagagaaa

SEQ ID NO: 113814 - DNA, 60 bp, Artificial
  Synthetic oligonucleotide
cagcaacaggaatcatgtttgagctcagccggtgtgtgatgacattagcttatgcagaaa

SEQ ID NO: 113815 - DNA, 60 bp, Artificial
  Synthetic oligonucleotide
ttagattgttttgcttcgtctgctttggatatgcgccaaggaaggatggaacgataccag

SEQ ID NO: 113816 - DNA, 60 bp, Artificial
  Synthetic oligonucleotide
gtttagattgttttgcttcgtctgctttggatatgcgccaaggaaggatggaacgatacc

SEQ ID NO: 113817 - DNA, 55 bp, Artificial
  Synthetic oligonucleotide
attcgtactgcaatacaaattcataggtggataagagggactggtatttgggaaa

SEQ ID NO: 113818 - DNA, 60 bp, Artificial
  Synthetic oligonucleotide
gcgctgattcgtactgcaatacaaattcataggtggataagagggactggcatctgggaa

SEQ ID NO: 113819 - DNA, 60 bp, Artificial
  Synthetic oligonucleotide
aatggaagcgctgattcgtactgcaatacaaattcataggtggataagagggactggcat

SEQ ID NO: 113820 - DNA, 60 bp, Artificial
  Synthetic oligonucleotide
ggctattgccaatgattctagtgagaattgcagtaaaggagccagcaaacttcgagtatg

SEQ ID NO: 113821 - DNA, 60 bp, Artificial
  Synthetic oligonucleotide
catggttattgccgatgatcttagtaagaattgcagtaaaggagccagcaaactttgagt

SEQ ID NO: 113822 - DNA, 55 bp, Artificial
  Synthetic oligonucleotide
tgggttgctccagatatctatccaatgagaaggcctagaatggagatgtgccggc

SEQ ID NO: 113823 - DNA, 60 bp, Artificial
  Synthetic oligonucleotide
gcaacaggaatcatgtttgagctcagccggtgtgtgatgacattagcttatgcagaaaga

SEQ ID NO: 113824 - DNA, 60 bp, Artificial
  Synthetic oligonucleotide
aaaacgctagatgaatgggagagtggaaaaaatccatatgaaccgatagaagtgactgca

SEQ ID NO: 113825 - DNA, 60 bp, Artificial
  Synthetic oligonucleotide
tacgatttgggttttagctttacagctaccggttaatccgcaagtagtgtgggatgtacc

SEQ ID NO: 113826 - DNA, 60 bp, Artificial
  Synthetic oligonucleotide
gatttgggttttagctttacagctaccggttaatccgcaagtagtgtgggatgtaccacg

SEQ ID NO: 113827 - DNA, 60 bp, Artificial
  Synthetic oligonucleotide
gagcaaatcggcaggattggagatcattattatacaacaaattgttacactggagcggag

SEQ ID NO: 113828 - DNA, 60 bp, Artificial
  Synthetic oligonucleotide
gagcaaattggcaggattggagatcattattatacaacaaattgttacactggagcggag

SEQ ID NO: 113829 - DNA, 60 bp, Artificial
  Synthetic oligonucleotide
ttggcaggatcggagatcattattatacaacaaattgttacactggagcggaggctttga

SEQ ID NO: 113830 - DNA, 60 bp, Artificial
  Synthetic oligonucleotide
agcatagagcaatgatacagaatgctttggatggatcgatcattgaaaatgggaacgttg

SEQ ID NO: 113831 - DNA, 60 bp, Artificial
  Synthetic oligonucleotide
ctgaacatagagcaatgatacagaatgctttggatggatcaatcattgaaaatggaaacg

SEQ ID NO: 113832 - DNA, 60 bp, Artificial
  Synthetic oligonucleotide
aagacaaaattagttcgcgatgaacaaattggcaggatcggagatcattattatacaaca

SEQ ID NO: 113833 - DNA, 60 bp, Artificial
  Synthetic oligonucleotide
attacgttcgccatacactaatgcaaacttctttcaagattagagcgcttagatgtgacc

SEQ ID NO: 113834 - DNA, 60 bp, Artificial
  Synthetic oligonucleotide
ctgatagcgaaaaattggcaataattgatgttgtcgacagcgtaaatcataaattagatg

SEQ ID NO: 113835 - DNA, 60 bp, Artificial
  Synthetic oligonucleotide
ccatcgtattatgaagtggatgttggattctcacgatggagttagtttgaatggaggaat

SEQ ID NO: 113836 - DNA, 60 bp, Artificial
  Synthetic oligonucleotide
accatcgtattatgaagtggatgttggattctcacgatggagttagtttgaatggaggaa

SEQ ID NO: 113837 - DNA, 60 bp, Artificial
  Synthetic oligonucleotide
cagaggcagtagtatgcgatgaatctgcgcatgtgtcggcagatgctatccaggagaaag

SEQ ID NO: 113838 - DNA, 60 bp, Artificial
  Synthetic oligonucleotide
acattctattataacagaggcagtagtatgcgatgaatctgcgcatgtgtcggcagatgc

SEQ ID NO: 113839 - DNA, 60 bp, Artificial
  Synthetic oligonucleotide
cccgtactgcatcaggtgactgaaatcagcattgaggggatccccaacccgatctgtggc

SEQ ID NO: 113840 - DNA, 60 bp, Artificial
  Synthetic oligonucleotide
tagtcgagtacttgcccgtactgcatcaggtgactgaaatcagcattgaggggatcccca

SEQ ID NO: 113841 - DNA, 57 bp, Artificial
  Synthetic oligonucleotide
gtccatatagagaaaagtaccgaaaactccgaagtaaaatgaaaaacgtattaattg

SEQ ID NO: 113842 - DNA, 59 bp, Artificial
  Synthetic oligonucleotide
gtgtagtacctatacaaggtccgattaatagggctgttgcacaaaacgcctatgtgtag

SEQ ID NO: 113843 - DNA, 60 bp, Artificial
  Synthetic oligonucleotide
ctaggtgcgactttcataatgatggtttgtgcgaagagtgagagagggctaaaccagcag

SEQ ID NO: 113844 - DNA, 60 bp, Artificial
  Synthetic oligonucleotide
taaatctaggtgcgactttcataatgatggtttgtgcgaagagtgagagagggctaaacc

SEQ ID NO: 113845 - DNA, 51 bp, Artificial
  Synthetic oligonucleotide
ttttgtcggtcccgctagatggtttcgaactaccattaacctaagatcagt

SEQ ID NO: 113846 - DNA, 60 bp, Artificial
  Synthetic oligonucleotide
ctgggtgcgactttcataatgatggtttgtgcgaagagtgagagaggactaaaccagcag

SEQ ID NO: 113847 - DNA, 60 bp, Artificial
  Synthetic oligonucleotide
tagttgccgctgttgttgcgttgttgacgtcggtatgcacgctttcaagtgatatgagcg

SEQ ID NO: 113848 - DNA, 60 bp, Artificial
  Synthetic oligonucleotide
aagacagattaaacgtcatgttaatgaacagatcctcccaaagttaaagagtgatttggg

SEQ ID NO: 113849 - DNA, 60 bp, Artificial
  Synthetic oligonucleotide
taaatctgggtgcgactttcataatgatggtttgtgcgaagagtgagagaggactaaacc

SEQ ID NO: 113850 - DNA, 60 bp, Artificial
  Synthetic oligonucleotide
tagtcgccgctgttgtagcgttgttgacgtcggtatgcacgctttcaagtgatatgagcg

SEQ ID NO: 113851 - DNA, 60 bp, Artificial
  Synthetic oligonucleotide
ataatcaggagagagtcgaagagctaagtctggttcgtgtggatgatacgatttcacaac

SEQ ID NO: 113852 - DNA, 60 bp, Artificial
  Synthetic oligonucleotide
tgatgatgtgagactaagacagatcaaacgtcatgttaatgaacagatcctcccaaagct

SEQ ID NO: 113853 - DNA, 60 bp, Artificial
  Synthetic oligonucleotide
aaagaggatcacgaagctataggaagtgaggagaccaaaaggattcttcctaagactgct

SEQ ID NO: 113854 - DNA, 60 bp, Artificial
  Synthetic oligonucleotide
ggatcacgaagctataggaagtgaggagaccaaaaggattcttcctaagactgctatgcg

SEQ ID NO: 113855 - DNA, 60 bp, Artificial
  Synthetic oligonucleotide
cgcctgttgtcgtcactatggcttcctcactcagagctgcgatctccaagatcaagagag

SEQ ID NO: 113856 - DNA, 60 bp, Artificial
  Synthetic oligonucleotide
agctgtaaatgatacgtgatgcagtgttgccctaatcccttaagccttcccgacccctat

SEQ ID NO: 113857 - DNA, 60 bp, Artificial
  Synthetic oligonucleotide
ctgtaaatgatacgtgatgcagtgttgccctaatcccttaagccttcccgacccctattc

SEQ ID NO: 113858 - DNA, 60 bp, Artificial
  Synthetic oligonucleotide
tgaattgtaggtgatagatgacgcagtgttgccctaatcccttaagccttcccgacccca

SEQ ID NO: 113859 - DNA, 60 bp, Artificial
  Synthetic oligonucleotide
aagtttttaagcctggaactgacacattcctgcaggaaagagcgtaagagaatggcagac

SEQ ID NO: 113860 - DNA, 59 bp, Artificial
  Synthetic oligonucleotide
tggacagaattgttaaagagatgagacgtcagctagagatgattgataaactaactact

SEQ ID NO: 113861 - DNA, 60 bp, Artificial
  Synthetic oligonucleotide
tcaaatattgtatagtcacaattattaatactcttttaaaattggcaggatataaagaac

SEQ ID NO: 113862 - DNA, 60 bp, Artificial
  Synthetic oligonucleotide
tgtcaaacacaactggtgcaacgcaaacacagaaagcggagaaggctgcattcgcatcgt

SEQ ID NO: 113863 - DNA, 60 bp, Artificial
  Synthetic oligonucleotide
ttaaacgtatacatgataacctgataactaaaccagttgacgttatagacatgtcgaagg

SEQ ID NO: 113864 - DNA, 61 bp, Artificial
  Synthetic oligonucleotide
cttaaaagtatacatgataacctgataactaaaccagttgacgttatagacatgtcgaagg

SEQ ID NO: 113865 - DNA, 61 bp, Artificial
  Synthetic oligonucleotide
cttaaacgtatatatgataacctgataactaaaccagttgacgttatagacatgtcgaagg

SEQ ID NO: 113866 - DNA, 60 bp, Artificial
  Synthetic oligonucleotide
tgaattgcttaaacgtatatatgataacctgataactaaaccagttgacgttatagacat

SEQ ID NO: 113867 - DNA, 60 bp, Artificial
  Synthetic oligonucleotide
tgaattgcttaaaagtatacatgataacctgataactaaaccagttgacgttatagacat

SEQ ID NO: 113868 - DNA, 60 bp, Artificial
  Synthetic oligonucleotide
tgaattgcttaaacgtatacatgataacctgataactaaaccagttgacgttatagacat

SEQ ID NO: 113869 - DNA, 60 bp, Artificial
  Synthetic oligonucleotide
ctggtgcaacgcaaacacagaaagcggagaaggctgcattcgcatcgtacgcggaagcgt

SEQ ID NO: 113870 - DNA, 60 bp, Artificial
  Synthetic oligonucleotide
ggcgatccgatgatccttggctaaacacccccatcttcacagcgccgggcctgaccaacc

SEQ ID NO: 113871 - DNA, 60 bp, Artificial
  Synthetic oligonucleotide
agccgaagcaatcaagattgatgatgatgctggaccagatgaatattccccaaactctgt

SEQ ID NO: 113872 - DNA, 60 bp, Artificial
  Synthetic oligonucleotide
aaacggaatgggggaatacaatggatggacgtatcagaaggaactgtgatgaacgaggct

SEQ ID NO: 113873 - DNA, 60 bp, Artificial
  Synthetic oligonucleotide
ggggaatacaatggatggacgtatcagaaggcaccgtgatgaacgaggctgtcaacgctg

SEQ ID NO: 113874 - DNA, 60 bp, Artificial
  Synthetic oligonucleotide
gaaaatacaatatcagtggggattacgcaaatgccacgagaacttttttggctatttcac

SEQ ID NO: 113875 - DNA, 60 bp, Artificial
  Synthetic oligonucleotide
tgatcgggtcgtacatggaggggatcgtcacgatccgaaaaaactgaaagagcgtaaagc

SEQ ID NO: 113876 - DNA, 60 bp, Artificial
  Synthetic oligonucleotide
gcatagagagtggacggttcctgtcctcatctatacggagggagtcatgatttggccggc

SEQ ID NO: 113877 - DNA, 60 bp, Artificial
  Synthetic oligonucleotide
aacgctgtgataagcatggaaaaccccggatacccactgtttcgcgcaggattacttcag

SEQ ID NO: 113878 - DNA, 60 bp, Artificial
  Synthetic oligonucleotide
aatgggttatataatgtcgctcaagagtgtgcctatgcctttaaagatacgtacgtatta

SEQ ID NO: 113879 - DNA, 60 bp, Artificial
  Synthetic oligonucleotide
tgcctttaaagatacgtacgtattaagagtacattcacaacgcgagaatgttgaggagcc

SEQ ID NO: 113880 - DNA, 60 bp, Artificial
  Synthetic oligonucleotide
ttgaggagccttttgagattggcagaccaaaagttggaagtctaggtcaaaacgctgtga

SEQ ID NO: 113881 - DNA, 60 bp, Artificial
  Synthetic oligonucleotide
cttcagataacagtaagtggaacaataccagctgatataaacgatgaaatgaatcggttg

SEQ ID NO: 113882 - DNA, 60 bp, Artificial
  Synthetic oligonucleotide
gcatataaaacgcttcgtcagaagtttgactggagtgttcgccatgcagcggataaggca

SEQ ID NO: 113883 - DNA, 60 bp, Artificial
  Synthetic oligonucleotide
ttcgccatgcagcggataaggcaattgagaatttctcgcatatttttacaagaattaacc

SEQ ID NO: 113884 - DNA, 60 bp, Artificial
  Synthetic oligonucleotide
cgtcactatgtggaggactttcagatgcggtcgtttatgtattgccaatcagttttccga

SEQ ID NO: 113885 - DNA, 60 bp, Artificial
  Synthetic oligonucleotide
ggcggggtacaaaagaatatacgagtaacgaaatcatctcagatggagatctatcattcg

SEQ ID NO: 113886 - DNA, 60 bp, Artificial
  Synthetic oligonucleotide
tgatggatgatccggttatgcttcaattacgaacgatcggaaacttatatgacactcgcc

SEQ ID NO: 113887 - DNA, 60 bp, Artificial
  Synthetic oligonucleotide
atgctccgatcttcgacacccgttataaaataatggaaaccgagatagccacagcgaaaa

SEQ ID NO: 113888 - DNA, 60 bp, Artificial
  Synthetic oligonucleotide
agccacagcgaaaaacgcggatccagcaataaagcgaacgttggctcctttgatggatga

SEQ ID NO: 113889 - DNA, 60 bp, Artificial
  Synthetic oligonucleotide
gacggttcctgtcctcatctatacggagggagtcatgatttggccggcgcaggttggtgc

SEQ ID NO: 113890 - DNA, 60 bp, Artificial
  Synthetic oligonucleotide
gacatccctacataagaccctcttggacgaggcggagaatggaagatattatagatcgag

SEQ ID NO: 113891 - DNA, 60 bp, Artificial
  Synthetic oligonucleotide
gtcacacgcgaaatgttgcgttattatatgaagactgacatctttgatggcggggtacaa

SEQ ID NO: 113892 - DNA, 60 bp, Artificial
  Synthetic oligonucleotide
gacactcgccctgccatcatgggctctacgttatcagcgcggcaggcacagacatcccta

SEQ ID NO: 113893 - DNA, 60 bp, Artificial
  Synthetic oligonucleotide
aaagcgatcgagttatgcacactgctctcgcggatagggaggttgaagatggatatggaa

SEQ ID NO: 113894 - DNA, 60 bp, Artificial
  Synthetic oligonucleotide
ggagcgatgtctctgagatttcaaggaaagattgataccatgttcttctcggaaaatact

SEQ ID NO: 113895 - DNA, 60 bp, Artificial
  Synthetic oligonucleotide
tactgagaaaaccaatataatgtgcaatattagtgaggcggacggatgaagagaggtttt

SEQ ID NO: 113896 - DNA, 60 bp, Artificial
  Synthetic oligonucleotide
agatcgaacccgtacccatgtttacgtggaacgttgatcgctacagaatgcgtactcgga

SEQ ID NO: 113897 - DNA, 60 bp, Artificial
  Synthetic oligonucleotide
cgtactcggagatgcatataaaacgcttcgtcagaagtttgactggagtgttcgccatgc

SEQ ID NO: 113898 - DNA, 60 bp, Artificial
  Synthetic oligonucleotide
gttatgcttcaattacgaacgatcggaaacttatatgacactcgccctgccatcatgggc

SEQ ID NO: 113899 - DNA, 60 bp, Artificial
  Synthetic oligonucleotide
gtggatggaatggatgcttttagacgcgatggacgttcaacccctgaaaatcgattttgc

SEQ ID NO: 113900 - DNA, 60 bp, Artificial
  Synthetic oligonucleotide
caatacgcgtggcgaggggtgctgatagacttgacacattccggagattctttcccgcgt

SEQ ID NO: 113901 - DNA, 60 bp, Artificial
  Synthetic oligonucleotide
tacaaccccactgataatgaagggaatcagatacctggagctcttgatatcgccttatgc

SEQ ID NO: 113902 - DNA, 60 bp, Artificial
  Synthetic oligonucleotide
agcgtaaagcaattgatgtgccagatggtgatgtcaggttagacttaaactacaacccca

SEQ ID NO: 113903 - DNA, 59 bp, Artificial
  Synthetic oligonucleotide
atcctctgagggatgaagctccagatgatgaattacactgtagagtagatcgggatcaa

SEQ ID NO: 113904 - DNA, 60 bp, Artificial
  Synthetic oligonucleotide
cgttttagaagattatgaacttagaattgatttgagtgatcgggtcgtacatggagggga

SEQ ID NO: 113905 - DNA, 60 bp, Artificial
  Synthetic oligonucleotide
tttcccgcgtttggaagggctttagacgtagtaaacagggcaacggacgtcgcgcatatc

SEQ ID NO: 113906 - DNA, 60 bp, Artificial
  Synthetic oligonucleotide
cggtcgaagacgaatcgagaggctgcaaccattccagggtacaagatgtgaaccatctaa

SEQ ID NO: 113907 - DNA, 53 bp, Artificial
  Synthetic oligonucleotide
tcgattttgcagcgttaggaggcgcggtcaagtgtgacttgttcaattcagcc

SEQ ID NO: 113908 - DNA, 60 bp, Artificial
  Synthetic oligonucleotide
agaattaacctattcgatacagggaagactccgggagcgcggattatacattgggttcag

SEQ ID NO: 113909 - DNA, 54 bp, Artificial
  Synthetic oligonucleotide
cgccttatgcgctcggatcacaaggaagagcgttaaaacgaatgagggtgttac

SEQ ID NO: 113910 - DNA, 60 bp, Artificial
  Synthetic oligonucleotide
atcagttttccgattaagtgtttaactttgattatagttggtgatgacctggtcgagccg

SEQ ID NO: 113911 - DNA, 60 bp, Artificial
  Synthetic oligonucleotide
cgatgagatcttaattaaactactgaacgtatagtctcagtgacatgggactcctgaagc

SEQ ID NO: 113912 - DNA, 60 bp, Artificial
  Synthetic oligonucleotide
cggaagttgaatatccgtactactacgatcgatggatttatgctccgatcttcgacaccc

SEQ ID NO: 113913 - DNA, 60 bp, Artificial
  Synthetic oligonucleotide
cagtttcaggtcgctttgcttaaagtaaaggggttcgttttcggcaacgatgagatctta

SEQ ID NO: 113914 - DNA, 60 bp, Artificial
  Synthetic oligonucleotide
cgtttggaagggctttagacgtagtaaacagggcaacggacgtcgcgcatatcaccgcgc

SEQ ID NO: 113915 - DNA, 59 bp, Artificial
  Synthetic oligonucleotide
gatatcaatctcacgaaatggtgacattacaacacattcgcaaggtattgttagggttg

SEQ ID NO: 113916 - DNA, 60 bp, Artificial
  Synthetic oligonucleotide
aggcatgttgcggaacatgtgcgcggagtcgcttcgatatcaatctcacgaaatggtgac

SEQ ID NO: 113917 - DNA, 60 bp, Artificial
  Synthetic oligonucleotide
gggttcaggagatgacgatgggcacgaaaacgtcatgggaaagtggatatcctctgaggg

SEQ ID NO: 113918 - DNA, 60 bp, Artificial
  Synthetic oligonucleotide
cgttcgcccagttgaagaggcaaggtacgtcatttattcaatacgcgtggcgaggggtgc

SEQ ID NO: 113919 - DNA, 60 bp, Artificial
  Synthetic oligonucleotide
gatacagggaagactccgggagcgcggattatacattgggttcaggagatgacgatgggc

SEQ ID NO: 113920 - DNA, 60 bp, Artificial
  Synthetic oligonucleotide
ggcgaggggtgctgatagacttgacacattccggagattctttcccgcgtttggaagggc

SEQ ID NO: 113921 - DNA, 52 bp, Artificial
  Synthetic oligonucleotide
acgtcatccttcgtcttacagaaggtatccgagctagtcttgagtctgatga

SEQ ID NO: 113922 - DNA, 60 bp, Artificial
  Synthetic oligonucleotide
cgagaggtctcgagaagcatgccaatccgtgctcggtttgttacacgtcatccttcgtct

SEQ ID NO: 113923 - DNA, 60 bp, Artificial
  Synthetic oligonucleotide
ctttcacgaacaaggcaatatatttctaatggattttgaaaaggacgcgagacttacatc

SEQ ID NO: 113924 - DNA, 60 bp, Artificial
  Synthetic oligonucleotide
gccgcttaagcaatacaaccatccagatgttctttcagaattctccgaaaccgttcggga

SEQ ID NO: 113925 - DNA, 60 bp, Artificial
  Synthetic oligonucleotide
attggaattcagctttaatcaatccatggacagttcttccctcttcaaccggctctggct

SEQ ID NO: 113926 - DNA, 60 bp, Artificial
  Synthetic oligonucleotide
cggacatttaaaggaatttggaaaacttacattcgaaaacttaaccgagaaatatcgtcg

SEQ ID NO: 113927 - DNA, 60 bp, Artificial
  Synthetic oligonucleotide
cgatgttagtgcatgtcgattgatagattatcctttaggtgacgctttaccattaaatac

SEQ ID NO: 113928 - DNA, 60 bp, Artificial
  Synthetic oligonucleotide
tatttaacagcgtatagtcctttttatgaatcattcactgatgcagtagtcgcagagttc

SEQ ID NO: 113929 - DNA, 60 bp, Artificial
  Synthetic oligonucleotide
ctccttgtttcctaattcacccaaagaaatgattcttcgactgtttgtgcatgtgttttg

SEQ ID NO: 113930 - DNA, 60 bp, Artificial
  Synthetic oligonucleotide
tcatcaaagattcggacatttaaaggaatttggaaaacttacattcgaaaacttaaccga

SEQ ID NO: 113931 - DNA, 60 bp, Artificial
  Synthetic oligonucleotide
tttatccgctaatgatgtcagtttcagttgtatcatgcatggttattccgtcaatctgga

SEQ ID NO: 113932 - DNA, 60 bp, Artificial
  Synthetic oligonucleotide
ccgctaatgatgtcagtttcagttgtatcatgcatggttattccgtcaatctggacagta

SEQ ID NO: 113933 - DNA, 60 bp, Artificial
  Synthetic oligonucleotide
ctgacgttgctgctaataaatttacttttggaaggtatcacgctgtcgccacagtgagcg

SEQ ID NO: 113934 - DNA, 60 bp, Artificial
  Synthetic oligonucleotide
tacctttcccgctttcccaagttattgtatattaatggtcatggaagaaaatttattaaa

SEQ ID NO: 113935 - DNA, 52 bp, Artificial
  Synthetic oligonucleotide
taaattcacagtcagctcacaaggtgatctggatgtgcctcctattacttca

SEQ ID NO: 113936 - DNA, 60 bp, Artificial
  Synthetic oligonucleotide
gcatgtcgattgatagattatcctttaggtgacgctttaccattaaatacgttagaagtg

SEQ ID NO: 113937 - DNA, 60 bp, Artificial
  Synthetic oligonucleotide
gtctttgcttttaattcttattatatgggattcgagtcaagagatgagcttgagcaggaa

SEQ ID NO: 113938 - DNA, 60 bp, Artificial
  Synthetic oligonucleotide
gacctaaaaccgatcttgagacatcacggattcattgatatcactagtgctgacgttgct

SEQ ID NO: 113939 - DNA, 60 bp, Artificial
  Synthetic oligonucleotide
cacccctagtactgattttgtaatacctggagttagagaagttttagttttagcagacgc

SEQ ID NO: 113940 - DNA, 60 bp, Artificial
  Synthetic oligonucleotide
cgcccttgatttaaatttaaccgcttatgatattggttgtcgtgattatgaatgtgctta

SEQ ID NO: 113941 - DNA, 60 bp, Artificial
  Synthetic oligonucleotide
taacgaaagacttccttcatacataaaattgccttttgatagtcttgatcttaaaggtaa

SEQ ID NO: 113942 - DNA, 60 bp, Artificial
  Synthetic oligonucleotide
gcaccacgaatattcaaagaattggccttttcatgcgtaataagcaagtctacaaagcac

SEQ ID NO: 113943 - DNA, 60 bp, Artificial
  Synthetic oligonucleotide
cagctttaatcaatccatggacagttcttccctcttcaaccggctctggctcaatgtcaa

SEQ ID NO: 113944 - DNA, 60 bp, Artificial
  Synthetic oligonucleotide
ctacaaagcactggctattactggtaatgatcataaacctgaaggagttttcacccctag

SEQ ID NO: 113945 - DNA, 60 bp, Artificial
  Synthetic oligonucleotide
acctgaaggagttttcacccctagtactgattttgtaatacctggagttagagaagtttt

SEQ ID NO: 113946 - DNA, 60 bp, Artificial
  Synthetic oligonucleotide
tttaaccgcttatgatattggttgtcgtgattatgaatgtgcttacatgaccgttatgga

SEQ ID NO: 113947 - DNA, 60 bp, Artificial
  Synthetic oligonucleotide
tgatatcactagtgctgacgttgctgctaataaatttacttttggaaggtatcacgctgt

SEQ ID NO: 113948 - DNA, 60 bp, Artificial
  Synthetic oligonucleotide
catggacagttcttccctcttcaaccggctctggctcaatgtcaataccatcttctaaaa

SEQ ID NO: 113949 - DNA, 60 bp, Artificial
  Synthetic oligonucleotide
cgtaataagcaagtctacaaagcactggctattactggtaatgatcataaacctgaagga

SEQ ID NO: 113950 - DNA, 60 bp, Artificial
  Synthetic oligonucleotide
ttaaaggtaatggctatgttaatcaatttggtttttgggcattattatatttggattaca

SEQ ID NO: 113951 - DNA, 60 bp, Artificial
  Synthetic oligonucleotide
atctgacattctttggcaccacgaatattcaaagaattggccttttcatgcgtaataagc

SEQ ID NO: 113952 - DNA, 60 bp, Artificial
  Synthetic oligonucleotide
gcttcagtattagacgtcaaacgaggtattacaatagtaaaagcggaggttaatagggag

SEQ ID NO: 113953 - DNA, 60 bp, Artificial
  Synthetic oligonucleotide
cccaacacttcatctttcaaattgttgagtctcttcttccagtttcttcatgagaagact

SEQ ID NO: 113954 - DNA, 60 bp, Artificial
  Synthetic oligonucleotide
acacttcacccaacacttcatctttcaaattgttgagtctcttcttccagtttcttcatg

SEQ ID NO: 113955 - DNA, 60 bp, Artificial
  Synthetic oligonucleotide
taatgaattaatgaaggttgtgaatactctaggattgagcgaacctaatcaagtgttttt

SEQ ID NO: 113956 - DNA, 60 bp, Artificial
  Synthetic oligonucleotide
taagttcgataaccgccatgttacgtgaatatggtgctgaaatcgctcattcaggtcaat

SEQ ID NO: 113957 - DNA, 60 bp, Artificial
  Synthetic oligonucleotide
cgataaccgccatgttacgtgaatatggtgctgaaatcgctcattcaggtcaattcatca

SEQ ID NO: 113958 - DNA, 60 bp, Artificial
  Synthetic oligonucleotide
ttcagtggacaaatcacagacattcgaagaaatcaactcattccaacagccaaattcaaa

SEQ ID NO: 113959 - DNA, 60 bp, Artificial
  Synthetic oligonucleotide
cagtggacaaatcacagacattcgaagaaatcaactcattccaacagccaaattcaaaca

SEQ ID NO: 113960 - DNA, 60 bp, Artificial
  Synthetic oligonucleotide
aagtttttttcaggatgttgaaagtaaacgtgcaggctctcatctatcctttcagtggac

SEQ ID NO: 113961 - DNA, 60 bp, Artificial
  Synthetic oligonucleotide
ggatgttgaaagtaaacgtgcaggctctcatctatcctttcagtggacaaatcacagaca

SEQ ID NO: 113962 - DNA, 60 bp, Artificial
  Synthetic oligonucleotide
atgttggaaactgtcacgtgagctctcccctagccttttgacataccgtgttgtggcggc

SEQ ID NO: 113963 - DNA, 60 bp, Artificial
  Synthetic oligonucleotide
atgtgttttggaaggatgttggaaactgtcacgtgagctctcccctagccttttgacata

SEQ ID NO: 113964 - DNA, 60 bp, Artificial
  Synthetic oligonucleotide
ttcacccaaagaaatgattcttcgactgtttgtgcatgtgttttggaaggatgttggaaa

SEQ ID NO: 113965 - DNA, 60 bp, Artificial
  Synthetic oligonucleotide
taatatcattggaaatataggtaatgacttgcaatattggacgttgtggcctttacataa

SEQ ID NO: 113966 - DNA, 60 bp, Artificial
  Synthetic oligonucleotide
tataggtaatgacttgcaatattggacgttgtggcctttacataatgattacactcaagc

SEQ ID NO: 113967 - DNA, 60 bp, Artificial
  Synthetic oligonucleotide
ctttacataatgattacactcaagcagatacaaatcgtcctaatcatgctaatattctca

SEQ ID NO: 113968 - DNA, 60 bp, Artificial
  Synthetic oligonucleotide
ggtatgacagagcttcagtattagacgtcaaacgaggtattacaatagtaaaagcggagg

SEQ ID NO: 113969 - DNA, 61 bp, Artificial
  Synthetic oligonucleotide
cccgctttcccaagttattgtatattaatggtcatggaagaaaatttattaaattgccgag

SEQ ID NO: 113970 - DNA, 60 bp, Artificial
  Synthetic oligonucleotide
catgaccgttatggacgaaaacacaataatacgttatgttgggtatgacagagcttcagt

SEQ ID NO: 113971 - DNA, 60 bp, Artificial
  Synthetic oligonucleotide
aatgtgcttacatgaccgttatggacgaaaacacaataatacgttatgttgggtatgaca

SEQ ID NO: 113972 - DNA, 60 bp, Artificial
  Synthetic oligonucleotide
acactcaagcagatacaaatcgtcctaatcatgctaatattctcagaaacctaagtcatt

SEQ ID NO: 113973 - DNA, 60 bp, Artificial
  Synthetic oligonucleotide
aatattctcagaaacctaagtcattttgacaatgagttagttagtattcattattaccct

SEQ ID NO: 113974 - DNA, 60 bp, Artificial
  Synthetic oligonucleotide
aaaagcggaggttaatagggagaaattaatcgaattatgcggtttaggtcatgtctttgc

SEQ ID NO: 113975 - DNA, 60 bp, Artificial
  Synthetic oligonucleotide
agctgggtggtcgagtgggacaccttgagacaggacttgcaggattacgcgttgaccatg

SEQ ID NO: 113976 - DNA, 60 bp, Artificial
  Synthetic oligonucleotide
ctgggtggtcgagtgggacaccttgagacaggacttgcaggattacgcgttgaccatgac

SEQ ID NO: 113977 - DNA, 60 bp, Artificial
  Synthetic oligonucleotide
gctattggtcggatggatcctcgcttacgtgaagaagtagtgcgattgataattgcattg

SEQ ID NO: 113978 - DNA, 60 bp, Artificial
  Synthetic oligonucleotide
cggatggatcctcgcttacgtgaagaagtagtgcgattgataattgcattgacgagcgac

SEQ ID NO: 113979 - DNA, 60 bp, Artificial
  Synthetic oligonucleotide
aattgcattgacgagcgacaatggaacatcattgtcaaaagggcttgaaccaaggattgc

SEQ ID NO: 113980 - DNA, 60 bp, Artificial
  Synthetic oligonucleotide
cgagcgacaatggaacatcattgtcaaaagggcttgaaccaaggattgcagcgcttgaga

SEQ ID NO: 113981 - DNA, 54 bp, Artificial
  Synthetic oligonucleotide
caaggattgcagcgcttgagaagacgtcgcaaatacactctgatactatcctca

SEQ ID NO: 113982 - DNA, 60 bp, Artificial
  Synthetic oligonucleotide
tgtcggagccctccaaacaactgtcaatggacttgattcgagtgttacccagctgggtgg

SEQ ID NO: 113983 - DNA, 60 bp, Artificial
  Synthetic oligonucleotide
cggagccctccaaacaactgtcaatggacttgattcgagtgttacccagctgggtggtcg

SEQ ID NO: 113984 - DNA, 60 bp, Artificial
  Synthetic oligonucleotide
ggtagtgggttgagttggagggtacaggtgaattctgacatcttcattgctgatgattat

SEQ ID NO: 113985 - DNA, 60 bp, Artificial
  Synthetic oligonucleotide
ggcagagcatgtggataggggtagtctcatactctggtagtgggttgagttggagggtac

SEQ ID NO: 113986 - DNA, 60 bp, Artificial
  Synthetic oligonucleotide
catatatgtcttccagcttttgatggttttacaatagccgatggtggagacctatcgcta

SEQ ID NO: 113987 - DNA, 60 bp, Artificial
  Synthetic oligonucleotide
tgatgattatatacatatatgtcttccagcttttgatggttttacaatagccgatggtgg

SEQ ID NO: 113988 - DNA, 60 bp, Artificial
  Synthetic oligonucleotide
cctatcgctaaactttgtcacagggctgttgccaccgctactaattggggacactgagcc

SEQ ID NO: 113989 - DNA, 60 bp, Artificial
  Synthetic oligonucleotide
ccgatggtggagacctatcgctaaactttgtcacagggctgttgccaccgctactaattg

SEQ ID NO: 113990 - DNA, 60 bp, Artificial
  Synthetic oligonucleotide
ggggacactgagcctgctttccataatgatatagttacgtatggcgcacggactatagct

SEQ ID NO: 113991 - DNA, 60 bp, Artificial
  Synthetic oligonucleotide
ctactaattggggacactgagcctgctttccataatgatatagttacgtatggcgcacgg

SEQ ID NO: 113992 - DNA, 60 bp, Artificial
  Synthetic oligonucleotide
ggcgcacggactatagctatagggttgtcgtcgggcggtacgcctcagtatatgagtaaa

SEQ ID NO: 113993 - DNA, 60 bp, Artificial
  Synthetic oligonucleotide
tggcgcacggactatagctatagggttgtcgtcgggcggtacgcctcagtatatgagtaa

SEQ ID NO: 113994 - DNA, 60 bp, Artificial
  Synthetic oligonucleotide
tgccatgactatttcttatccacgtagtttcacgtgaggatcagaccacctcgcggcact

SEQ ID NO: 113995 - DNA, 60 bp, Artificial
  Synthetic oligonucleotide
tcttatccacgtagtttcacgtgaggatcagaccacctcgcggcactggggcatttcatc

SEQ ID NO: 113996 - DNA, 60 bp, Artificial
  Synthetic oligonucleotide
atatgagtaaaaacttgtgggtggagcagtggcaggatggggtactacggttgcgtgttg

SEQ ID NO: 113997 - DNA, 60 bp, Artificial
  Synthetic oligonucleotide
aaaacttgtgggtggagcagtggcaggatggggtactacggttgcgtgttgaaggagggg

SEQ ID NO: 113998 - DNA, 60 bp, Artificial
  Synthetic oligonucleotide
ttcaaaatggtgggcttcaattccggtttaataccgatcaattccagatagttaataata

SEQ ID NO: 113999 - DNA, 55 bp, Artificial
  Synthetic oligonucleotide
gttaggaaataatcttgctattcgtctgccagggcagacaggtttgaatattcaa

SEQ ID NO: 114000 - DNA, 60 bp, Artificial
  Synthetic oligonucleotide
cactgagctatctacacttacactacgtgtgacatccatacaatcggatttcgaatctcg

SEQ ID NO: 114001 - DNA, 60 bp, Artificial
  Synthetic oligonucleotide
tggatcattgaccactgagctatctacacttacactacgtgtgacatccatacaatcgga

SEQ ID NO: 114002 - DNA, 60 bp, Artificial
  Synthetic oligonucleotide
ccatgacaatctcactacgagagtggacactgcggaacgtaacgttggatcattgaccac

SEQ ID NO: 114003 - DNA, 60 bp, Artificial
  Synthetic oligonucleotide
gttgaccatgacaatctcactacgagagtggacactgcggaacgtaacgttggatcattg

SEQ ID NO: 114004 - DNA, 60 bp, Artificial
  Synthetic oligonucleotide
gttaggaaataatcttgctattcgtctgccagggcagacaggtttgaatattcaaaatgg

SEQ ID NO: 114005 - DNA, 60 bp, Artificial
  Synthetic oligonucleotide
ccgtatgactatgggcttgaatgacggattaaacgtgttaggaaataatcttgctattcg

SEQ ID NO: 114006 - DNA, 60 bp, Artificial
  Synthetic oligonucleotide
tcgattagtaataaccgtatgactatgggcttgaatgacggattaaacgtgttaggaaat

SEQ ID NO: 114007 - DNA, 54 bp, Artificial
  Synthetic oligonucleotide
tacaatcggatttcgaatctcgaatagctacattagagcgtacagcagtcacta

SEQ ID NO: 114008 - DNA, 60 bp, Artificial
  Synthetic oligonucleotide
ctctagcggacagttagccgtgaagtcggcatcgcctaacttaagatatccaattgctga

SEQ ID NO: 114009 - DNA, 60 bp, Artificial
  Synthetic oligonucleotide
taacttaagatatccaattgctgatattagtggtagtataggaatgagccctaactatag

SEQ ID NO: 114010 - DNA, 60 bp, Artificial
  Synthetic oligonucleotide
gtactaaggtgttggatatgctcatagatagctcaactcttgaaattaactctagcggac

SEQ ID NO: 114011 - DNA, 60 bp, Artificial
  Synthetic oligonucleotide
actcttgaaattaactctagcggacagttagccgtgaagtcggcatcgcctaacttaaga

SEQ ID NO: 114012 - DNA, 60 bp, Artificial
  Synthetic oligonucleotide
tgaacaaagttatgttgcgtcagtagtgactcccttgagacttaatagcagtactaaggt

SEQ ID NO: 114013 - DNA, 60 bp, Artificial
  Synthetic oligonucleotide
tgagacttaatagcagtactaaggtgttggatatgctcatagatagctcaactcttgaaa

SEQ ID NO: 114014 - DNA, 60 bp, Artificial
  Synthetic oligonucleotide
gttaataataacttgactctcaagacaactgtatttgattcaattaactccagaataagt

SEQ ID NO: 114015 - DNA, 60 bp, Artificial
  Synthetic oligonucleotide
cagaataagtacgattgaacaaagttatgttgcgtcagtagtgactcccttgagacttaa

SEQ ID NO: 114016 - DNA, 60 bp, Artificial
  Synthetic oligonucleotide
ccaattgctgatattagtggtagtataggaatgagccctaactataggttcaggcagagc

SEQ ID NO: 114017 - DNA, 60 bp, Artificial
  Synthetic oligonucleotide
ctaactataggttcaggcagagcatgtggataggggtagtctcatactctggtagtgggt

SEQ ID NO: 114018 - DNA, 60 bp, Artificial
  Synthetic oligonucleotide
gcaacagttggacttacgttacgtattgagtctgcagtttgtgaatcagtgcttgcggat

SEQ ID NO: 114019 - DNA, 60 bp, Artificial
  Synthetic oligonucleotide
ccttttcaacatcatgcaacagttggacttacgttacgtattgagtctgcagtttgtgaa

SEQ ID NO: 114020 - DNA, 60 bp, Artificial
  Synthetic oligonucleotide
gcttgcggatgcaaatgaaactttattggcgaatgttaccgcagtacgtcaagagtatgc

SEQ ID NO: 114021 - DNA, 60 bp, Artificial
  Synthetic oligonucleotide
agtttgtgaatcagtgcttgcggatgcaaatgaaactttattggcgaatgttaccgcagt

SEQ ID NO: 114022 - DNA, 60 bp, Artificial
  Synthetic oligonucleotide
ccaggcatgaattggactgagctgattactaactattcaccatccagggaagataatttg

SEQ ID NO: 114023 - DNA, 60 bp, Artificial
  Synthetic oligonucleotide
caagagtatgctataccagttggaccagtattcccaccaggcatgaattggactgagctg

SEQ ID NO: 114024 - DNA, 60 bp, Artificial
  Synthetic oligonucleotide
agataatttgcaacgtgtctttacagtagcctctatcagaagcatgttgattaagtgagg

SEQ ID NO: 114025 - DNA, 60 bp, Artificial
  Synthetic oligonucleotide
caggcatgaattggactgagctgattactaactattcaccatccagggaagataatttgc

SEQ ID NO: 114026 - DNA, 60 bp, Artificial
  Synthetic oligonucleotide
gtgaggaccagactaaccatctggtatccaatcttagttagcatgtagctacgtcaagtc

SEQ ID NO: 114027 - DNA, 60 bp, Artificial
  Synthetic oligonucleotide
ttaagtgaggaccagactaaccatctggtatccaatcttagttagcatgtagctacgtca

SEQ ID NO: 114028 - DNA, 60 bp, Artificial
  Synthetic oligonucleotide
tgttagcgatctcattcagcaatttaatcaaatgatagtaaccatgaatggaaatgactt

SEQ ID NO: 114029 - DNA, 60 bp, Artificial
  Synthetic oligonucleotide
gctagggataagattgttgaaggtacattatattctaatgttagcgatctcattcagcaa

SEQ ID NO: 114030 - DNA, 60 bp, Artificial
  Synthetic oligonucleotide
actcttaaagatgctagggataagattgttgaaggtacattatattctaatgttagcgat

SEQ ID NO: 114031 - DNA, 50 bp, Artificial
  Synthetic oligonucleotide
tggaatttgcaaaatagaagacaacgtaccggatttgtttttcataaacc

SEQ ID NO: 114032 - DNA, 59 bp, Artificial
  Synthetic oligonucleotide
agtctcaaagaaatggagtagctccacaatctgaggcgttaaggaagctagccggtatt

SEQ ID NO: 114033 - DNA, 60 bp, Artificial
  Synthetic oligonucleotide
tttttactaaatggacaaattattaatacatatcaagctagatttggcactattatcgca

SEQ ID NO: 114034 - DNA, 60 bp, Artificial
  Synthetic oligonucleotide
tattatcgcaagaaattttgatacaattcgtctatcattccaattaatgcgtccaccaaa

SEQ ID NO: 114035 - DNA, 60 bp, Artificial
  Synthetic oligonucleotide
ccagcttagacgtgcgctaactacagctactataactttgttacctgatgcagaaagatt

SEQ ID NO: 114036 - DNA, 60 bp, Artificial
  Synthetic oligonucleotide
catggttctttaatccaattatcctaagaccaaacaatgtagaggtagaatttttactaa

SEQ ID NO: 114037 - DNA, 60 bp, Artificial
  Synthetic oligonucleotide
tcgtgcgctctaaatgctccagcaaatattcaacagtttgaacatattgtccagcttaga

SEQ ID NO: 114038 - DNA, 60 bp, Artificial
  Synthetic oligonucleotide
gctccagcaaatattcaacagtttgaacatattgtccagcttagacgtgcgctaactaca

SEQ ID NO: 114039 - DNA, 60 bp, Artificial
  Synthetic oligonucleotide
cagcatcatttactttaaatagatctcaaccaatgcatgacaacttgatgggaaccatgt

SEQ ID NO: 114040 - DNA, 60 bp, Artificial
  Synthetic oligonucleotide
actttaaatagatctcaaccaatgcatgacaacttgatgggaaccatgtggcttaatgct

SEQ ID NO: 114041 - DNA, 60 bp, Artificial
  Synthetic oligonucleotide
agctacgtcaagtcattcagactctacaagtaaggacatgacttcatgttcgctacgtag

SEQ ID NO: 114042 - DNA, 60 bp, Artificial
  Synthetic oligonucleotide
ctacgtcaagtcattcagactctacaagtaaggacatgacttcatgttcgctacgtagag

SEQ ID NO: 114043 - DNA, 60 bp, Artificial
  Synthetic oligonucleotide
ttttgatacaattcgtctatcattccaattaatgcgtccaccaaacatgacaccagccgt

SEQ ID NO: 114044 - DNA, 60 bp, Artificial
  Synthetic oligonucleotide
gtccaccaaacatgacaccagccgtaaatgcattatttccgcaagcacaaccttttcaac

SEQ ID NO: 114045 - DNA, 60 bp, Artificial
  Synthetic oligonucleotide
ggcaacagtaatcaacttggtactttgatgtcaaccacaatcagttcggcttatactcta

SEQ ID NO: 114046 - DNA, 60 bp, Artificial
  Synthetic oligonucleotide
ataatgctgatagaaacgctttgtacattgaggatcacaccttggtttatactagaccat

SEQ ID NO: 114047 - DNA, 60 bp, Artificial
  Synthetic oligonucleotide
gaatatgctgatatacttgatcgtaattacgggattgctattccgactccaccaaatata

SEQ ID NO: 114048 - DNA, 60 bp, Artificial
  Synthetic oligonucleotide
tcactgttcagttagctatgttggcctccagattgataagaacttatcagctagacgatc

SEQ ID NO: 114049 - DNA, 60 bp, Artificial
  Synthetic oligonucleotide
ctagacgatcctgtcgttcttgactcacagggaaactatgtcactcagccttttgaaccg

SEQ ID NO: 114050 - DNA, 60 bp, Artificial
  Synthetic oligonucleotide
cagaaagcttgaaataggtcctaccaacctggagatcatcacatctagtctgggtcgtga

SEQ ID NO: 114051 - DNA, 60 bp, Artificial
  Synthetic oligonucleotide
atgtagctggtccacagcccgcagatagagataacgccgttaaggagggtaatcttccac

SEQ ID NO: 114052 - DNA, 60 bp, Artificial
  Synthetic oligonucleotide
actgaagtagttgacaagctcagagccgcaatgtctgatggcatggctaaagacatgccg

SEQ ID NO: 114053 - DNA, 60 bp, Artificial
  Synthetic oligonucleotide
caaggcagactccaaatgtaatcaaagagcttaagaaggatactcgtaaaatcagaaagc

SEQ ID NO: 114054 - DNA, 59 bp, Artificial
  Synthetic oligonucleotide
cttatgccaatcaacttctagcttcacttgatctgagtagcaatgagaaggtacgtacg

SEQ ID NO: 114055 - DNA, 60 bp, Artificial
  Synthetic oligonucleotide
aagttctgacaacaacgtatcaatcagccgttcctcttatgccaatcaacttctagcttc

SEQ ID NO: 114056 - DNA, 60 bp, Artificial
  Synthetic oligonucleotide
cactatgcccgtcgaaacttacccaagtatcacctaccacgagttgatgttgtcaagaga

SEQ ID NO: 114057 - DNA, 60 bp, Artificial
  Synthetic oligonucleotide
ataactcgggaacttgctatcgttaagtctgaaatcgtaacaactggtagtattcaacaa

SEQ ID NO: 114058 - DNA, 60 bp, Artificial
  Synthetic oligonucleotide
tgtcaagagatttcgctcggcaaataagcaggggagtgattgttaccggagttccttttc

SEQ ID NO: 114059 - DNA, 60 bp, Artificial
  Synthetic oligonucleotide
ctgctatttataggtgaggacaatattaccgactccagctacacatcctctctgctgacg

SEQ ID NO: 114060 - DNA, 60 bp, Artificial
  Synthetic oligonucleotide
acacatcctctctgctgacgatagccagtttcattaagaacagaccgattgacgcattac

SEQ ID NO: 114061 - DNA, 54 bp, Artificial
  Synthetic oligonucleotide
tctgagtcccttgagtatgacacctagtctgtacgatagcattgataccatggc

SEQ ID NO: 114062 - DNA, 60 bp, Artificial
  Synthetic oligonucleotide
ataagatcgaatttgtcatcggatttaatgatgaaccacagattgaggctgaatatgctg

SEQ ID NO: 114063 - DNA, 60 bp, Artificial
  Synthetic oligonucleotide
gaagtcatatcagtcactaagtcaggaccagtcatcaataagatcgaatttgtcatcgga

SEQ ID NO: 114064 - DNA, 60 bp, Artificial
  Synthetic oligonucleotide
tgacgatagccagtttcattaagaacagaccgattgacgcattaccatggactgatcccg

SEQ ID NO: 114065 - DNA, 60 bp, Artificial
  Synthetic oligonucleotide
gacgcattaccatggactgatcccgctcaactgagaaatgaactacgtatggcttcttgg

SEQ ID NO: 114066 - DNA, 60 bp, Artificial
  Synthetic oligonucleotide
gggatttgtcaaacatcatcagtaatatgtccaataatagatggcgtgtcggcaacagta

SEQ ID NO: 114067 - DNA, 60 bp, Artificial
  Synthetic oligonucleotide
caccgatcatgtctgatggagaacctggtctttacaacggagctttcaattgtaattccg

SEQ ID NO: 114068 - DNA, 60 bp, Artificial
  Synthetic oligonucleotide
gcttcttggcccttcgtcgaacgtaacacacctgttcaatttcgagttaggtattcaccg

SEQ ID NO: 114069 - DNA, 60 bp, Artificial
  Synthetic oligonucleotide
gactgatcccgctcaactgagaaatgaactacgtatggcttcttggcccttcgtcgaacg

SEQ ID NO: 114070 - DNA, 60 bp, Artificial
  Synthetic oligonucleotide
ggtcaaattccgaacattattgattgtatggcggcaacattttacctgctatttataggt

SEQ ID NO: 114071 - DNA, 60 bp, Artificial
  Synthetic oligonucleotide
aatattccggactagaattgcatcgtggatatgtttattatcaacctaggcatggatcac

SEQ ID NO: 114072 - DNA, 60 bp, Artificial
  Synthetic oligonucleotide
atacaattgggagctagagtgtggggccgaaacatcattaagttgactgattacatggaa

SEQ ID NO: 114073 - DNA, 60 bp, Artificial
  Synthetic oligonucleotide
ttcatacaatgatgtcatcagtcgtgtccgtggtggactgcctaatgctttggctaccgg

SEQ ID NO: 114074 - DNA, 60 bp, Artificial
  Synthetic oligonucleotide
agaagttccacgtaatacagatccaattctgggaagcatcgcaacgtcgagtatacagta

SEQ ID NO: 114075 - DNA, 60 bp, Artificial
  Synthetic oligonucleotide
gcagcaaagaaagaagagaatgtcgttgaagattcaggctctgtcagccattcccgactc

SEQ ID NO: 114076 - DNA, 60 bp, Artificial
  Synthetic oligonucleotide
ggatgagctcgcgtaaccgtagatctaacatgaagaagaacaagcaaaacgcagcaaaga

SEQ ID NO: 114077 - DNA, 60 bp, Artificial
  Synthetic oligonucleotide
ggctaatgatatagaccgtactctgatcatggcccgttccataatgagggttgaaaggcc

SEQ ID NO: 114078 - DNA, 60 bp, Artificial
  Synthetic oligonucleotide
gttaagattacagtttcttcgccatgtgcagagatctacataccggcttatgttgcatcc

SEQ ID NO: 114079 - DNA, 60 bp, Artificial
  Synthetic oligonucleotide
atcaacctaggcatggatcactccgtgtactgatcgaactacttaagcgtgaatgttcgg

SEQ ID NO: 114080 - DNA, 60 bp, Artificial
  Synthetic oligonucleotide
gtgatgctagattcgataacgtgttcagacggtctccattcgtagccactatgcccgtcg

SEQ ID NO: 114081 - DNA, 60 bp, Artificial
  Synthetic oligonucleotide
aatcgtggattataaccgtagtcttgttagatacgataatgctgatagaaacgctttgta

SEQ ID NO: 114082 - DNA, 60 bp, Artificial
  Synthetic oligonucleotide
cgtaaacaacagcatgacgtaattaatgaacccctggctgagatcactgatggtgtcatt

SEQ ID NO: 114083 - DNA, 60 bp, Artificial
  Synthetic oligonucleotide
ggctgagatcactgatggtgtcattaacatattgaggaataacttgggtgcttttggaat

SEQ ID NO: 114084 - DNA, 60 bp, Artificial
  Synthetic oligonucleotide
ttacatggaattgcttagagctgagattccagccaactaccgattgaaagaatattccgg

SEQ ID NO: 114085 - DNA, 60 bp, Artificial
  Synthetic oligonucleotide
acagtattctgatttatccaagtaatgctggtattgttcgtgatgctagattcgataacg

SEQ ID NO: 114086 - DNA, 60 bp, Artificial
  Synthetic oligonucleotide
gtcactcagccttttgaaccgggaaccaagttcacgaaggacggtcttagctactctcag

SEQ ID NO: 114087 - DNA, 60 bp, Artificial
  Synthetic oligonucleotide
gagggttgaaaggccagaagaagcaccgatcatgtcatatgtcaatgggatgtcccgagt

SEQ ID NO: 114088 - DNA, 60 bp, Artificial
  Synthetic oligonucleotide
tcgttgataatcgtgatggacgtagtgtcacttcttgctttgatggacgtatcaagaata

SEQ ID NO: 114089 - DNA, 60 bp, Artificial
  Synthetic oligonucleotide
gccggctgaagttatggctataatgagatcagctcttatcgttgataatcgtgatggacg

SEQ ID NO: 114090 - DNA, 60 bp, Artificial
  Synthetic oligonucleotide
ggaattttcgattcttaagacgagcttgctccgatagagtcggaaatggcggaacttgtt

SEQ ID NO: 114091 - DNA, 50 bp, Artificial
  Synthetic oligonucleotide
acaaataatccgttaattacccaagatctctccttgggctaaatacaccc

SEQ ID NO: 114092 - DNA, 60 bp, Artificial
  Synthetic oligonucleotide
cataatacaacaacggaggcgatacaaacgtatattaaacccttttgtgcggctttcggt

SEQ ID NO: 114093 - DNA, 60 bp, Artificial
  Synthetic oligonucleotide
caacgacagaggcgatacaaacgtatattaaacccttttgtgcggctttcgggataataa

SEQ ID NO: 114094 - DNA, 60 bp, Artificial
  Synthetic oligonucleotide
caacgacggaggcgatacaaacgtatattaaacccttttgtgcggctttcgggataataa

SEQ ID NO: 114095 - DNA, 60 bp, Artificial
  Synthetic oligonucleotide
tacatcaaactacatattagcaagatcagttgtgcctgatttgaaggagaaagaattagt

SEQ ID NO: 114096 - DNA, 60 bp, Artificial
  Synthetic oligonucleotide
gctaggaacctcgatggatatcaacaaattaatttggaagagttaatgagaactggggac

SEQ ID NO: 114097 - DNA, 60 bp, Artificial
  Synthetic oligonucleotide
taaacaaccagcctgtagctttggtaggagcactgccatttgtgacagattcatcagtta

SEQ ID NO: 114098 - DNA, 60 bp, Artificial
  Synthetic oligonucleotide
cagacgtaaccatggaaaataaaaataacaatagaaaacagcaattatctgacaaagtgc

SEQ ID NO: 114099 - DNA, 60 bp, Artificial
  Synthetic oligonucleotide
ggtcagttagttgatttaacaagattagtatcatataattatgaaactttaatggcttgt

SEQ ID NO: 114100 - DNA, 60 bp, Artificial
  Synthetic oligonucleotide
cttcgtgaatcgctagtcgcatgcgaattggctataataaatactatagtttacccagca

SEQ ID NO: 114101 - DNA, 60 bp, Artificial
  Synthetic oligonucleotide
gaaagaattaaggaataggtggtattggaaattgaaaaaagatacactgccagacggaga

SEQ ID NO: 114102 - DNA, 60 bp, Artificial
  Synthetic oligonucleotide
ttacaaatttttgatgtaccacgagtgccagatgaccaaatgtacaggttgagagacaga

SEQ ID NO: 114103 - DNA, 60 bp, Artificial
  Synthetic oligonucleotide
atatttcaagatgaagagacagagggagttattagaagattcatcgcagatatgagacaa

SEQ ID NO: 114104 - DNA, 60 bp, Artificial
  Synthetic oligonucleotide
cgaacgaattaatgatgcagtggccatcattacggctgctaatagactaaacttatacca

SEQ ID NO: 114105 - DNA, 60 bp, Artificial
  Synthetic oligonucleotide
caatggcgtacaggaaacgcggagttaaacgtgaaaacttaccacaacaacatgagcgtc

SEQ ID NO: 114106 - DNA, 60 bp, Artificial
  Synthetic oligonucleotide
ttctgaatcatcaattagttgaaccattgaataacgaaatcatttttaattatataccag

SEQ ID NO: 114107 - DNA, 60 bp, Artificial
  Synthetic oligonucleotide
gaaccaagacaattaccaatatatcgaacaaatggtgagaaagaattaaggaataggtgg

SEQ ID NO: 114108 - DNA, 60 bp, Artificial
  Synthetic oligonucleotide
gagcgactagtgccgcaattgcagcccttatctaatcgtccttggagtgaggggatcccc

SEQ ID NO: 114109 - DNA, 60 bp, Artificial
  Synthetic oligonucleotide
ctagtgccgcaattgcagcccttatctaatcgtcttgaagtgaggggatccccccacacc

SEQ ID NO: 114110 - DNA, 53 bp, Artificial
  Synthetic oligonucleotide
ctagtgccgcaattgcagcccttatctaatcgtcttgaagtgaggggatcccc

SEQ ID NO: 114111 - DNA, 60 bp, Artificial
  Synthetic oligonucleotide
gtccaaaaatacgggcattaatcccagtttttacatagggttgaatatccacatagattg

SEQ ID NO: 114112 - DNA, 60 bp, Artificial
  Synthetic oligonucleotide
gggcaagctttctatacatagcgattatattaatcagattgggcaagtatgtccaaaaat

SEQ ID NO: 114113 - DNA, 60 bp, Artificial
  Synthetic oligonucleotide
tatttaccgatcactggctccctggatacagcatatgcaaatttatcacagcaagaaacg

SEQ ID NO: 114114 - DNA, 60 bp, Artificial
  Synthetic oligonucleotide
tacgggttgcacagggattttctccatcaaataagtgggacgtgagcacagccgcacgaa

SEQ ID NO: 114115 - DNA, 60 bp, Artificial
  Synthetic oligonucleotide
gcaagccgtaaaagctcttcaactacgctttaagggtttcttctgagtccgagctgtgtg

SEQ ID NO: 114116 - DNA, 60 bp, Artificial
  Synthetic oligonucleotide
cgtgccgcgtgtgccggttcttggagtcacgtatgcgagcatatatcaggatagcagaac

SEQ ID NO: 114117 - DNA, 60 bp, Artificial
  Synthetic oligonucleotide
cacggcagacacactttccaagatgcatacacagaatgcgcacggaacttcggatactat

SEQ ID NO: 114118 - DNA, 60 bp, Artificial
  Synthetic oligonucleotide
cgctggtattggaggtgtgaatattaagtatcgagtcaacaagataaccgcggatggcaa

SEQ ID NO: 114119 - DNA, 60 bp, Artificial
  Synthetic oligonucleotide
gccaatatacgagattgtgagacagaacaatggatcgcaaccatcgtacgcgtcgggtga

SEQ ID NO: 114120 - DNA, 60 bp, Artificial
  Synthetic oligonucleotide
gtgcagggtggttgacctcgcggcgtaaactcccactgctgtataacgggggagggtgcg

SEQ ID NO: 114121 - DNA, 60 bp, Artificial
  Synthetic oligonucleotide
gcatacatactgcagtgggatctggatcaggcacaaaaggatctggagaacgcgcgaacg

SEQ ID NO: 114122 - DNA, 60 bp, Artificial
  Synthetic oligonucleotide
gctcgcgcgattgaatctaaatacggtacgaagattgatgtttacagggatgacgttcca

SEQ ID NO: 114123 - DNA, 60 bp, Artificial
  Synthetic oligonucleotide
gtcgaggaagaaaagacgtctgaggagccggcacgcattggaattactatagaaggggtc

SEQ ID NO: 114124 - DNA, 53 bp, Artificial
  Synthetic oligonucleotide
ccagctcagatcatcgaggtggaacgcagtctccagaaagagttgggaatttc

SEQ ID NO: 114125 - DNA, 60 bp, Artificial
  Synthetic oligonucleotide
cgcagagagaaggtgtcgaggaagaaaagacgtctgaggagccggcacgcattggaatta

SEQ ID NO: 114126 - DNA, 60 bp, Artificial
  Synthetic oligonucleotide
cctcgattgaagtgctaaaccacattaaggattccaaactgtcaaaactcgactatcatt

SEQ ID NO: 114127 - DNA, 60 bp, Artificial
  Synthetic oligonucleotide
gtaaggcatgtcgtaacaattacggaactagcttcgaactttccttgtgtcaactgggac

SEQ ID NO: 114128 - DNA, 60 bp, Artificial
  Synthetic oligonucleotide
gtaaggcatgtcgtaacaattacggaactagcttcgagctttccttgtgtcaactgggac

SEQ ID NO: 114129 - DNA, 60 bp, Artificial
  Synthetic oligonucleotide
atgccttatactctcagaaaatttggcagattgggaattgacgatgacgactgtgaactg

SEQ ID NO: 114130 - DNA, 60 bp, Artificial
  Synthetic oligonucleotide
tgtatgccttatactctcagaaaatttggcagattgggaattgacgatgacgactgtgaa

SEQ ID NO: 114131 - DNA, 60 bp, Artificial
  Synthetic oligonucleotide
cacggttcagttacacaatacgtgattccagaatggcttggagagagcattactttgtat

SEQ ID NO: 114132 - DNA, 56 bp, Artificial
  Synthetic oligonucleotide
cggttcagttactcaatacgtgattccagaatggcttggagagagcattactttgt

SEQ ID NO: 114133 - DNA, 60 bp, Artificial
  Synthetic oligonucleotide
cattttagatgtaaggcatgtcgtaacaattacggaactagcttcgaactttccttgtgt

SEQ ID NO: 114134 - DNA, 60 bp, Artificial
  Synthetic oligonucleotide
cattttagatgtaaggcatgtcgtaacaattacggaactagcttcgagctttccttgtgt

SEQ ID NO: 114135 - DNA, 60 bp, Artificial
  Synthetic oligonucleotide
ctcagaaaatttggcagattgggaattgacgatgacgactgtgaattgtcagatgctatc

SEQ ID NO: 114136 - DNA, 60 bp, Artificial
  Synthetic oligonucleotide
cagaaaatttggcagattgggaattgacgatgacgactgtgaactgtcagatgctatctc

SEQ ID NO: 114137 - DNA, 53 bp, Artificial
  Synthetic oligonucleotide
tctgaaaaaagtgctcttcgacccaaccaacgaaattagaattctcaaccacg

SEQ ID NO: 114138 - DNA, 60 bp, Artificial
  Synthetic oligonucleotide
ccacaatgatgatcgttcacgaattctccgacctaacgacccgcgactcagtagtccctc

SEQ ID NO: 114139 - DNA, 60 bp, Artificial
  Synthetic oligonucleotide
aatgatgattattcacgaattctccgacctaacgacccgcgactcagtagtccctcaaat

SEQ ID NO: 114140 - DNA, 60 bp, Artificial
  Synthetic oligonucleotide
cacgaattctccgacctaacgacccgcgactcagtagtccctcaaattgctgaaatggca

SEQ ID NO: 114141 - DNA, 50 bp, Artificial
  Synthetic oligonucleotide
gtgttcttattctcatgtcagatcattcaagctatcttttcatcatgtgt

SEQ ID NO: 114142 - DNA, 60 bp, Artificial
  Synthetic oligonucleotide
taacctcgattgaagtgctaaaccacattaaggattccaaactgtcaaaactcgactatc

SEQ ID NO: 114143 - DNA, 60 bp, Artificial
  Synthetic oligonucleotide
ccatatcagtttctgaaagaaggaatgagcgtaaacttctacgatcctatctttgaatgc

SEQ ID NO: 114144 - DNA, 60 bp, Artificial
  Synthetic oligonucleotide
gactagaacaactaggcttcctgaaagatggacttctgtctaaagatgattttttgaaga

SEQ ID NO: 114145 - DNA, 51 bp, Artificial
  Synthetic oligonucleotide
aagttgtcagcttcgcaaagacatgctattggaacgaaatatgatgacaag

SEQ ID NO: 114146 - DNA, 53 bp, Artificial
  Synthetic oligonucleotide
aaaagttgtcagcttcgcaaagacatgctattggaacgaaatacgacgacaag

SEQ ID NO: 114147 - DNA, 60 bp, Artificial
  Synthetic oligonucleotide
gaattagttggtgcttcaggcaaaaagttgtcagcttcgcaaagacatgctattggaacg

SEQ ID NO: 114148 - DNA, 60 bp, Artificial
  Synthetic oligonucleotide
tcggcagcacgctaggagtcatgcctcacctctgaggatgtgttatccctggctgcaagc

SEQ ID NO: 114149 - DNA, 60 bp, Artificial
  Synthetic oligonucleotide
ctctacttttcggcagcacgctaggagtcatgcctcacctctgaggatgtgttatccctg

SEQ ID NO: 114150 - DNA, 60 bp, Artificial
  Synthetic oligonucleotide
gttatccctggctgcaagcggggggcacgtgaacaagggttctgtgtctccttagatgcg

SEQ ID NO: 114151 - DNA, 60 bp, Artificial
  Synthetic oligonucleotide
cagcacgctaggagtcatgcttcatctctgaggatgtgttatccctggctgcaagcgggg

SEQ ID NO: 114152 - DNA, 60 bp, Artificial
  Synthetic oligonucleotide
taaaccacattaaggattccaaactgtcaaaacttgattaccatttgaagcaagaatacg

SEQ ID NO: 114153 - DNA, 55 bp, Artificial
  Synthetic oligonucleotide
gatggacttctgtctaaagatgattttttgaagataccaattgatttcatgacta

SEQ ID NO: 114154 - DNA, 60 bp, Artificial
  Synthetic oligonucleotide
catgcttcccaaatgtcttataattggaaaagtctcaccactgaaaaacgtccatatcag

SEQ ID NO: 114155 - DNA, 61 bp, Artificial
  Synthetic oligonucleotide
ccgacgcgtttatgttttcagagatttgctataaaaggattttctataagtagtttgtacg

SEQ ID NO: 114156 - DNA, 60 bp, Artificial
  Synthetic oligonucleotide
atccgacgcgtttatgttttcagagatttgctataaaaggattttctataagtagtttgt

SEQ ID NO: 114157 - DNA, 60 bp, Artificial
  Synthetic oligonucleotide
ttaggaaattaatccgtattccaaaagtaacaaaatctattgtacctagaggaataataa

SEQ ID NO: 114158 - DNA, 60 bp, Artificial
  Synthetic oligonucleotide
catgcagcagttgcaaaagcgtcaatttattacttaagacttgcagtacatggatttggc

SEQ ID NO: 114159 - DNA, 60 bp, Artificial
  Synthetic oligonucleotide
aatgcatgcagcagttgcaaaagcgtcaatttattacttaagacttgcagtacatggatt

SEQ ID NO: 114160 - DNA, 60 bp, Artificial
  Synthetic oligonucleotide
aaaccagaaaggttacatttactgctggttgagaaaatgcatgcagcagttgcaaaagcg

SEQ ID NO: 114161 - DNA, 60 bp, Artificial
  Synthetic oligonucleotide
cagaggacgcattacatttgagactttcttcagtcatttcaccgtcatggacttgttcac

SEQ ID NO: 114162 - DNA, 60 bp, Artificial
  Synthetic oligonucleotide
cttcaagatatcttcagaggacgcattacatttgagactttcttcagtcatttcaccgtc

SEQ ID NO: 114163 - DNA, 60 bp, Artificial
  Synthetic oligonucleotide
cgagtttgccagaactatggagcatttcattcgattcttcaagatatcttcagaggacgc

SEQ ID NO: 114164 - DNA, 60 bp, Artificial
  Synthetic oligonucleotide
gttaaaaatcattacgagtttgccagaactatggagcatttcattcgattcttcaagata

SEQ ID NO: 114165 - DNA, 60 bp, Artificial
  Synthetic oligonucleotide
tggtgtaatgttttaaatcatgcgaagaaacatgtacctgaccatgagttagaaagaaat

SEQ ID NO: 114166 - DNA, 60 bp, Artificial
  Synthetic oligonucleotide
cgaaaagatcagctcaaggggtagtatggttaccagatacagtaatgaatgtgtttaaca

SEQ ID NO: 114167 - DNA, 57 bp, Artificial
  Synthetic oligonucleotide
tcgtaagtgtatgcagtagagtattgatggagcaagattatggtgatgttcaattaa

SEQ ID NO: 114168 - DNA, 55 bp, Artificial
  Synthetic oligonucleotide
tttcaccgtcatggacttgttcacatcgatcgagggagtgtttgataaaaggaac

SEQ ID NO: 114169 - DNA, 60 bp, Artificial
  Synthetic oligonucleotide
agaaagaaatgaagtattgagtgcgttatctgatacctatagtcattcaacattccaaga

SEQ ID NO: 114170 - DNA, 60 bp, Artificial
  Synthetic oligonucleotide
aatcatgcgaagaaacatgtacctgaccatgagttagaaagaaatgaagtattgagtgcg

SEQ ID NO: 114171 - DNA, 60 bp, Artificial
  Synthetic oligonucleotide
gagcggcagaaattttgggaagacagcccgaaagagcgggaagattaataaagcatcagg

SEQ ID NO: 114172 - DNA, 60 bp, Artificial
  Synthetic oligonucleotide
tgattcaagagcggcagaaattttgggaagacagcccgaaagagcgggaagattaataaa

SEQ ID NO: 114173 - DNA, 60 bp, Artificial
  Synthetic oligonucleotide
gctatgaatgctttagctagatgctatttatattggggtccgattgatacaaaaatagta

SEQ ID NO: 114174 - DNA, 60 bp, Artificial
  Synthetic oligonucleotide
attaatatagttaccaaaccagaaaggttacatttactgctggttgagaaaatgcatgca

SEQ ID NO: 114175 - DNA, 60 bp, Artificial
  Synthetic oligonucleotide
ctgagacatggagagatgctgtcacgccaaggcaaccattggatagcctttaattgtttg

SEQ ID NO: 114176 - DNA, 60 bp, Artificial
  Synthetic oligonucleotide
gagacatggagagatgctgtcacgccaaggcaaccattggatagcctttaattgtttgga

SEQ ID NO: 114177 - DNA, 60 bp, Artificial
  Synthetic oligonucleotide
gattaataaagcatcaggatggagatttacgtgacataagcagttttgagctgagacatg

SEQ ID NO: 114178 - DNA, 60 bp, Artificial
  Synthetic oligonucleotide
aggatggagatttacgtgacataagcagttttgagctgagacatggagagatgctgtcac

SEQ ID NO: 114179 - DNA, 60 bp, Artificial
  Synthetic oligonucleotide
acagatatttacgaggaagtggcttggagagttcttttgatattcaagtggctatgaatg

SEQ ID NO: 114180 - DNA, 60 bp, Artificial
  Synthetic oligonucleotide
ggaagtggcttggagagttcttttgatattcaagtggctatgaatgctttagctagatgc

SEQ ID NO: 114181 - DNA, 60 bp, Artificial
  Synthetic oligonucleotide
taattgtttggattcaaatgatgcgcttcttgttacaattactctaatacacagatattt

SEQ ID NO: 114182 - DNA, 60 bp, Artificial
  Synthetic oligonucleotide
caaatgatgcgcttcttgttacaattactctaatacacagatatttacgaggaagtggct

SEQ ID NO: 114183 - DNA, 60 bp, Artificial
  Synthetic oligonucleotide
gtattgagtgcgttatctgatacctatagtcattcaacattccaagaagagattgcgtct

SEQ ID NO: 114184 - DNA, 60 bp, Artificial
  Synthetic oligonucleotide
cattccaagaagagattgcgtctttgaagaggttcgaggagaaagcaacacctgtttaca

SEQ ID NO: 114185 - DNA, 60 bp, Artificial
  Synthetic oligonucleotide
ccaagaagagattgcgtctttgaagaggttcgaggagaaagcaacacctgtttacacgga

SEQ ID NO: 114186 - DNA, 60 bp, Artificial
  Synthetic oligonucleotide
cctgtttacacggatgattcagtgtcattgatttacactttctttatgctagtctcaact

SEQ ID NO: 114187 - DNA, 60 bp, Artificial
  Synthetic oligonucleotide
cacggatgattcagtgtcattgatttacactttctttatgctagtctcaactgatagtga

SEQ ID NO: 114188 - DNA, 60 bp, Artificial
  Synthetic oligonucleotide
agtctcaactgatagtgaaacaacaataacagatgtgagaagattaggacgttttttaat

SEQ ID NO: 114189 - DNA, 60 bp, Artificial
  Synthetic oligonucleotide
acaaatttaatatggcaaaattcgagtgaagcgagaccttttgtttcagaagttttaaat

SEQ ID NO: 114190 - DNA, 60 bp, Artificial
  Synthetic oligonucleotide
gcaaaattcgagtgaagcgagaccttttgtttcagaagttttaaattggggattaagagc

SEQ ID NO: 114191 - DNA, 60 bp, Artificial
  Synthetic oligonucleotide
agttttaaattggggattaagagcatgtaatgaatgtatatttacagggtcgaaaagatc

SEQ ID NO: 114192 - DNA, 60 bp, Artificial
  Synthetic oligonucleotide
ggggattaagagcatgtaatgaatgtatatttacagggtcgaaaagatcagctcaagggg

SEQ ID NO: 114193 - DNA, 60 bp, Artificial
  Synthetic oligonucleotide
actattctgcttctgagatgcgtaattggttcataacagatttagactgtcaaagttgtt

SEQ ID NO: 114194 - DNA, 60 bp, Artificial
  Synthetic oligonucleotide
agtagtttgtacgagatatttaatttgaaaattgagaataggaatttatttgatttgatc

SEQ ID NO: 114195 - DNA, 55 bp, Artificial
  Synthetic oligonucleotide
tgaataatcttatgaaatcccatttaaccgaggttaacgtagtgattaaggatac

SEQ ID NO: 114196 - DNA, 60 bp, Artificial
  Synthetic oligonucleotide
gttatgtacaggcgaattgcagtctaaaacagatcatggtacttgattcaagagcggcag

SEQ ID NO: 114197 - DNA, 60 bp, Artificial
  Synthetic oligonucleotide
caaagttgttatgtacaggcgaattgcagtctaaaacagatcatggtacttgattcaaga

SEQ ID NO: 114198 - DNA, 60 bp, Artificial
  Synthetic oligonucleotide
cagctcaaggggtagtatggttaccagatacagtaatgaatgtgtttaacaatccaaatg

SEQ ID NO: 114199 - DNA, 51 bp, Artificial
  Synthetic oligonucleotide
cgtaagtgtatgcagtagagtattgatggagcaagattatggtgatgttca

SEQ ID NO: 114200 - DNA, 60 bp, Artificial
  Synthetic oligonucleotide
tgaatgcaagggtaatttgatttcaaaatatccagtctatggattgtttaacgcaaggcg

SEQ ID NO: 114201 - DNA, 60 bp, Artificial
  Synthetic oligonucleotide
gcagatgtcgagtcatacatatttccgcgtatccgggagattctgactggtggaatttct

SEQ ID NO: 114202 - DNA, 60 bp, Artificial
  Synthetic oligonucleotide
cttgagaaatttatcggaagggtctcctatgtgaggagcgacgttatgtattgacgaacc

SEQ ID NO: 114203 - DNA, 60 bp, Artificial
  Synthetic oligonucleotide
ggaagggtctcctatgtgaggagcgacgttatgtattgacgaaccattctgtaggaaggc

SEQ ID NO: 114204 - DNA, 60 bp, Artificial
  Synthetic oligonucleotide
gatctagattacgaagtattgaaattagtgcatccactctcggtgccattcttgagaaat

SEQ ID NO: 114205 - DNA, 60 bp, Artificial
  Synthetic oligonucleotide
gtattgaaattagtgcatccactctcggtgccattcttgagaaatttatcggaagggtct

SEQ ID NO: 114206 - DNA, 60 bp, Artificial
  Synthetic oligonucleotide
agatgataatactccaagcaaggtacatatatcaatcaatgaagaacagttgcgtgactt

SEQ ID NO: 114207 - DNA, 60 bp, Artificial
  Synthetic oligonucleotide
ccgggtgacattaaaaagatgttcacatatattgcatatgtatacatgtgtcaaatgttc

SEQ ID NO: 114208 - DNA, 60 bp, Artificial
  Synthetic oligonucleotide
ttgacgaaccattctgtaggaaggctaggtaactcggttgggagttatcgaaactggctc

SEQ ID NO: 114209 - DNA, 60 bp, Artificial
  Synthetic oligonucleotide
tctttgatgcgacattttctccgtgacagaaaggacttaattaaggaaatgggattggat

SEQ ID NO: 114210 - DNA, 60 bp, Artificial
  Synthetic oligonucleotide
ctgaacaacatgacatatttattgacttataaatcatgtcatgagtttaaggatttttat

SEQ ID NO: 114211 - DNA, 60 bp, Artificial
  Synthetic oligonucleotide
gcgacattttctccgtgacagaaaggacttaattaaggaaatgggattggataagggaac

SEQ ID NO: 114212 - DNA, 60 bp, Artificial
  Synthetic oligonucleotide
ggagaaatggatcagacaaccaagttgacagtacaaatgatgcatctgtgaaaggtatgg

SEQ ID NO: 114213 - DNA, 60 bp, Artificial
  Synthetic oligonucleotide
atacgccggattatacgacgatcttttcaaattgaataacaataatgttgatatcgacgt

SEQ ID NO: 114214 - DNA, 60 bp, Artificial
  Synthetic oligonucleotide
tggtcaaatggtgggagtttcgtatccatcagctagcgaatccaaggcgcacatagaatc

SEQ ID NO: 114215 - DNA, 60 bp, Artificial
  Synthetic oligonucleotide
cgagtcatacatatttccgcgtatccgggagattctgactggtggaatttctggaatccg

SEQ ID NO: 114216 - DNA, 60 bp, Artificial
  Synthetic oligonucleotide
ctactgcttggaggcccgttaggccaatatacattaatgtcattcaggcccacttagccc

SEQ ID NO: 114217 - DNA, 60 bp, Artificial
  Synthetic oligonucleotide
aaaaactcattcaatggagaaatggatcagacaaccaagttgacagtacaaatgatgcat

SEQ ID NO: 114218 - DNA, 60 bp, Artificial
  Synthetic oligonucleotide
gggagtttcgtatccatcagctagtgaatccaaggcgcacatagaatcgtatattacacc

SEQ ID NO: 114219 - DNA, 60 bp, Artificial
  Synthetic oligonucleotide
ggagccgatgttcctgtctgagtatttgactcatttaaaccaagatgagaaaatgctgtt

SEQ ID NO: 114220 - DNA, 60 bp, Artificial
  Synthetic oligonucleotide
gcttggaggcccgttaggccaatatacattaatgtcattcaggcccacttagctcaagct

SEQ ID NO: 114221 - DNA, 60 bp, Artificial
  Synthetic oligonucleotide
ttactatgcaggtatgcattttagagatccatcaatccagctgcacgagtcagagaagat

SEQ ID NO: 114222 - DNA, 60 bp, Artificial
  Synthetic oligonucleotide
taaagatagtagatcaggtatcgtttgagcaaaatgagattgtgtcgaaatctttgatgc

SEQ ID NO: 114223 - DNA, 60 bp, Artificial
  Synthetic oligonucleotide
cgacgtgatcactaaacatgatgagacgattggtaaaataatctcaaaggagttgaaatc

SEQ ID NO: 114224 - DNA, 51 bp, Artificial
  Synthetic oligonucleotide
ggaatttctggaatccgagaagcatacattaatgagttgagagtctgtgaa

SEQ ID NO: 114225 - DNA, 55 bp, Artificial
  Synthetic oligonucleotide
atggagaaagacagaaaagtcaagctccatgatgatttatcattctcaaatgaag

SEQ ID NO: 114226 - DNA, 60 bp, Artificial
  Synthetic oligonucleotide
caagtcaatagtctacgacattgtattcatgcgaactctacttaatatgggaggctactc

SEQ ID NO: 114227 - DNA, 60 bp, Artificial
  Synthetic oligonucleotide
ttagattcacacaaactgagtatagctaggcagtcagaagcaaagctgaaatcagttggc

SEQ ID NO: 114228 - DNA, 60 bp, Artificial
  Synthetic oligonucleotide
aaaccctaatggtggaagggatttgaagaaagcagtgactagacttaatctatactacgg

SEQ ID NO: 114229 - DNA, 60 bp, Artificial
  Synthetic oligonucleotide
ctgagtatagctaggcagtcagaagcaaagctgaaatcagttggcgtaaacctaccaaaa

SEQ ID NO: 114230 - DNA, 60 bp, Artificial
  Synthetic oligonucleotide
aagcataccggaatctgaatgcaagggtaatttgatttcaaaatatccagtctatggatt

SEQ ID NO: 114231 - DNA, 60 bp, Artificial
  Synthetic oligonucleotide
gtaagttcaagcgtagccggatcccctagcctagtttggtttcaagtagctggagacgac

SEQ ID NO: 114232 - DNA, 58 bp, Artificial
  Synthetic oligonucleotide
aaaaccgcattgggaagataaagccatatcgattactatcaatgggtcaatattggaa

SEQ ID NO: 114233 - DNA, 60 bp, Artificial
  Synthetic oligonucleotide
aatccaattagatacatatcgaccccagatgagggaaaggcgttagagcgacttataggg

SEQ ID NO: 114234 - DNA, 60 bp, Artificial
  Synthetic oligonucleotide
taattggtcctcacataaatgcaacggtcggtcgccaacgtacaccacctaaaggtctgt

SEQ ID NO: 114235 - DNA, 60 bp, Artificial
  Synthetic oligonucleotide
tgtcattcaggcccacttagcccaagctttcataattggtcctcacataaatgcaacggt

SEQ ID NO: 114236 - DNA, 60 bp, Artificial
  Synthetic oligonucleotide
ctttctcctcaggaaattttgaaaatggaatttcaatgagattagaaagcttagattcgc

SEQ ID NO: 114237 - DNA, 60 bp, Artificial
  Synthetic oligonucleotide
ttaacgcatcttatctgggagaaagatattcatttaaagtacaatatatgtggtcgggaa

SEQ ID NO: 114238 - DNA, 60 bp, Artificial
  Synthetic oligonucleotide
gagccaagccaccgaagcatacgtgtctgccatgagtggcgcagatgtcgagtcatacat

SEQ ID NO: 114239 - DNA, 60 bp, Artificial
  Synthetic oligonucleotide
tttaaggtacaatatatgtggtcgggaagactagatactttcttcatgaactcagtacag

SEQ ID NO: 114240 - DNA, 60 bp, Artificial
  Synthetic oligonucleotide
gggaggctactcaaggtcaaatcaaattactgactttaagggcaccatagatgacattac

SEQ ID NO: 114241 - DNA, 60 bp, Artificial
  Synthetic oligonucleotide
ctctacttaatatgggaggctactcaaggtcaaatcaaattactgactttaagggcacca

SEQ ID NO: 114242 - DNA, 60 bp, Artificial
  Synthetic oligonucleotide
ggagtcaataataccatactaccaaggcataaaacgtgcaatcagtgagtttggtcaagc

SEQ ID NO: 114243 - DNA, 60 bp, Artificial
  Synthetic oligonucleotide
ggcgaggatgttgggattggatttgctaccatataccaaaatggaacttcagacgtgatt

SEQ ID NO: 114244 - DNA, 60 bp, Artificial
  Synthetic oligonucleotide
ttacgacattgtattcatgcgaactctacttaatatgggaggctactcaaggtcaaatca

SEQ ID NO: 114245 - DNA, 60 bp, Artificial
  Synthetic oligonucleotide
ggcccacttagcccaagctttcataattggtcctcacataaatgcaacggtcggtcgcca

SEQ ID NO: 114246 - DNA, 60 bp, Artificial
  Synthetic oligonucleotide
cgtaacacgaatacaatggcaaacgcttatggagaaagacagaaaagtcaagctccatga

SEQ ID NO: 114247 - DNA, 60 bp, Artificial
  Synthetic oligonucleotide
cggatctttaacgcatcttatctgggagaaagatattcatttaaggtacaatatatgtgg

SEQ ID NO: 114248 - DNA, 60 bp, Artificial
  Synthetic oligonucleotide
taccagaaaaaacggatctttaacgcatcttatctgggagaaagatattcatttaaggta

SEQ ID NO: 114249 - DNA, 60 bp, Artificial
  Synthetic oligonucleotide
ccatactaccaaggcataaaacgtgcaatcagtgagtttggtcaagctgatagcgaaaat

SEQ ID NO: 114250 - DNA, 60 bp, Artificial
  Synthetic oligonucleotide
agatgtgaaagaacaagcgttggatttttgaaaagaagcgcgatcgttagatttgaattc

SEQ ID NO: 114251 - DNA, 51 bp, Artificial
  Synthetic oligonucleotide
cgtataaaggtgtttcagtccaatatcttgatggcagactaggtcgatttt

SEQ ID NO: 114252 - DNA, 60 bp, Artificial
  Synthetic oligonucleotide
cctcaaacagcaaatcctacatcaaaccccattttggtatccccttcaattactgattat

SEQ ID NO: 114253 - DNA, 60 bp, Artificial
  Synthetic oligonucleotide
atcttcatgcccgatgtttcaatacatttagaccctcccactgtagatcattcatattat

SEQ ID NO: 114254 - DNA, 60 bp, Artificial
  Synthetic oligonucleotide
cttcatgcccgatgtttcaatacatttagaccctcccactgtagatcattcatattataa

SEQ ID NO: 114255 - DNA, 60 bp, Artificial
  Synthetic oligonucleotide
cgaagaacttttaactgaagaaatctattttcaagctatgtctgactttattaaagctaa

SEQ ID NO: 114256 - DNA, 60 bp, Artificial
  Synthetic oligonucleotide
taagacatgttttaaacaattgcttaacattaggcgaacccttcgccttcgacccacttg

SEQ ID NO: 114257 - DNA, 60 bp, Artificial
  Synthetic oligonucleotide
ccactgctggaaatttaagacatgttttaaacaattgcttaacattaggcgaacccttcg

SEQ ID NO: 114258 - DNA, 60 bp, Artificial
  Synthetic oligonucleotide
ctgtcaaaaccgatcttcaagcgattgaatttgaacgtaattctgtaaccactgctggaa

SEQ ID NO: 114259 - DNA, 60 bp, Artificial
  Synthetic oligonucleotide
atctgtcaaaaccgatcttcaagcgattgaatttgaacgtaattctgtaaccactgctgg

SEQ ID NO: 114260 - DNA, 60 bp, Artificial
  Synthetic oligonucleotide
gtaacaagaggtagattctggaccgtgttggacgatgaacgcgactttttatctgtcaaa

SEQ ID NO: 114261 - DNA, 60 bp, Artificial
  Synthetic oligonucleotide
atcccacccaacattttgcagttatagttcttaaaaatgctaaaaccaatgtaacaagag

SEQ ID NO: 114262 - DNA, 60 bp, Artificial
  Synthetic oligonucleotide
cgtttcgttaccattggaaataagttgcagtgcaatcaatcccacccaacattttgcagt

SEQ ID NO: 114263 - DNA, 60 bp, Artificial
  Synthetic oligonucleotide
gaatgtggaaaacgtttcgttaccattggaaataagttgcagtgcaatcaatcccaccca

SEQ ID NO: 114264 - DNA, 60 bp, Artificial
  Synthetic oligonucleotide
cagcaaatcctacatcaaaccccattttggtatccccttcaattactgattatgctgaac

SEQ ID NO: 114265 - DNA, 60 bp, Artificial
  Synthetic oligonucleotide
gcttttgtgaagaatatcacgtccttttagggttcgattcgtataaaggtgtttcagtcc

SEQ ID NO: 114266 - DNA, 60 bp, Artificial
  Synthetic oligonucleotide
ataacattcttgtgcttttgtgaagaatatcacgtccttttagggttcgattcgtataaa

SEQ ID NO: 114267 - DNA, 60 bp, Artificial
  Synthetic oligonucleotide
ggattatccccattagatgacgttgtgactattagattgaaagatttgctgcgtgtgttc

SEQ ID NO: 114268 - DNA, 55 bp, Artificial
  Synthetic oligonucleotide
ttcgtataaaggtgtttcagtccaatatcttgatggcagactaggtcgatttttg

SEQ ID NO: 114269 - DNA, 60 bp, Artificial
  Synthetic oligonucleotide
gctgaacaaatatcagacgaatttgctaaggctcgaaaaccgattttggtcccgactcaa

SEQ ID NO: 114270 - DNA, 60 bp, Artificial
  Synthetic oligonucleotide
tactgattatgctgaacaaatatcagacgaatttgctaaggctcgaaaaccgattttggt

SEQ ID NO: 114271 - DNA, 60 bp, Artificial
  Synthetic oligonucleotide
gctcttatcctgatttgttcagtaatccaatcaaatacctcggatttttaatcttcatgc

SEQ ID NO: 114272 - DNA, 65 bp, Artificial
  Synthetic oligonucleotide
ccaaaggtttaaacgttctaaaagcttcctcgattattgtataacattcttgtgcttttgtgaag

SEQ ID NO: 114273 - DNA, 60 bp, Artificial
  Synthetic oligonucleotide
gacatttttaatcgtgtttttcacagcatccaaggttctaaatttattggatatcgtaag

SEQ ID NO: 114274 - DNA, 60 bp, Artificial
  Synthetic oligonucleotide
agtcaaacttgtcatttcgtccattcttattgtgaattatcattcgttcctcattctttg

SEQ ID NO: 114275 - DNA, 60 bp, Artificial
  Synthetic oligonucleotide
ttcatattataatttgaagagaaatcataaaatgagttttgacgaacttcaatcaaattt

SEQ ID NO: 114276 - DNA, 60 bp, Artificial
  Synthetic oligonucleotide
ttaaagctaagcaaactgaagatgtttcacttcaaacgatttttgagtatgtgatggaag

SEQ ID NO: 114277 - DNA, 60 bp, Artificial
  Synthetic oligonucleotide
tattactttatacagtagctacaactcagctgtgttaaatgttgtccctagaaacggaca

SEQ ID NO: 114278 - DNA, 58 bp, Artificial
  Synthetic oligonucleotide
taaatgttgtccctagaaacggacaagtggaatgtagtgcttcaaagatgatggccaa

SEQ ID NO: 114279 - DNA, 60 bp, Artificial
  Synthetic oligonucleotide
caaacttgtcatttcgtccattcttattgtgaattatcattcgttcctcattctttggct

SEQ ID NO: 114280 - DNA, 60 bp, Artificial
  Synthetic oligonucleotide
tcattctttggcttatattactttatacagtagctacaactcagctgtgttaaatgttgt

SEQ ID NO: 114281 - DNA, 60 bp, Artificial
  Synthetic oligonucleotide
tttggtttaaccaaaggtttaaacgttctaaaagcttcctcgattattgtataacattct

SEQ ID NO: 114282 - DNA, 60 bp, Artificial
  Synthetic oligonucleotide
tacttgaaacaggattatccccattagatgacgttgtgactattagattgaaagatttgc

SEQ ID NO: 114283 - DNA, 60 bp, Artificial
  Synthetic oligonucleotide
acagaacgtgaaaaattacctgtttgggcttctcatttaatagctcgtatgaatgtggaa

SEQ ID NO: 114284 - DNA, 60 bp, Artificial
  Synthetic oligonucleotide
ttacctgtttgggcttctcatttaatagctcgtatgaatgtggaaaacgtttcgttacca

SEQ ID NO: 114285 - DNA, 55 bp, Artificial
  Synthetic oligonucleotide
cgatcgtcccatctcgcaaacacctagtactcaagatgaacaccgctcgtgtttt

SEQ ID NO: 114286 - DNA, 60 bp, Artificial
  Synthetic oligonucleotide
cgatcgtcccatctcgcaaacacctagtactcaagatgaacaccgctcgtgtttttatgc

SEQ ID NO: 114287 - DNA, 60 bp, Artificial
  Synthetic oligonucleotide
gctggacttgatcttgtacttggagctctgggaataaattttaactacaatttgcccggc

SEQ ID NO: 114288 - DNA, 60 bp, Artificial
  Synthetic oligonucleotide
gtttttatgctggacttgatcttgtacttggagctctgggaataaattttaactacaatt

SEQ ID NO: 114289 - DNA, 60 bp, Artificial
  Synthetic oligonucleotide
cgaatgcctggctagtaatcgtgatcctcgcgcccgccgaacctttcaacctagtgatgg

SEQ ID NO: 114290 - DNA, 60 bp, Artificial
  Synthetic oligonucleotide
acctcgaatgcctggctagtaatcgtgatcctcgcgcccgccgaacctttcaacctagtg

SEQ ID NO: 114291 - DNA, 52 bp, Artificial
  Synthetic oligonucleotide
ttttgttacaagatttaatgctacgaccgatcgtcccatctcgcaaacacct

SEQ ID NO: 114292 - DNA, 60 bp, Artificial
  Synthetic oligonucleotide
caacctagtgatggatttgctctttttgttacaagatttaatgctacgaccgatcgtccc

SEQ ID NO: 114293 - DNA, 60 bp, Artificial
  Synthetic oligonucleotide
gcttacgtacgtgcgtcgcgaattatcaatgaaccgggagctggtcagagtacacgtcac

SEQ ID NO: 114294 - DNA, 60 bp, Artificial
  Synthetic oligonucleotide
aggcttacgtacgtgcgtcgcgaattatcaatgaaccgggagctggtcagagtacacgtc

SEQ ID NO: 114295 - DNA, 60 bp, Artificial
  Synthetic oligonucleotide
tatgaagtaccacacatatgaattacgacgtgaggactccttcatgtccagcattcttag

SEQ ID NO: 114296 - DNA, 52 bp, Artificial
  Synthetic oligonucleotide
ggtatgatctacgttcctatttactgcgacaaatggatattccaccaaatgt

SEQ ID NO: 114297 - DNA, 60 bp, Artificial
  Synthetic oligonucleotide
tcagggtagcaaaccgaattttagccttagctttagtatcacgtctacaaaatgcgtatg

SEQ ID NO: 114298 - DNA, 60 bp, Artificial
  Synthetic oligonucleotide
ccgaattttagccttagctttagtatcacgtctacaaaatgcgtatgtagcacattcgcc

SEQ ID NO: 114299 - DNA, 60 bp, Artificial
  Synthetic oligonucleotide
aatgcgtatgtagcacattcgccaatgaatttgcaggcgccacagaatctaaacattaac

SEQ ID NO: 114300 - DNA, 60 bp, Artificial
  Synthetic oligonucleotide
cattcgccaatgaatttgcaggcgccacagaatctaaacattaacggtcagattggggtg

SEQ ID NO: 114301 - DNA, 60 bp, Artificial
  Synthetic oligonucleotide
aaacattaacggtcagattggggtgccaaacgccgtgctagacgccctccgtcgagccta

SEQ ID NO: 114302 - DNA, 60 bp, Artificial
  Synthetic oligonucleotide
cggtcagattggggtgccaaacgccgtgctagacgccctccgtcgagcctaattcatatg

SEQ ID NO: 114303 - DNA, 60 bp, Artificial
  Synthetic oligonucleotide
gtcgagcctaattcatatgaagtaccacacatatgaattacgacgtgaggactccttcat

SEQ ID NO: 114304 - DNA, 60 bp, Artificial
  Synthetic oligonucleotide
gttaaaatctggaaccaatatggaagggatttatgcacgtgctttttgttacctcgaatg

SEQ ID NO: 114305 - DNA, 51 bp, Artificial
  Synthetic oligonucleotide
ggtatgatctacgttcctatttactgcgacaaatggatattccaccaaatg

SEQ ID NO: 114306 - DNA, 60 bp, Artificial
  Synthetic oligonucleotide
ccggtcggttccccgatccgggtgatcaactccagtgcggttaatacaggtattatacac

SEQ ID NO: 114307 - DNA, 60 bp, Artificial
  Synthetic oligonucleotide
gccctacaggacagcagctgacgagccgcaaccaatggcagtgggtgctcaagatatgga

SEQ ID NO: 114308 - DNA, 60 bp, Artificial
  Synthetic oligonucleotide
tccggcaacgccctacaggacagcagctgacgagccgcaaccaatggcagtgggtgctca

SEQ ID NO: 114309 - DNA, 60 bp, Artificial
  Synthetic oligonucleotide
acactaccgtggcctgatgttaagtttctttatcctccggcaacgccctacaggacagca

SEQ ID NO: 114310 - DNA, 60 bp, Artificial
  Synthetic oligonucleotide
agtacacgtcactttacactaccgtggcctgatgttaagtttctttatcctccggcaacg

SEQ ID NO: 114311 - DNA, 60 bp, Artificial
  Synthetic oligonucleotide
tcgtaccggtcggttccccgatccgggtgatcaactccagtgcggttaatacaggtatta

SEQ ID NO: 114312 - DNA, 51 bp, Artificial
  Synthetic oligonucleotide
ggggagctttgatagagggttcagacacgtgccaacttaccatcgatgatg

SEQ ID NO: 114313 - DNA, 60 bp, Artificial
  Synthetic oligonucleotide
cactatcacattaccgaggaccagggggagctttgatagagggttcagacacgtgccaac

SEQ ID NO: 114314 - DNA, 50 bp, Artificial
  Synthetic oligonucleotide
ctggagataacggaaactgtaatgccaaactatccagacgtaataaacgc

SEQ ID NO: 114315 - DNA, 60 bp, Artificial
  Synthetic oligonucleotide
ttagttcgcgatgaacaaattggcaggatcggagatcattattatacaacaaattgttac

SEQ ID NO: 114316 - DNA, 51 bp, Artificial
  Synthetic oligonucleotide
ctacagcagcaacacgtatacaggttcctcttgctttcaacaaagctctag

SEQ ID NO: 114317 - DNA, 60 bp, Artificial
  Synthetic oligonucleotide
ggctgtttgatgcgcagaatgtcaattattactctagcttcgacgaattcatcatagctc

SEQ ID NO: 114318 - DNA, 60 bp, Artificial
  Synthetic oligonucleotide
ttggacagatagctgaaacagttatacttaaaggttcagttcctttccaattagcacgcg

SEQ ID NO: 114319 - DNA, 60 bp, Artificial
  Synthetic oligonucleotide
gctgaaacagttatacttaaaggttcagttcctttccaattagcacgcgctaatcagcca

SEQ ID NO: 114320 - DNA, 60 bp, Artificial
  Synthetic oligonucleotide
tatgctgtatttaacagtgttccaattgttgaggtactcagtccagctcaaacaactgtg

SEQ ID NO: 114321 - DNA, 60 bp, Artificial
  Synthetic oligonucleotide
cagtgttccaattgttgaggtactcagtccagctcaaacaactgtgtcaatagtaggttc

SEQ ID NO: 114322 - DNA, 60 bp, Artificial
  Synthetic oligonucleotide
ttgatcgcttagcttcaaaggctacggtttcaggtgacatgtacaattcatatgctgtat

SEQ ID NO: 114323 - DNA, 60 bp, Artificial
  Synthetic oligonucleotide
cgcttagcttcaaaggctacggtttcaggtgacatgtacaattcatatgctgtatttaac

SEQ ID NO: 114324 - DNA, 60 bp, Artificial
  Synthetic oligonucleotide
tagatcatattatagtataaatgcaccagctattgtaccacaagtcgaaattgatcgctt

SEQ ID NO: 114325 - DNA, 60 bp, Artificial
  Synthetic oligonucleotide
tataaatgcaccagctattgtaccacaagtcgaaattgatcgcttagcttcaaaggctac

SEQ ID NO: 114326 - DNA, 60 bp, Artificial
  Synthetic oligonucleotide
caggcatatagcaagttcgctgatgataatccacgtcatcttcgtgttaagacgggaggt

SEQ ID NO: 114327 - DNA, 60 bp, Artificial
  Synthetic oligonucleotide
gtaccgttcgttcaggcatatagcaagttcgctgatgataatccacgtcatcttcgtgtt

SEQ ID NO: 114328 - DNA, 60 bp, Artificial
  Synthetic oligonucleotide
cactacctgtccgacgagtgtagagcattcgtgagtggctcgtcaccctcacgttgctcg

SEQ ID NO: 114329 - DNA, 60 bp, Artificial
  Synthetic oligonucleotide
atgcgtagagcactacctgtccgacgagtgtagagcattcgtgagtggctcgtcaccctc

SEQ ID NO: 114330 - DNA, 60 bp, Artificial
  Synthetic oligonucleotide
tcgttctgggattagctttgcaagcatacgatcaaatgcgtagagcactacctgtccgac

SEQ ID NO: 114331 - DNA, 60 bp, Artificial
  Synthetic oligonucleotide
gagtgtccacttgtgtcgttctgggattagctttgcaagcatacgatcaaatgcgtagag

SEQ ID NO: 114332 - DNA, 60 bp, Artificial
  Synthetic oligonucleotide
agccattagctcccaagtcctactatgtgagatcaaggtgtggggatacaatttgaccga

SEQ ID NO: 114333 - DNA, 60 bp, Artificial
  Synthetic oligonucleotide
gttttattcgagcattgtagggtggcccttgggagtgagccattagctcccaagtcctac

SEQ ID NO: 114334 - DNA, 60 bp, Artificial
  Synthetic oligonucleotide
ttgacattgtttggttttattcgagcattgtagggtggcccttgggagtgagccattagc

SEQ ID NO: 114335 - DNA, 60 bp, Artificial
  Synthetic oligonucleotide
cgtcaccctcacgttgctcgaccaaaccaaagaatgctgattgttctattttgacattgt

SEQ ID NO: 114336 - DNA, 60 bp, Artificial
  Synthetic oligonucleotide
gccattagctcccaagtcctactatgtgagatcaaggtgtggggatacaatttgaccgac

SEQ ID NO: 114337 - DNA, 50 bp, Artificial
  Synthetic oligonucleotide
atggcaaatagagcaacttcagcctttctcgataaccctcatccagtcgg

SEQ ID NO: 114338 - DNA, 60 bp, Artificial
  Synthetic oligonucleotide
gggtctcgtcaattcgttgcagtcgctgagcttttagcttcaaagttgattgctagtagt

SEQ ID NO: 114339 - DNA, 60 bp, Artificial
  Synthetic oligonucleotide
aagggtctcgtcaattcgttgcagtcgctgagcttttagcttcaaagttgattgctagta

SEQ ID NO: 114340 - DNA, 60 bp, Artificial
  Synthetic oligonucleotide
caatgtggttaaatgcaggttcagagattcaagttgctggatttgattattcttgcgcca

SEQ ID NO: 114341 - DNA, 60 bp, Artificial
  Synthetic oligonucleotide
ccaccaggtatgaattggactgatttgattactaactactcaccatctagagaggataat

SEQ ID NO: 114342 - DNA, 60 bp, Artificial
  Synthetic oligonucleotide
catgcttgttaaatgaggaccgagctaattacttggtatccaattttggcaagtatgtag

SEQ ID NO: 114343 - DNA, 60 bp, Artificial
  Synthetic oligonucleotide
aagtatgtagctacgttaagctgtttgaactctataagtaagggtacgtttacgtattcg

SEQ ID NO: 114344 - DNA, 60 bp, Artificial
  Synthetic oligonucleotide
cgtcggaatacatagaaaactggaacttgcaaaatagaagacaaagaactggttttacat

SEQ ID NO: 114345 - DNA, 60 bp, Artificial
  Synthetic oligonucleotide
aaccactacatccatcatttgaaccatggcaattcgcaggcaaccagcacgcccatcaac

SEQ ID NO: 114346 - DNA, 60 bp, Artificial
  Synthetic oligonucleotide
gcgggcaataatatatacgtactgacaggtaatgatacgttcggcgttctagaggcagag

SEQ ID NO: 114347 - DNA, 60 bp, Artificial
  Synthetic oligonucleotide
aagtgtttcgcatttgcgggctatcggttaaggactattttggccagattggaaggggtg

SEQ ID NO: 114348 - DNA, 60 bp, Artificial
  Synthetic oligonucleotide
ttggagtgaggatattattgaactgcctaagcaacaacaggaaagcgttctagtggtcag

SEQ ID NO: 114349 - DNA, 60 bp, Artificial
  Synthetic oligonucleotide
tctagaggcagagtagagtgtttcgcatttgcgggctatcggttaaggactattttggcc

SEQ ID NO: 114350 - DNA, 60 bp, Artificial
  Synthetic oligonucleotide
cgctgaaccaactgctgaaagtgatgaagaggttaatgatgtttcccgagacgacgaagc

SEQ ID NO: 114351 - DNA, 60 bp, Artificial
  Synthetic oligonucleotide
tttcactcaccgctgaaccaactgctgaaagtgatgaagaggttaatgatgtttcccgag

SEQ ID NO: 114352 - DNA, 60 bp, Artificial
  Synthetic oligonucleotide
gctgtgcacgaacgaacaactactgtccttgctttcactcaccgctgaaccaactgctga

SEQ ID NO: 114353 - DNA, 60 bp, Artificial
  Synthetic oligonucleotide
aaggttaattttggcagagatggaatcaatcacaagagcgctccagcctggtgagcttga

SEQ ID NO: 114354 - DNA, 60 bp, Artificial
  Synthetic oligonucleotide
cccacaggtgaaagaaatcgaacgcccattgaccgacgcacccaaggagcaacgaacatc

SEQ ID NO: 114355 - DNA, 60 bp, Artificial
  Synthetic oligonucleotide
ccaactgctgaaagtgatgaagaggttaatgatgtttcccgagatgacgaggcagagaaa

SEQ ID NO: 114356 - DNA, 60 bp, Artificial
  Synthetic oligonucleotide
cgcctgacatcgtcagtgccagtgtaatcacacctgtatctaaagcagcagcgcgaccgg

SEQ ID NO: 114357 - DNA, 60 bp, Artificial
  Synthetic oligonucleotide
ggagtgaggatattattgaactgcctaagcaacaacaggaaagcgttctagtggtcagca

SEQ ID NO: 114358 - DNA, 60 bp, Artificial
  Synthetic oligonucleotide
gcagagatggaatcaatcacaagagcgctccagcctggtgagcttgaagaccggaaggag

SEQ ID NO: 114359 - DNA, 60 bp, Artificial
  Synthetic oligonucleotide
aattttagcagagatggaatcaatcacaagagcgctccagcctggtgagcttgaagaccg

SEQ ID NO: 114360 - DNA, 60 bp, Artificial
  Synthetic oligonucleotide
gatatcgaagtagtcgcaccaagagtgttggagccaccaacactatcacccgcacccatt

SEQ ID NO: 114361 - DNA, 60 bp, Artificial
  Synthetic oligonucleotide
cgagaccgtgtgtgcgggcaataatatatacgtactgacaggtaatgatacgttcggcgt

SEQ ID NO: 114362 - DNA, 60 bp, Artificial
  Synthetic oligonucleotide
gagtgtttcgcatttgcgggctatcggttaaggactattttggccagattggaaggggtg

SEQ ID NO: 114363 - DNA, 60 bp, Artificial
  Synthetic oligonucleotide
cgtcagtgccagtgtaatcacacctgtatctaaagcagcagcgcgaccggtcgaggagtt

SEQ ID NO: 114364 - DNA, 60 bp, Artificial
  Synthetic oligonucleotide
ctgacatcgtcagtgccagtgtaatcacacctgtatctaaagcagcagcgcgaccggtcg

SEQ ID NO: 114365 - DNA, 60 bp, Artificial
  Synthetic oligonucleotide
gctatcgaagtagtcgcaccaagagtgttggagccaccaacactatcacccgcacccatt

SEQ ID NO: 114366 - DNA, 60 bp, Artificial
  Synthetic oligonucleotide
aaagctgtgcacgaacgaacaactactgtccttgctttcactcaccgctgaaccaactgc

SEQ ID NO: 114367 - DNA, 60 bp, Artificial
  Synthetic oligonucleotide
cgttcggcgttctagaggcagagtagagtgtttcgcatttgcgggctatcggttaaggac

SEQ ID NO: 114368 - DNA, 60 bp, Artificial
  Synthetic oligonucleotide
tgtgcgggcaataatatatacgtactgacaggtaatgatacgttcggcgttctagaggca

SEQ ID NO: 114369 - DNA, 60 bp, Artificial
  Synthetic oligonucleotide
tagtggtcagcaaaccaaatatgatcgcggaggaggaactgatgccagctgctatcgaag

SEQ ID NO: 114370 - DNA, 60 bp, Artificial
  Synthetic oligonucleotide
tgttgaactgcctaagcaacaacaggaaagcgttctagtggtcagcaaaccaaatatgat

SEQ ID NO: 114371 - DNA, 60 bp, Artificial
  Synthetic oligonucleotide
gcaacaacaggaaagcgttctagtggtcagcaaaccaaatatgatcgcggaggaggaact

SEQ ID NO: 114372 - DNA, 60 bp, Artificial
  Synthetic oligonucleotide
cgcggaggaggaactgatgccagctgatatcgaagtagtcgcaccaagagtgttggagcc

SEQ ID NO: 114373 - DNA, 60 bp, Artificial
  Synthetic oligonucleotide
gtactctcgagaccgtgtgtgcgggcaataatatatacgtactgacaggtaatgatacgt

SEQ ID NO: 114374 - DNA, 60 bp, Artificial
  Synthetic oligonucleotide
caaatatgatcgcggaggaggaactgatgccagctgctatcgaagtagtcgcaccaagag

SEQ ID NO: 114375 - DNA, 60 bp, Artificial
  Synthetic oligonucleotide
ccatcatttgaaccatggcaattcgcaggcaaccagcacgcccatcaactcgaacaaggg

SEQ ID NO: 114376 - DNA, 60 bp, Artificial
  Synthetic oligonucleotide
gaaccatggcaattcgcaggcaaccagcacgcccatcaactcgaacaggggtactctgaa

SEQ ID NO: 114377 - DNA, 60 bp, Artificial
  Synthetic oligonucleotide
gcccatcaactcgaacaagggtactctgaagggcataggttcatcacgaactacaacgca

SEQ ID NO: 114378 - DNA, 60 bp, Artificial
  Synthetic oligonucleotide
tcaactcgaacaggggtactctgaagggcataggttcatcacgaactacaacgcaacgag

SEQ ID NO: 114379 - DNA, 60 bp, Artificial
  Synthetic oligonucleotide
cgaacaagggtactctgaagggcataggttcatcacgaactacaacgcaacgagcagact

SEQ ID NO: 114380 - DNA, 60 bp, Artificial
  Synthetic oligonucleotide
ctacaacgcaacgagcagacttaacagcgcaatgacacttcaaatcatgaacaaaccaat

SEQ ID NO: 114381 - DNA, 60 bp, Artificial
  Synthetic oligonucleotide
caacgcaacgagcagacttaacagcgcaatgacacttcaaatcatgaacaaaccaatgat

SEQ ID NO: 114382 - DNA, 60 bp, Artificial
  Synthetic oligonucleotide
acgcaacgagcagacttaacagcgcaatgacacttcaaatcatgaacaaaccaatgatta

SEQ ID NO: 114383 - DNA, 60 bp, Artificial
  Synthetic oligonucleotide
gcaacgagcagacttaacagcgcaatgacacttcaaatcatgaacaaaccaatgattacg

SEQ ID NO: 114384 - DNA, 60 bp, Artificial
  Synthetic oligonucleotide
aaccaactgctgaaagtgatgaagaggttaatgatgtttcccgagatgacgaggcagaga

SEQ ID NO: 114385 - DNA, 60 bp, Artificial
  Synthetic oligonucleotide
aatgatacgttcggcgttctagaggcagagtagagtgtttcgcatttgcgggctatcggt

SEQ ID NO: 114386 - DNA, 51 bp, Artificial
  Synthetic oligonucleotide
gcaccaagagtgttggagccaccaacactatcactcgcacccattgtagtg

SEQ ID NO: 114387 - DNA, 60 bp, Artificial
  Synthetic oligonucleotide
cgcggataagatagtgggtaattatactgggcaacaattgaacgtgcagtccaatatgct

SEQ ID NO: 114388 - DNA, 60 bp, Artificial
  Synthetic oligonucleotide
cagaccagtactttcaataccgtctgaatatgtacataatggaagagttggacccataac

SEQ ID NO: 114389 - DNA, 60 bp, Artificial
  Synthetic oligonucleotide
gacacgctgaagcgaggttagacaacactgtgggagcgtttgagttactcagaccagtac

SEQ ID NO: 114390 - DNA, 60 bp, Artificial
  Synthetic oligonucleotide
cctcaagtagtggagtgggccaggtgcgtaatatatttaagcctataggtgatcaaacga

SEQ ID NO: 114391 - DNA, 60 bp, Artificial
  Synthetic oligonucleotide
cgaatagtgtccccatccagcgtatccactacagtgagtacagcggtgataggtggcaac

SEQ ID NO: 114392 - DNA, 60 bp, Artificial
  Synthetic oligonucleotide
gcagaatcatcaggatcacatgtagatatgcaaagagctattatgaatcacgcggataag

SEQ ID NO: 114393 - DNA, 60 bp, Artificial
  Synthetic oligonucleotide
gggacatcagacaccgtgttacccgctatgcgtgtgtactacagaccattgggattccta

SEQ ID NO: 114394 - DNA, 60 bp, Artificial
  Synthetic oligonucleotide
ctgcgagtggcacagggattctctccgtcaaacaagtgggatgtaagtacagctgcgaga

SEQ ID NO: 114395 - DNA, 60 bp, Artificial
  Synthetic oligonucleotide
gtggctcaacatattgacaacactgaaaagatgaacatgatgatggatttctccttcgcc

SEQ ID NO: 114396 - DNA, 60 bp, Artificial
  Synthetic oligonucleotide
tctccttcgccaataggaataaccggcagaatattacagctgatacgctatcaaggatgc

SEQ ID NO: 114397 - DNA, 60 bp, Artificial
  Synthetic oligonucleotide
gaccaatatttacgcggctactcggagcgaagaatttaagtggacaagcgttagcatcac

SEQ ID NO: 114398 - DNA, 60 bp, Artificial
  Synthetic oligonucleotide
cgacgttcgctggtaatgcacttaagagtgcgcaacaggctatttctaaggcagtaggtt

SEQ ID NO: 114399 - DNA, 60 bp, Artificial
  Synthetic oligonucleotide
tcagagtggtgggagacactattgaacgtggtgatggatacagttcttgggtatttttcg

SEQ ID NO: 114400 - DNA, 60 bp, Artificial
  Synthetic oligonucleotide
gcataccgtgaaagcccttcaattacgcttaaaaggtttctttcagatctgagctacgtg

SEQ ID NO: 114401 - DNA, 60 bp, Artificial
  Synthetic oligonucleotide
cgatggaccgcatggtagggacgacgaggcagaaatgcctatatacagaatcattaggag

SEQ ID NO: 114402 - DNA, 60 bp, Artificial
  Synthetic oligonucleotide
tcagaaacatttgcgagaagtgcccattatagccactcacttttacagcaaatacgtcag

SEQ ID NO: 114403 - DNA, 60 bp, Artificial
  Synthetic oligonucleotide
aatacgtcagtcatacgttaaagcgcgtaagcgcggtgacctgcataccgtgaaagccct

SEQ ID NO: 114404 - DNA, 60 bp, Artificial
  Synthetic oligonucleotide
acgtccttcgtcccagctgacctggatctagagcagactattcaacgcgtgttctttcgc

SEQ ID NO: 114405 - DNA, 60 bp, Artificial
  Synthetic oligonucleotide
gatacctctattacccgttatttctacgttaaatcaacatgaattcgagattactcaagc

SEQ ID NO: 114406 - DNA, 60 bp, Artificial
  Synthetic oligonucleotide
gcgcggcttgatgagttgagagatatttcccaggtaaaaggtgatgagtataaagtaacg

SEQ ID NO: 114407 - DNA, 60 bp, Artificial
  Synthetic oligonucleotide
gcgcatttcagtatgttataatcttatatcacatttacaacgtatcgatggaccgcatgg

SEQ ID NO: 114408 - DNA, 60 bp, Artificial
  Synthetic oligonucleotide
gacctaatagcgacgtagttaactatgattatacgtggattggtaaagattacgagcgca

SEQ ID NO: 114409 - DNA, 60 bp, Artificial
  Synthetic oligonucleotide
catgcatttatgacgtatactgatgttctgtacgaagatgcagggtcatatatagtctca

SEQ ID NO: 114410 - DNA, 60 bp, Artificial
  Synthetic oligonucleotide
gagctgaaattagaagagaaatcacacggtacacaggactaatagaacaacaaacccaat

SEQ ID NO: 114411 - DNA, 60 bp, Artificial
  Synthetic oligonucleotide
gcatgggtagcaacgttaggaggcgattggcctagaacatacaattcgtcgatgcgcgcg

SEQ ID NO: 114412 - DNA, 60 bp, Artificial
  Synthetic oligonucleotide
tatttgtccgacggagttattcttgtggctactgcttttgaggacttaggcggatacgca

SEQ ID NO: 114413 - DNA, 60 bp, Artificial
  Synthetic oligonucleotide
gtgtcaggtggagtccaggtgccaagacagtctacggctgtagaaatacgtgtgcaagag

SEQ ID NO: 114414 - DNA, 60 bp, Artificial
  Synthetic oligonucleotide
gtaaatcagcagttggaaatactatgtctccagttagatttgtaactgtaaacgacggcg

SEQ ID NO: 114415 - DNA, 60 bp, Artificial
  Synthetic oligonucleotide
gtcgatgcgcgcgtttaatgtacttacaggtggagatataaacttgagtacagaatatgg

SEQ ID NO: 114416 - DNA, 60 bp, Artificial
  Synthetic oligonucleotide
ccacctggaaaggcagttcgaaatgttcatacagtcacaggaatcagagtggtgggagac

SEQ ID NO: 114417 - DNA, 60 bp, Artificial
  Synthetic oligonucleotide
cgcggactataatttaagaatgcgcagagatgcactgctaggagaattagcgcggcttga

SEQ ID NO: 114418 - DNA, 60 bp, Artificial
  Synthetic oligonucleotide
gaccgtaatatcaaataatgtaccacgtgtgcctgtactcggagtaacatatgcgagcat

SEQ ID NO: 114419 - DNA, 60 bp, Artificial
  Synthetic oligonucleotide
cgagcatatatcaggatagtcgaactgagctagaggcgcgtcgcttcctacaaacattag

SEQ ID NO: 114420 - DNA, 60 bp, Artificial
  Synthetic oligonucleotide
gtgtttaggattcatggcaattggagcgcgcgtataccatatccaccaggtaatttacca

SEQ ID NO: 114421 - DNA, 60 bp, Artificial
  Synthetic oligonucleotide
gatatccagcaagtaataaatgactctatatcccaagagttaggacgattaagcgatgag

SEQ ID NO: 114422 - DNA, 60 bp, Artificial
  Synthetic oligonucleotide
ccaccaggtaatttaccaacacgaaacaccgctaatcagcatcaagatatccagcaagta

SEQ ID NO: 114423 - DNA, 60 bp, Artificial
  Synthetic oligonucleotide
taagtacagctgcgagaatgcaacagcgtagggtgatttcattgatggatgacttgatga

SEQ ID NO: 114424 - DNA, 65 bp, Artificial
  Synthetic oligonucleotide
gacacatgacgagaaactaatgtagtaggaaaagatggaaataaatagagctgaaattagaagag

SEQ ID NO: 114425 - DNA, 60 bp, Artificial
  Synthetic oligonucleotide
attcggtaaacagggcgatggactctcaactgagcagaagtggatggatataagtagggg

SEQ ID NO: 114426 - DNA, 60 bp, Artificial
  Synthetic oligonucleotide
ggtacttaggcattggtgagcttaataggttcggcagaaccacaagcgataagaacgctg

SEQ ID NO: 114427 - DNA, 60 bp, Artificial
  Synthetic oligonucleotide
caaacccaattaaatatatcggacaatgatgagaacatcctcaagacgttaatcgcggac

SEQ ID NO: 114428 - DNA, 60 bp, Artificial
  Synthetic oligonucleotide
agaaacaactgagaagtgatgttgctaatgtgggaacgcgagcgccgtcacatgcattta

SEQ ID NO: 114429 - DNA, 60 bp, Artificial
  Synthetic oligonucleotide
cagaatcattaggagagatagtggatcaataccgtcatacgcatcgggcgaacatctgta

SEQ ID NO: 114430 - DNA, 60 bp, Artificial
  Synthetic oligonucleotide
tatcctctcatttacacgtagacgagatagtgaggaggcgtgagcataagagcatatccg

SEQ ID NO: 114431 - DNA, 60 bp, Artificial
  Synthetic oligonucleotide
ggacttttaacccggttgatttgcgtgaagtacgtattgaggacataacaccaggcatag

SEQ ID NO: 114432 - DNA, 60 bp, Artificial
  Synthetic oligonucleotide
ccaggcatagaatttactatcaatatggaagttagtacgtatttggcagaatcatcagga

SEQ ID NO: 114433 - DNA, 60 bp, Artificial
  Synthetic oligonucleotide
ctacttacacgaccatttcaaaacaagttggtcttggtatgtcaacgtccaaacttgcag

SEQ ID NO: 114434 - DNA, 55 bp, Artificial
  Synthetic oligonucleotide
ataccagaagcttgagggtacggttcatagtcagactgtgcgcgtcgggatctga

SEQ ID NO: 114435 - DNA, 60 bp, Artificial
  Synthetic oligonucleotide
cattgcgaactcctttgttagtttggatgcaatcaccataccagaagcttgagggtacgg

SEQ ID NO: 114436 - DNA, 57 bp, Artificial
  Synthetic oligonucleotide
cgtgtaggtggtacacccatcaatttcgatcgattccttcctctagtcgaagtcgac

SEQ ID NO: 114437 - DNA, 60 bp, Artificial
  Synthetic oligonucleotide
aaggtgtgtttgaaactacgatgagaaaaccacttcttccacaacgaccaaagtgcccag

SEQ ID NO: 114438 - DNA, 60 bp, Artificial
  Synthetic oligonucleotide
ctgccagcgttgttgctgcaacccaacttgaacgtaatcttgtacgcgagattcttgaag

SEQ ID NO: 114439 - DNA, 60 bp, Artificial
  Synthetic oligonucleotide
aacatcgtgttgttaggtcatatgcgtatttatctcctgccagcgttgttgctgcaaccc

SEQ ID NO: 114440 - DNA, 60 bp, Artificial
  Synthetic oligonucleotide
cagacgtacttctgactgcttacgtttcatggttcattattctgctgcattccgtgttgc

SEQ ID NO: 114441 - DNA, 60 bp, Artificial
  Synthetic oligonucleotide
cagataaaactgtagctgactggcctgaccttgtatcattctactatggaattgaccctc

SEQ ID NO: 114442 - DNA, 60 bp, Artificial
  Synthetic oligonucleotide
acgctatccccatgtttttgaagctattccattggtcaccaatctgccttggtttcgacg

SEQ ID NO: 114443 - DNA, 60 bp, Artificial
  Synthetic oligonucleotide
catgattgataatattggtaatgaaaagaatcgtgttcttactgatcgaatcgaatgccc

SEQ ID NO: 114444 - DNA, 60 bp, Artificial
  Synthetic oligonucleotide
ggggaacgaatgttactggcattgttattactgatgtaccttccattgctccctctcgta

SEQ ID NO: 114445 - DNA, 60 bp, Artificial
  Synthetic oligonucleotide
ccgcaatgaaatcaccggatacactactctgctgcaatttcgtgaatacagtgctgctca

SEQ ID NO: 114446 - DNA, 60 bp, Artificial
  Synthetic oligonucleotide
gacgtgaaattgaagataacgtcacaactgttccattcggtaccaatcactctatacccc

SEQ ID NO: 114447 - DNA, 60 bp, Artificial
  Synthetic oligonucleotide
gctcatgttccacttcaactctccgctcttgactactcaacctttccctatgacagacgt

SEQ ID NO: 114448 - DNA, 60 bp, Artificial
  Synthetic oligonucleotide
gaatacagtgctgctcatgttccacttcaactctccgctcttgactactcaacctttccc

SEQ ID NO: 114449 - DNA, 60 bp, Artificial
  Synthetic oligonucleotide
agactgaggataaaatcgaacctgtcatcgaacaaacgtctaacgacaaacccgagcccc

SEQ ID NO: 114450 - DNA, 60 bp, Artificial
  Synthetic oligonucleotide
ccacagctctctacgaagttcgaatccatcatgtcaacatcagctaagaaaacacctgaa

SEQ ID NO: 114451 - DNA, 60 bp, Artificial
  Synthetic oligonucleotide
actaccggtaacgtttaagcgctttctccatcctaccacagctctctacgaagttcgaat

SEQ ID NO: 114452 - DNA, 60 bp, Artificial
  Synthetic oligonucleotide
accgatcctcgtatatattttccgaatactggtatgaccactgtcttcactgatcaactc

SEQ ID NO: 114453 - DNA, 60 bp, Artificial
  Synthetic oligonucleotide
ttgctaagtttcttggagtcggtgtcactgatggtagtattatgtctcaaagcggaagtc

SEQ ID NO: 114454 - DNA, 60 bp, Artificial
  Synthetic oligonucleotide
gtcaagcctacttcaatcaagaagttgaaactctattacagcagagtggatggggaacga

SEQ ID NO: 114455 - DNA, 60 bp, Artificial
  Synthetic oligonucleotide
ggccaaagtattttctgctcggacctttcagttgtttgctaagtttcttggagtcggtgt

SEQ ID NO: 114456 - DNA, 60 bp, Artificial
  Synthetic oligonucleotide
gtgacttattcttacaatccgcatctcaaggcctacgctattctggaattttgtcaagcc

SEQ ID NO: 114457 - DNA, 60 bp, Artificial
  Synthetic oligonucleotide
catgcactcaattttagcgttgtaccacacaccttcgtcagctcatgtatgtggtaaact

SEQ ID NO: 114458 - DNA, 60 bp, Artificial
  Synthetic oligonucleotide
tccattgctccctctcgtatcgaatccggtgtatatagctttactttgttacaacccgtc

SEQ ID NO: 114459 - DNA, 58 bp, Artificial
  Synthetic oligonucleotide
actgcgagccttcaagagaatggaattgttgccctcctcaaccatgcacgatacatca

SEQ ID NO: 114460 - DNA, 60 bp, Artificial
  Synthetic oligonucleotide
ctcatacagtcaaatcccgtcggtgatatgattcgtcccgctgtacgtaataatttccga

SEQ ID NO: 114461 - DNA, 60 bp, Artificial
  Synthetic oligonucleotide
caagccatgtttccccatgatgatacaagaactgtacttggcccgaagcacatgcactca

SEQ ID NO: 114462 - DNA, 60 bp, Artificial
  Synthetic oligonucleotide
ctgcatctttagaaatgcattccaatcttcgattcagtctaacgcatagtatacgtcagg

SEQ ID NO: 114463 - DNA, 60 bp, Artificial
  Synthetic oligonucleotide
catgtacaaagcgccgaaactcatcccgtacccgcagttggtctacttggaagtccgtca

SEQ ID NO: 114464 - DNA, 58 bp, Artificial
  Synthetic oligonucleotide
gtataccgttagtcgtcccgcgattgcatatgctcaagctcgaaatgttgttatacca

SEQ ID NO: 114465 - DNA, 60 bp, Artificial
  Synthetic oligonucleotide
ctaggaccttggcgttcttgaatgctccttttcaaacgtataccgttagtcgtcccgcga

SEQ ID NO: 114466 - DNA, 60 bp, Artificial
  Synthetic oligonucleotide
caactttcctcactgatcttctgactttagctatgacatttgttatgcatccagtgactt

SEQ ID NO: 114467 - DNA, 60 bp, Artificial
  Synthetic oligonucleotide
cgatcttgcacctacgtcaacacattacggtgctgtaatggctacaactttcctcactga

SEQ ID NO: 114468 - DNA, 60 bp, Artificial
  Synthetic oligonucleotide
ataatattcggaacaggccatcaagttcaatatgatgacggattgcgtggacttcacatc

SEQ ID NO: 114469 - DNA, 60 bp, Artificial
  Synthetic oligonucleotide
gacattacgcgtgctctgtccttagagttctttccttcattctacgatcttgcacctacg

SEQ ID NO: 114470 - DNA, 60 bp, Artificial
  Synthetic oligonucleotide
cactgatttcgtcaattatacaacaatcagagattaagactgctgctgatttcaacgcga

SEQ ID NO: 114471 - DNA, 60 bp, Artificial
  Synthetic oligonucleotide
caacaacctcatttcacgaagtcttacgtggtttccttgagaatattcgccccactacat

SEQ ID NO: 114472 - DNA, 60 bp, Artificial
  Synthetic oligonucleotide
cgcgactcaatctccacaatatacacaatgccccaaggattatcccgacgcaagccatgt

SEQ ID NO: 114473 - DNA, 60 bp, Artificial
  Synthetic oligonucleotide
ttctggtggcttgataactgatgcgaacagtggttttggaagtcgtggtatgccgtacat

SEQ ID NO: 114474 - DNA, 60 bp, Artificial
  Synthetic oligonucleotide
tgccgtacatcttctctctgatttcaggtttgctcgctgtatctcgcaaaattggtcgat

SEQ ID NO: 114475 - DNA, 60 bp, Artificial
  Synthetic oligonucleotide
gcgccgaaactcatcccgtacccgcagttggtctacttggaagtccgtcacttgttagcc

SEQ ID NO: 114476 - DNA, 60 bp, Artificial
  Synthetic oligonucleotide
tgacggattgcgtggacttcacatcttctcttgcaccgctaaccagattgacgcaactgg

SEQ ID NO: 114477 - DNA, 60 bp, Artificial
  Synthetic oligonucleotide
cccttcatccccggtatggcaaaacaatacagtgtctcaaactacaacgtccggctcatg

SEQ ID NO: 114478 - DNA, 60 bp, Artificial
  Synthetic oligonucleotide
tacaacgtccggctcatgattgatgtttctcatccaggaatcgaaatgataatcgaccca

SEQ ID NO: 114479 - DNA, 60 bp, Artificial
  Synthetic oligonucleotide
cggaccatactctcgtgctcctcctgtcgctacatatctattgtctgtgattcaattagc

SEQ ID NO: 114480 - DNA, 60 bp, Artificial
  Synthetic oligonucleotide
gttgtacgtcccattgcaatcgtccctgagataaatcaacttcccgccgttcttgttgaa

SEQ ID NO: 114481 - DNA, 60 bp, Artificial
  Synthetic oligonucleotide
cggtgagtggtttcatggtgtatactgttttgctgcatacaatgccgcgcttctctatcg

SEQ ID NO: 114482 - DNA, 60 bp, Artificial
  Synthetic oligonucleotide
atacaatgccgcgcttctctatcgattgatcatgccatacgataacacaccgccaacaaa

SEQ ID NO: 114483 - DNA, 60 bp, Artificial
  Synthetic oligonucleotide
cagcaaacagatgaagcgaataaatggatatcgatgggacagtcttgtaccataaaagta

SEQ ID NO: 114484 - DNA, 60 bp, Artificial
  Synthetic oligonucleotide
cataaaagtatgtccattgaatacccagactttaggaataggttgtattaccacaaatac

SEQ ID NO: 114485 - DNA, 60 bp, Artificial
  Synthetic oligonucleotide
gcgaataaatggatatcgatgggacagtcttgtaccataaaggtatgtccattgaatacg

SEQ ID NO: 114486 - DNA, 60 bp, Artificial
  Synthetic oligonucleotide
cataaaagtatgtccattgaatacgcagactttaggaataggttgtattaccacaaatac

SEQ ID NO: 114487 - DNA, 60 bp, Artificial
  Synthetic oligonucleotide
cataaaggtatgtccattgaatacgcagactttaggaataggttgtattaccacaaatac

SEQ ID NO: 114488 - DNA, 60 bp, Artificial
  Synthetic oligonucleotide
cagcaaacagatgaagcgaataaatggatatcgatgggacagtcttgtaccataaaggta

SEQ ID NO: 114489 - DNA, 60 bp, Artificial
  Synthetic oligonucleotide
atcaacagatgcgtatgatggtctctctttggattctctcctacattggtgttgtccacc

SEQ ID NO: 114490 - DNA, 60 bp, Artificial
  Synthetic oligonucleotide
cgtatgatggtctctctttggattctctcctacattggtgttgtccaccagaacgcgacg

SEQ ID NO: 114491 - DNA, 50 bp, Artificial
  Synthetic oligonucleotide
gttgtccaccagaacgcgacgattgcaggctttttcttctcaaccaaaac

SEQ ID NO: 114492 - DNA, 60 bp, Artificial
  Synthetic oligonucleotide
ttctacaacactaatggtcagaggctcaatatcacgcagcggcatttcggctatttctgt

SEQ ID NO: 114493 - DNA, 60 bp, Artificial
  Synthetic oligonucleotide
ggtcagaggctcaatatcacgcagcggcatttcggctatttctgtgccagatctgctgat

SEQ ID NO: 114494 - DNA, 60 bp, Artificial
  Synthetic oligonucleotide
ctatttctgtgccagatctgctgattggaatgctgactctagctggctagctgcttctca

SEQ ID NO: 114495 - DNA, 60 bp, Artificial
  Synthetic oligonucleotide
cgcatggtaccaggagtcaatgctattcagtgcgctgttacctccagttctcgtgaacca

SEQ ID NO: 114496 - DNA, 60 bp, Artificial
  Synthetic oligonucleotide
ggagtcaatgctattcagtgcgctgttacctccagttctcgtgaaccaggatgcatggcg

SEQ ID NO: 114497 - DNA, 60 bp, Artificial
  Synthetic oligonucleotide
ctcagctaagcgctttaataatgtcctgcagacagtttcccctgctcgcaaatcaaggag

SEQ ID NO: 114498 - DNA, 60 bp, Artificial
  Synthetic oligonucleotide
cagtcccaatggagtcccagtacgtgagttacagctgttggcctgtgccactgaatgtat

SEQ ID NO: 114499 - DNA, 60 bp, Artificial
  Synthetic oligonucleotide
ttacctcgtcgaactctccatggcagaagcaatacagtccattgtctttgagcttaacgt

SEQ ID NO: 114500 - DNA, 60 bp, Artificial
  Synthetic oligonucleotide
gtcgaactctccatggcagaagcaatacagtccattgtctttgagcttaacgtcctccac

SEQ ID NO: 114501 - DNA, 60 bp, Artificial
  Synthetic oligonucleotide
gtttggcaatcgcgggctacccacggaccaacgacaactcacatcgttacttacctcgtc

SEQ ID NO: 114502 - DNA, 60 bp, Artificial
  Synthetic oligonucleotide
cgcgggctacccacggaccaacgacaactcacatcgttacttacctcgtcgaactctcca

SEQ ID NO: 114503 - DNA, 60 bp, Artificial
  Synthetic oligonucleotide
gccagatctgctgattggaatgctgactctagctggctagctgcttctcagctaagcgct

SEQ ID NO: 114504 - DNA, 60 bp, Artificial
  Synthetic oligonucleotide
ctgcttctcagctaagcgctttaataatgtcctgcagacagtttcccctgctcgcaaatc

SEQ ID NO: 114505 - DNA, 60 bp, Artificial
  Synthetic oligonucleotide
cccagtacgtgagttacagctgttggcctgtgccactgaatgtattcgctcccacgtcca

SEQ ID NO: 114506 - DNA, 60 bp, Artificial
  Synthetic oligonucleotide
ctgaatgtattcgctcccacgtccaagcaggcttaattgatcaggcaaagggtcagacat

SEQ ID NO: 114507 - DNA, 60 bp, Artificial
  Synthetic oligonucleotide
gtattcgctcccacgtccaagcaggcttaattgatcaggcaaagggtcagacattgacac

SEQ ID NO: 114508 - DNA, 51 bp, Artificial
  Synthetic oligonucleotide
ggtcagacattgacacaaaatgctacggatgttaatcaggtgctacagcgt

SEQ ID NO: 114509 - DNA, 60 bp, Artificial
  Synthetic oligonucleotide
agcttaacgtcctccactatatcaacgcctcagcaaccttttccaggttccgcatggtac

SEQ ID NO: 114510 - DNA, 60 bp, Artificial
  Synthetic oligonucleotide
gtcctccactatatcaacgcctcagcaaccttttccaggttccgcatggtaccaggagtc

SEQ ID NO: 114511 - DNA, 60 bp, Artificial
  Synthetic oligonucleotide
tacgtcccagtctctggtgcctggttcgacctcactcaatatccccgttgggcgaatcgc

SEQ ID NO: 114512 - DNA, 60 bp, Artificial
  Synthetic oligonucleotide
ttgtcaggtctggtcgctgctcctgatccacctcgtgcgcctccctacgtcccagtctct

SEQ ID NO: 114513 - DNA, 60 bp, Artificial
  Synthetic oligonucleotide
gctgccttgtcaggtctggtcgctgctcctgatccacctcgtgcgcctccctacgtccca

SEQ ID NO: 114514 - DNA, 60 bp, Artificial
  Synthetic oligonucleotide
aatttcgctatgtcatgttatggtaaggatttcagagagatcgcaatggtgctagctcag

SEQ ID NO: 114515 - DNA, 60 bp, Artificial
  Synthetic oligonucleotide
ggagacgtggcctaatatgttgtccggcgccttggtcaatttcgctatgtcatgttatgg

SEQ ID NO: 114516 - DNA, 60 bp, Artificial
  Synthetic oligonucleotide
ctctaatctatgtggagacgtggcctaatatgttgtccggcgccttggtcaatttcgcta

SEQ ID NO: 114517 - DNA, 60 bp, Artificial
  Synthetic oligonucleotide
gtacccattgctgctgcgtatcactctgctgaacatgatgcagaacggtcctctaatcta

SEQ ID NO: 114518 - DNA, 60 bp, Artificial
  Synthetic oligonucleotide
gctcagtcctgctctaatatgccgttcgctccagagtctagttacgatcaacagatgcgt

SEQ ID NO: 114519 - DNA, 60 bp, Artificial
  Synthetic oligonucleotide
gctatgtcatgttatggtaaggatttcagagagatcgcaatggtgctagctcagtcctgc

SEQ ID NO: 114520 - DNA, 60 bp, Artificial
  Synthetic oligonucleotide
ggtataattggctcattgaagaaattctttcgagtcgatgaaaaccgcgaacagtgcctc

SEQ ID NO: 114521 - DNA, 60 bp, Artificial
  Synthetic oligonucleotide
ggctcattgaagaaattctttcgagtcgatgaaaaccgcgaacagtgcctcgaaacgtat

SEQ ID NO: 114522 - DNA, 51 bp, Artificial
  Synthetic oligonucleotide
ttttatagcaggtggcgacgcgtacatgtcaaagtcaatggtgcaaatact

SEQ ID NO: 114523 - DNA, 60 bp, Artificial
  Synthetic oligonucleotide
cgttttatcctctgtgtctagtgtttttatagcaggtggcgacgcgtacatgtcaaagtc

SEQ ID NO: 114524 - DNA, 60 bp, Artificial
  Synthetic oligonucleotide
cgattgtaatggatatgccatcgacctcacgtcctggcgatcctcaacagtattctaccg

SEQ ID NO: 114525 - DNA, 60 bp, Artificial
  Synthetic oligonucleotide
gatatgccatcgacctcacgtcctggcgatcctcaacagtattctaccgaaacatcgagc

SEQ ID NO: 114526 - DNA, 60 bp, Artificial
  Synthetic oligonucleotide
acagtgcctcgaaacgtataaggatttatttcgtatgttctgcgagcttgcgattgtaat

SEQ ID NO: 114527 - DNA, 60 bp, Artificial
  Synthetic oligonucleotide
gtgcctcgaaacgtataaggatttatttcgtatgttctgcgagcttgcgattgtaatgga

SEQ ID NO: 114528 - DNA, 60 bp, Artificial
  Synthetic oligonucleotide
ctcgcactcgtatgatgtattatgatgttcctatcatcgttttatcctctgtgtctagtg

SEQ ID NO: 114529 - DNA, 60 bp, Artificial
  Synthetic oligonucleotide
tcataacccgttaccgccagagaaaaagaaatcaatcctttcgagaactagatcaactaa

SEQ ID NO: 114530 - DNA, 51 bp, Artificial
  Synthetic oligonucleotide
aaagaaatcaatcctttcgagaactagatcaactaagctctcgtctggaga

SEQ ID NO: 114531 - DNA, 60 bp, Artificial
  Synthetic oligonucleotide
ccttaatgggcataccaccttgagttacgccacctctgttttcatgatgcgcgcagcagc

SEQ ID NO: 114532 - DNA, 60 bp, Artificial
  Synthetic oligonucleotide
cgttatctacttgctcgcactcgtatgatgtattatgatgttcctatcatcgttttatcc

SEQ ID NO: 114533 - DNA, 60 bp, Artificial
  Synthetic oligonucleotide
acaactgggagccgtacgaagactctcttatccgaattaaacattcatgttttgcaatgc

SEQ ID NO: 114534 - DNA, 60 bp, Artificial
  Synthetic oligonucleotide
atacacaactgggagccgtacgaagactctcttatccgaattaaacattcatgttttgca

SEQ ID NO: 114535 - DNA, 60 bp, Artificial
  Synthetic oligonucleotide
ggtgcaaatactaacgtgcattatgtcgctgtgtgttggtataattggctcattgaagaa

SEQ ID NO: 114536 - DNA, 60 bp, Artificial
  Synthetic oligonucleotide
tgtcaaagtcaatggtgcaaatactaacgtgcattatgtcgctgtgtgttggtataattg

SEQ ID NO: 114537 - DNA, 60 bp, Artificial
  Synthetic oligonucleotide
tcgccttaatgggcataccaccttgagttacgccacctctgttttcatgatgcgcgcagc

SEQ ID NO: 114538 - DNA, 60 bp, Artificial
  Synthetic oligonucleotide
accactaaagacgaaattgagcaacagatggatagaattgtaaaagagatgagacgtcag

SEQ ID NO: 114539 - DNA, 60 bp, Artificial
  Synthetic oligonucleotide
ccatcgcgcgtatcaacactggaatcagcgaaaatcgattcagttttacctccattaacc

SEQ ID NO: 114540 - DNA, 60 bp, Artificial
  Synthetic oligonucleotide
acactggaatcagcgaaaatcgattcagttttacctccattaaccgtacgcgaagcgagc

SEQ ID NO: 114541 - DNA, 60 bp, Artificial
  Synthetic oligonucleotide
ccagaattcgattggtgagctatccacaagactatccaatgtggagacgtctatggtgac

SEQ ID NO: 114542 - DNA, 60 bp, Artificial
  Synthetic oligonucleotide
tgagctatccacaagactatccaatgtggagacgtctatggtgacgacggctggacgggg

SEQ ID NO: 114543 - DNA, 60 bp, Artificial
  Synthetic oligonucleotide
acacgggtgacaactgaggttacaaggttagatggtctaatcaatagtggccagaattcg

SEQ ID NO: 114544 - DNA, 60 bp, Artificial
  Synthetic oligonucleotide
cacgggtgacaactgaggttacaaggttagatggtctaatcaatagtggccagaattcga

SEQ ID NO: 114545 - DNA, 60 bp, Artificial
  Synthetic oligonucleotide
attgcagctcgacctttcggggcaatcaaaaggggtgggatttgtcggcacaggaatggt

SEQ ID NO: 114546 - DNA, 60 bp, Artificial
  Synthetic oligonucleotide
ttgcagctcgacctttcggggcaatcaaaaggggtgggatttgtcggcacaggaatggtg

SEQ ID NO: 114547 - DNA, 60 bp, Artificial
  Synthetic oligonucleotide
accttgaacgtcattgtaggtaatggaatgtggtttaatagttctaatcaattgcagctc

SEQ ID NO: 114548 - DNA, 60 bp, Artificial
  Synthetic oligonucleotide
gtaggtaatggaatgtggtttaatagttctaatcaattgcagctcgacctttcggggcaa

SEQ ID NO: 114549 - DNA, 60 bp, Artificial
  Synthetic oligonucleotide
gctattcgcgcctatggatgcatctctcattacagagatacggaaaatagtactccaact

SEQ ID NO: 114550 - DNA, 60 bp, Artificial
  Synthetic oligonucleotide
cgcgcctatggatgcatctctcattacagagatacggaaaatagtactccaactatctgt

SEQ ID NO: 114551 - DNA, 60 bp, Artificial
  Synthetic oligonucleotide
tccaggtcaacgttgatgatatcagggctgccaatattaaactcgacggacttggaagac

SEQ ID NO: 114552 - DNA, 60 bp, Artificial
  Synthetic oligonucleotide
caggtcaacgttgatgatatcagggctgccaatattaaactcgacggacttggaagacag

SEQ ID NO: 114553 - DNA, 60 bp, Artificial
  Synthetic oligonucleotide
tagcatctcaaccattgagtcaagattgggtgagatggataatcgacttgtgggtatctc

SEQ ID NO: 114554 - DNA, 60 bp, Artificial
  Synthetic oligonucleotide
tgagtcaagattgggtgagatggataatcgacttgtgggtatctcgagtcaggtcacgca

SEQ ID NO: 114555 - DNA, 57 bp, Artificial
  Synthetic oligonucleotide
ggggatactgaaccatcgtcaactattgatccattgtctacgacatttgccgcggtc

SEQ ID NO: 114556 - DNA, 50 bp, Artificial
  Synthetic oligonucleotide
acgatcaacgcattgatgcgtttaggatcatgggagtatcggaatggacg

SEQ ID NO: 114557 - DNA, 56 bp, Artificial
  Synthetic oligonucleotide
aagaattatggtggcacatacaccggtcatactcaagtatattgggctccgtggac

SEQ ID NO: 114558 - DNA, 60 bp, Artificial
  Synthetic oligonucleotide
atcctcattgggtgacagaatcaatgctgtcgaaccacgagttgacagtctggatacggt

SEQ ID NO: 114559 - DNA, 60 bp, Artificial
  Synthetic oligonucleotide
actcagagcatatcctcattgggtgacagaatcaatgctgtcgaaccacgagttgacagt

SEQ ID NO: 114560 - DNA, 60 bp, Artificial
  Synthetic oligonucleotide
gatacggtcacgtctaatctcactggacgaacatccactttggaggcagatgttggaagc

SEQ ID NO: 114561 - DNA, 60 bp, Artificial
  Synthetic oligonucleotide
agttgacagtctggatacggtcacgtctaatctcactggacgaacatccactttggaggc

SEQ ID NO: 114562 - DNA, 60 bp, Artificial
  Synthetic oligonucleotide
tgggtatctcgagtcaggtcacgcaattatctaactcagttagccagaacactcagagca

SEQ ID NO: 114563 - DNA, 60 bp, Artificial
  Synthetic oligonucleotide
tgggtatctcgagtcaggtcacgcaattatctaactcaggtagccagaacactcagagca

SEQ ID NO: 114564 - DNA, 60 bp, Artificial
  Synthetic oligonucleotide
ctcgagtcaggtcacgcaattatctaactcagttagccagaacactcagagcatatcctc

SEQ ID NO: 114565 - DNA, 60 bp, Artificial
  Synthetic oligonucleotide
ctcgagtcaggtcacgcaattatctaactcaggtagccagaacactcagagcatatcctc

SEQ ID NO: 114566 - DNA, 60 bp, Artificial
  Synthetic oligonucleotide
ggaggcagatgttggaagcttacggacagaactagcagcgctaacaacacgggtgacaac

SEQ ID NO: 114567 - DNA, 60 bp, Artificial
  Synthetic oligonucleotide
ctttggaggcagatgttggaagcttacggacagaactagcagcgctaacaacacgggtga

SEQ ID NO: 114568 - DNA, 60 bp, Artificial
  Synthetic oligonucleotide
agacgggggatactgaaccatcgtcaactattgatccattgctacgacatttgccgcggt

SEQ ID NO: 114569 - DNA, 60 bp, Artificial
  Synthetic oligonucleotide
gatgattggttggtgttgagcttttctcagatgacgactaactcaataatggcagatggg

SEQ ID NO: 114570 - DNA, 60 bp, Artificial
  Synthetic oligonucleotide
ttgatgaaggtggatgattggttggtgttgagcttttctcagatgacgactaactcaata

SEQ ID NO: 114571 - DNA, 60 bp, Artificial
  Synthetic oligonucleotide
cacccacaattgagttggagagcaaatgtcactttgaatttgatgaaggtggatgattgg

SEQ ID NO: 114572 - DNA, 60 bp, Artificial
  Synthetic oligonucleotide
tgcaatatcagcacccacaattgagttggagagcaaatgtcactttgaatttgatgaagg

SEQ ID NO: 114573 - DNA, 60 bp, Artificial
  Synthetic oligonucleotide
ggcagatcgttttggcatgcgcacgggtacttggacgggacaattgcaatatcagcaccc

SEQ ID NO: 114574 - DNA, 60 bp, Artificial
  Synthetic oligonucleotide
gcaggtggcagatcgttttggcatgcgcacgggtacttggacgggacaattgcaatatca

SEQ ID NO: 114575 - DNA, 60 bp, Artificial
  Synthetic oligonucleotide
tccattaaccgtacgcgaagcgagcggcgtacgtaccctgagctttggttatgatacgag

SEQ ID NO: 114576 - DNA, 60 bp, Artificial
  Synthetic oligonucleotide
ggggatactgaaccatcgtcaactattgatccattgctacgacatttgccgcggtccaat

SEQ ID NO: 114577 - DNA, 60 bp, Artificial
  Synthetic oligonucleotide
agacgggggatactgaaccatcgtcaactattgatccattgtctacgacatttgccgcgg

SEQ ID NO: 114578 - DNA, 60 bp, Artificial
  Synthetic oligonucleotide
cagaagcgtggtgttgatactgtttgttggcaatatttacgtcaaattctacttcattat

SEQ ID NO: 114579 - DNA, 60 bp, Artificial
  Synthetic oligonucleotide
tatttgttcgagatttcatattcgcatacattcatgaattgaacgggcgtcgagtttatc

SEQ ID NO: 114580 - DNA, 60 bp, Artificial
  Synthetic oligonucleotide
cgggcgtcgagtttatcttgattacagtttacacagcttgcttctagttatgtctcgtgg

SEQ ID NO: 114581 - DNA, 65 bp, Artificial
  Synthetic oligonucleotide
gtctcgtggttctattaaatattttacttcccatctaaatcaactctttaatcccatgctatctc

SEQ ID NO: 114582 - DNA, 60 bp, Artificial
  Synthetic oligonucleotide
gaattgaacgggcgtcgagtttatcttgattacagtttacacagcttgcttctagttatg

SEQ ID NO: 114583 - DNA, 60 bp, Artificial
  Synthetic oligonucleotide
ggcgtactacatccgattgaaatctttgattataatgcttttggtatcgatgaagttaac

SEQ ID NO: 114584 - DNA, 65 bp, Artificial
  Synthetic oligonucleotide
gacattgctttagttctcaataatgctagcgatttaattttaaaactattcgaaaacgacggtgg

SEQ ID NO: 114585 - DNA, 60 bp, Artificial
  Synthetic oligonucleotide
aggaacagtcatatgttaatttaccagaatgtgtctcgaagaaaagttttcagaagcgtg

SEQ ID NO: 114586 - DNA, 60 bp, Artificial
  Synthetic oligonucleotide
tatgttaaagctaaatcattgtcaaaagattatggtatagttagtaattcattgaaaaga

SEQ ID NO: 114587 - DNA, 60 bp, Artificial
  Synthetic oligonucleotide
gagaatatatggtgactttgattacgcagttgagcacgacggattaattcaacctagtga

SEQ ID NO: 114588 - DNA, 52 bp, Artificial
  Synthetic oligonucleotide
attatatgagttggatccaagtaaaaaatgtactcgttacttcttcagtgag

SEQ ID NO: 114589 - DNA, 60 bp, Artificial
  Synthetic oligonucleotide
catactattccaaatttgacattgtttttaagaaataaaatgattgaagtattatatgag

SEQ ID NO: 114590 - DNA, 60 bp, Artificial
  Synthetic oligonucleotide
gtatacccgtaagttgagaggagtagttatccacgccgctaaatgtttgtattacatgtt

SEQ ID NO: 114591 - DNA, 60 bp, Artificial
  Synthetic oligonucleotide
aatttgaagaaatgtatacccgtaagttgagaggagtagttatccacgccgctaaatgtt

SEQ ID NO: 114592 - DNA, 60 bp, Artificial
  Synthetic oligonucleotide
gataataaaatgatttcggtaatgcattcagttatgggtgatgatgttttggaagtgatc

SEQ ID NO: 114593 - DNA, 60 bp, Artificial
  Synthetic oligonucleotide
gctaaatgtttgtattacatgttttcaatgaatatgtttttagatgatcatttctttgct

SEQ ID NO: 114594 - DNA, 60 bp, Artificial
  Synthetic oligonucleotide
gatggttcaacgaccagattgtaaagttagtatagtgacggagcaaggtctttcaatccc

SEQ ID NO: 114595 - DNA, 60 bp, Artificial
  Synthetic oligonucleotide
ggagttatccttatctcgcatatttggagtatttttgcaacaagctgcaatattaggtgt

SEQ ID NO: 114596 - DNA, 60 bp, Artificial
  Synthetic oligonucleotide
agtaaaaatacagactatcttcgttggttaacaatgacaagtactattgtttcaaatttc

SEQ ID NO: 114597 - DNA, 60 bp, Artificial
  Synthetic oligonucleotide
agcaaagtctcaacgttcttatggtattgataatggtttaggtattggatacgcgatttg

SEQ ID NO: 114598 - DNA, 60 bp, Artificial
  Synthetic oligonucleotide
gaaaccatttgttaagagctcgatttctaattgtgtacatcttggtaaagctgtaggtag

SEQ ID NO: 114599 - DNA, 60 bp, Artificial
  Synthetic oligonucleotide
tttacctaattacatgaaaccatttgttaagagctcgatttctaattgtgtacatcttgg

SEQ ID NO: 114600 - DNA, 60 bp, Artificial
  Synthetic oligonucleotide
gtgtgttgcacggcttattaagtggtattgtttcagaattattgtgtgatctcaactccg

SEQ ID NO: 114601 - DNA, 60 bp, Artificial
  Synthetic oligonucleotide
ttttacccagtgtgttgcacggcttattaagtggtattgtttcagaattattgtgtgatc

SEQ ID NO: 114602 - DNA, 60 bp, Artificial
  Synthetic oligonucleotide
cgtatttcaatccagactgataaacctgtttcttgtattttacccagtgtgttgcacggc

SEQ ID NO: 114603 - DNA, 60 bp, Artificial
  Synthetic oligonucleotide
gttggggtttcacattaggcgagcatttacttaggtttaaaagattaaggcatcttactg

SEQ ID NO: 114604 - DNA, 60 bp, Artificial
  Synthetic oligonucleotide
caggaactttaggagagattacaggatcattaggagcagcttttgatgttgattcagcag

SEQ ID NO: 114605 - DNA, 60 bp, Artificial
  Synthetic oligonucleotide
tgacagagacatctcaggaactttaggagagattacaggatcattaggagcagcttttga

SEQ ID NO: 114606 - DNA, 60 bp, Artificial
  Synthetic oligonucleotide
cggaaagcttttcttatattctagtttaccaacggtgcatgacagagacatctcaggaac

SEQ ID NO: 114607 - DNA, 60 bp, Artificial
  Synthetic oligonucleotide
aatagttcttacggaaagcttttcttatattctagtttaccaacggtgcatgacagagac

SEQ ID NO: 114608 - DNA, 60 bp, Artificial
  Synthetic oligonucleotide
tggcgattattccagtagactagtacggtttgacgtgattaacaaattgtcaaagtttca

SEQ ID NO: 114609 - DNA, 60 bp, Artificial
  Synthetic oligonucleotide
ggtttaaatggcagtttgaaactattctcatcatttggcgattattccagtagactagta

SEQ ID NO: 114610 - DNA, 51 bp, Artificial
  Synthetic oligonucleotide
ctagtttagttgatgctgctggtgccgctattggtatacctcaaagtttac

SEQ ID NO: 114611 - DNA, 60 bp, Artificial
  Synthetic oligonucleotide
gatgtatcctcaattaagaattcaggtgatatgaaaggtatggatgcccatactattcca

SEQ ID NO: 114612 - DNA, 60 bp, Artificial
  Synthetic oligonucleotide
gtttaggtattggatacgcgatttgggcctgtcatcgaagttctcgttatatttactctg

SEQ ID NO: 114613 - DNA, 53 bp, Artificial
  Synthetic oligonucleotide
tacatcttggtaaagctgtaggtagtaaaatgtcatcaaatcattcaacatcg

SEQ ID NO: 114614 - DNA, 60 bp, Artificial
  Synthetic oligonucleotide
ttccatatccaacaaggatgtccttattttgtgatgaaagatcagatactacgaaaagac

SEQ ID NO: 114615 - DNA, 60 bp, Artificial
  Synthetic oligonucleotide
cgaaaattgatcaatccttgacagtaagaactgaatcattggaagagcgattatctttgg

SEQ ID NO: 114616 - DNA, 60 bp, Artificial
  Synthetic oligonucleotide
ggcatcttactgaaagtcgtaaaaatcagcttggattgggtgacattgaagttatggttc

SEQ ID NO: 114617 - DNA, 60 bp, Artificial
  Synthetic oligonucleotide
cgtgtattgatgagttttaatagtattgctgtgctacgttcccgcaaaattgaagtttca

SEQ ID NO: 114618 - DNA, 54 bp, Artificial
  Synthetic oligonucleotide
gtgctctcctatatcttggccaatgttaaccttcgcaatgactgacaaagacga

SEQ ID NO: 114619 - DNA, 60 bp, Artificial
  Synthetic oligonucleotide
ttgttcagttagattgagaatatatggtgactttgattacgcagttgagcacgacggatt

SEQ ID NO: 114620 - DNA, 60 bp, Artificial
  Synthetic oligonucleotide
acgcgatttgggcctgtcatcgaagttctcgttatatttactctgactcagataagcgta

SEQ ID NO: 114621 - DNA, 60 bp, Artificial
  Synthetic oligonucleotide
atttactctgactcagataagcgtaacattgaagctttgcttaatcttgataaatctctt

SEQ ID NO: 114622 - DNA, 60 bp, Artificial
  Synthetic oligonucleotide
tcagatttcaaattgatcgtcgtgcgagagtaattgtaattgttccaaatgcaatacagt

SEQ ID NO: 114623 - DNA, 60 bp, Artificial
  Synthetic oligonucleotide
gatcgtcgtgcgagagtaattgtaattgttccaaatgcaatacagtcaagtgaattgttc

SEQ ID NO: 114624 - DNA, 60 bp, Artificial
  Synthetic oligonucleotide
ggtaatttgctagatgctagattgcaaatgagcacgaccggagatgtatcctcaattaag

SEQ ID NO: 114625 - DNA, 60 bp, Artificial
  Synthetic oligonucleotide
ccctttgattaatgactggacaaaagtgccaattctgaacgaaatgtctgagctatttga

SEQ ID NO: 114626 - DNA, 60 bp, Artificial
  Synthetic oligonucleotide
gacagaaaagtgatgaaccaacattatcaaaggaattaaaaggtatttcaaacgctcgcg

SEQ ID NO: 114627 - DNA, 60 bp, Artificial
  Synthetic oligonucleotide
gctcgcgttatagctttcgctcttaataggaatgattaccatgatgaatcaaaatttctc

SEQ ID NO: 114628 - DNA, 60 bp, Artificial
  Synthetic oligonucleotide
ttcaagggagatgactgaagtggaaaaatttatcgaatcccgtgctaaaaacgagatgca

SEQ ID NO: 114629 - DNA, 60 bp, Artificial
  Synthetic oligonucleotide
agatttagcgagaccatttccatcaggtgattaccagttcgtgtattcggatgccgatca

SEQ ID NO: 114630 - DNA, 60 bp, Artificial
  Synthetic oligonucleotide
cggaaatcattacattttgggtactttaacacagatggtcagcgcacctcctcacatcat

SEQ ID NO: 114631 - DNA, 60 bp, Artificial
  Synthetic oligonucleotide
gcgcacctcctcacatcattaacgctactgatgcactgttgcttgaatcttgtttagagc

SEQ ID NO: 114632 - DNA, 60 bp, Artificial
  Synthetic oligonucleotide
tttggcgcgtcagccggtcattcgggagcggatcagccattggtgatcgaaccgtggatg

SEQ ID NO: 114633 - DNA, 60 bp, Artificial
  Synthetic oligonucleotide
atcttgtttagagcagttcgcggctaacgtgagagctagaccagcgcaacctgtcacgag

SEQ ID NO: 114634 - DNA, 60 bp, Artificial
  Synthetic oligonucleotide
ggcaaccaacggatatcaattagctagaccgatccccaaacaactaacaaaccgctggct

SEQ ID NO: 114635 - DNA, 60 bp, Artificial
  Synthetic oligonucleotide
tatcaggctatcgatccaaatactgggaaggagtacctccgcgcagggcagtccgtcgcg

SEQ ID NO: 114636 - DNA, 60 bp, Artificial
  Synthetic oligonucleotide
ccgctggctttccagcttcgtgagtcaagtgatatcagatggtataaatgagacgccttt

SEQ ID NO: 114637 - DNA, 60 bp, Artificial
  Synthetic oligonucleotide
ggtgatcgaaccgtggatgcagggtaaaattagcggtgtacctccaccatcctcagttag

SEQ ID NO: 114638 - DNA, 60 bp, Artificial
  Synthetic oligonucleotide
atgccgatcaagtagtcgatggccatgacgatcttagcatatcatcaggattagttgaga

SEQ ID NO: 114639 - DNA, 60 bp, Artificial
  Synthetic oligonucleotide
ccaggcgcgtacaatacttccgtccaatcccgtcctatttgataacattaatggcgcgtc

SEQ ID NO: 114640 - DNA, 60 bp, Artificial
  Synthetic oligonucleotide
gtgggaaatgcacgtaaatccatagccatatacgagtctcatggtgcaagggtgttgact

SEQ ID NO: 114641 - DNA, 60 bp, Artificial
  Synthetic oligonucleotide
aaggctcgcttacgttacttgccgctcatagatccgagatccttggaagtccaggcgcgt

SEQ ID NO: 114642 - DNA, 60 bp, Artificial
  Synthetic oligonucleotide
ttacatcaaggagatcccctgcctcagcaaggaggaaggctcgcttacgttacttgccgc

SEQ ID NO: 114643 - DNA, 60 bp, Artificial
  Synthetic oligonucleotide
ccagcgccatgtatgatggtgatgtggtactagatctcggtactggaccagaggcgaaga

SEQ ID NO: 114644 - DNA, 60 bp, Artificial
  Synthetic oligonucleotide
ggcgcgtcgcctcatgtatgcttgacgatgatgtacaactttgaagtatccagcgccatg

SEQ ID NO: 114645 - DNA, 60 bp, Artificial
  Synthetic oligonucleotide
gagcaatatggtcgtagcttgttctctttagcgcggaagattggtgatcgatccttggtc

SEQ ID NO: 114646 - DNA, 60 bp, Artificial
  Synthetic oligonucleotide
ctgtcacgagattggatcaatgctatcatttacgttggggtgctcaatatgttggtgagg

SEQ ID NO: 114647 - DNA, 60 bp, Artificial
  Synthetic oligonucleotide
gacgtgggattttacatacagcatcctttgcaacttctgaacactatcacgctgcctacg

SEQ ID NO: 114648 - DNA, 60 bp, Artificial
  Synthetic oligonucleotide
gatcgatccttggtcaaagacacagcagtactcaaacatgcatatcaggctatcgatcca

SEQ ID NO: 114649 - DNA, 60 bp, Artificial
  Synthetic oligonucleotide
caatgatcccacagataacagctcagtttgacgcgaataagggtgaatggtcattggata

SEQ ID NO: 114650 - DNA, 60 bp, Artificial
  Synthetic oligonucleotide
cgctgcctacgaatgaagacttattcctgagcgcccctgatatgcgcgagtgggcagtca

SEQ ID NO: 114651 - DNA, 60 bp, Artificial
  Synthetic oligonucleotide
atggcctcaggagcgatatgttcaaatagcttacgactcaccatccgtggttgatggagc

SEQ ID NO: 114652 - DNA, 60 bp, Artificial
  Synthetic oligonucleotide
ccgcctcaggactgggatgttcttactgataccatcagctggtcgccgtctcttccgacc

SEQ ID NO: 114653 - DNA, 60 bp, Artificial
  Synthetic oligonucleotide
ccccgctccagtgcagtggctacctcagtacaccattgaccaagtggcagtatacgaagg

SEQ ID NO: 114654 - DNA, 60 bp, Artificial
  Synthetic oligonucleotide
aagtttgggagagatgaaccatattctgacatggattcactggagcgcatatgccgtgct

SEQ ID NO: 114655 - DNA, 60 bp, Artificial
  Synthetic oligonucleotide
gggtggtgctgtcatccgagctgccgcagttaccggacacgtactttgatggagatgagc

SEQ ID NO: 114656 - DNA, 60 bp, Artificial
  Synthetic oligonucleotide
gaaagagaaactccgtgtactgaaatatgaggttctaaggatttacccgatcagtactta

SEQ ID NO: 114657 - DNA, 60 bp, Artificial
  Synthetic oligonucleotide
ctatcggactacgcaaaggcattttacagtgatacatatgaggttttagatcggtttttc

SEQ ID NO: 114658 - DNA, 60 bp, Artificial
  Synthetic oligonucleotide
ctacgacttattgcccctattgattgtgaatgatactatgataagtgatctgcttggaac

SEQ ID NO: 114659 - DNA, 60 bp, Artificial
  Synthetic oligonucleotide
tcggtttttctggacacatgattcatcggcgggcgtcctagtgcattacgataaaccaac

SEQ ID NO: 114660 - DNA, 60 bp, Artificial
  Synthetic oligonucleotide
cttagtggatcacttctaccgatatgagacactgtccgctatatcacgtcagctgccatc

SEQ ID NO: 114661 - DNA, 60 bp, Artificial
  Synthetic oligonucleotide
atgggtcgtccgtgacgggaattgagatgattagcattgagaatcctggcttttcgaata

SEQ ID NO: 114662 - DNA, 60 bp, Artificial
  Synthetic oligonucleotide
tgttgataaagccgtttgtgactaataacgttgagattttcttcgtggcttttggtgtac

SEQ ID NO: 114663 - DNA, 60 bp, Artificial
  Synthetic oligonucleotide
ctgtcatatgatctgcgctggactaagctggctctgctcgagtcgaccacgctaagtagc

SEQ ID NO: 114664 - DNA, 60 bp, Artificial
  Synthetic oligonucleotide
ttagttgagagtttactggactcgtgtatgcatgctacagctccaggcggatcattcgtc

SEQ ID NO: 114665 - DNA, 60 bp, Artificial
  Synthetic oligonucleotide
gacgcaagctgctcgtgttgggatatcggggttatgtgcgaatgtgggaaatgcacgtaa

SEQ ID NO: 114666 - DNA, 60 bp, Artificial
  Synthetic oligonucleotide
cagaactgctccctcgttataccgggctttaacgcacaggatgtatttaactgctacttc

SEQ ID NO: 114667 - DNA, 60 bp, Artificial
  Synthetic oligonucleotide
gacattacagacgcgtggccggcccagttggattttaccatagctggtactgacgtagat

SEQ ID NO: 114668 - DNA, 60 bp, Artificial
  Synthetic oligonucleotide
gctggtactgacgtagatattacggtcaacccttattaccgcttgatggcctttgtgaag

SEQ ID NO: 114669 - DNA, 60 bp, Artificial
  Synthetic oligonucleotide
ggtgttctcagacgccggtatttacacaatgcaggctttggtcggttctaacgctaatcc

SEQ ID NO: 114670 - DNA, 60 bp, Artificial
  Synthetic oligonucleotide
ggtcggttctaacgctaatcctgtgtcactgggatcgtttgtggtggactctccagatgt

SEQ ID NO: 114671 - DNA, 60 bp, Artificial
  Synthetic oligonucleotide
ttcgacgcggcctttcagcaattagtcagggtacttacgaggagtacggctaatgtcctg

SEQ ID NO: 114672 - DNA, 60 bp, Artificial
  Synthetic oligonucleotide
cttcagttgggaaagaaccttggagacccctgcgtaatcagcggaccaatgagattgtcg

SEQ ID NO: 114673 - DNA, 60 bp, Artificial
  Synthetic oligonucleotide
gattacctgagcgatggatggattacaggcgtgcgcggtgatatcgtaacatgtatgctg

SEQ ID NO: 114674 - DNA, 60 bp, Artificial
  Synthetic oligonucleotide
cgatggtcaatggcagatagcgaaccccgataaattccaattcttctcgtcaaacacggg

SEQ ID NO: 114675 - DNA, 60 bp, Artificial
  Synthetic oligonucleotide
ggagttaataccgtcaacatccccagtaacatgtgtggacataaggccgactgcgcaacc

SEQ ID NO: 114676 - DNA, 60 bp, Artificial
  Synthetic oligonucleotide
tgaattacttaaacgtatacatgacaacctgatagctaaaccagttgacgttatagatat

SEQ ID NO: 114677 - DNA, 60 bp, Artificial
  Synthetic oligonucleotide
aaacgtatacatgacaacctgatagctaaaccagttgacgttatagatatgtcgaaggaa

SEQ ID NO: 114678 - DNA, 60 bp, Artificial
  Synthetic oligonucleotide
cggcggaactcttcaccgcaagccccattagacctgatgattgactgagaagccacagtc

SEQ ID NO: 114679 - DNA, 60 bp, Artificial
  Synthetic oligonucleotide
cggcggaactcttcaccgcaagacccattagacctgatgattgactgagaagccacagtc

SEQ ID NO: 114680 - DNA, 60 bp, Artificial
  Synthetic oligonucleotide
gcggcggaactcttcaccgcaagacccattagacctgatgattgactgagaagccacagt

SEQ ID NO: 114681 - DNA, 60 bp, Artificial
  Synthetic oligonucleotide
gcggcggaactcttcaccgcaagccccattagacctgatgattgactgagaagccacagt

SEQ ID NO: 114682 - DNA, 60 bp, Artificial
  Synthetic oligonucleotide
gcgtacatactgcagtgggatctggatcaagcacaaaaggacctggagaacgcgcggacg

SEQ ID NO: 114683 - DNA, 60 bp, Artificial
  Synthetic oligonucleotide
tgtcatctttagcagatgcctttagcgtattggcgccagacttcaacttatttggtgtag

SEQ ID NO: 114684 - DNA, 60 bp, Artificial
  Synthetic oligonucleotide
gtctttagcagatgcctttagcgtattggcgccagactttaacttatttggtgtagtacc

SEQ ID NO: 114685 - DNA, 60 bp, Artificial
  Synthetic oligonucleotide
agctttagcagatgcctttagcgtattggcgccagactttaacttatttggtgtagtacc

SEQ ID NO: 114686 - DNA, 60 bp, Artificial
  Synthetic oligonucleotide
atgcctttagcgtattggcgccagacttcaacttatttggtgtagtacctatacaaggtc

SEQ ID NO: 114687 - DNA, 60 bp, Artificial
  Synthetic oligonucleotide
gcctttagcgtattggcgccagactttaacttatttggtgtagtacctatacaaggtccg

SEQ ID NO: 114688 - DNA, 60 bp, Artificial
  Synthetic oligonucleotide
agtgatcccagaacgtcacgatggtggagatcatgaatttcatacagttgagaaaaggga

SEQ ID NO: 114689 - DNA, 60 bp, Artificial
  Synthetic oligonucleotide
acatcaggtagggacttgtatcgaacctttctgcaaatttttgagtcattgagaccacat

SEQ ID NO: 114690 - DNA, 60 bp, Artificial
  Synthetic oligonucleotide
tctcaatgcaagtttgacgaactgacaaagggagagggttcatcttggcattttcatgcc

SEQ ID NO: 114691 - DNA, 60 bp, Artificial
  Synthetic oligonucleotide
agctacctcgttcaaccgtcattagaatttttgttcgaggtcccaagtgctctcaatgca

SEQ ID NO: 114692 - DNA, 60 bp, Artificial
  Synthetic oligonucleotide
ttttcatgccctagtacttactaatgtttcaaagtcccatgtgcagtcagctagacgtgt

SEQ ID NO: 114693 - DNA, 60 bp, Artificial
  Synthetic oligonucleotide
gcaagtttgacgaactgacaaagggagagggttcatcttggcattttcatgccctagtac

SEQ ID NO: 114694 - DNA, 60 bp, Artificial
  Synthetic oligonucleotide
ctagacgtgtcatgcttaatgctctatcaggtatgaagagaagctattatattcgaaatg

SEQ ID NO: 114695 - DNA, 60 bp, Artificial
  Synthetic oligonucleotide
gccctagtacttactaatgtttcaaagtcccatgtgcagtcagctagacgtgtcatgctt

SEQ ID NO: 114696 - DNA, 60 bp, Artificial
  Synthetic oligonucleotide
atttatcacttaaaagagtagagtggggatgcgccatttggactacccgctgtggatatg

SEQ ID NO: 114697 - DNA, 60 bp, Artificial
  Synthetic oligonucleotide
attcgaaatgataagatttatcacttaaaagagtagagtggggatgcgccatttggacta

SEQ ID NO: 114698 - DNA, 50 bp, Artificial
  Synthetic oligonucleotide
atgagaatgtacatccgatcattcaaccgacgttcattgaatgcatgaga

SEQ ID NO: 114699 - DNA, 60 bp, Artificial
  Synthetic oligonucleotide
ctgaaagtgttactccattaccagagttcgaccttgaccatgatagaacgcctgataaca

SEQ ID NO: 114700 - DNA, 60 bp, Artificial
  Synthetic oligonucleotide
ttctgaaagtgttactccattaccagagttcgaccttgaccatgatagaacgcctgataa

SEQ ID NO: 114701 - DNA, 60 bp, Artificial
  Synthetic oligonucleotide
gctaccgctccaagcttgccaccggatccaccaacctaccgttctgaaagtgttactcca

SEQ ID NO: 114702 - DNA, 60 bp, Artificial
  Synthetic oligonucleotide
caaccaacagctaccgctccaagcttgccaccggatccaccaacctaccgttctgaaagt

SEQ ID NO: 114703 - DNA, 60 bp, Artificial
  Synthetic oligonucleotide
taggattacagccacttaacaccgcaacctatacgcaaccaacagctaccgctccaagct

SEQ ID NO: 114704 - DNA, 60 bp, Artificial
  Synthetic oligonucleotide
agaaaagggaatggataggattacagccacttaacaccgcaacctatacgcaaccaacag

SEQ ID NO: 114705 - DNA, 60 bp, Artificial
  Synthetic oligonucleotide
cccagaacgtcacgatggtggagatcatgaatttcatacagttgagaaaagggaatggat

SEQ ID NO: 114706 - DNA, 60 bp, Artificial
  Synthetic oligonucleotide
cggtagaaatgtcactcatattcaagccaggctccatttcgcatacatcttccaagactc

SEQ ID NO: 114707 - DNA, 60 bp, Artificial
  Synthetic oligonucleotide
aaataaaacccaacggtagaaatgtcactcatattcaagccaggctccatttcgcataca

SEQ ID NO: 114708 - DNA, 60 bp, Artificial
  Synthetic oligonucleotide
ttatgtttttgtggtataggatatagaggcatgaatccacatgaaccgggtttaactcag

SEQ ID NO: 114709 - DNA, 60 bp, Artificial
  Synthetic oligonucleotide
atgagaatgtacatccgatcattcaaccgacgttcattgaatgcatgagattatgttttt

SEQ ID NO: 114710 - DNA, 60 bp, Artificial
  Synthetic oligonucleotide
ccaagactctacatacaacaccacatactaaaacactgcaggattatgttcgacccttac

SEQ ID NO: 114711 - DNA, 60 bp, Artificial
  Synthetic oligonucleotide
ttcgcatacatcttccaagactctacatacaacaccacatactaaaacactgcaggatta

SEQ ID NO: 114712 - DNA, 60 bp, Artificial
  Synthetic oligonucleotide
cccgctgtggatatgtactgacgtttagtactcacaattcggccagggttgatggaggtt

SEQ ID NO: 114713 - DNA, 60 bp, Artificial
  Synthetic oligonucleotide
atttggactacccgctgtggatatgtactgacgtttagtactcacaattcggccagggtt

SEQ ID NO: 114714 - DNA, 60 bp, Artificial
  Synthetic oligonucleotide
caaatggatgtagttgaatacggattgggatacttactggaagcaatacgatacggcgca

SEQ ID NO: 114715 - DNA, 60 bp, Artificial
  Synthetic oligonucleotide
tgaatacggattgggatacttactggaagcaatacgatacggcgcaatagtgttacagga

SEQ ID NO: 114716 - DNA, 60 bp, Artificial
  Synthetic oligonucleotide
aaagtttcctacgccatctcaaatgtaaatatgcggcccaaggatgatgagagagcgcgt

SEQ ID NO: 114717 - DNA, 60 bp, Artificial
  Synthetic oligonucleotide
aatttactaactattggcgagacaattggggaacaattaatagttgaatgtctaatcaca

SEQ ID NO: 114718 - DNA, 60 bp, Artificial
  Synthetic oligonucleotide
cgcgactgacgcttgatgaaatcattcgaagaggatatatcccacgaaattacattatca

SEQ ID NO: 114719 - DNA, 60 bp, Artificial
  Synthetic oligonucleotide
aattacattatcaataaagtttcctacgccatctcaaatgtaaatatgcggcccaaggat

SEQ ID NO: 114720 - DNA, 60 bp, Artificial
  Synthetic oligonucleotide
ctcagtcggcacgtgtatccacatcagctgcacgattgtatggccagacgcgactgacgc

SEQ ID NO: 114721 - DNA, 60 bp, Artificial
  Synthetic oligonucleotide
agacgcgactgacgcttgatgaaatcattcgaagaggatatatcccacgaaattacatta

SEQ ID NO: 114722 - DNA, 60 bp, Artificial
  Synthetic oligonucleotide
gtggtataggatatagaggcatgaatccacatgaaccgggtttaactcagtcggcacgtg

SEQ ID NO: 114723 - DNA, 60 bp, Artificial
  Synthetic oligonucleotide
tttaactcagtcggcacgtgtatccacatcagctgcacgattgtatggccagacgcgact

SEQ ID NO: 114724 - DNA, 60 bp, Artificial
  Synthetic oligonucleotide
ttctatcaagaacagagtgcgagcgcctaccagagttatttacagtatacctacacgtta

SEQ ID NO: 114725 - DNA, 60 bp, Artificial
  Synthetic oligonucleotide
cagagtgcgagcgcctaccagagttatttacagtatacctacacgttaagtcgattgatg

SEQ ID NO: 114726 - DNA, 57 bp, Artificial
  Synthetic oligonucleotide
ctacacgttaagtcgattgatgatattgtccggctagttcaatcatatggtgagttt

SEQ ID NO: 114727 - DNA, 59 bp, Artificial
  Synthetic oligonucleotide
gggtcatttaacatttaaagatatcagcgcacataaagttggtccagaggcggttagac

SEQ ID NO: 114728 - DNA, 60 bp, Artificial
  Synthetic oligonucleotide
tgcaggattatgttcgacccttactcattgttacgacgagatcgtcgctccaaatggatg

SEQ ID NO: 114729 - DNA, 60 bp, Artificial
  Synthetic oligonucleotide
cgacccttactcattgttacgacgagatcgtcgctccaaatggatgtagttgaatacgga

SEQ ID NO: 114730 - DNA, 60 bp, Artificial
  Synthetic oligonucleotide
ggcgagacaattggggaacaattaatagttgaatgtctaatcacagttctacgcatgcag

SEQ ID NO: 114731 - DNA, 60 bp, Artificial
  Synthetic oligonucleotide
tctaatcacagttctacgcatgcagctttttgagtcgagccaatatcgtaagctacctcg

SEQ ID NO: 114732 - DNA, 60 bp, Artificial
  Synthetic oligonucleotide
agggaagatgaagcggtgcggggtgcagctgctcgaagattaccgcaaaagtgggatgat

SEQ ID NO: 114733 - DNA, 60 bp, Artificial
  Synthetic oligonucleotide
gtgaatcagagcatctactatcccaatggcggcgacgcgcataaattccattcaaacgcc

SEQ ID NO: 114734 - DNA, 60 bp, Artificial
  Synthetic oligonucleotide
caaacgccaagccacgtgcgatccagatcatcttcagtccaagtgtgaatgtacgcacca

SEQ ID NO: 114735 - DNA, 60 bp, Artificial
  Synthetic oligonucleotide
tgtgggtatacgcatactactcggatggatcagtgctcgtaatcaacaagaactcgcaat

SEQ ID NO: 114736 - DNA, 60 bp, Artificial
  Synthetic oligonucleotide
acaagaactcgcaatacaaggttggcatttccgagactttcaaggcactcaaggagtatc

SEQ ID NO: 114737 - DNA, 60 bp, Artificial
  Synthetic oligonucleotide
gatgtgatagacgcatacacactgcagtgggatctggatcaagcgcaaaaggacctggag

SEQ ID NO: 114738 - DNA, 60 bp, Artificial
  Synthetic oligonucleotide
cggtgtagagagaaagatggctccaataggcgcgcgggagagcgcagttatgttagtttc

SEQ ID NO: 114739 - DNA, 60 bp, Artificial
  Synthetic oligonucleotide
cggtgtagagagaaagatggctccaataggcgcgcgggagagtgcagttatgttagtttc

SEQ ID NO: 114740 - DNA, 57 bp, Artificial
  Synthetic oligonucleotide
aaaagaagaacatattagcttacacgagtacgggaggagatgtgaaaacggagttcc

SEQ ID NO: 114741 - DNA, 58 bp, Artificial
  Synthetic oligonucleotide
aaaagaagaactattagatacacgagtacgggaggagatgtgaaaacggagttcctgc

SEQ ID NO: 114742 - DNA, 60 bp, Artificial
  Synthetic oligonucleotide
ttcaaacagtattaaagatgtggtgcgagctacagcgtatttcacagcgccaaccggaga

SEQ ID NO: 114743 - DNA, 60 bp, Artificial
  Synthetic oligonucleotide
tgttagtttcaaacagtattaaagatgtggtgcgagctacagcgtatttcacagcgccaa

SEQ ID NO: 114744 - DNA, 60 bp, Artificial
  Synthetic oligonucleotide
gctgggaatttcgcgtgagggagtggccgagcagacagagagattgagagatctgcgacg

SEQ ID NO: 114745 - DNA, 60 bp, Artificial
  Synthetic oligonucleotide
gctagggatttcgcgtgagggagtggccgagcagacagagagattgagagatctgcgacg

SEQ ID NO: 114746 - DNA, 56 bp, Artificial
  Synthetic oligonucleotide
gatcaagcgcaaaaggacctggagaacgcgcgaacgagaatgttgacagaggagat

SEQ ID NO: 114747 - DNA, 60 bp, Artificial
  Synthetic oligonucleotide
tctggatcaagcgcaaaaggacctggagaacgcgcgaacgagaatgttgacagaggagat

SEQ ID NO: 114748 - DNA, 60 bp, Artificial
  Synthetic oligonucleotide
gtctccggaaagagttgggaatttcccgtgagggagtggccgagcagacggagagattga

SEQ ID NO: 114749 - DNA, 60 bp, Artificial
  Synthetic oligonucleotide
gtctccagaaagagttgggaatttcccgtgagggagtggccgagcagacggagagattga

SEQ ID NO: 114750 - DNA, 60 bp, Artificial
  Synthetic oligonucleotide
gtctccagaaagagttgggaatttcccgtgagggagtggccgagcagacggggagattga

SEQ ID NO: 114751 - DNA, 60 bp, Artificial
  Synthetic oligonucleotide
agagttgggaatttcccgtgagggagtggccgagcagacggggagattgagagatctgcg

SEQ ID NO: 114752 - DNA, 60 bp, Artificial
  Synthetic oligonucleotide
gttgggaatttcccgtgagggagtggccgagcagacggagagattgagagatcttcggcg

SEQ ID NO: 114753 - DNA, 60 bp, Artificial
  Synthetic oligonucleotide
atcggttcggccgcgattgatgggttgattcaaggtacagtacagtctgtaatcacgggg

SEQ ID NO: 114754 - DNA, 60 bp, Artificial
  Synthetic oligonucleotide
acacgtcattggcatgcgctcggtggtgcgcaggaggcgacaggtagaacgtttcgagaa

SEQ ID NO: 114755 - DNA, 60 bp, Artificial
  Synthetic oligonucleotide
cgtttcactataggagcgaatcagatatgatcgatcactttgcggctaagatactggaag

SEQ ID NO: 114756 - DNA, 60 bp, Artificial
  Synthetic oligonucleotide
ttcactataggagcgaatcagatatgatcgatcactttgcggctaagatattggaagatt

SEQ ID NO: 114757 - DNA, 60 bp, Artificial
  Synthetic oligonucleotide
gtacgcacgctcgactaactacactacaccagtcggacagttggtagttaatgcgccagc

SEQ ID NO: 114758 - DNA, 60 bp, Artificial
  Synthetic oligonucleotide
ccccaaaccgaatcaaattagaacgataacaaaaccaaacacagtacctcaactcggcac

SEQ ID NO: 114759 - DNA, 60 bp, Artificial
  Synthetic oligonucleotide
ccccaaaccaaaccaaattagaacgataacaaaaccaaacacagtacctcaactcggcac

SEQ ID NO: 114760 - DNA, 60 bp, Artificial
  Synthetic oligonucleotide
caccatgtggcactatacgagtatcaacaatgacacgagagtagcacttgaccccaaacc

SEQ ID NO: 114761 - DNA, 60 bp, Artificial
  Synthetic oligonucleotide
tagcacttgaccccaaaccgaatcaaattagaacgataacaaaaccaaacacagtacctc

SEQ ID NO: 114762 - DNA, 60 bp, Artificial
  Synthetic oligonucleotide
gatgctaggtgtgtacgcacgctcgactaactacactacaccagtcggacagttggtagt

SEQ ID NO: 114763 - DNA, 60 bp, Artificial
  Synthetic oligonucleotide
ggagcgaatcagatatgatcgatcactttgcggctaagatattggaagattggcgacaga

SEQ ID NO: 114764 - DNA, 60 bp, Artificial
  Synthetic oligonucleotide
cgcgctccactaattacactacaccagtcggacagttggtagttaatgcgccaacgattc

SEQ ID NO: 114765 - DNA, 60 bp, Artificial
  Synthetic oligonucleotide
acactacaccagtcggacagttggtagttaatgcgccaacgattctcaactattctaatc

SEQ ID NO: 114766 - DNA, 60 bp, Artificial
  Synthetic oligonucleotide
tacactggtatcaacgcattcatcttggcactggaatgtattacatacgtttcactatag

SEQ ID NO: 114767 - DNA, 60 bp, Artificial
  Synthetic oligonucleotide
caacgcattcatcttggcactggaatgtattacatacgtttcactataggagcgaatcag

SEQ ID NO: 114768 - DNA, 60 bp, Artificial
  Synthetic oligonucleotide
gtacctcaactcggcacagactacttgtacactttcaactcacaacgacgatcacacacg

SEQ ID NO: 114769 - DNA, 60 bp, Artificial
  Synthetic oligonucleotide
ctcggcacagactatttgtatactttcaactcacaacgacgatcacacacgttacggcta

SEQ ID NO: 114770 - DNA, 60 bp, Artificial
  Synthetic oligonucleotide
tgctgcgtgacatcggtataacacatgagataataagaccatcgacgcctgagcttatag

SEQ ID NO: 114771 - DNA, 60 bp, Artificial
  Synthetic oligonucleotide
tacaactaattcatatctaatggctccggatacatccattatcttgctcggtgcagagag

SEQ ID NO: 114772 - DNA, 60 bp, Artificial
  Synthetic oligonucleotide
agaagagtggggcgcatgcaaaggctgctgagagaggaaggcgtaaacaagggaagaagc

SEQ ID NO: 114773 - DNA, 60 bp, Artificial
  Synthetic oligonucleotide
agaagagtggggcgcatgcaaaggctgctgagagagggagacgtaaacaagggaagaagc

SEQ ID NO: 114774 - DNA, 60 bp, Artificial
  Synthetic oligonucleotide
tggctcgcgaagcttcaaaaaagaagaacatattagcttacacgagtacgggaggagatg

SEQ ID NO: 114775 - DNA, 60 bp, Artificial
  Synthetic oligonucleotide
attagcctacacgagcacgggagggaatgtaaaaacggagttcctgcatttgatcgatca

SEQ ID NO: 114776 - DNA, 60 bp, Artificial
  Synthetic oligonucleotide
atctgcgacgaaaagagaagagtggggcgcatgcaaaggctgctgagagagggagacgta

SEQ ID NO: 114777 - DNA, 60 bp, Artificial
  Synthetic oligonucleotide
gggcgattcacctatgctagttctggataactatccctcaatgttatctagagcggagaa

SEQ ID NO: 114778 - DNA, 60 bp, Artificial
  Synthetic oligonucleotide
ttgtgggtatgggcgattcacctatgctagttctggataactatccctcgatgttgtcca

SEQ ID NO: 114779 - DNA, 60 bp, Artificial
  Synthetic oligonucleotide
ggtatttttctccagctgagcaacatgactgcgattgtgtgtgtcagcttacttagtgag

SEQ ID NO: 114780 - DNA, 60 bp, Artificial
  Synthetic oligonucleotide
ctgagcaacatgactgcgattgtgtgtgtcagcttacttagtgagaaagcagtactcgtg

SEQ ID NO: 114781 - DNA, 50 bp, Artificial
  Synthetic oligonucleotide
acttagtgagaaagcagtactcgtgaagaatttaactgatcatgtgaaag

SEQ ID NO: 114782 - DNA, 60 bp, Artificial
  Synthetic oligonucleotide
atcggacggtttgttagtggaccagacactataactgagaagcgtactatggattctgtc

SEQ ID NO: 114783 - DNA, 60 bp, Artificial
  Synthetic oligonucleotide
gcccttttgggtgttccttacgttcagggagcttttagacatggcataatttcaaagcat

SEQ ID NO: 114784 - DNA, 60 bp, Artificial
  Synthetic oligonucleotide
cggtttgttagcggaccagacactataactgagaagcgtactatggattctgttatcgca

SEQ ID NO: 114785 - DNA, 57 bp, Artificial
  Synthetic oligonucleotide
aggattgacgccgatcatgtcgtgttgactgcggatgggtactggagaaaagatgat

SEQ ID NO: 114786 - DNA, 60 bp, Artificial
  Synthetic oligonucleotide
atcattttagttgttgcaccgccgagtggttttattcgagcggcttcagtggggtcatca

SEQ ID NO: 114787 - DNA, 60 bp, Artificial
  Synthetic oligonucleotide
aaagattgtgggtatgggcgattcacctatgctagttctggataactatccctcaatgtt

SEQ ID NO: 114788 - DNA, 60 bp, Artificial
  Synthetic oligonucleotide
tttagttgttgcaccgccgagtggttttattcgggcagcttcagtggggtcatcatcttc

SEQ ID NO: 114789 - DNA, 60 bp, Artificial
  Synthetic oligonucleotide
cggtttgttagtggaccagacactataactgagaagcgtactatggattctgtcatcgca

SEQ ID NO: 114790 - DNA, 60 bp, Artificial
  Synthetic oligonucleotide
aacctaagtaggattgacgccgatcatgtcgtgttgactgcggatgggtactggagaaaa

SEQ ID NO: 114791 - DNA, 60 bp, Artificial
  Synthetic oligonucleotide
atcggacggtttgttagcggaccagacactataactgagaagcgtactatggattctgtt

SEQ ID NO: 114792 - DNA, 60 bp, Artificial
  Synthetic oligonucleotide
cctaagtaggattgacgccgatcatgtcgtgttgactgcggatgggtactggagaaaaga

SEQ ID NO: 114793 - DNA, 60 bp, Artificial
  Synthetic oligonucleotide
cattttagttgttgcaccgccgagtggttttattcgagcggcttcagtggggtcatcatc

SEQ ID NO: 114794 - DNA, 60 bp, Artificial
  Synthetic oligonucleotide
gatggatttgagtcgaacacaggcgatcaatacacgcctagaggcagacgtgaagtcagc

SEQ ID NO: 114795 - DNA, 55 bp, Artificial
  Synthetic oligonucleotide
tccaacacctgttgccttacagcctctattatcacagctgcgggagttgtcaagt

SEQ ID NO: 114796 - DNA, 60 bp, Artificial
  Synthetic oligonucleotide
cagaaagctggcttacggggagttgttgttcatgagctctcagtcggatacagtagacgg

SEQ ID NO: 114797 - DNA, 60 bp, Artificial
  Synthetic oligonucleotide
attgtggaactcgagaagcacttgatcgtccaaaaatctgcgtcgtctgatccaacacct

SEQ ID NO: 114798 - DNA, 58 bp, Artificial
  Synthetic oligonucleotide
gatacagtagacggaattaaacttcaactcgatgcatcgcggcaatgtcatgaatgcc

SEQ ID NO: 114799 - DNA, 60 bp, Artificial
  Synthetic oligonucleotide
gcgcagcggtctaaccagagatcccttcttgacgacctttatgctaatacacaagttgtg

SEQ ID NO: 114800 - DNA, 60 bp, Artificial
  Synthetic oligonucleotide
agctatccgtgttgaacagcgcgtgtaagatgacactcaggtccctcctcaaaacgcatc

SEQ ID NO: 114801 - DNA, 60 bp, Artificial
  Synthetic oligonucleotide
cccagagctatgcctcgctgatgtgctactaccatccctccagaaagctggcttacgggg

SEQ ID NO: 114802 - DNA, 60 bp, Artificial
  Synthetic oligonucleotide
ccaacgagttatttcccagagctatgcctcgctgatgtgctactaccatccctccagaaa

SEQ ID NO: 114803 - DNA, 60 bp, Artificial
  Synthetic oligonucleotide
tactttaaaatatatcctacatatgatgaacacgatggtaggatggttgatcagaagcag

SEQ ID NO: 114804 - DNA, 60 bp, Artificial
  Synthetic oligonucleotide
cgcctggcttgggaaacatcgaccctgagatctacaacgaggggcgctttatgtttatgc

SEQ ID NO: 114805 - DNA, 60 bp, Artificial
  Synthetic oligonucleotide
gtcggaatcagcagggctgtcgagatccaaaccactaacaacgtgcacttagcgcctggc

SEQ ID NO: 114806 - DNA, 60 bp, Artificial
  Synthetic oligonucleotide
tactgaagaggcgaaagtggcggatgaggaactaatgttgtttgggctagaccatcgtgc

SEQ ID NO: 114807 - DNA, 60 bp, Artificial
  Synthetic oligonucleotide
aggcgtggttaatcgtactgaagaggcgaaagtggcggatgaggaactaatgttgtttgg

SEQ ID NO: 114808 - DNA, 60 bp, Artificial
  Synthetic oligonucleotide
gactaggaaggatacctcatcactaactgctacacctggactccgagcaccgagcatgtc

SEQ ID NO: 114809 - DNA, 60 bp, Artificial
  Synthetic oligonucleotide
tgtaccagtctctaagactaggaaggatacctcatcactaactgctacacctggactccg

SEQ ID NO: 114810 - DNA, 60 bp, Artificial
  Synthetic oligonucleotide
ctcgccgagcaaacgattttcaaactcgatgtaccagacgataagacagtgcatcttctg

SEQ ID NO: 114811 - DNA, 60 bp, Artificial
  Synthetic oligonucleotide
aaacaggtggccgaattggtgagcaccatcacccagaaccagacgacttaccagcaagag

SEQ ID NO: 114812 - DNA, 60 bp, Artificial
  Synthetic oligonucleotide
cgctggccacctctaatggactctctctgtgctctatcttgatggatgagaagctatccg

SEQ ID NO: 114813 - DNA, 60 bp, Artificial
  Synthetic oligonucleotide
tcttgatggatgagaagctatccgtgttgaacagcgcgtgtaagatgacactcaggtccc

SEQ ID NO: 114814 - DNA, 60 bp, Artificial
  Synthetic oligonucleotide
gatgaacggcaagcaggcgcatgagatcagtgagctgcgtgactctgtcaccaattatga

SEQ ID NO: 114815 - DNA, 60 bp, Artificial
  Synthetic oligonucleotide
cgttaaatcagcgacaggcgaagtcggtgcgtattacgtccagtctcctatcggccacac

SEQ ID NO: 114816 - DNA, 60 bp, Artificial
  Synthetic oligonucleotide
gacaggcgaagtcggtgcgtattacgtccagtctcctatcggccacacctatcgacgctg

SEQ ID NO: 114817 - DNA, 60 bp, Artificial
  Synthetic oligonucleotide
gtcaccaattatgaaaaacaggtggccgaattggtgagcaccatcacccagaaccagacg

SEQ ID NO: 114818 - DNA, 60 bp, Artificial
  Synthetic oligonucleotide
cgataagacagtgcatcttctggaccgcgacgatgatcatgtggtagcaagatttacgcg

SEQ ID NO: 114819 - DNA, 60 bp, Artificial
  Synthetic oligonucleotide
caagatttacgcgtgttttcattgaggatgtagccccatctcatcatgcagcgcagcggt

SEQ ID NO: 114820 - DNA, 60 bp, Artificial
  Synthetic oligonucleotide
gcgtgttttcattgaggatgtagccccatctcatcatgcagcgcagcggtctaaccagag

SEQ ID NO: 114821 - DNA, 60 bp, Artificial
  Synthetic oligonucleotide
cacgtgaaggaagatgagcttatggatgccgtccgaatcgccccagatgttaggcaggag

SEQ ID NO: 114822 - DNA, 60 bp, Artificial
  Synthetic oligonucleotide
acaagttgtgtcagtaacgccatcagcattgagatgggtcatcaaacatggagtgtccga

SEQ ID NO: 114823 - DNA, 50 bp, Artificial
  Synthetic oligonucleotide
ggcgacgcgtcaagaatggtgggagcggattgccagagaaacgtcgacca

SEQ ID NO: 114824 - DNA, 60 bp, Artificial
  Synthetic oligonucleotide
cgatccactgtacacgctggccacctctaatggactctctctgtgctctatcttgatgga

SEQ ID NO: 114825 - DNA, 60 bp, Artificial
  Synthetic oligonucleotide
cgcgagtttctgactaaggcgatagagcatggttcaatgtctattccttatcagcatgtc

SEQ ID NO: 114826 - DNA, 60 bp, Artificial
  Synthetic oligonucleotide
aaggcgatagagcatggttcaatgtctattccttatcagcatgtcaatgtgccgaaggtt

SEQ ID NO: 114827 - DNA, 60 bp, Artificial
  Synthetic oligonucleotide
ctggactccgagcaccgagcatgtcttcacctgtcgatatggcgcagtcgcgcgagtttc

SEQ ID NO: 114828 - DNA, 60 bp, Artificial
  Synthetic oligonucleotide
gcaccgagcatgtcttcacctgtcgatatggcgcagtcgcgcgagtttctgactaaggcg

SEQ ID NO: 114829 - DNA, 60 bp, Artificial
  Synthetic oligonucleotide
tgaggccattctctgctggcgctttctctatttcaggcgtcatctctccagcccacgcct

SEQ ID NO: 114830 - DNA, 60 bp, Artificial
  Synthetic oligonucleotide
gaacacaggcgatcaatacacgcctagaggcagacgtgaagtcagcacaatcttgcagcc

SEQ ID NO: 114831 - DNA, 60 bp, Artificial
  Synthetic oligonucleotide
tcagcatgtcaatgtgccgaaggttgataggaaagtggtaagtcttgtggtgaggccatt

SEQ ID NO: 114832 - DNA, 60 bp, Artificial
  Synthetic oligonucleotide
gtgccgaaggttgataggaaagtggtaagtcttgtggtgaggccattctctgctggcgct

SEQ ID NO: 114833 - DNA, 60 bp, Artificial
  Synthetic oligonucleotide
gcccacgcctacctcttagaatgcttacctcagcttgaacaggctatggctttcgttgct

SEQ ID NO: 114834 - DNA, 59 bp, Artificial
  Synthetic oligonucleotide
cgtttcaccatcaaaccgggcatgagccttcaggatgctatcacggctttcattaactt

SEQ ID NO: 114835 - DNA, 60 bp, Artificial
  Synthetic oligonucleotide
ctcaggtccctcctcaaaacgcatcgagatttggatcttcatcgtgcgttccaacgagtt

SEQ ID NO: 114836 - DNA, 60 bp, Artificial
  Synthetic oligonucleotide
gcaagttgagcaactcttaaatccacctgggagcagtttccttagtatgctattaaacgc

SEQ ID NO: 114837 - DNA, 60 bp, Artificial
  Synthetic oligonucleotide
gacaactgagcttagagcgttgagcgcggataataatgttgactatactgctatgcatga

SEQ ID NO: 114838 - DNA, 60 bp, Artificial
  Synthetic oligonucleotide
gttgaccaagcgataaatactctacacaatgaacaaccgaatgaatgacagacttacgat

SEQ ID NO: 114839 - DNA, 53 bp, Artificial
  Synthetic oligonucleotide
ccgaatgaatgacagacttacgataaccaattatgcgcgcacacaaacattac

SEQ ID NO: 114840 - DNA, 60 bp, Artificial
  Synthetic oligonucleotide
cagatggattggaagcggatggccagcgaatagaattacgatagattttgctatttcggc

SEQ ID NO: 114841 - DNA, 60 bp, Artificial
  Synthetic oligonucleotide
gctagccggcatggatttggacgaaggcacatctgcatattttagattacttatgaatga

SEQ ID NO: 114842 - DNA, 60 bp, Artificial
  Synthetic oligonucleotide
gggtttgtctttcgaaaacaatgcacgagcaaatagatcactgattgagtacgataaatt

SEQ ID NO: 114843 - DNA, 60 bp, Artificial
  Synthetic oligonucleotide
cggataggactcgtaatagtgtagcaaagcatttgacaaatagttcgaaggcgcctccag

SEQ ID NO: 114844 - DNA, 60 bp, Artificial
  Synthetic oligonucleotide
aaaagagtcgacaagtcaactttagtagatgatgttcaccatacagagcctgcaatggga

SEQ ID NO: 114845 - DNA, 60 bp, Artificial
  Synthetic oligonucleotide
cgatagatactccaatccctgttgataattctgaggcgtgggcgtctatcgttggaaaaa

SEQ ID NO: 114846 - DNA, 60 bp, Artificial
  Synthetic oligonucleotide
tgttagatcgccaatacaaatgggtggatgcttcgaatccagaggatcacgtgaattcga

SEQ ID NO: 114847 - DNA, 60 bp, Artificial
  Synthetic oligonucleotide
agtcttagataagaaaggcgttcttcctaccgctatagaggatgcgtatttgagtggagt

SEQ ID NO: 114848 - DNA, 60 bp, Artificial
  Synthetic oligonucleotide
tgagtggagtggtagcaggattagaaaatcaaacgggaataaattttaccgtaacatctg

SEQ ID NO: 114849 - DNA, 60 bp, Artificial
  Synthetic oligonucleotide
ccgtaacatctgcaacaagtggtgaaataatattagatggtcaaagatatccttgtgcca

SEQ ID NO: 114850 - DNA, 60 bp, Artificial
  Synthetic oligonucleotide
ggtacgttagggatgggcatcctaccgccgtccagaactgacgaagatcaatgttcagct

SEQ ID NO: 114851 - DNA, 60 bp, Artificial
  Synthetic oligonucleotide
ggacgcaccattaacatacaatgatcaaaatggtaacttctttaggccatctcgcgacag

SEQ ID NO: 114852 - DNA, 60 bp, Artificial
  Synthetic oligonucleotide
tagttcgaaggcgcctccagtgttgtcggcggcaagacattcagtttcgagtgtgacaac

SEQ ID NO: 114853 - DNA, 60 bp, Artificial
  Synthetic oligonucleotide
ggggcaggctatattttaacgaaagtgtcgaaaagcattgtacaatctatggctgggcca

SEQ ID NO: 114854 - DNA, 60 bp, Artificial
  Synthetic oligonucleotide
ccgcaaattcaaccaaccaaaaggttcgtgatgctgatttcataatgaacgagaccgatg

SEQ ID NO: 114855 - DNA, 60 bp, Artificial
  Synthetic oligonucleotide
gacaactggaaatagtaagggacttagcattaccgatttcctaatcgatggagttgaacc

SEQ ID NO: 114856 - DNA, 60 bp, Artificial
  Synthetic oligonucleotide
ctattgttcaggctcgtaaccaaccactgctggcacgcttaatgcctgaagtgcagatgg

SEQ ID NO: 114857 - DNA, 60 bp, Artificial
  Synthetic oligonucleotide
gtgggaatttcttgcattttcgaagcgtggggccagatcagattagaattgctgaaaagg

SEQ ID NO: 114858 - DNA, 60 bp, Artificial
  Synthetic oligonucleotide
atgcaacatacaatcagtggtttgttggataggctagattatttagaatcgcaagttgag

SEQ ID NO: 114859 - DNA, 60 bp, Artificial
  Synthetic oligonucleotide
cttaatgcctgaagtgcagatggatcttaaaacagacttaacgaggagtcgaggcaataa

SEQ ID NO: 114860 - DNA, 60 bp, Artificial
  Synthetic oligonucleotide
aactatttattgcgcacacaatattcattgtatactgaaatgggccagcaaatattggag

SEQ ID NO: 114861 - DNA, 60 bp, Artificial
  Synthetic oligonucleotide
gctgaaaaggacattccaactgagattaattttgtaactcgtgtttcgtttatggacgca

SEQ ID NO: 114862 - DNA, 60 bp, Artificial
  Synthetic oligonucleotide
atattcggttccagcaatatggctagactatatggtcaggcgttgcaaactatcctgata

SEQ ID NO: 114863 - DNA, 60 bp, Artificial
  Synthetic oligonucleotide
ggtagtgctaacgtggtgcattttaacgatcggacagattatattttaccatcaattact

SEQ ID NO: 114864 - DNA, 60 bp, Artificial
  Synthetic oligonucleotide
cattttcgaagcgtggggccagatcagattagaattgctgaaaaggacattccaactgag

SEQ ID NO: 114865 - DNA, 60 bp, Artificial
  Synthetic oligonucleotide
gtacgcgcgagataagatagtagctggaaataaattaccagcgcatgcattagcgtcgca

SEQ ID NO: 114866 - DNA, 60 bp, Artificial
  Synthetic oligonucleotide
cagcaagttaatgtttcaataatggcaactgtagttgcgatacgcaatgatgagccagtt

SEQ ID NO: 114867 - DNA, 60 bp, Artificial
  Synthetic oligonucleotide
ccgaatgatgatgtgtggactatgaacttaagagagcgattagagagatcgcgtaatact

SEQ ID NO: 114868 - DNA, 60 bp, Artificial
  Synthetic oligonucleotide
aatgttgtcaatgattttggaaatttcttgcgtggacaaccgaatgatgatgtgtggact

SEQ ID NO: 114869 - DNA, 60 bp, Artificial
  Synthetic oligonucleotide
acgcaatgatgagccagtttttcagcttattctaacaatcatggcaacaatcaacggaac

SEQ ID NO: 114870 - DNA, 60 bp, Artificial
  Synthetic oligonucleotide
accatacagagcctgcaatgggagatgtgcttagagatttacttgaaaatcctcctaacg

SEQ ID NO: 114871 - DNA, 60 bp, Artificial
  Synthetic oligonucleotide
gatcgcgtaatactatatatctaaatgattgggataggttgtcgtcaagtgaaacacgca

SEQ ID NO: 114872 - DNA, 60 bp, Artificial
  Synthetic oligonucleotide
ttgggcagcgtgtgtttttcgaagtgccatacgaaatagacgctttaacgtctggtgttc

SEQ ID NO: 114873 - DNA, 60 bp, Artificial
  Synthetic oligonucleotide
ctatgcatgataggatagcgttgatattttcatcaactcttcttgagctattttcgagtg

SEQ ID NO: 114874 - DNA, 60 bp, Artificial
  Synthetic oligonucleotide
cgtcatttaaggtttccatttaggggtagtcgcgctatggtacgttagggatgggcatcc

SEQ ID NO: 114875 - DNA, 60 bp, Artificial
  Synthetic oligonucleotide
ggaggtaactgacgttattccagctcgtaatttagcaggtgggaatttcttgcattttcg

SEQ ID NO: 114876 - DNA, 60 bp, Artificial
  Synthetic oligonucleotide
caattgctggcgatacgatggcacctataacattgcgtcataccgcaaattcaaccaacc

SEQ ID NO: 114877 - DNA, 60 bp, Artificial
  Synthetic oligonucleotide
atgatgagggaccgcatggcacctttagaacgtattatcgaccattagaaacactaggtg

SEQ ID NO: 114878 - DNA, 60 bp, Artificial
  Synthetic oligonucleotide
taccagcgcatgcattagcgtcgcaccattacactagaatcaaccctaatactaggcgta

SEQ ID NO: 114879 - DNA, 60 bp, Artificial
  Synthetic oligonucleotide
ctatccccgatacagactagacacattgacgttgaaatggcaggtagccgttccgccagt

SEQ ID NO: 114880 - DNA, 60 bp, Artificial
  Synthetic oligonucleotide
actaggcgtatcgaagaagtgaatacaatttttggcgtgggtgagttatcgccaaatcca

SEQ ID NO: 114881 - DNA, 60 bp, Artificial
  Synthetic oligonucleotide
ggagattggtattgaggagaatcgaagtttacagcagaatatgaatgccgccgtgttctc

SEQ ID NO: 114882 - DNA, 60 bp, Artificial
  Synthetic oligonucleotide
ccgcggaactcttcatggaatgatgtattggacacaacgtggtcagaaatattcggttcc

SEQ ID NO: 114883 - DNA, 60 bp, Artificial
  Synthetic oligonucleotide
gcattccctaggttgttagatcatcggcaatctggatattcagacgaacaactccgcgtt

SEQ ID NO: 114884 - DNA, 60 bp, Artificial
  Synthetic oligonucleotide
gtattttagatcgagcactaatagtggttatacattatcaaactcgccgaacacaggaca

SEQ ID NO: 114885 - DNA, 60 bp, Artificial
  Synthetic oligonucleotide
gtttccttagtatgctattaaacgcactcattgatgtagctatgggggtcgcgttaccag

SEQ ID NO: 114886 - DNA, 60 bp, Artificial
  Synthetic oligonucleotide
agcagctcatacggccgattatttagatatactacattaccaactgtacatgatcgtgat

SEQ ID NO: 114887 - DNA, 60 bp, Artificial
  Synthetic oligonucleotide
ggtggtgcgtttaaaattaagttcggattttctagattggaaagaacgtcatacatgggg

SEQ ID NO: 114888 - DNA, 60 bp, Artificial
  Synthetic oligonucleotide
aacgagtttaaatggagatggcgctttcttgcttatcaatcagatgttttttactagcga

SEQ ID NO: 114889 - DNA, 60 bp, Artificial
  Synthetic oligonucleotide
cagtcccttctagtttaatgtatgtcaaccataatagagctaaaattgaacaatctctga

SEQ ID NO: 114890 - DNA, 54 bp, Artificial
  Synthetic oligonucleotide
gaaagaacgtcatacatggggatttacattaggtgagcatttactgcgtttcaa

SEQ ID NO: 114891 - DNA, 60 bp, Artificial
  Synthetic oligonucleotide
caatctctgactgtacgaaccgagactttagatgaacgtgcctctttagattcaacgttt

SEQ ID NO: 114892 - DNA, 60 bp, Artificial
  Synthetic oligonucleotide
taatgtatgtcaaccataatagagctaaaattgaacaatctctgactgtacgaaccgaga

SEQ ID NO: 114893 - DNA, 60 bp, Artificial
  Synthetic oligonucleotide
cctggttatcatcaaagcagctcatacggccgattatttagatatactacattaccaact

SEQ ID NO: 114894 - DNA, 60 bp, Artificial
  Synthetic oligonucleotide
ttcaacgtttttacgacatgtattctcctactctatagtaccaaaagacattgaagtatt

SEQ ID NO: 114895 - DNA, 60 bp, Artificial
  Synthetic oligonucleotide
ctgccgacccacgtatcaaaaggaacaatgatcgtacgaaccgtttgtcgagcaaaagag

SEQ ID NO: 114896 - DNA, 60 bp, Artificial
  Synthetic oligonucleotide
tggttatgcaatctggaattgtcatagaacatcacgttatttatatactgatcgggataa

SEQ ID NO: 114897 - DNA, 60 bp, Artificial
  Synthetic oligonucleotide
cttgagcttgattaaacaatgtgtacggagttggacctgattacatataccgtgctatgg

SEQ ID NO: 114898 - DNA, 60 bp, Artificial
  Synthetic oligonucleotide
cgaacgttcggataccactaaacgtcataccttagatatgattaagatagtacttgaagt

SEQ ID NO: 114899 - DNA, 60 bp, Artificial
  Synthetic oligonucleotide
acaaagaacaactagcaaaacaagatcaaaaagaaaacgaaactacctcaaataataaag

SEQ ID NO: 114900 - DNA, 60 bp, Artificial
  Synthetic oligonucleotide
cagtccgtttggtgtatcctttcgtaacgataatgacctcccctatttcctggcctatgt

SEQ ID NO: 114901 - DNA, 60 bp, Artificial
  Synthetic oligonucleotide
aggaatgaacgtttcagatcaaacttttcaatcaggtttttttgctacttcagctcaaca

SEQ ID NO: 114902 - DNA, 60 bp, Artificial
  Synthetic oligonucleotide
ttcaaagttagataatagaatgattcgattgctacattcagtgatgggagacgacgtttt

SEQ ID NO: 114903 - DNA, 60 bp, Artificial
  Synthetic oligonucleotide
ttatcaagattgtttggtgtgtttctacaacaagctgcaattttaggagtttatgtacct

SEQ ID NO: 114904 - DNA, 60 bp, Artificial
  Synthetic oligonucleotide
gtaagatcccgtcttatatgaaaccctttgttaacaatgcaattcaaaactgtaaaaaga

SEQ ID NO: 114905 - DNA, 55 bp, Artificial
  Synthetic oligonucleotide
atatttgcctaattggagcattaattatatccgcaaatgcatacagtcatttttc

SEQ ID NO: 114906 - DNA, 60 bp, Artificial
  Synthetic oligonucleotide
ttacctagtgttatgcatggattattaaatggtataattggagaattgttatgtgattta

SEQ ID NO: 114907 - DNA, 60 bp, Artificial
  Synthetic oligonucleotide
agctacttcaacctaccaacgtcaacttgaatttaaagatagttttagaatgtggccgaa

SEQ ID NO: 114908 - DNA, 60 bp, Artificial
  Synthetic oligonucleotide
gaaggaataccattttatcatcacactcatagtagtaaatttggtgcgctggataataca

SEQ ID NO: 114909 - DNA, 60 bp, Artificial
  Synthetic oligonucleotide
aactgtactatattaacttatcgagccaaaagcccaacgagtttaaatggagatggcgct

SEQ ID NO: 114910 - DNA, 60 bp, Artificial
  Synthetic oligonucleotide
tgataacagaatttacgaacatgcaatgcctaatgacgttaaattacaaattttaattgg

SEQ ID NO: 114911 - DNA, 60 bp, Artificial
  Synthetic oligonucleotide
aagttttttcctgccgacccacgtatcaaaaggaacaatgatcgtacgaaccgtttgtcg

SEQ ID NO: 114912 - DNA, 60 bp, Artificial
  Synthetic oligonucleotide
gttatgatagtattggttatgccttagcagtgttgtattctaaagatatgaagccgttgg

SEQ ID NO: 114913 - DNA, 60 bp, Artificial
  Synthetic oligonucleotide
tgattacatataccgtgctatggatttatccagtgtcgaaggcggaaaccagctagcgtc

SEQ ID NO: 114914 - DNA, 60 bp, Artificial
  Synthetic oligonucleotide
tgtggccgaaattatgttatgatagtattggttatgccttagcagtgttgtattctaaag

SEQ ID NO: 114915 - DNA, 60 bp, Artificial
  Synthetic oligonucleotide
gtacatgatcgtgatatttcaggtacaatgggagaaatagtaggtggattaggagcgtct

SEQ ID NO: 114916 - DNA, 60 bp, Artificial
  Synthetic oligonucleotide
taggtggattaggagcgtcttttgacatcgattcagctattgaatttggagcttatgttt

SEQ ID NO: 114917 - DNA, 60 bp, Artificial
  Synthetic oligonucleotide
cccactgctttctcttgagcttgattaaacaatgtgtacggagttggacctgattacata

SEQ ID NO: 114918 - DNA, 52 bp, Artificial
  Synthetic oligonucleotide
tgaacaattcgttagacgtttgcgaggtccaaccattcatgcggcaaaatgt

SEQ ID NO: 114919 - DNA, 60 bp, Artificial
  Synthetic oligonucleotide
gtttataacattaatcgtaatttaattaatgcggctgcctccgcaattggcatacctcaa

SEQ ID NO: 114920 - DNA, 60 bp, Artificial
  Synthetic oligonucleotide
ggatttaatgtactaaagtcagataaaaggtttaatgaaaagattgctgttggcaaacag

SEQ ID NO: 114921 - DNA, 60 bp, Artificial
  Synthetic oligonucleotide
aaaattgacgatcctaactgtactatattaacttatcgagccaaaagcccaacgagttta

SEQ ID NO: 114922 - DNA, 60 bp, Artificial
  Synthetic oligonucleotide
caaatgcccgaatcatagcattcgctttaaatcgtaatgattatcaaattgaatcaaagt

SEQ ID NO: 114923 - DNA, 60 bp, Artificial
  Synthetic oligonucleotide
cgttttgttacatttttgacgaataaatcaggtggtattaaaagtgaagaaccgacatta

SEQ ID NO: 114924 - DNA, 60 bp, Artificial
  Synthetic oligonucleotide
gcccgaaccaaaagttagtttgataacagaacaaggtttgcagactcctattttacatga

SEQ ID NO: 114925 - DNA, 60 bp, Artificial
  Synthetic oligonucleotide
tggcaaacagattggtaatttattagacgctaaagctcaaatgatttcatcaggagatgt

SEQ ID NO: 114926 - DNA, 60 bp, Artificial
  Synthetic oligonucleotide
agttttggatttgatgacgtaaacaagttagctattaatcctaaaataagatatttgcct

SEQ ID NO: 114927 - DNA, 60 bp, Artificial
  Synthetic oligonucleotide
ttcaaatagatagaagagctcgtgttatagtgattgtgcccaatgcgattcaatcaagtg

SEQ ID NO: 114928 - DNA, 60 bp, Artificial
  Synthetic oligonucleotide
aacatgctgatagcccatggaaaatgtgcaataaggtttcaaatagatagaagagctcgt

SEQ ID NO: 114929 - DNA, 60 bp, Artificial
  Synthetic oligonucleotide
agctattgttttaaatagagcgagcgatttaattttggcttttgccgataacaacgagcc

SEQ ID NO: 114930 - DNA, 60 bp, Artificial
  Synthetic oligonucleotide
ttttaattggattggacaaaatgtttaacaagttaagtatccaacacagatttggtacat

SEQ ID NO: 114931 - DNA, 61 bp, Artificial
  Synthetic oligonucleotide
gccattgctacatcctaccagaatatttgattattctagttttggatttgatgacgtaaac

SEQ ID NO: 114932 - DNA, 60 bp, Artificial
  Synthetic oligonucleotide
ttgaagtattatatgaacttgaccctacaggcaaatgtgctagatatttcttcgctgaag

SEQ ID NO: 114933 - DNA, 60 bp, Artificial
  Synthetic oligonucleotide
ttttcaatagacgagaaagttgctgagtatgaaaaaattcttaatgataaagttaacatg

SEQ ID NO: 114934 - DNA, 60 bp, Artificial
  Synthetic oligonucleotide
aaccctcaaattttagaaagacaaaagtgcagaatcaatacaaccgcgttttttcaatag

SEQ ID NO: 114935 - DNA, 60 bp, Artificial
  Synthetic oligonucleotide
tgccattttcaataaagcagaaaagatccgggatttattcatcggaacagaacctttgac

SEQ ID NO: 114936 - DNA, 60 bp, Artificial
  Synthetic oligonucleotide
aagaaaggtatgtgcagatcgcttatgattcaccatccgttgttgatggggctacgcaat

SEQ ID NO: 114937 - DNA, 60 bp, Artificial
  Synthetic oligonucleotide
agagccctggattcaagggaaaatcagtggtgtgccgccaccctcctcagtgcgacagtt

SEQ ID NO: 114938 - DNA, 60 bp, Artificial
  Synthetic oligonucleotide
gacgttgtgctagatcttgggacgggaccagaggctaaaatccttgaactgatacccgca

SEQ ID NO: 114939 - DNA, 60 bp, Artificial
  Synthetic oligonucleotide
gctaaaaggcgcgatggcgaacgtttggggggtgagacttgcagactcgttatcttcacc

SEQ ID NO: 114940 - DNA, 60 bp, Artificial
  Synthetic oligonucleotide
cgagacgagccgtactctgacatggatgcgctggagaaaatatgtcgtaccgcctggcca

SEQ ID NO: 114941 - DNA, 60 bp, Artificial
  Synthetic oligonucleotide
ggatttccaggagcatttgatgactgggagcgattcatgagagagaagctgcgtgtgcta

SEQ ID NO: 114942 - DNA, 60 bp, Artificial
  Synthetic oligonucleotide
gacttgcggtggactagactggcattattagagtccacgacattgagtagcgcgtcgatt

SEQ ID NO: 114943 - DNA, 60 bp, Artificial
  Synthetic oligonucleotide
cgtaccgcctggccaaactgctcaattacctgggttccattgtcatacgacttgcggtgg

SEQ ID NO: 114944 - DNA, 60 bp, Artificial
  Synthetic oligonucleotide
ggtcggcgatgcgctatcctattatgtggactacaatcggagtcatcgagtcgtgctttc

SEQ ID NO: 114945 - DNA, 60 bp, Artificial
  Synthetic oligonucleotide
gtcggcttacgcaactcccgttacgtcctgattatggtaatatctgggtcggcgatgcgc

SEQ ID NO: 114946 - DNA, 60 bp, Artificial
  Synthetic oligonucleotide
gctacgcaatatggctatgtcaggaagaatcaactcagactcggcatgagaatatcggcg

SEQ ID NO: 114947 - DNA, 60 bp, Artificial
  Synthetic oligonucleotide
gtgccaccgggtgattataccttgactcctctgtaactcactgtccctcgtgagcgcgcc

SEQ ID NO: 114948 - DNA, 60 bp, Artificial
  Synthetic oligonucleotide
tcgaccaggcagcgatggacgaaggcgatctgatggttagtcggcttacgcaactcccgt

SEQ ID NO: 114949 - DNA, 60 bp, Artificial
  Synthetic oligonucleotide
cctttttctgagcgcacctgacatgcgagagtgggcagttaaggaaagcggtaacacgat

SEQ ID NO: 114950 - DNA, 60 bp, Artificial
  Synthetic oligonucleotide
atcgctgagtgatacgccctcgccggtacagtggcttccacaatacaccatcgaccaggc

SEQ ID NO: 114951 - DNA, 60 bp, Artificial
  Synthetic oligonucleotide
gagagagaagctgcgtgtgctaaagtatgaagtattgcgcatctatccaatcagcaacta

SEQ ID NO: 114952 - DNA, 60 bp, Artificial
  Synthetic oligonucleotide
gaaccctggcttctcgaatatgacccaggccgctcgcattggtatctcaggattgtgtgc

SEQ ID NO: 114953 - DNA, 60 bp, Artificial
  Synthetic oligonucleotide
tatcttcacccactattgagacacgaacgcgtcagtataccttacacgatctttgctcag

SEQ ID NO: 114954 - DNA, 60 bp, Artificial
  Synthetic oligonucleotide
ctttgctcagacctagatgctaatccggggagggaaccgtggaaacctctgcgtaatcag

SEQ ID NO: 114955 - DNA, 60 bp, Artificial
  Synthetic oligonucleotide
ctccggcatcagctagaagaaagtctaggttgcgatatttgccattaatagaccctaggt

SEQ ID NO: 114956 - DNA, 60 bp, Artificial
  Synthetic oligonucleotide
gtgacacatatgaagtgttggacaggttcttttggacgcatgactcttcagcgggggtct

SEQ ID NO: 114957 - DNA, 60 bp, Artificial
  Synthetic oligonucleotide
agtggtgtgccgccaccctcctcagtgcgacagttcggctatgatgttgcccgtggcgcg

SEQ ID NO: 114958 - DNA, 60 bp, Artificial
  Synthetic oligonucleotide
tatcatctggactggtggagagccttttgtcttcatgcatgcacgccacagcacccgggg

SEQ ID NO: 114959 - DNA, 60 bp, Artificial
  Synthetic oligonucleotide
gtgtgctaatgtaggtaacgcgcgtaagtccattgccatttacgaatctcatggggccag

SEQ ID NO: 114960 - DNA, 60 bp, Artificial
  Synthetic oligonucleotide
ccgactagacccgtatggcactacatcgaacagaagatcttgcccaatattacgtcatac

SEQ ID NO: 114961 - DNA, 60 bp, Artificial
  Synthetic oligonucleotide
cagcaactatagcaatgaacatgtcaacgtcttcgtggccaatgctttggtgggcgcttt

SEQ ID NO: 114962 - DNA, 60 bp, Artificial
  Synthetic oligonucleotide
cgaatctcatggggccagagtattaactatcacatcaaggagatctccggcatcagctag

SEQ ID NO: 114963 - DNA, 60 bp, Artificial
  Synthetic oligonucleotide
ccgtctgatgacctttgtaaggatcgatggacagtggcagattgccaatccagacaaatt

SEQ ID NO: 114964 - DNA, 60 bp, Artificial
  Synthetic oligonucleotide
aagggtgagtggacgttggatatggtcttctccgacgcaggaatctataccatgcaggct

SEQ ID NO: 114965 - DNA, 60 bp, Artificial
  Synthetic oligonucleotide
cgcaggaatctataccatgcaggctctagtgggatctaatgctaatccagtctctttggg

SEQ ID NO: 114966 - DNA, 60 bp, Artificial
  Synthetic oligonucleotide
gatgtcaatgctgcgatgattccccaagtgtctgcgcagtttgatgcgactaagggtgag

SEQ ID NO: 114967 - DNA, 59 bp, Artificial
  Synthetic oligonucleotide
ggattgacattcatggactacccatggaaaagcgaggtaacttcatagtggggcagaac

SEQ ID NO: 114968 - DNA, 60 bp, Artificial
  Synthetic oligonucleotide
gcgcaggatgtctttaactgttatttcaattccgccctcgctttctcgactgaagatgtc

SEQ ID NO: 114969 - DNA, 60 bp, Artificial
  Synthetic oligonucleotide
ctggtgccgaccagccgttagtcatagagccctggattcaagggaaaatcagtggtgtgc

SEQ ID NO: 114970 - DNA, 60 bp, Artificial
  Synthetic oligonucleotide
cagcatccacttcaacttttgaatacgatcacattgccaaccaacgaggacctttttctg

SEQ ID NO: 114971 - DNA, 60 bp, Artificial
  Synthetic oligonucleotide
ctgggcaatctgtcgcatattttggtgcatcagcgggtcattctggtgccgaccagccgt

SEQ ID NO: 114972 - DNA, 60 bp, Artificial
  Synthetic oligonucleotide
tcgtgctttcatcggaacttcctcagcttccggacacatattttgatggcgatgaacagt

SEQ ID NO: 114973 - DNA, 60 bp, Artificial
  Synthetic oligonucleotide
gcgcagcctgttctcactagctcgtaagattggtgaccgctcgttagtgaaagatacggc

SEQ ID NO: 114974 - DNA, 60 bp, Artificial
  Synthetic oligonucleotide
ccgctcgttagtgaaagatacggctgtcttgaagcacgcttaccaagccatcgatccaaa

SEQ ID NO: 114975 - DNA, 60 bp, Artificial
  Synthetic oligonucleotide
gaggtacaggcgcgcactattctgccagctgatccagtgttatttgaaaacgtgagcgga

SEQ ID NO: 114976 - DNA, 60 bp, Artificial
  Synthetic oligonucleotide
ggtcagtgcacctccttatattattaacgctactgacgcaatgttgcttgaatcctgtct

SEQ ID NO: 114977 - DNA, 60 bp, Artificial
  Synthetic oligonucleotide
aacccgttacacgcttagaccaatgctatcatttaagatggggagcacaatatgtaggag

SEQ ID NO: 114978 - DNA, 60 bp, Artificial
  Synthetic oligonucleotide
atacccgcaacctctccagtcacatgcgtggacatacggcctacagcgcagcctagtgga

SEQ ID NO: 114979 - DNA, 60 bp, Artificial
  Synthetic oligonucleotide
atgacactatgattggtgatctacttggcacgggggcatcgctatcacagttctttcaat

SEQ ID NO: 114980 - DNA, 60 bp, Artificial
  Synthetic oligonucleotide
tgagcgatggatggatcactggggtgcgtggggacatagttacttgtatgttatctttgg

SEQ ID NO: 114981 - DNA, 60 bp, Artificial
  Synthetic oligonucleotide
cgaattgttcttcgtcgctttcggtgtgcatcaacactcatcacttacttggacatctgg

SEQ ID NO: 114982 - DNA, 60 bp, Artificial
  Synthetic oligonucleotide
gatcaagcctttcgtcaccaacaacgtcgaattgttcttcgtcgctttcggtgtgcatca

SEQ ID NO: 114983 - DNA, 60 bp, Artificial
  Synthetic oligonucleotide
tatgagactttatctacgatctcacgacaattgccgtcttttgggtatgttgatgatggg

SEQ ID NO: 114984 - DNA, 60 bp, Artificial
  Synthetic oligonucleotide
tgatgatgggtcttccgtgactggtatcgagacaattagtattgagaaccctggcttctc

SEQ ID NO: 114985 - DNA, 60 bp, Artificial
  Synthetic oligonucleotide
gtctgacggcgtcaacgagactccactgtggccccaagaaaggtatgtgcagatcgctta

SEQ ID NO: 114986 - DNA, 60 bp, Artificial
  Synthetic oligonucleotide
gggagcttcttgagcaatcgcgattggctgcatctgaaggattgagaaaggtgataccta

SEQ ID NO: 114987 - DNA, 60 bp, Artificial
  Synthetic oligonucleotide
gactgatatcgagaatgttagagctctctcaattttgtgtgctgtgttcaagaatctgca

SEQ ID NO: 114988 - DNA, 60 bp, Artificial
  Synthetic oligonucleotide
cagtgcacttaagttgactgatatcgagaatgttagagctctctcaattttgtgtgctgt

SEQ ID NO: 114989 - DNA, 60 bp, Artificial
  Synthetic oligonucleotide
ggcttgacttcacccttcgtcattgacatcagcaatatggttgagactgttgtttacgat

SEQ ID NO: 114990 - DNA, 60 bp, Artificial
  Synthetic oligonucleotide
ggatagatatggcttgacttcacccttcgtcattgacatcagcaatatggttgagactgt

SEQ ID NO: 114991 - DNA, 60 bp, Artificial
  Synthetic oligonucleotide
ctcattcttaggtaaacgcgccatccaagattatcgcgattacaatagtgttcaaatgcg

SEQ ID NO: 114992 - DNA, 60 bp, Artificial
  Synthetic oligonucleotide
cgaacagttggagttggaggggtcacccttcttctcgaatggtgaaattgggcgatatga

SEQ ID NO: 114993 - DNA, 60 bp, Artificial
  Synthetic oligonucleotide
cattaaatattaactctagaggcaaacacgttctgggtgacatcagtcgtgagcttagag

SEQ ID NO: 114994 - DNA, 60 bp, Artificial
  Synthetic oligonucleotide
caagatgaagttagaaagatcagaagcgagaatcttgagattaggaagattgggataggt

SEQ ID NO: 114995 - DNA, 60 bp, Artificial
  Synthetic oligonucleotide
gctgatcttgacgcgcttagtgctgctctgatagtcggacaagatgaagttagaaagatc

SEQ ID NO: 114996 - DNA, 60 bp, Artificial
  Synthetic oligonucleotide
aacattcaatgtcgtaaattggcaaaagctctgttggatagatatggcttgacttcaccc

SEQ ID NO: 114997 - DNA, 60 bp, Artificial
  Synthetic oligonucleotide
actggcataaataagaacattcaatgtcgtaaattggcaaaagctctgttggatagatat

SEQ ID NO: 114998 - DNA, 60 bp, Artificial
  Synthetic oligonucleotide
cggctaagtgcgctataatacgtgagaatgttggttttatgaaaatcaaaactggcataa

SEQ ID NO: 114999 - DNA, 60 bp, Artificial
  Synthetic oligonucleotide
gataggtagtccaaatcttgaagtaatcacctctaacaaaggtaggacggctaagtgcgc

SEQ ID NO: 115000 - DNA, 60 bp, Artificial
  Synthetic oligonucleotide
cgcaatttcagcttgctatgacctatttgacacacacatagacgttgtcgcccatattcg

SEQ ID NO: 115001 - DNA, 60 bp, Artificial
  Synthetic oligonucleotide
gtgagcttagagctatgtctagagaacgttggagggataataactcttcagttggcctgc

SEQ ID NO: 115002 - DNA, 60 bp, Artificial
  Synthetic oligonucleotide
gctatgacctatttgacacacacatagacgttgtcgcccatattcgtgctatggttccga

SEQ ID NO: 115003 - DNA, 60 bp, Artificial
  Synthetic oligonucleotide
taactgacacattcgttgatgagatcgatgtgatggctgaaaagaggttgagtgaatacc

SEQ ID NO: 115004 - DNA, 60 bp, Artificial
  Synthetic oligonucleotide
cgtgctatggttccgaatgaagtagccgaaatgttagaccataccagaggcacatatcag

SEQ ID NO: 115005 - DNA, 60 bp, Artificial
  Synthetic oligonucleotide
cttaataaaggttgttacctcgcaaccgttagtgcaaacctctacgtaagcatgtggtag

SEQ ID NO: 115006 - DNA, 59 bp, Artificial
  Synthetic oligonucleotide
gaatataaagttaaatacactagtgcggatgatgaagctatttatattaatgatcacat

SEQ ID NO: 115007 - DNA, 60 bp, Artificial
  Synthetic oligonucleotide
tcgtaccattatttctgagactaaaccaaccaacgctagacgtttagcttacactaacgc

SEQ ID NO: 115008 - DNA, 60 bp, Artificial
  Synthetic oligonucleotide
ctaactcgattttagacgaagcgttcaactcacgtcaagtcaacgattctggcgatcgct

SEQ ID NO: 115009 - DNA, 60 bp, Artificial
  Synthetic oligonucleotide
aagttcagacactaaaacaattaacggtggttcactaaacgatgaaaaagctaactcgat

SEQ ID NO: 115010 - DNA, 60 bp, Artificial
  Synthetic oligonucleotide
agtgaataccatcaactagctcttgatataagtgaagctattaacatcactcgtaccatt

SEQ ID NO: 115011 - DNA, 60 bp, Artificial
  Synthetic oligonucleotide
tgctgtgttcaagaatctgcaaatcgaaataaactttacaaagaggtctggaaatgctgg

SEQ ID NO: 115012 - DNA, 60 bp, Artificial
  Synthetic oligonucleotide
agttaccagctactgcatcttcaactacttcagttgtagccgctatagctcccgatgtca

SEQ ID NO: 115013 - DNA, 60 bp, Artificial
  Synthetic oligonucleotide
gttagtgaccgatggacctgacaggacgtcaataagtacactgtatgatggaacgatcaa

SEQ ID NO: 115014 - DNA, 60 bp, Artificial
  Synthetic oligonucleotide
tgcttatgagtgggagcaggacataatatctttaccagagtacatcagacgcattaagct

SEQ ID NO: 115015 - DNA, 60 bp, Artificial
  Synthetic oligonucleotide
acgcgtaggttcagaggaatgccagaactacaaccacgtgagttaactgaaataagatct

SEQ ID NO: 115016 - DNA, 66 bp, Artificial
  Synthetic oligonucleotide
cgaatgctctgatttctttattaaacgtttataccttgatatcaaacataagttaccagctactgc

SEQ ID NO: 115017 - DNA, 60 bp, Artificial
  Synthetic oligonucleotide
atcgttatgatgctgatcttgacgcgcttagtgctgctctgatagtcggacaagatgaag

SEQ ID NO: 115018 - DNA, 60 bp, Artificial
  Synthetic oligonucleotide
gggagcaggacataatatctttaccagagtacatcagacgcattaagctgagtataccag

SEQ ID NO: 115019 - DNA, 60 bp, Artificial
  Synthetic oligonucleotide
gagtggtgcaacagccgaagcgttttcgaagagcacaactcaaccgctagctgctgctaa

SEQ ID NO: 115020 - DNA, 60 bp, Artificial
  Synthetic oligonucleotide
cagccgaagcgttttcgaagagcacaactcaaccgctagctgctgctaatactagggagc

SEQ ID NO: 115021 - DNA, 60 bp, Artificial
  Synthetic oligonucleotide
ctgctgctaatactagggagcttcttgagcaatcgcgattggctgcatctgaaggattga

SEQ ID NO: 115022 - DNA, 60 bp, Artificial
  Synthetic oligonucleotide
cccgatgtcagagtatcatcaacgaccactagtttagctaattcattcctcagtgcactt

SEQ ID NO: 115023 - DNA, 60 bp, Artificial
  Synthetic oligonucleotide
gacgaagcgttcaactcacgtcaagtcaacgattctggcgatcgcttgataacgtcaagc

SEQ ID NO: 115024 - DNA, 60 bp, Artificial
  Synthetic oligonucleotide
ggcgatcgcttgataacgtcaagctctaagatagttaacaatgttctaccaggtcctgaa

SEQ ID NO: 115025 - DNA, 60 bp, Artificial
  Synthetic oligonucleotide
aggtcctgaaacattcgcagaaattcgtgatagtaagaaagatggcactgttgtgagagg

SEQ ID NO: 115026 - DNA, 60 bp, Artificial
  Synthetic oligonucleotide
cgcagaaattcgtgatagtaagaaagatggcactgttgtgagaggtgagaatcaggctat

SEQ ID NO: 115027 - DNA, 60 bp, Artificial
  Synthetic oligonucleotide
cgctgtcgtgcgttatgtcgatcacatgtggggaaaagagtctgctgatggtaaacaagg

SEQ ID NO: 115028 - DNA, 60 bp, Artificial
  Synthetic oligonucleotide
atggtaaacaaggtataagtagtacattgggtttattgttaggagctgcagctggagctg

SEQ ID NO: 115029 - DNA, 60 bp, Artificial
  Synthetic oligonucleotide
tactgatttactcaaaatgggtgcgcttgaggcggctaaagttataagcgtcggagttat

SEQ ID NO: 115030 - DNA, 60 bp, Artificial
  Synthetic oligonucleotide
aatgggtgcgcttgaggcggctaaagttataagcgtcggagttatagtatacggagtgcc

SEQ ID NO: 115031 - DNA, 60 bp, Artificial
  Synthetic oligonucleotide
tactcgtaatgacgccactccagccgatgagccattataccgtataatggagtcagttac

SEQ ID NO: 115032 - DNA, 60 bp, Artificial
  Synthetic oligonucleotide
actgaagagatattaatatgtccgaaaagacatagaattgaaactgatgcaagatttaat

SEQ ID NO: 115033 - DNA, 50 bp, Artificial
  Synthetic oligonucleotide
gtcagtgagaagcagtttgttaatctcgatacgaatggagtgacattagg

SEQ ID NO: 115034 - DNA, 52 bp, Artificial
  Synthetic oligonucleotide
atctttggacttggctataagactatgattgtaacaccaccgaatctacagc

SEQ ID NO: 115035 - DNA, 60 bp, Artificial
  Synthetic oligonucleotide
gcatcttcaactacttcagttgtagccgctatagctcccgatgtcagagtatcatcaacg

SEQ ID NO: 115036 - DNA, 60 bp, Artificial
  Synthetic oligonucleotide
ggcctagccggatctctacgcctcctgaaccccatcgctgtcaacaagaacccccaccaa

SEQ ID NO: 115037 - DNA, 54 bp, Artificial
  Synthetic oligonucleotide
ggcctagccggatctctacgcctcctgaaccccatcgctgtcaacaagaacccc

SEQ ID NO: 115038 - DNA, 60 bp, Artificial
  Synthetic oligonucleotide
gcgtgtgacccgcctactcgagaactacccaacgctcagcctcacgctgcgtcaggacac

SEQ ID NO: 115039 - DNA, 60 bp, Artificial
  Synthetic oligonucleotide
actcgagaactacccaacgctcagcctcacgctgcgtcaggacacctcatctagaggagc

SEQ ID NO: 115040 - DNA, 60 bp, Artificial
  Synthetic oligonucleotide
gtcaggacacctcatctagaggagccattgagtctaactacagcgcctcaggcctagccg

SEQ ID NO: 115041 - DNA, 60 bp, Artificial
  Synthetic oligonucleotide
ctagaggagccattgagtctaactacagcgcctcaggcctagccggatctctacgcctcc

SEQ ID NO: 115042 - DNA, 52 bp, Artificial
  Synthetic oligonucleotide
gttttagagaacatccggagcaaccatggcagccccatcagctaaactcgtc

SEQ ID NO: 115043 - DNA, 60 bp, Artificial
  Synthetic oligonucleotide
gccgcgtccctatccccagccgatgtgaattcgatgtcagcgcacaactcagcggttgag

SEQ ID NO: 115044 - DNA, 57 bp, Artificial
  Synthetic oligonucleotide
gtcagcgcacaactcagcggttgagaccctcatgttcaagatgaagtggttgtcccc

SEQ ID NO: 115045 - DNA, 60 bp, Artificial
  Synthetic oligonucleotide
gcaaggtgtgctcggctatctcccaacatcggccgccgacgctattaaggatcctgagtc

SEQ ID NO: 115046 - DNA, 60 bp, Artificial
  Synthetic oligonucleotide
gcgccaggatggacccacttgcatctcgccaaatgacctggagtctaagtacgacatctc

SEQ ID NO: 115047 - DNA, 60 bp, Artificial
  Synthetic oligonucleotide
cccagatctctcgacctccagcctccatctgccacatcaatggtcatcgcctacacctct

SEQ ID NO: 115048 - DNA, 60 bp, Artificial
  Synthetic oligonucleotide
cgacctccagcctccatctgccacatcaatggtcatcgcctacacctctaaggtcttggg

SEQ ID NO: 115049 - DNA, 60 bp, Artificial
  Synthetic oligonucleotide
atctcctggctcgccgctatcgtcctcttggttgcgtaccaactggaactggacctgacg

SEQ ID NO: 115050 - DNA, 60 bp, Artificial
  Synthetic oligonucleotide
gaactggacctgacggccgcgtccctatccccagccgatgtgaattcgatgtcagcgcac

SEQ ID NO: 115051 - DNA, 60 bp, Artificial
  Synthetic oligonucleotide
cccacttgcatctcgccaaatgacctggagtctaagtacgacatctcctggctcgccgct

SEQ ID NO: 115052 - DNA, 60 bp, Artificial
  Synthetic oligonucleotide
acgacatctcctggctcgccgctatcgtcctcttggttgcgtaccaactggaactggacc

SEQ ID NO: 115053 - DNA, 60 bp, Artificial
  Synthetic oligonucleotide
ttgcttcccgaatcagtctcgccgcctcgggctttaatcccagatctctcgacctccagc

SEQ ID NO: 115054 - DNA, 60 bp, Artificial
  Synthetic oligonucleotide
gccccttgactcttgcttcccgaatcagtctcgccgcctcgggctttaatcccagatctc

SEQ ID NO: 115055 - DNA, 60 bp, Artificial
  Synthetic oligonucleotide
ttgatcaatgctggtctcgacgccgcccttcagcacaactcgcagtgcacagtcgatgcc

SEQ ID NO: 115056 - DNA, 60 bp, Artificial
  Synthetic oligonucleotide
ctcctctgcgtaccttgatcaatgctggtctcgacgccgcccttcagcacaactcgcagt

SEQ ID NO: 115057 - DNA, 60 bp, Artificial
  Synthetic oligonucleotide
acctactctcgacccgaccccgaagctgccagacctcctcctctgcgtaccttgatcaat

SEQ ID NO: 115058 - DNA, 60 bp, Artificial
  Synthetic oligonucleotide
cccccaccaaccaacctactctcgacccgaccccgaagctgccagacctcctcctctgcg

SEQ ID NO: 115059 - DNA, 60 bp, Artificial
  Synthetic oligonucleotide
caaggacgtgcttcccgacgactggactcgagtctgccccttgactcttgcttcccgaat

SEQ ID NO: 115060 - DNA, 60 bp, Artificial
  Synthetic oligonucleotide
gtgtcccatgtggcacaaggacgtgcttcccgacgactggactcgagtctgccccttgac

SEQ ID NO: 115061 - DNA, 60 bp, Artificial
  Synthetic oligonucleotide
agtcgatgccgccctccatgcgttcatcaagaaggcgtgtcccatgtggcacaaggacgt

SEQ ID NO: 115062 - DNA, 60 bp, Artificial
  Synthetic oligonucleotide
aactcgcagtgcacagtcgatgccgccctccatgcgttcatcaagaaggcgtgtcccatg

SEQ ID NO: 115063 - DNA, 60 bp, Artificial
  Synthetic oligonucleotide
tgtcccccttctcctcccgtatcatgcatctctgtgccgccaatgccgccagcccattta

SEQ ID NO: 115064 - DNA, 60 bp, Artificial
  Synthetic oligonucleotide
gtcagcgcacaactcagcggttgagaccctcatgttcaagatgaagtggttgtccccctt

SEQ ID NO: 115065 - DNA, 60 bp, Artificial
  Synthetic oligonucleotide
agcccatttaggagcttcagtgaaatgttcctcatgtggcaaaaacccacgaagtacgtt

SEQ ID NO: 115066 - DNA, 60 bp, Artificial
  Synthetic oligonucleotide
cctcccgtatcatgcatctctgtgccgccaatgccgccagcccatttaggagcttcagtg

SEQ ID NO: 115067 - DNA, 60 bp, Artificial
  Synthetic oligonucleotide
cttcccactatcactatgaagctatccggccggttcctcgagattatcgctgatggcgct

SEQ ID NO: 115068 - DNA, 60 bp, Artificial
  Synthetic oligonucleotide
gaagtacgttcttcccactatcactatgaagctatccggccggttcctcgagattatcgc

SEQ ID NO: 115069 - DNA, 60 bp, Artificial
  Synthetic oligonucleotide
tcgcgggtgggaggtagctaggcgcggccataggcctgctgcctcactctctatattcat

SEQ ID NO: 115070 - DNA, 60 bp, Artificial
  Synthetic oligonucleotide
cagctcgcgggtgggaggtagctaggcgcggccataggcctgctgcctcactctctatat

SEQ ID NO: 115071 - DNA, 60 bp, Artificial
  Synthetic oligonucleotide
cccagtcgaaatggacgagctaactttatccattggaggttcaccaggaaaacttgcagg

SEQ ID NO: 115072 - DNA, 60 bp, Artificial
  Synthetic oligonucleotide
gacgttatgtcagttttgttggaacgagatgccaggaaaggcattagtaagctagctgag

SEQ ID NO: 115073 - DNA, 60 bp, Artificial
  Synthetic oligonucleotide
agctgcgtaacaaacgtaccaccatcgccttactcagtcgagaagttcaagccagacttg

SEQ ID NO: 115074 - DNA, 60 bp, Artificial
  Synthetic oligonucleotide
ggctttcgccaacagatcttctcttctcctcgaacactgttgaccataagctgcgtaaca

SEQ ID NO: 115075 - DNA, 60 bp, Artificial
  Synthetic oligonucleotide
gataaatctcccagtcgaaatggacgagctaactttatccattggaggttcaccaggaaa

SEQ ID NO: 115076 - DNA, 60 bp, Artificial
  Synthetic oligonucleotide
gcgatggtttgccaaaatgggcagaatgggttgacaatgtgctgagtgataggatagcta

SEQ ID NO: 115077 - DNA, 60 bp, Artificial
  Synthetic oligonucleotide
tcgaatagtacgcttccaacatcttgggcccaatttgacttaatgcaaaatgataaggaa

SEQ ID NO: 115078 - DNA, 60 bp, Artificial
  Synthetic oligonucleotide
cggcagctgattttggattacaattggcgaaatgggttcaagcgtcaacacaattgcact

SEQ ID NO: 115079 - DNA, 60 bp, Artificial
  Synthetic oligonucleotide
gtacggcagctgattttggattacaattggcgaaatgggttcaagcgtcaacacaattgc

SEQ ID NO: 115080 - DNA, 60 bp, Artificial
  Synthetic oligonucleotide
gataaggaaatagcctcctacgtcgacattaggttcaacgacatttgtgtaaaacatggt

SEQ ID NO: 115081 - DNA, 60 bp, Artificial
  Synthetic oligonucleotide
taaaacatggtttttgtgaactcgacgatttacggactaagaacgctggagtgctgcaag

SEQ ID NO: 115082 - DNA, 60 bp, Artificial
  Synthetic oligonucleotide
gtgaactcgacgatttacggactaagaacgctggagtgctgcaaggtgagttcgctagat

SEQ ID NO: 115083 - DNA, 60 bp, Artificial
  Synthetic oligonucleotide
tagctgaatatcccccaacaacatgtattttgcaattgcttccaaattatgacgttatgt

SEQ ID NO: 115084 - DNA, 60 bp, Artificial
  Synthetic oligonucleotide
tgctccaagaacattgacatgtgcacagatgtttgatattccccatgtccacgattttac

SEQ ID NO: 115085 - DNA, 60 bp, Artificial
  Synthetic oligonucleotide
cagtgctggaaaagggcacttatacttatgcggtgatggtcatgctccaagaacattgac

SEQ ID NO: 115086 - DNA, 60 bp, Artificial
  Synthetic oligonucleotide
gtgattaaacaagtctcgaactatttcacatgcgttaaagttggaacgtctggtttcagt

SEQ ID NO: 115087 - DNA, 60 bp, Artificial
  Synthetic oligonucleotide
gttgtcccaagctcatttggaacatctaattcatccagtgattaaacaagtctcgaacta

SEQ ID NO: 115088 - DNA, 60 bp, Artificial
  Synthetic oligonucleotide
tggtttcagtctgaattacaatcatccatacattagggccatgttcctcgagccaatcac

SEQ ID NO: 115089 - DNA, 60 bp, Artificial
  Synthetic oligonucleotide
caagtctcgaactatttcacatgcgttaaagttggaacgtctggtttcagtctgaattac

SEQ ID NO: 115090 - DNA, 60 bp, Artificial
  Synthetic oligonucleotide
agccaatcactgcctgtgatgttgttgaattaccacttcaagcacttcatgctagattca

SEQ ID NO: 115091 - DNA, 60 bp, Artificial
  Synthetic oligonucleotide
gtctgaattacaatcatccatacattagggccatgttcctcgagccaatcactgcctgtg

SEQ ID NO: 115092 - DNA, 60 bp, Artificial
  Synthetic oligonucleotide
gctagattcagtgctggaaaagggcacttatacttatgcggtgatggtcatgctccaaga

SEQ ID NO: 115093 - DNA, 60 bp, Artificial
  Synthetic oligonucleotide
cactgcctgtgatgttgttgaattaccacttcaagcacttcatgctagattcagtgctgg

SEQ ID NO: 115094 - DNA, 60 bp, Artificial
  Synthetic oligonucleotide
ccaacatcttgggcccaatttgacttaatgcaaaatgataaggaaatagcctcctacgtc

SEQ ID NO: 115095 - DNA, 60 bp, Artificial
  Synthetic oligonucleotide
gtaaaacaaagaaggtatctcagactgacccaattgaacataagtatcagagcagaccag

SEQ ID NO: 115096 - DNA, 60 bp, Artificial
  Synthetic oligonucleotide
ggtatctcagactgacccaattgaacataagtatcagagcagaccaggtatgatcgaggg

SEQ ID NO: 115097 - DNA, 60 bp, Artificial
  Synthetic oligonucleotide
agcagaccaggtatgatcgagggtggagtgacgattacgccgagacaagctgtgacgcta

SEQ ID NO: 115098 - DNA, 60 bp, Artificial
  Synthetic oligonucleotide
acacaattgcactactacgtacacccggctgatatgagtgctcttcgagcggcagaccaa

SEQ ID NO: 115099 - DNA, 60 bp, Artificial
  Synthetic oligonucleotide
ctacgtacacccggctgatatgagtgctcttcgagcggcagaccaatccttaatccgtca

SEQ ID NO: 115100 - DNA, 60 bp, Artificial
  Synthetic oligonucleotide
ggcagaccaatccttaatccgtcaacttcctcgagttacagttgaggtgtgtaaaacaaa

SEQ ID NO: 115101 - DNA, 60 bp, Artificial
  Synthetic oligonucleotide
tgtgacgctagaagagatctatccattggccagtcgtccggaaaaaggagttattatgtt

SEQ ID NO: 115102 - DNA, 60 bp, Artificial
  Synthetic oligonucleotide
ttattatgttcatgttgtcccaagctcatttggaacatctaattcatccagtgattaaac

SEQ ID NO: 115103 - DNA, 60 bp, Artificial
  Synthetic oligonucleotide
aacgcctagccagcgggagtaagttctagtttgttcacctgggggagacagagaaggtgc

SEQ ID NO: 115104 - DNA, 60 bp, Artificial
  Synthetic oligonucleotide
gagggatagtcggacatttcactagcgcgagctccatactcaacgcctagccagcgggag

SEQ ID NO: 115105 - DNA, 60 bp, Artificial
  Synthetic oligonucleotide
cctcccgtcgagggatagtcggacatttcactagcgcgagctccatactcaacgcctagc

SEQ ID NO: 115106 - DNA, 60 bp, Artificial
  Synthetic oligonucleotide
ttacagatcggtcctagcatgcgagttactgcgggttgcagaggttgggcctcccgtcga

SEQ ID NO: 115107 - DNA, 60 bp, Artificial
  Synthetic oligonucleotide
gatggaggagtactataacggtctaagaataggcacttacagatcggtcctagcatgcga

SEQ ID NO: 115108 - DNA, 60 bp, Artificial
  Synthetic oligonucleotide
gctagctgagatgcagatggaggagtactataacggtctaagaataggcacttacagatc

SEQ ID NO: 115109 - DNA, 60 bp, Artificial
  Synthetic oligonucleotide
ttgttggaacgagatgccaggaaaggcattagtaagctagctgagatgcagatggaggag

SEQ ID NO: 115110 - DNA, 60 bp, Artificial
  Synthetic oligonucleotide
ctcgagatgtaaagttgttgtctcagtaagcgcggagcgctcgaggttattaagcgatgg

SEQ ID NO: 115111 - DNA, 60 bp, Artificial
  Synthetic oligonucleotide
gaggttattaagcgatggtttgccaaaatgggcagaatgggttgacaatgtgctgagtga

SEQ ID NO: 115112 - DNA, 60 bp, Artificial
  Synthetic oligonucleotide
cttcagtgaccgtggtctcattttatgcgcccgagcaacacatagcaatagccagatacg

SEQ ID NO: 115113 - DNA, 60 bp, Artificial
  Synthetic oligonucleotide
caacacatagcaatagccagatacgcatcttggtatgagaaggataccatttgtagattg

SEQ ID NO: 115114 - DNA, 60 bp, Artificial
  Synthetic oligonucleotide
gacatgtgcacagatgtttgatattccccatgtccacgattttactatgccttcagtgac

SEQ ID NO: 115115 - DNA, 60 bp, Artificial
  Synthetic oligonucleotide
acgattttactatgccttcagtgaccgtggtctcattttatgcgcccgagcaacacatag

SEQ ID NO: 115116 - DNA, 60 bp, Artificial
  Synthetic oligonucleotide
gtcatatccaatctttccttccctcaggccaacgttaacgggaagcattttctcgagatg

SEQ ID NO: 115117 - DNA, 60 bp, Artificial
  Synthetic oligonucleotide
agcattttctcgagatgtaaagttgttgtctcagtaagcgcggagcgctcgaggttatta

SEQ ID NO: 115118 - DNA, 60 bp, Artificial
  Synthetic oligonucleotide
gccagatacgcatcttggtatgagaaggataccatttgtagattgttgcagagtactctt

SEQ ID NO: 115119 - DNA, 60 bp, Artificial
  Synthetic oligonucleotide
gtgctatgtcatatccaatctttccttccctcaggccaacgttaacgggaagcattttct

SEQ ID NO: 115120 - DNA, 60 bp, Artificial
  Synthetic oligonucleotide
ccccaacaacatgtattttgcaattgcttccaaattatgacgttatgtcagttttgttgg

SEQ ID NO: 115121 - DNA, 60 bp, Artificial
  Synthetic oligonucleotide
atgaaccagtctttaaaactaagctaattcgtgatcagcaaatcggcagaattggggatc

SEQ ID NO: 115122 - DNA, 60 bp, Artificial
  Synthetic oligonucleotide
cgatggccatacagcaatatctaagagttggatatttagaagagattaggtatgtgcaac

SEQ ID NO: 115123 - DNA, 60 bp, Artificial
  Synthetic oligonucleotide
ggggatcattattacacaacgagctgctataccggagctgaagcgttggttacaactgct

SEQ ID NO: 115124 - DNA, 60 bp, Artificial
  Synthetic oligonucleotide
gcgcactgcttaggctcttctgttttgtctgttatggatatgctccccgcgcggatggaa

SEQ ID NO: 115125 - DNA, 60 bp, Artificial
  Synthetic oligonucleotide
acaatccagatgcagctgacgattggatagatccaaatttatttggggttagaggacagc

SEQ ID NO: 115126 - DNA, 60 bp, Artificial
  Synthetic oligonucleotide
aatttatttggggttagaggacagcatcatcaaattaagcgagaagttgagaggcagatc

SEQ ID NO: 115127 - DNA, 60 bp, Artificial
  Synthetic oligonucleotide
gctgagaaagttcactttgctggattcaccgccccggcatgtgaaagtggggaagtaatc

SEQ ID NO: 115128 - DNA, 60 bp, Artificial
  Synthetic oligonucleotide
attagttgtcagtttttgagtttatcttatttgctcattctattttctctcttagcactc

SEQ ID NO: 115129 - DNA, 60 bp, Artificial
  Synthetic oligonucleotide
ggttagaggacagcatcatcaaattaagcgagaagttgagaggcagatcaacacttgccc

SEQ ID NO: 115130 - DNA, 60 bp, Artificial
  Synthetic oligonucleotide
agagattaggtatgtgcaacaattattcgggaaggttccatctggcgaattcccactgca

SEQ ID NO: 115131 - DNA, 60 bp, Artificial
  Synthetic oligonucleotide
gaggcagatcaacacttgcccttatactggatacaaaggaggaattttccaagtgatgta

SEQ ID NO: 115132 - DNA, 60 bp, Artificial
  Synthetic oligonucleotide
gcactgcttaggctcttctgttttgtctgttatggatatgctccccgcgcggatggaacg

SEQ ID NO: 115133 - DNA, 60 bp, Artificial
  Synthetic oligonucleotide
atcaccttgtgttatgctgagaaagttcactttgctggattcaccgccccggcatgtgaa

SEQ ID NO: 115134 - DNA, 60 bp, Artificial
  Synthetic oligonucleotide
tgtgaacccaacgttcatctccaggtatcgccagatcgcgtactatttctacaatccaga

SEQ ID NO: 115135 - DNA, 60 bp, Artificial
  Synthetic oligonucleotide
tcgcgtactatttctacaatccagatgcagctgacgattggatagatccaaatttatttg

SEQ ID NO: 115136 - DNA, 60 bp, Artificial
  Synthetic oligonucleotide
gcagaattggggatcattattacacaacgagctgctataccggagctgaagcgttggtta

SEQ ID NO: 115137 - DNA, 60 bp, Artificial
  Synthetic oligonucleotide
aggtaatgaaccagtctttaaaactaagctaattcgtgatcagcaaatcggcagaattgg

SEQ ID NO: 115138 - DNA, 53 bp, Artificial
  Synthetic oligonucleotide
ttgaaacattcaaagcagatacagacgtgtagcgtaatagatgttcgcgcttc

SEQ ID NO: 115139 - DNA, 60 bp, Artificial
  Synthetic oligonucleotide
gaatgatggaggaggctattaagcaatctgctttgattaactcggagagggttagattag

SEQ ID NO: 115140 - DNA, 60 bp, Artificial
  Synthetic oligonucleotide
gcggtgcacagctacttgaagactaccgcaaaagtggaatgatggaggaggctattaagc

SEQ ID NO: 115141 - DNA, 60 bp, Artificial
  Synthetic oligonucleotide
gttagattagacgattcgctttcggccattccctatatttatgttcccataaaagaaggt

SEQ ID NO: 115142 - DNA, 60 bp, Artificial
  Synthetic oligonucleotide
ggaggctattaagcaatctgctttgattaactcggagagggttagattagacgattcgct

SEQ ID NO: 115143 - DNA, 60 bp, Artificial
  Synthetic oligonucleotide
agcgacggatgcggaggaaccaataaaagcattccggctgatagaattggcaaaagaggc

SEQ ID NO: 115144 - DNA, 60 bp, Artificial
  Synthetic oligonucleotide
gagagcaatgattgcagcgacggatgcggaggaaccaataaaagcattccggctgataga

SEQ ID NO: 115145 - DNA, 60 bp, Artificial
  Synthetic oligonucleotide
caagataaaacgatgcggtgcacagctacttgaagactaccgcaaaagtggaatgatgga

SEQ ID NO: 115146 - DNA, 60 bp, Artificial
  Synthetic oligonucleotide
ggctgatagaattggcaaaagaggcgatgtatgatcgagagaccgtttggctgcagtgtt

SEQ ID NO: 115147 - DNA, 60 bp, Artificial
  Synthetic oligonucleotide
gagttgatcggttgctcacccttcagaactgtaaagatcgaggagcacgtaggtaatgaa

SEQ ID NO: 115148 - DNA, 60 bp, Artificial
  Synthetic oligonucleotide
aaaagaaggtcaaattgtgaacccaacgttcatctccaggtatcgccagatcgcgtacta

SEQ ID NO: 115149 - DNA, 60 bp, Artificial
  Synthetic oligonucleotide
aatggcttctagagtatatggatagaaaacacatatgccagctctgctatttgaaacatt

SEQ ID NO: 115150 - DNA, 60 bp, Artificial
  Synthetic oligonucleotide
ccaatggtcctggtgcgagaagggctagatcagcaggagaagtgggaatggcttctagag

SEQ ID NO: 115151 - DNA, 60 bp, Artificial
  Synthetic oligonucleotide
tcgctttcggccattccctatatttatgttcccataaaagaaggtcaaattgtgaaccca

SEQ ID NO: 115152 - DNA, 60 bp, Artificial
  Synthetic oligonucleotide
cggttgctcacccttcagaactgtaaagatcgaggagcacgtaggtaatgaaccagtctt

SEQ ID NO: 115153 - DNA, 60 bp, Artificial
  Synthetic oligonucleotide
acgtgatttcccaacgcgcgaccgtaacatcgtggaagcgcgtgtgaaaaggtcgggtga

SEQ ID NO: 115154 - DNA, 60 bp, Artificial
  Synthetic oligonucleotide
attaccaatggtcctggtgcgagaagggctagatcagcaggagaagtgggaatggcttct

SEQ ID NO: 115155 - DNA, 60 bp, Artificial
  Synthetic oligonucleotide
ttaaaaagaaattgcttattcaatgggatgtgtgcgaaacagaattttgagagagcaatg

SEQ ID NO: 115156 - DNA, 60 bp, Artificial
  Synthetic oligonucleotide
gcttattcaatgggatgtgtgcgaaacagaattttgagagagcaatgattgcagcgacgg

SEQ ID NO: 115157 - DNA, 60 bp, Artificial
  Synthetic oligonucleotide
ccaaagtttcgcaccaattacccgattttgccgttggtcagcctcatgtacgaattgtgg

SEQ ID NO: 115158 - DNA, 52 bp, Artificial
  Synthetic oligonucleotide
atttgagcgtagatgaaaggttagtattgtgaaaatccaactgtcactgttg

SEQ ID NO: 115159 - DNA, 60 bp, Artificial
  Synthetic oligonucleotide
ctgtgtggggattctcgtaacgggtgaagccacgggtggaacctgcaggcctggagttat

SEQ ID NO: 115160 - DNA, 54 bp, Artificial
  Synthetic oligonucleotide
tgtgtcattgatgtaattgatgagtacatggtatgtacgtatgaggataggagt

SEQ ID NO: 115161 - DNA, 60 bp, Artificial
  Synthetic oligonucleotide
ccatccatttgatgactttatggcgcattgcatcaaccgctggggtatgtccataccggc

SEQ ID NO: 115162 - DNA, 60 bp, Artificial
  Synthetic oligonucleotide
aggagattgaactgaatatattgaagccaggatcatcatatgaacgaggtgttggtggac

SEQ ID NO: 115163 - DNA, 60 bp, Artificial
  Synthetic oligonucleotide
atatattgaagccaggatcatcatatgaacgaggtgttggtggacgcgtgtggcacggac

SEQ ID NO: 115164 - DNA, 60 bp, Artificial
  Synthetic oligonucleotide
atgcttgacggcaaggttttggttgatggaaaagttgtgactgtgagtggtcatatgtta

SEQ ID NO: 115165 - DNA, 56 bp, Artificial
  Synthetic oligonucleotide
tgggatttaaggttaagggttcaagaatcaatgtttcaaaaactcagatcttgcgc

SEQ ID NO: 115166 - DNA, 60 bp, Artificial
  Synthetic oligonucleotide
atccctacagttgatgcaagcttcagcgagatgtcgcgcggtccagcgaacgttatactt

SEQ ID NO: 115167 - DNA, 61 bp, Artificial
  Synthetic oligonucleotide
gagtggtgttttaaatagaaattctgagttgtataactatatccctacagttgatgcaagc

SEQ ID NO: 115168 - DNA, 60 bp, Artificial
  Synthetic oligonucleotide
tcgtaacgggtgaagccacgggtggaacctgcaggcctggagttatggtgtaaggcgtct

SEQ ID NO: 115169 - DNA, 60 bp, Artificial
  Synthetic oligonucleotide
ctggagttatggtgtaaggcgtctggttgtgtctatggagggaaaccataggggcgccgg

SEQ ID NO: 115170 - DNA, 60 bp, Artificial
  Synthetic oligonucleotide
cgttatacttactgacggtaaactggtacccgatggcacctgttttggaccaatattatc

SEQ ID NO: 115171 - DNA, 60 bp, Artificial
  Synthetic oligonucleotide
aagatacgttaaaagtaaattgttagaacttggttcaaagtatgatgtttatttgagcgt

SEQ ID NO: 115172 - DNA, 60 bp, Artificial
  Synthetic oligonucleotide
aacgccatcataactgatcaagagcagttaattgatttcactcaatctgagagggcatta

SEQ ID NO: 115173 - DNA, 60 bp, Artificial
  Synthetic oligonucleotide
ggggcgccgggttcgttttgcagccatagccaaactgcacgagtggagccagggacctat

SEQ ID NO: 115174 - DNA, 60 bp, Artificial
  Synthetic oligonucleotide
aggtaaatgtttgatgctgtataacagcgagaaggatatcttcgaagggttgggatttaa

SEQ ID NO: 115175 - DNA, 60 bp, Artificial
  Synthetic oligonucleotide
ggaaccgtagactgagcagtttaagtggcgttggctttacagtgacgaaaatgcttgacg

SEQ ID NO: 115176 - DNA, 60 bp, Artificial
  Synthetic oligonucleotide
gtagactgagcagtttaagtggcgttggctttacagtgacgaaaatgcttgacggcaagg

SEQ ID NO: 115177 - DNA, 60 bp, Artificial
  Synthetic oligonucleotide
gaaaccattatcggtgtcgaaccgaatggattgaagacgatttcaactgcgaaagatgtt

SEQ ID NO: 115178 - DNA, 60 bp, Artificial
  Synthetic oligonucleotide
gctgtataacagcgagaaggatatcttcgaagggttgggatttaaggttaagggttcaag

SEQ ID NO: 115179 - DNA, 60 bp, Artificial
  Synthetic oligonucleotide
caataactttctgtatgctgcaccttacagtgatttcgctacttcatctgtcaagcggca

SEQ ID NO: 115180 - DNA, 60 bp, Artificial
  Synthetic oligonucleotide
acttcatctgtcaagcggcattttaaaggtaggaattatagtgattggtgtctcaacatt

SEQ ID NO: 115181 - DNA, 60 bp, Artificial
  Synthetic oligonucleotide
ctgtcaagcggcattttaaaggtaggaattatagtgattggtgtctcaacattttggatg

SEQ ID NO: 115182 - DNA, 60 bp, Artificial
  Synthetic oligonucleotide
tctcaacattttggatgaagttaacctgaaagatggtgtatacttagtaccgttgtacgc

SEQ ID NO: 115183 - DNA, 60 bp, Artificial
  Synthetic oligonucleotide
tgaagttaacctgaaagatggtgtatacttagtaccgttgtacgccatagtaggtggtgg

SEQ ID NO: 115184 - DNA, 60 bp, Artificial
  Synthetic oligonucleotide
cgttgtacgccatagtaggtggtggtcagatcacttcgcatgactttgttaacgccatca

SEQ ID NO: 115185 - DNA, 60 bp, Artificial
  Synthetic oligonucleotide
gtagtctccatccatttgatgactttatggcgcattgcatcaaccgctggggtatgtcca

SEQ ID NO: 115186 - DNA, 60 bp, Artificial
  Synthetic oligonucleotide
gatcaagagcagttaattgatttcactcaatctgagagggcattatctactcaagtggtg

SEQ ID NO: 115187 - DNA, 60 bp, Artificial
  Synthetic oligonucleotide
gtattaaatttttgtaagtcgttatggaattatttagtgacagtggaagcatagttgaaa

SEQ ID NO: 115188 - DNA, 60 bp, Artificial
  Synthetic oligonucleotide
cgtgacagggtttactacatgcttggtgatgcacatcatgcaaacttatcaggtaaatgt

SEQ ID NO: 115189 - DNA, 60 bp, Artificial
  Synthetic oligonucleotide
cgaaagggttgattatggttcacgattattttatactaattggtgaaagtccgggtccgc

SEQ ID NO: 115190 - DNA, 60 bp, Artificial
  Synthetic oligonucleotide
cggttgaagatccaagacttaagaatgaattcaggtcgaaagggttgattatggttcacg

SEQ ID NO: 115191 - DNA, 60 bp, Artificial
  Synthetic oligonucleotide
ctgacggtaaactggtacccgatggcacctgttttggaccaatattatcaaaatcggttg

SEQ ID NO: 115192 - DNA, 60 bp, Artificial
  Synthetic oligonucleotide
aaggcgtctggttgtgtctatggagggaaaccataggggcgccgggttcgttttgcagcc

SEQ ID NO: 115193 - DNA, 60 bp, Artificial
  Synthetic oligonucleotide
gcaagcttcagcgagatgtcgcgcggtccagcgaacgttatacttactgacggtaaactg

SEQ ID NO: 115194 - DNA, 60 bp, Artificial
  Synthetic oligonucleotide
cgccgggttcgttttgcagccatagccaaactgcacgagtggagccagggacctatgcaa

SEQ ID NO: 115195 - DNA, 60 bp, Artificial
  Synthetic oligonucleotide
gtgtcgaaccgaatggattgaagacgatttcaactgcgaaagatgttaagaagttgtacg

SEQ ID NO: 115196 - DNA, 60 bp, Artificial
  Synthetic oligonucleotide
tctgggatcctagacgtacagatcataagttcaataatgttgtaagttacttcaagaagg

SEQ ID NO: 115197 - DNA, 60 bp, Artificial
  Synthetic oligonucleotide
gcctaagaatctgaatacacctgaaggcgctattgaatgggaacgaatggtacatgatga

SEQ ID NO: 115198 - DNA, 60 bp, Artificial
  Synthetic oligonucleotide
caatattatcaaaatcggttgaagatccaagacttaagaatgaattcaggtcgaaagggt

SEQ ID NO: 115199 - DNA, 60 bp, Artificial
  Synthetic oligonucleotide
atttgtgctcaagaatataataggtggattatacaatatgtatttgaaagacatgcatct

SEQ ID NO: 115200 - DNA, 60 bp, Artificial
  Synthetic oligonucleotide
gagatctatgacgtgacgtacgatgatctggttaggatgtcgagtgaagtatttgtgctc

SEQ ID NO: 115201 - DNA, 60 bp, Artificial
  Synthetic oligonucleotide
gcgtaaattgttgagaccagtgcgtattttgccactcccgtatttacgaaggtcaactgc

SEQ ID NO: 115202 - DNA, 60 bp, Artificial
  Synthetic oligonucleotide
gcgaaacttcgtccagcattcatgcaagtaggcagcatgcgtaaattgttgagaccagtg

SEQ ID NO: 115203 - DNA, 60 bp, Artificial
  Synthetic oligonucleotide
agggtaactgtttgtgcgaaacttcgtccagcattcatgcaagtaggcagcatgcgtaaa

SEQ ID NO: 115204 - DNA, 60 bp, Artificial
  Synthetic oligonucleotide
acttgataatagatatggttaacgcacttgataagagggtaactgtttgtgcgaaacttc

SEQ ID NO: 115205 - DNA, 60 bp, Artificial
  Synthetic oligonucleotide
tacatgatgataataacttgataatagatatggttaacgcacttgataagagggtaactg

SEQ ID NO: 115206 - DNA, 60 bp, Artificial
  Synthetic oligonucleotide
attttaatttcaataactttctgtatgctgcaccttacagtgatttcgctacttcatctg

SEQ ID NO: 115207 - DNA, 60 bp, Artificial
  Synthetic oligonucleotide
acatgcatctaaatttaggtgtagtgaataagtccgtcagtttatccgatggttcttcag

SEQ ID NO: 115208 - DNA, 60 bp, Artificial
  Synthetic oligonucleotide
tccaagcgaggccgtcccatttctggaaagcggttctgaatgatagcccggaggcggtga

SEQ ID NO: 115209 - DNA, 60 bp, Artificial
  Synthetic oligonucleotide
ttgggtactgctcccatcactacaaccatcgttaaagctcgtattagaagaggaggcatg

SEQ ID NO: 115210 - DNA, 60 bp, Artificial
  Synthetic oligonucleotide
gaggatttgatgcttactgatcaagtttatatgcatcgagatatgttgccagaaccgcgg

SEQ ID NO: 115211 - DNA, 60 bp, Artificial
  Synthetic oligonucleotide
gcgaatgcgacaagttcatgactgctttcaccgcctccgggctatcattcagaaccgctt

SEQ ID NO: 115212 - DNA, 60 bp, Artificial
  Synthetic oligonucleotide
cgaaaacacggagtgtaaatcttcgtttatgatttggtttatcctagcaaacctcaccat

SEQ ID NO: 115213 - DNA, 60 bp, Artificial
  Synthetic oligonucleotide
caactcacatctaacacaactgggtcggcgttctgatgcgccccagcaattaggtcgggt

SEQ ID NO: 115214 - DNA, 60 bp, Artificial
  Synthetic oligonucleotide
taccgcggtgatccctggtcggaatatcatgtaatataaaggatccttttccgcgtatga

SEQ ID NO: 115215 - DNA, 60 bp, Artificial
  Synthetic oligonucleotide
atgactcagggccactgctttccgtgttcgcgttacaagagataatgcaaaaggtgaggc

SEQ ID NO: 115216 - DNA, 60 bp, Artificial
  Synthetic oligonucleotide
cgcataggaatgagatgcttgaaatcgccccactgatcgagtctgtttatgcgtcggaac

SEQ ID NO: 115217 - DNA, 64 bp, Artificial
  Synthetic oligonucleotide
ccttaaacgattatttactttatatgtataacaccagagttcaagtcaattatggtccaacggg

SEQ ID NO: 115218 - DNA, 60 bp, Artificial
  Synthetic oligonucleotide
acgtagccacacgagacgtcgacgtattcataggcgcttgttcggaaccaatctatcgta

SEQ ID NO: 115219 - DNA, 60 bp, Artificial
  Synthetic oligonucleotide
gatgtgagttggatatcattgtggtttgctttcaacagatcgtttgaaccaacgcatagg

SEQ ID NO: 115220 - DNA, 60 bp, Artificial
  Synthetic oligonucleotide
gtggtatcgattcgcgtgagttaattaatccgacaacatatggcattgggatgacttatc

SEQ ID NO: 115221 - DNA, 60 bp, Artificial
  Synthetic oligonucleotide
cgatccatccaatgcgttctgaatcattgcgcgatgctcggcagtcaacacaggtagtac

SEQ ID NO: 115222 - DNA, 60 bp, Artificial
  Synthetic oligonucleotide
tcgtttgaaccaacgcataggaatgagatgcttgaaatcgccccactgatcgagtccgtt

SEQ ID NO: 115223 - DNA, 60 bp, Artificial
  Synthetic oligonucleotide
aggtgttaggagttgaattcaagaatgtactacctgtgttgactgccgagcatcgcgcaa

SEQ ID NO: 115224 - DNA, 60 bp, Artificial
  Synthetic oligonucleotide
ttagaagccccgccggaaatagatcgtgtagttcagtacacttatgagattgcacgttta

SEQ ID NO: 115225 - DNA, 60 bp, Artificial
  Synthetic oligonucleotide
acctttctaaccacccaattgagttccttaactcttgtaactgcaccgcttcaatatacc

SEQ ID NO: 115226 - DNA, 60 bp, Artificial
  Synthetic oligonucleotide
atcacatattcgcaggaggttctgactgattttaggaggcaggatacaatttgggtttta

SEQ ID NO: 115227 - DNA, 60 bp, Artificial
  Synthetic oligonucleotide
cttctctgcatcaatgacaagtgtcgcatatcaaccttcatcactgaaagttccgacgca

SEQ ID NO: 115228 - DNA, 60 bp, Artificial
  Synthetic oligonucleotide
cttccacctgctgtaaagagcaaatgacctacaacgccagcgaccattcttactgccgga

SEQ ID NO: 115229 - DNA, 60 bp, Artificial
  Synthetic oligonucleotide
ttgcgacaggaacgggatacaatggatgggctacgatagatgttgagtatagagatccgg

SEQ ID NO: 115230 - DNA, 60 bp, Artificial
  Synthetic oligonucleotide
tgcgccttaaagccgctcgaaactggcccatgttcgcttgtaaacgtgcaatctcataag

SEQ ID NO: 115231 - DNA, 60 bp, Artificial
  Synthetic oligonucleotide
ctggtgagaggatggatccggcagtaagaatggtcgctggcgttgtaggtcatttgctct

SEQ ID NO: 115232 - DNA, 60 bp, Artificial
  Synthetic oligonucleotide
gccagcgaccattcttactgccggatccatcctctcaccaggatcaatttttagatcaag

SEQ ID NO: 115233 - DNA, 60 bp, Artificial
  Synthetic oligonucleotide
ctcacgcgaatcgataccacaataacgtatgtagcgctgcgcatgcacgtaaggggccgg

SEQ ID NO: 115234 - DNA, 60 bp, Artificial
  Synthetic oligonucleotide
gcagtcaagagatcgggttttacgagtggatacctactatgaagagatgtcacaggttgg

SEQ ID NO: 115235 - DNA, 60 bp, Artificial
  Synthetic oligonucleotide
atcgatgttgagtatagagatccggccccttacgtgcatgcgcagcgctacatacgttat

SEQ ID NO: 115236 - DNA, 60 bp, Artificial
  Synthetic oligonucleotide
ctgtaaaatcaacctctcgtgttgccgtcatatagtcagcttgcacttgcctcacctttt

SEQ ID NO: 115237 - DNA, 60 bp, Artificial
  Synthetic oligonucleotide
ctctcgtgttgccgtcatatagtcagcttgcacttgcctcaccttttgcattatctcttg

SEQ ID NO: 115238 - DNA, 60 bp, Artificial
  Synthetic oligonucleotide
ttttcagagcagattttgcgacaggaacgggatacaatggatgggctacgatagatgttg

SEQ ID NO: 115239 - DNA, 60 bp, Artificial
  Synthetic oligonucleotide
gcacgtaaggggccggatctctatactcaacatctatcgtagcccatccattgtatcccg

SEQ ID NO: 115240 - DNA, 60 bp, Artificial
  Synthetic oligonucleotide
ccttacagctaccggttaatccgcaggtagtgtgggatgtgccgcgcagctctatcgcca

SEQ ID NO: 115241 - DNA, 60 bp, Artificial
  Synthetic oligonucleotide
ttcatcttccgttataacatctccaacctgtgacatctcttcatagtaggtatccactcg

SEQ ID NO: 115242 - DNA, 60 bp, Artificial
  Synthetic oligonucleotide
ctaacatcattaagttgctgtgcggttggagttgatcctgttagaatagcaaatggccca

SEQ ID NO: 115243 - DNA, 60 bp, Artificial
  Synthetic oligonucleotide
gcgcgatgtattcccccgtgggtaagcacgttgctatattcatgattaagttggcgatag

SEQ ID NO: 115244 - DNA, 60 bp, Artificial
  Synthetic oligonucleotide
cgattacgctgacccagagaataacgacaactgggccatttgctattctaacaggatcaa

SEQ ID NO: 115245 - DNA, 60 bp, Artificial
  Synthetic oligonucleotide
ctcagccgccaagatatgctccgagcgcgccaatgccatcatctatgcccactgttgcac

SEQ ID NO: 115246 - DNA, 60 bp, Artificial
  Synthetic oligonucleotide
atcagccgccaagatatgctccgagcgcgccaatgccatcatctatgcctactgttgcac

SEQ ID NO: 115247 - DNA, 60 bp, Artificial
  Synthetic oligonucleotide
ctatcacctggaatgttaaatcctggaggagtaccatggattgcgattggagatgaaaca

SEQ ID NO: 115248 - DNA, 60 bp, Artificial
  Synthetic oligonucleotide
cacctggaatgttaaatcctggaggagtaccatggattgcgattggagatgaaacatccg

SEQ ID NO: 115249 - DNA, 60 bp, Artificial
  Synthetic oligonucleotide
ccatgtgagaggttgagttaccgttgtctgtcttcggaagcggcggaactctttaccgca

SEQ ID NO: 115250 - DNA, 60 bp, Artificial
  Synthetic oligonucleotide
gtcaggctccggttaatgtgaataatcctggcgcgggacccggaatgatagaaattgagg

SEQ ID NO: 115251 - DNA, 60 bp, Artificial
  Synthetic oligonucleotide
tggagttcatgacgggttacagtggcagcggtggatacgttattcatgggctttatgctg

SEQ ID NO: 115252 - DNA, 60 bp, Artificial
  Synthetic oligonucleotide
ggcttttaaagcaatattagtagtgtgttttacctctgatggtgtaaacatgaaagtatt

SEQ ID NO: 115253 - DNA, 60 bp, Artificial
  Synthetic oligonucleotide
ggctattaaagcaatatcagtagtgtgttttacctctgatggtgtaaacatgaaagtatt

SEQ ID NO: 115254 - DNA, 60 bp, Artificial
  Synthetic oligonucleotide
ggctattaaagcagtactagtagtgtgttttacctctgatggtgtaaacatgaaagtact

SEQ ID NO: 115255 - DNA, 61 bp, Artificial
  Synthetic oligonucleotide
gcaatatcagtagtgtgttttacctctgatggtgtaaacatgaaagtattagctttaagac

SEQ ID NO: 115256 - DNA, 60 bp, Artificial
  Synthetic oligonucleotide
ttctgctacctacaagctctgaccgcctacttaacctatttgggtgctaaagtaggtcaa

SEQ ID NO: 115257 - DNA, 60 bp, Artificial
  Synthetic oligonucleotide
ggaaatcgccaaaggacgaggaccaagcacatccgatgctagacatactgccacagactc

SEQ ID NO: 115258 - DNA, 60 bp, Artificial
  Synthetic oligonucleotide
ttttgctacctacaagctctgactgcctacttaacctatttgggtgctaaagtaggtcaa

SEQ ID NO: 115259 - DNA, 60 bp, Artificial
  Synthetic oligonucleotide
atcttctgcttaaggaaatcgccaaaggacgaggaccaagcacatccgatgctagacata

SEQ ID NO: 115260 - DNA, 60 bp, Artificial
  Synthetic oligonucleotide
aactaatgctaactctgatcagaacgctgatggcgatcgattggttgaaaatcttctgct

SEQ ID NO: 115261 - DNA, 60 bp, Artificial
  Synthetic oligonucleotide
ggaatcgtccaaaggacgaggaccaagcacatccgatgctagacatactgccacagactc

SEQ ID NO: 115262 - DNA, 60 bp, Artificial
  Synthetic oligonucleotide
atcttctgcttaaggaatcgtccaaaggacgaggaccaagcacatccgatgctagacata

SEQ ID NO: 115263 - DNA, 60 bp, Artificial
  Synthetic oligonucleotide
tccgtcataaccggaaacttcgagtcctctggaccaactaatgctaactctgatcagaac

SEQ ID NO: 115264 - DNA, 60 bp, Artificial
  Synthetic oligonucleotide
aactaatgctcactataatcagaacgctgatggcgatcgattggttgaaaatcttctgct

SEQ ID NO: 115265 - DNA, 59 bp, Artificial
  Synthetic oligonucleotide
atccagtcagaactctgaaccattgatcgtccccgcaaatagttcttcttttgcggcga

SEQ ID NO: 115266 - DNA, 60 bp, Artificial
  Synthetic oligonucleotide
atccagtcagaactctgaaccattgatcgtccccgcaaatagttcttcttttgcggcgac

SEQ ID NO: 115267 - DNA, 60 bp, Artificial
  Synthetic oligonucleotide
ttgcggcggcctctgactttgtacctgaaaaaacaaagtctgaagggaatttgaaaaata

SEQ ID NO: 115268 - DNA, 60 bp, Artificial
  Synthetic oligonucleotide
tccgtcataaccggaaacttcgagtcctctggaccaactaatgctcactataatcagaac

SEQ ID NO: 115269 - DNA, 60 bp, Artificial
  Synthetic oligonucleotide
aactagtcagaactatgaaccattgatcgtccccgcaaatagttcttcttttgcggcggc

SEQ ID NO: 115270 - DNA, 60 bp, Artificial
  Synthetic oligonucleotide
tgaaccattgatcgtccccgcaaatagttcttcttttgcggcggcctctgactttgtacc

SEQ ID NO: 115271 - DNA, 60 bp, Artificial
  Synthetic oligonucleotide
gacgcataatcatcgtggagcagaggttgcggcgttagatgcattgggtgttgagatcga

SEQ ID NO: 115272 - DNA, 60 bp, Artificial
  Synthetic oligonucleotide
gcactaataataccaggaatccgggatttacttaaaactaaagcctacagagtagagaag

SEQ ID NO: 115273 - DNA, 60 bp, Artificial
  Synthetic oligonucleotide
tcgggcagtgagcatgcaaagtaccgattttttcttgagagttgacacttactatgagag

SEQ ID NO: 115274 - DNA, 60 bp, Artificial
  Synthetic oligonucleotide
gatcgggatacaacggatgggggttggtagatgtggagtttagacagcccagtccgtacg

SEQ ID NO: 115275 - DNA, 56 bp, Artificial
  Synthetic oligonucleotide
ggggttggtagatgtggagtttagacagcccagtccgtacgacttggtgcaaaggc

SEQ ID NO: 115276 - DNA, 60 bp, Artificial
  Synthetic oligonucleotide
tcaacaggaattagcaacacacgcgccagagattgatggaactataccagaagtagcact

SEQ ID NO: 115277 - DNA, 60 bp, Artificial
  Synthetic oligonucleotide
gttagagtcgattatggtgcgagcggacagcctttagattttcaaattggaggacgtgcc

SEQ ID NO: 115278 - DNA, 60 bp, Artificial
  Synthetic oligonucleotide
gagtcgattatggtgcgagcggacagcctttagattttcaaattggaggacgtgcccaat

SEQ ID NO: 115279 - DNA, 60 bp, Artificial
  Synthetic oligonucleotide
aggacgtgcccaatatgatgcaaatcgtttcaggggaaatatacaaaccggatcgggata

SEQ ID NO: 115280 - DNA, 60 bp, Artificial
  Synthetic oligonucleotide
attcggatggtttcaggggttattgggcatttaatgttcacctttggtccacgcttcacc

SEQ ID NO: 115281 - DNA, 60 bp, Artificial
  Synthetic oligonucleotide
ctgcggtggatagacaaatagttcaagatatgattaatgggatgattatcgaaaatgctc

SEQ ID NO: 115282 - DNA, 60 bp, Artificial
  Synthetic oligonucleotide
tcgaaaatgctcaaatagcagatcggaatgtcgatgtatatatgtgtgcaatgtcggatc

SEQ ID NO: 115283 - DNA, 60 bp, Artificial
  Synthetic oligonucleotide
tgtaacagaagccttaaagatgggcgttcagctggcggcgccaactgtataggactgacc

SEQ ID NO: 115284 - DNA, 60 bp, Artificial
  Synthetic oligonucleotide
gttgtttcatataagaagaaaatgagattgatggatgtaacagaagccttaaagatgggc

SEQ ID NO: 115285 - DNA, 60 bp, Artificial
  Synthetic oligonucleotide
gcaacacacgcgccagagattgatggaactataccagaagtagcactaataataccagga

SEQ ID NO: 115286 - DNA, 60 bp, Artificial
  Synthetic oligonucleotide
gacaactacgactaatgcgtgccagagtaccagaagtcgttgtaaacgcaagtccgagcc

SEQ ID NO: 115287 - DNA, 60 bp, Artificial
  Synthetic oligonucleotide
tgtaaacgcaagtccgagccaattctggcgagctgcgattaaggtttcaccagaaccgat

SEQ ID NO: 115288 - DNA, 60 bp, Artificial
  Synthetic oligonucleotide
ttgccccgatgattgaatcaatctatgcctcggagttatcgataatacaattagatgtta

SEQ ID NO: 115289 - DNA, 60 bp, Artificial
  Synthetic oligonucleotide
ttagatgttagacaactacgactaatgcgtgccagagtaccagaagtcgttgtaaacgca

SEQ ID NO: 115290 - DNA, 65 bp, Artificial
  Synthetic oligonucleotide
ccgattagagcattacttaacctatcacaaagttttagttttattaacgttcgtgatatcatccg

SEQ ID NO: 115291 - DNA, 60 bp, Artificial
  Synthetic oligonucleotide
aacgttcgtgatatcatccgttggtgtgatagtcgtgcgttgcaaagatcattggcttac

SEQ ID NO: 115292 - DNA, 60 bp, Artificial
  Synthetic oligonucleotide
cgcaagtccgagccaattctggcgagctgcgattaaggtttcaccagaaccgattagagc

SEQ ID NO: 115293 - DNA, 60 bp, Artificial
  Synthetic oligonucleotide
atccgttggtgtgatagtcgtgcgttgcaaagatcattggcttacgagttggaacgtgag

SEQ ID NO: 115294 - DNA, 59 bp, Artificial
  Synthetic oligonucleotide
aaacgatgtgtattttcatcgtagcgtgatacctgaaccaagattggatgatatcaatg

SEQ ID NO: 115295 - DNA, 60 bp, Artificial
  Synthetic oligonucleotide
gcaattgatccagtaattcggatggtttcaggggttattgggcatttaatgttcaccttt

SEQ ID NO: 115296 - DNA, 60 bp, Artificial
  Synthetic oligonucleotide
atgtcggatccagtctatcgagtacataataggttacagggatatatagaaagtgtgcag

SEQ ID NO: 115297 - DNA, 60 bp, Artificial
  Synthetic oligonucleotide
tagcagatcggaatgtcgatgtatatatgtgtgcaatgtcggatccagtctatcgagtac

SEQ ID NO: 115298 - DNA, 55 bp, Artificial
  Synthetic oligonucleotide
aagtgtgcagcaagccgtaatacagagagcgatacagtggttagtgagattagga

SEQ ID NO: 115299 - DNA, 60 bp, Artificial
  Synthetic oligonucleotide
ccagtctatcgagtacataataggttacagggatatatagaaagtgtgcagcaagccgta

SEQ ID NO: 115300 - DNA, 60 bp, Artificial
  Synthetic oligonucleotide
gaccgattttcggagggcggatactatatggatacttactcatgaactaccacctaacgc

SEQ ID NO: 115301 - DNA, 60 bp, Artificial
  Synthetic oligonucleotide
taatgtttccgaatcagataattctcgacttaaaagctgacccaaatcacgcaattgatc

SEQ ID NO: 115302 - DNA, 59 bp, Artificial
  Synthetic oligonucleotide
tacataacgaatttgatcatgaacatagcattgtgcttaccacatggagaatatttagc

SEQ ID NO: 115303 - DNA, 60 bp, Artificial
  Synthetic oligonucleotide
cgcatttaataggcgttttgaaccaattgctaggtctgaattattgaatattgccccgat

SEQ ID NO: 115304 - DNA, 60 bp, Artificial
  Synthetic oligonucleotide
agataattctcgacttaaaagctgacccaaatcacgcaattgatccagtaattcggatgg

SEQ ID NO: 115305 - DNA, 60 bp, Artificial
  Synthetic oligonucleotide
ccttttttcgtgcaatgttgccgtatcacatgattaggtttgcgagattgaatcagatta

SEQ ID NO: 115306 - DNA, 60 bp, Artificial
  Synthetic oligonucleotide
cgtgagataatcgatccacgcactttcggtgtaaatatgaattatccaaattatagggaa

SEQ ID NO: 115307 - DNA, 60 bp, Artificial
  Synthetic oligonucleotide
ggtgcaaaggcatattcgatattgtgatttagattcacgtgagataatcgatccacgcac

SEQ ID NO: 115308 - DNA, 60 bp, Artificial
  Synthetic oligonucleotide
agtccgtacgacttggtgcaaaggcatattcgatattgtgatttagattcacgtgagata

SEQ ID NO: 115309 - DNA, 60 bp, Artificial
  Synthetic oligonucleotide
ggcgttttgaaccaattgctaggtctgaattattgaatattgccccgatgattgaatcaa

SEQ ID NO: 115310 - DNA, 60 bp, Artificial
  Synthetic oligonucleotide
tattagattcagctttaaatgattttttactatatatgtataataatagagttagagtcg

SEQ ID NO: 115311 - DNA, 60 bp, Artificial
  Synthetic oligonucleotide
cacctttggtccacgcttcaccaacattactcaaacaatggctacattattagattcagc

SEQ ID NO: 115312 - DNA, 60 bp, Artificial
  Synthetic oligonucleotide
atgaacctggagctccctatttggatggtgacgtgttatccagagataatggggctctac

SEQ ID NO: 115313 - DNA, 60 bp, Artificial
  Synthetic oligonucleotide
gttaaattgtaggatggatgctcaacgtactaaggatgaaaacaaaaaagatgaacctgg

SEQ ID NO: 115314 - DNA, 60 bp, Artificial
  Synthetic oligonucleotide
cgaattgtatcgaaaattcgtgtgcctgatgcgttatcttgtgttaataaaagggttgtt

SEQ ID NO: 115315 - DNA, 60 bp, Artificial
  Synthetic oligonucleotide
ggaacgtgacggactaagatatgctagcattaagtatggatccactgcaaaagttttcta

SEQ ID NO: 115316 - DNA, 60 bp, Artificial
  Synthetic oligonucleotide
ctgacgcatcttggttacaatcattacctttcgagtataaggaagaggaacgtgacggac

SEQ ID NO: 115317 - DNA, 60 bp, Artificial
  Synthetic oligonucleotide
aagttttctatattatatacaacgttgactattcaaatacacctgattcgttaatttcga

SEQ ID NO: 115318 - DNA, 60 bp, Artificial
  Synthetic oligonucleotide
tgtatacgtatgaggcagcgatgttacaagcaaatatgggacaattcaaagctgctctgc

SEQ ID NO: 115319 - DNA, 60 bp, Artificial
  Synthetic oligonucleotide
ttttagctacaacattgtatacgtatgaggcagcgatgttacaagcaaatatgggacaat

SEQ ID NO: 115320 - DNA, 60 bp, Artificial
  Synthetic oligonucleotide
ttagatttggtggtatgttgagaaatgtaacaatcgaattttttagttcgttacctgacg

SEQ ID NO: 115321 - DNA, 60 bp, Artificial
  Synthetic oligonucleotide
aaagtttattacattggcgcctatccatcttactggttagaattgattacatgggttcct

SEQ ID NO: 115322 - DNA, 60 bp, Artificial
  Synthetic oligonucleotide
gagaaacataatcatgtttttacacgcaggaaactcaataacatttcacacgattgatac

SEQ ID NO: 115323 - DNA, 60 bp, Artificial
  Synthetic oligonucleotide
tctgattcaattgattaccccataggcaatgatttgttattctacgtatttgataattta

SEQ ID NO: 115324 - DNA, 60 bp, Artificial
  Synthetic oligonucleotide
gctataatagtctattccctacatcaattttttcatatagcaggcaagaccgcctattcg

SEQ ID NO: 115325 - DNA, 54 bp, Artificial
  Synthetic oligonucleotide
tctgctgaatcagacattttatactatcttagatattgaaaatgagccaaaaga

SEQ ID NO: 115326 - DNA, 60 bp, Artificial
  Synthetic oligonucleotide
caacgtgaaatatacgcaattacaaatgagaggactaaatcgattctgctgaatcagaca

SEQ ID NO: 115327 - DNA, 60 bp, Artificial
  Synthetic oligonucleotide
tcattagtaaagggacacatacatttaataggacctgaaatggaatcattgagaaacata

SEQ ID NO: 115328 - DNA, 60 bp, Artificial
  Synthetic oligonucleotide
acagagtgtcaagaagagaaattggaaacttagtacgtgatcaagttttttcattagtaa

SEQ ID NO: 115329 - DNA, 60 bp, Artificial
  Synthetic oligonucleotide
gcctgctattgattatgatccacagtcgtataattacagagtgtcaagaagagaaattgg

SEQ ID NO: 115330 - DNA, 60 bp, Artificial
  Synthetic oligonucleotide
gtcccatttatatatgcctgctattgattatgatccacagtcgtataattacagagtgtc

SEQ ID NO: 115331 - DNA, 60 bp, Artificial
  Synthetic oligonucleotide
aaaatacttatgattatctcaaaatcaatagattagtaaacagtacatttcgttctttac

SEQ ID NO: 115332 - DNA, 50 bp, Artificial
  Synthetic oligonucleotide
ggataaatttaaaataggtgatggtcaacctcacacgcgtgaagagtttg

SEQ ID NO: 115333 - DNA, 60 bp, Artificial
  Synthetic oligonucleotide
ttgcaactaggacattcaagagctttaattcctgatttgtataatcatatgatttcactt

SEQ ID NO: 115334 - DNA, 57 bp, Artificial
  Synthetic oligonucleotide
ggataactcaagtccatttcaaaatagaaaaagacagttagagtttgaagattggtc

SEQ ID NO: 115335 - DNA, 60 bp, Artificial
  Synthetic oligonucleotide
ccacatcgtaccgatagaggtgattggaggaatatagaagaattggataactcaagtcca

SEQ ID NO: 115336 - DNA, 60 bp, Artificial
  Synthetic oligonucleotide
acttttccacatcgtaccgatagaggtgattggaggaatatagaagaattggataactca

SEQ ID NO: 115337 - DNA, 60 bp, Artificial
  Synthetic oligonucleotide
ggataaatttaaaataggtgatggtcaacctcacacgcgtgaagagtttgaaaatactta

SEQ ID NO: 115338 - DNA, 57 bp, Artificial
  Synthetic oligonucleotide
cagttgacacattcgattaacttatcagtgttaaagaggaatcattttgaaggatat

SEQ ID NO: 115339 - DNA, 60 bp, Artificial
  Synthetic oligonucleotide
catattggcattagacaaccgtcaattttcaaaagagatagttatatgacatcacgactg

SEQ ID NO: 115340 - DNA, 60 bp, Artificial
  Synthetic oligonucleotide
gatcgttttttttcacatattggcattagacaaccgtcaattttcaaaagagatagttat

SEQ ID NO: 115341 - DNA, 60 bp, Artificial
  Synthetic oligonucleotide
ggcacttaatggctaagttaattataatcaacagtgagaaaggcgagaaagtagaaacac

SEQ ID NO: 115342 - DNA, 60 bp, Artificial
  Synthetic oligonucleotide
ttacaacaacgtgaaatatacgcaattacaaatgagaggactaaatcgattctgctgaat

SEQ ID NO: 115343 - DNA, 60 bp, Artificial
  Synthetic oligonucleotide
cggtggaagtaaatttgatcaattttcaattgtgaactgtaacagtaccgtggttgcctt

SEQ ID NO: 115344 - DNA, 60 bp, Artificial
  Synthetic oligonucleotide
agtaccgtggttgccttatattcactttctaacactgttaacagtttaaaaactattgaa

SEQ ID NO: 115345 - DNA, 57 bp, Artificial
  Synthetic oligonucleotide
cgttctttactgttggactaggtcataagtaacttaatgagttgctgtaatataccc

SEQ ID NO: 115346 - DNA, 60 bp, Artificial
  Synthetic oligonucleotide
ggcgcctatccatcttactggttagaattgattacatgggttccttttaatatagtagcg

SEQ ID NO: 115347 - DNA, 60 bp, Artificial
  Synthetic oligonucleotide
atcatttggtatgataggttatttgatagaaatgacattgaaacaattgaatctaaatca

SEQ ID NO: 115348 - DNA, 60 bp, Artificial
  Synthetic oligonucleotide
atctaaatcatatatttacattgatataagaactgacgtacggaatttagacacgacaaa

SEQ ID NO: 115349 - DNA, 55 bp, Artificial
  Synthetic oligonucleotide
tgatatgatagttgatatggctattaaactagcttctaaacaatgtacagttatg

SEQ ID NO: 115350 - DNA, 64 bp, Artificial
  Synthetic oligonucleotide
ccgaaattaacacaattgggtcgtgaatactataattgcataacaactattgttagtccatctg

SEQ ID NO: 115351 - DNA, 60 bp, Artificial
  Synthetic oligonucleotide
ccgaaattaacacaattgggtcgtgaatactataattgcataacaactattgttagtcca

SEQ ID NO: 115352 - DNA, 51 bp, Artificial
  Synthetic oligonucleotide
tgttagtccatctgtttacaaagagtcagagctgtattcattattattatc

SEQ ID NO: 115353 - DNA, 60 bp, Artificial
  Synthetic oligonucleotide
atgtgtacggtggaagtaaatttgatcaattttcaattgtgaactgtaacagtaccgtgg

SEQ ID NO: 115354 - DNA, 60 bp, Artificial
  Synthetic oligonucleotide
gggtactgctttctctctcacgccgcagaagggatcatgtgttccaacaacaatggcccg

SEQ ID NO: 115355 - DNA, 60 bp, Artificial
  Synthetic oligonucleotide
atgtgttccaacaacaatggcccgaatgttgagagatcgcggagcggatgagtgggccgt

SEQ ID NO: 115356 - DNA, 60 bp, Artificial
  Synthetic oligonucleotide
tctcttgcattggcggcggcgaaggagggtaacccggcagaggccttctatcgtgacatg

SEQ ID NO: 115357 - DNA, 60 bp, Artificial
  Synthetic oligonucleotide
attggcggcggcgaaggagggtaacccggcagaggccttctatcgtgacatgtcctcatg

SEQ ID NO: 115358 - DNA, 60 bp, Artificial
  Synthetic oligonucleotide
gggcgatgcagcttatcacctggaagcggctggcaattaattttggtgtcaaggtttcaa

SEQ ID NO: 115359 - DNA, 60 bp, Artificial
  Synthetic oligonucleotide
tcacctggaagcggctggcaattaattttggtgtcaaggtttcaatgcgtgcactgggag

SEQ ID NO: 115360 - DNA, 56 bp, Artificial
  Synthetic oligonucleotide
aaggtttcaatgcgtgcactgggagtgagaaatggctatcgtgtctctcgggcggc

SEQ ID NO: 115361 - DNA, 60 bp, Artificial
  Synthetic oligonucleotide
gtgaattgttcggtggtgggcacgtgtgtcctgagtgtcattctgtgtttcagagtgctg

SEQ ID NO: 115362 - DNA, 60 bp, Artificial
  Synthetic oligonucleotide
gtggagagcctaagacgctgacccggccgaccgaactgatagaggcgttaactgcactgg

SEQ ID NO: 115363 - DNA, 60 bp, Artificial
  Synthetic oligonucleotide
ttcctgatatgcatgtcactcataatggccagccattgaccactgcatggtacccgcccc

SEQ ID NO: 115364 - DNA, 60 bp, Artificial
  Synthetic oligonucleotide
ggtgatgtttggcttggagcgttggtgattcatgatccccgaagtcatgtctctaagacg

SEQ ID NO: 115365 - DNA, 60 bp, Artificial
  Synthetic oligonucleotide
agctcgtagtcatctgcctagccatcagcagacgcataatatgattgtgcctcagaaaga

SEQ ID NO: 115366 - DNA, 60 bp, Artificial
  Synthetic oligonucleotide
gtatgattaggtacgttggtgagcagggaaatgatgacactcgagcccttgttgttcgtg

SEQ ID NO: 115367 - DNA, 60 bp, Artificial
  Synthetic oligonucleotide
tttgctaagaacatcagtcagcgacagtattgacagtatgattaggtacgttggtgagca

SEQ ID NO: 115368 - DNA, 60 bp, Artificial
  Synthetic oligonucleotide
agaggaaacattaaattcggtgaccgtcaggctcaagtgatctctcatttcaatcaagtc

SEQ ID NO: 115369 - DNA, 60 bp, Artificial
  Synthetic oligonucleotide
atggaactggtaaccttgtgaattcatgctatgtggagacattccagcacagaggaaaca

SEQ ID NO: 115370 - DNA, 51 bp, Artificial
  Synthetic oligonucleotide
cccgaagtcatgtctctaagacgatgaagggtgtcaacagaggagcgaatg

SEQ ID NO: 115371 - DNA, 60 bp, Artificial
  Synthetic oligonucleotide
tgccgtttaccaactccctgaagaatgtactttggaactggtcgtgcgtgatggaactgg

SEQ ID NO: 115372 - DNA, 60 bp, Artificial
  Synthetic oligonucleotide
gcctagccatcagcagacgcataatatgattgtgcctcagaaagatggtgcccagggtgt

SEQ ID NO: 115373 - DNA, 60 bp, Artificial
  Synthetic oligonucleotide
ggccggttcatcatcgctatggacccgagaatgaacttgtctgactttcctgtggacgtg

SEQ ID NO: 115374 - DNA, 60 bp, Artificial
  Synthetic oligonucleotide
ctcagaaagatggtgcccagggtgtggttgtgacgccagattatgcaaaatctggatgca

SEQ ID NO: 115375 - DNA, 59 bp, Artificial
  Synthetic oligonucleotide
ccccgcctcatgcacgctctcggttatgggacaaattttggccggttcatcatcgctat

SEQ ID NO: 115376 - DNA, 60 bp, Artificial
  Synthetic oligonucleotide
catggtacccgccccctgcttccctgagaccgcttcttcctgatggaactgttggtgcaa

SEQ ID NO: 115377 - DNA, 60 bp, Artificial
  Synthetic oligonucleotide
gagtcacgtggtgctgggcctttgatggatgagctcgatttctattttgaaaagaactgg

SEQ ID NO: 115378 - DNA, 60 bp, Artificial
  Synthetic oligonucleotide
ccaactttgagcctccctcagcttctagccgcaatcccgatgatggtgggtcaactccgg

SEQ ID NO: 115379 - DNA, 60 bp, Artificial
  Synthetic oligonucleotide
tcctgtggacgtgatgagacctgcagagggacgtcggccttgtgtatgtcaggagtcacg

SEQ ID NO: 115380 - DNA, 60 bp, Artificial
  Synthetic oligonucleotide
cctattatcaacgggtgatgtttggcttggagcgttggtgattcatgatccccgaagtca

SEQ ID NO: 115381 - DNA, 57 bp, Artificial
  Synthetic oligonucleotide
tgtcattctgtgtttcagagtgctggcgagagaaagatgtgcacgactttggatctg

SEQ ID NO: 115382 - DNA, 60 bp, Artificial
  Synthetic oligonucleotide
actgcactgggcaagggtactgctttctctctcacgccgcagaagggatcatgtgttcca

SEQ ID NO: 115383 - DNA, 60 bp, Artificial
  Synthetic oligonucleotide
aagacgctgacccggccgaccgaactgatagaggcgttaactgcactgggcaagggtact

SEQ ID NO: 115384 - DNA, 60 bp, Artificial
  Synthetic oligonucleotide
gacatgcagccgttccactcatatggaggtccgaatgaatctcatttcgcaccgatgggg

SEQ ID NO: 115385 - DNA, 60 bp, Artificial
  Synthetic oligonucleotide
gagattcgcaaggtgaggcagttcatggtcaagtttccgtttggccgaacttgtcctcat

SEQ ID NO: 115386 - DNA, 60 bp, Artificial
  Synthetic oligonucleotide
ggtgtgaaaatcaattgtcggtgtaatctgacgcaggggttcagtctgtgttcggatgca

SEQ ID NO: 115387 - DNA, 60 bp, Artificial
  Synthetic oligonucleotide
ctgcttgcttaaaggtgtgaaaatcaattgtcggtgtaatctgacgcaggggttcagtct

SEQ ID NO: 115388 - DNA, 60 bp, Artificial
  Synthetic oligonucleotide
aagatgtggcacctgttgattatatcaatgggccagcgaagacaccgttgtgggagccct

SEQ ID NO: 115389 - DNA, 60 bp, Artificial
  Synthetic oligonucleotide
tgctcaactcacttaccaaatctcaacatgttcaccaacaaagcaattcttgccgtttac

SEQ ID NO: 115390 - DNA, 60 bp, Artificial
  Synthetic oligonucleotide
tcctttggaagatcctcgtcacacagattgcaacttgtggaccgaaatgccaaccatgcg

SEQ ID NO: 115391 - DNA, 60 bp, Artificial
  Synthetic oligonucleotide
ggtacgttggtgagcagggaaatgatgacactcgagcccttgttgttcgtgctatgaatg

SEQ ID NO: 115392 - DNA, 60 bp, Artificial
  Synthetic oligonucleotide
agagatttgctcgtaccgagatcgacaatttagatctgctcttttggctcgagcgacccc

SEQ ID NO: 115393 - DNA, 60 bp, Artificial
  Synthetic oligonucleotide
tttggctcgagcgaccccccgcctcatgcacgctctcggttatgggacaaattttggccg

SEQ ID NO: 115394 - DNA, 60 bp, Artificial
  Synthetic oligonucleotide
gggagccctatgttgttcaatgtcctgatctggcgcccactggtcgggttgatgttcctg

SEQ ID NO: 115395 - DNA, 60 bp, Artificial
  Synthetic oligonucleotide
gtcctgaagactgagactgcgtcttgttttctgccgtgcttttgctcaactcacttacca

SEQ ID NO: 115396 - DNA, 54 bp, Artificial
  Synthetic oligonucleotide
aaatacgacgctttacaacactcgtatgctggaggcgattctgcacatcgtgga

SEQ ID NO: 115397 - DNA, 60 bp, Artificial
  Synthetic oligonucleotide
tgtggaccgaaatgccaaccatgcgggatgactttgcacgccaaggtcgtttttggaggt

SEQ ID NO: 115398 - DNA, 60 bp, Artificial
  Synthetic oligonucleotide
ctgtggttttgtcattcctttggaagatcctcgtcacacagattgcaacttgtggaccga

SEQ ID NO: 115399 - DNA, 60 bp, Artificial
  Synthetic oligonucleotide
ttgaatgtggatcatttccgggagtgcattgctcgacacactcacgtgtacgcagacggg

SEQ ID NO: 115400 - DNA, 54 bp, Artificial
  Synthetic oligonucleotide
acacactcacgtgtacgcagacggggccaggttgatgggaacatttgtgttcga

SEQ ID NO: 115401 - DNA, 60 bp, Artificial
  Synthetic oligonucleotide
gttgttcgtgctatgaatgacttctttccagccaaggtcggggaggctgtgtttcaggct

SEQ ID NO: 115402 - DNA, 60 bp, Artificial
  Synthetic oligonucleotide
gaatgacttctttccagccaaggtcggggaggctgtgtttcaggctgttcaggcggcgct

SEQ ID NO: 115403 - DNA, 60 bp, Artificial
  Synthetic oligonucleotide
gtttcaggctgttcaggcggcgcttcaaggaccaggcatgctgacaacgttgatgaccag

SEQ ID NO: 115404 - DNA, 60 bp, Artificial
  Synthetic oligonucleotide
ccgtactatgattaaatcatcgaacatggaagcctatcataatgatattcgttatgggat

SEQ ID NO: 115405 - DNA, 60 bp, Artificial
  Synthetic oligonucleotide
gttatgggatatcgtatgatatttggtggttccatggtaacgtaaatactcagcaaataa

SEQ ID NO: 115406 - DNA, 60 bp, Artificial
  Synthetic oligonucleotide
aactatttcctcctgctttttacaattgtcaaatgaatcttgacaatgtacgaactaatt

SEQ ID NO: 115407 - DNA, 60 bp, Artificial
  Synthetic oligonucleotide
gtataactaaagcttgtcgtgacacatttgaagaaaatgtgaaacctgaaaatatcgctc

SEQ ID NO: 115408 - DNA, 60 bp, Artificial
  Synthetic oligonucleotide
acgtttaatacagtaatgagtcctattgatcgattattctatagtggatatgtctatgat

SEQ ID NO: 115409 - DNA, 60 bp, Artificial
  Synthetic oligonucleotide
tgtctatgattttgtacctaattataggtttgacaatggggtcttagacgttactggttc

SEQ ID NO: 115410 - DNA, 60 bp, Artificial
  Synthetic oligonucleotide
acctaattataggtttgacaatggggtcttagacgttactggttcagacctcctttctga

SEQ ID NO: 115411 - DNA, 60 bp, Artificial
  Synthetic oligonucleotide
tttggaaatacgctgttatgccaagacaaactatcctgactgatcgtgttagtgtcggat

SEQ ID NO: 115412 - DNA, 60 bp, Artificial
  Synthetic oligonucleotide
gctgttatgccaagacaaactatcctgactgatcgtgttagtgtcggattcatgggagcc

SEQ ID NO: 115413 - DNA, 60 bp, Artificial
  Synthetic oligonucleotide
agtgtcggattcatgggagccataactgagcctaatgtacacatttttcagaacgtttca

SEQ ID NO: 115414 - DNA, 60 bp, Artificial
  Synthetic oligonucleotide
gaacgtttcacgcaacgcctggcgagtattcggtataggggcagatgcgagaggacgatg

SEQ ID NO: 115415 - DNA, 60 bp, Artificial
  Synthetic oligonucleotide
gaggacgatgttatcgttcagacataaattcacctttgggcatggattcggtcgattatg

SEQ ID NO: 115416 - DNA, 60 bp, Artificial
  Synthetic oligonucleotide
cagatatctctattagaatgtgtttcttatcaacgtttgtcaggaacgcaatccttagtt

SEQ ID NO: 115417 - DNA, 59 bp, Artificial
  Synthetic oligonucleotide
aatgtgtttcttatcaacgtttgtcaggaacgcaatccttagttatttaccgcgcagtt

SEQ ID NO: 115418 - DNA, 60 bp, Artificial
  Synthetic oligonucleotide
tgtacacaatgtagatattctcaatgatccaatataccaagcaaaagagataaccgcccc

SEQ ID NO: 115419 - DNA, 60 bp, Artificial
  Synthetic oligonucleotide
tattctcaatgatccaatataccaagcaaaagagataaccgccccaagacttgatcctac

SEQ ID NO: 115420 - DNA, 60 bp, Artificial
  Synthetic oligonucleotide
gtaggagattttatagacagattaaagaatgggaatgttttaaggataataactaaacca

SEQ ID NO: 115421 - DNA, 60 bp, Artificial
  Synthetic oligonucleotide
tatacataccttttctgtacaatcaaggatttaacaacatactatcttaatgtacacaat

SEQ ID NO: 115422 - DNA, 60 bp, Artificial
  Synthetic oligonucleotide
tcttagtaatacgaagagcggactcgtctatggtatcacttctcttgacagattgtctct

SEQ ID NO: 115423 - DNA, 60 bp, Artificial
  Synthetic oligonucleotide
gagcggactcgtctatggtatcacttctcttgacagattgtctctctttgcacgtgatcc

SEQ ID NO: 115424 - DNA, 60 bp, Artificial
  Synthetic oligonucleotide
tatgtgagtactttttgtgggtttactaagattggtagattcggacgtgatcttagtaat

SEQ ID NO: 115425 - DNA, 52 bp, Artificial
  Synthetic oligonucleotide
tactaagattggtagattcggacgtgatcttagtaatacgaagagcggactc

SEQ ID NO: 115426 - DNA, 60 bp, Artificial
  Synthetic oligonucleotide
tgcatgtattagagatataggttgccgaaatttccatggtgtcatatttgctagacgtga

SEQ ID NO: 115427 - DNA, 60 bp, Artificial
  Synthetic oligonucleotide
gagatataggttgccgaaatttccatggtgtcatatttgctagacgtgagcggtttgaat

SEQ ID NO: 115428 - DNA, 60 bp, Artificial
  Synthetic oligonucleotide
gattgtctctctttgcacgtgatccaattttctatcaatattctaatttactacactcta

SEQ ID NO: 115429 - DNA, 58 bp, Artificial
  Synthetic oligonucleotide
ctacactctactcttaagttgaatggaaccattaaagctgattttattaaaatagaag

SEQ ID NO: 115430 - DNA, 57 bp, Artificial
  Synthetic oligonucleotide
taatatgcttgctagtccatgtagtgttattgtttataattctttatttatgacgta

SEQ ID NO: 115431 - DNA, 60 bp, Artificial
  Synthetic oligonucleotide
cttatggcatactatgctgacgaagagaatatacaggatttgatatcatatgtgagtact

SEQ ID NO: 115432 - DNA, 60 bp, Artificial
  Synthetic oligonucleotide
ggtataaccagataaatttatcactaggaagttatgcaccagttgctactctcacccctg

SEQ ID NO: 115433 - DNA, 60 bp, Artificial
  Synthetic oligonucleotide
caatgttagtctaatcttcagtggaaaattgaatatgacttgttttaatttggaaaaatg

SEQ ID NO: 115434 - DNA, 60 bp, Artificial
  Synthetic oligonucleotide
aattatgggtggacaccctgacgccttaagttgtgctcttatggcatactatgctgacga

SEQ ID NO: 115435 - DNA, 60 bp, Artificial
  Synthetic oligonucleotide
tttgcaacatacaaaaattatgggtggacaccctgacgccttaagttgtgctcttatggc

SEQ ID NO: 115436 - DNA, 60 bp, Artificial
  Synthetic oligonucleotide
aaaactacctaaagatatggtcatgacgatggataaggctagagttatcatgtctatcaa

SEQ ID NO: 115437 - DNA, 60 bp, Artificial
  Synthetic oligonucleotide
tatcgtgttctggaaaaaactacctaaagatatggtcatgacgatggataaggctagagt

SEQ ID NO: 115438 - DNA, 55 bp, Artificial
  Synthetic oligonucleotide
aaaagtgttgggagtcggcctggtagtattgaagtatttatcgtgttctggaaaa

SEQ ID NO: 115439 - DNA, 60 bp, Artificial
  Synthetic oligonucleotide
taccgtctcgtaaaaagtgttgggagtcggcctggtagtattgaagtatttatcgtgttc

SEQ ID NO: 115440 - DNA, 55 bp, Artificial
  Synthetic oligonucleotide
agatgttgacgcttgcacacaacacgctgttactcttttcaccaatatctaccac

SEQ ID NO: 115441 - DNA, 54 bp, Artificial
  Synthetic oligonucleotide
atatatcaaagaattgctatcccacgctttttagatttagttaatgactctcgt

SEQ ID NO: 115442 - DNA, 60 bp, Artificial
  Synthetic oligonucleotide
gtgaatagtgatagacgtggtttttacggcttattattgaataaacgagcaatggattac

SEQ ID NO: 115443 - DNA, 60 bp, Artificial
  Synthetic oligonucleotide
tatatagtgaagtgtttgaagttgacgatcctgatgtgactctcaataatgttcaggata

SEQ ID NO: 115444 - DNA, 60 bp, Artificial
  Synthetic oligonucleotide
gtataaacttttggaaaaggtggctggtaaatataactttataactacactatatagtga

SEQ ID NO: 115445 - DNA, 60 bp, Artificial
  Synthetic oligonucleotide
cagcaaataaaacaaatgtggaacaagtcattatgcaataagttcgctgttatgcacgtt

SEQ ID NO: 115446 - DNA, 60 bp, Artificial
  Synthetic oligonucleotide
cgtatgatatttggtggttccatggtaacgtaaatactcagcaaataaaacaaatgtgga

SEQ ID NO: 115447 - DNA, 60 bp, Artificial
  Synthetic oligonucleotide
gtatcaagcacagcataggtttcaaaactcatctggaatagtgaatagtgatagacgtgg

SEQ ID NO: 115448 - DNA, 60 bp, Artificial
  Synthetic oligonucleotide
tatatcgtacgtatcaagcacagcataggtttcaaaactcatctggaatagtgaatagtg

SEQ ID NO: 115449 - DNA, 66 bp, Artificial
  Synthetic oligonucleotide
ccattcataggtaaaatagatgactcaagatcagatttgcatttaacggtaggagattttatagac

SEQ ID NO: 115450 - DNA, 65 bp, Artificial
  Synthetic oligonucleotide
cgcaaatatgacaatgcaccatccatttctcaaatcatggttagtaaaagtgatttatactatgg

SEQ ID NO: 115451 - DNA, 50 bp, Artificial
  Synthetic oligonucleotide
aacgaaccagacggtttattagatccaatgtttaatacaatacgtctaac

SEQ ID NO: 115452 - DNA, 56 bp, Artificial
  Synthetic oligonucleotide
gttcaggatattgatgtaccaactgttgaacctattaccatcactgaatattcata

SEQ ID NO: 115453 - DNA, 60 bp, Artificial
  Synthetic oligonucleotide
ttgaagttgacgatcctgatgtgactctcaataatgttcaggatattgatgtaccaactg

SEQ ID NO: 115454 - DNA, 60 bp, Artificial
  Synthetic oligonucleotide
taaatatgtgttcgctcgtcttaatctatttgatactaacttagccgttggggatgaaat

SEQ ID NO: 115455 - DNA, 60 bp, Artificial
  Synthetic oligonucleotide
gcgcacccgaagaaaagtatcgttctaattattgtgggggatgataagcttgaaccacaa

SEQ ID NO: 115456 - DNA, 60 bp, Artificial
  Synthetic oligonucleotide
atgcagacactatttattacgactattacccattggaaaatggagcgaaaggatgtaatc

SEQ ID NO: 115457 - DNA, 60 bp, Artificial
  Synthetic oligonucleotide
tgcttaccttggcgcgcgttctgaattagtattcccgccctattatgacaaatggatcaa

SEQ ID NO: 115458 - DNA, 60 bp, Artificial
  Synthetic oligonucleotide
agctttccccaactttttaaagcacgttatgaatttacgtgatgtgaaacgtatatgcga

SEQ ID NO: 115459 - DNA, 60 bp, Artificial
  Synthetic oligonucleotide
cgcgtatgacagaactaagatacgtgcattggagctctgcaagatactttcggcgatcgg

SEQ ID NO: 115460 - DNA, 60 bp, Artificial
  Synthetic oligonucleotide
gaaggtgggaaacataatcttatcaagatacctgaatcggatatgatcgacgtaccgagg

SEQ ID NO: 115461 - DNA, 60 bp, Artificial
  Synthetic oligonucleotide
ctttcggcgatcggacgtaaaatgttagatgttcaagaagagccaaaggatgagatggcg

SEQ ID NO: 115462 - DNA, 60 bp, Artificial
  Synthetic oligonucleotide
cgaaaggagttgaatttatgacagatactaagtggatgaaatgggcaattgacgacaaaa

SEQ ID NO: 115463 - DNA, 60 bp, Artificial
  Synthetic oligonucleotide
ttatgacagatactaagtggatgaaatgggcaattgacgacaaaatggatatacaacccc

SEQ ID NO: 115464 - DNA, 60 bp, Artificial
  Synthetic oligonucleotide
ggctcaacaagatgatttctctacgctaacggattatacgaaaggaagaacagtgtgccc

SEQ ID NO: 115465 - DNA, 60 bp, Artificial
  Synthetic oligonucleotide
ggcgacaccctcagtctgggacaaagacagtcagctgtattcgaacatatggctcaacaa

SEQ ID NO: 115466 - DNA, 60 bp, Artificial
  Synthetic oligonucleotide
gacgacaaaatggatatacaaccccttaaggttactctggataaccactgttccgttaac

SEQ ID NO: 115467 - DNA, 51 bp, Artificial
  Synthetic oligonucleotide
ccaaaggatgagatggcgttatctactagatttcagttcaagttaggcgag

SEQ ID NO: 115468 - DNA, 60 bp, Artificial
  Synthetic oligonucleotide
ctttagagtatgcgttagggccatattatgacctacgtctgcagttattcggcgacaccc

SEQ ID NO: 115469 - DNA, 60 bp, Artificial
  Synthetic oligonucleotide
cgttagggccatattatgacctacgtctgcagttattcggcgacaccctcagtctgggac

SEQ ID NO: 115470 - DNA, 60 bp, Artificial
  Synthetic oligonucleotide
tgaaccacaaatacgctcagagcaaatcgtaaataagtactattattcacggaggcacat

SEQ ID NO: 115471 - DNA, 60 bp, Artificial
  Synthetic oligonucleotide
ctgaaccaaacctacttaccatcgatttcgagaaggatgcttaccttggcgcgcgttctg

SEQ ID NO: 115472 - DNA, 60 bp, Artificial
  Synthetic oligonucleotide
ccatggggataacgagacatcggatatgtgataagtcgatattgaaatataaatgcaaag

SEQ ID NO: 115473 - DNA, 60 bp, Artificial
  Synthetic oligonucleotide
ggcgcgcgttctgaattagtattcccgccctattatgacaaatggatcaattcaccgatg

SEQ ID NO: 115474 - DNA, 60 bp, Artificial
  Synthetic oligonucleotide
cggtcgttacgtctaaattagatacacttaagttgcacgtagcttccttatgcgcggggc

SEQ ID NO: 115475 - DNA, 60 bp, Artificial
  Synthetic oligonucleotide
tgtttgatcgtatgattcaaggcggatgggatcaggaacggttcaaattacacaacatat

SEQ ID NO: 115476 - DNA, 60 bp, Artificial
  Synthetic oligonucleotide
ttcaaggcggatgggatcaggaacggttcaaattacacaacatattgactgaaccaaacc

SEQ ID NO: 115477 - DNA, 60 bp, Artificial
  Synthetic oligonucleotide
agttatcagattaattcccgtcgaagtcggggcatacgcaaatagatttggacttaagag

SEQ ID NO: 115478 - DNA, 60 bp, Artificial
  Synthetic oligonucleotide
tttctctacgctaacggattatacgaaaggaagaacagtgtgccctcactcaggcgggac

SEQ ID NO: 115479 - DNA, 60 bp, Artificial
  Synthetic oligonucleotide
tccttggagtaatcgggcggttcatgggtatataaagacgtcagcggaatctttagagta

SEQ ID NO: 115480 - DNA, 60 bp, Artificial
  Synthetic oligonucleotide
cgggcggttcatgggtatataaagacgtcagcggaatctttagagtatgcgttagggcca

SEQ ID NO: 115481 - DNA, 60 bp, Artificial
  Synthetic oligonucleotide
cttccttatgcgcggggctagctgactctctagtgtatacgctgcctgtagcgcacccga

SEQ ID NO: 115482 - DNA, 60 bp, Artificial
  Synthetic oligonucleotide
cgaacccttatccatgtttgcgtggtgcgctaattgctgctgagtgtgagctcggcgatg

SEQ ID NO: 115483 - DNA, 60 bp, Artificial
  Synthetic oligonucleotide
tggagtctgcgtccagaatatggtcagcgtgagaggccgttagaagacaataaatatgtg

SEQ ID NO: 115484 - DNA, 60 bp, Artificial
  Synthetic oligonucleotide
gctcattccgaaagagaaaacatgagcgagagttatcaggttgggacgcagagatggata

SEQ ID NO: 115485 - DNA, 60 bp, Artificial
  Synthetic oligonucleotide
ccggatgagattagaaccgaaatcgctgaacttaatagaataaaagatgagtggaaaaac

SEQ ID NO: 115486 - DNA, 60 bp, Artificial
  Synthetic oligonucleotide
ccgttaaccatcaactcttcaattgtatcgttaaggcgaggtcagcaaatgcagacacta

SEQ ID NO: 115487 - DNA, 53 bp, Artificial
  Synthetic oligonucleotide
cgtaccgaggttaagtatcatagaggctctaaattatagaccgaaaaggaacg

SEQ ID NO: 115488 - DNA, 60 bp, Artificial
  Synthetic oligonucleotide
gatgtaatcatacgaacctggatttattacgaagtttaacaacgacggagatgttccaca

SEQ ID NO: 115489 - DNA, 59 bp, Artificial
  Synthetic oligonucleotide
aatggatcaattcaccgatgtttaatgcccggcttaaaattgcgcgtggcgagattgca

SEQ ID NO: 115490 - DNA, 50 bp, Artificial
  Synthetic oligonucleotide
aattacgaacgattggacccaagtttacatgaggggagggaacatgagac

SEQ ID NO: 115491 - DNA, 60 bp, Artificial
  Synthetic oligonucleotide
gtggaaaaacgccgcgtatgacagaactaagatacgtgcattggagctctgcaagatact

SEQ ID NO: 115492 - DNA, 60 bp, Artificial
  Synthetic oligonucleotide
gctagatataacgctacgcgcttatgataataggaaatccgcaaagaacgcgaaaggagt

SEQ ID NO: 115493 - DNA, 60 bp, Artificial
  Synthetic oligonucleotide
ctgatttgttttgtgttcgactacatttttgagaaacatgtacagctacgtaatgccaaa

SEQ ID NO: 115494 - DNA, 60 bp, Artificial
  Synthetic oligonucleotide
gtgagctcggcgatgtgtacttcacattgcgtcaaacgtataaatggagtctgcgtccag

SEQ ID NO: 115495 - DNA, 60 bp, Artificial
  Synthetic oligonucleotide
ggttcaagataatatttcatattggcatagacagtggtcgatcccaatgattttatttga

SEQ ID NO: 115496 - DNA, 60 bp, Artificial
  Synthetic oligonucleotide
gcgtccagaatatggtcagcgtgagaggccgttagaagacaataaatatgtgttcgctcg

SEQ ID NO: 115497 - DNA, 60 bp, Artificial
  Synthetic oligonucleotide
tgtttggagaacgaacccttatccatgtttgcgtggtgcgctaattgctgctgagtgtga

SEQ ID NO: 115498 - DNA, 52 bp, Artificial
  Synthetic oligonucleotide
gttctgcaacagatgatgggagattttacgcgctaatcgctatagcagctac

SEQ ID NO: 115499 - DNA, 60 bp, Artificial
  Synthetic oligonucleotide
gagacaggatgcggatgacacccataaagaattcggctcaatatgtttcgagtattacac

SEQ ID NO: 115500 - DNA, 60 bp, Artificial
  Synthetic oligonucleotide
gcgattcaaagaagagacaggatgcggatgacacccataaagaattcggctcaatatgtt

SEQ ID NO: 115501 - DNA, 60 bp, Artificial
  Synthetic oligonucleotide
cgagtattacactacgacaaagatctctcaaggtgagatagatgttccggtcgttacgtc

SEQ ID NO: 115502 - DNA, 60 bp, Artificial
  Synthetic oligonucleotide
gggatgaaatcattcactggcgttatgaggtttatcagcctaaagaaacaactcatgatg

SEQ ID NO: 115503 - DNA, 60 bp, Artificial
  Synthetic oligonucleotide
cgctcgtcttaatctatttgatactaacttagccgttggggatgaaatcattcactggcg

SEQ ID NO: 115504 - DNA, 60 bp, Artificial
  Synthetic oligonucleotide
gtaatgcaagagatcagcatggcgcagcatgtgatgatggcaccaggcgatcttattctg

SEQ ID NO: 115505 - DNA, 60 bp, Artificial
  Synthetic oligonucleotide
agcatggcgcagcatgtgatgatggcaccaggcgatcttattctggaagttgaggaccag

SEQ ID NO: 115506 - DNA, 60 bp, Artificial
  Synthetic oligonucleotide
atgtgttacaacaggatggcgagggaaccaaatctcgccgttcttccgccgaccttacct

SEQ ID NO: 115507 - DNA, 60 bp, Artificial
  Synthetic oligonucleotide
ggatggcgagggaaccaaatctcgccgttcttccgccgaccttacctcttccattccatc

SEQ ID NO: 115508 - DNA, 60 bp, Artificial
  Synthetic oligonucleotide
tcttattctggaagttgaggaccagatacggaggagaggtatggcggttcatgtgttaca

SEQ ID NO: 115509 - DNA, 60 bp, Artificial
  Synthetic oligonucleotide
tgaggaccagatacggaggagaggtatggcggttcatgtgttacaacaggatggcgaggg

SEQ ID NO: 115510 - DNA, 60 bp, Artificial
  Synthetic oligonucleotide
cgatccgagttacgtccaagaggcggcggcatactactcggctcctaccactgatcctac

SEQ ID NO: 115511 - DNA, 60 bp, Artificial
  Synthetic oligonucleotide
cgtccaagaggcggcggcatactactcggctcctaccactgatcctacttggaaagccac

SEQ ID NO: 115512 - DNA, 60 bp, Artificial
  Synthetic oligonucleotide
gaccttacctcttccattccatctcattcaccggccgtttccacccctgaggtatcggaa

SEQ ID NO: 115513 - DNA, 60 bp, Artificial
  Synthetic oligonucleotide
ggtatcggaatatctgaatcgagcgtttaaccttaatgtggggtcgtatgacgagggtcc

SEQ ID NO: 115514 - DNA, 60 bp, Artificial
  Synthetic oligonucleotide
atagtgggtggagcctatgatcaagaaatttctcccaaacctcccttcgaagccttcttg

SEQ ID NO: 115515 - DNA, 60 bp, Artificial
  Synthetic oligonucleotide
gtgggtggagcctatgatcaagaaatttctcccaaacctcccttcgaagccttcttggat

SEQ ID NO: 115516 - DNA, 57 bp, Artificial
  Synthetic oligonucleotide
agccttcttggatttccttgactccaggggatgagcactccctctcgcacacgcccc

SEQ ID NO: 115517 - DNA, 60 bp, Artificial
  Synthetic oligonucleotide
agccttcttggatttccttgactccaggggatgagcactccctctcgcacacgccccccg

SEQ ID NO: 115518 - DNA, 60 bp, Artificial
  Synthetic oligonucleotide
ctgatcctacttggaaagccacattacgtcgtattcatgctcaaggaactatagtgggtg

SEQ ID NO: 115519 - DNA, 60 bp, Artificial
  Synthetic oligonucleotide
cctacttggaaagccacattacgtcgtattcatgctcaaggaactatagtgggtggagcc

SEQ ID NO: 115520 - DNA, 60 bp, Artificial
  Synthetic oligonucleotide
cgacgtaggcagaaacgggtggatctagtgacaaacgatccgagttacgtccaagaggcg

SEQ ID NO: 115521 - DNA, 60 bp, Artificial
  Synthetic oligonucleotide
ggtgcttcttctacacgacgtaggcagaaacgggtggatctagtgacaaacgatccgagt

SEQ ID NO: 115522 - DNA, 60 bp, Artificial
  Synthetic oligonucleotide
tccatcctcaatgaggccaaccttcttcctagtgccattcgaaagatggcctccgttcgt

SEQ ID NO: 115523 - DNA, 60 bp, Artificial
  Synthetic oligonucleotide
gccagaaggccctcccatcttcctttcgctcaaaggatccatcctcaatgaggccaacct

SEQ ID NO: 115524 - DNA, 60 bp, Artificial
  Synthetic oligonucleotide
acgagggtccattgccagaaggccctcccatcttcctttcgctcaaaggatccatcctca

SEQ ID NO: 115525 - DNA, 60 bp, Artificial
  Synthetic oligonucleotide
gaatcgagcgtttaaccttaatgtggggtcgtatgacgagggtccattgccagaaggccc

SEQ ID NO: 115526 - DNA, 60 bp, Artificial
  Synthetic oligonucleotide
acgagctcctcaatgagataaaacactcagagaggggtgcttcttctacacgacgtaggc

SEQ ID NO: 115527 - DNA, 60 bp, Artificial
  Synthetic oligonucleotide
ctgttcggacgcaagacgagctcctcaatgagataaaacactcagagaggggtgcttctt

SEQ ID NO: 115528 - DNA, 50 bp, Artificial
  Synthetic oligonucleotide
ctccgttcgttctacctatgagaaggctttgaaaaagtccaatctcaagg

SEQ ID NO: 115529 - DNA, 60 bp, Artificial
  Synthetic oligonucleotide
gaggccaaccttcttcctagtgccattcgaaagatggcctccgttcgttctacctatgag

SEQ ID NO: 115530 - DNA, 60 bp, Artificial
  Synthetic oligonucleotide
acttaaatcgtagtgcaaagcaagagatgatggatcgccagtcactggccgaggattaca

SEQ ID NO: 115531 - DNA, 60 bp, Artificial
  Synthetic oligonucleotide
cgtagtgcaaagcaagagatgatggatcgccagtcactggccgaggattacaacgcattg

SEQ ID NO: 115532 - DNA, 60 bp, Artificial
  Synthetic oligonucleotide
ttaaacgatgtgtatcatgctttccaaagtgtacacgttgcacctaatgatgttatcaag

SEQ ID NO: 115533 - DNA, 60 bp, Artificial
  Synthetic oligonucleotide
gtaggctacggagccatagtgacattggtttcaagaaagcgactgttggcgatgttattc

SEQ ID NO: 115534 - DNA, 60 bp, Artificial
  Synthetic oligonucleotide
ggctacggagccatagtgacattggtttcaagaaagcgactgttggcgatgttattccta

SEQ ID NO: 115535 - DNA, 60 bp, Artificial
  Synthetic oligonucleotide
tgcttcatggcaattatacgttatacatcctgttcaagggtcattaggcttggttgttca

SEQ ID NO: 115536 - DNA, 60 bp, Artificial
  Synthetic oligonucleotide
atacgttatacatcctgttcaagggtcattaggcttggttgttcaattgatgggtgatgc

SEQ ID NO: 115537 - DNA, 60 bp, Artificial
  Synthetic oligonucleotide
tggttgttcaattgatgggtgatgcattaacttacaacgtttttgctcagtacggtacta

SEQ ID NO: 115538 - DNA, 60 bp, Artificial
  Synthetic oligonucleotide
aactgtattgactggcggtgccacaaacaccgctttggaaggtacgaaggttaagtttca

SEQ ID NO: 115539 - DNA, 60 bp, Artificial
  Synthetic oligonucleotide
cggtgccacaaacaccgctttggaaggtacgaaggttaagtttcaaaccaaggttacggc

SEQ ID NO: 115540 - DNA, 60 bp, Artificial
  Synthetic oligonucleotide
ttaagtttcaaaccaaggttacggctcaacaagctttagcgctgacgatggcgttgaaag

SEQ ID NO: 115541 - DNA, 60 bp, Artificial
  Synthetic oligonucleotide
ccaaggttacggctcaacaagctttagcgctgacgatggcgttgaaagacgcagcttcta

SEQ ID NO: 115542 - DNA, 60 bp, Artificial
  Synthetic oligonucleotide
tcgggatagatggtcatctgcttattgagaagagtgttcagcataaacctgaaaagattc

SEQ ID NO: 115543 - DNA, 60 bp, Artificial
  Synthetic oligonucleotide
cgggatagatggtcatctgcttattgagaagagtgttcagcataaacctgaaaagattct

SEQ ID NO: 115544 - DNA, 60 bp, Artificial
  Synthetic oligonucleotide
tatgaatatctgattggcccttgggctcattatggagacattgattattcagttgtggtt

SEQ ID NO: 115545 - DNA, 60 bp, Artificial
  Synthetic oligonucleotide
ggcccttgggctcattatggagacattgattattcagttgtggttgatacgctcaacgag

SEQ ID NO: 115546 - DNA, 60 bp, Artificial
  Synthetic oligonucleotide
agttgtggttgatacgctcaacgaggagactaagtggtattgtgaggtcatcgggataga

SEQ ID NO: 115547 - DNA, 60 bp, Artificial
  Synthetic oligonucleotide
cgctcaacgaggagactaagtggtattgtgaggtcatcgggatagatggtcatctgctta

SEQ ID NO: 115548 - DNA, 60 bp, Artificial
  Synthetic oligonucleotide
gcgttgaaagacgcagcttctatgttatctcagggtgaattgataggatattttgaacaa

SEQ ID NO: 115549 - DNA, 60 bp, Artificial
  Synthetic oligonucleotide
tatagccgatattcatatacctaaagttttcaatgatcttagaaatactacattacactg

SEQ ID NO: 115550 - DNA, 60 bp, Artificial
  Synthetic oligonucleotide
cattacactgcaaactggaaggcaaacagacaatcgctggatatacagtgtatgaatatc

SEQ ID NO: 115551 - DNA, 60 bp, Artificial
  Synthetic oligonucleotide
tggaaggcaaacagacaatcgctggatatacagtgtatgaatatctgattggcccttggg

SEQ ID NO: 115552 - DNA, 60 bp, Artificial
  Synthetic oligonucleotide
gcaccaattgaacaggctaggatcagctatgtataaagcagatcatgaacgtgagactga

SEQ ID NO: 115553 - DNA, 60 bp, Artificial
  Synthetic oligonucleotide
cgtagcaactcagcaccaattgaacaggctaggatcagctatgtataaagcagatcatga

SEQ ID NO: 115554 - DNA, 60 bp, Artificial
  Synthetic oligonucleotide
caacgcattgaacttagctgttggtcaagagataaagttggacgtagcaactcagcacca

SEQ ID NO: 115555 - DNA, 60 bp, Artificial
  Synthetic oligonucleotide
gaggattacaacgcattgaacttagctgttggtcaagagataaagttggacgtagcaact

SEQ ID NO: 115556 - DNA, 60 bp, Artificial
  Synthetic oligonucleotide
gcaggccgagccgcagctgatggttcaggtgttgtgccagtgtttggaccaagtgtagct

SEQ ID NO: 115557 - DNA, 60 bp, Artificial
  Synthetic oligonucleotide
tatctgcagcaggccgagccgcagctgatggttcaggtgttgtgccagtgtttggaccaa

SEQ ID NO: 115558 - DNA, 60 bp, Artificial
  Synthetic oligonucleotide
gagactgaactgactgacttaattaatagaattcgtgagaatgaggttactgtcaatggc

SEQ ID NO: 115559 - DNA, 60 bp, Artificial
  Synthetic oligonucleotide
cagatcatgaacgtgagactgaactgactgacttaattaatagaattcgtgagaatgagg

SEQ ID NO: 115560 - DNA, 60 bp, Artificial
  Synthetic oligonucleotide
gtcgcggaggctgcgatcgctgtcaaagagtcaggaattatcacacaattaaacgatgtg

SEQ ID NO: 115561 - DNA, 60 bp, Artificial
  Synthetic oligonucleotide
gtgtcgcggaggctgcgatcgctgtcaaagagtcaggaattatcacacaattaaacgatg

SEQ ID NO: 115562 - DNA, 60 bp, Artificial
  Synthetic oligonucleotide
gggattgtcacagaacagtattattagtctaacaggaaacgacagaactgttgctgatgg

SEQ ID NO: 115563 - DNA, 58 bp, Artificial
  Synthetic oligonucleotide
ggataggaattaatggcacctagagtaaaaaccaagatgtttaatgaaatcactagtg

SEQ ID NO: 115564 - DNA, 60 bp, Artificial
  Synthetic oligonucleotide
tttaatggtaagaatcatgacagactgaagcttaaagtatacgtaaaagattcgttgtca

SEQ ID NO: 115565 - DNA, 60 bp, Artificial
  Synthetic oligonucleotide
ggattgtcacagaacagtattattagtctaacaggaaacgacagaactgttgctgatggc

SEQ ID NO: 115566 - DNA, 60 bp, Artificial
  Synthetic oligonucleotide
gcagacgatcgtatcgtcggaccaactgttaatctgttcaaatatggagcagctgtggtc

SEQ ID NO: 115567 - DNA, 60 bp, Artificial
  Synthetic oligonucleotide
tctacgcagtttcacgggcctaatcagggtgcgctacgtcctgagttagcattcgatcac

SEQ ID NO: 115568 - DNA, 60 bp, Artificial
  Synthetic oligonucleotide
gtgtgtggctctcatctttagtttaagaattcattggaggtacatgatgttcccgggagg

SEQ ID NO: 115569 - DNA, 60 bp, Artificial
  Synthetic oligonucleotide
ggtggagtagatacttcctcgatgagctacaactacggcgattatctgtaggtttgcgac

SEQ ID NO: 115570 - DNA, 60 bp, Artificial
  Synthetic oligonucleotide
gagttagaaatgaaacggaagcaggtacaagcgctcgaagacagactgatggcgcgggcc

SEQ ID NO: 115571 - DNA, 60 bp, Artificial
  Synthetic oligonucleotide
gagaaggaacgtcaggaacacgcgctcaaacagctggagatactgcgactgaggcgggag

SEQ ID NO: 115572 - DNA, 60 bp, Artificial
  Synthetic oligonucleotide
aacacgttcattgaaaatgcagaatgcccagatacgtaggatcagaccagatggcacggt

SEQ ID NO: 115573 - DNA, 60 bp, Artificial
  Synthetic oligonucleotide
catcctacgacaaaggtcatatttaatggtctcgacgtgaataccgaagttcaacctttg

SEQ ID NO: 115574 - DNA, 60 bp, Artificial
  Synthetic oligonucleotide
gcgcgggccttagtggaacaaatgcgaaaatagcaactgcaagcagcgcacgacaagcag

SEQ ID NO: 115575 - DNA, 60 bp, Artificial
  Synthetic oligonucleotide
aagcaggaacgaagtacggtctaggcctgacagaaacacggttggattatgtgcgtttag

SEQ ID NO: 115576 - DNA, 60 bp, Artificial
  Synthetic oligonucleotide
gccaaccctttcaacaagccaaataagacatgccattgaacggatcgctcaaatcactga

SEQ ID NO: 115577 - DNA, 60 bp, Artificial
  Synthetic oligonucleotide
ctatagtccagttgcgaatgggcaagtcgggattccaaagctagaggtcgaccatattag

SEQ ID NO: 115578 - DNA, 60 bp, Artificial
  Synthetic oligonucleotide
cgaccatattagtttctcgaatgtagtatcaatgatgacagcaaatatacgtaccggcga

SEQ ID NO: 115579 - DNA, 52 bp, Artificial
  Synthetic oligonucleotide
actaaatatcaacttacgtgcgcttatggaagcaaatgtgaccgccgatgac

SEQ ID NO: 115580 - DNA, 60 bp, Artificial
  Synthetic oligonucleotide
gtggactattaatggtgctctttaaggtaatgacggataataggcttgttatcgtaggtg

SEQ ID NO: 115581 - DNA, 60 bp, Artificial
  Synthetic oligonucleotide
ctgtaggtttgcgactaatcactaacccacgtattgctagacgtttcaatggggtaagga

SEQ ID NO: 115582 - DNA, 60 bp, Artificial
  Synthetic oligonucleotide
attcgatcacgatcacatcatacggtgtttaatgttggcagctgcaaactatccaagact

SEQ ID NO: 115583 - DNA, 60 bp, Artificial
  Synthetic oligonucleotide
gggaattatagttcagataaatacaggttatgttgcatccgctaatgtaatacgaccagt

SEQ ID NO: 115584 - DNA, 60 bp, Artificial
  Synthetic oligonucleotide
gcatcagaagcagatatatcatcaatccatctagctatagcgagagaagtgtcaccgatg

SEQ ID NO: 115585 - DNA, 60 bp, Artificial
  Synthetic oligonucleotide
cgctttgctaacgcaaaccttcagatgaataacaatcggcaccacgaaagtgtacttgag

SEQ ID NO: 115586 - DNA, 60 bp, Artificial
  Synthetic oligonucleotide
atcctgtagaatatggaattttcatccagcgaggagctacgtacaccatcaacgctgctg

SEQ ID NO: 115587 - DNA, 60 bp, Artificial
  Synthetic oligonucleotide
agccggagcgaataccataattgcaatcatgcgcttgttcaccccacaaggtttcctacg

SEQ ID NO: 115588 - DNA, 60 bp, Artificial
  Synthetic oligonucleotide
acacaaacaaccagaaattgacagcagtgcaaataatggagaaggaacgtcaggaacacg

SEQ ID NO: 115589 - DNA, 60 bp, Artificial
  Synthetic oligonucleotide
ggcgccgtcgcccctagctcatatgagatggacacaggcacactatcaaggaatggtgat

SEQ ID NO: 115590 - DNA, 60 bp, Artificial
  Synthetic oligonucleotide
agtacgaggatcagtttacgaagaaggataaattacgtgctagtgaagcagacgatcgta

SEQ ID NO: 115591 - DNA, 60 bp, Artificial
  Synthetic oligonucleotide
ccacaacaacgtaggcgttaatccagcattattacgtgactttacgcaggtgaactggct

SEQ ID NO: 115592 - DNA, 60 bp, Artificial
  Synthetic oligonucleotide
ccagatggcacggtgcttcgttatgatgatcagattgatattgaagcatttaggtggagt

SEQ ID NO: 115593 - DNA, 60 bp, Artificial
  Synthetic oligonucleotide
gaggatatgagattaatctaccccttgcaaccgatatcagtagcccgctccatgcgcgca

SEQ ID NO: 115594 - DNA, 60 bp, Artificial
  Synthetic oligonucleotide
ccggtggagatagcgtagttatgcgtacttatcagacggaagcagacgatgacttagatg

SEQ ID NO: 115595 - DNA, 60 bp, Artificial
  Synthetic oligonucleotide
ggaggagatcgtatatccagatcccagcacaacattatcccaatcactcagtgtcgctca

SEQ ID NO: 115596 - DNA, 60 bp, Artificial
  Synthetic oligonucleotide
cgtcgcagtcgtgctttatcagagtggagtcattaatggatccgcgtcgacatacttgcg

SEQ ID NO: 115597 - DNA, 60 bp, Artificial
  Synthetic oligonucleotide
tgatttcaaacagataagcgatccgaaaggctatctaacgtatagtgttaagtacgagga

SEQ ID NO: 115598 - DNA, 60 bp, Artificial
  Synthetic oligonucleotide
tatacgcgagcgtctgcatattacgaatgttcccgaccccatatatatcacaggcgcatc

SEQ ID NO: 115599 - DNA, 60 bp, Artificial
  Synthetic oligonucleotide
ggataatgtacttaacagacgatgacccagatcccgacttcgtgcccgacgtgccagaag

SEQ ID NO: 115600 - DNA, 60 bp, Artificial
  Synthetic oligonucleotide
ttgcttgtacccattggtgtgacagccggagcagaacaatcagccgaatatgttagtgga

SEQ ID NO: 115601 - DNA, 60 bp, Artificial
  Synthetic oligonucleotide
ccaaaccagcgatgcagtgcggcaattacgagcgttaatgccaaccctttcaacaagcca

SEQ ID NO: 115602 - DNA, 60 bp, Artificial
  Synthetic oligonucleotide
cacttgctaataagcgcaacagggtaacgtatactcatcccccaaccggaatggcatacc

SEQ ID NO: 115603 - DNA, 60 bp, Artificial
  Synthetic oligonucleotide
tacacagcagaggtgatgacacccagcgaagggtacacgcagcacgtcgacgctgagagt

SEQ ID NO: 115604 - DNA, 60 bp, Artificial
  Synthetic oligonucleotide
catggatggcctgctacgacctgagccaagcgcgtttgatccaccagcttcaggagagga

SEQ ID NO: 115605 - DNA, 60 bp, Artificial
  Synthetic oligonucleotide
agacgatgtacgcgcaatcaatatacgtaatgcttaagtcacgtttgatcaaattagatt

SEQ ID NO: 115606 - DNA, 60 bp, Artificial
  Synthetic oligonucleotide
gctcaaatcactgatgttgatagcacggactatggcaagctcacattacgttttctcggg

SEQ ID NO: 115607 - DNA, 60 bp, Artificial
  Synthetic oligonucleotide
gagcagctgtggtcaatatagacttgaatcgtgatttctttgatacagcgacgggtatag

SEQ ID NO: 115608 - DNA, 60 bp, Artificial
  Synthetic oligonucleotide
acggaagcagacgatgacttagatgaaggcataagaatgaccacgtatgaccaatacttc

SEQ ID NO: 115609 - DNA, 60 bp, Artificial
  Synthetic oligonucleotide
atacgtcaatcgtctggcccatcttatgtcaatgcacttacccgttggtcagacaaagtg

SEQ ID NO: 115610 - DNA, 60 bp, Artificial
  Synthetic oligonucleotide
tcaggtaatcatgcgacgttcaagccagaccaatatgtcatcacgtcaccggaaggaagc

SEQ ID NO: 115611 - DNA, 56 bp, Artificial
  Synthetic oligonucleotide
tgctcacacggaccatttatcagtagtatatgccacgatgtccaacttcatgctta

SEQ ID NO: 115612 - DNA, 60 bp, Artificial
  Synthetic oligonucleotide
gagaggaacggttaccaacgaattcgcatcccggttcagaacaatcgtggctacactggc

SEQ ID NO: 115613 - DNA, 60 bp, Artificial
  Synthetic oligonucleotide
ccaagagcatcaaggaacccacagacgtacataccgtatacaaatcagagaggaacggtt

SEQ ID NO: 115614 - DNA, 60 bp, Artificial
  Synthetic oligonucleotide
cccgttggtcagacaaagtggcaaaggagttgacgctgtcagcataatggaggagatcgt

SEQ ID NO: 115615 - DNA, 60 bp, Artificial
  Synthetic oligonucleotide
gcgcgcaatagtaaatcataacgaagttgatcgaccacgaggcgccgtcgcccctagctc

SEQ ID NO: 115616 - DNA, 60 bp, Artificial
  Synthetic oligonucleotide
taatgaagcagataagagaaatgcgtattcatatgactgcattgtttaatagtttacatg

SEQ ID NO: 115617 - DNA, 60 bp, Artificial
  Synthetic oligonucleotide
agaaaagaaacatgaaatgaagatgagtgataatagaaatgaattcaaacattcacataa

SEQ ID NO: 115618 - DNA, 60 bp, Artificial
  Synthetic oligonucleotide
agtttacatgatgataatgttaaatggagaatgagtgaatctattcgcagagaaaagaaa

SEQ ID NO: 115619 - DNA, 51 bp, Artificial
  Synthetic oligonucleotide
cccgaaacgctgagttgaggatcaatgtagatatgaaaaattcatgtggct

SEQ ID NO: 115620 - DNA, 60 bp, Artificial
  Synthetic oligonucleotide
tgaacggacgccatcccgttcatttctagcgagtagagaaaaacattgtacccgaaacgc

SEQ ID NO: 115621 - DNA, 60 bp, Artificial
  Synthetic oligonucleotide
gaccttgctcagcttaaagctttctaccaggacttgacagacaaggagttgtacatctta

SEQ ID NO: 115622 - DNA, 60 bp, Artificial
  Synthetic oligonucleotide
ccccggacactttaactaccggaatcagaccgagaccaacagtgaccatggaccttgctc

SEQ ID NO: 115623 - DNA, 60 bp, Artificial
  Synthetic oligonucleotide
gtcaaacgggaggacctgttcttgagttgcaggatgtgtttcgatggataagcgagacag

SEQ ID NO: 115624 - DNA, 60 bp, Artificial
  Synthetic oligonucleotide
taggttcgtaagtcaaacgggaggacctgttcttgagttgcaggatgtgtttcgatggat

SEQ ID NO: 115625 - DNA, 60 bp, Artificial
  Synthetic oligonucleotide
gattttcatgccatcacattatctcatgctaacatgatatttggtgcagattcggtcgga

SEQ ID NO: 115626 - DNA, 60 bp, Artificial
  Synthetic oligonucleotide
ctatggttgggagattttcatgccatcacattatctcatgctaacatgatatttggtgca

SEQ ID NO: 115627 - DNA, 60 bp, Artificial
  Synthetic oligonucleotide
atttggtgcagattcggtcggatttaaaggtgtaaatgtatcaacattgcccccggacac

SEQ ID NO: 115628 - DNA, 60 bp, Artificial
  Synthetic oligonucleotide
gcgagacagtttcagggcctgtcgtgatacgaacggattgtacaacaggagttggcaacc

SEQ ID NO: 115629 - DNA, 60 bp, Artificial
  Synthetic oligonucleotide
ttcgatggataagcgagacagtttcagggcctgtcgtgatacgaacggattgtacaacag

SEQ ID NO: 115630 - DNA, 60 bp, Artificial
  Synthetic oligonucleotide
gagaaggctgcctggagtatctgaacccgcgaagtatgaggcgtacgtagtgtgcggacc

SEQ ID NO: 115631 - DNA, 60 bp, Artificial
  Synthetic oligonucleotide
gaggtgtagagagtcaaagctacagcgaattttgcctgagttatccatggtgtcctacgt

SEQ ID NO: 115632 - DNA, 56 bp, Artificial
  Synthetic oligonucleotide
ggggcagctcgcaagtcgtagtagtttggcagaggtgtagagagtcaaagctacag

SEQ ID NO: 115633 - DNA, 60 bp, Artificial
  Synthetic oligonucleotide
tagtgtgcggacctttcagaacggggcaggtcattgctgatgtcctgcgaacggccgagg

SEQ ID NO: 115634 - DNA, 60 bp, Artificial
  Synthetic oligonucleotide
gtaaaacgtatccagctgcagaagctagagagcagattgcagcagcaggaaggcttgggg

SEQ ID NO: 115635 - DNA, 60 bp, Artificial
  Synthetic oligonucleotide
gcagcagcaggaaggcttgggggcagctcgcaagtcgtagtagtttggcagaggtgtaga

SEQ ID NO: 115636 - DNA, 60 bp, Artificial
  Synthetic oligonucleotide
gtcctacgtccccgaagatgtaattctgggctttaagagagctcgcgagaaggaggattt

SEQ ID NO: 115637 - DNA, 60 bp, Artificial
  Synthetic oligonucleotide
aaggaggatttttctcagtggtgtggatggttatatagaagtgttttagaggcgatgcga

SEQ ID NO: 115638 - DNA, 60 bp, Artificial
  Synthetic oligonucleotide
gagagtcaaagctacagcgaattttgcctgagttatccatggtgtcctacgtccccgaag

SEQ ID NO: 115639 - DNA, 60 bp, Artificial
  Synthetic oligonucleotide
tgtcctacgtccccgaagatgtaattctgggctttaagagagctcgcgagaaggaggatt

SEQ ID NO: 115640 - DNA, 60 bp, Artificial
  Synthetic oligonucleotide
tgtacaacaggagttggcaacctctggcccaatggtagtggacatttctactatccttat

SEQ ID NO: 115641 - DNA, 60 bp, Artificial
  Synthetic oligonucleotide
caggagttggcaacctctggcccaatggtagtggacatttctactatccttatgaaagga

SEQ ID NO: 115642 - DNA, 60 bp, Artificial
  Synthetic oligonucleotide
cagtggtgtggatggttatatagaagtgttttagaggcgatgcgaatgattgaccatggt

SEQ ID NO: 115643 - DNA, 60 bp, Artificial
  Synthetic oligonucleotide
gggcggagggaccccagtgggatgtgaaaagttatgtagcgggttttaacttcgttacga

SEQ ID NO: 115644 - DNA, 60 bp, Artificial
  Synthetic oligonucleotide
ggagggaccccagtgggatgtgaaaagttatgtagcgggttttaacttcgttacgagggc

SEQ ID NO: 115645 - DNA, 60 bp, Artificial
  Synthetic oligonucleotide
gcggttaggaagatggcagcagagcatcatctagctcgacctcaactgacctcgagaagg

SEQ ID NO: 115646 - DNA, 60 bp, Artificial
  Synthetic oligonucleotide
ggcagcagagcatcatctagctcgacctcaactgacctcgagaaggctgcctggagtatc

SEQ ID NO: 115647 - DNA, 60 bp, Artificial
  Synthetic oligonucleotide
ctcgagaaggctgcctggagtatctgaacccgcgaagtatgaggcgtacgtagtgtgcgg

SEQ ID NO: 115648 - DNA, 60 bp, Artificial
  Synthetic oligonucleotide
cttttctgggattgttgcacatcaagcctatgatccgattcgcagggaccacatgctcct

SEQ ID NO: 115649 - DNA, 60 bp, Artificial
  Synthetic oligonucleotide
gggattgttgcacatcaagcctatgatccgattcgcagggaccacatgctccttcgttcg

SEQ ID NO: 115650 - DNA, 60 bp, Artificial
  Synthetic oligonucleotide
ctgatggatctggtaaaacgtatccagctgcagaagctagagagcagattgcagcagcag

SEQ ID NO: 115651 - DNA, 60 bp, Artificial
  Synthetic oligonucleotide
cgagctcgagagataggatggagaaagtggggtactttcacttgcatcgtgtcaacatga

SEQ ID NO: 115652 - DNA, 60 bp, Artificial
  Synthetic oligonucleotide
acatgctccttcgttcgatgaaactccatttcggacctaattccaagctcctatggttgg

SEQ ID NO: 115653 - DNA, 60 bp, Artificial
  Synthetic oligonucleotide
gctccttcgttcgatgaaactccatttcggacctaattccaagctcctatggttgggaga

SEQ ID NO: 115654 - DNA, 51 bp, Artificial
  Synthetic oligonucleotide
ctatccttatgaaaggaaaacgaagtttcggtatggtacatttattgattg

SEQ ID NO: 115655 - DNA, 60 bp, Artificial
  Synthetic oligonucleotide
ggcgatgcgaatgattgaccatggtgtacgtgatttttcacccttgacagagcgtggagt

SEQ ID NO: 115656 - DNA, 60 bp, Artificial
  Synthetic oligonucleotide
atcaagtagaggctgctcattacggtatgcgtaccactcgtgtcaagcgtgcggatggga

SEQ ID NO: 115657 - DNA, 60 bp, Artificial
  Synthetic oligonucleotide
agcgtggagttgtgtatcaagtagaggctgctcattacggtatgcgtaccactcgtgtca

SEQ ID NO: 115658 - DNA, 60 bp, Artificial
  Synthetic oligonucleotide
ctacttggtcactatggggatgatcaaacttacgaggccttgagagtaagcgccttattt

SEQ ID NO: 115659 - DNA, 52 bp, Artificial
  Synthetic oligonucleotide
actcgtgtcaagcgtgcggatgggactatcgattatcagggattatcatgga

SEQ ID NO: 115660 - DNA, 60 bp, Artificial
  Synthetic oligonucleotide
cgccttatttattcgagctcgagagataggatggagaaagtggggtactttcacttgcat

SEQ ID NO: 115661 - DNA, 60 bp, Artificial
  Synthetic oligonucleotide
ggggatgatcaaacttacgaggccttgagagtaagcgccttatttattcgagctcgagag

SEQ ID NO: 115662 - DNA, 58 bp, Artificial
  Synthetic oligonucleotide
tcacttgcatcgtgtcaacatgatgtgacacaccctcatatagggatcccttgcagtc

SEQ ID NO: 115663 - DNA, 60 bp, Artificial
  Synthetic oligonucleotide
ggggagaacgattgtgttgttcgggtgtcattcagaaggagaggttcttgctgatggatc

SEQ ID NO: 115664 - DNA, 60 bp, Artificial
  Synthetic oligonucleotide
ggcttacggtggttgtgcactcgtctttgctctaagtcgactaatgtaggggggagaacg

SEQ ID NO: 115665 - DNA, 50 bp, Artificial
  Synthetic oligonucleotide
gagcttcagcagcagcggcttaccaggcgggtttcttgcgggcgttttac

SEQ ID NO: 115666 - DNA, 60 bp, Artificial
  Synthetic oligonucleotide
gctctacctcatcaacatcgagagtgtgggctttagagagggagcttcagcagcagcggc

SEQ ID NO: 115667 - DNA, 60 bp, Artificial
  Synthetic oligonucleotide
gcctggtgagctctacctcatcaacatcgagagtgtgggctttagagagggagcttcagc

SEQ ID NO: 115668 - DNA, 60 bp, Artificial
  Synthetic oligonucleotide
cggccgaggatttggcttggagggaaatgcttggtgtgctgaagacactaatccatgatg

SEQ ID NO: 115669 - DNA, 60 bp, Artificial
  Synthetic oligonucleotide
acggccgaggatttggcttggagggaaatgcttggtgtgctgaagacactaatccatgat

SEQ ID NO: 115670 - DNA, 60 bp, Artificial
  Synthetic oligonucleotide
ttcagaacggggcaggtcattgctgatgtcctgcgaacggccgaggatttggcttggagg

SEQ ID NO: 115671 - DNA, 60 bp, Artificial
  Synthetic oligonucleotide
tccaggaaaacgacaaattctagttgttaacgatccaaacaatgacttcgatatacatga

SEQ ID NO: 115672 - DNA, 60 bp, Artificial
  Synthetic oligonucleotide
acttgtggttgatggggacacagtcaacgcgtcttatataacagctctataaaatcgaaa

SEQ ID NO: 115673 - DNA, 60 bp, Artificial
  Synthetic oligonucleotide
ggcttggtttgcttatcaatcgtaaactaagaccagaggataatctgtcactgatcaccg

SEQ ID NO: 115674 - DNA, 60 bp, Artificial
  Synthetic oligonucleotide
gtccgagtcatacagaagacccttaaagtataagtcaaaggggataatcgctgaggcatc

SEQ ID NO: 115675 - DNA, 60 bp, Artificial
  Synthetic oligonucleotide
gatcaccgatcctgacttgatcgccttagttgagtattcacccgcttggtacccgttcgc

SEQ ID NO: 115676 - DNA, 60 bp, Artificial
  Synthetic oligonucleotide
aattacgttgacagcgaaaacacaagagaagtagttgaggggttgaggatgatgggaatg

SEQ ID NO: 115677 - DNA, 60 bp, Artificial
  Synthetic oligonucleotide
tcgagtcaaccaatttcactttaagtttggaacctgtacctgtggactactctcaagata

SEQ ID NO: 115678 - DNA, 60 bp, Artificial
  Synthetic oligonucleotide
ttcaggtatgtggagggattgtctactagctctcgactttagggaggatatcatccaacc

SEQ ID NO: 115679 - DNA, 60 bp, Artificial
  Synthetic oligonucleotide
tgtctttgctaggacggttgggccgagtatagtgtggagtcgttctgatatcgagtcaac

SEQ ID NO: 115680 - DNA, 60 bp, Artificial
  Synthetic oligonucleotide
ttccaatttgaataagttggttcacgtagcacccagtaatagtaacaaacagtctcttgg

SEQ ID NO: 115681 - DNA, 60 bp, Artificial
  Synthetic oligonucleotide
gagtgtttaacagaaggtgctctatacattatgcctgatccaatattccggtcgcacatg

SEQ ID NO: 115682 - DNA, 60 bp, Artificial
  Synthetic oligonucleotide
ggctcgtgacgtagctcaggaaaatcacatggaactatcagctaaaagaacggtcgtcgg

SEQ ID NO: 115683 - DNA, 60 bp, Artificial
  Synthetic oligonucleotide
cggtcgtcggtaattgcgtaaccgaacatatcaagatattcgtagctcgtgggttcatca

SEQ ID NO: 115684 - DNA, 60 bp, Artificial
  Synthetic oligonucleotide
gcctcagggcgatgtcatatgctgatagacttaatacgatatacgatatattcatgacaa

SEQ ID NO: 115685 - DNA, 60 bp, Artificial
  Synthetic oligonucleotide
gttcgccattggcggaccggaaatgcttgttggcgctcccgagattagaggtatggctag

SEQ ID NO: 115686 - DNA, 60 bp, Artificial
  Synthetic oligonucleotide
ggctagattcatgcaccggtttgataatgagtatttcagtgttatgaatgatctgtatgc

SEQ ID NO: 115687 - DNA, 60 bp, Artificial
  Synthetic oligonucleotide
gtatgctacattacgtgacaactcaggtggtaagaaatttatcgatgacttgactggttc

SEQ ID NO: 115688 - DNA, 60 bp, Artificial
  Synthetic oligonucleotide
ctttcatgtgtgctacaacgaacgatccaagctattttgctgcagcattcgatttcgccc

SEQ ID NO: 115689 - DNA, 60 bp, Artificial
  Synthetic oligonucleotide
accggccgttaggctactaagtaacagaccgaagaatacattagctagtacgcttgaggg

SEQ ID NO: 115690 - DNA, 60 bp, Artificial
  Synthetic oligonucleotide
cgcttgagggtatagttggaactacatacacgggcgctttaccgcatgatgtcatggctc

SEQ ID NO: 115691 - DNA, 60 bp, Artificial
  Synthetic oligonucleotide
tggtcaatgcagggtctcgtttggtgagaggcacaagagctaaacgtatcatcaccccaa

SEQ ID NO: 115692 - DNA, 60 bp, Artificial
  Synthetic oligonucleotide
attcacccgcttggtacccgttcgctctacgaatcaatcaagctttggatgatggactca

SEQ ID NO: 115693 - DNA, 60 bp, Artificial
  Synthetic oligonucleotide
gtgtggcagacgaagctccattatacgcattttgtgacatagtgaagtactgtctgactg

SEQ ID NO: 115694 - DNA, 60 bp, Artificial
  Synthetic oligonucleotide
ctttgttcggaagcgcgatttcttcagattcaacggtaaagacatggtctgctcgagctc

SEQ ID NO: 115695 - DNA, 60 bp, Artificial
  Synthetic oligonucleotide
ctgatgttataagatgttggctgatcgacaccattcctgaagaggtcgagattggtggcg

SEQ ID NO: 115696 - DNA, 60 bp, Artificial
  Synthetic oligonucleotide
tggtggcgaaatattcaagttgagagatgagatggtcagacgtgtggcagacgaagctcc

SEQ ID NO: 115697 - DNA, 60 bp, Artificial
  Synthetic oligonucleotide
caagtttcccagacccgagaacgattttctaggtttcaagtttatcattgaagccgacac

SEQ ID NO: 115698 - DNA, 60 bp, Artificial
  Synthetic oligonucleotide
gcttatggacacaatggattacgatggcaaattcgcagaatatatggaaacggaatttct

SEQ ID NO: 115699 - DNA, 60 bp, Artificial
  Synthetic oligonucleotide
gcaaaagggcggttagatttcatgtctcttaggagtaagttcatcattcagtccgagtca

SEQ ID NO: 115700 - DNA, 60 bp, Artificial
  Synthetic oligonucleotide
ccgatgctcatgcagacggagtgagacgtttcgctgacaagttcacaggagatgatgtca

SEQ ID NO: 115701 - DNA, 60 bp, Artificial
  Synthetic oligonucleotide
cgttgtagggttagctgaaaggaacacatcaattcccgagtctgttgaaccgataaaccg

SEQ ID NO: 115702 - DNA, 60 bp, Artificial
  Synthetic oligonucleotide
acacagttacgtaatacggctacaaacaaaggtcacacagacgaagttctcattaagttc

SEQ ID NO: 115703 - DNA, 60 bp, Artificial
  Synthetic oligonucleotide
gtctctggtgaacatcatacaacgtggtaaattgactaagtactccaaaccgaaatacca

SEQ ID NO: 115704 - DNA, 60 bp, Artificial
  Synthetic oligonucleotide
cggaggtatagacattcttagtgctttgagtgaagttgattcaggtatgtggagggattg

SEQ ID NO: 115705 - DNA, 60 bp, Artificial
  Synthetic oligonucleotide
gaaccgataaaccgattattacgtaagtatcctcacatgcacccaagctacatcggaggt

SEQ ID NO: 115706 - DNA, 60 bp, Artificial
  Synthetic oligonucleotide
ggatgatactcgctatgtgtggttacactggtactcatgctgctactgcacttgtcaatc

SEQ ID NO: 115707 - DNA, 60 bp, Artificial
  Synthetic oligonucleotide
aaataccattacgtcaactggtttattcggccatataatggggttaagtacgtatcaccg

SEQ ID NO: 115708 - DNA, 60 bp, Artificial
  Synthetic oligonucleotide
ggggttgaggatgatgggaatgcccaagaatgctagattacttcacaacttacagactgc

SEQ ID NO: 115709 - DNA, 60 bp, Artificial
  Synthetic oligonucleotide
gactacataaacatcggttttgcaaaggacggtataaaggacatttcagcgactccggac

SEQ ID NO: 115710 - DNA, 60 bp, Artificial
  Synthetic oligonucleotide
tcagcgactccggacatacttttcaaggggggtacttcttcagctagtagtactaacacc

SEQ ID NO: 115711 - DNA, 60 bp, Artificial
  Synthetic oligonucleotide
gctggttaaccgacgtttatcacagaacaccaactcacagattaatatggcttggtttgc

SEQ ID NO: 115712 - DNA, 60 bp, Artificial
  Synthetic oligonucleotide
gatgtagacaacaaaactgtgtttgatactagtgggccgaagaagttagtgctgactcga

SEQ ID NO: 115713 - DNA, 60 bp, Artificial
  Synthetic oligonucleotide
cactttaaacgtaagaacgactatgatgtcagtcttgacactaggatcactaacaaacgt

SEQ ID NO: 115714 - DNA, 60 bp, Artificial
  Synthetic oligonucleotide
gagcatctctggacccgttaagtattactcgccttttctgatggatgaagatgtagacaa

SEQ ID NO: 115715 - DNA, 60 bp, Artificial
  Synthetic oligonucleotide
cccagtaattctcagaccaaataatgtggaagtggagtttctactaaacggacagataat

SEQ ID NO: 115716 - DNA, 60 bp, Artificial
  Synthetic oligonucleotide
ttctactaaacggacagataataaatacttatcaagcaagatttggaacaattatagcca

SEQ ID NO: 115717 - DNA, 60 bp, Artificial
  Synthetic oligonucleotide
gttgctggatttgattattcatgcgcgatcaatgcaccagctaatacacaacaatttgaa

SEQ ID NO: 115718 - DNA, 60 bp, Artificial
  Synthetic oligonucleotide
tattcatgcgcgatcaatgcaccagctaatacacaacaatttgaacacgttgtacagctc

SEQ ID NO: 115719 - DNA, 60 bp, Artificial
  Synthetic oligonucleotide
atgataatttaatgggtacgatgtggttaaatgctggatcagagattcaggttgctggat

SEQ ID NO: 115720 - DNA, 60 bp, Artificial
  Synthetic oligonucleotide
gtacgatgtggttaaatgctggatcagagattcaggttgctggatttgattattcatgcg

SEQ ID NO: 115721 - DNA, 60 bp, Artificial
  Synthetic oligonucleotide
gcttcccgagagtagtcaattcagctgacggagcaaccacatggtattttaacccagtaa

SEQ ID NO: 115722 - DNA, 60 bp, Artificial
  Synthetic oligonucleotide
atggtattttaacccagtaattctcagaccaaataatgtggaagtggagtttctactaaa

SEQ ID NO: 115723 - DNA, 52 bp, Artificial
  Synthetic oligonucleotide
acaatttgaacacgttgtacagctccgtagagtgttgactacagctacgata

SEQ ID NO: 115724 - DNA, 60 bp, Artificial
  Synthetic oligonucleotide
gaaagatttagcttcccgagagtagtcaattcagctgacggagcaaccacatggtatttt

SEQ ID NO: 115725 - DNA, 58 bp, Artificial
  Synthetic oligonucleotide
tacgtcaagctgcttgaactctataagtaaggatgcgtttacgcattcgctacataga

SEQ ID NO: 115726 - DNA, 60 bp, Artificial
  Synthetic oligonucleotide
tacgtcaagctgcttgaactctataagtaaggatgcgtttacgcattcgctacatagagt

SEQ ID NO: 115727 - DNA, 60 bp, Artificial
  Synthetic oligonucleotide
cgtctgttagacaggaatacgcgataccagttggaccagtttttccgccaggtatgaatt

SEQ ID NO: 115728 - DNA, 60 bp, Artificial
  Synthetic oligonucleotide
caacagtaggactcacacttagaattgaatctgcaatttgtgaatctgtgcttgctgatg

SEQ ID NO: 115729 - DNA, 60 bp, Artificial
  Synthetic oligonucleotide
catttgaacatcatgcaacagtaggactcacacttagaattgaatctgcaatttgtgaat

SEQ ID NO: 115730 - DNA, 60 bp, Artificial
  Synthetic oligonucleotide
caccgaatatgacaccagctgtagcggcattatttccgaatgcgcagccatttgaacatc

SEQ ID NO: 115731 - DNA, 60 bp, Artificial
  Synthetic oligonucleotide
accaccgaatatgacaccagctgtagcggcattatttccgaatgcgcagccatttgaaca

SEQ ID NO: 115732 - DNA, 60 bp, Artificial
  Synthetic oligonucleotide
tttgatacaattaggttatcgtttcagttgatgagaccaccgaatatgacaccagctgta

SEQ ID NO: 115733 - DNA, 60 bp, Artificial
  Synthetic oligonucleotide
attatagccagaaattttgatacaattaggttatcgtttcagttgatgagaccaccgaat

SEQ ID NO: 115734 - DNA, 50 bp, Artificial
  Synthetic oligonucleotide
attgcaccgcaatcagattcacttagaaaactgtcaggcatcaagtttaa

SEQ ID NO: 115735 - DNA, 60 bp, Artificial
  Synthetic oligonucleotide
ttcgattttggactacttggaacgactctattaaatttagacgctaactatgttgaaacg

SEQ ID NO: 115736 - DNA, 60 bp, Artificial
  Synthetic oligonucleotide
agacagagaacaggtttcacatttcataaaccgaatattttcccttattcagcatcattc

SEQ ID NO: 115737 - DNA, 60 bp, Artificial
  Synthetic oligonucleotide
aatttgcaaaatagaagacagagaacaggtttcacatttcataaaccgaatattttccct

SEQ ID NO: 115738 - DNA, 60 bp, Artificial
  Synthetic oligonucleotide
gttagaaattggaatttcgattttggactacttggaacgactctattaaatttagacgct

SEQ ID NO: 115739 - DNA, 60 bp, Artificial
  Synthetic oligonucleotide
cgtgagtgatctaattcagcaatttaatcaaatgctaattactatgaatggaaatgagtt

SEQ ID NO: 115740 - DNA, 60 bp, Artificial
  Synthetic oligonucleotide
agcatcattcacactgaacagatcgcaaccagctcatgataatttaatgggtacgatgtg

SEQ ID NO: 115741 - DNA, 60 bp, Artificial
  Synthetic oligonucleotide
tattttcccttattcagcatcattcacactgaacagatcgcaaccagctcatgataattt

SEQ ID NO: 115742 - DNA, 60 bp, Artificial
  Synthetic oligonucleotide
gtttgatggacagaagatgggattttatcgatgaacagttgagagttcaatttattttta

SEQ ID NO: 115743 - DNA, 60 bp, Artificial
  Synthetic oligonucleotide
tttatttttagagcttatgacttgcgagcatatcaaaacgggcgtgtgtctcaaattctt

SEQ ID NO: 115744 - DNA, 60 bp, Artificial
  Synthetic oligonucleotide
atctaatgtatttcaagccgcagacgatgttaatattactaattattggcgtttgatgga

SEQ ID NO: 115745 - DNA, 60 bp, Artificial
  Synthetic oligonucleotide
caagccgcagacgatgttaatattactaattattggcgtttgatggacagaagatgggat

SEQ ID NO: 115746 - DNA, 60 bp, Artificial
  Synthetic oligonucleotide
ctttctaacagcttattatttgctggattaaatctaattggcaaacgtagctgcatccca

SEQ ID NO: 115747 - DNA, 60 bp, Artificial
  Synthetic oligonucleotide
aacgtagctgcatcccaattaattctaacttttcaattccagattatcttgactattggt

SEQ ID NO: 115748 - DNA, 60 bp, Artificial
  Synthetic oligonucleotide
gagcttatgacttgcgagcatatcaaaacgggcgtgtgtctcaaattctttctaacagct

SEQ ID NO: 115749 - DNA, 60 bp, Artificial
  Synthetic oligonucleotide
tcaaattctttctaacagcttattatttgctggattaaatctaattggcaaacgtagctg

SEQ ID NO: 115750 - DNA, 60 bp, Artificial
  Synthetic oligonucleotide
gcatcccaattaattctaacttttcaattccagattatcttgactattggtttccaaccg

SEQ ID NO: 115751 - DNA, 60 bp, Artificial
  Synthetic oligonucleotide
gaacaggtattcttatagctcatattgacgtcgatttctggtataatgtattcatgagaa

SEQ ID NO: 115752 - DNA, 60 bp, Artificial
  Synthetic oligonucleotide
acaaaagacgatgtaattaatgctcaacgttcgttaattagttattatttcggtagagtt

SEQ ID NO: 115753 - DNA, 51 bp, Artificial
  Synthetic oligonucleotide
ttttgtcaaaattgtcaagagacgaccagtgaacaagatctcgccgcactt

SEQ ID NO: 115754 - DNA, 60 bp, Artificial
  Synthetic oligonucleotide
tttatcagagatggatcatataatttttgtcaaaattgtcaagagacgaccagtgaacaa

SEQ ID NO: 115755 - DNA, 60 bp, Artificial
  Synthetic oligonucleotide
cgttaatattcttagaatgaatgctactatagcaatgggtgacgcttttatcagagatgg

SEQ ID NO: 115756 - DNA, 60 bp, Artificial
  Synthetic oligonucleotide
agagaggcaataaaaagttatactattccaaatgattgtcctgtggtatgtaattctatt

SEQ ID NO: 115757 - DNA, 60 bp, Artificial
  Synthetic oligonucleotide
gccaagcgtacatggttattcaacgtcagaaacatctcttgatcattatattcgtatgaa

SEQ ID NO: 115758 - DNA, 60 bp, Artificial
  Synthetic oligonucleotide
tgccaagcgtacatggttattcaacgtcagaaacatctcttgatcattatattcgtatga

SEQ ID NO: 115759 - DNA, 60 bp, Artificial
  Synthetic oligonucleotide
cggtagagttttcaaaagcgtaactttaacatgggattcgaaatgtaatctgccaagcgt

SEQ ID NO: 115760 - DNA, 60 bp, Artificial
  Synthetic oligonucleotide
gcgcaatgcctgtcttgtaactgatagtggaattcgaactgagctgcaaaatgaaccagt

SEQ ID NO: 115761 - DNA, 57 bp, Artificial
  Synthetic oligonucleotide
gtcattatgttaattaaagattatagtgaaattaaagaaacaccaatttatcagcaa

SEQ ID NO: 115762 - DNA, 60 bp, Artificial
  Synthetic oligonucleotide
gaagtcagacctccagaactccaacttttcatttatggcgacattcattttcacgaccga

SEQ ID NO: 115763 - DNA, 60 bp, Artificial
  Synthetic oligonucleotide
tatgcgttaatattcttagaatgaatgctactatagcaatgggtgacgcttttatcagag

SEQ ID NO: 115764 - DNA, 60 bp, Artificial
  Synthetic oligonucleotide
ccacctcacccagaatggcactttcagactacttcagcgcagttagttgtacatttgacg

SEQ ID NO: 115765 - DNA, 60 bp, Artificial
  Synthetic oligonucleotide
gtacatttgacgaagaagtcagacctccagaactccaacttttcatttatggcgacattc

SEQ ID NO: 115766 - DNA, 53 bp, Artificial
  Synthetic oligonucleotide
gacgactcagtaatggaactagcctacagcgaaatcaacgttggatcaacccc

SEQ ID NO: 115767 - DNA, 60 bp, Artificial
  Synthetic oligonucleotide
ccccacctcacccagaatggcactttcagactacttcagcgcagttagttgtacatttga

SEQ ID NO: 115768 - DNA, 60 bp, Artificial
  Synthetic oligonucleotide
gacgactcagtaatggaactagcctacagcgaaatcaacgttggatcaacccccacctca

SEQ ID NO: 115769 - DNA, 60 bp, Artificial
  Synthetic oligonucleotide
gtgtctcgctggatgagttctttatgtttctattggtcgtggaatcttaggcatgtgtca

SEQ ID NO: 115770 - DNA, 60 bp, Artificial
  Synthetic oligonucleotide
tactgaatttctgagtgtctcgctggatgagttctttatgtttctattggtcgtggaatc

SEQ ID NO: 115771 - DNA, 60 bp, Artificial
  Synthetic oligonucleotide
attacattacttcccagtatactatggccaatggtcagtcagttaaccaaatctaatgta

SEQ ID NO: 115772 - DNA, 60 bp, Artificial
  Synthetic oligonucleotide
ccagtatactatggccaatggtcagtcagttaaccaaatctaatgtatttcaagccgcag

SEQ ID NO: 115773 - DNA, 50 bp, Artificial
  Synthetic oligonucleotide
atttcgatgaaaatgattatcttgatctcgagacgttaaatcttgaagct

SEQ ID NO: 115774 - DNA, 58 bp, Artificial
  Synthetic oligonucleotide
tacactactgagatattcgagaaaatagatagaataccaaacttcgtctatctttttg

SEQ ID NO: 115775 - DNA, 60 bp, Artificial
  Synthetic oligonucleotide
ttggaatgattatgatttatttgctgatcttcgcgttacagatacttcagatgagtttta

SEQ ID NO: 115776 - DNA, 60 bp, Artificial
  Synthetic oligonucleotide
atgagttttatactttaagttcgatgttaaccgagcatatgcaatcaataattacattac

SEQ ID NO: 115777 - DNA, 60 bp, Artificial
  Synthetic oligonucleotide
atgaaccagttactgtaccagtaactcttccaactttgccgactttttcaagtactaaaa

SEQ ID NO: 115778 - DNA, 60 bp, Artificial
  Synthetic oligonucleotide
agtactaaaaattaatcctgttaattcatgtcaattacgcgattacataagatgagttgt

SEQ ID NO: 115779 - DNA, 60 bp, Artificial
  Synthetic oligonucleotide
gatgagttgttttaatggatagtgagcgccactatgaatatggttcgtattcaaactctc

SEQ ID NO: 115780 - DNA, 60 bp, Artificial
  Synthetic oligonucleotide
gttgttttaatggatagtgagcgccactatgaatatggttcgtattcaaactctcatggc

SEQ ID NO: 115781 - DNA, 60 bp, Artificial
  Synthetic oligonucleotide
gaaacgaatgagtcaataattacgtcatacgatggttgtctaggtatgtttggtttatca

SEQ ID NO: 115782 - DNA, 53 bp, Artificial
  Synthetic oligonucleotide
aggtacaaatgttgagaattcggtatctggacatgtgtataatgcattgatct

SEQ ID NO: 115783 - DNA, 60 bp, Artificial
  Synthetic oligonucleotide
tgagcatatcaagacggtcgcatcaaatacgattttcggaatcagcaacttcgtattcag

SEQ ID NO: 115784 - DNA, 60 bp, Artificial
  Synthetic oligonucleotide
ttaaaatgactgccatggatttagaactaccgatatctgcgaaattactacaccacccaa

SEQ ID NO: 115785 - DNA, 60 bp, Artificial
  Synthetic oligonucleotide
gactgccatggatttagaactaccgatatctgcgaaattactacaccacccaactacaga

SEQ ID NO: 115786 - DNA, 59 bp, Artificial
  Synthetic oligonucleotide
caatacaatcactgagaacgtgtttatacaacaaccgtttaaattgagaacattaagga

SEQ ID NO: 115787 - DNA, 60 bp, Artificial
  Synthetic oligonucleotide
gagaagatgtggttaaattggttaacaatcagaaaaatgcgttaataactgtaaggatta

SEQ ID NO: 115788 - DNA, 60 bp, Artificial
  Synthetic oligonucleotide
gtaaggattaataatacatttaaggatgaaccaaaagtggggtttaaagatatttacgat

SEQ ID NO: 115789 - DNA, 60 bp, Artificial
  Synthetic oligonucleotide
tgaaacgaatgagtcaataattacgtcatacgatggttgtctaggtatgtttggtttatc

SEQ ID NO: 115790 - DNA, 60 bp, Artificial
  Synthetic oligonucleotide
cttttttagatcatccatcaataaagcagttttcaaatgggccctatttagttaaagata

SEQ ID NO: 115791 - DNA, 60 bp, Artificial
  Synthetic oligonucleotide
gtattaacaaccttatatcaatactatgacatgtatcatgagaagccgataatctacatg

SEQ ID NO: 115792 - DNA, 53 bp, Artificial
  Synthetic oligonucleotide
accaggatggaagctaatgtatgttggatataacggaaatgacacaagagggc

SEQ ID NO: 115793 - DNA, 60 bp, Artificial
  Synthetic oligonucleotide
cgatgacgcaataatagaatatatctactcaaatgaattagacttccagaatttcatact

SEQ ID NO: 115794 - DNA, 63 bp, Artificial
  Synthetic oligonucleotide
gcgttaagacattgcaaatattgaataaatctggtatagctgcggtagaaatacagaaaatgg

SEQ ID NO: 115795 - DNA, 60 bp, Artificial
  Synthetic oligonucleotide
catttttgatttctaatctcactacacataatatattatatctgaattatagcgttaaga

SEQ ID NO: 115796 - DNA, 60 bp, Artificial
  Synthetic oligonucleotide
agcgttaagacattgcaaatattgaataaatctggtatagctgcggtagaaatacagaaa

SEQ ID NO: 115797 - DNA, 60 bp, Artificial
  Synthetic oligonucleotide
gcgacacagtgttcgatatgactgagtgagctaaaaacttaacacactggtcacgatgtg

SEQ ID NO: 115798 - DNA, 60 bp, Artificial
  Synthetic oligonucleotide
ggaaaacgtggaggaagattgtagaagaacagaccgctaacaatttgaatatcgcataca

SEQ ID NO: 115799 - DNA, 60 bp, Artificial
  Synthetic oligonucleotide
gattggaaaacgtggaggaagattgtagaagaacagaccgctaacaatttgaatatcgca

SEQ ID NO: 115800 - DNA, 60 bp, Artificial
  Synthetic oligonucleotide
tatatgtggatatacgaacggatagagaaaatgcagattggaaaacgtggaggaagattg

SEQ ID NO: 115801 - DNA, 60 bp, Artificial
  Synthetic oligonucleotide
aagataattcgatattatatgtggatatacgaacggatagagaaaatgcagattggaaaa

SEQ ID NO: 115802 - DNA, 60 bp, Artificial
  Synthetic oligonucleotide
tgatttacatcataaagaactgttttatgcaagtgacgtgaccaaacttaaagataattc

SEQ ID NO: 115803 - DNA, 60 bp, Artificial
  Synthetic oligonucleotide
tttgagacatgggacccattggatacaccatactctgatttacatcataaagaactgttt

SEQ ID NO: 115804 - DNA, 60 bp, Artificial
  Synthetic oligonucleotide
tactctgatctaaaatttgagacatgggacccattggatacaccatactctgatttacat

SEQ ID NO: 115805 - DNA, 60 bp, Artificial
  Synthetic oligonucleotide
tatcaatactatgacatgtatcatgagaagccgataatctacatggtaggatcagcgcct

SEQ ID NO: 115806 - DNA, 60 bp, Artificial
  Synthetic oligonucleotide
catacaaatacttatccacaggtaaagctaaagtgtgttgcgttaaaatgactgccatgg

SEQ ID NO: 115807 - DNA, 60 bp, Artificial
  Synthetic oligonucleotide
gaatatcgcatacaaatacttatccacaggtaaagctaaagtgtgttgcgttaaaatgac

SEQ ID NO: 115808 - DNA, 60 bp, Artificial
  Synthetic oligonucleotide
gatcttaagcgatggatatacttacattcaacaaacaaggctagtattgaaggcggcaga

SEQ ID NO: 115809 - DNA, 60 bp, Artificial
  Synthetic oligonucleotide
tcatttgatcttaagcgatggatatacttacattcaacaaacaaggctagtattgaaggc

SEQ ID NO: 115810 - DNA, 60 bp, Artificial
  Synthetic oligonucleotide
gcggcagatattatgaacacgctccgatagagttgatttacgcatgcagatcggcaaggg

SEQ ID NO: 115811 - DNA, 60 bp, Artificial
  Synthetic oligonucleotide
tattgaaggcggcagatattatgaacacgctccgatagagttgatttacgcatgcagatc

SEQ ID NO: 115812 - DNA, 60 bp, Artificial
  Synthetic oligonucleotide
aatctatgtggcaaacgtaagtggcgtgttatcaacatattttaaactttacaatgcatt

SEQ ID NO: 115813 - DNA, 60 bp, Artificial
  Synthetic oligonucleotide
ttgttcagaatggatgtaaccacgagttacacgtatatgttatcagatgaaatctatgtg

SEQ ID NO: 115814 - DNA, 60 bp, Artificial
  Synthetic oligonucleotide
acaatgcattctataaagagcaaattacgttcggacaatcaagaatgtttattccacata

SEQ ID NO: 115815 - DNA, 64 bp, Artificial
  Synthetic oligonucleotide
gtggcaaacgtaagtggcgtgttatcaacatattttaaactttacaatgcattctataaagagc

SEQ ID NO: 115816 - DNA, 60 bp, Artificial
  Synthetic oligonucleotide
ccacatataacattaagtttcagtaacaagagagtagtgaggataggtagtacgcgattg

SEQ ID NO: 115817 - DNA, 60 bp, Artificial
  Synthetic oligonucleotide
attccacatataacattaagtttcagtaacaagagagtagtgaggataggtagtacgcga

SEQ ID NO: 115818 - DNA, 56 bp, Artificial
  Synthetic oligonucleotide
tgagcatatcaagacggtcgcatcaaatacgattttcggaatcagcaacttcgtat

SEQ ID NO: 115819 - DNA, 60 bp, Artificial
  Synthetic oligonucleotide
ttgatcttgacaactttggatcagatgatgctatttccaagctcggacgtcgaccaagta

SEQ ID NO: 115820 - DNA, 60 bp, Artificial
  Synthetic oligonucleotide
ctttggatcagatgatgctatttccaagctcggacgtcgaccaagtactaaagttcgtca

SEQ ID NO: 115821 - DNA, 60 bp, Artificial
  Synthetic oligonucleotide
cgaccaagtactaaagttcgtcaattcacatacgatttaatgatggtaacatttgtcggt

SEQ ID NO: 115822 - DNA, 60 bp, Artificial
  Synthetic oligonucleotide
atttgtcggttcagtgactcaatatgtttgccctgaatggattggtgagacattgactat

SEQ ID NO: 115823 - DNA, 60 bp, Artificial
  Synthetic oligonucleotide
tccctggctgcaggcgggggcgcgttagccgcggggcgcgcgttccttagatgcgggggg

SEQ ID NO: 115824 - DNA, 60 bp, Artificial
  Synthetic oligonucleotide
gtaaagcatgtcgtaacaactacagaactagcttcgagctttccctgtgtcaattgggac

SEQ ID NO: 115825 - DNA, 60 bp, Artificial
  Synthetic oligonucleotide
gactttcggaagtacgctaggagttatgctttgcgttagagagaatgttatccctggctg

SEQ ID NO: 115826 - DNA, 60 bp, Artificial
  Synthetic oligonucleotide
tttgaacaacctaagaagatgtactcacactcatgacgcttccaactcaaagtcagttac

SEQ ID NO: 115827 - DNA, 60 bp, Artificial
  Synthetic oligonucleotide
ttggtgatccgtatgctatatctagtcatgcaattaacaatgtatctatcagtccatcaa

SEQ ID NO: 115828 - DNA, 60 bp, Artificial
  Synthetic oligonucleotide
ctcattatcgcgtgatgaccctcttcgttttcggtataactataaccacaccaatcttca

SEQ ID NO: 115829 - DNA, 60 bp, Artificial
  Synthetic oligonucleotide
accaatcttcatattttcaatcgagtaattgatagtaacaaagacgttatttctgatctt

SEQ ID NO: 115830 - DNA, 60 bp, Artificial
  Synthetic oligonucleotide
aacgcgcttactagccaatctcgaacaaaattttaactcattatcgcgtgatgaccctct

SEQ ID NO: 115831 - DNA, 60 bp, Artificial
  Synthetic oligonucleotide
ctgatgcttattcaatccttaaatttttgaacgatggccacaactcatgtggatgcgcag

SEQ ID NO: 115832 - DNA, 60 bp, Artificial
  Synthetic oligonucleotide
gatgcgttagaaaaattgaacgtactttcactctacgattttgtgattcagtgtaaccat

SEQ ID NO: 115833 - DNA, 60 bp, Artificial
  Synthetic oligonucleotide
caattgtaattcgatttccaaaacgtaaaccttacttccgtttcaaagatgatgcgttag

SEQ ID NO: 115834 - DNA, 60 bp, Artificial
  Synthetic oligonucleotide
attcttgaaattgctgtttcaattcttaccatttatagtatttacggtggagtaattttc

SEQ ID NO: 115835 - DNA, 60 bp, Artificial
  Synthetic oligonucleotide
aatgctttaataagagttctaataagttaacttctttcatggaaggtataatttgcgcaa

SEQ ID NO: 115836 - DNA, 60 bp, Artificial
  Synthetic oligonucleotide
atttgcgcaatgtcatcagatcttgaattttcacctttcaaaaataccgttttgaacaac

SEQ ID NO: 115837 - DNA, 60 bp, Artificial
  Synthetic oligonucleotide
aagtacgctaggagttatgctttgcgttagagagaatgttatccctggctgcaggcgggg

SEQ ID NO: 115838 - DNA, 51 bp, Artificial
  Synthetic oligonucleotide
aactatcaatttttcggattcaaagattctgttcgagtacatttctcaatt

SEQ ID NO: 115839 - DNA, 60 bp, Artificial
  Synthetic oligonucleotide
ggtgacatttcaacagctagtcgaattggatggaatctggttgatcttgacaactttgga

SEQ ID NO: 115840 - DNA, 60 bp, Artificial
  Synthetic oligonucleotide
gaaacagttagatctaacgcgcttactagccaatctcgaacaaaattttaactcattatc

SEQ ID NO: 115841 - DNA, 60 bp, Artificial
  Synthetic oligonucleotide
ggatgcgcagatcattttgcttgtttcatttctgattacctgacatcaattgacgtactg

SEQ ID NO: 115842 - DNA, 56 bp, Artificial
  Synthetic oligonucleotide
gacaagttgattgaaaatagtatgtttgtatttgttaaacgtccagaaccttcact

SEQ ID NO: 115843 - DNA, 60 bp, Artificial
  Synthetic oligonucleotide
tatttgcaatcgcgtgttgaaccgaaacaagttgaaatgccaacttacgttgaaaagttg

SEQ ID NO: 115844 - DNA, 60 bp, Artificial
  Synthetic oligonucleotide
ttgaacgtactttcactctacgattttgtgattcagtgtaaccatggtgacatttcaaca

SEQ ID NO: 115845 - DNA, 60 bp, Artificial
  Synthetic oligonucleotide
tcaaaacttgcattccaggacttgaaactctgtacgttgagaaagataaactagacttgt

SEQ ID NO: 115846 - DNA, 60 bp, Artificial
  Synthetic oligonucleotide
cgaccaacaaactcttgacggatacacaactgttgcaatcgccattcttgaaattgctgt

SEQ ID NO: 115847 - DNA, 60 bp, Artificial
  Synthetic oligonucleotide
cttgttcaagaaaacgaaaaaatttgagttgtctaaagttgcgattcatgaacattctga

SEQ ID NO: 115848 - DNA, 60 bp, Artificial
  Synthetic oligonucleotide
agtcagttacttcggtactacctggtaaacataaatcttttcgaagcttcctacgatctt

SEQ ID NO: 115849 - DNA, 60 bp, Artificial
  Synthetic oligonucleotide
aagatgtactcacactcatgacgcttccaactcaaagtcagttacttcggtactacctgg

SEQ ID NO: 115850 - DNA, 60 bp, Artificial
  Synthetic oligonucleotide
cgatcaagtgacgtgtatgacaaaattgccaactgtatcacaaggaaacaacaaggaatg

SEQ ID NO: 115851 - DNA, 60 bp, Artificial
  Synthetic oligonucleotide
cggtactacctggtaaacataaatcttttcgaagcttcctacgatcttctcgatcaagtg

SEQ ID NO: 115852 - DNA, 60 bp, Artificial
  Synthetic oligonucleotide
tcatccctgtgcgctacggcttagaagtgtcggacattttgtctacggaaaacattttag

SEQ ID NO: 115853 - DNA, 60 bp, Artificial
  Synthetic oligonucleotide
cacaaggaaacaacaaggaatgttcacacgctctgaaatgtgtatgcattgtgacgtcgg

SEQ ID NO: 115854 - DNA, 60 bp, Artificial
  Synthetic oligonucleotide
gacatgaaggtgcatactcataaatcatccgaaattcagtcattcaagaaaggattttca

SEQ ID NO: 115855 - DNA, 60 bp, Artificial
  Synthetic oligonucleotide
acaatgatgattattcacgaatttgctgatgaaactactcgttccgcaatgaccccccaa

SEQ ID NO: 115856 - DNA, 60 bp, Artificial
  Synthetic oligonucleotide
gaccccccaaatcgtaaaagaaaagaaaatcgaactcgaccaaacattgtcctcaattgt

SEQ ID NO: 115857 - DNA, 60 bp, Artificial
  Synthetic oligonucleotide
cgtaaaagaaaagaaaatcgaactcgaccaaacattgtcctcaattgtagaaacgatcag

SEQ ID NO: 115858 - DNA, 53 bp, Artificial
  Synthetic oligonucleotide
cattgactatgtatgaagaaaaacacgaaggttcatccctgtttgaaaaatct

SEQ ID NO: 115859 - DNA, 60 bp, Artificial
  Synthetic oligonucleotide
gttgatgactcaaaattcgttagctacgctgaaactgaaagctttggtagatacgttgat

SEQ ID NO: 115860 - DNA, 60 bp, Artificial
  Synthetic oligonucleotide
aagctttggtagatacgttgataaacatgaagattacttatacagtcaaactgatgctta

SEQ ID NO: 115861 - DNA, 60 bp, Artificial
  Synthetic oligonucleotide
cgctgaattaggcaatccactgtcaaaacattccagacatgttacttccatcaaaacttg

SEQ ID NO: 115862 - DNA, 60 bp, Artificial
  Synthetic oligonucleotide
gcaatccactgtcaaaacattccagacatgttacttccatcaaaacttgcattccaggac

SEQ ID NO: 115863 - DNA, 60 bp, Artificial
  Synthetic oligonucleotide
ggtttattgtccaaggcgaattttgccaagataccagatgatctgtcaactatcaatttt

SEQ ID NO: 115864 - DNA, 61 bp, Artificial
  Synthetic oligonucleotide
caaacttactacctaaattgttgcgtatttgcgaaatcaagaaagacgttgaatatgtagg

SEQ ID NO: 115865 - DNA, 55 bp, Artificial
  Synthetic oligonucleotide
aagacgttgaatatgtaggatatattgatggaattacaaaggatgaaatgatcgg

SEQ ID NO: 115866 - DNA, 60 bp, Artificial
  Synthetic oligonucleotide
ctgtgttcgaatgtttctatcctaatcatttcatcaagtctgtgaaacgagatgctatca

SEQ ID NO: 115867 - DNA, 60 bp, Artificial
  Synthetic oligonucleotide
aagtttttttcactcatgacattttcgaaagtaaagatgaccacagaaacttccgaaatg

SEQ ID NO: 115868 - DNA, 60 bp, Artificial
  Synthetic oligonucleotide
acgtccctatcattatatcaaggaaggtacaagtgtgaatttttatgatcctgtgttcga

SEQ ID NO: 115869 - DNA, 60 bp, Artificial
  Synthetic oligonucleotide
taaatccgatgccagggccgctcacacgtgctattgcgcgcgccgcctatgtgtagtcca

SEQ ID NO: 115870 - DNA, 60 bp, Artificial
  Synthetic oligonucleotide
taaatccgatgccagggccgctcacacgtgctattgcacgcgccgcctatgtgtagtcca

SEQ ID NO: 115871 - DNA, 60 bp, Artificial
  Synthetic oligonucleotide
acggcgtaaatccgatgccagggccgctcacacgtgctattgcgcgcgccgcctatgtgt

SEQ ID NO: 115872 - DNA, 60 bp, Artificial
  Synthetic oligonucleotide
acggcgtaaatccgatgccagggccgctcacacgtgctattgcacgcgccgcctatgtgt

SEQ ID NO: 115873 - DNA, 60 bp, Artificial
  Synthetic oligonucleotide
ctgtgcgatgcctatcgcctcttgccgctcactgtgctgatagaacccttcgccgtgaca

SEQ ID NO: 115874 - DNA, 60 bp, Artificial
  Synthetic oligonucleotide
cattcctttcacgtgctgtgcgatgcctatcgcctcttgccgctcactgtgctgatagaa

SEQ ID NO: 115875 - DNA, 60 bp, Artificial
  Synthetic oligonucleotide
ggccgtaatgcaacgaaggcggtacaatcccactttccattcctttcacgtgctgtgcga

SEQ ID NO: 115876 - DNA, 60 bp, Artificial
  Synthetic oligonucleotide
tatttcagctgatggccgtaatgcaacgaaggcggtacaatcccactttccattcctttc

SEQ ID NO: 115877 - DNA, 60 bp, Artificial
  Synthetic oligonucleotide
ctggtgcaatcgcaaatgctatttctcgccttatggctggctttgtacctcgtgaaggtg

SEQ ID NO: 115878 - DNA, 60 bp, Artificial
  Synthetic oligonucleotide
cccttcgccgtgacaacgtgaaacagattcttactcgtgaactgccattttcctcggatc

SEQ ID NO: 115879 - DNA, 60 bp, Artificial
  Synthetic oligonucleotide
gctgatagaacccttcgccgtgacaacgtgaaacagattcttactcgtgaactgccattt

SEQ ID NO: 115880 - DNA, 60 bp, Artificial
  Synthetic oligonucleotide
gtaccgttcgatcacatttatcctactggttcagcgacatactgtcctggtgcaatcgca

SEQ ID NO: 115881 - DNA, 60 bp, Artificial
  Synthetic oligonucleotide
gtttatggggaacaagtaccgttcgatcacatttatcctactggttcagcgacatactgt

SEQ ID NO: 115882 - DNA, 60 bp, Artificial
  Synthetic oligonucleotide
gacatactgtcctggtgcaatcgcaaatgctatttctcgccttatggctggctttgtacc

SEQ ID NO: 115883 - DNA, 60 bp, Artificial
  Synthetic oligonucleotide
gagttctcgctccctcaatgaacttgaggatcatgatcagagaggtcgtatgccttggaa

SEQ ID NO: 115884 - DNA, 60 bp, Artificial
  Synthetic oligonucleotide
gctccctcaatgaacttgaggatcatgatcagagaggtcgtatgccttggaagatcatgc

SEQ ID NO: 115885 - DNA, 60 bp, Artificial
  Synthetic oligonucleotide
tgaaatcagtgtattacttccgctaattggatgatccgtgagggtgaccaaacgctactg

SEQ ID NO: 115886 - DNA, 60 bp, Artificial
  Synthetic oligonucleotide
acttccgctaattggatgatccgtgagggtgaccaaacgctactgtctgtctctccagct

SEQ ID NO: 115887 - DNA, 60 bp, Artificial
  Synthetic oligonucleotide
tacctcgctgctgacctgatcgcgtataagtttgtgctcccttacatgcttgacatggta

SEQ ID NO: 115888 - DNA, 60 bp, Artificial
  Synthetic oligonucleotide
cgctgctgacctgatcgcgtataagtttgtgctcccttacatgcttgacatggtagatgg

SEQ ID NO: 115889 - DNA, 60 bp, Artificial
  Synthetic oligonucleotide
tgacatggtagatggtcgtcctcagattgtcctgccttctcataccgtagaagaaatgtt

SEQ ID NO: 115890 - DNA, 60 bp, Artificial
  Synthetic oligonucleotide
ggtcgtcctcagattgtcctgccttctcataccgtagaagaaatgttgaccaacaccagc

SEQ ID NO: 115891 - DNA, 60 bp, Artificial
  Synthetic oligonucleotide
aagaaatgttgaccaacaccagcttgctgaactcgattgatgcttcatttggtatcgaag

SEQ ID NO: 115892 - DNA, 60 bp, Artificial
  Synthetic oligonucleotide
ccaacaccagcttgctgaactcgattgatgcttcatttggtatcgaagcgcgcagtgatc

SEQ ID NO: 115893 - DNA, 60 bp, Artificial
  Synthetic oligonucleotide
ggtatcgaagcgcgcagtgatcaaaggatgactcgtgatgctgctgagatgagttctcgc

SEQ ID NO: 115894 - DNA, 60 bp, Artificial
  Synthetic oligonucleotide
gaagcgcgcagtgatcaaaggatgactcgtgatgctgctgagatgagttctcgctccctc

SEQ ID NO: 115895 - DNA, 60 bp, Artificial
  Synthetic oligonucleotide
actgccattttcctcggatctaatcaactacgcacaccatgtcaattcatcatcccttac

SEQ ID NO: 115896 - DNA, 60 bp, Artificial
  Synthetic oligonucleotide
gaaggtgatgactttgctccgagtggccctattgactacctcgctgctgacctgatcgcg

SEQ ID NO: 115897 - DNA, 60 bp, Artificial
  Synthetic oligonucleotide
gctttgtacctcgtgaaggtgatgactttgctccgagtggccctattgactacctcgctg

SEQ ID NO: 115898 - DNA, 60 bp, Artificial
  Synthetic oligonucleotide
atccgggtcagattgcatctaagtggtcgctgatacgtcgttccggccctactcgtccac

SEQ ID NO: 115899 - DNA, 60 bp, Artificial
  Synthetic oligonucleotide
gccatgaatccgggtcagattgcatctaagtggtcgctgatacgtcgttccggccctact

SEQ ID NO: 115900 - DNA, 60 bp, Artificial
  Synthetic oligonucleotide
ctcagggcgtcgaagcggctcgtttggtagctcaagtttatggggaacaagtaccgttcg

SEQ ID NO: 115901 - DNA, 60 bp, Artificial
  Synthetic oligonucleotide
catcccttactacctctcagggcgtcgaagcggctcgtttggtagctcaagtttatgggg

SEQ ID NO: 115902 - DNA, 60 bp, Artificial
  Synthetic oligonucleotide
cggatctaatcaactacgcacaccatgtcaattcatcatcccttactacctctcagggcg

SEQ ID NO: 115903 - DNA, 60 bp, Artificial
  Synthetic oligonucleotide
ttgatcgtgaactgatggaactggcccttctcatcaaggaacagggcttcgccatgaatc

SEQ ID NO: 115904 - DNA, 60 bp, Artificial
  Synthetic oligonucleotide
atcatgctagcgatgatggcggcccaattgaaggttgagttggacgcgctggcggacgag

SEQ ID NO: 115905 - DNA, 60 bp, Artificial
  Synthetic oligonucleotide
tgccttggaagatcatgctagcgatgatggcggcccaattgaaggttgagttggacgcgc

SEQ ID NO: 115906 - DNA, 60 bp, Artificial
  Synthetic oligonucleotide
gctggcggacgagcgtacggagtcacaagctaatgctcacgttacatccttcggatcccg

SEQ ID NO: 115907 - DNA, 60 bp, Artificial
  Synthetic oligonucleotide
ttggacgcgctggcggacgagcgtacggagtcacaagctaatgctcacgttacatccttc

SEQ ID NO: 115908 - DNA, 60 bp, Artificial
  Synthetic oligonucleotide
ccgtttatttaatcagatgtcggcgttcgttactattgatcgtgaactgatggaactggc

SEQ ID NO: 115909 - DNA, 60 bp, Artificial
  Synthetic oligonucleotide
tacatccttcggatcccgtttatttaatcagatgtcggcgttcgttactattgatcgtga

SEQ ID NO: 115910 - DNA, 60 bp, Artificial
  Synthetic oligonucleotide
gatggaactggcccttctcatcaaggaacagggcttcgccatgaatccgggtcagattgc

SEQ ID NO: 115911 - DNA, 60 bp, Artificial
  Synthetic oligonucleotide
ttggcatcttggacagcaacgtgactcccccttacgctattactgctaccaaattcgagc

SEQ ID NO: 115912 - DNA, 60 bp, Artificial
  Synthetic oligonucleotide
gactagcggtggatacattttctacacttattgcggattgtttggacatggcgaccgcgg

SEQ ID NO: 115913 - DNA, 60 bp, Artificial
  Synthetic oligonucleotide
attgtttggacatggcgaccgcggacatcccacgatggcagttggagttgagaagaagaa

SEQ ID NO: 115914 - DNA, 60 bp, Artificial
  Synthetic oligonucleotide
tgaccgcggacatcccacgatggcagttggagttgagaagaagaaccgcaacgcattcgg

SEQ ID NO: 115915 - DNA, 60 bp, Artificial
  Synthetic oligonucleotide
gacaacgtgatgatcgcgccatgcgtacgcgaaatccgccaccacgcgcattactaatcg

SEQ ID NO: 115916 - DNA, 60 bp, Artificial
  Synthetic oligonucleotide
aaccgcaatgcattcggacgcatgcatcctatgtacgtcgctgcgaattacaaacgtcgc

SEQ ID NO: 115917 - DNA, 60 bp, Artificial
  Synthetic oligonucleotide
aaattcgagcgaaagactagcggtggatacattttctacacttattgcggattgtttgga

SEQ ID NO: 115918 - DNA, 60 bp, Artificial
  Synthetic oligonucleotide
gcagttcattaagcaacagtccatcccatatgttaccgctgacaacgtgatgatcgcgcc

SEQ ID NO: 115919 - DNA, 60 bp, Artificial
  Synthetic oligonucleotide
cctgtactaccgcgaccacagcgtgcgcgtttggaaattgaccaatcctgtgtccatatc

SEQ ID NO: 115920 - DNA, 60 bp, Artificial
  Synthetic oligonucleotide
aatcactggcaacgacgctggcgactcgatcattgataaggcgtactgcgaacctgtcag

SEQ ID NO: 115921 - DNA, 60 bp, Artificial
  Synthetic oligonucleotide
ggcaacgacgctggcgactcgatcattgataaggcgtactgcgaacctgtcagcttcatg

SEQ ID NO: 115922 - DNA, 60 bp, Artificial
  Synthetic oligonucleotide
gcagttcattaaacaacagtccatcccatatgttaccgctgacaacgtgatgatcgcgcc

SEQ ID NO: 115923 - DNA, 60 bp, Artificial
  Synthetic oligonucleotide
catccagacgattgaagtgaacatccagggatatgacgaaattgaaggcgttggcatctt

SEQ ID NO: 115924 - DNA, 60 bp, Artificial
  Synthetic oligonucleotide
agtgaacatccagggatatgacgaaattgaaggcgttggcatcttggacagcaacgtgac

SEQ ID NO: 115925 - DNA, 60 bp, Artificial
  Synthetic oligonucleotide
cgaccgcggacatcccacgatggcagttggagttgagaagaagaaccgcaatgcattcgg

SEQ ID NO: 115926 - DNA, 60 bp, Artificial
  Synthetic oligonucleotide
aagagtgatcaatcctacatctacgtgttcgtcttcctgtactaccgcgaccacagcgtg

SEQ ID NO: 115927 - DNA, 60 bp, Artificial
  Synthetic oligonucleotide
tgacaacgtgatgatcgcgccatgcgtacgcgaaatccgccaccacgcgcattactaatc

SEQ ID NO: 115928 - DNA, 60 bp, Artificial
  Synthetic oligonucleotide
aaccgcaacgcattcggacgcatgcatcctgtgtacgtcgctgcgaattacaaacgtcgc

SEQ ID NO: 115929 - DNA, 60 bp, Artificial
  Synthetic oligonucleotide
tgacaacgtgatgatcgcgccatgcgtacgcgaaatccgccaccacgcgcattattaacc

SEQ ID NO: 115930 - DNA, 60 bp, Artificial
  Synthetic oligonucleotide
attgtttggacatggtgaccgcggacatcccacgatggcagttggagttgagaagaagaa

SEQ ID NO: 115931 - DNA, 60 bp, Artificial
  Synthetic oligonucleotide
ccgccaaacgcctgaattcgactaacgtgaatgtcaagtggtacggcggatccggtccca

SEQ ID NO: 115932 - DNA, 60 bp, Artificial
  Synthetic oligonucleotide
aagtggtacggcggatccggtcccactcgctgtgatcttcgatccaccggtcaacgcgct

SEQ ID NO: 115933 - DNA, 60 bp, Artificial
  Synthetic oligonucleotide
gtctgtgccaactaagatcattatcgaggcaactcaatgcacccttactctccacacccc

SEQ ID NO: 115934 - DNA, 60 bp, Artificial
  Synthetic oligonucleotide
atcgtcacctctcccgtcatgctgcagacccgtacgctcacgagcacacttccggaggtg

SEQ ID NO: 115935 - DNA, 60 bp, Artificial
  Synthetic oligonucleotide
cttccggaggtgccccccctgccgctgcccccctcccttctgtcccatgccaaagctatc

SEQ ID NO: 115936 - DNA, 60 bp, Artificial
  Synthetic oligonucleotide
ccacagttctaccgtgtctgtgccaactaagatcattatcgaggcaactcaatgcaccct

SEQ ID NO: 115937 - DNA, 60 bp, Artificial
  Synthetic oligonucleotide
tccggtcccactcgctgtgatcttcgatccaccggtcaacgcgctcagattcacgctact

SEQ ID NO: 115938 - DNA, 60 bp, Artificial
  Synthetic oligonucleotide
aatgcacccttactctccacacccccgctttcgactttgccacgtcccccccactgtccc

SEQ ID NO: 115939 - DNA, 60 bp, Artificial
  Synthetic oligonucleotide
tttgagtagagctttgggtccgcctggcgtggccgcgtagacccgatgtctgccattcat

SEQ ID NO: 115940 - DNA, 60 bp, Artificial
  Synthetic oligonucleotide
cacgatacagccttcggtgcgttcaatccagcagcgtacgatcaactccttaccaccgcc

SEQ ID NO: 115941 - DNA, 60 bp, Artificial
  Synthetic oligonucleotide
aggttcctggcacgatacagccttcggtgcgttcaatccagcagcgtacgatcaactcct

SEQ ID NO: 115942 - DNA, 60 bp, Artificial
  Synthetic oligonucleotide
ccggcgtcgactcagctggtgcttaccccgacctgacttgctggccggttttgggtgtat

SEQ ID NO: 115943 - DNA, 60 bp, Artificial
  Synthetic oligonucleotide
gcgtcgactcagctggtgcttaccccgacctgacttgctggccggttttgggtgtatttg

SEQ ID NO: 115944 - DNA, 60 bp, Artificial
  Synthetic oligonucleotide
ttgggtgtatttgagtagagctttgggtccgcctggcgtggccgcgtagacccgatgtct

SEQ ID NO: 115945 - DNA, 60 bp, Artificial
  Synthetic oligonucleotide
tgatcgtcacctctcccgtcatgctgcagacccgtacgctcacgagcacacttccggagg

SEQ ID NO: 115946 - DNA, 60 bp, Artificial
  Synthetic oligonucleotide
ctcgagcactcgatcaaagccgccaaatccagcgttgatcgtcacctctcccgtcatgct

SEQ ID NO: 115947 - DNA, 60 bp, Artificial
  Synthetic oligonucleotide
accctcgagaatagactcgagcactcgatcaaagccgccaaatccagcgttgatcgtcac

SEQ ID NO: 115948 - DNA, 57 bp, Artificial
  Synthetic oligonucleotide
gttttagaagacatcggagcaggcatggctcaagacttgatcaacgtttcccaactg

SEQ ID NO: 115949 - DNA, 60 bp, Artificial
  Synthetic oligonucleotide
atcaactccttaccaccgccaaacgcctgaattcgactaacgtgaatgtcaagtggtacg

SEQ ID NO: 115950 - DNA, 60 bp, Artificial
  Synthetic oligonucleotide
tcaacgcgctcagattcacgctactgaccggctcatcatgttcgagctgcccggcgtcga

SEQ ID NO: 115951 - DNA, 60 bp, Artificial
  Synthetic oligonucleotide
tcacgctactgaccggctcatcatgttcgagctgcccggcgtcgactcagctggtgctta

SEQ ID NO: 115952 - DNA, 60 bp, Artificial
  Synthetic oligonucleotide
tcctttttaccaccatacgcacaatgctagatttggagttttggacagtacgaaaatttc

SEQ ID NO: 115953 - DNA, 60 bp, Artificial
  Synthetic oligonucleotide
tgattgtgttagaaaatcgaaatttcaaaaaagaggaatagacactgtttgctggcaata

SEQ ID NO: 115954 - DNA, 60 bp, Artificial
  Synthetic oligonucleotide
taagcatacaacatagatttggaacgtttgagagtcagatttttagttgctttttaatga

SEQ ID NO: 115955 - DNA, 52 bp, Artificial
  Synthetic oligonucleotide
taacggaattcttcaagagtgtgttgttccagttaacgtaatccaaaaagat

SEQ ID NO: 115956 - DNA, 59 bp, Artificial
  Synthetic oligonucleotide
acttcctctcactcaagaagtgatagaaaataaccttaatgatgttgctgtagtcctga

SEQ ID NO: 115957 - DNA, 60 bp, Artificial
  Synthetic oligonucleotide
ataaatcacattctcaaaacgaaaaaactaaatcacccggcccccgtacttccgacagta

SEQ ID NO: 115958 - DNA, 60 bp, Artificial
  Synthetic oligonucleotide
ctaataaatcaggtggacagaaaagtgaagaacctactctatcgaaagagttaaaaggca

SEQ ID NO: 115959 - DNA, 60 bp, Artificial
  Synthetic oligonucleotide
gcatatgtttcaatttgttgattatgtgaaacatcaatctaaagtggtagaattaaagtt

SEQ ID NO: 115960 - DNA, 60 bp, Artificial
  Synthetic oligonucleotide
tgtgtaatacaggtgatgttagttcagtaaaaaattcaggagatatgaaaggtatggatg

SEQ ID NO: 115961 - DNA, 60 bp, Artificial
  Synthetic oligonucleotide
agtaaagctttcacttctctcaatggtgacggtgcttacatgttgattaatcagatgttt

SEQ ID NO: 115962 - DNA, 60 bp, Artificial
  Synthetic oligonucleotide
ggtttcacgtttggagaacatttgttacgtttcaaacgtcttcgtcatttgactgaaagc

SEQ ID NO: 115963 - DNA, 60 bp, Artificial
  Synthetic oligonucleotide
acttcggaatctataataagacgtcactgttattagagtatgaaaaatctgtaggtacaa

SEQ ID NO: 115964 - DNA, 59 bp, Artificial
  Synthetic oligonucleotide
cattgtaactgaacaaggaatgagtatccctttaattaacgattggtcgaaagtaccca

SEQ ID NO: 115965 - DNA, 60 bp, Artificial
  Synthetic oligonucleotide
aattaaagttaaattccaattttttggattgggagactagacacaaatggggtttcacgt

SEQ ID NO: 115966 - DNA, 60 bp, Artificial
  Synthetic oligonucleotide
ttcaacattttacttccttttttacctggttatcatctcaacagtgcttatggtaaacta

SEQ ID NO: 115967 - DNA, 60 bp, Artificial
  Synthetic oligonucleotide
caagacgctcagttcaacattttacttccttttttacctggttatcatctcaacagtgct

SEQ ID NO: 115968 - DNA, 60 bp, Artificial
  Synthetic oligonucleotide
tggtaaactattttcatactccactttgcctactgttcacgatagggatatttctggaac

SEQ ID NO: 115969 - DNA, 60 bp, Artificial
  Synthetic oligonucleotide
caacagtgcttatggtaaactattttcatactccactttgcctactgttcacgataggga

SEQ ID NO: 115970 - DNA, 60 bp, Artificial
  Synthetic oligonucleotide
tttgaagaaatatacaatcgtaaattaagaggcgttgtcattcacgctgctaaatgtttg

SEQ ID NO: 115971 - DNA, 60 bp, Artificial
  Synthetic oligonucleotide
atactccactttgcctactgttcacgatagggatatttctggaactttgggagagattac

SEQ ID NO: 115972 - DNA, 60 bp, Artificial
  Synthetic oligonucleotide
agatagataccataatgtattcgtacgtgatttcatttttgcttatattcatgaattaaa

SEQ ID NO: 115973 - DNA, 60 bp, Artificial
  Synthetic oligonucleotide
gactgaaagcagaaaaaatgagttaggattaggagacatagaagttatggtacataattt

SEQ ID NO: 115974 - DNA, 57 bp, Artificial
  Synthetic oligonucleotide
acgatagggatatttctggaactttgggagagattactggatctttaggtgcttcat

SEQ ID NO: 115975 - DNA, 60 bp, Artificial
  Synthetic oligonucleotide
tcttttttagtgaagataaggaatatactttgaaagaaaagcatcctcagtttgaagaaa

SEQ ID NO: 115976 - DNA, 60 bp, Artificial
  Synthetic oligonucleotide
ttgtcgttgattcaattaacaattgcgtaaagttagggaatgaggttaaatctaaaatgt

SEQ ID NO: 115977 - DNA, 60 bp, Artificial
  Synthetic oligonucleotide
cgagatcttgcaaatgaagaagtgatttcagcacgtttattagctagtaaaaacacagag

SEQ ID NO: 115978 - DNA, 60 bp, Artificial
  Synthetic oligonucleotide
gtgtcccacaatgttgtcgaacaatctattcgttttatatatccttttgttactgtcatg

SEQ ID NO: 115979 - DNA, 60 bp, Artificial
  Synthetic oligonucleotide
cacagagtttcttaggtggttaactatgactagtaccattgtttctaacttcggaatcta

SEQ ID NO: 115980 - DNA, 58 bp, Artificial
  Synthetic oligonucleotide
tttcctgaagtagttcgcaaatggttgtccctacgtaaaaatgatttgtcaaagttaa

SEQ ID NO: 115981 - DNA, 60 bp, Artificial
  Synthetic oligonucleotide
agagacatacactagatatgattaaaataataatggatgtgatatcagctaaagctcaac

SEQ ID NO: 115982 - DNA, 60 bp, Artificial
  Synthetic oligonucleotide
attctgttatgggagatgatgttttggaagtgatcaaaaatggtgtcaaatttcctgaag

SEQ ID NO: 115983 - DNA, 60 bp, Artificial
  Synthetic oligonucleotide
tcatacagatttgcctgtatcgtgtattcttcccagtgttttacatggattattgaatga

SEQ ID NO: 115984 - DNA, 60 bp, Artificial
  Synthetic oligonucleotide
tctcaacaatcaacgtatcaaagacaactcgattttaaagatgattttcgttcttggcct

SEQ ID NO: 115985 - DNA, 60 bp, Artificial
  Synthetic oligonucleotide
taaagatgattttcgttcttggcctaaattatgttatgataagattggatatgttttagc

SEQ ID NO: 115986 - DNA, 60 bp, Artificial
  Synthetic oligonucleotide
cctccagaatgtcgttattttgtgatgaaagatctgatactacgaagagacatacactag

SEQ ID NO: 115987 - DNA, 60 bp, Artificial
  Synthetic oligonucleotide
tacataatttgaacaaatatttagatagtaatagagttcttatgagttttaacagtatct

SEQ ID NO: 115988 - DNA, 60 bp, Artificial
  Synthetic oligonucleotide
atcaatctttaactgttagaacagaatctttggaagaaagagcgtttctcgattcagttt

SEQ ID NO: 115989 - DNA, 60 bp, Artificial
  Synthetic oligonucleotide
cgcactgtgtgctgtcaaattaaggatttatggtgactttgattattcttgtgaacgtga

SEQ ID NO: 115990 - DNA, 60 bp, Artificial
  Synthetic oligonucleotide
atggtgactttgattattcttgtgaacgtgatggagtaattgaacccagtcaagacgctc

SEQ ID NO: 115991 - DNA, 60 bp, Artificial
  Synthetic oligonucleotide
attattcttgtgaacgtgatggagtaattgaacccagtcaagacgctcagttcaacattt

SEQ ID NO: 115992 - DNA, 60 bp, Artificial
  Synthetic oligonucleotide
gtgaacgtgatggagtaattgaacccagtcaagacgctcagttcaacattttacttcctt

SEQ ID NO: 115993 - DNA, 60 bp, Artificial
  Synthetic oligonucleotide
acagttattcaatcccatgcttactctggagttcgactgataaggtgtttccaattctga

SEQ ID NO: 115994 - DNA, 60 bp, Artificial
  Synthetic oligonucleotide
ggacacattagagttgagtgttagtaaattacctgaatacatgaaaaagtttgtcgttga

SEQ ID NO: 115995 - DNA, 60 bp, Artificial
  Synthetic oligonucleotide
ttgctcgttatgtcccgaggttcaatcaagtactttacctctcacctctcacagttattc

SEQ ID NO: 115996 - DNA, 60 bp, Artificial
  Synthetic oligonucleotide
gtcccgaggttcaatcaagtactttacctctcacctctcacagttattcaatcccatgct

SEQ ID NO: 115997 - DNA, 60 bp, Artificial
  Synthetic oligonucleotide
ggccgtagggtgtatttagattatagtattcatagtcttttgctcgttatgtcccgaggt

SEQ ID NO: 115998 - DNA, 60 bp, Artificial
  Synthetic oligonucleotide
catgcttactctggagttcgactgataaggtgtttccaattctgaaactgtgcagttagc

SEQ ID NO: 115999 - DNA, 50 bp, Artificial
  Synthetic oligonucleotide
agctagggtaattgttattgttccgaacgctatacaatcaagtgaactct

SEQ ID NO: 116000 - DNA, 60 bp, Artificial
  Synthetic oligonucleotide
gtaggtacaaaacaagatgtgatggtatccaaacctgattgtaaaattagcattgtaact

SEQ ID NO: 116001 - DNA, 54 bp, Artificial
  Synthetic oligonucleotide
ttttggattgggagactagacacaaatggggtttcacgtttggagaacatttgt

SEQ ID NO: 116002 - DNA, 60 bp, Artificial
  Synthetic oligonucleotide
gatgagcaaactaagtacatcgtgtctaccattactgatggaataaatgctacgattata

SEQ ID NO: 116003 - DNA, 60 bp, Artificial
  Synthetic oligonucleotide
gtagcgactggactgactccttctaagagaatttaataaaacgaaaatgacgatccaagt

SEQ ID NO: 116004 - DNA, 60 bp, Artificial
  Synthetic oligonucleotide
gctgctgttacagtcattgatcagttatatcaaaagttgccttatgatgagcaaactaag

SEQ ID NO: 116005 - DNA, 60 bp, Artificial
  Synthetic oligonucleotide
ccaagttcagaatttgaattgctgtccaggacgttttgtttgtgttcataaaatgacact

SEQ ID NO: 116006 - DNA, 60 bp, Artificial
  Synthetic oligonucleotide
tacgattatatctgttatggctatattgggtttgaataatttgaacagagtacgatacag

SEQ ID NO: 116007 - DNA, 60 bp, Artificial
  Synthetic oligonucleotide
cgatccaagttcagaatttgaattgctgtccaggacgttttgtttgtgttcataaaatga

SEQ ID NO: 116008 - DNA, 60 bp, Artificial
  Synthetic oligonucleotide
gtacatcgtgtctaccattactgatggaataaatgctacgattatatctgttatggctat

SEQ ID NO: 116009 - DNA, 60 bp, Artificial
  Synthetic oligonucleotide
tttctgctgctgttacagtcattgatcagttatatcaaaagttgccttatgatgagcaaa

SEQ ID NO: 116010 - DNA, 60 bp, Artificial
  Synthetic oligonucleotide
aaccggcacaaggcgtggccgccactggccgttgatgatcatgtggaactgagctttgct

SEQ ID NO: 116011 - DNA, 60 bp, Artificial
  Synthetic oligonucleotide
gccggagggaaaccggcacaaggcgtggccgccactggccgttgatgatcatgtggaact

SEQ ID NO: 116012 - DNA, 60 bp, Artificial
  Synthetic oligonucleotide
cgactggactgactccttctaagagaatttaataaaacgaaaatgacgatccaagttcag

SEQ ID NO: 116013 - DNA, 60 bp, Artificial
  Synthetic oligonucleotide
ctgttatggctatattgggtttgaataatttgaacagagtacgatacagtaaactggatg

SEQ ID NO: 116014 - DNA, 60 bp, Artificial
  Synthetic oligonucleotide
tacgatacagtaaactggatgaaaatggtgtttattctcaggagatggtgacaatgaatg

SEQ ID NO: 116015 - DNA, 60 bp, Artificial
  Synthetic oligonucleotide
cagaacagtgttgaccctaacaatacaccaaagattgaagtgaggagtcagttctaactg

SEQ ID NO: 116016 - DNA, 60 bp, Artificial
  Synthetic oligonucleotide
tggatgaaaatggtgtttattctcaggagatggtgacaatgaatgtgcaatctgatgctg

SEQ ID NO: 116017 - DNA, 60 bp, Artificial
  Synthetic oligonucleotide
ctttgcaggagaggaggtaccgagttctgggactcacgtccatcgccactttacttggtt

SEQ ID NO: 116018 - DNA, 60 bp, Artificial
  Synthetic oligonucleotide
gttctaactgtttactttgcaggagaggaggtaccgagttctgggactcacgtccatcgc

SEQ ID NO: 116019 - DNA, 60 bp, Artificial
  Synthetic oligonucleotide
tacttggttacaacctcacggtgtgacaaggtgaagcatgacccatcttcgtgtgctaat

SEQ ID NO: 116020 - DNA, 60 bp, Artificial
  Synthetic oligonucleotide
cgtccatcgccactttacttggttacaacctcacggtgtgacaaggtgaagcatgaccca

SEQ ID NO: 116021 - DNA, 60 bp, Artificial
  Synthetic oligonucleotide
tcgtgtgctaatggtgtgtgctgctaatcgctggactgccggagggaaaccggcacaagg

SEQ ID NO: 116022 - DNA, 60 bp, Artificial
  Synthetic oligonucleotide
gcatgacccatcttcgtgtgctaatggtgtgtgctgctaatcgctggactgccggaggga

SEQ ID NO: 116023 - DNA, 60 bp, Artificial
  Synthetic oligonucleotide
ggtaggattggagatcattattatacaacaaattgttacaccggagcggaggcattggtc

SEQ ID NO: 116024 - DNA, 60 bp, Artificial
  Synthetic oligonucleotide
cagagttttcgtcagtcccgctagatggtttcgaactgccgttaacctaagatcagtagg

SEQ ID NO: 116025 - DNA, 60 bp, Artificial
  Synthetic oligonucleotide
gcggtgaggatgagcttcacagagttctcgtcagtcccgctagatggtttcgaactacca

SEQ ID NO: 116026 - DNA, 60 bp, Artificial
  Synthetic oligonucleotide
ttcacaaccaccgagatatgctccgagtgccccgatgccgtcatcaatgccgaccgttgc

SEQ ID NO: 116027 - DNA, 60 bp, Artificial
  Synthetic oligonucleotide
tttcacaaccaccgagatatgctccgagtgccccgatgccgtcatcaatgccgaccgttg

SEQ ID NO: 116028 - DNA, 60 bp, Artificial
  Synthetic oligonucleotide
cgtgcggatgatacgatttcacaaccaccgagatatgctccgagtgccccaatgccatca

SEQ ID NO: 116029 - DNA, 60 bp, Artificial
  Synthetic oligonucleotide
cgatttcacaaccaccgagatatgctccgagtgccccaatgccatcatcaatgccaaccg

SEQ ID NO: 116030 - DNA, 58 bp, Artificial
  Synthetic oligonucleotide
tattatttagattgtaagcgtgagataggatgagaccgtgggagagaaaacgtcagct

SEQ ID NO: 116031 - DNA, 60 bp, Artificial
  Synthetic oligonucleotide
gaacagggctctatacttgcctcaaacataacaactttagcgctaacatataaaatgctg

SEQ ID NO: 116032 - DNA, 60 bp, Artificial
  Synthetic oligonucleotide
gaatacttattgaaaactttactaagaagaacattaatattatctacattgaacagggct

SEQ ID NO: 116033 - DNA, 60 bp, Artificial
  Synthetic oligonucleotide
tgctggtgctattaagtggcgaaacgctgttggttcaagaataaacggcccagttcacat

SEQ ID NO: 116034 - DNA, 60 bp, Artificial
  Synthetic oligonucleotide
gctggtgctattaagtggcgaaacgctgttggttcaagaataaacgacccagttcacatg

SEQ ID NO: 116035 - DNA, 60 bp, Artificial
  Synthetic oligonucleotide
ctggtgctattaagtggcgaaacgctgttggttcaagaataaacgacccagttcacatgg

SEQ ID NO: 116036 - DNA, 60 bp, Artificial
  Synthetic oligonucleotide
ctggtgctattaagtggcgaaacgctgttggttcaagaataaacggcccagttcacatgg

SEQ ID NO: 116037 - DNA, 60 bp, Artificial
  Synthetic oligonucleotide
ccactgtggagccagtcagtgtcgtaccagttgctaaattaatgcaagaaccagtgcatg

SEQ ID NO: 116038 - DNA, 60 bp, Artificial
  Synthetic oligonucleotide
agctgtgcaatcatccactgtggagccagtcagtgtcgtaccagttgctaaattaatgca

SEQ ID NO: 116039 - DNA, 54 bp, Artificial
  Synthetic oligonucleotide
aattaatgcaagaaccagtgcatgtagatgtaactcaagccgaagtgcatatcc

SEQ ID NO: 116040 - DNA, 54 bp, Artificial
  Synthetic oligonucleotide
aattaatgcaagaaccagtgcatgtagatgtaactcaagccgaagtgcttatcc

SEQ ID NO: 116041 - DNA, 60 bp, Artificial
  Synthetic oligonucleotide
aatgattggcatgcacatctcaggtgatccaaccatattcatttgtagcaatgcatgtgg

SEQ ID NO: 116042 - DNA, 60 bp, Artificial
  Synthetic oligonucleotide
caatgattggcatgcacatctcaggtgatccaaccatattcatttgtagcaatgcatgtg

SEQ ID NO: 116043 - DNA, 60 bp, Artificial
  Synthetic oligonucleotide
cgcggctcagagcgtttatttcaatacaaagatcaattatgttcaatgattggcatgcac

SEQ ID NO: 116044 - DNA, 60 bp, Artificial
  Synthetic oligonucleotide
gatgtatcgcggctcagagcgtttatttcaatacaaagatcaattatgttcaatgattgg

SEQ ID NO: 116045 - DNA, 58 bp, Artificial
  Synthetic oligonucleotide
gtacttagtgccttcagacttggattggaacgagttaaggacgataactattgacggg

SEQ ID NO: 116046 - DNA, 58 bp, Artificial
  Synthetic oligonucleotide
gtacttagtgccttcagactcagattggaacgagttaaggacgataactattgacggg

SEQ ID NO: 116047 - DNA, 60 bp, Artificial
  Synthetic oligonucleotide
cgtgtgataaacctatcgccgagtatgcgtgtatgcgtgatgataatgactgttcttgtg

SEQ ID NO: 116048 - DNA, 60 bp, Artificial
  Synthetic oligonucleotide
gaatgcttattgaaaactttactaagaagaacattaatattatctacattgaacagggct

SEQ ID NO: 116049 - DNA, 60 bp, Artificial
  Synthetic oligonucleotide
caacggacttgtgcacaaagccgtgaacagtaaagccctaacgaatgaccgaatacttat

SEQ ID NO: 116050 - DNA, 60 bp, Artificial
  Synthetic oligonucleotide
cggacttgtgcacaaagccgtgaacagtaaagccctaacgaatgaccgaatacttattga

SEQ ID NO: 116051 - DNA, 60 bp, Artificial
  Synthetic oligonucleotide
tattacacaacacttgacaattacaaattaatcaaaaatgcatttactagcaacggactt

SEQ ID NO: 116052 - DNA, 60 bp, Artificial
  Synthetic oligonucleotide
caacgggcttgtgcacaaagccgtgaacagtaaagccctaacgaatgtccgaatgcttat

SEQ ID NO: 116053 - DNA, 60 bp, Artificial
  Synthetic oligonucleotide
ttctatcagtgcttaatcaagatgagtatttcacgcagcgagataaccgatattggcgga

SEQ ID NO: 116054 - DNA, 60 bp, Artificial
  Synthetic oligonucleotide
tattacacaacacttgacaattacaaattaatcaaaaatgaatttactagcaacgggctt

SEQ ID NO: 116055 - DNA, 60 bp, Artificial
  Synthetic oligonucleotide
agaatttctccttattctatcagtgcttaatcaagatgagtatttcacgcagcgagataa

SEQ ID NO: 116056 - DNA, 60 bp, Artificial
  Synthetic oligonucleotide
attgattcagacggtgctacgcttgaccttccggcgttatctatgagacgcgtttatgat

SEQ ID NO: 116057 - DNA, 60 bp, Artificial
  Synthetic oligonucleotide
gacggtgctacgcttgaccttccggcgttatctatgagacgcgtttatgattcggtatgt

SEQ ID NO: 116058 - DNA, 50 bp, Artificial
  Synthetic oligonucleotide
cgtttatgattcggtatgtatcggttgtgcggatgcgcctctagaacagt

SEQ ID NO: 116059 - DNA, 60 bp, Artificial
  Synthetic oligonucleotide
agtgaattgatgactcgcgctagactattgttgtctaaattcatgaaagtgtacttagtg

SEQ ID NO: 116060 - DNA, 60 bp, Artificial
  Synthetic oligonucleotide
aaacgtttgttctacgtgtgataaacctatcgccgagtatgcgtgtatgcgtgatgataa

SEQ ID NO: 116061 - DNA, 60 bp, Artificial
  Synthetic oligonucleotide
aaacgtttgttctacgtgtgataaacctatcgccgagtatgcgtgcatgcgtgatgataa

SEQ ID NO: 116062 - DNA, 60 bp, Artificial
  Synthetic oligonucleotide
cgggcttgtgcacaaagccgtgaacagtaaagccctaacgaatgtccgaatgcttattga

SEQ ID NO: 116063 - DNA, 60 bp, Artificial
  Synthetic oligonucleotide
cgtgtgataaacctatcgccgagtatgcgtgcatgcgtgatgataatgactgttcttgtg

SEQ ID NO: 116064 - DNA, 60 bp, Artificial
  Synthetic oligonucleotide
aatgcatgtggtttaatgttggccaaaatgtaggaagtctttatgtgtgatattatttag

SEQ ID NO: 116065 - DNA, 60 bp, Artificial
  Synthetic oligonucleotide
ctcgcgctagactattgttgtctaaattcatgaaagtgtacttagtgccttcagacttgg

SEQ ID NO: 116066 - DNA, 65 bp, Artificial
  Synthetic oligonucleotide
ggtttaatgttggccaaaatgtaggaagtctttatgtgtgatattatttagattgtaagcgtgag

SEQ ID NO: 116067 - DNA, 60 bp, Artificial
  Synthetic oligonucleotide
ctcgcgctagactattgttgtctaaattcatgaaagtgtacttagtgccttcagactcag

SEQ ID NO: 116068 - DNA, 60 bp, Artificial
  Synthetic oligonucleotide
ccaacaacacacttgtccaacgactccgcaagaaggtctcctccctgtggaaggactatg

SEQ ID NO: 116069 - DNA, 60 bp, Artificial
  Synthetic oligonucleotide
cacgaactcctcaccatgcctgccgcacttgctgacctcccccctccgccgcccccgact

SEQ ID NO: 116070 - DNA, 60 bp, Artificial
  Synthetic oligonucleotide
tggaaggactatgacgctcacgtgtctgaccccaccgcccacgaactcctcaccatgcct

SEQ ID NO: 116071 - DNA, 60 bp, Artificial
  Synthetic oligonucleotide
tgagatcaatcgtagtttctacgcgactgctctgccaagcgttgtgccgacctccgacac

SEQ ID NO: 116072 - DNA, 60 bp, Artificial
  Synthetic oligonucleotide
gcccccgactgatgatgagatcaatcgtagtttctacgcgactgctctgccaagcgttgt

SEQ ID NO: 116073 - DNA, 60 bp, Artificial
  Synthetic oligonucleotide
aagcgttgtgccgacctccgacactctgtggggaacagccagctatgagataatcggccg

SEQ ID NO: 116074 - DNA, 60 bp, Artificial
  Synthetic oligonucleotide
caagcgttgtgccgacctccgacactctgtggggaacagccagctatgagataatcggcc

SEQ ID NO: 116075 - DNA, 60 bp, Artificial
  Synthetic oligonucleotide
cgcggtccgtatcgcatcgagtgacaaagcgccgaggttgattttgcacgtcacggacga

SEQ ID NO: 116076 - DNA, 60 bp, Artificial
  Synthetic oligonucleotide
ataatcggccgcgcggtccgtatcgcatcgagtgacaaagcgccgaggttgattttgcac

SEQ ID NO: 116077 - DNA, 60 bp, Artificial
  Synthetic oligonucleotide
tttgcacgtcacggacgaaaccatccgcctggaggtgccgacaatgtccttcactctcgc

SEQ ID NO: 116078 - DNA, 60 bp, Artificial
  Synthetic oligonucleotide
gattttgcacgtcacggacgaaaccatccgcctggaggtgccgacaatgtccttcactct

SEQ ID NO: 116079 - DNA, 60 bp, Artificial
  Synthetic oligonucleotide
tctcctccctgtggaaggactatgacgctcacgtgtctgaccccaccgcccacgaactcc

SEQ ID NO: 116080 - DNA, 60 bp, Artificial
  Synthetic oligonucleotide
atcgtgagtccaatgtcgtgcgtgtttgaatgagcggcgcaggggtgaccacccaggcgg

SEQ ID NO: 116081 - DNA, 60 bp, Artificial
  Synthetic oligonucleotide
ccccgtcactggattcaacgcccgtgcgaccgttaaagactccgccatcgttatgtggtt

SEQ ID NO: 116082 - DNA, 60 bp, Artificial
  Synthetic oligonucleotide
aagactccgccatcgttatgtggttccccgctcccgacatcgcaacctccgctcgtcggg

SEQ ID NO: 116083 - DNA, 60 bp, Artificial
  Synthetic oligonucleotide
ctgctgggtgcgtttgctgtccaccctcacgaagtggtccacccccagcaccatggtcac

SEQ ID NO: 116084 - DNA, 60 bp, Artificial
  Synthetic oligonucleotide
cggtctgaccaaaccccccgtcactggattcaacgcccgtgcgaccgttaaagactccgc

SEQ ID NO: 116085 - DNA, 60 bp, Artificial
  Synthetic oligonucleotide
ctccccaggggcgccatccactcatccctcaccggcaagttcgatgagcgctgctgggtg

SEQ ID NO: 116086 - DNA, 60 bp, Artificial
  Synthetic oligonucleotide
atccactcatccctcaccggcaagttcgatgagcgctgctgggtgcgtttgctgtccacc

SEQ ID NO: 116087 - DNA, 60 bp, Artificial
  Synthetic oligonucleotide
ccttcactctcgccagccctttgtccactggctctctactgcgcgtcacgctccccaggg

SEQ ID NO: 116088 - DNA, 60 bp, Artificial
  Synthetic oligonucleotide
gccctttgtccactggctctctactgcgcgtcacgctccccaggggcgccatccactcat

SEQ ID NO: 116089 - DNA, 60 bp, Artificial
  Synthetic oligonucleotide
tgatgaagcaattaccaacaacacacttgtccaacgactccgcaagaaggtctcctccct

SEQ ID NO: 116090 - DNA, 60 bp, Artificial
  Synthetic oligonucleotide
ttatgtggttccccgctcccgacatcgcaacctccgctcgtcgggcgatcgtgagtccaa

SEQ ID NO: 116091 - DNA, 60 bp, Artificial
  Synthetic oligonucleotide
gctcgtcgggcgatcgtgagtccaatgtcgtgcgtgtttgaatgagcggcgcaggggtga

SEQ ID NO: 116092 - DNA, 60 bp, Artificial
  Synthetic oligonucleotide
tcccttagggatgcaagttatggctgacttcgtaaatcgttttaattcaccattccacca

SEQ ID NO: 116093 - DNA, 60 bp, Artificial
  Synthetic oligonucleotide
cgcgagagctatcggctttccgctatgccagtcgtgctccactcttgcgggggccacagt

SEQ ID NO: 116094 - DNA, 60 bp, Artificial
  Synthetic oligonucleotide
caaagctatcggctttccgctatgtccgtcgtgctccactcttgcgggggccacagttct

SEQ ID NO: 116095 - DNA, 55 bp, Artificial
  Synthetic oligonucleotide
ctacatgtgagggcagttatggcacggcataacgctcacatgcgcccgtgtcgct

SEQ ID NO: 116096 - DNA, 51 bp, Artificial
  Synthetic oligonucleotide
atgtgagggcagttatggcacggcataacgctcacatgcgcccgtgtcgct

SEQ ID NO: 116097 - DNA, 60 bp, Artificial
  Synthetic oligonucleotide
gaaggcaagtgatgaagtgagtttagtgccttatcaggagcaggtaagaccgcccagtta

SEQ ID NO: 116098 - DNA, 58 bp, Artificial
  Synthetic oligonucleotide
gaaggcaagcgatgaagtgagtttagtgccttatcaggaacaggtgagaccgcccagt

SEQ ID NO: 116099 - DNA, 60 bp, Artificial
  Synthetic oligonucleotide
gaaggcaagcgatgaagtgagtttagtgccttatcaggagcaggtaagaccgcccagtta

SEQ ID NO: 116100 - DNA, 60 bp, Artificial
  Synthetic oligonucleotide
tgaagtgccgctagacggattcgacataccaccagagctgatcagatagagtggagcccc

SEQ ID NO: 116101 - DNA, 60 bp, Artificial
  Synthetic oligonucleotide
gcagatcctggcatgatgattcccatcgctgtctaacgagggagggtatgccatcctcga

SEQ ID NO: 116102 - DNA, 60 bp, Artificial
  Synthetic oligonucleotide
acgcatataacgaggcggtgaggatgagcatatcggagtttagtgaagtgccgctagacg

SEQ ID NO: 116103 - DNA, 60 bp, Artificial
  Synthetic oligonucleotide
gagtttagtgaagtgccgctagacggattcgacataccaccagagctgatcagatagagt

SEQ ID NO: 116104 - DNA, 60 bp, Artificial
  Synthetic oligonucleotide
agatcctggcatgatgattcccatcgctgtctaacgggggagggtatgccatcctcgaca

SEQ ID NO: 116105 - DNA, 60 bp, Artificial
  Synthetic oligonucleotide
cctggcatgatgattcccatcgctgtctaacgagggagggtatgccatcctcgacacact

SEQ ID NO: 116106 - DNA, 60 bp, Artificial
  Synthetic oligonucleotide
tagccgcggtcatcgctttgataacttcagctagcacattaacaagcgatttgggaatcc

SEQ ID NO: 116107 - DNA, 60 bp, Artificial
  Synthetic oligonucleotide
gtaaatgaacaggttctgcctaaaatgcgggtggagttgtctgcaatgaagagacgacgt

SEQ ID NO: 116108 - DNA, 60 bp, Artificial
  Synthetic oligonucleotide
tagaccatacgagaaaagagataatgaagaaagatgcatataacgaggcggtgaggatga

SEQ ID NO: 116109 - DNA, 60 bp, Artificial
  Synthetic oligonucleotide
agccgcggtcatcgctttgataacttcagctagcacattaacaagcgatttgggaatcct

SEQ ID NO: 116110 - DNA, 60 bp, Artificial
  Synthetic oligonucleotide
tctaagactgcgtcaaattaaaaaacgtgtaaatgaacaggttctgcctaaaatgcgggt

SEQ ID NO: 116111 - DNA, 60 bp, Artificial
  Synthetic oligonucleotide
gcatcatacgctgaagcgtttagagacgatctaagactgcgtcaaattaaaagacgtgta

SEQ ID NO: 116112 - DNA, 54 bp, Artificial
  Synthetic oligonucleotide
aaaacgtgtaaatgaacaggttctgcctaaaatgcgggtggaattatctgcaat

SEQ ID NO: 116113 - DNA, 60 bp, Artificial
  Synthetic oligonucleotide
caaattaaaagacgtgtaaatgaacaggttctgcctaaaatgcgggtggagttgtctgca

SEQ ID NO: 116114 - DNA, 60 bp, Artificial
  Synthetic oligonucleotide
gtggcatatgcatcgtatgccgaagcatttagagacgatctaagactgcgtcaaattaaa

SEQ ID NO: 116115 - DNA, 60 bp, Artificial
  Synthetic oligonucleotide
tagcatatgcatcatacgctgaagcgtttagagacgatctaagactgcgtcaaattaaaa

SEQ ID NO: 116116 - DNA, 60 bp, Artificial
  Synthetic oligonucleotide
agataatgaagaaagacgcatataacgaggcggtgaggatgagcatatcggagtttagtg

SEQ ID NO: 116117 - DNA, 60 bp, Artificial
  Synthetic oligonucleotide
cgagaaaagagataatgaagaaagatgcatataacgaggcggtgaggatgagcatatcgg

SEQ ID NO: 116118 - DNA, 54 bp, Artificial
  Synthetic oligonucleotide
caccgcgtggagtggttgatccagcgatgcaaattcctactgctgtataacggg

SEQ ID NO: 116119 - DNA, 58 bp, Artificial
  Synthetic oligonucleotide
ttgcaccgcgtggagtggttgatccagcgatgcaaattcctactgctgtataacgggg

SEQ ID NO: 116120 - DNA, 60 bp, Artificial
  Synthetic oligonucleotide
cgccccgaggtttgcaccgcgtggagtggttgatccagcgatgcaaattcctactgctgt

SEQ ID NO: 116121 - DNA, 57 bp, Artificial
  Synthetic oligonucleotide
atagttccgatacagggtccaataaatagagctgttgcacaaaatgcctacatgtga

SEQ ID NO: 116122 - DNA, 60 bp, Artificial
  Synthetic oligonucleotide
gaagaatagggacattttcaagcgcggcggggaacgcacaagagacaccacaaggagtaa

SEQ ID NO: 116123 - DNA, 60 bp, Artificial
  Synthetic oligonucleotide
ggaacgtggggaccagatcgccaaccgttcggctacttcttaacggcagctgaagttacg

SEQ ID NO: 116124 - DNA, 60 bp, Artificial
  Synthetic oligonucleotide
cgtggcttatgacggtcaagctcccgtgaatgtaaacaatccgggagcggaaccaggtat

SEQ ID NO: 116125 - DNA, 52 bp, Artificial
  Synthetic oligonucleotide
agtgatcgtggcttatgatggtcaagctcccgtgaatgtaaacaatccggga

SEQ ID NO: 116126 - DNA, 60 bp, Artificial
  Synthetic oligonucleotide
atgcaccctcccagccattgagacgtcttccacagctgtcgcgcgagctacgacatcacc

SEQ ID NO: 116127 - DNA, 60 bp, Artificial
  Synthetic oligonucleotide
ctgcaccctcccagccattgagacgtctcccacagctgtcgcgcgagctacgacatcacc

SEQ ID NO: 116128 - DNA, 60 bp, Artificial
  Synthetic oligonucleotide
ttcgtcacacctgacgtcatccgcctcggtaatgcgtactgctgcgctcagtgctgtgga

SEQ ID NO: 116129 - DNA, 60 bp, Artificial
  Synthetic oligonucleotide
ttcgtcacaccggacgtcatccgcctcggcaatgcgtactgctgcgctcagtgctgtgga

SEQ ID NO: 116130 - DNA, 56 bp, Artificial
  Synthetic oligonucleotide
ttccactcgttcgttgaatcagcttattccagttacttgactagaccagatacgtg

SEQ ID NO: 116131 - DNA, 57 bp, Artificial
  Synthetic oligonucleotide
cttccactcgttcgttgaatcagcttattccagttacttgactagaccagatacgtg

SEQ ID NO: 116132 - DNA, 60 bp, Artificial
  Synthetic oligonucleotide
cggatatggttcgcgaacattacgctgtgtggcttcagtctctggttgatcatctgtcag

SEQ ID NO: 116133 - DNA, 60 bp, Artificial
  Synthetic oligonucleotide
caccacggatatggttcgcgaacattacgctgtgtggcttcagtctctggttgatcatct

SEQ ID NO: 116134 - DNA, 60 bp, Artificial
  Synthetic oligonucleotide
gcaccacggatatggttcgcgaacattacgctgtgtggcttcagtctctggttgatcatc

SEQ ID NO: 116135 - DNA, 60 bp, Artificial
  Synthetic oligonucleotide
cgcaccacggatatggttcgcgaacattacgctgtgtggcttcagtctctggttgatcat

SEQ ID NO: 116136 - DNA, 60 bp, Artificial
  Synthetic oligonucleotide
cacctcctgacctaaatggtcccttgaccccacttgggacagggttagccgagacatggt

SEQ ID NO: 116137 - DNA, 60 bp, Artificial
  Synthetic oligonucleotide
tgttcagggtagatcacctcctgacctaaatggtcccttgaccccacttgggacagggtt

SEQ ID NO: 116138 - DNA, 60 bp, Artificial
  Synthetic oligonucleotide
ggtagatcacctcctgacctaaatggtcccttgaccccacttgggacagggttagccgag

SEQ ID NO: 116139 - DNA, 60 bp, Artificial
  Synthetic oligonucleotide
cgatcgtgtcttctgataaggttaccatgcatgagtgttcagggtagatcacctcctgac

SEQ ID NO: 116140 - DNA, 60 bp, Artificial
  Synthetic oligonucleotide
cgatcgtgtcttctgataaagtcaccatgcatgagtgttcagggtagatcacctcctgac

SEQ ID NO: 116141 - DNA, 60 bp, Artificial
  Synthetic oligonucleotide
cgacatcaccactctcgatcgtgtcttctgataaagtcaccatgcatgagtgttcagggt

SEQ ID NO: 116142 - DNA, 60 bp, Artificial
  Synthetic oligonucleotide
cgacatcaccactctcgatcgtgtcttctgataaggttaccatgcatgagtgttcagggt

SEQ ID NO: 116143 - DNA, 60 bp, Artificial
  Synthetic oligonucleotide
gccattgagacgtcttccacagctgtcgcgcgagctacgacatcaccactctcgatcgtg

SEQ ID NO: 116144 - DNA, 60 bp, Artificial
  Synthetic oligonucleotide
cattgagacgtctcccacagctgtcgcgcgagctacgacatcaccactctcgatcgtgtc

SEQ ID NO: 116145 - DNA, 60 bp, Artificial
  Synthetic oligonucleotide
tcacatgagtgatagcgatattgtttcttagtctatttctgagtgttacttgatagtttg

SEQ ID NO: 116146 - DNA, 60 bp, Artificial
  Synthetic oligonucleotide
ccacatgagtgatagcgatatcgtttcttagtctatttctgagtgttacttgatagtttg

SEQ ID NO: 116147 - DNA, 60 bp, Artificial
  Synthetic oligonucleotide
tgatagtttgtatgttttttcctaataagttagattagtggcgaagggtaggatggttat

SEQ ID NO: 116148 - DNA, 60 bp, Artificial
  Synthetic oligonucleotide
tgatagtttgtatgtttttcctaataagttagattagtggcgaagggtaggatggttatt

SEQ ID NO: 116149 - DNA, 60 bp, Artificial
  Synthetic oligonucleotide
ttttcctaataagttagattagtggcgaagggtaggatggttatttggtgcccatgtggc

SEQ ID NO: 116150 - DNA, 59 bp, Artificial
  Synthetic oligonucleotide
ttttcctaataagttagattagtggcgaagggtaggatggttatttggtgcccatgtgg

SEQ ID NO: 116151 - DNA, 60 bp, Artificial
  Synthetic oligonucleotide
agagctaccaatgatgagctgaagttcgattgttttggcgaggaattagatcacatgagt

SEQ ID NO: 116152 - DNA, 60 bp, Artificial
  Synthetic oligonucleotide
agagctaccaatgatgagctgaagttcgattgttttggcgaggaattagaccacatgagt

SEQ ID NO: 116153 - DNA, 50 bp, Artificial
  Synthetic oligonucleotide
gactggacagagtgtgatggttacatctggtacatctcggaaatctacgt

SEQ ID NO: 116154 - DNA, 60 bp, Artificial
  Synthetic oligonucleotide
catatgctaagactggacagagtgtgatggttacatctggtacatctcggaagtctacgt

SEQ ID NO: 116155 - DNA, 60 bp, Artificial
  Synthetic oligonucleotide
attttatgagtgaatcatatgctaagactggacagagtgtgatggttacatctggtacat

SEQ ID NO: 116156 - DNA, 60 bp, Artificial
  Synthetic oligonucleotide
gaagcgttttgattttatgagtgaatcatacgctaagactggacagagtgtgatggttac

SEQ ID NO: 116157 - DNA, 60 bp, Artificial
  Synthetic oligonucleotide
gttaacagacggcagttttgagtcttttctaacacatgtgaagcggtttgattttatgag

SEQ ID NO: 116158 - DNA, 60 bp, Artificial
  Synthetic oligonucleotide
cttcgcccaaattaagttaacagacggcagttttgagtcttttctaacaaatgtgaagcg

SEQ ID NO: 116159 - DNA, 60 bp, Artificial
  Synthetic oligonucleotide
ccaatgatgagctgaagttcgattgttttggcgaggaattagaccacatgagtgatagcg

SEQ ID NO: 116160 - DNA, 60 bp, Artificial
  Synthetic oligonucleotide
ccaatgatgagctgaagttcgattgttttggcgaggaattagatcacatgagtgatagcg

SEQ ID NO: 116161 - DNA, 60 bp, Artificial
  Synthetic oligonucleotide
cgaaaggtcttttattttacacgcccaaagaagacgatgcgagctacgttattatggatg

SEQ ID NO: 116162 - DNA, 60 bp, Artificial
  Synthetic oligonucleotide
cgaaaggtcttttgttttacacgcccaaagaagacgatgcgagctacgttattatggatg

SEQ ID NO: 116163 - DNA, 60 bp, Artificial
  Synthetic oligonucleotide
ccaagcgttcaccaattcagaagccagaaaacttactcgcccttttaatcgaccaaaatg

SEQ ID NO: 116164 - DNA, 60 bp, Artificial
  Synthetic oligonucleotide
ccaagcgttcaccaattcagaaaccagaaaacttactcgcccttttaatcgaccaaaatg

SEQ ID NO: 116165 - DNA, 60 bp, Artificial
  Synthetic oligonucleotide
caagcgttcaccaattcagaaaccagaaaacttactcgcccttttaatcgaccaaaatgg

SEQ ID NO: 116166 - DNA, 60 bp, Artificial
  Synthetic oligonucleotide
caagcgttcaccaattcagaagccagaaaacttactcgcccttttaatcgaccaaaatgg

SEQ ID NO: 116167 - DNA, 60 bp, Artificial
  Synthetic oligonucleotide
atggtaaaataaatgatgacaaactattcaatttaactctcccggagtttgatttaatga

SEQ ID NO: 116168 - DNA, 60 bp, Artificial
  Synthetic oligonucleotide
gaccaaaatggaatcctacattcaagctattcgtaacaacaagaaagatgatggtaaaat

SEQ ID NO: 116169 - DNA, 57 bp, Artificial
  Synthetic oligonucleotide
gatttaatgaaaagtcagttacaggcaaatcaaagtgattgcaaaattggactcgat

SEQ ID NO: 116170 - DNA, 61 bp, Artificial
  Synthetic oligonucleotide
gatgacaaactattcaatttaactctcccggagtttgatttaatgaaaagtcagttacagg

SEQ ID NO: 116171 - DNA, 60 bp, Artificial
  Synthetic oligonucleotide
tttacacgcccaaagaagacgatgcgagctacgttattatggatgagtatactgacgcaa

SEQ ID NO: 116172 - DNA, 60 bp, Artificial
  Synthetic oligonucleotide
tttacacgcccaaagaagacgatgcgagctacgttattatggatgagtatactgacgcga

SEQ ID NO: 116173 - DNA, 60 bp, Artificial
  Synthetic oligonucleotide
tggtgtcttgccgccgatagagttataccaacatttgcttgataaacttcccacttcagt

SEQ ID NO: 116174 - DNA, 60 bp, Artificial
  Synthetic oligonucleotide
ggtgtcttgccgccgatagagttataccaacatttgcttgataaacttcccacttcagtg

SEQ ID NO: 116175 - DNA, 60 bp, Artificial
  Synthetic oligonucleotide
taccaacatttgcttgataaacttcccacttcagtgatttgcgagggcgcgggttacaga

SEQ ID NO: 116176 - DNA, 60 bp, Artificial
  Synthetic oligonucleotide
gcttgataaacttcccacttcagtgatttgcgagggcgcgggttacagaggtaccgatga

SEQ ID NO: 116177 - DNA, 60 bp, Artificial
  Synthetic oligonucleotide
ccacttcagtgatttgcgagggcgcgggttacagaggtaccgatgagtctgaatataaga

SEQ ID NO: 116178 - DNA, 60 bp, Artificial
  Synthetic oligonucleotide
gcgagggcgcgggttacagaggtaccgatgagtctgaatataagacgaagagagttgatg

SEQ ID NO: 116179 - DNA, 60 bp, Artificial
  Synthetic oligonucleotide
gagagttgatgacatgtgcaccttcacccaaattaagttaacagacggcagttttgagtc

SEQ ID NO: 116180 - DNA, 60 bp, Artificial
  Synthetic oligonucleotide
acatgtgcaccttcgcccaaattaagttaacagacggcagttttgagtcttttctaacaa

SEQ ID NO: 116181 - DNA, 60 bp, Artificial
  Synthetic oligonucleotide
aggaggggggacgcagtcatgatctattttgtttggagaccattgcgtatattttgtgat

SEQ ID NO: 116182 - DNA, 58 bp, Artificial
  Synthetic oligonucleotide
tgtgtatggatgcaggcgctgcgggacaggtcaatgcgctgctagccccaaggagggg

SEQ ID NO: 116183 - DNA, 60 bp, Artificial
  Synthetic oligonucleotide
tgtgtatggatgcaggcgctgcgggacaggtcaatgcgctgctagccccaaggagggggg

SEQ ID NO: 116184 - DNA, 55 bp, Artificial
  Synthetic oligonucleotide
tgaggtgcaacaatctggcagatattacgtaccgcaaggtcgaacacgtggtggg

SEQ ID NO: 116185 - DNA, 60 bp, Artificial
  Synthetic oligonucleotide
ggaccaagcaaagtacagacgggaccttatgcaggagcagttgaggtgcaacaatctggc

SEQ ID NO: 116186 - DNA, 60 bp, Artificial
  Synthetic oligonucleotide
caaacattcggaccaagcaaagtacagacgggaccttatgcaggagcagttgaggtgcaa

SEQ ID NO: 116187 - DNA, 60 bp, Artificial
  Synthetic oligonucleotide
gttcaggccatgaatgacatcgttagaataacgggtcaaatgcaaacattcggaccaagc

SEQ ID NO: 116188 - DNA, 60 bp, Artificial
  Synthetic oligonucleotide
catataatgttcaggccatgaatgacatcgttagaataacgggtcaaatgcaaacattcg

SEQ ID NO: 116189 - DNA, 52 bp, Artificial
  Synthetic oligonucleotide
cttatgctgataaagtacgcataagtaatacgtcaataccgaatacacttac

SEQ ID NO: 116190 - DNA, 60 bp, Artificial
  Synthetic oligonucleotide
gtggctgcggtgttgcacggtcaccgctttcattagtgtcgcgtcggttcttatgctgat

SEQ ID NO: 116191 - DNA, 60 bp, Artificial
  Synthetic oligonucleotide
tgcgccagtaggccagatcaacagagctcttgtgctagcagcctaccactagtggctgcg

SEQ ID NO: 116192 - DNA, 60 bp, Artificial
  Synthetic oligonucleotide
gcggctttgaggccagatttcagaatgaatggtgttgttgcgccagtaggccagatcaac

SEQ ID NO: 116193 - DNA, 60 bp, Artificial
  Synthetic oligonucleotide
attttgtgatcctcaaggtgcgtcacttgaaagcgctccaggggctccagggacttttgt

SEQ ID NO: 116194 - DNA, 60 bp, Artificial
  Synthetic oligonucleotide
gcagtcatgatctattttgtttggagaccattgcgtatattttgtgatcctcaaggtgcg

SEQ ID NO: 116195 - DNA, 60 bp, Artificial
  Synthetic oligonucleotide
gcgagagttagcttggatccaggagtgatggagacgttagggattgcaattaataggtac

SEQ ID NO: 116196 - DNA, 60 bp, Artificial
  Synthetic oligonucleotide
gtgatcctcaaggtgcgtcacttgaaagcgctccaggggctccagggacttttgtcaccg

SEQ ID NO: 116197 - DNA, 60 bp, Artificial
  Synthetic oligonucleotide
ggacttttgtcaccgttgatggagtaaatgttgcggctggagatgtcgtcgcatggaata

SEQ ID NO: 116198 - DNA, 60 bp, Artificial
  Synthetic oligonucleotide
ccgttgatggagtaaatgttgcggctggagatgtcgtcgcatggaataccattgcaccag

SEQ ID NO: 116199 - DNA, 60 bp, Artificial
  Synthetic oligonucleotide
gcatggaataccattgcaccagtgaatgttggaaatcctggggcacgcagatcaatttta

SEQ ID NO: 116200 - DNA, 60 bp, Artificial
  Synthetic oligonucleotide
ccattgcaccagtgaatgttggaaatcctggggcacgcagatcaattttacagtttgaag

SEQ ID NO: 116201 - DNA, 60 bp, Artificial
  Synthetic oligonucleotide
atcaattttacagtttgaagtgttatggtatacgtctttggatagatcgctagacacggt

SEQ ID NO: 116202 - DNA, 60 bp, Artificial
  Synthetic oligonucleotide
tgaagtgttatggtatacgtctttggatagatcgctagacacggttccggaattggctcc

SEQ ID NO: 116203 - DNA, 60 bp, Artificial
  Synthetic oligonucleotide
cgactgaaaggaatgaaattgttgcgtatctattattagtagcttctttagctgatgtgt

SEQ ID NO: 116204 - DNA, 60 bp, Artificial
  Synthetic oligonucleotide
aaattgttgcgtatctattattagtagcttctttagctgatgtgtatgcggctttgaggc

SEQ ID NO: 116205 - DNA, 60 bp, Artificial
  Synthetic oligonucleotide
gctgatgtgtatgcggctttgaggccagatttcagaatgaatggtgttgttgcgccagta

SEQ ID NO: 116206 - DNA, 59 bp, Artificial
  Synthetic oligonucleotide
gttaaaattcggttaggatggacgcgatagcagcaagagccttgtccgttgtacgggca

SEQ ID NO: 116207 - DNA, 60 bp, Artificial
  Synthetic oligonucleotide
tgcgagagttagcttggatccaggagtgatggagacgttagggattgcaattaataggta

SEQ ID NO: 116208 - DNA, 60 bp, Artificial
  Synthetic oligonucleotide
gccagatcaacagagctcttgtgctagcagcctaccactagtggctgcggtgttgcacgg

SEQ ID NO: 116209 - DNA, 60 bp, Artificial
  Synthetic oligonucleotide
agtggctgcggtgttgcacggtcaccgctttcattagtgtcgcgtcggttcttatgctga

SEQ ID NO: 116210 - DNA, 60 bp, Artificial
  Synthetic oligonucleotide
ttccgaacaatccttcggcgtgggagtctgttcacagcaaggtggtacgccaattcctgc

SEQ ID NO: 116211 - DNA, 52 bp, Artificial
  Synthetic oligonucleotide
gctaactcacccggacgtgttaccgtcatcctgaatggtggccccaattctc

SEQ ID NO: 116212 - DNA, 60 bp, Artificial
  Synthetic oligonucleotide
agatggagctgcgccacccgagccatgcttcctagtcgctaactcacccggacgtgttac

SEQ ID NO: 116213 - DNA, 60 bp, Artificial
  Synthetic oligonucleotide
tgggtccggtgcgagatggagctgcgccacccgagccatgcttcctagtcgctaactcac

SEQ ID NO: 116214 - DNA, 56 bp, Artificial
  Synthetic oligonucleotide
gaaggggcttactccccttctcccttcacttacggcccgcgttacgttcaggacgg

SEQ ID NO: 116215 - DNA, 59 bp, Artificial
  Synthetic oligonucleotide
atagaaggggcttactccccttctcccttcacttacggcccgcgttacgttcaggacgg

SEQ ID NO: 116216 - DNA, 60 bp, Artificial
  Synthetic oligonucleotide
cgaaccacgtacgcagtgggtcaggacggccctgtatacatagaaggggcttactcccct

SEQ ID NO: 116217 - DNA, 60 bp, Artificial
  Synthetic oligonucleotide
cggacaaaggccgaaccacgtacgcagtgggtcaggacggccctgtatacatagaagggg

SEQ ID NO: 116218 - DNA, 60 bp, Artificial
  Synthetic oligonucleotide
gggagccgatcctcaacctactgctgtccagatagccgagtctttcacggacaaaggccg

SEQ ID NO: 116219 - DNA, 60 bp, Artificial
  Synthetic oligonucleotide
gacgggagccgatcctcaacctactgctgtccagatagccgagtctttcacggacaaagg

SEQ ID NO: 116220 - DNA, 60 bp, Artificial
  Synthetic oligonucleotide
gcagagcgccaaccgctcctccgcatgcccactccccgtaggttcgagtgaactgacagg

SEQ ID NO: 116221 - DNA, 60 bp, Artificial
  Synthetic oligonucleotide
ggcatacgccgctgaggcggctgtggaggaagcatagcggttggttttttgcagagcgcc

SEQ ID NO: 116222 - DNA, 60 bp, Artificial
  Synthetic oligonucleotide
ctcctccgcatgcccactccccgtaggttcgagtgaactgacaggagcctcctagcatga

SEQ ID NO: 116223 - DNA, 60 bp, Artificial
  Synthetic oligonucleotide
ccatgtacgtcgccacgaagtatgatgattttaccaggcatcagatgttggcgctcgcgc

SEQ ID NO: 116224 - DNA, 60 bp, Artificial
  Synthetic oligonucleotide
ggccatggatttatccatgtacgtcgccacgaagtatgatgattttaccaggcatcagat

SEQ ID NO: 116225 - DNA, 50 bp, Artificial
  Synthetic oligonucleotide
ttttggccgtctctctcgtatcttccgtcgtcttgatccagaccttcgtg

SEQ ID NO: 116226 - DNA, 60 bp, Artificial
  Synthetic oligonucleotide
ggcatcagatgttggcgctcgcgctttttggccgtctctctcgtatcttccgtcgtcttg

SEQ ID NO: 116227 - DNA, 60 bp, Artificial
  Synthetic oligonucleotide
cgtattgaatcgcaccgcgttgctcgggagctagcggcacttctgggaccgacgggagcc

SEQ ID NO: 116228 - DNA, 60 bp, Artificial
  Synthetic oligonucleotide
attgaatcgcaccgcgttgctcgggagctagcggcacttctgggaccgacgggagccgat

SEQ ID NO: 116229 - DNA, 60 bp, Artificial
  Synthetic oligonucleotide
tgattcacgggctctatcccgagctcgagctttccttcggaaccctattgtggtcaggaa

SEQ ID NO: 116230 - DNA, 60 bp, Artificial
  Synthetic oligonucleotide
cgggctctatcccgagctcgagctttccttcggaaccctattgtggtcaggaactaccca

SEQ ID NO: 116231 - DNA, 60 bp, Artificial
  Synthetic oligonucleotide
aggtgcgtggcctgtagccgccataaccattgaattcctttccttctattctataggtca

SEQ ID NO: 116232 - DNA, 60 bp, Artificial
  Synthetic oligonucleotide
ggtgcgtggcctgtagccgccataaccattgaattcctttccttctattctataggtcat

SEQ ID NO: 116233 - DNA, 60 bp, Artificial
  Synthetic oligonucleotide
cacttcaggtggtggcggaacgaacatacccgcctacttcccttttactttctcgaaacg

SEQ ID NO: 116234 - DNA, 60 bp, Artificial
  Synthetic oligonucleotide
ccttttactttctcgaaacgaagtaccttcaccgcgcgagtgagggggggaggtgcgtgg

SEQ ID NO: 116235 - DNA, 60 bp, Artificial
  Synthetic oligonucleotide
tggcgagaatggcgctcccatcatcacgaacggtgtcccatctctcacttcaggtggtgg

SEQ ID NO: 116236 - DNA, 60 bp, Artificial
  Synthetic oligonucleotide
tcccatctctcacttcaggtggtggcggaacgaacatacccgcctacttcccttttactt

SEQ ID NO: 116237 - DNA, 60 bp, Artificial
  Synthetic oligonucleotide
cttcggcgtgggagtctgttcacagcaaggtggtacgccaattcctgcttcattggcgag

SEQ ID NO: 116238 - DNA, 60 bp, Artificial
  Synthetic oligonucleotide
caattcctgcttcattggcgagaatggcgctcccatcatcacgaacggtgtcccatctct

SEQ ID NO: 116239 - DNA, 60 bp, Artificial
  Synthetic oligonucleotide
tacacctacaccaatccggtgtggcacgcccttcgtaaacagctctcttcggccatggat

SEQ ID NO: 116240 - DNA, 60 bp, Artificial
  Synthetic oligonucleotide
ccggtgtggcacgcccttcgtaaacagctctcttcggccatggatttatccatgtacgtc

SEQ ID NO: 116241 - DNA, 60 bp, Artificial
  Synthetic oligonucleotide
tgactgcatctatgtgagaggttgagttgccgtcgtctgtcttcggaagcggcggaactc

SEQ ID NO: 116242 - DNA, 60 bp, Artificial
  Synthetic oligonucleotide
gactgcatctatgtgagaggttgagttgccgtcgtctgtcttcggaagcggcggaactct

SEQ ID NO: 116243 - DNA, 60 bp, Artificial
  Synthetic oligonucleotide
agtgactgcatctatgtgagaggttgagttgccgtcgtctgtcttcggaagcggcggaac

SEQ ID NO: 116244 - DNA, 60 bp, Artificial
  Synthetic oligonucleotide
ccgttagcccagtagctagattctcaccttcgatttcaatctcaagcatcgctattggtg

SEQ ID NO: 116245 - DNA, 60 bp, Artificial
  Synthetic oligonucleotide
aagcaggccaagtcgtctgacaagactcctattccggagattcgtctaaacaagaaggat

SEQ ID NO: 116246 - DNA, 60 bp, Artificial
  Synthetic oligonucleotide
gtttgctgagactggtactgagcaagctagtcccaagaccgaaatcgtggctgccacagt

SEQ ID NO: 116247 - DNA, 60 bp, Artificial
  Synthetic oligonucleotide
ggctggaatggtacaccggttcacggtagtcgtgagatctttgagaaattgagcgagtct

SEQ ID NO: 116248 - DNA, 60 bp, Artificial
  Synthetic oligonucleotide
gagaaattgagcgagtctaggttggcgtctatggaaatgatatcaaatgtgaaaccgatt

SEQ ID NO: 116249 - DNA, 59 bp, Artificial
  Synthetic oligonucleotide
ttactatgtttttccacacgtcgaacgtttttccttcagaaaagagtgttagacacgcc

SEQ ID NO: 116250 - DNA, 60 bp, Artificial
  Synthetic oligonucleotide
ctgtcactattgagcgtggaaatccaaatttgatcgtaacgcagtctctgacgcgtggcc

SEQ ID NO: 116251 - DNA, 60 bp, Artificial
  Synthetic oligonucleotide
gttggttcggcaagtaaacgtaggcaaagattggttaagcaggccaagtcgtctgacaag

SEQ ID NO: 116252 - DNA, 60 bp, Artificial
  Synthetic oligonucleotide
cgttcggctgttcaactgactactgcttagagcgattagcgtctcgtgattatgatgcta

SEQ ID NO: 116253 - DNA, 60 bp, Artificial
  Synthetic oligonucleotide
gctgccacagttcataaaattcctgtcaatcatgccgaggcggataaacgcgtagtggtc

SEQ ID NO: 116254 - DNA, 60 bp, Artificial
  Synthetic oligonucleotide
caagaaggatacagtgtttgctgagactggtactgagcaagctagtcccaagaccgaaat

SEQ ID NO: 116255 - DNA, 60 bp, Artificial
  Synthetic oligonucleotide
tatgatgctattcttatgttaatgtcaagcctaagcggagcatgccatgctacaaagtcg

SEQ ID NO: 116256 - DNA, 60 bp, Artificial
  Synthetic oligonucleotide
tcaccatttgcatctttcaagtgttacagtgccgtccctcatgaaatgccacgacctcca

SEQ ID NO: 116257 - DNA, 60 bp, Artificial
  Synthetic oligonucleotide
gtcgcttatgggagtttcgccgcacctgaatgtaaggagcttgattgattcaccatttgc

SEQ ID NO: 116258 - DNA, 60 bp, Artificial
  Synthetic oligonucleotide
ttagagaggtaacgagtttagcgagagatacaactggtgtggaacatgagttgatgcaat

SEQ ID NO: 116259 - DNA, 60 bp, Artificial
  Synthetic oligonucleotide
cgagtttagcgagagatacaactggtgtggaacatgagttgatgcaatcagtcggtgatg

SEQ ID NO: 116260 - DNA, 60 bp, Artificial
  Synthetic oligonucleotide
ttacgtaaatatgtttcgaaacatcaactcagctttcgcggtgctcaagtccacgaaacc

SEQ ID NO: 116261 - DNA, 60 bp, Artificial
  Synthetic oligonucleotide
tcgaaacatcaactcagctttcgcggtgctcaagtccacgaaaccaattcggaacattcg

SEQ ID NO: 116262 - DNA, 60 bp, Artificial
  Synthetic oligonucleotide
atacgaccgattatcgactagagagaatggcacgaggactgtgtcttgggtaaggtaagg

SEQ ID NO: 116263 - DNA, 60 bp, Artificial
  Synthetic oligonucleotide
gcaggccaagtcgtctgacaagactcctattccggagattcgtctaaacaagaaggatac

SEQ ID NO: 116264 - DNA, 60 bp, Artificial
  Synthetic oligonucleotide
gatgatcctaaccaaggctggaatggtacaccggttcacggtagtcgtgagatctttgag

SEQ ID NO: 116265 - DNA, 60 bp, Artificial
  Synthetic oligonucleotide
tcgctattggtgaagttggttcggcaagtaaacgtaggcaaagattggttaagcaggcca

SEQ ID NO: 116266 - DNA, 60 bp, Artificial
  Synthetic oligonucleotide
ttccgttagcccagtagctagattctcaccttcgatttcaatctcaagcatcgctattgg

SEQ ID NO: 116267 - DNA, 60 bp, Artificial
  Synthetic oligonucleotide
gatctttgagaaattgagcgagtctaggttggcgtctatggaaatgatatcaaatgtgaa

SEQ ID NO: 116268 - DNA, 60 bp, Artificial
  Synthetic oligonucleotide
tggggaggtgagtgaggacgaggagttagtgtcagagggaatgtacgctgtaccattaga

SEQ ID NO: 116269 - DNA, 56 bp, Artificial
  Synthetic oligonucleotide
agtccttcgaagtgtcgaaaacggatgttgtcggagtagagaacaagcaattggcc

SEQ ID NO: 116270 - DNA, 60 bp, Artificial
  Synthetic oligonucleotide
taccattagatttggatatttatgctgagaaatgtcctagcccgacgccccccaatagtc

SEQ ID NO: 116271 - DNA, 60 bp, Artificial
  Synthetic oligonucleotide
ggggaggtgagtgaggacgaggagttagtgtcagagggaatgtacgctgtaccattagat

SEQ ID NO: 116272 - DNA, 60 bp, Artificial
  Synthetic oligonucleotide
cccaatagtccgaagaagcgtgagaaggcggaccatgagccaatagatatttcctcagcg

SEQ ID NO: 116273 - DNA, 60 bp, Artificial
  Synthetic oligonucleotide
gactagagagaatggcacgaggactgtgtcttgggtaaggtaagggctccgaggtgccac

SEQ ID NO: 116274 - DNA, 60 bp, Artificial
  Synthetic oligonucleotide
gcctcagcagtgatgatccagcctacctacttgctcaattctgccttagaaatttgaatg

SEQ ID NO: 116275 - DNA, 60 bp, Artificial
  Synthetic oligonucleotide
cgttccgtgtggttgtgttattagtgtcaatgtctggtataggtcttgtaatacgaccga

SEQ ID NO: 116276 - DNA, 60 bp, Artificial
  Synthetic oligonucleotide
ggcagacgaaacgccacctactatcagcccaacaggacgagattccgttagcccagtagc

SEQ ID NO: 116277 - DNA, 60 bp, Artificial
  Synthetic oligonucleotide
ataactctggcagacgaaacgccacctactatcagcccaacaggacgagattccgttagc

SEQ ID NO: 116278 - DNA, 60 bp, Artificial
  Synthetic oligonucleotide
gggagcgttacacctactcgctcttcacagatgagcccggaacgataactctggcagacg

SEQ ID NO: 116279 - DNA, 60 bp, Artificial
  Synthetic oligonucleotide
cagcctgggagcgttacacctactcgctcttcacagatgagcccggaacgataactctgg

SEQ ID NO: 116280 - DNA, 60 bp, Artificial
  Synthetic oligonucleotide
gcctaatagtttagcagttgtagacatggacacttcagcctgggagcgttacacctactc

SEQ ID NO: 116281 - DNA, 60 bp, Artificial
  Synthetic oligonucleotide
ggaatttgtagttgtgcctaatagtttagcagttgtagacatggacacttcagcctggga

SEQ ID NO: 116282 - DNA, 60 bp, Artificial
  Synthetic oligonucleotide
gcggcccgctaaatataggtgcatttcgcgattccttgcgtgtattacagagtcctcaat

SEQ ID NO: 116283 - DNA, 60 bp, Artificial
  Synthetic oligonucleotide
gtccatgtatgcggcccgctaaatataggtgcatttcgcgattccttgcgtgtattacag

SEQ ID NO: 116284 - DNA, 60 bp, Artificial
  Synthetic oligonucleotide
cgtcggctatgcttgaaacagtgtcaacaacaaacgcctttccgttccgtgtggttgtgt

SEQ ID NO: 116285 - DNA, 60 bp, Artificial
  Synthetic oligonucleotide
cgacctccaaccgtctaaaggaaagcgggtcgctgcatttgcagataagttgatgcttga

SEQ ID NO: 116286 - DNA, 60 bp, Artificial
  Synthetic oligonucleotide
ccacgaaaccaattcggaacattcggtgcgtaattgggaggatgacaacattactatgtt

SEQ ID NO: 116287 - DNA, 60 bp, Artificial
  Synthetic oligonucleotide
taaggatacgtcggctatgcttgaaacagtgtcaacaacaaacgcctttccgttccgtgt

SEQ ID NO: 116288 - DNA, 60 bp, Artificial
  Synthetic oligonucleotide
ctttcaagtgttacagtgccgtccctcatgaaatgccacgacctccaaccgtctaaagga

SEQ ID NO: 116289 - DNA, 60 bp, Artificial
  Synthetic oligonucleotide
atgataaaatagattgcctcagcagtgatgatccagcctacctacttgctcaattctgcc

SEQ ID NO: 116290 - DNA, 60 bp, Artificial
  Synthetic oligonucleotide
tgtcgcttatgggagtttcgccgcacctgaatgtaaggagcttgattgattcaccatttg

SEQ ID NO: 116291 - DNA, 60 bp, Artificial
  Synthetic oligonucleotide
acgacttacgctgtcactattgagcgtggaaatccaaatttgatcgtaacgcagtctctg

SEQ ID NO: 116292 - DNA, 60 bp, Artificial
  Synthetic oligonucleotide
agaccgaaatcgtggctgccacagttcataaaattcctgtcaatcatgccgaggcggata

SEQ ID NO: 116293 - DNA, 60 bp, Artificial
  Synthetic oligonucleotide
gcagtctctgacgcgtggccaatcatctcaatttcgaaaggtaatccgtgcgttcggctg

SEQ ID NO: 116294 - DNA, 60 bp, Artificial
  Synthetic oligonucleotide
caaatttaaatcctagctttagattgttaatgccggttgaatccgtgcggcatttgtcag

SEQ ID NO: 116295 - DNA, 60 bp, Artificial
  Synthetic oligonucleotide
aatccgtgcggcatttgtcagtattcgggcctttcccttcggggatctaccacattggct

SEQ ID NO: 116296 - DNA, 60 bp, Artificial
  Synthetic oligonucleotide
ccgtgcggcatttgtcagtattcgggcctttcccttcggggatctaccacattggctcgg

SEQ ID NO: 116297 - DNA, 60 bp, Artificial
  Synthetic oligonucleotide
gaggcaaaatacaatatgtcgatagaaataatgtgattggtgtttgtattgattcgaatc

SEQ ID NO: 116298 - DNA, 60 bp, Artificial
  Synthetic oligonucleotide
atgtcgatagaaataatgtgattggtgtttgtattgattcgaatccgcgaggtgacgttt

SEQ ID NO: 116299 - DNA, 60 bp, Artificial
  Synthetic oligonucleotide
ttcagttggatctagacgtttaatggaattgtcacgaccatacattgaaggaggcaaaat

SEQ ID NO: 116300 - DNA, 60 bp, Artificial
  Synthetic oligonucleotide
cagttggatctagacgtttaatggaattgtcacgaccatacattgaaggaggcaaaatac

SEQ ID NO: 116301 - DNA, 60 bp, Artificial
  Synthetic oligonucleotide
ggtagagtggacgtttcaacaagaaatttgactttatataatgtgatagctgagaaaggg

SEQ ID NO: 116302 - DNA, 60 bp, Artificial
  Synthetic oligonucleotide
agctgagaaagggtataacattgaaaccgataatataaattatctattgacattggcttg

SEQ ID NO: 116303 - DNA, 55 bp, Artificial
  Synthetic oligonucleotide
gattcgaatccgcgaggtgacgttttgattcaagccgtgattaatcatttaatta

SEQ ID NO: 116304 - DNA, 60 bp, Artificial
  Synthetic oligonucleotide
ccaggtagagtggacgtttcaacaagaaatttgactttatataatgtgatagctgagaaa

SEQ ID NO: 116305 - DNA, 65 bp, Artificial
  Synthetic oligonucleotide
gctgagaaagggtataacattgaaaccgataatataaattatctattgacattggcttgtatcgg

SEQ ID NO: 116306 - DNA, 54 bp, Artificial
  Synthetic oligonucleotide
cattggcttgtatcggtgttgaaaatttgaattcagaacaacgacttaggttag

SEQ ID NO: 116307 - DNA, 59 bp, Artificial
  Synthetic oligonucleotide
aaaatcagcaaaatgtcgagtaccacggaggtcttagcgatctcgagcttgggagaatt

SEQ ID NO: 116308 - DNA, 60 bp, Artificial
  Synthetic oligonucleotide
gtagaaaaatcagcaaaatgtcgagtaccacggaggtcttagcgatctcgagcttgggag

SEQ ID NO: 116309 - DNA, 60 bp, Artificial
  Synthetic oligonucleotide
gcatcgaacgagtcaatctcaatatagctataattcagaagggtgtcaatcatactctat

SEQ ID NO: 116310 - DNA, 54 bp, Artificial
  Synthetic oligonucleotide
gtataaaagtatgataagagcaaattcctggatgagaacttttgatgtagactt

SEQ ID NO: 116311 - DNA, 60 bp, Artificial
  Synthetic oligonucleotide
ccatatttagatgccagtcttgaacacgcatatcttagttctagatacaatgatctgatg

SEQ ID NO: 116312 - DNA, 60 bp, Artificial
  Synthetic oligonucleotide
catactctatctaagccatatttagatgccagtcttgaacacgcatatcttagttctaga

SEQ ID NO: 116313 - DNA, 60 bp, Artificial
  Synthetic oligonucleotide
tgatctgatgatgtatgaccatttggataagccaagtttgaacagaataagtgatagacg

SEQ ID NO: 116314 - DNA, 60 bp, Artificial
  Synthetic oligonucleotide
tagttctagatacaatgatctgatgatgtatgaccatttggataagccaagtttgaacag

SEQ ID NO: 116315 - DNA, 61 bp, Artificial
  Synthetic oligonucleotide
cagaataagtgatagacgtagttacacaactaactacattaatgccttaagactatatggc

SEQ ID NO: 116316 - DNA, 60 bp, Artificial
  Synthetic oligonucleotide
gtttgaacagaataagtgatagacgtagttacacaactaactacattaatgccttaagac

SEQ ID NO: 116317 - DNA, 60 bp, Artificial
  Synthetic oligonucleotide
cagaaaaattgcaaatttaaatcctagctttagattgttaatgccggttgaatccgtgcg

SEQ ID NO: 116318 - DNA, 60 bp, Artificial
  Synthetic oligonucleotide
gccttaagactatatggcataaatccaccatttataaatgccgtttaagacagaaaaatt

SEQ ID NO: 116319 - DNA, 60 bp, Artificial
  Synthetic oligonucleotide
tttcttaaggatggatgattttgcgaagcattttaacaggtatgcttcgatggcgataca

SEQ ID NO: 116320 - DNA, 60 bp, Artificial
  Synthetic oligonucleotide
cttaaggatggatgattttgcgaagcattttaacaggtatgcttcgatggcgatacagcg

SEQ ID NO: 116321 - DNA, 60 bp, Artificial
  Synthetic oligonucleotide
ttatacaacaaattgttacactggagcggaggccttgattacaactgcgattcacattca

SEQ ID NO: 116322 - DNA, 60 bp, Artificial
  Synthetic oligonucleotide
cgcgatgaacaaattggcaggatcggagatcattattatacaacaaattgttacactgga

SEQ ID NO: 116323 - DNA, 60 bp, Artificial
  Synthetic oligonucleotide
gcgatgaacaaattggcaggatcggagatcattattatacaacaaattgttacactggag

SEQ ID NO: 116324 - DNA, 60 bp, Artificial
  Synthetic oligonucleotide
cagattggcaggatcggagatcattattatacaacaaattgttacactggagcggaggcc

SEQ ID NO: 116325 - DNA, 60 bp, Artificial
  Synthetic oligonucleotide
ggctgtcaactgataggaagatggatgaagtttctcaaataggaatttaattcgttatcg

SEQ ID NO: 116326 - DNA, 60 bp, Artificial
  Synthetic oligonucleotide
ggctgtcaactgatagaaagatggatgaagtttctcaaataggaatttaattcgttatcg

SEQ ID NO: 116327 - DNA, 55 bp, Artificial
  Synthetic oligonucleotide
ctgagctagcttgcttttgttatccccatttggagaacgatagctataaattcat

SEQ ID NO: 116328 - DNA, 60 bp, Artificial
  Synthetic oligonucleotide
ttaattcgttatcgatttgagaatgggtatgacaaagtaagaatagaaagcgcttatgtg

SEQ ID NO: 116329 - DNA, 60 bp, Artificial
  Synthetic oligonucleotide
attcgttatcgatttgagaatgggtatgacaaagtaagaatagaaagcgcttatgtgacc

SEQ ID NO: 116330 - DNA, 60 bp, Artificial
  Synthetic oligonucleotide
gcgtctcagtcgccgttcgagccttgcggtgtagccatggctgagctagcttgcttttgt

SEQ ID NO: 116331 - DNA, 60 bp, Artificial
  Synthetic oligonucleotide
aaggggctgtcaactgataggaagatggatgaagtttctcaaataggaatttaattcgtt

SEQ ID NO: 116332 - DNA, 60 bp, Artificial
  Synthetic oligonucleotide
ggcttttaaagcgtctcagtcgccgttcgagccttgcggtgtagccatggctgagctagc

SEQ ID NO: 116333 - DNA, 60 bp, Artificial
  Synthetic oligonucleotide
gcgtctcagtcgccgtttgagccttgcggtgtagccatggctgagctagcttgcttttgt

SEQ ID NO: 116334 - DNA, 60 bp, Artificial
  Synthetic oligonucleotide
aaggggctgtcaactgatagaaagatggatgaagtttctcaaataggaatttaattcgtt

SEQ ID NO: 116335 - DNA, 60 bp, Artificial
  Synthetic oligonucleotide
ggcttttaaagcgtctcagtcgccgtttgagccttgcggtgtagccatggctgagctagc

SEQ ID NO: 116336 - DNA, 50 bp, Artificial
  Synthetic oligonucleotide
atgaacgttgttggtaaattattagattttaagtctgaactggatttaat

SEQ ID NO: 116337 - DNA, 60 bp, Artificial
  Synthetic oligonucleotide
taatggctgatatgatgaataatcttgagaaacgtttgtcaaatttagaaaagttttgcg

SEQ ID NO: 116338 - DNA, 60 bp, Artificial
  Synthetic oligonucleotide
gcttccactatctagaacaatgtgtttgcaatctatggaaacatcagacggacaagatgt

SEQ ID NO: 116339 - DNA, 60 bp, Artificial
  Synthetic oligonucleotide
gacaagatgttgaaacagagatcagagtgaattcgtttgatataggagattttcatgctt

SEQ ID NO: 116340 - DNA, 55 bp, Artificial
  Synthetic oligonucleotide
ccttgcgttaagttgactaataaaagtattttgaacgtacctatcaccatgactc

SEQ ID NO: 116341 - DNA, 60 bp, Artificial
  Synthetic oligonucleotide
ggtgaaactcatccatgcttgttaaatgaaccatattatgtcatttcatattcgattgat

SEQ ID NO: 116342 - DNA, 60 bp, Artificial
  Synthetic oligonucleotide
tagaattcacgataatgacgaatatcaaaatttaattcaggcacatcgccacaacctttc

SEQ ID NO: 116343 - DNA, 60 bp, Artificial
  Synthetic oligonucleotide
tgacgaatatcaaaatttaattcaggcacatcgccacaacctttctgctcacggaccttt

SEQ ID NO: 116344 - DNA, 60 bp, Artificial
  Synthetic oligonucleotide
atcgattacttagaatctatcaatctaataaacatgttattcttgaactttgtaacttta

SEQ ID NO: 116345 - DNA, 60 bp, Artificial
  Synthetic oligonucleotide
aagatgacatttttgatggtatttcggaagttgcaatcggtgcattattgctttgcttag

SEQ ID NO: 116346 - DNA, 60 bp, Artificial
  Synthetic oligonucleotide
gatggtatttcggaagttgcaatcggtgcattattgctttgcttaggtaaaagaaaacca

SEQ ID NO: 116347 - DNA, 60 bp, Artificial
  Synthetic oligonucleotide
ctttcgattactaccctctgttattaagtgataatactttctttctatttaaagttactt

SEQ ID NO: 116348 - DNA, 60 bp, Artificial
  Synthetic oligonucleotide
cattcttcggatactaaatcattagaaaagtttacttctgcaaaatactcaaacattgtc

SEQ ID NO: 116349 - DNA, 60 bp, Artificial
  Synthetic oligonucleotide
cctacagcttttattctgagtgaagattttggcacacctgacaacatgtttattctaaat

SEQ ID NO: 116350 - DNA, 60 bp, Artificial
  Synthetic oligonucleotide
gcatcgaaaagacgaaacagaaacttgtaaatgaaagtgcaaaactttggcaaggtagcc

SEQ ID NO: 116351 - DNA, 60 bp, Artificial
  Synthetic oligonucleotide
ttgagatacataggttaatgagtgtagttcttcttgtgctgtctacgaactattggaatt

SEQ ID NO: 116352 - DNA, 60 bp, Artificial
  Synthetic oligonucleotide
ggcaaggtagcctcataaccaaaacagttactccaagctacttattcttaggattaagtg

SEQ ID NO: 116353 - DNA, 60 bp, Artificial
  Synthetic oligonucleotide
agtagtatacaatcatgacaataaaaaagttctaattgggaaaagtaagaacgtattgaa

SEQ ID NO: 116354 - DNA, 57 bp, Artificial
  Synthetic oligonucleotide
aaagttacttttactgtttcgattgttgctaaaccatcatctgtaagtgtgaaagaa

SEQ ID NO: 116355 - DNA, 50 bp, Artificial
  Synthetic oligonucleotide
cctgaatcagttaagtttatcggcgacacaagttatttcggcacttcatc

SEQ ID NO: 116356 - DNA, 50 bp, Artificial
  Synthetic oligonucleotide
ttcaaggccacacgtgctaattcgtttcgtaactttgaacctgatgaaag

SEQ ID NO: 116357 - DNA, 60 bp, Artificial
  Synthetic oligonucleotide
agcttaaactggattcccctcatttcaacagtagtcctacagcttttattctgagtgaag

SEQ ID NO: 116358 - DNA, 60 bp, Artificial
  Synthetic oligonucleotide
aagcgtttgatgtcggtacttattatcagtcagatatttacttttttggtcatagcgaaa

SEQ ID NO: 116359 - DNA, 60 bp, Artificial
  Synthetic oligonucleotide
tattctaaatgttattgacaatgaaggcaatgttaagaaagtaatctgcgaagcaatatt

SEQ ID NO: 116360 - DNA, 60 bp, Artificial
  Synthetic oligonucleotide
gaactgtacgatgacgatccacagttaagagtattatcattggttagtgaaaaggaaggt

SEQ ID NO: 116361 - DNA, 60 bp, Artificial
  Synthetic oligonucleotide
catagcgaaattgaactgtacgatgacgatccacagttaagagtattatcattggttagt

SEQ ID NO: 116362 - DNA, 51 bp, Artificial
  Synthetic oligonucleotide
tcgaatatttaggcaatatttcaccttactataaagctgaattttcatata

SEQ ID NO: 116363 - DNA, 60 bp, Artificial
  Synthetic oligonucleotide
attggttagtgaaaaggaaggtaaattatttcatttaattaagggtatagctacattagt

SEQ ID NO: 116364 - DNA, 60 bp, Artificial
  Synthetic oligonucleotide
gttgaaggtaaactttctctaagtgaagactacgatggcactcaagtcaaaaaatgttta

SEQ ID NO: 116365 - DNA, 60 bp, Artificial
  Synthetic oligonucleotide
cttactataatggcaaacaatggccaggcgttagaagtagaattcacgataatgacgaat

SEQ ID NO: 116366 - DNA, 60 bp, Artificial
  Synthetic oligonucleotide
tcaaaatcgaaatcttactataatggcaaacaatggccaggcgttagaagtagaattcac

SEQ ID NO: 116367 - DNA, 60 bp, Artificial
  Synthetic oligonucleotide
ctttgcttaggtaaaagaaaaccaaagtatacttatcttgaagaaatgggatttggtaga

SEQ ID NO: 116368 - DNA, 60 bp, Artificial
  Synthetic oligonucleotide
aggtaaaagaaaaccaaagtatacttatcttgaagaaatgggatttggtagaagacgtgc

SEQ ID NO: 116369 - DNA, 60 bp, Artificial
  Synthetic oligonucleotide
gtgacattaagtctaagcttaaactggattcccctcatttcaacagtagtcctacagctt

SEQ ID NO: 116370 - DNA, 51 bp, Artificial
  Synthetic oligonucleotide
tcagtgaacattcatcatcaattggtcgtcggcgtagttatagtagctatc

SEQ ID NO: 116371 - DNA, 60 bp, Artificial
  Synthetic oligonucleotide
aatgatatcagtcccagtcttagtcttaaagataggttattaaatcaaattcgtgcccac

SEQ ID NO: 116372 - DNA, 60 bp, Artificial
  Synthetic oligonucleotide
caaaagtagcatcgaaaagacgaaacagaaacttgtaaatgaaagtgcaaaactttggca

SEQ ID NO: 116373 - DNA, 60 bp, Artificial
  Synthetic oligonucleotide
gaatacttgacccaggcagccgcctcgctccgaatcaaaagtagcatcgaaaagacgaaa

SEQ ID NO: 116374 - DNA, 60 bp, Artificial
  Synthetic oligonucleotide
cgtgcccacaatcccagtgtgtttgatttgcatcataattcaggagtaatgctagagctt

SEQ ID NO: 116375 - DNA, 60 bp, Artificial
  Synthetic oligonucleotide
tgctagagcttaagcaaaaacaaaaagacaattattcgactttgaatcacagttattcga

SEQ ID NO: 116376 - DNA, 60 bp, Artificial
  Synthetic oligonucleotide
cccagtcttagtcttaaagataggttattaaatcaaattcgtgcccacaatcccagtgtg

SEQ ID NO: 116377 - DNA, 60 bp, Artificial
  Synthetic oligonucleotide
tcgtgcccacaatcccagtgtgtttgatttgcatcataattcaggagtaatgctagagct

SEQ ID NO: 116378 - DNA, 60 bp, Artificial
  Synthetic oligonucleotide
atcatgtgataatccatcttcctgtgagatagttgaacttgttgttaaaactttcgatta

SEQ ID NO: 116379 - DNA, 60 bp, Artificial
  Synthetic oligonucleotide
ccatcttcctgtgagatagttgaacttgttgttaaaactttcgattactaccctctgtta

SEQ ID NO: 116380 - DNA, 60 bp, Artificial
  Synthetic oligonucleotide
gcaggatatacaattgaatacttgacccaggcagccgcctcgctccgaatcaaaagtagc

SEQ ID NO: 116381 - DNA, 60 bp, Artificial
  Synthetic oligonucleotide
ggatggaccaagaacaactcctcaaataccttttgtctcaaacaatagaagaaagaacac

SEQ ID NO: 116382 - DNA, 60 bp, Artificial
  Synthetic oligonucleotide
tgaattgaatagggatggaccaagaacaactcctcaaataccttttgtctcaaacaatag

SEQ ID NO: 116383 - DNA, 60 bp, Artificial
  Synthetic oligonucleotide
gatacataggttaatgagtgtagttcttcttgtgctgtctacgaactattggaattcgac

SEQ ID NO: 116384 - DNA, 60 bp, Artificial
  Synthetic oligonucleotide
aactttggcaaggtagcctcataaccaaaacagttactccaagctacttattcttaggat

SEQ ID NO: 116385 - DNA, 60 bp, Artificial
  Synthetic oligonucleotide
gacatgattaagaaggaagtgatgaagaaacaatcgtataatgatgcggtgaggatgagc

SEQ ID NO: 116386 - DNA, 60 bp, Artificial
  Synthetic oligonucleotide
ttacccaaaatgcgtgtagagttgacagcgatgaaacgacgacgagcgatggctcatatg

SEQ ID NO: 116387 - DNA, 60 bp, Artificial
  Synthetic oligonucleotide
ttacccaaaatgcgtgtagagctgacggcgatgaaacgacgacgagcgatggctcatatg

SEQ ID NO: 116388 - DNA, 60 bp, Artificial
  Synthetic oligonucleotide
cccaaaatgcgtgtagagttgacagcgatgaaacgacgacgagcgatggctcatatgatc

SEQ ID NO: 116389 - DNA, 57 bp, Artificial
  Synthetic oligonucleotide
tgtgagggcagttatggcacggcataacgctcacatgcgcccgtgtcgctgtcgtgg

SEQ ID NO: 116390 - DNA, 60 bp, Artificial
  Synthetic oligonucleotide
agttccgctagatggtttcgaattaccattaacctaaggtcagtaggtagagtggcgccc

SEQ ID NO: 116391 - DNA, 60 bp, Artificial
  Synthetic oligonucleotide
ccgtggtcatggcttcattcaagggattctccgtcaacactgttccagtttccaaggcca

SEQ ID NO: 116392 - DNA, 60 bp, Artificial
  Synthetic oligonucleotide
gactgtggtcatggcttcattcaagggattctccgccaacactgttccagtttccaaagt

SEQ ID NO: 116393 - DNA, 60 bp, Artificial
  Synthetic oligonucleotide
gaccgtggtcatggcttcattcaagggattctccgccaacactgtaccagtctctaagac

SEQ ID NO: 116394 - DNA, 60 bp, Artificial
  Synthetic oligonucleotide
tcacttccgaatgatgctgctagatgcatgatcgatagagcttcgaagatagccgaagca

SEQ ID NO: 116395 - DNA, 60 bp, Artificial
  Synthetic oligonucleotide
ctcacttccgaatgacgctgctagatgtatgatcgatagagcttcgaagatagccgaggc

SEQ ID NO: 116396 - DNA, 60 bp, Artificial
  Synthetic oligonucleotide
tgcctcacttccgaatgacgctgctagatgtatgatcgatagagcttcgaagatagccga

SEQ ID NO: 116397 - DNA, 60 bp, Artificial
  Synthetic oligonucleotide
ttttatacatggcaagatatggacatatggttagtgtgtctcacgagccactcgtggttg

SEQ ID NO: 116398 - DNA, 60 bp, Artificial
  Synthetic oligonucleotide
atacatggcaagatatggacatatggttagtgtttcccatgagccacttgtggttgatgg

SEQ ID NO: 116399 - DNA, 60 bp, Artificial
  Synthetic oligonucleotide
agtctcttggatggagatttgagggaatgaaagtcgttttatacatggcaagatatggac

SEQ ID NO: 116400 - DNA, 60 bp, Artificial
  Synthetic oligonucleotide
gtctcttggatggagatttgaaggaatgaaagtcgttttatacatggcaagatatggaca

SEQ ID NO: 116401 - DNA, 60 bp, Artificial
  Synthetic oligonucleotide
gttattttttgcttatggacacaatggattacgatggcaaattcgcagaatatatggaaa

SEQ ID NO: 116402 - DNA, 60 bp, Artificial
  Synthetic oligonucleotide
gttattttttgcttatggacacaatggattacgatggcaagttcgcagaatatatggaaa

SEQ ID NO: 116403 - DNA, 60 bp, Artificial
  Synthetic oligonucleotide
aaagtgattaaatattgtatagtcacaatcattaatactcttttaaaattggctggatat

SEQ ID NO: 116404 - DNA, 60 bp, Artificial
  Synthetic oligonucleotide
aaagtgattaaatattgtataatcacaatcattaatactcttttaaaattggctggatat

SEQ ID NO: 116405 - DNA, 60 bp, Artificial
  Synthetic oligonucleotide
aaagtgattaaatgttgtatagtcacgatcattaatactcttttaaaattggctggatat

SEQ ID NO: 116406 - DNA, 60 bp, Artificial
  Synthetic oligonucleotide
aaggtccgattaacagggctgttgcacaaaacgcctatgtgtgagggcagttatggcacg

SEQ ID NO: 116407 - DNA, 60 bp, Artificial
  Synthetic oligonucleotide
aaggtccgattaatagggctgttgcacaaaacgcctatgtgtgagggcagttatggcacg

SEQ ID NO: 116408 - DNA, 60 bp, Artificial
  Synthetic oligonucleotide
ggtccgattaatagggctgttgcacaaaacgcctatgtgtgagggcagttatggcacggc

SEQ ID NO: 116409 - DNA, 60 bp, Artificial
  Synthetic oligonucleotide
aattgtagtggagtccaatgtcttggagatattagggatagcagttaatagatataacgg

SEQ ID NO: 116410 - DNA, 53 bp, Artificial
  Synthetic oligonucleotide
atttatccgcctcatgatcgcgagaacgttttgttgataatattgctgtcagc

SEQ ID NO: 116411 - DNA, 60 bp, Artificial
  Synthetic oligonucleotide
atttatccgcctcatgatcgcgagaacgttttgttgataatattgctgtcagctttagca

SEQ ID NO: 116412 - DNA, 60 bp, Artificial
  Synthetic oligonucleotide
ggagtccaatgtcttggagatattagggatagcagttaatagatataacggattgactct

SEQ ID NO: 116413 - DNA, 60 bp, Artificial
  Synthetic oligonucleotide
aattgtagtggagtccaatgtcttggagatattagggacagcagttaatagatataacgg

SEQ ID NO: 116414 - DNA, 60 bp, Artificial
  Synthetic oligonucleotide
gtcaacctttcggctattttttggcagcgccagaagttacccaacatgggcggttcagac

SEQ ID NO: 116415 - DNA, 60 bp, Artificial
  Synthetic oligonucleotide
ggagtccaatgtcttggagatattagggacagcagttaatagatataacggattgactct

SEQ ID NO: 116416 - DNA, 60 bp, Artificial
  Synthetic oligonucleotide
gcaatgccgaaagtcgcgttggatatattggacaaagcgatgtcgaatcaaacgggcgca

SEQ ID NO: 116417 - DNA, 60 bp, Artificial
  Synthetic oligonucleotide
aataccaacagcaatgccgaaagtcgcgttggatatattggacaaagcgatgtcgaatca

SEQ ID NO: 116418 - DNA, 58 bp, Artificial
  Synthetic oligonucleotide
agtgggcctaagcttaattggagagattgacttgcccgagtttatgcgtcacgcgtga

SEQ ID NO: 116419 - DNA, 60 bp, Artificial
  Synthetic oligonucleotide
tggaggaatcggtaatttgccaattagaaactggaattttaatttcgggttacttggaac

SEQ ID NO: 116420 - DNA, 60 bp, Artificial
  Synthetic oligonucleotide
attttaatttcgggttacttggaacaactttgctgaacttagacgctaattatgttgaaa

SEQ ID NO: 116421 - DNA, 60 bp, Artificial
  Synthetic oligonucleotide
gaagtcttcaacatggatgtcctatactctttgtcaaagactcttaaagacgctagagac

SEQ ID NO: 116422 - DNA, 60 bp, Artificial
  Synthetic oligonucleotide
aaatgaatttcaaactggaggaatcggtaatttgccaattagaaactggaattttaattt

SEQ ID NO: 116423 - DNA, 60 bp, Artificial
  Synthetic oligonucleotide
cgggttacttggaacaactttgctgaacttagacgctaattatgttgaaacggcaagaaa

SEQ ID NO: 116424 - DNA, 60 bp, Artificial
  Synthetic oligonucleotide
tatgttgaaacggcaagaaatacaattgattatttcgtggattttgtagacaatgtatgc

SEQ ID NO: 116425 - DNA, 60 bp, Artificial
  Synthetic oligonucleotide
gtgctattaacgcaccagccaatatacaacaatttgagcatattgtgccactccgaagag

SEQ ID NO: 116426 - DNA, 60 bp, Artificial
  Synthetic oligonucleotide
tgactactcatgtgctattaacgcaccagccaatatacaacaatttgagcatattgtgcc

SEQ ID NO: 116427 - DNA, 60 bp, Artificial
  Synthetic oligonucleotide
gggcacaatgtggttaaacgcaggatcggaaattcaagtcgctggatttgactactcatg

SEQ ID NO: 116428 - DNA, 60 bp, Artificial
  Synthetic oligonucleotide
atgggcacaatgtggttaaacgcaggatcggaaattcaagtcgctggatttgactactca

SEQ ID NO: 116429 - DNA, 60 bp, Artificial
  Synthetic oligonucleotide
cactaaatagatcacaacccgctcatgataatttgatgggcacaatgtggttaaacgcag

SEQ ID NO: 116430 - DNA, 60 bp, Artificial
  Synthetic oligonucleotide
attcagcatcatatacactaaatagatcacaacccgctcatgataatttgatgggcacaa

SEQ ID NO: 116431 - DNA, 60 bp, Artificial
  Synthetic oligonucleotide
gaactggactgatttaatcaccaattattcaccgtctagggaggacaatttgcaacgcat

SEQ ID NO: 116432 - DNA, 60 bp, Artificial
  Synthetic oligonucleotide
tgaggaccaagctaacaacttggtatccaactttggtgagtatgtagctatatcaagctg

SEQ ID NO: 116433 - DNA, 60 bp, Artificial
  Synthetic oligonucleotide
gcatggatgagatggttagagaatcacaaaggaacggaattgcacctcaatcagactcgc

SEQ ID NO: 116434 - DNA, 60 bp, Artificial
  Synthetic oligonucleotide
tatcaagctgtttgaactctgtaagtaaggatgcgtatacgcattcgctacacagagtaa
